United States Patent Application Publication US 2008/0008996 A1 - sequence listing, part 8

SEQ ID NO: 48107 - DNA, 441 bp, Zea mays
ctgcagctgcagctgcttaagccttcttacttttctccatggcatgaactcttactggaatactaccccacttaaaaagaatgaaggtaggacttttgtaatttggggatttgaactccttgaagtaccacataacaagggtgttacgggtccttctgctgctgttgctgcttgaccaggctgcggagtgatgactggcacagggttgattcaaggagaaccttcttcttatcttctcttcactatcttcttttctcttctcacttttcacttttcactgcctctttctttctctttgctcttcccactggaggattctatcaaagagtattaccatcatacagaggaggaaaccaaagatgttgaaccatatacaacagtcttcaacccaagaatcaccaagcattgtgatcttaggggcgagggagtgggaaaatggag

SEQ ID NO: 48108 - DNA, 462 bp, Zea mays
  unsure (1)..(462): unsure at all n locations
actcaagcttntaaagggagaacacatgttaggactaacaaaggggcattntgttaattacaggatntgtagtgcatgccaagccgggaagcaagttggcactcatcatccacacaagaacatcatgacatgtgacaggccactggagctcatctcatcaagatcaacttgctctacttgagagccgttagtctcatcaaacacaacgtcacaagaaacttcaacaagtcctgaggacttgttaaagactctatatgcccttgtgtttgagtcatatcctagtaaaaagccttctacagttntaggagcaaatttagattttctacctcttttgacaagaataaaacatttgctaccaaaaactctaaaatatgaaatattgtgctatttaccggttaggagttcataggatgtcttcttgaggattcggtgtagatataatcggatgatggcgtagcaagc

SEQ ID NO: 48109 - DNA, 380 bp, Zea mays
cattatgtggaacagggattgagtcgctttggttttagagactgcgatcctgctccatcaccttatgaccctagcatgctattgagaaagaatcggagaatagcaagggatcaattgacatactgccagatcataggcttgctcatgtaccttgcaagtgcaacaaagccagacatctcatatgatgtgagtaagctgagtcgggttgtgtcaaaactacgagatgatcactggcgtgctcttgagagagtgttgcagcatttgaaagggactatgacatatggtattcattatactggaaacccaaaagtgttggaaggctactgagatgccaactggatttctgatgctaaagagccttatgccacaagcggatatgt

SEQ ID NO: 48110 - DNA, 378 bp, Zea mays
  unsure (1)..(378): unsure at all n locations
agcttgctacaggccntctactaaactacatatgattcttattggaacactaccccacttaaaataaatgatggtggaactctcgaactttgaggatttgaactccctgaagtacctcataacacggatgttacagggccttcttctgctggtgatgcttgagcaagcagcaaacagaagactggcacggggttgatcctgggagaaccttcttcttagcttctcttcactatcttctgttaactgaccctctctgtctctttgctcttcccactggaggattctatcgatgagtattaccatcatacagaggaggaagccaaagactatgaaccatgttcaacagtcttcaacccaagaatcaccaagcattgtgat

SEQ ID NO: 48111 - DNA, 471 bp, Zea mays
  unsure (1)..(471): unsure at all n locations
aaaagtactatataacatgtattatcatttatatttnattctatgttgaactgaatcaacaattcagttttcgaaatctgttctgtcagtggacagaacacagcaaccaagttgtaaaattcataactcttaaactatcaggcctgtgtttatgaaattttaacacaagcaagatcagaaaagcatctacaactttcttataatgaccatgaacagattgtaacattaaattaggcaaacaatgcagtttctgaaatctgtacagaacttggacagattcagttactgaatttgtaaaaatcctaactcctaaaccttcagacctatggctgtcaaattttaacaccagcaagataataaagttatctaccacttttctatagcacatatctacagaaaacacaatttggtcatcatacatacagcacaccgaanacagtacgggcagtccaaaacaacaatcaatacatt

SEQ ID NO: 48112 - DNA, 216 bp, Zea mays
  unsure (1)..(216): unsure at all n locations
cgcgcggggaccgagctattcagttgagtcccgcccaattccttgcgctcatatcttctctggcatcccgtggaacctcctgacccatttgattgaactatctcgccgagaccaggccggtctccccggcgacgacgagcattcccgcctgcgcgcgtggactgaccgactccggccatattcgacggtgttttgtacaccggtgngatccccgag

SEQ ID NO: 48113 - DNA, 189 bp, Zea mays
  unsure (1)..(189): unsure at all n locations
ggcgacaatatcattgaacacttcattgtgatctttagatgaaagacgattaccatcattggtccctcttctttttttaaattcctcataagatgcagcctattgaaacaaagtatatatgaaggctaacgaactataagctgatgtttagatcaagcatanatcatttataccagaaaatggacggac

SEQ ID NO: 48114 - DNA, 222 bp, Zea mays
  unsure (1)..(222): unsure at all n locations
actcagcttaaccgaggatgaaacagattgtattgaaattctcgcccataagccttctccattccatatagatgaagtacattaaggcccgtcggtgttgggattgctnnccctccaacacaaccaccatcctccctcctcactccctctcatatcactccctccccccccacccctcatcctctccatgcccccaccctcataatttacctcctccactcc

SEQ ID NO: 48115 - DNA, 404 bp, Zea mays
catgcaactgagacaggaacaaccgggctgcattatttccttgaaaaaatgtaggatctgaggatgccaagagataaaacaaagatgaaattaacacctccttcaaacctcaaccacgcctcccaaaaagaacatccaggtaatgatcaaccacacttacattaagaggtgtatgaatgcttgaagaaggcactcgattagcatgtcctacataaaaaggttgatatttcaagaatgaagacttgttttaatgctcaaaaggaccttgttagacttgtcccattaaacaaaagctatgagtaaataaaattttactacctgttcaacacaaaaagaaaaaaaactcaaattgaaacccttgtacctccgaaaagacataatgcagatgccatgaacaatcctct

SEQ ID NO: 48116 - DNA, 381 bp, Zea mays
  unsure (1)..(381): unsure at all n locations
tatgtgagcaacctcgcggctgtgaagatagtgagtaccctaaccatgtctataaactctctaaggcgctttatgggctcaagcaagccccaagagcatggtatgaatgccttagagatttccttatcgctaatggcttcaaagtcggaaaagccgatcctacgctctttactaaaactcttganaatgacttgtttgtatgccaaatttatgttgatgatattatatttgggtctactaacgagtctacatgtgaagagtttagtaggatcatgacacagaagctcgagatgtctatgatggcggagttgaagtatttcttaggaattcaagtgaagcaactccaagagggcaccttnctaagccaaaccaagtacactc

SEQ ID NO: 48117 - DNA, 450 bp, Zea mays
agcttgtcgacgtttgttagatgtcgaagaatatgatatactcaatagccaccacaatcaccaatagtgccaccatgtgcgcgattgtggttgttgtttccacgccctagactagcagcattagcagaggcttggtgacctccatgaagtaaatccatcctggcgtcgaagctgagaatctatcaagtcatgccataatgtacgagatgagttcatcatcatcaacgattttctttgtagatgccatctcatctgtaagagatttcatcttggcaatatattaagctattatgatattacctttcttgtagttggaaggacaatccgcatgttcacggttcgggctcttgactatgacatgtaagtattttgcagttctgaccaaaccttgtgggttgtttcgtatatggcacgctgacccatgacttcttgagtcatggatgttatgtg

SEQ ID NO: 48118 - DNA, 478 bp, Zea mays
agcttcacatgtctcgtatgattcatatatatacgatgttaaaagcccatcagaatgaagcttcttcatgcgattctcacttatatgacccaaacgacagtgccacatgtaggtaggacttaaatcattaggccgaggccttttagcactaatattacagataggtgcatcatcaagatttaaaatgaataacccattcataatggatgcaaaagccacaaacatgccattcttagagatcacacaaccattgttttcactcgcaaatgaataaccatccttcatcaaacatgaaggagacataatgtttcgactcatactaggaactatataacaattatttaactccaaaataaatcctgatgggaggtggagttgcatcgtcccgacggtcaacgcagcaactcttgcattattgcctactccgaaatcaactctctctcttttcacgcttctacttcttatcattccctgcatc

SEQ ID NO: 48119 - DNA, 379 bp, Zea mays
  unsure (1)..(379): unsure at all n locations
tgtgaagattcttcattccaacgtgggcaagtcggggatgacagtttcattccatgttagtcttagcaattaagcaagtgtctagttcagcttggttatcattaaaatcaactaaatatctgaccatctaacactcccttaaatgctattgaatcatcacttcttctaaagacagcgacaccttgaaagctctcttgtgagttntggtgtttggatgacaactcaattaaaggactaacaagtgtactaagtgttgaacaggtgcttaagggaaagctaacaggaatcaacacaagtgaacataagtgatggtccaagaactggattatgaatacataatggacatcacaagtaagatgaacattgcataaagtgagac

SEQ ID NO: 48120 - DNA, 447 bp, Zea mays
agcttgagcacattagtctccacacttctgtttttattctatgtgcttacaacggtgagaggttgtcttggtattcagaaagatatccataaaggatatgatgaatctgtggtagattctaaaatttcagatcattaatgaccatcattaaagaattgtcatttccaactagttatggttggagtcaggaagttttgcacgctcctgacttgtgactaactgcatgtactacatgtacaagttccccctatggttttagtacgcgggaatccatgaaagatttcccatgcgtacattgggtatgttcccaatctcaccaccgcagcgtacatgtatgggcacacagaaagctggggatctatgtgagaatttattctctgtcgatcattaaactttagaatctctgcatgagaatctatttacggcccgtacgctcgcttgaatcat

SEQ ID NO: 48121 - DNA, 130 bp, Zea mays
ttcctttatactatcatgagtctcggcacaagtatatcggtactgaattgcatgaacaatttctccaaaaccaaccattagtgattgattgcacttacagggtctccccttttgacggttgatggaaaca

SEQ ID NO: 48122 - DNA, 432 bp, Zea mays
  unsure (1)..(432): unsure at all n locations
agcaagcttgttcacagcttctgaccattatcgtttggcgtcttgaattctgcaagcatcgttctcgccatgtcgataagcgtcctgttcttcctctctaccacatcgntttgctgtggtgtgtgaaaaggaaatgtgcccttatgcccatttcaagtatatttggtgattaagtgcccaacacagattgagtgagtaattatatgccaaatgatggatgaagtgcaaatcaacnaaaaggtatggttatagacttaccacactcgccctcccccaccaatatattggtctaaatgctagaatcaggaaaagaaaaggattggaaaagagttggttgtgtacagccaactgcagctcattctggacaccggactgtccggtgtgcaccggatactgtcgatgcccagtgaacacccggtttaaggacaaaac

SEQ ID NO: 48123 - DNA, 263 bp, Zea mays
aactcagcttcgcgagcggaccaaggactacatctcgaatgtttgtatcgtcttactttaaaatttctcacttcgcagcagaagcgtgaatgactttctttcttcaagagccccttcggtcggactggatttctttcttagagtttccgtcttttaccatctagagccgtctgtcatacactgacaccctttttcttgccctccgcaccttggtagtcgttcataacagggtatcaaagttaaagcgccatacctgatcaccc

SEQ ID NO: 48124 - DNA, 420 bp, Zea mays
agcgagctcatatcatctcttgttcctgccaatcttattaagtacattctggtacccatcttatgatcagtgcatcaaagttatccaatgaagacttatgcacccaaataaccttggtcctacaatgttgagaactcaacagctttgtaccacaacagtcaaatttgggtctcctaatcatacttgaatggattgaccatgtacgcttaagagctttaccctctggacataccttgaatagatgatctttttcacgggaattgtcacaaatgagacgcttgtcctatgcaatgcatccgtcttttgctttcatcctttgtgatggccatctttcttgatcgtgcaagaacttgattcttcatgtgagggcatgaatcaattacatggccctctttcttacatccatagaatctcctatat

SEQ ID NO: 48125 - DNA, 404 bp, Zea mays
  unsure (1)..(404): unsure at all n locations
aaaaactcagctctaagggaagcacatttaggactacaatgttcattnttttaagacaggcatngtagcgcatgtcaaacagggaagcaagctggagctcatcatccacgtaagaacatcatgacgactgatagaccgcttgagctactccacatggatcttttcggcccaatagcttacataagcatcggcaggagtaagtattgtctcgaattatggatgaatattctcgcttcacttgggtattctttntgtacgaaaaatctcacacctaagagatcttaaagagattnttgaggcgggctcaagatgtgttcggatggagaatcaagaagaatagaagcgacaatggaacggagttcaaacattcacacattaaaggatttcttgtcgaagagggcatc

SEQ ID NO: 48126 - DNA, 319 bp, Zea mays
  unsure (1)..(319): unsure at all n locations
agcttngaanantaaagattcttatatactgtttgaaagcaagagctaagaaatcaagcaaagcaaagcaagcgtaccaaatgtgcttggggtgggttcttatttatacgcccagcgcgctccaaagtggagggccccggttgtcattgactgttgctattctagcaaaaggaaagtgtttttcggaccttcggcttaaggccttcgtccatatcgcaatctgaattcgttattctaacaaattaaccttgcgaggggctactgttgggggcccntatttttccataattctctaaaacatgatttaacaacgttactt

SEQ ID NO: 48127 - DNA, 319 bp, Zea mays
gttacttctgaccttaggttgtgtatgctatgctgtttgtgaggtcagccttcgtcatggcgcagaggccagcttcgagcttcggaaatcccatacttttatccatctcccggcagacggataactctttgttgtccgggaggcagtacaagaaatcatctttgtctgtaccgttaaacactaaggcccccttcgggtacttcagttcccaggcatagatgttggcttcaaaaacttcttcttcagataatgtttttccccaagcatgtcgaatgatataaccaagaccttcggacggtgcttcgggagcacgggattt

SEQ ID NO: 48128 - DNA, 474 bp, Zea mays
  unsure (1)..(474): unsure at all n locations
agctngcacaggagtcgaagcatcagccttatgtgaagccaaactgcagcttccatcctcatttacttctttcaagcttgtagtattattatttggtgttatcagctcctgctggtccaccaccaagttacctgcatcatgttaagaatgttttgatttaaaccacattaaaattgaccactttttttacatgaaaggatagaacatgtacacaaaaaagctttctgaacgtaccataatctgtagtttcacttttggtcgactgaagggacactgcagagccgatttcaagatcaaattgaccattaccagcagcaatctgatgcattaagtttgcagtagcacatttcaagaaagggctactgtttctgatgggtgtatcagagcgattctcagtcatctcagagaccgattgattaccagacatgcttttcgaactggtcctaagctgggtgttagctggttcaagaacac

SEQ ID NO: 48129 - DNA, 409 bp, Zea mays
  unsure (1)..(409): unsure at all n locations
ctaagcttggctcacaacctcggcgccccatcctgcnacagatgaatgttattgtaatctaaacttaatanaggaaaaccaaggtacaaagacaggtaaaagttccatacagaactgagcactcttcgagcttcatccccagccaactcacgcccgcccttagcccaaatttgggtaataaatctgattcctatgcttcgggtttcggctgggacatcaactatatctgacgttgaaagattgaaaagtggctcgttaaccatcttggcatgagtgcatccagccttcataaatgcagcagttgtgccccgagaagctaccagcgtacagaaatccacgtgactagtgataacttcatcaagggcttcaactacattttcaatatgatccaaggccccggtgatgtctt

SEQ ID NO: 48130 - DNA, 448 bp, Zea mays
  unsure (1)..(448): unsure at all n locations
gtcacctgangcatgcaagctngctcctacataaacactaagcatcaatgccttatacttaaacttaaactntaaactagaaaaaacaaaagtagcttatgctacatgcaccttttgtaacaccccaggtgtttatcgtttgctcgaccacgagtgcggactttaaaacgtgatagcggtgaataaaatgtatactaaattntaattatctttgtctatcgcgattttgatatcgtgtctgtctccatctgtttaaatagtcctaaattattttgcaaaaattcagactttagtaatctttcgaaacattgaatccagtatcgtttgggttgagccatcgacatcttgccccaaactctaaattcttgaaatcggatctggttcctaaactttgtttcaaattctttcactcttgcgttgcacgtgtctctctgtggcctgtcatcgt

SEQ ID NO: 48131 - DNA, 479 bp, Zea mays
  unsure (1)..(479): unsure at all n locations
gtccttcttctgctcgctcgactaccaacgcggtgcttaccacttgtgtctgtcttgagatatacagcagcanatcttcagctggttgagatgatgtggctcgccgcggagtgttcagtactggtggtggtgacaagaatctcttcagtgcatctagggctntctgtgcttctgaagtccactgaaacttgtccactttcttgagtagcttgtaaaatggtaaacatttttctcccagcctagatataaatctgctcagggctgccatacatccggtaagacgctgaaccttcttatgtgatcgtggagcttccattntcatgatagcttcaatcttatccggattagcttcaattccccggtggctaacaatatatccgagtagcttccctgctggtactccaaagacacattgttctggattaagctttcatcgatatcgctgtagactggttgaaaccagctgtaagtcttcgatg

SEQ ID NO: 48132 - DNA, 474 bp, Zea mays
agctagagaaaggacttcatccacacacgtgtttatcttctatgccacagccagcccatgctcggcgtagcaattaagcatgcgtctagaccggcctcttcttttgcaaaatcaaccaaataaagtttgccgtctagtacacccttaaaagctagtgaaccatcacatcttctaaagacagacacatctacattcgtcaatagacaattatgtcccatattacataattgactgacaaatagtaaattatatccaagagactcaactaaaaacacattagagatagagcgctcatttgatattgcaatcttgcctaagcctttcagcttgccttggttcccatcaccgaatatgattgaatcttgggaatgcttattcttgacgtatgaagagaacattctcttttcccccgtcatgtggttcgtgcatccgctgccgataatccagcttgaacccctggatgcataaacctgc

SEQ ID NO: 48133 - DNA, 483 bp, Zea mays
  unsure (1)..(483): unsure at all n locations
gtcacctgcggcatgcaagcttcctttaacctcgaaacgcgatactcttttcattggtgaaactttcaggtagacatagtccccttcatgaaaatacaagggcattcaccgtttgtctgcataacccttctgacgagcttgtgctttcttcatattatgaataattttctgaaccttttcctcggcctcctttaccatatcaggcctaaagaaatacctttccccaggttcagaccaatttagcggagtacgacatcgtcgtccatataaagcttcgaaaggtgccatcttgatactttcttgatagctattattatatgaaaactccgccaagggcaaacattcatcccatttttgtgagaagtccagaacacatgctcgcagcatatcttcaagtatctggttcactctctcagtctatccactggttngaggatgataggccgaactgtggagcagcttantacccagagatttatgaag

SEQ ID NO: 48134 - DNA, 416 bp, Zea mays
ttgtggaacgcgccaaaggaaaaattctcacagctgtcaaaaagatgctccttgacgaaaaagggcaggagggcccgatagtaccccaggcggtctgggcgctaaacacgaccgaatgcaaggcgaccgggttacccctttccgccttctatacggatcggacgccatgaccccacaagaaataaaacatgggtccccgcgaacagatgcgtcagccgtccccgacgtggacgagcccacttcgaaagatctcatcgatggagaccgagtcttcggcctacaggctctaaataaataccaagcccagacaaaagcatggcgcgaccacgcactcatcccgatggaattcagcgaaagggacctcgtactcctccgaatagctcggacagagtccacgggcaagctggagcccaagt

SEQ ID NO: 48135 - DNA, 449 bp, Zea mays
  unsure (1)..(449): unsure at all n locations
cctagacacagtccgaaggatcgaagcttccttcgtttgttttnntctgttagaatatccctcgagggcgaaatgaacatgctgatttgttagccaggtctgcagcacaggggctgccgctaccttcggatgtattcttcgaaacaataaaggcaccttcagtggagttacttgaaagagcagttcttactatttctcctgtgtacagtgaagattggagaactgaaataatttcttaccttcatggcaacttcctatcagatgacgaagcttataataaaagaatagaggcaagagctcgtccgtatatcattatagaacgggagttatacaagcatggagtttgtgctccgctgctcaagtgctngtctagagccgaaggtatagagttgatgaaggagatacatgcaggcctttgtggatcccacatcggatccaggcccgtactt

SEQ ID NO: 48136 - DNA, 477 bp, Zea mays
agcatgcaacatacctcttaaacaaagctttttttatcgttatgttgatacaaacccagaagattctgataatcaggcttctacaatacataattctcttccttttccttgtataggtaattgaaccttacaattacatagaatggatggatgattaaaagagtgtgcattgttgttgaactgaaattaatagctgatccatttttatgatggcatatgcagaagtgtactaaagtccaatgatttttgagtgcatatatattcatatatgttcttaatcatgctttagatggctcatctcatggttgagtgctgtcatgctgctgtattttcatgtataataccttgtcatgattagttgtgtcaaataatgcttatatgtgtaccttgaagatatttgtctgctcattggttcaagtcatatatgaactgtttaagtgatgattcacaaactcattatgttcttaattcctcatc

SEQ ID NO: 48137 - DNA, 416 bp, Zea mays
  unsure (1)..(416): unsure at all n locations
actaagctcgctcaagccttcttcttattccatggcaggagctatattggttctttatcccacttaaaaagaatgagggtagatctcttgaatattggggatgtgaactccttgaagtacctcataacaagggtgttacggngccttcttctgttgttgctgcttgagcgggctgcggagaaatgactgacacagggttgattctaggagaaccttattcttatcttctcttcactatcatcttttcactgaccctttctttctctgtgctcttcccactggaggattctatcaaagagtattaccatcatacagaggagganaccacagatgttgaaccatgtacaacagtcttcaacccaagaatcaccaagcattgtgatcttaacggcgaggagtggaaaatggagtctctt

SEQ ID NO: 48138 - DNA, 423 bp, Zea mays
agcttagcaaatatgagttgtggatcagcgtagtcctgttcttgggtcatatcataaaccgagatggattttgtggcggaaacgcatgaattattctagcttaagcgcccaagtctcgccttagaggcaatgacacacttaaatcggaataaaccatcaattcctcggatctagtccgataaagccacttaccaaggattgaataccactagctcactcgaaggtgaggcacagagaaaatacaataaacatgaaaccacaaattaaggtactgaagttattacataaatcgaagttttaacaaaaggtaacaagttcgtaattaaaatgcagcggataatcgataacgtcgatactgaggaatagggcaaggcctagcccactactcctcctggtcctctcctatcgaggcagcatcccact

SEQ ID NO: 48139 - DNA, 464 bp, Zea mays
agcttgccttcgcctcagtataccattcttttccatcggagttgtggaatgcgcacatggcaaaattttcacagctgtcaagaagatgctcctcgacgataaaaaaggcaagtgggctgatttgctacctaaagcggtctgggcattaaacacgactgagtgcagggcgactgggttcacccctttccgccttctatatggatcagaggccatgaccccacaagaaataaaacatgggtccccacggacagtcccgttagctgtccccgacgtggacgagcccacttcgaaagacctcatcgatggagaccgtgtcttcgtcctacaggctctaaacaaatatcaagcccaaacaaaagcatggcgtgaccacgcagtcatcccgagggaattcagcgaaagagacctcgtactcgttctgacatctcggacagagtcctggggcaagctagagctcaagtggg

SEQ ID NO: 48140 - DNA, 483 bp, Zea mays
  unsure (1)..(483): unsure at all n locations
ccgtnctttgtgtatggacgacgtgcggttntacgctatggacatgtagttgtagcgtcaccaacgtgccagtgtcagaatgcctggtcccgagttaagctgcgctcaaaccatgtcaagtgaatttgtgttgagttcaaactttcccagaatgtgttcaaggtaatttggcacgactttgatatttggatcttctggctctgacgttggaaaagcagagaacacagatgatctttgagaagaggtctgaaattcagaaattcagaaatctgaatctctctaagggttcattgatcaagggctgatttggggatttatctgagttattttggctaagcctcttcaatcttcttgtagcttacacatatacttaacttatataatggctcactcacatttaaacgttcattccttttttacttttgaatttgtcatgggttacttaggtttgaataggtgccatcttatttcaaagttcatgtt

SEQ ID NO: 48141 - DNA, 423 bp, Zea mays
  unsure (1)..(423): unsure at all n locations
cacctgcagcatgcaagcttctaaagntgaatcaataaattttattatttggagagatcggaaagagaaagagacgacagagatgagaattatatgcgtgttcatcttgtccactaaactgaaagatgcaattttaattggaagtcggcgccacttcatggacacgagtaacgccaacatcatctatggcgcaataccttgatgtcataatttatactgtcgagctatgtaatttcggtggcatagatcacgtcgtcgaccatatagtcacgtgataatcgtctcactggatgtgtgaatggtaaattttaataaagaggctaatatacaaaacattcggatagcacgggagtggatctatgtataattgtgcgtggaggcattgagtgagacataacaagagacaattagtctgaactccct

SEQ ID NO: 48142 - DNA, 444 bp, Zea mays
  unsure (1)..(444): unsure at all n locations
actaagcttctaaaggcggaacacatatgaagactaccaatttcattttgtttttatatgattnngagcgcatgtcacgcagggaagcaagttggagttcatgatcgacacaagaacatcatgacgaccgagaggccgctngagctactccacatggatcaatttggaccgattgtttacataagcatcggcgggagtaagtattggcttgttattgtggatgactattctcgcttcactcgggtgttctttttgcagaaaaaatcacaaaacccaagagaccttatagaaattcttgagacaagctcaaaatgagttcggattgagaatcacaaagattataagcgacaatggaacggagttcaagaacactcanattgaaggatttcttgaggaggatggcatcaagcatgagttctcttattcctacacaccttaacaaaa

SEQ ID NO: 48143 - DNA, 412 bp, Zea mays
agcttcgatcttgagcactagccttttgatttttctctctgccttctccgacggcaagcctgcatgtgcatcggccaaaaccaagaccgttagcttcaaacgaccgtcgcagccgagatggtagcagcagggttagcagccaggagcactcaccagtagaagaaaagctgcttgctttcggagtggagccagcagtcgtagtagcagtgaaggttgtggccgtaccggtgccgcgggtcaatctgctcataaaaacaaatctcagtttgaaactaactgtttatagattcgaaaaaagatgtgtaaactgcacaactgtttagattgtgtttctcaccgcttccagccagtgctgcaacgcaagcttctgagcattctcgtccttcagcaacccctttccaacctgagagag

SEQ ID NO: 48144 - DNA, 370 bp, Zea mays
aaatattattaaatcgcgagcaagaggtacaaataaaatgaccacgaaatgttataagtgtggaattgctgatggtcacaacagtaagacatgtttgtcaatggaggacaatagactaaagttggcaagccttgctggacgtaagagaggacgacctcctgcatctatgaacaagggtggcagtaaagctcctgattggaatgagacaacaacattcaaaaagcacgcaattgatttctatagtagtgagtcagacagtgattaatctgctgtatgagatacgattacattgtttattacaataaaccttgcatgattgacacatgatttatatagaggtggctatcgaaatctaataaatataacgcat

SEQ ID NO: 48145 - DNA, 463 bp, Zea mays
  unsure (1)..(463): unsure at all n locations
agcttagaaaagagagaaaggggttagattttntaanatgattcacagcatggtgattgtttccacttatagtgtgacaaattaagtagcgaaccaaacatgcctttaactggataaccatagtcgtgtaggcattctgtcacccaacacttcaaaagcttagaaaaagagagaaaagaggttagatgaaattaaaatgattcaaagcatggtgattgtttccacttatgctccttagagttaccaccgcgcgcacgtcattttattaagaaaaagaatgtacatagagtgtaaagacacatggtcttgtattcagcgttcctgtaaatcctgaaaaaacccacctgcagcacccacaatacgacgactcagtcagactgaagcccaagctgcgcagatgcatgctattcctgaagcctttgtgtcttccttttcaaaacaccactcatcatgtctgacttat

SEQ ID NO: 48146 - DNA, 368 bp, Zea mays
  unsure (1)..(368): unsure at all n locations
tctaaagggagaacacantttacgactaacctatgttcattntgttatagacaggatttgtagcgcatgtcatgcaggacagcaagttggtgcctatcatccgcataagaacataatgacgaccggcaggccactggagctcctacacatggatctattcggcccgatcgcttacataagcatcggcgggagtaagtactgtctagttattgtggatgattattctcgcttcacttgggtattcttcttgcaggaaaaatctcaaacccaagaaatcttacagggattcttgagacgggctcaaaatgagttcgccttaaggatcaagaaaataagaagcgacaacgggacggagttcaagaactctc

SEQ ID NO: 48147 - DNA, 390 bp, Zea mays
  unsure (1)..(390): unsure at all n locations
ctcgaccggatccttaagtcacctgcggcatgcaagcttcgcatctggagatattaccctgtaagtaagagatgatttcggttctccaatcttcgctaaaaacaggagatatattaagaactgctctttcaagaagttccaccgaaggtgcttttattgtttcgaagaacacatccgaaggtaaaggcagcccctgtgctgctgacttatctagcagatcagcatgctcattntgtcctcgaggaatattcttgacagaaaaccctttgaaagaagcttcgactcttcgaaccatatccagatatgtttaagcttcggatccttagccttacaacttttatcaatatgacccgaaacaacctgggaatcagttttaaatatggcccttct

SEQ ID NO: 48148 - DNA, 376 bp, Zea mays
  unsure (1)..(376): unsure at all n locations
cgcattgcatatntaaatttcttgtattgcatctanggtttgtctaacctagttgagataactgccaacaaagcgagtgaaaaagcttaactcggatcaaacttgacaagtcttagttttaagcttttagcacttaaattcttactttttatgcaattgctggttcttgaaatatgcatgaggtactgcacttanggggagtattcaaaactcaaatcactcatgaaaacccctagtgcaaagccaaaatgcaaatttcaccattcacctattttctctanaaattatctagcctatggcaaaatattttgaaattatgagaaaatatatgagggtgccaatacctgtcccaacaagtgttattttgtgtgattat

SEQ ID NO: 48149 - DNA, 482 bp, Zea mays
  unsure (1)..(482): unsure at all n locations
cctctcagtcacctgcagcatgcaagcttaccctgtcccattcttagggcatgtggctagataagatattccttgatcaacaggcctacatacgcatccaatccttaattgacccgggcggagcatcacctgttcctagcccaagtctcgatttaagtatttccatccttaagattgtgtctgttccttaagatgaaagagcatcacggngaactttgcagtaagatcccactattgctccaaatgaaaatattcttgcaggtagaagccatcctctcccaggttagatggaggacaacctctatccacaagatctaagcaaggctaagcattnttgtaaatcatattttgatacttcacagaagtatctataaaggtatggatatcaaggaaagcaatgcatcaaagggtttcaagtaactcctatgaacctaatgcacatttcactagacttaaagtgtgcganaagtatttaaaaacac

SEQ ID NO: 48150 - DNA, 380 bp, Zea mays
  unsure (1)..(380): unsure at all n locations
gctgtagaaacccacgaacatgtgcagtgattatgcaactatcgtatttttataattatcacctatgcacaatgggcaactctttcaaacactaaacctggntttcttctgtccttgctcttatatcctaatttactctctgtcaatcatacaatcatcatacattatatattgctgctaaacggttcgccacgcgcgcatgggcgcgcttcatacactagtgtctatctgataagaattcttcattaacatttctggttccgtcactttctctaccatgacattccgtacactctagcacgcacaccggcacacgctgtaccacgcgtgacgcgccccacgccacgtgcccacgtccaggtacagctgctcctggtcca

SEQ ID NO: 48151 - DNA, 470 bp, Zea mays
tcaagctcatagaagaaagatgccactcgcccactccgtccaaaccgggactcattctcttcggacggctgacaactacgcgagcggttgggacactgaaactagggcccacatgtcggtctcttaaatctctgcgtgcctgccgagctcaccgtcgccgccgttgtggatgtggactcgtgggggtcgacttccgccgccgaactccgctgtgtgacctaaagggaatcgttctcaacggcggtgggagcgatggatcctgagtccgggaagcctgaggaggtggcggcttaccagagcaaagaggtcacgcttgcgatgctccacttcatgctcgccgcgctcctcgacgaccccgtacttgccgacgtcaccaggaagccctccctcgacgacgtcgacactctgattaacctatagctcggcagcgccatgaagctgaccgttgtcaagtggataacactttcttc

SEQ ID NO: 48152 - DNA, 450 bp, Zea mays
  unsure (1)..(450): unsure at all n locations
tgcagcatgcaagctaggaacaatctggaatagatcggcggttatattcagctattccaaagaaacttcngactcgatgtacagtggatggtggttttcactccaaaacatcctcgaccttgctgggatcaaccgcaatccccttggcaaacaatacatgttccaaaaactggatttcctccagccaatacgcgcatttactgaatttagcatataattgatgctcccttacgcgcgttaatacgatctgcaaatgtctagcatgctccctcttattcttggaatatatcaatatatcatcaatgaagactaccatgaatttatccaacttgggaatgaataccgagttcaaagatatgtgaagtgggcgggagcatttgttaatccgaaagacataaccagatattcaaataatccataccgcatagtgaatgtgggcttgggtatatc

SEQ ID NO: 48153 - DNA, 464 bp, Zea mays
  unsure (1)..(464): unsure at all n locations
tacttaccacatgctcctatggatgttgtgtttcatctaatctactgaaggcttcaacactggattatagataggtaggaccttccaattgttgggcttgatacaagtgtatggagctgattatggtgttgtgggagaaaaggagaagaattggagataaacttaatgggaacatcttacctgctgtgttatcacaactgaatgctagaactanatgctctaggcatttaccagtgactaaagctggttttttctctgtcatgttgaagacatctcacacactcacaacagacatgtatngaagaatatttggtgagtgtcattgctcgagggaggacactagcaaacttgtcacatgcgttggcttgattatacataagagagagggatgggaattgaagatttgtgcgtgagtctactgagacaaggtgtaaaaatgctaccaagagtattgaccactactg

SEQ ID NO: 48154 - DNA, 473 bp, Zea mays
agcttatgaagattcttcatcccaacatgggttagtctgtggtgccagagccaacccatgttggtcttagcaattaagcatgtgtcgagttcagctctatcaaaatctactaagtatagctgaccctctaacacacccttaaatgctattgaatcatcacttcttctaaagacagtgacacctatatcagtaaagagacagttgtagcccattttgcataattgagatacggaaagcaaattgtagtctaatgaatctacaagaaaaacattggaaatagaatggtcaggagatatagcaattttacccaatcctttgaccaagccttgttttccatccccgaatgtgattgctcgttggggatcatggtttttctcgtaagaggagaacatctttttctcccctgtcatgtggtttgtgcacccgctgtcgagtatccaacttgagcccccggatgcataaacctacaaaac

SEQ ID NO: 48155 - DNA, 400 bp, Zea mays
  unsure (1)..(400): unsure at all n locations
caactaagcaaagcctcctccgaagtcttaaaaattctgcgaattgtattttttttcttcactttgagctcgtgcagatattctttattgcgcgaactttctgactatcgcagcaattcattccttaacttattattctccagttggacttcagccaaagaacccttcgtggtctgaataacaaaacctttcttttctaatacaccttcgtgctctttgaccatgacttcaaggtcctggattgagaagtctctctttttcaaattagcttcgtaacgttcaactttctcaaccaaatcttgaatgaccggcttgttgttctcttctttcagatcttgctgcatttntagaaccttgcttaatcatatgctctgtcgaaacgatcttccgttaaacatga

SEQ ID NO: 48156 - DNA, 461 bp, Zea mays
  unsure (1)..(461): unsure at all n locations
agcttaaaccttatgccctattctttgatgtgtgttatgagccttanatgatacacatattccagctcacgtatgtcatgagtcgaagcttgaacacataaatagaaaaaggtggcctagctacaatntgttatgtatagtggacatggatatgcggtttacttttgtangtgctggattggctggttcttgccatgacatggcaatgctcatgagttgtatgtgagaagcgaactacccacacccaccagcaagtatggtggcatgttatgttggcattgcatacattgtattcatgcattacgatctattaaaattttttctgagtttatttgtttgtgtacaaggaggtattatctagcggatagtggttactcaattcccgaagatacttgccaccatatctaaatcagatacattacttataacaacttaatcgaacaagagtagagactgtgtat

SEQ ID NO: 48157 - DNA, 218 bp, Zea mays
agctttgcctatgcagactaataccttatttccaactctcaatgggagtggagggatggcgagagtaccgtaccctccgtggcaagaggctggacggtggtgtatctgtgctcttggttggcgtgaacccggtctggtcttaagaaactctgtggcgaattgacatatgcaacggttaagtgctacatatgttatgtgattggagatccccaactggg

SEQ ID NO: 48158 - DNA, 291 bp, Zea mays
  unsure (1)..(291): unsure at all n locations
cacaacgcgactcggagacaccccccccgacggaatgatctcaacacacaaaaccagcacanccccgacgccacaatttcacccccaccgaaagcggcccaaaacaacgaaacgtaaagggcgacaacaaagcggggcaaaaaaaggtagcccgcaaaacaagaaaaaacaagaaaaagaaaagcaaaaaaaaggcgaaccaacgtaactctggcgcagtgcttaagacacttggcagcccgccaccggtaccagacaccgacacggaacaatcctgcagacacggacgga

SEQ ID NO: 48159 - DNA, 461 bp, Zea mays
agcttcacgaagaggaaccttcggctatcttatacaaacagcttcacgcgaggaccgcttcttcctataagaccttcggcgacgaagcataaacccaacagctgcgatggcggtcaggcaagaaccctgcactggagcttcctataaactgtagcgggttttctgaagctagtggaactttgtaaaggcctcgtagtggtaccctgcctcgcttccttggtagaggtgtatggagtctgatcaactctgtggcaaatgggtaacacgacttgtgggtaaagatgtgcaacctctgcagagtgtaaaactggtatactagtcgtgctcacggtcatgagcggctcggacactcacatgattaatttatggaacttaaacttaatctgtcatttcattgcatttgggattatcttattattactcttacttattatttctaaaggtcggatttacttgcactt

SEQ ID NO: 48160 - DNA, 384 bp, Zea mays
acatgtaatgaagcctttgagcagctaaaagtaatattaaccaccgctccggtattggctcaaccagacattgaaaagcccattgatgtgtattgtgacgcatcaagcagtggtctcagctgcgttctaatgcaagaaggccgagtgatagcttatgcttcaaggcagatgcgccggcatgaggaacattatccaactcatgacctggatctacctacggtggttcatgcactaaaaacatggcatcattatctgctggggaatgtctgtcacacttatacagatcataaaagtctgaagtacatctttacccagtcagagcttaatatgaggccaaggagatggctcgagctgataaaggattatgaattagagattcactat

SEQ ID NO: 48161 - DNA, 477 bp, Zea mays
agcaagcttgtgcacacactagaagttcttctcttcttactccccacagacagatggtcaaacagagagaaccaatcagattctagaggatatgttgagggcttgtgctttgcaagataagataggttgggacaaaagattaccatatgcagaattctcttacaacaatagctaccaagccagtctgaagatgtcaccatttgaagcgctctatgggaggaattgcagaactccattgcattgggaccaacctggtgaaagacaggtgttcagtccagatattttgcttgaagccgaagagaacattagaatggtctgagagaatttaaaggcagcgcagtccagacaacgaagctatgctgacaccagaagaaaggaactcagttttgaagtgggagactatgtctacttgaaagtgtcacccatcacaggaaccaaaaggtttggagtcaaaggcaagctatcaccccgatatat

SEQ ID NO: 48162 - DNA, 390 bp, Zea mays
ccatgctattgtgtgaggacatagcagagcacaatgtgctgctgggctcgcaattatctgaagaccaggagaaaaccttgataaggtttttattcaacaacaaagatgtttttgcatggtcggctaatgatctctgtggagtaaatcgggatgttattgaacattcgctcaatgttgacccattcttcagaccccgaaagcagaggcttcggaaaatgtctgatgacaaggccgaaggggctcgcaatgaagtaaaaagactcctcagtgcaggagttatcagagaagtgaagtattcagagtggctacctaacactgttatggtgaagaatgcaatggcagtggaaatgtgttctatttacagatctaacacgcttgtctgaagacaat

SEQ ID NO: 48163 - DNA, 459 bp, Zea mays
  unsure (1)..(459): unsure at all n locations
agctntaaccccctctccccgcgagatcctttttcgtttctttctaaccataatgaatgtgatatcgaatgtcatacttgatgcatattcactttatttgttcccttgtatgatgtactgtttgcttcccaatttgaatggatgtatgtatgaatgcttgccatcgcatagagaacgatccggtcgaagagcccgaagaactcgcaagagaagcccctgagcaccaatcggttggtggaggcaagtgtcctttgacctatctctgtcctattcattacttaattcacctcccgcattacacctttatacctaaagatagactagtttttggtatccatgttctttgttacctacttgggttggattattactgtttagctttatgctattgctcaactctaatcaatgaacatgatgagattatctatgatacgctgttttccctctcttatatgatgt

SEQ ID NO: 48164 - DNA, 502 bp, Zea mays
  unsure (1)..(502): unsure at all n locations
ctcagcttctaagggagagncacatttaggattaacaaatgttcattttgatatagacaggattngtagcgcatgccaagcacggaagcaagttggtactcaccatccacacacgaacataatgacgactgacaggccactggagcttctacacatggattcattcggcccgatagcttatataagcatcgacgagagtaagtactgtctagttattgtggatgattattctcgcttcacttgggtgttctttntgcatgaaaaatctcacacccaagagaccttanagggattcttgagacaggctcanaatgagttcggcttaaggattaagaaaattagaagcgacaacggaacggagttcaagaactctcaaattgaaggcttccttgaggaggagggcatcaagcatgagttctcttctctctacacgccacaacacaatggtgtagtggagaggaagaatcgaactctattggacatggcaagaaccatgcttgat

SEQ ID NO: 48165 - DNA, 286 bp, Zea mays
cccaaaaaaacaaatccccttttttcacacccttgcgcggagtaacgcggcaaggcgccccggcgtattctcctttaccaacaaaagtcccgtgttgtcgacacaacactatttattagactcgagaacaactttgtacccatctcgatatatcatagaagcactaacgagattcttcttgatagagggcacatgctgcaggctcttcaatggcaccatctttcccgaagtaaacttcagaatgaccgtacccacaccaagaacatgagcacgcgacccatttcca

SEQ ID NO: 48166 - DNA, 404 bp, Zea mays
agtagcataggcaagtaaaatgcgaattgactctagcctagctacgggtgcataggtttcaccgaaatccaaaccttcgacttgtgaataccctctggccacaagtcgtgccttgttccttgtcaccacaccatgctcgtcttgcttgttgcggaagacccacttggttcctacaacattttggttaggacgtggaactaaatgccatacctcattcctcgtgaagttgttgagctcctcttgcatcgccatcacccaatccgaatcttgaagtgcttcctctaccctgtgtggctcaatagaggaaacaaaagagtaatgctcacaaaaatgtgcaacacgagatctagttgttaccctcttatgaatgtcgccaaggatggtgttcacggggtgatctcgtt

SEQ ID NO: 48167 - DNA, 462 bp, Zea mays
  unsure (1)..(462): unsure at all n locations
agctngccaaacaccattatgtatataatactgcagtatttgagaatactgcagtattcttccaaaactgcagaaaaactttgttcccaaacaccccctaaataagtttttaatagagcgatcttggtaaaggcacgacgtccggcgatctcgcacggcacaggatctactcctgcacaactactactactcaacattgtggctacccatggtccggcgatctagagtgcgcctatgccgccacccatggtcccatgacgccgcgccagcatacaacccgttcaattgtctttgcctgaaatctaagcaaggcgcatgataataaatgctgcggtgttattggtagcttccagtacgaccgtggtcatcatactcgaaatggtagtacaaagactatcgtgctttaaatatccattgcaactgttcttttgatattttaatttgaagatgtttaaatgcact

SEQ ID NO: 48168 - DNA, 348 bp, Zea mays
  unsure (1)..(348): unsure at all n locations
ctaatgcacaatatctcccnccttgacatcaattaccatatccatattcaagcaagaacatagaatgatgtcaagagacagcatggtattgagcacgtaaattataacacactaacattactcccccttacacattgaacatatgcaacacaagcattggagaanaattaaggtacaaatatgcaaaaaggtcaatacctccttttgtacctttaccattgttatggtgttctttccatctaagtaggcagagttgcttttgtcatcaatttaagaattccaacttgaaagctttatctctatgaagctccttcaccctcgtgcctgatcctttatactgaccttttc

SEQ ID NO: 48169 - DNA, 478 bp, Zea mays
agcttcgggctgactaagtcgtagtgccgtatggatcctttgtcttcatgccaacaagctgtggcagaatctccggtggtagccgatcacttcagcacaagaaatctagtccaagaatatctggcctataaagtgtccccaacgttgagtgaatggaacatgctgaagctgacggagacaaaagagaagaatgaacttgtgcgactaccttataagttcaaacttgagaaacagttcacagggccatgttaagaatggttagaaatgatagaaactatgtgcaacgaatttttgggaaattacactaaaaagaagatcaactgatgactgcagccttcggcactcgaccgaagtgaagggtgaattgcgtgatggatgccctgaattctgaatatcctgactatgagcgattgaacaaaggtgccgaacggcacaagagaaaaaagatcgttagtgtcctgacagaccagctgctaga

SEQ ID NO: 48170 - DNA, 392 bp, Zea mays
  unsure (1)..(392): unsure at all n locations
tgactgccatgaatagcaatgggcccttggtccgaatgtatcttcatgcatagataaactgggtgaagaattgcttcgaacgcattcgaaagtaccacgaccaatgatggcattcgaaaggtattccataacaacaatatcaaatacaacttgttcagtcttgtgttgataatgaatccgaaggttattggcattgtgtttntttcaagtgctacgatctgccttccaccgatacctacaaggggatgtgtggcatcatgaattctgtcttctggctcttgcatattgctgaacgccttaacatatatgatatcatctgcgctgcctgtatgaaacaaaacattgtggaccagacattcttttgatacacaagagataaccataacatcatt

SEQ ID NO: 48171 - DNA, 475 bp, Zea mays
  unsure (1)..(475): unsure at all n locations
agctnngttctatggagtctaatatactgaatagtttcttggtgtgttctaatcgactcttactttcaactgactcgccattagtttgtcttttaagagttgctacatgtttggtgttcttgcaaggaagtgtggggctcgtgactcctatgaggaggggtgaagctactacatagaatggtggggctcttgcgagaaggggtgaggctcttacaatgaggggtggggttcctacaatgaggaatggggcctctccaactaccattgcattgtgacatctgtaatttatgatgtgtctcttcttcatatagtaaatctatgcaatccctataaaagtactagatatgtctccatcaccctttatgaacttgagctctttgtctccatatccttcatagatctaaccaatgatcgtctagaatctccctcatatggcatgtcttgctttgctgaagaggtgaaaccatatccaaag

SEQ ID NO: 48172 - DNA, 370 bp, Zea mays
agctttgctttgaaataaatgtaagattatgttattctcttcttcatttcttcatctccgatgttctgtaatgtctaccagatgggtgagacgttcctggtaaggtaaagaaagataccgagcttgtcaagtagttcacgggcacctacagggttgtctgatgtctgtgagacaaagacaactgtaggtgggcctaattacttgggaggttctgtcacagctggtatcagagcgtaacccttcttgcagatattatgatgcattttctaaagacttttcgacagccttacctataattcttttctcttcttacctaagtattctgaagaagtctatcttatagaccacatacgaggagtgcaccatatag

SEQ ID NO: 48173 - DNA, 446 bp, Zea mays
  unsure (1)..(446): unsure at all n locations
actagctacaagaattctaatcagatatgagctcatgcctttgtttgtatattattgtncatcaagcggcttgggaaagatatcggctaattgatctttactattaatgtaagaaatctcgatatcccccttttgttggtgatccctaagaaaatgataccgaatggctatgtgcttagtgcggctatgctctacgggattgttcgccattttgattgcactctcattatcacatagcacagggactntggttaatttgtaaccgtagtcctgcagggtttgcctcattcaaagcaattgcgcgcaacagtgacctgcgacaatatactcagcttctgcggtggatagagcgaccgatatttgcttctttgaagcccatgacaccaaggatctatccaagaactgtgcaagtcccgatgtgctctgtctattgatcttacaccccg

SEQ ID NO: 48174 - DNA, 458 bp, Zea mays
  unsure (1)..(458): unsure at all n locations
agctntccatgttgagcttgaacattccaattcgagtctccatctgaccgtggtgaccgtcacaagttggtgttcttctgcagtccgaatccagcatgttcaaatccttttccctttcggtcttctccctgattcctaagcaaaacaagagtgcacgggtctccatggtctaaatatgatggacatgaactcaagagtgtaatcacctgatggttgagttgacgagcacgagcgcgagtaatgggaccagaaattggtacttgtattggtatagatgcatcagtagtgtggatgtcttcatcagcacgggtcttcatggtctaaatatgatggacatgaactcaagagtgtaatcacctgatggttgagttgacgagcacgatcgcgagttatgggaccagaaattggtacttgtattggtatagatgcatcagtagtgtggatgtcttcatcacatg

SEQ ID NO: 48175 - DNA, 364 bp, Zea mays
actaagctctcacctgtcgtgtagccagttgtgcactacctcattttgattttctactgaacgctcctaggaccactttggtgaacaacgatgtcctgttctgcttgccttaccatatgtgcactagacacgatgtcaatgagctctataatgcttgcacatctgcccaattgttcttcggggttcttaatgcctgcagatcacctgcacaaagcaaggagctttatttaattactgcaaggaaacccccatctctttaccccaaacacctgatatacatcacctgcactgccataccattgcatcataccagaacattctgttctaccgggagctactgaagcctactgctggtttggcaatt

SEQ ID NO: 48176 - DNA, 483 bp, Zea mays
  unsure (1)..(483): unsure at all n locations
taagtcacctgcagctgcagcttaaagatttncacggacaagctcttactttttatatctancgccgcgaaagggctactattgggggtatgcttcgtagccgaagatcctaaagaaatgaacaccttcggcagatcctctccaaagcagcgccgaagctatcgactataaagcttcggcacagtgacatgtctcaagacgaaggggtgaaccgacttaaagatgaaatgacttaaagacccatgatattctgtgtcattattgtagttcagtgtgaagggtataaatgtaattatatacaagctatgaactgtgcctataaataggtgaatagtacccatgtactgttcaggcgctctcctgtaatcacgctttgggcatttagttttgcttcacgctgggatttttgctttccttcaagccgaaggtacatttgaacttgttatcatttctacataatgaaatagaatgagttataataat

SEQ ID NO: 48177 - DNA, 370 bp, Zea mays
aagcttccaatgcgctacgcgcttctgtttctcttgaacccttttgttctatgatagcagggcaccgacagcgactaatatgtctcatacggtcatgggggtgtacggcgaccgggctctacagagcacggctagatggtgtagatgctcgagaggatagccacgcccaatcttatacccgcgagggcaccgcacgagtacgcgaaaggtggaacgaggaccgagatcggagctgctccgatgaactcgcgtatgctgcggtcgaatactatgcgtgaagcggacttgtgatacggaagagtctgacgcgtgggtcccatgagccattgacggaacgcgcgcgcagcgcggaaagaatgcaggcgcatgt

SEQ ID NO: 48178 - DNA, 479 bp, Zea mays
  unsure (1)..(479): unsure at all n locations
agctngagacattattacttaatggtcatgtgttgtccgaaagacacacttgagatcatcatatagatgcaccaaagaaccatataaagccttcaatgtccataccatctttgtaatggaccagactcgttcttttgaagcaattcaaagaacttaaccaattcagattagattttaagataagagggacttaaaatctcatttccgatgatactcatcaagtattcatcttatgggaaaaaatgaccaatagaatggttcataactctttatttcatctcaataatgggatgaccaattcaatcttacccagcatggtaagtatcatcacttgaaaagttataacatatgcaacactctgtatgggaggatgtatgtagaatacaatccataagaaatgtttctgagaaacatatgcaatatccatcactatcactntgtgtttccacatgatataanatttatggatatctctataa

SEQ ID NO: 48179 - DNA, 456 bp, Zea mays
  unsure (1)..(456): unsure at all n locations
cttcttcaatccaatgcattatttgattcttcatctcccctatgaggcacgaatggnggggcgtgcanggacgttggtgctatccaattgagagatgtctaaagactattctaaagaaatgtagaaataaatgcaaaatcgaggctttcattgcagaggcatacattctaaaggaggtgtcaaacttcacaacaacttattatggtgacaaactgtcgagcgtgcataatccaccgcctcgttacaatgatggcggcaatgaatcgaaccttatcatatttcgaggccaactcagaagtgcaagtggctcgaccaccaagtcgctgacacatgaagagtggcggcatatcatgctatatgtactgaccaacctttgagaggtgacgccatacatggaacaatttcttcatgaattatgacatcgatcaacggaccncactccacaggatatgacac

SEQ ID NO: 48180 - DNA, 441 bp, Zea mays
agcttctaaagggagagcacactttaggattatcaaatgttcatcttgagaaagacaggatttgtagtgcatgccaagcaagtgaagcaagtggtgttcatcatccacataagaacatcatgacgactcacaggccactggagctccttcacatggatctatttggcccgatagcttacataagcatcggcgggagtaagtactgtctagttattgtggatgattattctcgcttcacttgggtgttctttttgtaggaaaaatctcatacccaagagaccttaaagggattcttgagatgggctcaaaacgagttcggcttaaggatcaagaaaattagaagcgacaacgggacggagttcaagaactcacaaattgaaggcttccttgaggaggaaggcatcaagcatgagttctcttcttctacacgcccaacaaatg

SEQ ID NO: 48181 - DNA, 369 bp, Zea mays
cttctcctccgttgcttcgaacgcaacgggttgggcttcggatgaatcgccaagctcgctgattttcctcgagccttctatcatgcactcaaaacttacaaaacgcccgataacttcctcgggggtcattttagtatatctaggattaccacgaatcaattgaacttgagtgggattaagaaaaatgagagatcttaaaataacatttaccacttcctgatcgtcccacttcttgctcccgagggtgcgcacttggatcaccaaagacttgagccggttgtacatgtgttgtggctcctcccctatgtgaagccggaaccgaccgagctccccctcgatcgtttcccgcttggtgatcttggtgagctc

SEQ ID NO: 48182 - DNA, 474 bp, Zea mays
  unsure (1)..(474): unsure at all n locations
agcttgtggtgccctcgggcgtcttgtcgctatcgaagtaccaagtctcccacttggaagcctcggggccgaaaccttctggcgtggtagcgtcgcaaggactgctgataccgcgccgagtgtagtaaggccacgtcccgagcctcttccagctggtccaacgaatattctcggctggtctggttgcttcagtcgtcgtacgcctttgtcctcggggaaccgtattctaagtccgtgggtaggacggcctcggccccatatactataaagaacggcgagaaacccgtggcccagctcggcgtcgtcctcagactccaaaccatcgagggtagctcttttatccaccgcttgccaaacttgttgaggtcgttgtagatcctcggttntagtccctgcaaaatcatgccattggctcgctccacctgccccattgtcattgggtgagctacggcagcccagtccacacggatgtgg

SEQ ID NO: 48183 - DNA, 456 bp, Zea mays
  unsure (1)..(456): unsure at all n locations
cctttaaactcagctcggctcttattgcttttttctgaccctggtgtctttctttatgaagtctgctagcgtctaggactgaatcgaggatctatgcacataatcaatgctgaactcgttgagttccgcagcccactttccaatccttccagtagcttctctgttcctcatgatgtcctacagaggctgtgacgaaggaacaattatatggaatgcttgaaaataatgccgaagcttcctggaggccattaagacagcatacaacaccttctccaattctggataatctttctttgataagcttagaacttcggagacaaagtatactgnggcttgctttttgatttgtccatcgaaattttcctgcacaagtgccacacttactgcagagtgcanagctgccacatacaatagtaacggagcccctggccatgtggagtaatgctggatacaatc

SEQ ID NO: 48184 - DNA, 472 bp, Zea mays
  unsure (1)..(472): unsure at all n locations
agcttctaaagggagaacacactttgngactatcagtatgttaatttgagaaagacagggtttgtagcgcatgtcatgcagggaagcaagttggtgttcgtcatccacataagaacatcatgacgatcggcaggccactcgagctcctacacatggacctattcggcccgattgcttacataagcatcgacgagagtaagtactgtctagttattgtggatgactattctcgcttctcttgggtgttctttttgcaggaaaaatctcatacccaagagaccttaaagggatttttgagacgagctcaaaacgagttcggcttaaggatcaagaaaataagaagcgacaatggaacggagttcaagaactcacaaattgaaagcttccttgaagaggagggcatcaagcatgagttctcttcttcctacacgccacaacaaaatggtgtagtggagaggaataatcgaactct

SEQ ID NO: 48185 - DNA, 472 bp, Zea mays
  unsure (1)..(472): unsure at all n locations
tgatgacaatgagtacnggtattagcataaatttctgataattatctattggatatgagcaggggtagaatatggtatccgcgggtactgctatggatataataagatatctaccgataattttttcgcgggtatggatattcagtatccatacccattacccaatgaatatctgtcacgtggcccatccggattgtaaagccctaaaattggtataataaaaataaataaataaatgcatatattgatataaaagtgtttcggaattgtggaacctttgaagattaataggttntctttctttggcatattcaattaataaaaattataagggtcagaccacaaattaattaatacagagatattcatctcattcttgtattattgcattcgattcaaattcaaattcgtgaacacgcttgaaactacataatgagaatgatggaaacaagggaatacatcactaacaaat

SEQ ID NO: 48186 - DNA, 269 bp, Zea mays
gcgcacgcacgcgacgccaccacacgaaccagccggcgaaaaacaggcagcccgagcgatggggaaacaaccacgcccgaccaaaccggaagggaacgacagctacgaaagcaaacctaacgttacgccccaccggaaggcaggggcgcgaccaggtccaggccccacccctggacaggacaagcccgggcaaggccatccgcatagagacaagagcagcccgacccaagagagaacaaacagcatgcttcgcatgaccacacgatccg

SEQ ID NO: 48187 - DNA, 391 bp, Zea mays
  unsure (1)..(391): unsure at all n locations
ctcagctgagccatgaactgtcttcccgcaccgaacctcatcgtagtatgcctctatctctgggtcgcggcagtgggagttcttcatgacttggtcgatgaccagatgcgagtcactgcgggcgtcgaggtgtctgacccctagctcgatggcgatccgcaacccgttgaccagagcctcgtactcagccacattgttggacgccgagaaatggaggcgtagcacgtagcgtaagtgttttccgaggggcgagatgaagagcaggcccgcgccggctcccgtcttcgtcagcgacccgtcgaanaacatggtccagagctccggttggatcggagccgtcggcagctgggtgtcgacccattctgctacgaagtccgccaatacctgggac

SEQ ID NO: 48188 - DNA, 421 bp, Zea mays
  unsure (1)..(421): unsure at all n locations
agctcggacagtacatcagtcgccgtgtncttatctctntctataagacgaaactccagaccttcgaatttatcttctagctttcggacggcggcgcagtatcttcccattgaatcacttgaacaatcccattccttgtttatctgactgatgactaccagagaatctccgtataccatcagtctcttgacacccagtgatatagcgatgtttaatccgtgtatcaaagcttcatactcggctgcgttgatagaggccgggaatagcaattggagagcatacttgaggtgttcgcctccaggtgcagtgaagagaattcctgctcctgctccctgcagcttcaacgagccatcaaaatacattcgccatactgttgcggcttctggattatccggcacttgctgttctgtccactctgata

SEQ ID NO: 48189 - DNA, 287 bp, Zea mays
  unsure (1)..(287): unsure at all n locations
tactcaagctctatttgaagtgcntggacatttgagacaagatcttctattcctttgcgacctacacgaaggggcgtctcattccactgcgtgctaagtcttcgaagtaagtaagaattttagttttaaagtgataagttctattcgcctattcaccccccctctaggcgacattcagatcctgttcccgggtcaaagggaactttcaagcattccataagtaattgagacatatagttaccaatataaacgagactagtcgataactcgatagcgcatcgcttttt

SEQ ID NO: 48190 - DNA, 463 bp, Zea mays
  unsure (1)..(463): unsure at all n locations
agctgtggaggttcttcatccncacatgtgtttagcggcgangccacagccagcccatgcaagtcttagccattaagcatgcatctagactggcctcttcttttgcaaaatcaactaggtaaagcttgccgtctagtacacccttaaaagctagtgaaccatcacatcttctaaagacagacacatctacatttgtaaacaaacagttatatcccatattgcataattgactaacagatagcaaattatatccaagagactctactaaaaacacattagagatagagtgctcatttgagattgcaattttacctaacccttttaccttgccttgattcccatcaccgaatattattgaatcttgggaatctttgtttttgacgtaagaggtgaacatcttcttctctccgtcatatggtttgtgcatccgctgtcaataatccagcttgaactctcggatgca

SEQ ID NO: 48191 - DNA, 326 bp, Zea mays
tatccagcaactcttgcgactgcttcttcaactctgccaactcaccgggtggcattcgcgatggcctcttgcaaatggaggccgatcccggttgcaactcgatggcgaatacaatatcccggtccggtggcattcccggcaattcatcaggaaagacatctgcttactcacagaccactgggatctttatcacgggtaactccgtcatatagaaagtacatgactgataagaaccctgactaggcagaatcaaagcgaaatttccgcagaaaggagaattaacttctcgcggactactggctacatcaagcacaacttggtgcaag

SEQ ID NO: 48192 - DNA, 373 bp, Zea mays
  unsure (1)..(373): unsure at all n locations
agctttgaaccactaagctaaaattattccataccctatgccctatgtcaattattcaccctccctttatatattactattagatgtttaacttatcatgtattttactccacaggatcgtaacttgggagatgaacggttttctgatttcaattgcagatagaaaaggtagctctttaatctcaaccattgaacaacaacacacaacatgagggccatgactttgattctcatttaatttggcgttattagtgatgagagcgatgagtctactgatgagtctaggttatgagtcatcctttnngttgttcatattgtcataagaaaaaatgtcaattcacacattatgtaatgaattaagttgtggatgata

SEQ ID NO: 48193 - DNA, 438 bp, Zea mays
  unsure (1)..(438): unsure at all n locations
tgtagtntatgtaattcgcttccgcatttatttatctctcttgttctgcaatatctacaagatgggtgagacgttcctggtgaggttaggaaagatatcgaacttgtcaagtagttcacgggcacctacagggttgtctgatgtccgttggacaaggacaactgtaggtgggcctaattacttgggaggttccgtcacaaattgaacgctaccacgtcgtatcttaaggaacgcacgttgttgcctgtgaacgccgccgtggacactgctcttttcgaccggccgttccgggttgcctctgtccaagtttgcacaagcatcataagcctagtaggtcaatgattcattctgagtccctagatcgaatcaaccgacttgcgtanactataacgggctcaccggagcgttttgttcgctattgtcgcggacatacataaa

SEQ ID NO: 48194 - DNA, 479 bp, Zea mays
  unsure (1)..(479): unsure at all n locations
agcnttactgtatctaagacaatgtaannnnttaattattaagctgcaatcaaactctagtgccgcactggcactctctacanacatgtatgaagacagtacactgctacaactcaaaattaggcataagagaagggatntagaactgattcagtatagaaacttggaactcatataaatgaatggatcacaattatnnanaactttcatcttttctaagcgtatgatacagtcatggatcataaagttatgaagcatacagtacaagtagtgacctattttcctgcttaaatggattgcaagtatctaaccatagaaacttaattgtaacaacaaaatgctaaacatacaacatgaattgtggccgtgaatcttttcctcataatttcaatcaaaaatagaaatggaatcaaaaccagcgagtataagtgcagcaactaaatccagtaaaccaccgggaactctgaaagggacatgtg

SEQ ID NO: 48195 - DNA, 319 bp, Zea mays
cacaccgaccaagccgaacacttgatctgggacgccctcaatttatcccgatgatggtctaggtcagacatggtgaagcgatgactcctctccagaacagccaatgaattggtggcgccgctacacaatctgcccagatagtcccgagaagcaatgaaccgtcgtttctcctcctacaagcaagaacaacagtgagcatcaaagccaagaaagcatagcatatgcagcaaagaaatcttacctcataactcatcttctcaaagtcaactagagcattcaaagaagaattcaatgtgcgggcactagtcaagatagcaga

SEQ ID NO: 48196 - DNA, 274 bp, Zea mays
ctatattttgagaaagggaagccgactctctaaattcgagaagaaatgcgatgaggcgtctctacttggatattcatcaaatagtaaggcttatagagtcttcaacaagactcatggtattagtgaagaagcatatgatgctgagtttgatgaaactaatgggtctcaagatgaaagtgataatctagatgatgttggtggaactcaattgataaatgctacgaaaacaatggccattggtgaaataaacctaatgaagatgatgatgaaaata

SEQ ID NO: 48197 - DNA, 470 bp, Zea mays
  unsure (1)..(470): unsure at all n locations
agcttgagatagcatgtatgccctagtttgtatgtttcttccctagncganagggatatgggagttccatagacattgatgtattgaacttgtgtgatcggtgatgcttttgtgtgataaataagaagaactaatgaaaagccgcagtaaattaaataaatgctcgtactcatggggtcgtatttgtgttgcataaatatacaaaatgtntgtcgtcttttagcggcgttaaatgttgtgcgctcgatgatatgtaattagctaacgctagtgtgtgtggttgcttatgatgtctcgctacttagtgtttaattcgctagtgcgtacttaaagtatcttgtgctatttcattatattcatacatatgcatcttgcatctcatttaggaccgagagatgacgatcgagcaactgatgtggtgccaaccacaagatacatgtggtggacaacccgaagaatgatggacgtga

SEQ ID NO: 48198 - DNA, 425 bp, Zea mays
  unsure (1)..(425): unsure at all n locations
gaacacgcgacaggcctaactaatgtcactggcgattattatatactctgtgcagaccgtcaagcacgtaaacatgtgggacgctctcatcatgccaaaaatgtgatgacagcattaacacctctgtagttacttcatatggacctcttccgaccccgtgcctatctaagcataggaggaggcgagtatggccttgctatagttgatgactattcccgcttcactcgggtattctttgtggtgagaaatctgaaaccaacggaccctcaagcgcttcctatagagagcccaaaacgagatngagctcaaagcgaagaagataagacgcgactatgggtccgagttcaagaacctctaactggaggagtatatngaggaggaacgaatcaagcacgagttctctctccctatacaccacagcaaat

SEQ ID NO: 48199 - DNA, 387 bp, Zea mays
  unsure (1)..(387): unsure at all n locations
agctngacattgcttccctataggaaaccaatgccattcttaatgccagggcgtctcccattataaagcatactcttagcaaacctaaatctttatcttcaatctcaagctcatcaattgtagcaggtaattgagatatatgatcatcgtgctgctcaattaaatcaaggagatcatttatagcatcaacactaacatctctacatctagtgcaaatggaaacatgctccacagcagatgtagatggtttgcaaacattttatttatcaatcttagcatgtaaagtaccattctcatttctaagactggaaatagaatcattgcgaacattccaatctttagccttagcaattaaactagcattctcagtcctaaagctagaaagag

SEQ ID NO: 48200 - DNA, 453 bp, Zea mays
gtttaatgccaaaaggcaccttctactgcctttgtatttgaaaaatgtctaacagccaatcttataatttcctatgttcttcataacgaaacattaattatcccaaaggttgcgatcgttctaccttggcgttatttttgtagggtgtttctaagttctccttgatttcttaaaataaaaagtatcctatttattttatactataccaaggtataataaaattctctagtgaactacactgaataagtatactaactaaaataggggtgctctcctgttccttattaaaacaccttttctatattcttaactttaacacaatgtgaataaatggcaactctacttatggggtgtcatatgggttatcattttaaataagtagtagtgatcaagacttcttaaattttctaacctagtaactagtgcactattttcctttattattaccttttc

SEQ ID NO: 48201 - DNA, 452 bp, Zea mays
  unsure (1)..(452): unsure at all n locations
tctcctcctcccccatagagggnatgattgagcatgcgacacgcgaccttaagtcacctgcagcatgcaagctagtgaaggtgcttcatccccacatgtgtctttcggcgatgccacagccagcccatgcaagtcttagtcattaagcatgcatctagaccggcctcttcttttgcaaaatcaactaaataaagtttgccgtctaatacacccttaaaagctagtgaaccatcacttcttctaaagacagacacatctatatttgtaaacagacagttatatcccatattgcacaattgactaacagatagtaaattatatcctagtgactctactaaaaacacattagagatagagtgctcattagaaattgcaattgtacctaacccttttaccttgccttgagtcccatcaccgaatatgattgaatcttgggaatccttattcttgac

SEQ ID NO: 48202 - DNA, 377 bp, Zea mays
  unsure (1)..(377): unsure at all n locations
agctntgtatgttgtgagcaaacaattatttgtctatttatatgcaagctcnaagaccaaaagtcgtatcaatggtgctactgggggctcaatgaagagcagatgtgtgggcgtgtgagctgcttgcacttgtgctgctgtccttctgcgcgccgctgtttccacgcgcagatagcgtgctgctgttttcacgcacacaaagaaactgtatttctgtgcgtaacaaataaggtgcgcaagtgttaggtcacgggcaggcggtcgagagataggccttctgtgccatacgacttaggaccatttgagacagtttctctctctaatttaaagatgcgcagctctcctgcgcggtcacaaaaaaagcgttcaatatcaca

SEQ ID NO: 48203 - DNA, 444 bp, Zea mays
agcttgtccaagccatgacgtagaatacagttgtttacaagaccaagcgaactatgtatgttgtcaaaatccgatgattaatgaaatatatggttcatgactgctacacttgtcctcattcgctcgattcttttttttatttatttcttttgttcttgcgaacaaatcattagctcaaagctcgcaaacttgccaatcacttcctcaagagacattagtttatatctaggatccccacgtattaattgaacttgagtaggattatgaaatacgagggatctaagaataatcttgaccatctcatcgtcatcccacttggtgctcccgaggttgcgcacttgggtcaccatggtttttagccaggtgtacattgcttgcggctcttctcctttgttgaagatgaaacgaccgagctccccctcgatcgtctcctgcttggtgatc

SEQ ID NO: 48204 - DNA, 430 bp, Zea mays
  unsure (1)..(430): unsure at all n locations
ctcagcttctgagggagagcacatttaggagtaacacacgttcattttgttaaatacatgattcgtagcgcatgccacgcggggaagcaagttggagtccatcattcacacaagaacatcatgacgaccgacaggccgcttgagctactccacatggatctttatcgcccgaatgcttacataagcatcggcgggagtaagtattgacttgtaatagtggatgaatattctcgcttcacttgggtattctctttacaggagaaatctcanaccccagagaccttacagggattcttgagacgggctcaaaatgagttcggcttaacgatcaagaaaataataagctgacacgggacggagtttaagaactctcaaatcgaaggctttcttgatgaggagggcatcaagcatgagttctcctcttcctaca

SEQ ID NO: 48205 - DNA, 400 bp, Zea mays
tgcgaattgactcaagcctatctacaggtgcataaggttcaccgaaatccaaaccttcgacttgtgaatatcccttggccacaagtcgtactttgttccttgtcaccacaccatgctcgtcttgtttgttgcgaaagacccacttggttcctacaacattttggttaggacatggaactaaatgtcatacctcattcctagtgaagttgttgagctcctcttgcattgccaccacccaatgaaatcttgtagtgcttcctctaccctgtgtggctcaatagaggaaacaaacgagtaatggtcacaaaaatgagcaacacgagatcgagtagttaccctcttttgaatatcgccgaagatagtgatcacagggtgatctccgtgaatagttggtggactc

SEQ ID NO: 48206 - DNA, 459 bp, Zea mays
  unsure (1)..(459): unsure at all n locations
ctggaaaatctggaatgaatcggcggaataatcttctcttctattgaaacttccgacttgatgtacagtggttaggggtttccactccaaaatatccttgactttgctgggatccatcacaatccccttggcagataatacatgtcccaaaaattggatcttctccaaccagaacgcgcacttactgaacttagcatataattggtgttcccttaagcgcgttaatatgatccgcanatgtcgagcatgctcctcttcattcttagaatatatcaagatatcatcaatgaatactcaccacgaattatccaactcgggcatgaataccgagttcataagatatgtgaagtgggcacgagcatctgttagtccgaaagacataaccagattattcaaataatccataccacgtagtgaatgcggtcttttgtatatcttccggtcggatacgggtctgat

SEQ ID NO: 48207 - DNA, 439 bp, Zea mays
  unsure (1)..(439): unsure at all n locations
agcttcanatatgagagtttaatttagtatgttttaaataattgacgacaacctctgtactctttatgtatattgcttcgcttattggttgcagttagtgatcattttagttgctagttggtgctcatttgttcatgattttttagtatacttctatgattgtgaacacaaaaggtttctcctataagaggagagatacattaacagaagccaatcacaaaaatattttggaaaagcttaacaattgtgagatgttttatggaagagaacaacatcaagaaaccaatcttactaggttgggtgatacttaagtggggcccacatcataaaactttgattcatttagatcaattgtggaacacattgatagaggtgcttggatggtggagatagatgaaggtgcaccatctcagacatgaagtctacttgaaaaatagtc

SEQ ID NO: 48208 - DNA, 471 bp, Zea mays
  unsure (1)..(471): unsure at all n locations
agctnttatgaaaagctggctgtggtgaacagctggttgtggtgataatacggatgacaacgggtttaaaacctgcgggtacagagattataaactcgtacccacgagattaatgttaaacccgtacccgcacccgctgcccgcgacgggtagcgtatgttacccaaacccgctacgcatgggtttatggcacccgcaggtacacccacgggcacagtcatataataaatatttattaaactgatagcacataataataaatatttattaaactaataaaaacatgtatcgatcttagccaaaagttctactagttccctggcgcctgtagtcttcttttatatcatttgattagctccactcgctcaaagcttttggggtggcactaaattgagatgcatgtgctctacagcctacacagacacacacgcgggtatgcgggtgtgcgggcacaggtacaatattttcata

SEQ ID NO: 48209 - DNA, 449 bp, Zea mays
gcttcggagtgaatctcgtttctcatagcataacatcatcacatcattcttgttatcatatgcatcatacatcattctgcatatggcacaagaaggggatacgatattgatcttcggaatgtagcttcggaaaatattttcacgaagtctggatgttgttgcgacaaatgaaaattcttcttcacgaagcatgaaaagaagggaatgtgttttttcgtcgaagactcaaaaacggtatgtatgtaaaagttcatgcatcgtaaagaattaaaacataaaacataagtttattaccattcagggtacaaggtgttacatatattacatttcagaaagttttacagtagcacctagtcttccctaagtactacttctgcagcttcgttcaagagttgattgacaacttgatccatggtagcttcggccatctttttaatttcatcgtcatc

SEQ ID NO: 48210 - DNA, 451 bp, Zea mays
tgcagctgcaacttgaactgcctcagcgctatgaaatgtctatttgccgatacctcgcatataaagtctgaaggcttgataattgtatatatttggaagcttataaattttgaattattcttttattcttatgctaattcttttcatatagggtttaatacttagcaacgctttgagagcgcaaaagaatgtcgaacacgagagctatacatattgctttcaacaacctacgaacagaggttattaagctgaagaacgaagctttggaaaaagataaaactctgcttacattggtggataaaataaaggaagacgaagctactcttaaagctcaagctgaagctcataagcgcgaaattgaagatcttcggaaacagcttaccatagctaaagaagaacgcatacttgaataaacgaaacgagaacttagcgatctatgggcaaatcattt

SEQ ID NO: 48211 - DNA, 430 bp, Zea mays
agcttgccctctacaagaatagaatcacatgatatctcttttattgttattaaatcaagccatgaacgataccagttgtaggagtccttaaaagattacttcccctatatgagtattctcctttagaaagagtttctctccccctttacagatgataaaatactccccctgacagagatcctctacttaaggaaaaagcatgtgaaaattagaggagcgagacatgatttgaaaagactaacttcccttatgcatatgtaacagaatatgagttaactacttatgcattcttatcaacatggaagcatatgatatgaattatagtctaatcaaatattagacaacacatgtgaatggtactaaatgtagtctcaaaagataccaattgaaagtcaatggggagcttgagagacatgacagttcttggaga

SEQ ID NO: 48212 - DNA, 437 bp, Zea mays
  unsure (1)..(437): unsure at all n locations
agctngagcaaagctcacggtctcaccaggaatctatctgtgggcttgaatcgaacggagggggactagagaggggttggccaccgcggtggctcttggtcggcactggcgggctgcggggaggtcgccggaggcaaccgctggctcgggcgagtccgacgaggtactgaggaagcaatggggaaggcaaccgagcgctggggcgggttttataagcgcggacgcggtcggggcgccggctcaaccgtttggcgcgacgcgggcacgcggggcgcgcgcgcgggcgtgctctggcgagctcagagcgcgtcgaacacgtggcgcgttgcttctgcccgtgttcttcgctctgctgagcggccaggcgtacgaatctcgccctaccgcctgtgggagatttctttcctgcacctaaggctacctaggtcatgtaagtt

SEQ ID NO: 48213 - DNA, 384 bp, Zea mays
ttatttactcataactctaataattataggcgaaagctgttcgtatttcttcagctgaagaaatacggaccattatggaccgaagtgtcagaggtgttcttgctacccattctcaggtacctaaactatgaaacaacaaatgtcattatatttgcattttatattggacaaacacttagctagactttatcttcatttactctcagaagttctgtagtcagtgagcattagatgatgtgaagagactgtcccaactgttatgaagaacaatcttgtctactgaactctggaagctatattatttggtttgaatgctttggtgacatccaatttgtactgaaccagatactatgtatcaccagagcatgaattctacgctctccg

SEQ ID NO: 48214 - DNA, 459 bp, Zea mays
  unsure (1)..(459): unsure at all n locations
tgcaagctnttgacaaaacaaaaactcacacaaactctattctattattttcacaatctctcaagtggtagctgatccatttattactttggcctttattttctccccctttggcatcaagcaccaaaacgggattaatcttggcctttttaaccccattgcctcaccaaagtcttcaattaagagcaaatggcaataagatttcatgagatgaacttggaattagttaccctctcatcggagtgcagtggaagtctttcatggttcaagtccaccttttccctttcaatcctcctttgagactaaattaccaaactcaagcacatggttagtctcaaagggtcaagttgtaacacatctccccctaaacatgtgcataactttgcaacggacttgtgaagtccaggagtgtttgtcatcttgacaccacaataacaacaatatgcagaatgacatgat

SEQ ID NO: 48215 - DNA, 474 bp, Zea mays
  unsure (1)..(474): unsure at all n locations
ttgcctcgggcagactaataccagaataaggtaacacgcaacatgtgtgtttagatggcgagagtatcgtgtaccctccgtggcaagaggctatacagtggtttatctgtgctctcggttggtgtgaacctgatctggtcttaagaaccccggtggcgagttgacatatgcaagggttaagtgctacatatctcgtgtgattggagatccccagctgcgtattaatcgattcggatcgtcgttacttctcggacatgaagacttggtcactgccctacacgtatcattccagtgaacaagaagggttgataagaaaacaactagtatangccaagtgcttgaactacggtagaaagaactctnaatcacgtaatgacctaacttgctaataaactgggatttaaggatccactattagtaagcatcnttgctaacagagtcttgattcttgattaagccctaccttgacttcct

SEQ ID NO: 48216 - DNA, 464 bp, Zea mays
  unsure (1)..(464): unsure at all n locations
agcttaatctcagaagactgcttactatagttatgagcttctccctcttcttctcatcagccttcacataaaaccattcattagtgttgggggccttcgtctntcgaaagtcctcaaaaacatgatttaacaatgttttccaagtgtaacacatgaacaggtaccttcagactcgggtcaaaaccatatacgatgtgaaaagtgtggtcgagacgatgactgatgttgctccgaagctacgcgcaagggagcttctacgcaatgactgaaaaggaaccgactttaagaggaaaaggctatctantccccattgggttgtccataagtcaatagtaaatatgaagggcatgaatgtaaatttacacaggctgcgccctgtgcctataaatagatgaacagtacccccgtactgttcacgctgacttgtattcatntgtgcgtcacgcttagactattaccttctg

SEQ ID NO: 48217 - DNA, 512 bp, Zea mays
actcagcttcaccgtactcccccgcacgctctcgacctcaccggagtaagatatcatccggcgttgccctacagacggcgtgccagcgggcgtccgatccctcgccaccgtagaccggccagcagagccatcctcaaccccgtacaacccttggtttagactctatgtgcctcggtgaagcttccagagcgaggaatcgagctctgcctcaccagagacgctggatcaaggtcgccggacttcacccgaccgccggtgaacgtagaccgagccccacagtgagttattcttcgattccttgcacgggtcgactcattagcaccccgtgaagctccccgtgcccttggtttgacctgtatcgccgtggataggccgaagcacacgccgccgacgagctctcccgcctgcgcacgtggaccggccgattccggccatcaccgtcgtcgagccgcacctcgttgtgaccgcggtgacctaccgaagccaacccgacccttcgccggaccttcctc

SEQ ID NO: 48218 - DNA, 461 bp, Zea mays
  unsure (1)..(461): unsure at all n locations
agcttcgtagaaacatccatgcttcgtaaacaaaggatcgcttcttttgcaatagagctgatgaanatgtatttctcagcttactttgtgccttancacattttcatttttataaagcaatctccgaagatcgacttcgtattcaatttgtgtcattggtgcgatatgatgtataatgtgatgctatgcggatgatgtgatgatatgatgcatagaatgatgctaatgccgaagccacacacccacacgcccacactgaaacacacaatctctgcgtccccttaagaacgatcggaacctctttgccgtttatttttcggcttcaccgcttaattctcggtgtaagttttgcatccncttaagaacatcttttgaacttcttcgccttctgtttcggcggtataagttctgcatccccttaagaacgtcttttgaacttcttcgccttatatttcggcagt

SEQ ID NO: 48219 - DNA, 440 bp, Zea mays
  unsure (1)..(440): unsure at all n locations
cgntggaactcgctctcccgagcaagatgatccaacggtggagttgtatgtaagcggacaagggtttagctcaagaaggcaattgctctgttaatctagcctctcaagggcactgtgcggtggtatttataggtgcctgagtgcccagcgtcatggattaagaacgcatgtgccctcatgcgcctaggtcatccccggaatattcccattcacaaactgtcattacagaaaagccttcacaaactgggcccgtaatgcgcagcagccgcgcggggcctgttacaatgggccgaattctacgtgggccttcgcgttggacgaggccgcgagacggagcgacgtcgncatatgccttcgtcttgcagcgtattggatgaanggtggagactaccggtcgtcttgtcttccgtggtgtagtgagattgcaaaggcatctagcg

SEQ ID NO: 48220 - DNA, 456 bp, Zea mays
  unsure (1)..(456): unsure at all n locations
agctnggaaaatcatatcgttcatcgttttactctgattntagaggttctcaaacctacgctctcgtagcgacgcgtagaatattattgtgtggtttgtttctatctttggtgtaaagttattttcacgtattctttgcctatctataagtattgctacgatagaagcgaggatgtgagacacctgaagcaattggagaagcacctagagttgcaccaaaaaagcaaggtgtgtccgtgatcaccttctttacctaataatgattccgttaatcactgtggcactattaagttaatttgatgggacttaacaagttacctagttntgttcaccatataccttgcaaacaaacaaatcattgggtagtcttggtattgctctacctcttttggattaatgctctataagacatatgtcatgctctgtccttattggttgaatatatatngttcatga

SEQ ID NO: 48221 - DNA, 340 bp, Zea mays
  unsure (1)..(340): unsure at all n locations
ggatatctaacaaaactgaatctgattatctttagttnnggccgttcacaaaggtttcatgtgtgaagccatccttctaaataacagtagctgtgccccgagaaactaccatggcgcagaagtcagcgtgcccaccaataatcttgtcaagggcatcaacttcgccttcaatatgttctaatgttcttggcaggttttcagctgaaggtgtaacattcgaagagctagcttcgacagagtgaaacacgtccttcagccgctgcacacatcggatgccgaagcttaagcatttctcctgaagttctgtaaaggagttcttgcaaattgagtatttatccac

SEQ ID NO: 48222 - DNA, 438 bp, Zea mays
  unsure (1)..(438): unsure at all n locations
taaactatagctgcganacacacatggctctgtntgtgactgcctctgtcattactctgtttgagatgagaatagacctgacgtgccacggatggattctatcttcgaagcccctggtcatttcagagaacctgtatgcttgctcccttctttggcggaaatcattgtcagccccgatgtattcatccatcttctgaagcagcttctccagagtctgtggcggctttctagcgaaatactgaacagtaagtcctggacgaatcccttagatcatggcctcaatgacaattacattgagcactgtanacgcttgtgctctaagatgcaagaactcttatacgtatgcctctaggtactcctcatgatcttgngtgcattgaaacaatgcctgagctgtgactggctatgtttggaagccttggaacttgcaccagctat

SEQ ID NO: 48223 - DNA, 479 bp, Zea mays
  unsure (1)..(479): unsure at all n locations
tctagagagagaancacgtttgtgactaaccaatgttctatttgataaagacagggtttgtagcgcatgtcaagcagggaagcaagttggtactcatcatccacacaagaacatcatgacgaccgacaggccgcttgagctactccacatggatttattcggcccgatcgcttacataagcatcgactggagtaagtattgtcttgtaattgtggatgattattctcgcttcacttgcgtattctttntgcaggagaaatcttagacccaagagaccttanagggattcttgagataggctcaaaatgagttcggattaatgatcaagatcatacgaagcgacaacgggacggagttcaagaactcacaaatagaaggctntcttgatgacgaagtcatcaagcatgagttctcttcttcctacacaccacaacanaatggtgtagtggagaggaagaatataactctacttgacatgg

SEQ ID NO: 48224 - DNA, 319 bp, Zea mays
gagaatgaccatctagatgcatgtttgatcgctaagactaactagggctagctgtggcattgacggctagcacatgtcgtattgaacaagcttcataagcttctaaaggagaacatgcgttaagactaacagatgtatgtattgagatatacagaccttgtgcagcgagccaagcatggaagcacgtggaaataactcatccgagcgagaacgtgatgacaacgtcaagaccactggaacttcttcatatggatctctttggacccattgcttatcttagcatcagggaagtaagtatggtcttgtcatcgatgatgat

SEQ ID NO: 48225 - DNA, 438 bp, Zea mays
  unsure (1)..(438): unsure at all n locations
agcttttgagctcccgtttttatgacatgttttcgtcatntccgaagagaagatgtctcaagacaagaatacagttgctgatacaaagctaaccgcacaggagaagctttaggagaagactgctatatttgttgagtcaatatcataaacaaatactgagaatattactaaagagatactggaaggcttgtctgaagatactgatgatagcgacagctatgatgtggagagtggaggcgaagactctgaagatcggccctggcgaccaagtcatgccctcttcgggaaatcaactatcaaacagagtcatcttgataatatgagaggaaggttttctcgagatatgtctattgtgagggctgacgtagacagggccattcctgctcccgaagaaaacgaaggtgtgatctttccaagctttctttcaacttgacctcg

SEQ ID NO: 48226 - DNA, 386 bp, Zea mays
  unsure (1)..(386): unsure at all n locations
gctggtctaacagttccaaggttgtcatacatagcttgtcacaactcaggctctattccaatgcacgcaagaccatgaagaataccttcacgcatatgtacgaaggttcttgcgactgatggcacaagcgcctacagtgcccaatgagattgtcattgaggccatgatcaagggtcttcggctaggacctactgctccatatttcgccaggaagcctccacatatgctggagaaactgcttcagaagatggatgagtacattcgagctgacaattattntcgcaaaagaagggaggaagcttacagattctcggaatgactatgggcttctgaggaagaatcatctgatgcacgcaggtcaatccataactccactatagtgcgac

SEQ ID NO: 48227 - DNA, 329 bp, Zea mays
  unsure (1)..(329): unsure at all n locations
ccctcgttttcagcccatacgcaaggtcgaacagtcctgccggccgtcgncgcgtgcctccgtgtcgttttcccttcgttccaccgtgcccttcaccaaagacatccactntaggttcggtgtgttttcacatgcttggacttagtttattttcgggttcgtgccacagccaccatttccggcccgcgtgccatggcgaaccacctgtgttcagcccagacgcatggccgaacagccctgccgcccgtcggcgcgggcctccgtgtcgtttccctccgttcacagtgcccttacccaagcatacacattagctttggtgtctttcacac

SEQ ID NO: 48228 - DNA, 202 bp, Zea mays
aaaaccggaagaggcgcgcggcgacaggctgtatggctgtacagccttgcgtatgtgctgaacacgaagggctcgtcatggcgcacaggccgaatactgatgctggtgcacgaccccgaagataagctaagtccaagcatgcggaaagacaccgaacctaaaatgcacgtcttgagtgaagggcactgtggatcggagggaa

SEQ ID NO: 48229 - DNA, 465 bp, Zea mays
  unsure (1)..(465): unsure at all n locations
agcttaacaagtgcgagttctggatcaacgaatttctattcttgggtcatattataaaccgagatggactagttgtggatccaaagaatgtagcaccgattctggactggaaagcaccaaaagatgtccgaggaatcaagagtttcattggaatggctggttactatcggtgtttcattgaaggtttttccaagattgccagatcaatgatagccttgctagcaaaaaaaggttgagttcaagtggaccccagcgtgccaagaatcatttgagatgttgaagcagaagttgacaacaacaccgatattggttctgccagatgttcacaagctgttttcagtatattgtgatgcttcgtacatcggactgngatgtgtgttaatgcangaagggaaagtagtggcatactcatcccgacaattaaaagttcatgagaaagaataccccactcatgatctggagcta

SEQ ID NO: 48230 - DNA, 378 bp, Zea mays
  unsure (1)..(378): unsure at all n locations
ctataatactaagcttcnggttacagcatatccgacgatgaatggattaaccgactaaataatatcttgtacctttagtccatacaggtctgagtcaatgttgtaaactattatgacgggcatgattgtatattctcacaggctgtgtcctgtgctctataaatagtgaacagtatttctttactgtatacgcattcctgtaattgcaatcgcattactcggaaattattcttattcaatgcacaggtataaatgtatctaatattatattcgaatacatcaagtgtatattatatgtaaatgatgtcgcttacttataatttacttcgccttaatgctctatatctacccatattctatatcatctctgagaggtca

SEQ ID NO: 48231 - DNA, 425 bp, Zea mays
  unsure (1)..(425): unsure at all n locations
catgcaagctnggaatgggaaatgtcttaagaaaatttattggttagaggagggtgaatagcctaactggaaatttctagcactcaaaaacaccaggcaaaggattagacaacaagcattaataactctactttggtctagctacatattgcaaacctaaaagtgagtagaacctacatatttctagagatcgagatataagctaagcaaagctcagtgcacctctctggctctctgatgggtctctagagatttctagcgagttctaaaaccaactcaaaaaagcatactctctctaactatgctacggtgcaaaccttcaatgggatctatgaagagctcctctactacatttgaatatcccacgcgttatctgcttgtcacaatcaaactcgagtgacctatanttcttgatggcatcgaaa

SEQ ID NO: 48232 - DNA, 372 bp, Zea mays
gacaagagtcatcgctcttagattatgataagaaactctatcatgttactagacaagcaatagcaaatctttcttgattgcggcgatgtatgtcgatgactcaattatctttatgccacatgttaccgtcattaatcatattaagcaagagatgaagagaacatttagtatgagcgatcttggtctcctcaactattacatgtgaattgaaatgaactcaggaggtagtggaatcaccttgagtcacagtgcatatgcagttaagatactcaagtcttttggaatgatggattgtaactcatgcaacacctatgtaagctcggctcatctctacaagaccaacgaaggtgatgaagtgtggataaatacata

SEQ ID NO: 48233 - DNA, 442 bp, Zea mays
agcttcggtaaataaccacctcattactttttgagttgagcagcgctgtctcctccaaccctcacaatagtcatgtcgcggaagtatatatcttcctctcatagcatcaacatgactttgtttgatagtcgattttccgaagatggtatggcttggtcgccatggccgatcttcagaatctttgtctccactttctacatcatactcatcactgtcgtcagagtcttcagatagatccgccagtatttctcttgtaattttttctgtgttcgtttttgccatggattcgaaaaatccagcgatgaagggatccacgacttttctctcttcaaacagcttcgtgtccttagttatcttcgtctcctcagtcatctttttctcctcagacatggtgaaaacacgtccttataccgaagctcacaaagcttgacaatcacgtgag

SEQ ID NO: 48234 - DNA, 441 bp, Zea mays
agaacacattctaggactaaccaacgttcattatgataaatacttgatctgtagcgcatgccacacaggagagcaggtgggtactcatcatccacacaagaacatcatgacgaccgacaggccactggagctcctgcatatggatctattcggcccgagtgcttacataagcatcaccgggagtaagaactggctacctattatggatgattattctcgcttcacttgggtatgctttttacaagaagaatctcacacccaagagatcttaagggaatcttgagatgggctcaaaatgagttccgcttagtgatcaagataattataagcgacaacgggactgagttcaagaactctcaaatagaacggcttcttgatgaggatggcatcaagcatgagttctcttcttcctacacaccttaacaaaatggtgtagtggag

SEQ ID NO: 48235 - DNA, 400 bp, Zea mays
  unsure (1)..(400): unsure at all n locations
agctagttggtttntgctgatagcctaagccganaccgaagggttgatcgtacgctcgagcccccaggggaggggatgcccatgccgtagtggttgtaataaggcttcggtatgggtaaaaagcttgcttacgagatgcgtcatcgtccctgtgctaggtgacttaagagtccttcgctgcacatatcgagggtagagccttgctcgggcaaagcggaagtcttcccgaggcgacggtcaagttttccctgacgtttgccatagttggaggagtggtcacctgcgggattcgtggtggagtaggtagccgatgccgagctcacacgaagcggagacggcacccgatggcgagcccaatcgtctggcgagacaaagattgcgcccgatggcgagcctagcg

SEQ ID NO: 48236 - DNA, 346 bp, Zea mays
  unsure (1)..(346): unsure at all n locations
tgtgaagattcttatcccaacatgggcaagtcttctatgctagatccatcccatattaggtttagcaattaaacaagtgtctagttcagcttgattatcattaaaatcaactaaatatagctgaccctctaacactcccttaaatgctattgaatcatcactntctctaaagacagtaacacctacatctgtaaatagacagttgtagcccattatgcataattgagaaatagatagcggattgtaatctatagaatctacacgacaaacattggaaatagaatggtcaggggatatagcaattatacccacacctctgaccaaaccttgatttccatccacgaat

SEQ ID NO: 48237 - DNA, 478 bp, Zea mays
  unsure (1)..(478): unsure at all n locations
agcttacacatgaataaatctctaatgtttctcttttatctatnntgttaagtaaataaaaaataatctacattagttcatatcaaatcctaaaaattagagtgtgcagacagtaaatgaaaccattttatttaaacagagaataattctatgaagcatttgcaatttgaatcactaaatttggagttcatatgcgaaagttatgaaataaacaagtttgggaattcaaaatatgaaattaaggctaattctgtgattatttaaaagtccagggctaaatctgcaagattacaggggcctacgcgcgaaaaccagggacggcgggttgatttcctaaaaccagggggtttcttaagcaaaacagccacgtgaaggggtatcacgtggatctaaccgctagatcagaaaccgacgactgagattatatctgcatccgaaggcgcgcgcgcggtggcgggcgagcgctgacatgcgggac

SEQ ID NO: 48238 - DNA, 428 bp, Zea mays
  unsure (1)..(428): unsure at all n locations
accagccgggctcctctcatactccgcacatagccagcatcggggaccttcttcgacgtggaggccgagcccctctcccaaggacagcgcccctgtcttcttcctaagacagcccctccccttgctcatgttcattgtgcgcagggtggtctacataatgcctgagagggagatgtgttgttgcagcactgttgacgctcattgggtggttgatgttntacgcagcctcaacatcgacgtcgttcacccctggtgaaaccgcgatgatccttgttcgatccacatcggtgttgttctctgtgataattggtatgtggccttcttgggaggagggaacctcggtttgcgtgaggagagggaagcgctaacgctcgcgatgtcgagtatgccaatcgaataccacgttctacaacacgatggtttgtatg

SEQ ID NO: 48239 - DNA, 479 bp, Zea mays
  unsure (1)..(479): unsure at all n locations
agcttgtgaagaatttcatcccaacatgggctatttggcgatgctagagccaacccatattagtcttagcaattaagcaagtctcgagttcggctctattgaaatcaactaagtatagctgaccctccaatactcccttaaatgctactgaatcatcacttcttctaaagacagtaacacctatatccgtaaaaagatagttgtaacccattttgcataattgagatacagaaagcaaattgtaatctaaagaatctacaagaaaaacatttgaaatggaatggtcaggtgatatagcaattttaccaagtcctttgaccaaaccttgatttccatccccgaatgtgatagctctntggagatcttggtttttctcataggaagagaacataactttctctccagtcatatggtttgtgcacgcgctatcaatgatccaacttgagccccccgatgcataaacctgcaaaacaatttag

SEQ ID NO: 48240 - DNA, 409 bp, Zea mays
  unsure (1)..(409): unsure at all n locations
taatgcccctactaatagattgtctaattatgttaatggctaatctctcatgcctcacgataacaacggctatattttatatcctgctggttatcctgacgataagattagcagaattcatgctaagaaaactcattctgtttctcaccatgcttttatttataagaatgaggcttctagctctaggcgttctacccatgttaaaaatgcctaataggaaatctcctactgcatcaaatgatcataatatttcatttaagactctcgacgcttcatatgtgctcactaacaaatcacgcatagtacttgccatatatgtngggggcaaacacaatgtgtcaaggacttgtgtttgggaacccaaggtgcttgttttaatgtgaaacgacccaatatcgtttggtaccta

SEQ ID NO: 48241 - DNA, 468 bp, Zea mays
  unsure (1)..(468): unsure at all n locations
agcttattacacacatagcatacatattgtttgttgttaaantgtagcacaatactatatgccttccaagaattgcaaaatacgaaataattgtagcaacatactgtttgctgatctaaaatatgaaataatgcaaggtatgtaaaattgagtacgtaattaaccttaagtatacctgctaagccatctcatccctcaaccacattaatgcagcctctctatcattattacatgtactcaaaaatatctgtcgattgtcagtccttgaacaccttataagatataacatgtacctaaaggagatgatattggatcccaagacggtggaagttcgtctctccaactctaaccggtgcaggaataatctataaatataataaatttagaataaatgattaaagcttttataacttgtagcaactgacattaatttatgtttagtaagtaacgaaaccacttactacaatc

SEQ ID NO: 48242 - DNA, 393 bp, Zea mays
gcctctcatattcttctatgagcttatgatatgtatcaacttatgttcctgcaaattctagctcacaggaaggtttgcttgtcgacggacaacaagcattagcacatggtaatatactctcaatttgaataaatgtgcatgtgtgaggttgttgagattataagttttctatcacaacctcatgaggaatatctaatatgatatgatcatccataagattttcatgagagcataagagcatatcatatttttcttgacaagctagaatttcaacttttagcttttctacttggtccttaagcaaggtattcctacttactaattgagcgatacaatgtacagcgttattctgctcaattgaaatagtttcatacctatggaccaagtcagcat

SEQ ID NO: 48243 - DNA, 406 bp, Zea mays
  unsure (1)..(406): unsure at all n locations
agcttgacacgagttgtcctacatcatttnttgatatgcaagcacacctaatcatacatctcgtggatcagataataatattacggccactatatttacatcatatgcttcagtaggagcgatacctgtgagtactaaaaagtgttgtgcgatatcgcgctcacccagagggttcaatgctggaaggatacactacagaacaagtgattgagagctgtatagattacatcagagacagaacaatgataggtgtgcatgtacctaaacatgatggtaaactatgtgggagagggagaatgggtaagaaaacttctcgcgttgaggattacaagctagtacattgtgctcatggtagtgtactacaacatctcacgatagcctacgcttacataaaggaacacatgga

SEQ ID NO: 48244 - DNA, 461 bp, Zea mays
  unsure (1)..(461): unsure at all n locations
tcttcgctgagtgctgcggaccanacactcagcanagaagctccttttatctagtgcttcccagcgcacacagtagaaggactggcaaatgggtccactggagcctactttgcttagacctgtccatcaggcactcgacaaagaagtcccctttgtcgagtgcctcctggagctctcggcaaagggactggttagggggcccactggtgccttctttgttgagtgccaagatagcatgaactcaacaaaggcttcatcatcatcatcatttggcaatgtgacgacgactattctttgcaaatactacgtggcacttagaaaagtctttgccgagtgctctacaaggctctacagtgggagagctcgtagaagaagtcactattcgtttcggattaaagccaactatttgtactgctacagctccaatctatagagactaaacattgtataaatagtacaag

SEQ ID NO: 48245 - DNA, 475 bp, Zea mays
  unsure (1)..(475): unsure at all n locations
tatgaagattcttcattccaacatgggctagttggcgatgccagatccnacccatgttagtcttagcaattaagcaggtgtctagttcagcttgattgaaatcaactaagtatagctgaccctctagcacccccttaaaagctattgaatcatcacttctaaagacagtaacacctatatcagtaaaaagacagttgtagcccattttacataattgagaaacagaaagcaagttgtaatctaaagaatctacaagagaacattggaaatagaatggtcaggtgaatatagcaatttaccaagtcctttgaccaaaccttgatttccatccccaaatgtgatagctccgtggggatcttcgtttttctcatacgaggagaacatacttttctccnctgtcatgtnggttgtgcacccgctatcgattatcgaacttgaaccaccggatgcataaacctacannaacaatttagtc

SEQ ID NO: 48246 - DNA, 293 bp, Zea mays
agcttactcctccctgagaaagtgattaggatataagctctcaaccttctcctaaatgatttctgtggttgaaatgcccaacacaaataattggactaactagtttgctctatagtatatgttatacaggtgccaaaggttcaactcaaagccaatacaaagactaaaaaggtgttaataataaatgagccaaagaaaccgaagtgttctctggtctggcgcatcggactgttcagtgtgccaccgcacattgttccgtgcaccaacgaacaacaacttccaactctttatcc

SEQ ID NO: 48247 - DNA, 319 bp, Zea mays
ctcagcttggctgtggtaattctcacagcacaacatgtgtctggtttgaatgttgtggaacttcacacctaccatgtgtttatagtgctgcggcgggacagtaatccctagtgccccacccctgaacagttcccgacccgtgaatgtggaccactcacgcttgtagggaatcgcagatggcgaccccaccttctcttaaatatttatcgttttcggatcgagctcgggaaggtgtttctgacatccgcttctcaaccttgagatttttacggatcagctcgtactaaaacgatctacccggtaaggctactgtggggct

SEQ ID NO: 48248 - DNA, 399 bp, Zea mays
  unsure (1)..(399): unsure at all n locations
tccctacatgtgcttagctgttatgccacaaccagcccatgcgagtcttagctattaagcatgcatctagaccggcctcctctnttgcaaaatcaactaaataaagtttgccgtctaatacacccttaaaagctagtgaaccatcacttcttctaaagacagacacatctacatttgtaaaaagacaattatatcccatattgcatagttggctaacagatagcaaattgtagccaagagactcaactaaaaacacattatagatagagtgctcattagaaattgcaattttacctaacccttttaccttgccttgattcccatcaccgaatataattgaatcttgggaatcgctattcttgacataggaggtgaacatcttcttctcccccgtcatat

SEQ ID NO: 48249 - DNA, 270 bp, Zea mays
  unsure (1)..(270): unsure at all n locations
tcatcaattgatcttcttttttagagtaattgccaagtatttcattgcacattgcttcaatcgtatctagccactcttggcaaggtgctttanagaactttttaaacttgaaatagtaaggtaaacgtacgagttcaccttctttcttttcccctgtagcttcggcatttcccattctttcaaactgggaaaaactttgaatgctaaaaactcttgaaccaggtcccttgtgctgatatgctctgcaataattctgaattcactcattgc

SEQ ID NO: 48250 - DNA, 464 bp, Zea mays
  unsure (1)..(464): unsure at all n locations
ttaagtcacctgcngcatgcaagcttctaaagggagaccacgtgatagggttatcttatgttaaattcgaataagatagaccttgtgcagcatgtcaagcaggtaaacaggtgggaggagcacatcacggcaagaatgtgatgaccacatcaaggcccctggagctgctacatatggacctcttcggacccgtcgcctatctaagcatagggggaagtaagtatggtttagttattgtggatgacttttctcgcttcacttgggtattctttttgcaggataagtctgagacccaaggaaccctcaagcgcttcctaaggagagctcaaaacgagtttgagctcaaggtgaagaagataaggagtgacaacgggtccgagttcaaaaaccttcaagtagaggagtaccttgaggaggaanggatcaagcacgaagtctccgctccctacacaccacagcaaaat

SEQ ID NO: 48251 - DNA, 465 bp, Zea mays
  unsure (1)..(465): unsure at all n locations
tncgcctgcacgttgaggctatatagatcttgtgtgtcagggcgcaagaagatcgctccagcagcaagtattagtagctagatccgctatgttcctgcgcccacatgtcggggctcagtactcttgtacatgtccccctttagctataagaggggaggcatgcgacattacaacacaagctcaatctttatgcttagacccaagtcatccaagacaattcaagctctcaagcaatataacacacagtggagtatggtattacgctccggtggcccgaaccactctaaactcttgcgtgttcttatgttcattccttcatctcgcaacaagcaaaacgcttaggcccctcctcatcttaggatgtacggtgggtgcactccaccacccggccggagattcctctcnacatttggcgcccagtaggggcctatgctntacgttnttgcttgttttcgctcccatgat

SEQ ID NO: 48252 - DNA, 407 bp, Zea mays
  unsure (1)..(407): unsure at all n locations
agcttaatgcccctaannaatgtctaattgttaatggcttatctcccatggttcaggataatgagggctatattttatatcctgctaattatcctgagcacaaaattaggagaattcatgctaaaaaatctcattctatatctcaccatgcttttatatataagaatgaggcatctagctctagacattctacacatgttaaaatgcctaaaaataaaactcccgctgcatcaaatgagcctaatatttcatttaagacttttgacgcttcttatgtgctcactaacaaatcaggcaaagtagttgacaaatatgttgggggcaaacacaaggggtcaaagacttgtgtttgggtacccaaggtgcttgtttctaacgtgaaaggacccaagactgtttgggtacct

SEQ ID NO: 48253 - DNA, 468 bp, Zea mays
  unsure (1)..(468): unsure at all n locations
actaagcttgtacagcagggtaatcctncttgtaacagcgtggaggctggttctacttgccggcatgttgccatactcttgggcttgtggctggccatgggctttgacacccataacagtccgataagaagtgcatacagaaagccaagcacaccttaagattatttgcagaactagctttcgggagtaagcatgatattttttttctaaaaaagacatataatattatagtcaagcctgggaaactaatacccatgtaaagacacataaggaagcttatgcttgttactgtacgattggagaaacanagccacaaatatctaatgtagaactattaataaatgctcaaaagattgcaaaaacaatacatgtgtcctgcattttcgtgaaacanagtaatagtatcaaactggctatatattcaaaatctttgagaatgtcatgaaatatgataaaatctgactctga

SEQ ID NO: 48254 - DNA, 445 bp, Zea mays
  unsure (1)..(445): unsure at all n locations
agctntggaatcaaaaaacacaaagcgattagattgttctccacataatgagattgcttcagaataatcccattctcaccctttattagttttatgtttaatataacagatgcctctcccaaatccttcataccaaaattttgagataaaaatgatttcacatcatttatcacatcaatactagtcccaaatattagtatgtcatccacatacaagcacaatatcactcccttaccaacaacaaaccaatagtacacacaagtgtcagcttcgtttaccacaaaacctactgacgtcaaagttcaatcgaacttctcatgccattggcttggctcctgcttgaggccatataaggattttcttagtctacacactatgttctcatgtccatgtatcacaaatccatctggccccttcatatagatcttcccatcaagctcaccat

SEQ ID NO: 48255 - DNA, 423 bp, Zea mays
  unsure (1)..(423): unsure at all n locations
tgcttacttggtaagatgaccaaggcgcctttcacgggtttactggagaggacattanatntattggaactcatacatactgatgtgtgcggaccaatgagtacgacagctaggggaggattccaatacttcataaccttcactgatgaatttagtagatatgggtatgtctacttaatgaaacacaagtctgaatccttagaaaagttcatagagtttcaaaatgaagtagaaaatcagtgtggcaagaaaattaaagcactctgatcagatcgtggaggtgaatatttgagtcatgagtttagcaatcatctaaagagttgtggaattgttccacagcttacgccgtctggaacgcctcagaggaatggcgtgactgagcgacgtaatcggactttattggatatggttcgatcaatgatg

SEQ ID NO: 48256 - DNA, 440 bp, Zea mays
  unsure (1)..(440): unsure at all n locations
agctntatgcattggagcagaatcctttgagttcttgtaaaagaattggaagagctgggcagcgcctaagtgtaagacctttgtttggctggccataaataacaaatgttggacagcggacagacttaaaaaaggggacttcagcatcctgaattttgtgttctatgtgaccaggaagacgaaactgtgcagcatattctatctaattgcgtcttcacaagacagttttggcataagattttagcccccattggtctctcttctgtgggtcctaagagaagagattcaatttttgctgaatggtggagaaaggcttcaaccaagattcctaagagcaaaaaaaagggggttaatagtatgataatccttggggcttggagtatttggaagcaacgaaacaggtgtgtttntgaaggagctcgaccctgccttaatacctt

SEQ ID NO: 48257 - DNA, 411 bp, Zea mays
  unsure (1)..(411): unsure at all n locations
atagcaagaactttactggaatactaccccacttaaaaagaatgagggcagaactctagaatcttggngaatttgacttcctgaagtacctcataacaagggtgttatggggccttcttctattggtgcaacttgagcaagctaccgagagatgactgacacagggttgatcctgggagaaccatcttcttatcttctggtcactatcttcttttcactgaccctttctttctctgtgctctttccactagaggattctatcacagagtattaccatcatacagaggaggaaaccatggactatgaaccatgtagaacagtcttcaacccaagaatcaccaagcattgtgatcttacgggcgagggaatggaaaatggaataacttgctatttggcagaagcggttttatc

SEQ ID NO: 48258 - DNA, 390 bp, Zea mays
tgagaagaggtcactacagatgagctgcgatatgaagttatctcagtctccagacaaagaatatgaacaaaaatgcacagaaacttctatcgatatcatgaagacaactcgatcaagtaacttatcaagtcatgcttgctttggctggggtgatatcggccatcttgttaatggttgtcctaagaaggatgtagagatcaataaggtccaaaagaaaagacaacaccctcaaacccatgcatcaacaaagaataaacaacggaaagagaccacaggaaagataagttatgcagtgacaggaaccattccatatgacgatgcagtaatttttggaacactagtcattcacacaactatcgccaccgtgctggatgatcctcgacaacacat

SEQ ID NO: 48259 - DNA, 375 bp, Zea mays
catcaactacagaccataccagtaacctggcctttcgcatgctggggactggatatgattggacctttcaagagagctcaagggggatacactcatgtattggtggcgattgactaatacactaaatggatagagttcaagcccattgcttctttaacctctcgctaaagccgggaattcatacaagacataatattcagattcgggataccaaacagtatcatcactgacttatgatccaacttcaccagttcagaattcttcgacttctgcgagcaaaagagcattcagatcaagtacgcatctgtagcacatccaagagccaacgggcaggttgagcgagccaacggaatgatattggaggcactcaggaaa

SEQ ID NO: 48260 - DNA, 356 bp, Zea mays
  unsure (1)..(356): unsure at all n locations
acacttgatactcaagctggacgcgtcgattggntgtctacttggtggagactcctccttcttttcttccgacgccttgaatgcgacgggttgagcttctgatgtagatggatcattaagctcgttgaacttccttgagccttcgatcatgcactcaaaacttacaagatgcccgattacttactcaagggtcatattagtatatctacgattaccacgaattaattgaacttgagtggggttaacgaaaatgagagatcttagaataaccttaaccatttcgtggtcgtcccacttgacgctcccgaggttgcgcacttggttcaccaaagtcttgagccggttgtacatgtgtt

SEQ ID NO: 48261 - DNA, 432 bp, Zea mays
  unsure (1)..(432): unsure at all n locations
agctgtgtctcgggcagactaatacctgaatattattacacacaatgggagnggagagatagcgtgaggagcatgtaccctctagggcaagaggctggatggttgtgtatctgtgctctcggttggcgtgaacctgatctggtcttaacaacctcggtggcgagttgacatatgcaagggttaattgctacatatgtcatgtgatcggagatccccagctgggtattaatcgatttggatcgctgttacttctcagacatgaagacttggtcactgacctacacgtagcaatccagtgaagaaaaagggtgataaaagacggctagtataggccaagtgcttgaactatggtagaaagaactctagatgcangtaactttacttaacctaacaagtaaaactggattttaaggatccactattagaagcatt

SEQ ID NO: 48262 - DNA, 455 bp, Zea mays
  unsure (1)..(455): unsure at all n locations
tgagatcgagcgcacatgcaaacactaaacataacatcgggcctatatgcagtaatataaaggtaactaccaattgtggagcgagtaagttcttgatcaaccataggacctccttcatctaagtctagatgaccatctgttgccataagagtctngataggctttgcattttctaagccaaacttcttgagaatgtccttcaaatattctgattgacttataaaaattccatctttcaatcgtttgatttgaagaccaagaagaagctcaattctcctatcatagacatttcaaattcttttgacatcatttttccaaattcctcacaaaataattcattagtagatccacaaataatatcatcaacataaatctgacaaataaataagtctttgccaattcttttagtgaatagagtagtgtcgacctttccaattttaaagtctttggaaagc

SEQ ID NO: 48263 - DNA, 433 bp, Zea mays
  unsure (1)..(433): unsure at all n locations
ctgcagcttgctttggctatcgcctttttatccatatttgatgatagcctgagtagcaatccaataagctcatgaggtccaaagtagctgttgcatccacaagggaatctattcttggtaatgataattcatccttcagacatgccttgttgagatctgtaaagtcaatacacattctccattttctgttagctttctttaccaagatggtgttagccagccactcttggtatgtaacttatctgataacaccggcacttagaagtcttttcacttcatttcgtgcaccttcgactntatcatctgacattntctgaagcctctgctttcttggtctcaaggatgggtccacatttagtgagttcattggctgtccaagcaaaaacatctttgttgttaaacaaaaatcttagcaatgtcttttcttattcat

SEQ ID NO: 48264 - DNA, 433 bp, Zea mays
  unsure (1)..(433): unsure at all n locations
gaacactttngagtgccctgcctttgctcttcctctttgtgggttcgacatatttggacaactatccctgaagtgtcccttctacgcacatgcaaagcatcctctctttctttgctttttcctgtcaatgttaaagagaagatcctcgacttgcaggggcacacccattagattaatctaatgaatcatcctcattacctttccaatgcgtcggactgtttcttcgtccttggaggatgatgttgaggcttgatcatcatccatcgaatgttcttcttcttcactggagcttggagccttcttcttgcctttcatctttntgtattcatcacatgccaaagcatgtggctgtgaagaaattggctcctcttngtgcccattttccacgacatctcanatgtcgcaatctttcccatcacaatcgtcagggtca

SEQ ID NO: 48265 - DNA, 434 bp, Zea mays
agcttgcttttgaataaatgtaagattatgttattcgcttccgcatttctttatctccgatgctctgtaatgtctacaagatgggtgagacgttcctggtgaggtaaggaaagataccgaacttgtcaagtagttcaggggcacctacagggttgtctgatgtccgttggacaaggacaactgtaggtgggcctaattacttgggaggttccgtcacagctggtatcggagcgtagcccttcttggcagatattatgaggtatcttcaaaaggagtttcaaaagtcttacctaaaaaaaattcttttctcttcttacctaagtattctgaagagtctatcttaaagaccagataggaagagtgcaacatatagaaggttgaatcgactaaggttgattctgtaattatacatgcatcatgctaagaatcatact

SEQ ID NO: 48266 - DNA, 343 bp, Zea mays
  unsure (1)..(343): unsure at all n locations
ctactggcggagctagccgaagctcttgcttgctcataagatggctggggtgggctggccacggtggccgaagctctggcggcaatggcgggcggaattaagctcgccggagctaangggaagtggctggccggtgagggtgagtgccgagcgaantggggcgcgcctgggaaggctttatangcgcggcgcggtgcactggcggtcgtggaccggcgagtgcacgcgggcgtgcactgggaatgcgcggtgcgcgaacgggcgtgaaccgggggtgtcagccgcagtcgaacacgtgttcccgttgcctcttgccctgttcaagcgccgattgggagccaat

SEQ ID NO: 48267 - DNA, 427 bp, Zea mays
gccagcttggaaaaatctggaatgaatccgcggtaataaccagcccgtcccaggaaacttcggacttgatgtacagtggttgggggtttccacctccaaatatccgtgactttgctgggatccaccgcaatccccttggcagataatacatgtcccagaaattggatctcctccagccagaatgcgcacttactgaacttagcatataattggtgttcccttaagcgcgttaataccatccgcaagtgctgagcatgctcctcttcattcttggagtatattaagatatcgtcaatgaataccaccacaaatttgtcccacttcggcataaataccgagttcatcagatatctgaagtgggcgggagcatttgtcagtccaaaagacataaccagatattcaaataatccataccgcgtgctgaatg

SEQ ID NO: 48268 - DNA, 196 bp, Zea mays
agaatatcttcaggcgtatgtccgaagttcttacgcctgaggccaagcgccaacagggcccaatgaaattgtcattaatgccatgattaaggggcttctgcccggaccttcagcccaatactttgccaggaagcctcctcagactcttggaaaactcgcttacaagatggatgaatacatccacgctgaccatgac

SEQ ID NO: 48269 - DNA, 432 bp, Zea mays
  unsure (1)..(432): unsure at all n locations
gctggtcgatttattgctaactgtcctgataatgatagtgaccaggataaggggaacaagagggaaaagaagaagcattacaagaaggcaaagggcgaggcgcatctangcaaggagtgggactcggattgctcctcgtccgactccgacaatgaaggactcgccgccaccgccttcaacaaatcaaccctcttccccaacgagcgtcacacatgccttatggcaagagagaagaaggtatgtactcgcaactctacctatgcttcttcaagtgaggacgaatctagtgatgaggatgaagtagattattcatgtttgttcaagggcttagatagatctaagatagacanaaataatgaattaattgatgccttgaatgaaaagaatatacttttataaaagcaagaggatttgttgtatgaagagcatgat

SEQ ID NO: 48270 - DNA, 469 bp, Zea mays
  unsure (1)..(469): unsure at all n locations
agtttgacttctcttcttccttaacgaggttgatcttctttcaccttcacccttagagttgccatccatgtttaggacatatggttaagatagttgtccgtgcttgggatgggtangcccaacaaggtttactttgcttttgggataaatgggttgggcaacctataacataggctaggttgtggtggttccacagacgagttggtctaagacaccaatttagttntagtacccatctatgttaccaatattaattaacttgtttaagtaactcaattcggattagatcatgttagattaggtgggatctagattagattggtataactagataagatctatttattttaggctagatcatggttgttactgtagagtgggatangtatgccaattagaacaagataaatccataaggatgaggtagaatcttttggggtcagttagatctattaggatgacataaact

SEQ ID NO: 48271 - DNA, 455 bp, Zea mays
  unsure (1)..(455): unsure at all n locations
ggaccttaagcaccagagctgcagcttctgatctcgtgtctcggggggctctattacgtctgcaatcggactgatatgaatggaatagacgaaatcattctgccgaaacaccatcacaagacagaaaaattgcatatttatatattaacatgaaaggatgagagcgaaacacaactcaaaaagacaacaacacttgctctatgtctagtatatataaatacatntttcatgtgaaacagcaagagacgaggataaattggacccaagccagaacaacgtctacgaattggcatgacatgagcaaataaacaaaggaccgcacaaatttgcagagcttcaattctgattntactgtggatttcttccattccatagccggataaaatcttcagatagcatttgtcatgcctttcaacctctgccattctttccagctataccagatgtagagtcac

SEQ ID NO: 48272 - DNA, 388 bp, Zea mays
  unsure (1)..(388): unsure at all n locations
agcttacctaaaagcctgtatattattgaagggagagagagatcgtcagatttcgagaggcatagcagtagagtgatgtatgtttattacatacaacatgccatgagatatttatatatacgaagccttgagaaaaacgaatgatttttggagagtaaagtggtcagtccaacacgttgatganatgagtcactttacactagcaaaatacattcgtttttttaagtgacatatcatatctcatgtacgttgaggtcacattccagataaacagtaatcatatatctggtatatgatttgaattattataatatcagatgactacccggtcaacttacatttggggtgactaccgatcaccattatgaccaacccatgtgaacatcaa

SEQ ID NO: 48273 - DNA, 399 bp, Zea mays
  unsure (1)..(399): unsure at all n locations
gcaatatctccacacttggtgcaggctgtanccgggagggttcgcattatccaaacattgtgagatgcccattacccaatataatctaataatgtgtagttcgtatgatcacatatattactttttatcctcttgtggtgttttgttgtcttctaatcttgtttctcttgtgattaacagatatatatatatattaaaaatacaatccatgggtcagcaaccaagtaaagaaacaaggaacaagcgcaaggtggggcctatgttgccacctagcaaaagaccaacaacgtgtggccattgtcaatctgcaaaggttggtaaccattgcaacagtgtgtcggaagctcctccctccatagacatgttaatacttcgttnnttactcacacatggtaaata

SEQ ID NO: 48274 - DNA, 477 bp, Zea mays
  unsure (1)..(477): unsure at all n locations
tataccacactcaagcttcttgtcaaacgatgtgtgtntctaactagttgtgcgcactggataatttatctcatgcccgcatggnntgcttcccatggctagcagactattaatgtctattatgttttcttatcatgatatctatatatactttgttgcttccccgtttatgccattttcaaaggagatgctgtcgaacttttatatacgaatgttagatgtgtagtttagtatcattctggggtgtttgtggatcccggagtgttacagctggtatcaaagcatacgctatagattcttggcaatttgaagataaatttgacacacttgcacatataggaagggtatgggtacaaatatctttgatatatattaatgtctttgatgtgcatatgacaataatttcacccctccctattgctttatggcgatgtggtaagttgtttatgacctaatgcctatctctaaatcttatat

SEQ ID NO: 48275 - DNA, 264 bp, Zea mays
  unsure (1)..(264): unsure at all n locations
agcttatcaagtctactttcatatggatccggaattatttcatatctgttctgaggccgccgtaatcattgttttcttaccgagacatttcctgccttttctgcccatggtgctgcgtcaccctattatggcccaatgggtcgtgtatcaagttaggtccattaaggacgcatcctanggttgcagcacgaccccaatacccttgggggtcgccctccatggttataaacccctaaccggcaccaaaaacaacgggttttggtt

SEQ ID NO: 48276 - DNA, 450 bp, Zea mays
  unsure (1)..(450): unsure at all n locations
ngcacttacgaccaaaccgcacccgcatccatatcacatccaatggctcaacaatagtggtaaggtcaaggtaaccaagctggtacgaatntaatttgctattggttcatatcgtgatgttgttgactgtgatgttgtgcctatggatgcttgtaatattctgctaggtagaccatggcaatttgattcagattgtatgcatcatggtagatcaaatcaatattctctcatacaccatgataagaaaattattttgcttcccatgtcccctgaggctattgtgcgtgatgatgttgctaaagctaccaaagctaaaactgagaacaacaagaatattaaagctgttggtaataacaaagatgggataaaattgaaaggacattgcttgcttgcaacanaaactgatgttaatgaattaattgcttccactactattgcctacgccttgta

SEQ ID NO: 48277 - DNA, 447 bp, Zea mays
  unsure (1)..(447): unsure at all n locations
agcttgtgcgccaatggtcgactgcagagtcttatcttcttctatgcgcatcgaacagngaacagtgcactatctggtgcaccaccagactgtccagtgtgccacaaagagcacaacttttctccaacagctagatttgtgttggaggctataaatacactcccaaccgaccattctagtgtatgggagcccaagcaacataacaaggcatatagtagacatttccaagtgctcaaacacccaagtgcttaatagaatcactcggtgattagtgtaggtgctttgcgaagtgcttangttagttagaccgctttagcgcttgctctangtgaaccctagttaggtgagtgagtttagaaaaaccacacaacccnctcggctctttcacgagccgttgtaattgtaccgagtggggcaagagtcttgcgagaccgtgacaaccgcgtt

SEQ ID NO: 48278 - DNA, 309 bp, Zea mays
caccatgaaggcagactaaccgtgacatgtctaactcacctagcgatgctccggtgtatgatgtcttcacacggtatgaacatgggccaccatttgtaaagcggtccacaactacccatatggatacataacccgcccgggtacgacgtatgccgactataaaatacatccagatctcgaaccacttacattgagggatccgcaatggctgcaacaatccagcaagcctctgaagctctgctttggacctctgacagctatcacagatggccacatattctgcgatctctcttttcataccataccacc

SEQ ID NO: 48279 - DNA, 402 bp, Zea mays
  unsure (1)..(402): unsure at all n locations
atcaatctgggngctcgataatgaatgtataaatcatatttggagatagtagcaagggtggtaacaactgaatctcaactgcatattattttcaaatcttatctcttttgtgacttgtgtagccactaagggaaaaaaagcacttgaggatatacatcagttgtttgatatgaaagaaaggttcaattgaaagatgaatgaatattatcatatggtcaacaatccaaaattatgtgacgtattccctatctagttnaattggatttgattcttctatattagacactcaccatattatggattaagtcagccctttagacttcattgaacaaccatgcatattatccatgtcattcaaaatatattgtgcatganggctcaagggaaatttagtccatatta

SEQ ID NO: 48280 - DNA, 349 bp, Zea mays
gtgcttcttcacgctgagcccctgtcgtcctatctacaatgaagtctgctaacgcttgggattgcaatgaggaattatgcacgcagtcaatggtgaattcattaagttccgcaacccaatttccgatccttcctgtcgcatctctggtcctcattatgtctttcaggggttgtgatgaacgcactatcgtatgatatgctcgaaagtaatgtcgaagctatctggaggccatcaatacagcatacagtaccttctccaattatgtgtaattattctttgataggctcagcacttcggagatgaagtataccggcgattgcctttttacttggccatcttgcttctcttg

SEQ ID NO: 48281 - DNA, 441 bp, Zea mays
  unsure (1)..(441): unsure at all n locations
gctgatggctcgccatgctctntttgatggtgtagcttggtgtggtcatgggatcaccggaggtgggctccaattttgatcacttgctcttgattgctatatggtatcaaaaacaaggcaacacaacttaaaaaattgcaaccttctcccttcaaatactccttctccgaatggcaatttgagggagaagatataagataggaataaatatgtgacaataattataaaaaaggaatgaaaaagggtaaaacatgttactcatcttcatgcctcagcacttatcatttcatcttttgcaatataacgtgtgattacaaacgtaccttcggccttaaacaagggatagtgcgaatgtacttcgaagattgtgctaaacgaagctgcggttcctcgaaaggtgaatttatgctaaacaagggatagtgtgaatctaattatatg

SEQ ID NO: 48282 - DNA, 421 bp, Zea mays
  unsure (1)..(421): unsure at all n locations
gccttctcacatttcttgtgcccataaatatactntaattttcataattggctcaagtcaaaattttaaacttttcattccctttttcttatattcttgagttttggtcatggggctcacttanggcttttaatttgggttgcacattcttatnctttaaaagtctcaattgttttgattatgacacttttaagtatatacttggtgaattcttcattacttaagttattttgatgctcatgcttacattggctcacataaaataatggttcttggtttggcatttgagagaaaccctangtgacactggggtgtcacatcgtcttcatctcagacgcgaggtcgatgctcgacgtgccccccattgtggcgccggcgtcgtcgactcgctcgacagccgacgaggtgccgccttctactt

SEQ ID NO: 48283 - DNA, 431 bp, Zea mays
gttttgtcactggaacttattctttttttttcacaacgaacatgcccaatccacaactttgggtgcaaaactcatgtttggggtggtttcgcgcaatttcgttgtcgtacgtcacccattcccaaaacgggtgtcggggtgcatataaagcacgagtttttgccaccggaaccaattcttcgtttttcgcaacaaacatgcccaatgcactactttaggtccaaaactcatgtttggggtggttaagcactatatcgttgccgcacgtcacccattccgaaaacgggtgtcggggtgcatacaaagaacgagtttttgccaccagaaccattcctttgtttttctcaacgaacatgcccaatccactactttaggtccaaaactcatggtttgggtggtttcgcgcaatttctttgccgcacgtcacccat

SEQ ID NO: 48284 - DNA, 477 bp, Zea mays
  unsure (1)..(477): unsure at all n locations
tagtccccaattntgcccacaaagtcctccataaatgactattaaatttagcatcacgatcagaaacgattgtgttgggcacaccatgcaagcgaacaatttcacgaaagaacaaatcagcaatatgagtagcatcgtcagttttatgacatggtatgaaatgtgccatcttataaaatctatcaacaaccacaaacacactatcacgtcccttcctagtcctaggcaatcccagcacataatccatagaaatatcttcccaaggagcactatgaacgggtagaggctaatacaaaccgtgtggatttaaccgtgacttcgccttttgacatgtcgtgcaacgagcaaccaatctcaccacatctcttctcatcttgggccacaagaaatgaccagcaagtatgtcctccgttntctttgctctanaatgtcccattaagccacctccatgtgcttcctgtaacaacaacatacgaa

SEQ ID NO: 48285 - DNA, 434 bp, Zea mays
  unsure (1)..(434): unsure at all n locations
agcttgtaagagacacctaantatgttgtgtatttcgcggtgtcttagngacccgtgagattaagaagaagcactcaaccggtctaagtgaccgattgagagagggaaagggttgaaatatacctggcctttgtggcctcttcaacggggactaggttctttggaatcgaacctcggtaaaacaaatcaccgtgttcactcgtcaatcacttgatttgtttttccctctctaaaagttcccttgctcatattgatntgagtttgctcccaaaggtcatccgcattgattgagcaactctaagcaaggagaactatcttccgcactccaatntaattctaacgctaaccccagccttagtgcaagtttaagtttataaatttcaggtttcgcctattcacccccccctctaggcgactatcaatnggtatcggag

SEQ ID NO: 48286 - DNA, 476 bp, Zea mays
ttgtcctgaccatgctcttgtatgctcatgatctgattcctaagatatctggccacatatttcacttggagaacattgtcaaatcatgtttttgaggaccttccgaagccgaaggcccccaacagtaacccctcgcaatattaatttattggaatgatgaatttatattgcgacatggacgaaggtcttaagccgaatggtcgaaaaacaccttccctttgctagaatagcaacagtcactgacaagcgggacccttcagttctcagcacgctaggcgtataaataagaactcaccacgggttcatttggcacgctttcttgccatctgttctttcttactcaatttttagctcttgtgcaccaacatttggttggctttctaaatttttaagcttcgcgcttgagagcaccttctcagcattttcgaagatgtctgaagacaagaaaactgtcgctgagtcgaagctcagccttt

SEQ ID NO: 48287 - DNA, 362 bp, Zea mays
  unsure (1)..(362): unsure at all n locations
cgccaggggcttctgnggaaggtttggagaccagccaagaaaaatatattacctattctgtggtgaagacaagggccatactaccaggatgtgccatgttaccatttagaagcagaaggaaatagcggaagcagcagcgcaacagagtcagccgaagcaggtcatgcatactgcttcgtatcactcaccttatattccagaatatgtaggcaaccaccctgcagcttctgttgcttcggcgagccaaccccaagcatcttggcagcaacctccaccgccaccgccgacccagcgaggacaacagccagaagggaatcagcacaatcatcttcagagggatttcagagaggagtccgaagctc

SEQ ID NO: 48288 - DNA, 256 bp, Zea mays
  unsure (1)..(256): unsure at all n locations
aaaacgacatattattcccttggcgccataaagctactgggaaacgtcacatagataaagctcgtattcttcattgganggctccctcttggatcaccttgctcttcacctgtgaggggggccgtatatatcgcacagagtgagctcacaacagatcatagctcaacaagttgtggggaataatgtgcatgaactcaccacaggtgggagttcatgtgaagtgaatgctgatcaatcaataacggtaaacgtgaca

SEQ ID NO: 48289 - DNA, 425 bp, Zea mays
  unsure (1)..(425): unsure at all n locations
gcagcttctaaaggattatacattttgggactattaaatgttcattntgacaaagacagggtgtgtagcgcatgtcaagcanggaagcaagttggtacccatcatccacacaagaacatcatgacgaccgacaggccgcttaagctactccacatggatttattcggcccgatagcttatataagcatcggcgggagtaagtattgtcttgtaattgtggatgactattcttgcttcacttgggtattcttttataggaaaaatctcagacccaagaaaccttaaagggattcttgagacaagctcaaaatgagttcggattaaggatcaagaaaataagaagcgacaacgggatggagttcaagaactctcanattgaaggctttcttgaggaggaggaggaggagggcatcaagcatgagttc

SEQ ID NO: 48290 - DNA, 334 bp, Zea mays
tacttaagctttatctcttgaagaaatgctttatattgcacgttttggaaatgccagcgcttattacgctgtgctggcttatatatggaccacaagcgctggttattaatgcatacccacatttccaaatctatacgatgaaatgtctttaaaaattgggtcatcagagtcagttgactgagaatatatatttcttatagaaagttctattgaaagcaccaatacctaaataatgaggtttattctttgaaggttgccttaccttcttgacttggtggttaataacagttctcttttcaatccgaaaatatgacgacgactcaactaaaatatt

SEQ ID NO: 48291 - DNA, 391 bp, Zea mays
ctatggccttgacactcggcaaagttacaaaaatacatctttttatttgtttttgttggtccatccatccaaacaaacacaatatatatcacataatcaaatatatatcacataatcatcacatatacatcacggatatcacagaatcatcacagatatcacagaatcatcacatacatcaaacacatgacatagctcacaaagatcacatgtttcttcacaaaggtcacatgtttcttcacaaagtcacaagtaccacaaaatacttcacaacactaacaagtactcaaataaataagtccataaacatccaataaattacataaacatgtctcacaaccaagtttagaagaacatcaacgaggtgggtggctagactcgttcgatgatg

SEQ ID NO: 48292 - DNA, 414 bp, Zea mays
  unsure (1)..(414): unsure at all n locations
tcttactataacaaagaaaggccagctccagagctctcacactctangatgggagtaccttccaagacttgaccaaaagtttctctctttcatctcaatttaacattttccgaaacgtagctagactgaggcaaagcaagagtgcagcttgaaccgatcccaggcgacatcttttttaagccgatgttgggcgtatcagctatctcacctggagcatgaggaaagaaaacggtctcgatagcggacaaagctcttccggtttagcaagtttctcttggactgtgtgttcttccaacagacgagacgtgaggagaaatggagacttctccccatatttggtctaatccaacttttctttaaagtctctagcgggtgcaagcggcttccgcactgagtcgggtctgtagtctgtca

SEQ ID NO: 48293 - DNA, 372 bp, Zea mays
  unsure (1)..(372): unsure at all n locations
ctgcagcttgtaatagtcgttagccaactctgattattttatgtatactgcaagtccaaccagtaattagctctaattactcctgtgacaaacatgcccttgagaaacgaagaagcatcgtaactcactcctgtgataacacgttgagtcctacacatacgagctgtgacttaaattactaaagacatcacgctggcaactatcacgttgattatcactgatactacaatagagctctgtctgtaccaactatagattatataatctcaatgatgattagagtatataatctacactattgctctggatgaatagctagatgctgcactactacagcaaacctctgtacaagcggntgtgtagcctctacac

SEQ ID NO: 48294 - DNA, 351 bp, Zea mays
cccccatctacctctaatgtgtcatcaacatcactcctacttgacaaatgaaaaatgctgtatacaacaatatgacctttatacatgcttaaataagacatatcccaaacgctacatccattacctgtacttttaggctatcaaggatgtgacgactccttaacaaggtcatcatgaacaaaatgggcccactatctacaacgcttgaccataatctatgtcactatatggaaatatattctcttgtattgctattacagaaaatgagtgtgatgggctttctctatatggaaagcaactgaacgtattataacaacttataatccatttatgtcacgtcctatttaaaat

SEQ ID NO: 48295 - DNA, 433 bp, Zea mays
  unsure (1)..(433): unsure at all n locations
gcttgcctcgggcatactaataccataatattattattcgcaatgggagtggagagatggcgagagtagcgtgtaccctccgtggcaagaggctggacggtggtgtatctgtgctctcggttggcgtgaacctgatctggtcttaagaaccccggtggcgagttgacatatgcaagggttaagtgctacatatgtcatgtgattggagatcctcagctgagtataatcgattcggatcgccgtaacttcgcggacatgaagacttggtcactaacttacacgtagcaatccagtaaagatgaagggttgttaagaaattggctagtacaagtcaagtgattgaactatggtagaaagaactctagttacaggtaattntacttaacctgacaaataaaactggatttttaaggatccactattagtaagcatt

SEQ ID NO: 48296 - DNA, 269 bp, Zea mays
cccaccggcgcacgtggaccgggtaaatcactaagcctttttcgattcatgcacagatagcctctacgtcaccccaggaagctcaccgtgccgttggattggactaggtcgccgtcgtttggccggcacacccgccgccgacgaggacacccgcctgcgcacgtggaccgagcgattccggccatcgccgccagcgagccgtacgtcgttgtgaccgccagaacctccccgagctaaccctacccctcgccggacttttctcgtcgccg

SEQ ID NO: 48297 - DNA, 448 bp, Zea mays
  unsure (1)..(448): unsure at all n locations
tgcaagcttgcttcattgccgagtgccanggccacaacacttgttataaaatctctaccggngcctaagtgttccttctctgctgagtgctatagccctgacactcggcaaagcacctctttgccgagtgttacactcagcaaagtgaccagtatacatcttttttatttgttttttctattccatccaaacaaataaaagatatcacatgtatatcacagatatcacataatcatcacagatatcacatttgccgagtgcccgatagaaagcactcgacaaagcgccgagcactcggtaaagagccgaattccggtagtgctagccaaaaaacccggtccatattcccagcactattcatgtgtaatacgtggacatcgtcatgtaagcatctttaaaatgtgtngacatttctaanaagagagagatacgaatcgggtcantttat

SEQ ID NO: 48298 - DNA, 440 bp, Zea mays
  unsure (1)..(440): unsure at all n locations
tgactccctttatcatcattctgagtggaattgtgaattgacctgacatgcctcgggtaaaaccttccttcgaagcccctggttatttcagaaaacctgaaagccttctcccttctttgacgaaaatcattgtcagctcgaatgtattcgtccatcttctggagcagctattccagcgtttgtgggggcttcctggcaaaatactgtgctgacggccctggccgaagccccttgatcatagcctcaatgacaatctcattgggcactgttggcgcctgtgcccttaatcgtagaaaccttcggacatatgcctgaaggtattcttcatgatcctgngtgcattggaagagagcctgagcagtgaccggctttgtctgaaacccttgaaagctagtacagcaagtcttcacttctgcatgaggaatcgtcctggcgaagga

SEQ ID NO: 48299 - DNA, 434 bp, Zea mays
  unsure (1)..(434): unsure at all n locations
agcttgagcaaggctcacggtctcaccaggaagctatctgttggcttgaatcgaacggagggggactggagaggggttggccacggcggtggctcttggtcggcactggcgggctgcggggaggtcgccggaggcaatggctggctcgggcgagtccggcgaggtacggaggaagcaatggggacggcaaccgagcgctggggcgggttttatatgcgcggacgcggtcggggcgccggctcaaccgtntggcgcgacgcgggcacgcggggcgcgcgcgggcgtgccctggcgagctcagagcgcgtcgaacacgtggcgcgttgcttctgcccgtgttcttcgctctgctgagcggccaggcgtacgaatcttgccctaccgcccgtgggagatctcttccccgcacctagggctacctagttcatgtaagt

SEQ ID NO: 48300 - DNA, 348 bp, Zea mays
agaaggactgcttctgcaggagaacttccgaacgtgaagacttgttctgttcacggtgtcgctttatccgagcgcaagttacttatctcagaacgtgatgagtgaggtatccgtatcccggaggcgtaggagtccctctgctcggccagccttggctgcttacgtgtactccgtcgtttccaggatccgcttttcgaagtagtcaagaagcacgacagaaatcctgctaaaaagagatcctttttcgaggaaaaattcgacgcagagggggtctccccccttttagcccccgagggagggtcgggcttttctgaggctatgccgttccttccttgacactatgatttg

SEQ ID NO: 48301 - DNA, 402 bp, Zea mays
atgcagcttataaataaaatatacatattgtgtatttgcttatgccgcgcaatggcctctggaagctgagcattacattcaagcatatcatataattgtgccttcggtccagcctttgagagacataatgaggaatagataagctactgcgaggatcggaaaatgggccatcaagctcaatgaattgtctattgactatgtacacaggtcctcaaatcagtcctaggacgtaacggatttcatcgctgattggacgcccagggctcatgaagaattaacaaaacaccgccaagcctggatagtcttcttggaagggttctggggaaccatcagcgcaagagccgctgctgtcctaatagcgccctctataagtacaacatgctttgtggcaagactggattt

SEQ ID NO: 48302 - DNA, 416 bp, Zea mays
  unsure (1)..(416): unsure at all n locations
tttttctggttcttctccacttgacttcgactcttgggaggatcttcccgtgacttagacaaacacatttagagtataattcaattggctgagtcccaaaagattacctcttttcatatattctcccagcttttgtgttcgaggttgatgttggactctaaaactccaagtctccaagacttgatccagattgttatctatgagctccaacaccctgcataggtcacacagaacatatcanaacacagaaacaatctgaaagggaaatagggtttaaccttttcctataaataattttggtggttgaatgcccaacacaaataattggactaactagtttgctctagaatgtatattctacaggtgcataaaggttcaacacaaaccaataaaagatcaaagttagggttcaaatg

SEQ ID NO: 48303 - DNA, 479 bp, Zea mays
  unsure (1)..(479): unsure at all n locations
gatactaagcctgcgaagattcttcatcccaacgtgggcaagtcggcggtgctagagccaacccatgttagtcttagcaattaagcaagtatcgagttcagctctattaaaatcaactaagtatagctgaccctctaatactcccttaaatgctattgaatcatcacttcttctaaagacagtaacacctatatccgtaaaaagacagttgtaacccattttacataattgagaaacataaagcaaattgtaatctaaagaatctacaagaaaaacattggaaatagaatggtcaggtgatatagcaattttaccaagtcctttgaccaaaccttgatttccatccncgaatgtgatagctcgttggtgtcatggtttttctcataggaggagaacatccttttctccccagtcatgtggtttgtacaccagctatcaattatccaacttgagcccncggatgcataaacatacaaaac

SEQ ID NO: 48304 - DNA, 400 bp, Zea mays
gcttggaacttctccgaggcatgaaagctgttatctatcattccttcgaaagacaacattaagggatggcgcctcgagtggtttactatggaaagtcataacaagtctctttctactcgatcagggagatagcccgacgttcaaacgcctagctgaacagaagtccccacagattcgaagcttgttgagtccagggtgctacttgcagagatatgtgtattgaaggatagaggcttgactgctaaaactgttgttgtcgactttgttttcaagaatattcagcctttgaagggcagagtctaccctgcttacctatacactgatgttgatgatcccactcgtattaccaacaagcgaatatctgaggaggatgtgttgagtcggattgattttatgctga

SEQ ID NO: 48305 - DNA, 449 bp, Zea mays
  unsure (1)..(449): unsure at all n locations
tattcgctntgccagagaagaaatcactccagaactcaaaaaagatgaaggggtggttntcaagagcttttttagagcgggattgcggntccccttgaatgagatgattggggaagttttagataattatgaaatatatcttcatcagctgacccttagcgctatcgttaggctcagcgtcttcatctgggcccttcgaagccaaggagtggacccgaatgctgaagctttctgccgagtgcatgagctgcattaccagacgaaggccagagaagacgggctgcatganaactttggctgttataacttcgcatatcgcaaggatatgaaggcctcggtgcttagctaccacaccaagtggccaaccggttggaaaagtgagtggttctatgtctangccgatgagaagaagagggagaagttgataatgctagtgatgagcccgctga

SEQ ID NO: 48306 - DNA, 426 bp, Zea mays
agcttgatgtagcaacctcatgtgatgatttgattcaagtatagcaaactagtctacatgctgaattgactgaaaaagttgaagtcctgactttagacaaccaaaaattgaagaattatttgactgatgcaactactagaggaaaagttgctattgagaacaatgatttcaacaatgagttggcagtggataatcaaaggcttaagaatgaggtcaagaaactaaaaagtgaaaatgaacatcttgcaacaagtgtgcaaaagttcaacaagggtcaatacctccaaaatgagctgcttatgaacactggtatgaaaaataacaagagtggtattggatacaatgcttttgtgcaaaagaaagctatcactcaatacaagccaatgcagactcacaagcctatcaaatgctttgagtgtggaaatg

SEQ ID NO: 48307 - DNA, 440 bp, Zea mays
  unsure (1)..(440): unsure at all n locations
tacgaaatcccatactcttagctatcttccggcaaacagatatttttttgttatccgggagacagtacaggaaatcatcttcgttagtaccattgaacactaaggcccccttcggatatttcagtctttgggcgtagtgtttggcctccaagatttcttcttcagataatttcttccccgaagcatgtcaaacaatgtaatcaatatattcagctaaggctttggggacaggagatntttgcttttctgccatgtcttgctccgtcgtcttgccggtatctgaaatttgctgacccaccttatcttcaggcacggcggccttcgtctcagtaggcgctgaaggcccagcttcggcttcgacttggtttttggcagcttccgtagctctcttggtagaagcaggagttaatgccttcgtggtctctatgacaacgtctatg

SEQ ID NO: 48308 - DNA, 431 bp, Zea mays
  unsure (1)..(431): unsure at all n locations
agctttcatccttcttcttcacaaatagcgctggacatctttaatgcgaagtgctggggcgaatgaatcccttatccagcaactcttgcaactgcttcttcaactctgccaactcagcgggtggcattcggtagggcctcttggaaattggggtcgttcccggttgcaactcgatggcgaattcaatatcccggtccggtggcattcccggcaattcatcaggaaagacatctgcatactcacagaccactatgatcttcttcaggggtaacttcgtcatagagaaagcacatgactgagaagaaccctgactaggcagaatcaaagtgaaattcccgcagaaaggagaattaatttccacggtacgactggctacatcaagcacaacttggtgcaaggtcatccaattngcccctagaataatgtccaca

SEQ ID NO: 48309 - DNA, 480 bp, Zea mays
  unsure (1)..(480): unsure at all n locations
tctanagggagagcacattntgtgactaaccaatgttcattttgataaagacagggtttgtagcgcatgtcaagcagggaagcaagttggtgttcatcatccacacaagaacatcatgacgactgacaggccgcttgagctactccacatggacctattcggcccgatcgcttacataagcatcggcgggagtaagtattgtctagttattgtggataattattctcgcttcacttgggtattctttttgcaggataaatcacaaacccaagagactttcaagagattcttgagatgggctcaaaatgagtttggcttgaggatcaagaaaataagaagcgacgacaggacggagttcaagaactcacaaatagaaggcttccttgaggagganggcatcaagcatgagttctcttcttcctacaccccacaacanaatggtgtagtggagaggaagaatagaactctattggacatggg

SEQ ID NO: 48310 - DNA, 397 bp, Zea mays
  unsure (1)..(397): unsure at all n locations
gctngcatatatatggtggtgcctcccaaaagtatctccttctgctatattcacattatcctcagnggcattatgttccagaggtacatatccagactgaatatcatctgcttcagcaccaattatacttgcagcccttccaaatgcagcctacaagagttcttgcatgctatccaatcttccatcttggcggtctcgtattggacctgaagtagtcaaatttgcactaatatttggtacatcagcaagttccatagatggtctgtcatatttttcaccatgatgaacctagatagtataacctttaataataccatcatatctcagatgtgtccggacctcatcacaactgtggttgtatctatttttaccagttatgcatagacaaagtattctc

SEQ ID NO: 48311 - DNA, 441 bp, Zea mays
  unsure (1)..(441): unsure at all n locations
cctgcngcatgcaagctttaaatatttggtacgtggttcttttaaccagcaacgcgtagggggggggggcgtgttttantttngtcgatcccccacacaacacacttaaatgcctaacaatgttgctaagtgtcgaacacgagactcactatgacgaacaaactttaattcgggacaaagaaccgccatcatgggtcctccctaggtcaaaatacctttgagaccacgccaatggatataatatgggctctactttgtgttgaatatatggacaaggcctgagaaattcctatgcataaatatgatcataatagatgctggcgtgattaacacgataggtcatgccatagtgaataatatatgaggaataggggagtgacttgatcatatactattagtccatatatgaatatatgagaatcaaactagagcttgattgat

SEQ ID NO: 48312 - DNA, 327 bp, Zea mays
tgtcacgcccgactacccgaatgtacacatataagttttgcaggtccaaacaaatccaagtgaatcatataaacattcaatggttagagtatgtgctttacgatgtgcttaagctagttttatctctgctatatcatctagtgtatgttaatatctaattattaaaagagatattagacacacgcaacttcttggaggatgtctgcatgtagcattgtagcgagtggggcttatacactagcgatattacaccaattgtgttatggtgtggccaacaccgtataccggaaagaacaatacccgtgacatttcaattcaaagcttgat

SEQ ID NO: 48313 - DNA, 429 bp, Zea mays
cttcttagggagaacacacctgtgactatctaatgctcattgcgagaaagacaggattcgtatcgcatgtcacgcagggaagcaagttggtgttcatcatccacacaagaacatcatggcgactgacaggccactcgagctcctacacatggacctattctgcccgatagcttacataagcatcgacgggagtaagtactgtctagttattggggatgattattcttgcttcacttgggtgttctttttgcaggaaaaatctcatacccaagagaccttaaagggattcttgagacgggctcaaaataagttcggcttaaggatcaagaatattagaagcgacaacgggacggagttcaagaactcacaaatcgaaggctttcttgaggaggagggcatcaagcatgaagtctcttctcctacccccac

SEQ ID NO: 48314 - DNA, 464 bp, Zea mays
  unsure (1)..(464): unsure at all n locations
tgtgaaggttcttcatccccacatgtgctaagcggttatgttcacaccagcccatgatagtcttagcaattaagcatgcatctagaccggcctcctcttttgcaaaatcaactaaatagattttgccgtctaatacacccttaaaagctaatgaaccatcacttcttctaaagacagacacatctacatttgtgaatagacaattatatcccatattacataattgacttacggataacaaattatatccaagcgactcaactaagaatacattaganatagagtgctcatttgagattgcaatcttgcctaagcctttaaccttgccttgattcccgtcaccgaatatgatcgaatcttgngaatctttattcttgacgtaggaggtgaacatcttcttcttccccgtcatggtggttgtgcatccgctgtcgataatccagcttgatcccncggatgcataa

SEQ ID NO: 48315 - DNA, 423 bp, Zea mays
  unsure (1)..(423): unsure at all n locations
agcttgaggagaagacggggnntgttttgttgttggangaagcgtgcagnttgttgtactagcatataattgtcctgaataaatctgccttttatgaaagcactttgataaggagagaccatctcatgcaatctactcgccagctgattggctagaagcttggtaatcaacttggcgaagctatgcacaggactaatgggcctaaaatcctttactggagcagctccctctttcttcggaatgagagcagtattaagcacctgaaaattcatgaaccttctactccccactgtcgaaattgctgctatgacatccatttttataatatcccaacatgatttataaaatcttccggtgaagtcatctgngccccaggccttgtttgaaggaagttgtttgatagtgttccaaacttctacaaaa

SEQ ID NO: 48316 - DNA, 461 bp, Zea mays
  unsure (1)..(461): unsure at all n locations
ntggcatctttgtttacttcttcttcgtgagcccctgtcgttcattcaacgatgaaatctgctaacgcttgggactgaattgaagatctgtgcacatagtcaatggtgaattcattaagatctgcagcctatatcccaattcttccggcagattctctgttcctcataatgttcttcaaaggctgtgaccaacgaataattatgtgatatgcttgaaaataatgccgaagctttcttgaggccattaacacagcatatagcaccttttccaattctgtgtaatttttctttgacggacttacaacttccgagatgaagtacactggagcttgcttnttgacttggccatctatcttcatccgtacaagtgccacactcactgcagattgcgaagctgcaacatataatagcaatggagccccttgccaaggtggagttaattgtgttaaatcaatcaatat

SEQ ID NO: 48317 - DNA, 409 bp, Zea mays
  unsure (1)..(409): unsure at all n locations
agcttgcgatctggagttcatctctgggaacaatgcgatcatctactcgcccaggaacgggcacgcgagctacccccacccaggctgctacctgatgggttccgagacgctcggtgtcggagttagaaacgatgtggcgcgaagtgatctgtcagtggattcgagcacgcggtatgagatcatctcggcagggcatctcggggaggacgctgttgcggaaccgtgctggctgcagtacatgagggagtggggaccgaccatcacgtacagctcacgttcagagatagacaccgcgctgagcttcctgccgttctttctccgggtcacagcagaggcaatattcaacagccttccggcggaactgtacgacgaggaatgtcctacngtgcccactgagaagaacaactgg

SEQ ID NO: 48318 - DNA, 98 bp, Zea mays
tgtagggtatcacaacaactctctggctgccgacaatgtcttcggagtctccctcgatggagaccagcgcatttgtacagtcgtgtgctgccgtgcaa

SEQ ID NO: 48319 - DNA, 442 bp, Zea mays
  unsure (1)..(442): unsure at all n locations
gacccggatcttaagtcactgagctgcagctgaaaaatttatactggtccgaatgattgaggcttcctttgaagggttttctgttaaaaatatccctcgtggagaaaatgaatatgcagatttattagccaagtcagcagcacaggggctgcccttaccttcagaagtatttttcgaaacaataaaagcaccttcggttgagcttcttgaaagagcagtccttaacatatcccctgtctatagtgaagactggagaactgagatcatctctttccttcagggtaactttctttcagatgacgaagcttacaacaggaggatagaggcaagagctcgaccatatgttataatagaaggggaactatacaagcgtggagtctgttctccgttactcaagtgtttatctagagccgaaggtatggaatngatgaaggaaatacac

SEQ ID NO: 48320 - DNA, 404 bp, Zea mays
tctgacttgtgggcccgcctgggtgtccggtgcacaccggacatgcactgttccttgtccggtgtgccagtatgggcgcgcctgacttctgcgcgcgctgcgcgcgcatttaatgcgccgcaggtagaccgtggcgcggagatagccgttgctccggagttgcaccggacagtccggtgcacaccggacagtccggtgcacaccggacagtccggtgaattatagcggactagccgttggcgtttcccgaagctggcgagttcctgaggccgctcttccttggcgcaccggacactgtccggtgaattatagcgcgattgcctctggaaattcccgaaggtggcgagttcgagttggagtcctctggtgcaccggacactgtccggtgtacaccggacagtccg

SEQ ID NO: 48321 - DNA, 453 bp, Zea mays
  unsure (1)..(453): unsure at all n locations
ctgcccggatcttaagcaccgcggctgcaagctgctgcctcatttatgtcctctacatacaaaaggaaagttagaacattatagattccatttaaaacaaaacattntataccataccctcttgctcagataccttcctagcaaaacatcgctagttgattctctttatagcaacatcagaggctcagagcctctccactttccatggtaaacaatactaaaggttccagaacccagttcacgcaattccgaaaggtcaatgttctttattatctgttattaacgaagtggaaaataaggacaacacatataaattttcacataaggtgttgaaataaatagtaggtacacaaaaacctcaagtttatcgatgtcatctaaaacttgaatcccctggcttgttttgtccgattaattattcccttcttcctgaactcaaaagtaaagcaaaag

SEQ ID NO: 48322 - DNA, 416 bp, Zea mays
cttgaaactaaccttgcgctgttatgcggttagcaagataaattttattcctatatttaacttggtcaaaaagtctaagtgccatgtgtgtgttgaatcaaaacaaccccgcaagcctcacaaggctgctgatgcgaggagtttggcacctctagaacttgttcattctgatctgtgcgagatgaatggaattttgaccaaaggtggtaaaaaatactttctcacttttatagatgactccactagaatttgttatgtgtatctcttataaacaaaagatgaagcgttcaattattttaaggcctataaagctgaagttgagaaccaacttgagaggaaaataaaatgtttaatgtccgaccgatgtggaaaaatttctcttatgtgttcgatgagttctgcgtggaacatggtat

SEQ ID NO: 48323 - DNA, 440 bp, Zea mays
gcttgtgaagattcttcattctaacatgagcttgtcggtgatgctagagccagcccatgttagtcttatcatttaagcaagtgtctagttcagctttgttttaacacctcaggtgttaccatggctagggcacatctatgctttaataactgtgatcacatgtggaagaaacttaaggagaagagtacaagaaccttggagactaggtttaaccaagaaatgtgaatgaccaaaagcattacccaagttgtgtacacttatcaccttgggcaagaagggagtaaaaccctagacctctcttgaaccctatctcctaagcaccttggttaaaggggagagattaagcaaaggtgcaagtcatgaccaaacttttgacacaaagttaagtaacttattaacctacaattatagagaggaaacattgctaaaagaccccttaa

SEQ ID NO: 48324 - DNA, 438 bp, Zea mays
gaagattcttcattccaacatgtgctagtcggcgatgccagagccagcccatggtagtcttagcaattaagcaagtgtcgagttcagctctatcaaaatctactaagtatagctgaccctctaacactcccttaaatgctactgaatcatcacttcttctaaagacagtaacacctatatccgtaaaaagacagttgtaacccattttgcataattgagaaacagaaagcaaattgtaatttaaagaatctataagaaaaatattggaaatataatggtcaggagatataacaattttacccaatcctttgaccaaaccttgatttccatccccgaatgtgatagctcgttggggatcttggtttttctcataggaggataacatcttcttctccctgtcatgtgaattgtgccccgctatcgatgatccaacttgag

SEQ ID NO: 48325 - DNA, 436 bp, Zea mays
  unsure (1)..(436): unsure at all n locations
agcttatgaagattcttcatcccaacgtgggctattctgctatgcaagagccaacccatgttagtcttagcaattaagcaagtgtcgagttcagctctattaaaatcaactaagtatagctgaccctctaacactcccttaaatgccactgaatcatcacttcttctaaagacagtaacacctatatccgtaaaaagacaattgtagcccattttgcataattgagaaactgaaagcaagttgtaatataaagaatctaaaagaaaaacattggaaatagaatggtcaggagatantagcaatttacctagtcctttgaccaaacctngattntcatccccgaatgtgatagctctttggggatcatgtgttttttcataggaggagaacattcttttctccccagtcatgtggtttgtgcacccgctatcgatga

SEQ ID NO: 48326 - DNA, 480 bp, Zea mays
  unsure (1)..(480): unsure at all n locations
catacagctgacaatctcgtagcctctggaagtacctttctatttgtttctcatgctcttgctcattctgggaatataagaatgtcatcaattagcaccactacgaacttgtcgaggtagtccatgaacacactgttcatcangtacatgaaataagctggcgcattcgtcaaaccgattgacatgaccgtgaactcatacaatccatacttggtgatgaatgatgtcttcggtatgtccgaaggtcgaattctgagctgatggtaacctgacctcagatctatcttcgagaacacactggctcctctcaactggtcgaacagatcttcaattatgggcagggggtacttgttcttgatagtaacctcattcaaggatctgtagtcaatgcacatcctctttgtatcatccttcttctccacaaatagcactggtgctgcccaacgtgaagtacatggtctgatgtagccttctctaaca

SEQ ID NO: 48327 - DNA, 439 bp, Zea mays
  unsure (1)..(439): unsure at all n locations
ctgcagcttgacctaccaaaagatattgatgtttctttattaagacattgtgtggaaccaactcagtttttaaaaaatcagtttttatcttttagataggagattttagataggagaggctagcttcttaattttttaagaaactaataatctaatttctataaactgagtcataaaatgatatgtttagaaccacctcaatttatataaatcagtttcttcaaaattgggtgcttccaaacagggcctaagtcttcggacagacaccgtgagcacgttgtcaccttgctggtttgtgtcgtccctccagacttctccccctcccactcaaccctagtgttgacttgcactgaaagcccgccgcaatggagcggtctctaccggtgaagtcngtcgccgaggcactggacgctgcttggtgccgctttttgtggacatg

SEQ ID NO: 48328 - DNA, 465 bp, Zea mays
  unsure (1)..(465): unsure at all n locations
taagcttgcacacatacctcattngaatacctttgaacatatctcttctatatgctatgactaatggggcntcaaggctatttcaaaccaagtcataggtatattgaaagggaattggagtcttcggcgaagacaaaggcttccactccgtaactcatgcttcgccatcactccgagcaactctctattccttgggagaaatgagcatcaaacaaaaggactctatccttgggggagagagtaaaagctcaaaagcaaaaggaccggacttcatcttgggtataatcttaactcgttacttatgaccaaaggggaagaacttacttcgagggctctaatgattccgtttttggcgattcatgccaaaaaggtggagaaatgagccctaagcataaggaccgcaccaccaccaccaaattcaaaaacttagtgctttccacaagtctttatcattttggtatctat

SEQ ID NO: 48329 - DNA, 443 bp, Zea mays
  unsure (1)..(443): unsure at all n locations
agcttaagacananataacaagagtggtgtattatgggccactttacactacaactcttaattagaggtgaggtctgtcctaagggttatttttgttggcctccaacagtaataataggcttatgtgccaaaaatcacagaaagctaaggggtggttatttagttatgcttttctaaagtttaatgtcaaaaaggcactttctactatattgttatttgaaaaatgtcaaacagcagatttcatatttttcttaagtttttaacaacaaaacatttactaccccaagggtggggatattttcaccttgnggttatttttgtagggtttttctaagttatccctgttttattcaattaaaaggtatcctacttattttatgctaaaacagggtgtgatatatttttccagtgaactatattgaataagtatcctaacaaaaata

SEQ ID NO: 48330 - DNA, 474 bp, Zea mays
  unsure (1)..(474): unsure at all n locations
tcgtatcccgtgaattggctggttggggattttgaatttgtactttaagtcngattgctcttgactgctttgtttgaactggtgcagttaagttgggctgggttggggttgattcacccgcgatgatcgaattcgattccagggctttgcgattgagtgtagtgcagcgcaggagttgcgttcccaccaaggaacgtattcaggaccatccgaattgtcttgctacttgggttggtgggcatagaatgaaattttagtgctgcaaagtttcagacctgaaatattacagcttcctgcctcanatcaacctaatctggtggtctggattaacttgagacaggagactactgttgttttccaggaatcgtgacttctgttctctgtagcttatcatttgcttggtaggttgtatcaattgctgttaatacggccacactgtagttagggagatctattacaagtgctcaatcctca

SEQ ID NO: 48331 - DNA, 376 bp, Zea mays
atagattgtctacggataaactcgacacaagagatgacattagtagccaagcactagtttcttatttagcaaccctttatatgtggaagacaagcgtgttgctaaaatagagaaacatcataatatggactaaatttccttgaaccctcatgcacaatatattttgaatgacatggataatatgcatggttattcaatgaagtctaaagggatgacttaatccatattatggtgagtgtcaaatatggaagaataaaatccaaattaactagatagaaaatacgtcacataattttggattggtgaccatatgaataatatcactaatcttccaagtggacctttatctcataatcaacaaccgatgtgtatcctc

SEQ ID NO: 48332 - DNA, 458 bp, Zea mays
  unsure (1)..(458): unsure at all n locations
tcttataatttataaagaaggtgtagacttttcttaagattttcaacaaattctggatcaccgttttgggtgatctataaattaagctacagctgtttgatttagtatctctgaatctgttcaaatctggacagcaatgtgtgtttgaattaactgactttgatacacattgaatcaccttgagatgattataaatgaattgtagacaattctattagctctctaaaaagtctatgatcacctgatttggatgcctgaagctccagttatgaattcttgaagtaagtagtcgaattctgtccaaatctggacataatttacgtttagtattggttgacaattctaagtgtcaagtctcactatgatgataatacaaaagtagtagaggactttatangcctttcacacattcttagtttactatttttggatgaatatttgtaagttatgaataaaac

SEQ ID NO: 48333 - DNA, 338 bp, Zea mays
  unsure (1)..(338): unsure at all n locations
taaacacgggagtgtgctatatcctgtgcatttatgtttgtcatgatgaactatgattggtttggatctttgtaatgattgtcaccagagtgtgggtatcccctgcattttggttcacctactatgttaataaagttagttatatagttgggaaaccttttattccactttcctctntatctgagaagctgtgtggtctgtgttggagatcagtgaagatgctcatctgttcagtgctggtgaagaattctattctcttttcttatgctgcaagatttgccagatcagttctgatgtgtggtcgcattctgcacatgtcatagaacacgcgcagagga

SEQ ID NO: 48334 - DNA, 389 bp, Zea mays
cgggcctcggagatgtgtccgcgggcttcatctggccggtagggaggccatcgtggctaaagcactcggaatccgtcgcgggcctcgccggaatttctcaccgtgcctcgtcctccactgcgcgccgcgagcaggagtctaccgccattcaatcgaggtacttacgccatccacgtgttcgcattgttgttcagtaggtttagcgttagctaatcgcattttggacgaccctagcgcgtggaattgctcgccggcgttcatcgccgcggcgggtgagcggcgccgccgtgtcccaggttgggttggtgaagaattcctcagcaccgctagatctggctggtgcggctctgattaaatagaagatgccctttcgcgtgtgtcgatctggt

SEQ ID NO: 48335 - DNA, 394 bp, Zea mays
  unsure (1)..(394): unsure at all n locations
tttgaagcccgaaacatacaaactggccaacgatcaaggcaaggtctacagcaacgcttggaacatccaacagctacgtcgcttctacccttaaattgtttcaagtcgttcatgtacctcgttttttctttacatacacaaataaagtctaaccgtcaaggaaggatcagccttgccttggcaaagcccgaccctccctcgggggctagaaggggggaaccccctctgcgtcaaaattttcctcggaaaagttttctaccaaaacagctttcgactgtatcgataacggaaccctanaaccgagcgagagtacacgtaaacgacaaggcctaccgatccgagggactcctacgcctccgggatacggatacctcactcatcaccttccgcgaaa

SEQ ID NO: 48336 - DNA, 407 bp, Zea mays
  unsure (1)..(407): unsure at all n locations
tatgacactatcgacaactttttttaccaaactaaagttattctctgttgtataaattgcctaaaacttaagagaacagattctgcacataattatgagactaanaactgctataatcaaactgcaacaactttctgatctgatgtctgattgaggtgttcttcgcggccacggaaagatctacaaattgtatacaactcatagatagatttttattttttgaggccactaagaccacggaaaactgccatgaacagaaattgtcgaatctgccattctgcagaaactaaattcgagatcaaaacctaaccgcacatctaatccaacctataatcctttaatccccatgatccacaacctccaacagcacataattacagggaggaacaaggatcccatccttacct

SEQ ID NO: 48337 - DNA, 418 bp, Zea mays
  unsure (1)..(418): unsure at all n locations
gctggtgtttgatcctgaaattttgtcttgataatggatttacacatcttggaggctgggatagatgatcagganaagagattcttaacctataagatttccattgatatccttccaccgaagaccctgcagatggcatcggcgaccccaccacctcctccttcacctccatcgggaagggaacctgatgatgatgatgaccctgaggatcaagatccccagcatcggcggcggccggtccctgttgatctacggcggcctgttcagatgcgtctgggcccacggcttcctttgggtcgcgcgcatgcggtaattgtgccaccggttcgggtggaagtcgaggaggatcttggggagaatgtgtgtgcttcgtttcctcccgatgctgggataattgacattcagttggaagggacgc

SEQ ID NO: 48338 - DNA, 462 bp, Zea mays
  unsure (1)..(462): unsure at all n locations
ntaccaaatggacgtgaagagtgccttcctcaatggtttcttcaagaagaggtctatgttgagcaacctcccggctttgaagatagtgagtaccctaaccatgtctataagctctctaaggcgctttatgggctcaagcaagccccaagagcatggtatgaatgccttagagattttcttattgcaaatggattcaaagtcggaaaggccgatcctactttatttactaaaactcttgaaaatgacttgttcgtatgccaaatttatgttgatgatattatatttgggtctactaacgagtctacatgtaaagaatttagtaggatcatgacacanaagttcgagatgtctatgatgggggagttgaagtacttcttgggatntcaagtgaagcaactccaagagggcaccttcattagccaaacgaagtatactcaagacattctcaacaagtttgggatg

SEQ ID NO: 48339 - DNA, 422 bp, Zea mays
  unsure (1)..(422): unsure at all n locations
agcttcngctatgggtcaaattttttctttttcagtgcattagcaatgaatgctgtggtaacttcacacctactcgtctgcttatatagtgtcgcacgtgggaaggtgaatcgtcaaggtcttccgcaccggacaaacagccacccgcactcactgaacaatgggccacagagttcgagaagatgaatcgccagggcacgcgtaactgctgcaagatggggtcacctcgcgcttggattattataatcgtttctcggcaacaagctcagagaagggtgttttcggatcctcggcatcccgaagcctagaagattatttcacggatcaagctcgttatgaaaaacgatctagcaccgcgaaggggctactgttgggagtatgcttcgtagccgaagatcctaaagaaagaaataccttcggca

SEQ ID NO: 48340 - DNA, 429 bp, Zea mays
  unsure (1)..(429): unsure at all n locations
tcatcattngcttggcgaattgatgtagtggagtggttgtatcgacatgtgcactcttcacgagcttgttcatgctctcattacgctgtgtagacaacatcataccacaataatcatttttgaaaaaggaggtacccaatccttatgtattccatacatcttgttgagagtcatgttatcgtgtagatggaactcttcaagcatcattgaccatgcagtctcgaactccaattcagtcaaaggatgatgtattatagattggaactttgtcttatagtccacctcctcaaaccttgcatacaactcgtttaaaaaagtcatatacctactttgcacatgccatagacacaaccgatggattgtgtntgggaataccctctcgagtgcaattagcatagcaggatcttgatatgcaatcatatatgataa

SEQ ID NO: 48341 - DNA, 403 bp, Zea mays
  unsure (1)..(403): unsure at all n locations
agctntatcaaatggacgngaagagtgcctttctatcggaccaatcaaggaggaggtatatgttgagcaacctcccggctntgaagatagtgagtaccctaaccatgtctataggctctcaaaggcgctttatgggctcaagcaagcccccaagagcatggtatgaatgcctaagagatttccttattgctaatggcttcaaagtcggcaaggccgatcctactttatttactaaaactcttgcaaatgatttgttcgtatgccaaatttatgtgatgatattatatttgggtctactaacgaatctacatgtgaggaatttagtaggatcatgacacagaaattcgagatgtcaatgatgggggagttgaagtattcttgggatttcaagtaagcaactcca

SEQ ID NO: 48342 - DNA, 408 bp, Zea mays
  unsure (1)..(408): unsure at all n locations
taccgttggatcttcaacatgatcgagatcgtgaagccatctaccgattaatacaaggctagctacttcaaccttcactgntaattttggtaattactagatatcgctcgtcattatcgataattactaaatattgttcagtaattattgattggataaagctttatctgtagtgataaattttgtatatgtatgctcttaaacgctattggtcacctatgatgacaacctgacaatcacctaccctgaaatttctttaacaaatctttatcaattgttaagccattcgtgcataatatatacacatatatgagacaaatcattgaaaatattttctatcatagaaattattagaaatacaaatattactattatnttcttataaattagtttactttnntaaaaatg

SEQ ID NO: 48343 - DNA, 381 bp, Zea mays
  unsure (1)..(381): unsure at all n locations
ggaccttaagcaccgcggctgcagcttataaaggtcttattatgcctttctcaacggaccaatcaaggaagaggtctatgttgagcaacctcccggctntgaagacagtgagcatcccaaccatgtttataggctctctaaggcgctttatgggctcaagcaagccccaagagcatggtatgaatgcctaagagatttccttattgataatggcttgaaagtcggcaaggccgatcctacactctctactaaaactcttgaaaatgactggcttgtttgccaaatatatgttgatgataatatatttgggcctactaacgaatctacatgtgaagagattagtacgaacatgacacagatattcgacatggcgagatgggg

SEQ ID NO: 48344 - DNA, 233 bp, Zea mays
aacatctgatgatattccaccttttccattatgacgctcttgtagacttgttccattttccatgtgaaaatatattgatcctccaactttttctatggtatatgcagatttatttatatactgttgctcttgcagggggttgtcctgtgattaaaggaaataaatggtcatcaaccaagtggatgcacattcatgagtacaaagcttgaggctcggagaatcaaatatatgct

SEQ ID NO: 48345 - DNA, 423 bp, Zea mays
  unsure (1)..(423): unsure at all n locations
agcttcgtagaactatacatacattccatctagtctcacaagcagaanaataatttcgtatagaagttgctgcttattatattaactttctaaaaccattagtttaacaagtaaattatataaaatttctggacatactttataaggccgttatcaaacacatttacattccaggagacactaacgaacccctcattcatcaaatcatttgatgggcatcgtgcatagtagtttagctaactaagtctatgccaaaaaaaaaagaactaactaactctcangctgcgcatgggcatggcagacacagcaccgagcttcggcttgtttcttgacgacgagtatgtggagtaggctgtcgtcccacacgtccacgccgaagaggcggaaccgccgctgcacgaangcccatatcgcgacgtcgtc

SEQ ID NO: 48346 - DNA, 319 bp, Zea mays
tctaaagggagaacacgttataggttggactaacgttcaattcgaaaaagatagaccttgtgcagcttgtcaagcaggtaaacaagtgggaggagcacatcacagcaagaatgtgatgaccacttcaagacccctggagctgctgcatatggacctcttcggacccgtcgcctatctgagtataggaggaaagaagtatggtctagttattgttgatgacttttcccgcttcacttgggtgttctttttgcaggataagtttgaaacccaagggaccctcaagcgcttcctcaggagagctcaaaatgagtttgagctc

SEQ ID NO: 48347 - DNA, 436 bp, Zea mays
agcttaaccttgtaacgaggataagctacctttatttcttaaggtggagggtccttaagtctctttgaaatccttaaggataaatgcttaagattccaacatgctttcataagtgcatagtctgtcatgagcatcacacttttattatgacacattgcacttcacagtttctgtgttaaaaatatgttctcattaacctaattatgtgcacttggcatttaatgccaaaatctgtattcctcacaaggcacatatttagggggagcaatctattatatagaactgtttaagcttaattgacatatccttttaatcatatctctttcctttggtacatttgcatatttcctatttctattgtgccaaggctaagactaatatgtttccatgagcatcttgtgtattaagtcttagatggaaagggaaatggagtact

SEQ ID NO: 48348 - DNA, 391 bp, Zea mays
  unsure (1)..(391): unsure at all n locations
tgagtgtgtctgcaatttatatcagccctagtccaaaagcatttctattttctactatggttatcaagagttgtgcaatctgcttaaataaatccaaactctaataagggttgcaggaaccatggtgtntatcatttttgctagatagatcataaaatgtgggttctaaaaaaatctcgttgaccaaatttggctgaatacaatataagttataaattctacaagtctactgcttacttgaaaataataattctaaagggttatagacaaacagctttacatccgagcccctggggttttcttaaccgatcatctaatccggcccctgggaactatcaccggagcactgactatgcaatacccctggccttttccttttaacctgccttct

SEQ ID NO: 48349 - DNA, 441 bp, Zea mays
  unsure (1)..(441): unsure at all n locations
gcatgcaagcttgtggcgccctcaggcgtcttgtcgcattttatgtatcaagtccctcacctggaagcctcggggccgaacccttcaggtgtggtagcatcacagagactgctggtaccgtgccgagtgtagtaaggccacgtcccgagcttcttcgagctggtccagtgagttttctcggctggtctggttgcttcngtcatcgtacgcctttgtcctcggggaaccgtattctaagtctgtgggtaaaatagcctcggccccataaactagaaagaacggcgaanaacccgtggctcggcttggcgtcgtcctcagactccagaccaccganggtagctctttcatccaccgcttgccaaacttgttgaggtcgttgtagatcctcggtttaagtctctgcaaaatcatactgttggcacgctccacctgcccattcgt

SEQ ID NO: 48350 - DNA, 472 bp, Zea mays
  unsure (1)..(472): unsure at all n locations
agggagagcacatnttatgattaacaaatggtcatttatatatatacaggatttgtagcgcatgccaagcacggaagcaagttggtgctcaccatccacacaagaacatcatgacgaccgacaggccactggagctcctacacatggacctattcggcccggtagcttacataagcatcggcgggagtaagtactgtctagttattgtggatgattattctcgcttcacttgggtgttctttntgcaggaaaaatctcacacccaagagaccttaaagggattcttgagacgggctcaaaatgagtttggcttaaggatcaagaaaattagaagcgacaatgggacggagttcaagaactctcaaattgaatgcttccttgaggaggagggcatcaagcatgagttctcttctccctacacccccacagaaaatggtgtcgtggagaggaaaaatagaactctatcggacat

SEQ ID NO: 48351 - DNA, 453 bp, Zea mays
  unsure (1)..(453): unsure at all n locations
cttgagcaccgcagcctcagctacacattgcacggtgaaaatttttttgtttctttcctgttcgagaaaactcttttgcacaaagctgatggaagaaatagctcaactctgaaagcgctagccagacatgctcagggacatagcctcgaactatcgcaggaagaatccgttcaatctatatgtggaagtcatgactcttcatccctaagactcgtatagtagataaggtcaccccctactcaggttagcttcatacccatcagggaacatcaacttcttgatccactgaagtacttccttcctctatgccctgcttaagacgaaatcggccttatgccttctccatgtctttccaccacttggcaagttcatcttttggtttggctatcacataacgctgncagaaccactcttgcctttatgttatcctctgacttatcaggaatgttcata

SEQ ID NO: 48352 - DNA, 385 bp, Zea mays
tgaatggtcaaaatcaagaacttcaagtgccactcgatatttcttgatcattcatgcctcatctttagtgactgaatctaagtctagctcctcaaatgataattcttgcaaacattgtgccaaatatcatgcttcttgttgcctactaaccatgcaatgaacaatagcccacacgtgaatgtcaaagaatatttgaaaagatgctctatcaatgatgggttaaagaaagttgaacccaagtcaagtcccttaagcccaacaatggatgaaagatgcttgggttcaactcattctaggaaaaccctagcacagtgcataatgtgtggagatcccccaagttcatataaggaaccaccctatatgatgccttgtggaggattcactc

SEQ ID NO: 48353 - DNA, 445 bp, Zea mays
  unsure (1)..(445): unsure at all n locations
gcttgtgcacagtccacttgaactaatcttcttatattttcgnccncactgcaacatgacaccagagggtccaactcaaaaagcaatgtatgaattcaaaataattgcagagcatatcagtacaagggacctggtccaggagtttttggctttcaagggttttcctagtgtaaaagagtgggaaatgccgaagctgaagggggagaaaaaaaaggtgaactcgtgcgcttaccttactacttcaaagttaagaaatactttaaaacaccttgccaagagtggctggatacgattgaagtgatgtgcaatgaaatacttggcaattattctaaaaaagaagatctagtgatgaccgcagccttcggcacccatccgaagcgaagactaaaccgagtgctggacgccctgggtttcgaataccctgattaggaaaatctgaacaaag

SEQ ID NO: 48354 - DNA, 432 bp, Zea mays
  unsure (1)..(432): unsure at all n locations
tcaactccatctatattatgaaatgccttggaatcagtccattttccttcggcccttctggcagcttcctgactcccatgaatagcaataggcccttggtccgaaggtatcttctgcaagatagctggtgaagaattgcttcaaaagcatttatggtaccacgaccaatgatggcgttgtagggtattccatgtcaacgatatcaaacacaatttgctcagtccttgtgttattaacaaatccgaaggttaccggcatggtaatcttcccgagtgccacaatctgccgccctccgaagccacaaagagggtgcgtagcatcatgaatcttgtcttcaggctcctgcatctgtctgaacgctttggcaatataatgtcagctgcacttgctgtgtcactangacattgngaaacagaaaccctttgatcacac

SEQ ID NO: 48355 - DNA, 338 bp, Zea mays
  unsure (1)..(338): unsure at all n locations
gcttcactggcnacgtacgagtgatgaagagcacagtgtatgccgcagcacgggcgtactggctaccaccggagcggacgggcatgccgcctgcaagaaggcctggccgccgcccgtcagcagagtggacagggcacattaaatgctaaggcggcacatcgcttgtcagtggagtagacaaggcgtatttaatgctgagacggtacatcacctgccaacttgacaggcggcgtgcctcctccgcaataaatgcgcggcccagaggccttacgtctggctccgcccgctggcttacgtcacgggcaagaagccacgtggcagcatcaggtctccgcctg

SEQ ID NO: 48356 - DNA, 447 bp, Zea mays
  unsure (1)..(447): unsure at all n locations
ggtaagtagcataggcaagtaatatacgaattgactcttgcctanctacgggtgcataggtttcaccgatatccaaaccttcgacttgagaatatcctttggttacaagtcgggctttgttccttgtcaccacactatgcccgtcttgcttgttgcgaaatacacnattggttcctacaacattttggttaggacatggaactaaatgccatacctcatttcttgtgaagttgttgagctcctcttgcattgccagcacccaatccgaatctcttagtgcatcctctaccctgtatggctcaatagaggagacaaaagagtagtgttcacaaaaatgtgcgactcgagatcgagttgttacccccttatgaatatcgtcgaggatggagttcatgggtgatctctttgaatcgcttgatggactcttgggtgtgcagtcttggacct

SEQ ID NO: 48357 - DNA, 425 bp, Zea mays
  unsure (1)..(425): unsure at all n locations
gatgaaatactcagcgattcttttttatttgcgcttncgccggggcacgaggggtcacagccattttggaaaaagccggttgtgaacatgtcaaggccgcagcctatccggaatctatattctcagcagatgacactaaggaccgctcgaccgaagcctctttgctaagcgggagggattattctgatgtttggatgaagggcggtcgtgagatggctgatgaagccattaaaaagaatgagaaagaatctcacgatgcccaagaggaggctaaacaagttgaagaagctgctgaacgcgccatgattataggtacttttttaaagttttgcttcattgttcgtttctagcttcaaaattcaccaacatattcttcactacatccggccgtgcaccaccactggagccgtacaattccgaagccg

SEQ ID NO: 48358 - DNA, 349 bp, Zea mays
tattggcagaagctgaagctaaaattgcaaagctaaatacagagcttctctcaaagtcagaaagcttctaacaggaaaagcaaaagttaaatgccaaacttaagactgaggtcgagaaaagttcaaatctgcaaaaatcattgacagagcttcaaaacaaaagtctggagttcagtagctaatgtgtacaacggctgaagcagatcttcaatttggttggagccagctgggaaaagattagtcctacgactgaagacctgctaggggccttcgaacatatcgagggtgaagttgatgccctcgatgaacatatagccggacatggtgatttctgtgcctggtacttctc

SEQ ID NO: 48359 - DNA, 440 bp, Zea mays
agcttctaaagggagaacacattttattgattttaaatgttcattttgagaaagacaggatttgtagcgcatgccaggcaggaaagcaagttggtgcccatcatccacacaagaacataatgacgaccgacaggccactggagctcctgcacatggatctattcggcccgatcgcttacataagcatcggcgggagtaagtactgtctagttattgtggatgattattctcgcttcacttgggtattctttttacaggaaaaatctcaaacccaagagaccttaaagggattcttgagacgggctcaaaatgagttcggattaaggatcaagaaaataagaagcgacaacgggacggaattcaagaactctcaaattgaatgcttccttgaggaggagggcatcaagcatgagttctcttctccctacacacctcaacaa

SEQ ID NO: 48360 - DNA, 424 bp, Zea mays
  unsure (1)..(424): unsure at all n locations
ataaccttatccactttaagcgtaacctctgttttggtactcttcatggtataattttaattcttgtntcacatgtaccggaccttttctggcactgggatagatttaccagagtagacgatgcttctccagtgttggtgggattgctttttgtgtcctgatctataaccagcacacacgtaatttaactgaagctttctactaaatcaccatcgactggtaacttaatttcacaaacacggattatatttttcattcatagttactgatgtagtgatgtgtgttgctcttgagtggggtggtgcggcgccattattaatcggtatgtactgtgtntggtggattgacctgttggatttgaaatttttataaatacactggccatgtgttaccttatttgggctgcatcacaaagattctgatg

SEQ ID NO: 48361 - DNA, 405 bp, Zea mays
  unsure (1)..(405): unsure at all n locations
agcttggtgccgatggagaacattattttttgttatctcggntggcgaactgcttgccgttgtcgaccgtgagttcggacggtactccgaagcggcaaacaatattttgctagaagaatttctgggctgtcttcgatgtgatagtggatactgccctcgcttcaatccatttggtgaagtattcaacggcgacgaaggtgaacttgaggttcccctgagccgtgggcaggggcccgacaatgtcgaggccccagcgctgaaggggccacgtgtgggcgatcaacttcgtgaactgcgaggggcgtcccgagcgtggggaaaatntctgacaggcttcgcaggatctcacgacccgatttgcggcgcaaatcatggcgggccagtaaaaaccttggcgaatcacct

SEQ ID NO: 48362 - DNA, 314 bp, Zea mays
  unsure (1)..(314): unsure at all n locations
tcttcttcatactgatgaaaaccaaactctgcgaccactttatctaaatgaatggtccaactccgagatgcttgcttcaacccataaatggatttctaaagttcgcatatctttccagcattgatcggatcgacaaaaccctcgggctggataatatacacgtnctcatcaaggtttccattaaggaaagctgttttacatccatctgccaacctcataatcgaaatatgcgacaatagctagaatgatccaaatcgattaaagctcgctactggcgagaatgtctcgtcataaacaactcccttgaacttggc

SEQ ID NO: 48363 - DNA, 365 bp, Zea mays
cttcggcccttctggcagcttcctgacttccatgaatagcaatgggcccttggtccgaaggtatcttcatgcaaggatatgctggatgaagaattgcttcaaaggcattgagagtaccacgaccaatgattgcatttgaagggtattccatgtcaacaatatcaaacacaacttgtttagtccttgtgttgttgataaatctgaaggatactggcattgtgattttgccaagtgctacaatctgccttccttcgaggccacaaaggggatgtgtggcatcatggatcttggcttctggctcttgcatctgcctgaaggccttggcaaatatgatatcagctgcactgtctgtatcaaccaaaaca

SEQ ID NO: 48364 - DNA, 372 bp, Zea mays
  unsure (1)..(372): unsure at all n locations
gcttctaagggagaaccatttatgattacaaatgttcattttgagaaagacaggatttgtagcgcatgccaagctgggaagcaagttggaacccaacatccacacaagaacatcatgacgaccgacaggccgcttgagctactccacatggatctattcggcccaattgcttacataagcatcggcgggagtaagtattgtcttgtaatagtggatgattattctcgcttcacttgggtgttctttntgcaggaaaaatctcatacccaagaaaccttaaagggattcttgagacgggctcaaaatgagttcggcttaaggatcaagaaaattagaagcgacaacgggacggagttcaagaactctcaaatt

SEQ ID NO: 48365 - DNA, 446 bp, Zea mays
  unsure (1)..(446): unsure at all n locations
ntgggagagaagaaagggaagaggcagtaaggagcagcgaatagatgtgaagaaaccagagaagcaaaggggttgtgtatagaagggaaaggcaaccgctcacttctaaccgcggtcactgaacagtcgcaaggcattcaataagcacttccacccacccgaagacacgtcagacggtggacgccgtttcatgcaacactacacccattgggactccagtcaacagcgcaaaggatatgattacactagccgtcccatcgcattactactcagaggcaaccggctaaaacactcagcgtaccaagccgtcccttgcccacacccattgggagggggacacccaggaattatcagtatnattttcaaacggtcacatctgtgcagagcatgcagtgaatacctcaagacaaaatgagatatagtaggatcagagganagccaatata

SEQ ID NO: 48366 - DNA, 428 bp, Zea mays
  unsure (1)..(428): unsure at all n locations
agcttacttgacgtattactctttcttcttcttcttcgncgctntgaaggcaacgggttgcacctcgggtgtggaggtcgcacctcgctcgatgatttgtttggagcctttgatcattaattcaaagctcacaaacttccctatcacttcctcgggagacattagtttatatctaggatcaccacaaattaattgaacttgtgtaggattaagaaatacaagtgatcttagaataaccttgaccatttcatggtcatcccatttggtgctcccgaggttgcgcacttggttcaccaaggtctttagccggttgtacatggcttgtggctcctccccttggtgaagcatgaaacaaccgagctccccctcgatcgtctcccgcttggtgatcttggtcacctcgtctcattcgtgcgcggtcttgagca

SEQ ID NO: 48367 - DNA, 401 bp, Zea mays
  unsure (1)..(401): unsure at all n locations
ttatcaaatggacgtgaagagtgccttccttaatggaccaatcaaggaggaagtctctattgagcaacctcccagctttgaagatagtgagtaccctaaccatgtatataaactctctaaggcgctttatgggctcaagcaagccccaagagcatggtatgaatgcctaagagattttcttatcgctaatggcttcaaagtcggaaaagccgatcctactctctttactaaaacacttgcaaatgagttgtttgtatgccaaatttatgttgatgatatcatatttgggtctactaacgaatctacatgtgaagagtttagtaggatcatgactcaaaaattcgagatgtctatgatggnggagttgaagtatttcttaggaattcaagtaaagcaacttc

SEQ ID NO: 48368 - DNA, 395 bp, Zea mays
atatgcgaattgattaaagcctagctatgagtgcataggtttcatcgaaatccaaaccttcgacttgtgaatatccctttgccacaagacgggctttatttcttgtcaccacaccatgctcatcttgcttgttgcagaaacctacaacattttgattaggacgtggaactaaatgtcatacctcattcctcgtgaagttgttgagctcctcttgcattgccaccacccaatccggatcccttagtgcatcctctatcctgtatggctcaatagaagacacaaaagagtaatgctcacaaaaatctgcaactcgagatctagtggttacccccttgtgaatgtaaccaagaatggagttgacggggtgatctctttgaattgcttggtggactctt

SEQ ID NO: 48369 - DNA, 373 bp, Zea mays
  unsure (1)..(373): unsure at all n locations
tctaaagggggaacatcatttaagactaaccaatgttcattttgagaaagacaggatttgtagcgcctgccaagccgggaagcaagttggcactcatcatccgcacaagaacatcatgactagtgacaggccactagagctcctacatatggatctattcggctcgattgcttacataagcatcggcgggagtaagtattgtcttgtaatagtggatgatcattctcgcttcactggggtattcnttttacaggaaaaatctcaaacccaagagaccttaaaaggattcttgagacgggctcaaaatgagtttggcttaaggatcaagaaaataagaaccgacaacgggacggagttcaagaactctcaaatc

SEQ ID NO: 48370 - DNA, 415 bp, Zea mays
  unsure (1)..(415): unsure at all n locations
aagtctnttcatcttggagcttggtgaatatatcgactaactgngtgngggtgctaacataagcaatttcgatatatcccctttgttggtgatctctcacaaagtgatacctatctatgtgcttagtgcgactgtgttcaacaggattatccaccatgcggattgcactctcattgtcacatangagagggatttgctcaacttgtagccatagtccctaagggtttgcctcatctagagtaattgtgcacaacaatgttctgcagcaatatactcggcttcggcggtggatagagctactgaattttgtttctttgaagcccaagacaccagggatctccccagaaactaacaagtccctaatgtacactttctatcaatcttacatccggcataatcagcatcagaatacccg

SEQ ID NO: 48371 - DNA, 291 bp, Zea mays
  unsure (1)..(291): unsure at all n locations
ctaagctgtaagggagaatacgtgataggtctaactaatgttacttttcataaagatagaccttgtgcagcttggcaagccaggaaataggtgggaagctctcatcatgccaaaaatgtgatgacaacatcaagacccttggagttacttcatatggacctcttcngacccgtcgcctatctgagcattggaggaagtaagtatggtctcgttatagttgataatttttccgcttcattggggattttttttgcaggataatctgaaacccaagggaccctcagcgcttct

SEQ ID NO: 48372 - DNA, 341 bp, Zea mays
actgaagctttcaaataataccaggactctgcggtgacatcctatgagcagcttgatcgacgagttgctgaacttgttacacgcatggacatactggaagcttgacaacaaccaccatctccagccccagctcaccctcctatggacgacggcgacgatgacgatgatgtttatgcaccgctgcgacaacgcctcgaacgtaatcgacaaggtatgagaggtaatggtagacgtcgtcataatcctgaaccaaactgtaacgccctgaatttgggggtagaattttttcttattttctctcaccaaattccggcgttactctcttttctctttccccgttt

SEQ ID NO: 48373 - DNA, 451 bp, Zea mays
gcgcccactattttaaatgagaatgccactgaagcaatgatcaatgggcttcgttcaagaccaattgcccagtactttgctagaataccctccaaatccttagagaagcttctccagaaatatagctagtacaccatcagagagaggacctccatacatgtccaaagttgtgttcttcatggcaaatgttcctgagacaccaagtagcagttctaaaaaatgggagtccagggatcccgttaaacaaccgaagtagtggaaagtgcgcaccatttgcaagcacaatgtcacgacacttcgcagaatgaccagccacattgtgcacggtccacacaacctacaaatttgaaacaaatcatccttttatacctcacactaatgaaatgaaatctgcgtgcaatcgaaacagaggtaatatggtttctaacgtgcctgtttacagatatcttca

SEQ ID NO: 48374 - DNA, 439 bp, Zea mays
  unsure (1)..(439): unsure at all n locations
gcttgtgaagattcttatcccacatgggcttgtctgctatgccagagccaacccatgttagtcttagcaattaagcaagtatcgagttcagctctattgaaatcaactaagtatagctgaccctctaatactcccttaaatgctactgaatcatcacttcttctaaagacagtaacacctatatccgtaaaaagacagttgtaacccattttgcataattgagaaactgaaagcaagttataatctaaagaatctacaagaaaaatattggaaatagaatggtcaggtgatatagcaattttaccaagtcctttgaccaaaccttgatttccatccccaaatgtgaaaagttggtggggatcttggnttttctcataggaggagaacatccttttctcccctgtcatgtggttggtgcacccgctatcaatgatccaac

SEQ ID NO: 48375 - DNA, 438 bp, Zea mays
agcttatgaagattcttcatcccaacatgggctattcgtgttgtgccagagccaactcatgttagtcttagcaattaagcaagtgtcgagttcagctctatcaaagtctaccaagtatagctgaccctctaacactcccttaaatgctattgaatcatcacttcttctaaagacagtgacacctacatcagtaaagagacagttgtagcccatttgacataattaagatacggaaagcaaattgtaatctaaagagtctacaagaaaaacattggaaatggaatggtcaggtgatatagcaattttacccaatcctttgaccaaaccttggtttccatccctgaatgtgatcgctctttgtggatcttggtttttcttggaggaggagaacatcttcttctcccctgtcatgtggttggtgcacacgctgtcgatgat

SEQ ID NO: 48376 - DNA, 437 bp, Zea mays
tacagcggcctgcagcttcaatagtgaattggaaaatacttcattattttatcattcaattataaaagaacaccacgcaactgcaattgtgggtgatataaataaggaggttcaaactcgatcgcgtatttcttcattttgtgaacatttctcttttgtatctagcatcgaacctaaccgtgtggacgaatgcttacatgatgttgattgggtgaatgcaatgtatgaagaataaaataattatacctgctatgaagtttgggagcttgttgaaagaccaaagaatcacaatgttattggaaccggatgggtgtgacagaacaagcataatgaagatggtttggtggtaaaaaataaggcaagactagtggcacaaggttatactcaagtaaaaggattggaatctggtgagacatttgcacccgtggcaagattgg

SEQ ID NO: 48377 - DNA, 242 bp, Zea mays
cattacctggaaaactttttttgtgttatacctcgctaaggctggttgttactagtataaataccaccctatgtctatgatgtaaggcagctcatgataatctaaaacagaacctcttttgttcagctgtgtgctataaatatcgagagtgatctctaccccctttgctcttgtgaattccttcgcgggattgcagaagcggcggcttcatccgctcacaataggtgctcctactccgttcg

SEQ ID NO: 48378 - DNA, 351 bp, Zea mays
tgttgggtctatgctctcccgcccaaggtcttcaatggagaagcggctttcggctgaagctgtttgcatgagatggccgaaagttcctttccatgaagctttgacagtataaaccgactttaagatagaatgactttttaatccatgaaggtctgagtcaatgttgttagcttttataaggggcatacttgtaatttctcacatgctgcatcctgtgcctataaatagtgaacagtattccgttgctgttcacgcattctagtattctgcaattgcatattctggaaatcaccctcttgccaaggcagaggtattattggattcaataaatataatatgaattggttatga

SEQ ID NO: 48379 - DNA, 447 bp, Zea mays
  unsure (1)..(447): unsure at all n locations
gcatgcaagcttctaagttctgtcttcaattttctgtattaagaanatgtgaatgantaaaagatttcatcttatgaaaattcagaaggaagtctgtaaaaactaatgtgactggacatgacaagcaatattctattttactctccctttcccctcaatacccacatggaagaaacaagaacagcacaaaatgcaacagcacccaactccttcaatgcatcaataacaaaaaaaaggttcttggaggtgattgatcgtgtcactttcattttangaaagaacggaggaggctggttatatttgcaggttattaactagattgtctaacttcacttttacaaatttgaagtttcagatatatataccttgaaaaacatgctataaaacctgggatacaacatagcatgggagcggcacaacattacttacatgcttaattccctcatg

SEQ ID NO: 48380 - DNA, 413 bp, Zea mays
  unsure (1)..(413): unsure at all n locations
cactacgaatcatattccctctagttcatgttggctgtcacaccacaaacataggtggtgtgatctcacaagagtacaaaccccacttagtacaataaaatggtgcatgccagcaccaaaggcttgagggtgtctaacatcacttctagcaactaaggattaacctagagcatacgttataacaatggtttaactaacttaagcacttcacaaagcacctacactaatcaccaagtgattctctgagcatttaagtgtctagagctataagaatggngtcttaactctctattattgtttcttagctcccacacttctcagatgccatgttagggtagtatttataacccccatgctcaaactagtcgctgtacacaacacagaaattataagcactcactagatgtaacacc

SEQ ID NO: 48381 - DNA, 395 bp, Zea mays
  unsure (1)..(395): unsure at all n locations
tgcttaaaccttcggttctttatcttccttcgtattattctggtttactgtaatgcctgactcgagtccgaagatacctgttcacacattatactccagaaacgctgttaaatcctgtttttgaggaccttcggatgccgaaggtccccaacagtagcccctcgcaatattaatttgttcaaaataataaatttagattgcgacctggacgaaggctttacgccgaaggtccgaaaaaacaccttccctttgctagaatagcaacattcactgacaagcggggtctttcaattttcaacgcacttggcgtataaatacggccataccgtaaacgcatttgacacgctctctgaccaactgcttccgctcactcaattnttagctcttgtgtacta

SEQ ID NO: 48382 - DNA, 426 bp, Zea mays
  unsure (1)..(426): unsure at all n locations
ttctcttattgtttggcttacacacacctaaagggtacttctattggctttggttttaaacctcatggtagcttgatacaatactatacttatctttnttgacttcttacatgggttggtttttagtaaagccctaaataacaagagatatgttgaagccgacgctgcccgtaaagagatatttaagcttaagtccgaagtatctacgatntggttgactgcgaagagaacgacatatcttatatgattttagagacagaatttgttgagagccaaactgaagttctagatttgtccgaagaaaaatttagtggaaagaaacaatgaggagcaaaatatcagatttcgatgctttagtcactgaacaagacaagtgcattgcatatcttgaagttgaatttgcacaaacaaaaatggaattctaac

SEQ ID NO: 48383 - DNA, 420 bp, Zea mays
  unsure (1)..(420): unsure at all n locations
agctntatcaaatggacgtaaaaagtgcctttctcaacggaccaatcaaggaagaggtctatgttgagcaacctcccggctttgaagatagtgagtaccctaaccatgtgtataaactctctaaggcactttatgggctcaagcaagccccaagagcatggtatgaatgccttagagatttccttattgcaaatggattcaaagtcgaaaaagccgatcctacactctttaccaaaacacttgaaaatgatttgtttgtatgccaaatttatgttgatgatatcatatttgggtctactaacgaatctacatgtgaagagtttagtaggatcatggcacagaaattcgagatgtctatgatgggggagttgaagtacttcttatgatttcaagtgaagcaactccaagagggcaccttca

SEQ ID NO: 48384 - DNA, 440 bp, Zea mays
  unsure (1)..(440): unsure at all n locations
taaccttgtaacgaggataagctgcctttgttccaaaggtggatggttcttaagtctctntgaaatccttaaaggaaaatgcttaatatatctgcaacatgctctcataagtgcataaactgtcttgagcatcactcatatactatgacacaatgcacttcactttctctatgatatagacttgttctcattaacctaattatgtgcacttggcatttaaggccaaaatatgtattcctctcaaggcacatatttagggggagaaatctatattatatagaactttgatcatacttaattgacatatatcttgatcatatctctttcattgtggtacaaatgcatatattctatntntcccgtaccatgactaccactaatatgttccaaagatatactatgctagtcgtaaatgaaaaggaatggagtcttcgcgaaac

SEQ ID NO: 48385 - DNA, 389 bp, Zea mays
agcattggcatacccttacttctttgcgttggtaacactactgtggctaggcattcctggactaagtccctagacccaatgtggtcaaacacaattctaaattcatacacagcatcttcgcatggatcccctggtgtcatgttgcattgaagtctattcagcccgaagattatcttcagcgggctttgaactagcttctccttttcttcatcaattttaacataaaaccattcagatttccatccgatcggccatttagtgcgatagctgaccaccggtgtcttcatatccttccgataagcaaaattataacaaccgaaagtttcatgcaatcccgcttctctagccttcgtctgataatgaagttcatgtactcggcagaatgcatc

SEQ ID NO: 48386 - DNA, 421 bp, Zea mays
  unsure (1)..(421): unsure at all n locations
gctgtcagcatatttggtacccatcgcttgtatgggccatgaggggtagtaaacaaagatctatgaacccaaatgtcctttgtgctagcgcttggtaaactcattacccttctagcacaagttgcaattttgggttgcctagttacatatgaatcagatgacaagctaggagtggaagagttaccaacgggacaatccttgcattgatgtccctttttccggcatatgtagcaaagtcgatcctcaagtctagaagatttcttctttccttgtttcttgcttgctacatggttagtcaaaattttcttttctaaccctatgcctttntgttttaaatagggacaagatttaattaagtgtcccttccttgagcatntaaaacaaagtctatcatccttgttaatagtcaagccattttaat

SEQ ID NO: 48387 - DNA, 387 bp, Zea mays
  unsure (1)..(387): unsure at all n locations
tgaagccatggtaagtagcatatgcaagttatatgcgaatttattcaagcctaactacgggtgcataggtttcaccaaaatccaaaccttcaacttgtgagtatcccttggccataagtcaagctttgttcctagtcaccacaccatgctcatcttgcttgttgtggaagacccatttggttcctacaacattntgattatgacgtggaacaagatgccatacctcattccttgtgaagttgttgagttcctcttgcattgctaacacccaatccgaatcccttaatacgtattccaccctatatggttcaatagaagacacanaggagtaatgttcacaaaaatgagcaacacgagatcgagtggtacccccttatgaatatcgtc

SEQ ID NO: 48388 - DNA, 431 bp, Zea mays
agcttggactagtttgtgttattgaaagctaataccaagtttgagagagaagtacaagcggagtaaacttcttcactaaattgcttttcacaagatgagtgttaaactaaaaagcaattattcaagtgaagtgaatggagatagagagataatcgcacaaataaagacacgcgacacaacaattttatcccgtggtttggtcaagtagaatacttatctactccacattgtggcatcccaacggatgagggttgtactcaacccctttcaagtgatccaaagatcaacttgaataccacgattctctttatctcaacaatatcctggtgtgaggaatctccacacattggaatctctcacgccttacacaaaagatctcaaataagcacatgagtaaggtggaatagcaacacacacaagagcgagagttg

SEQ ID NO: 48389 - DNA, 459 bp, Zea mays
tgaggctgtgtatagattaccgccctcttaatgcggtgactatcaagagcaagtattctgtgcctcgtattgatgttctttttgaccagttggtcggggccaatgtgttttccaagatagaccttcgctccggctaccatcagatcaagatacgagcaagcgatattctgaagacgacattctcaaccagatatgggttatatgaattcttggtgatgtctttcgggctgactaatgcaccagcatatttcatgtatctgatgaattctggtttcatgcctgaattggataaattcgtagtggtgttcatcgatgatatcttggtgtactctaagaacgaagaagaacatgtcgggcatttgcatgtagtacttcaacgtctgcgagagcaccacctttatgccaagttgtcaaagtgtgatttttggctaaaggaaatcaaattctttggtcacacta

SEQ ID NO: 48390 - DNA, 445 bp, Zea mays
  unsure (1)..(445): unsure at all n locations
tgccagcttggacaatctggaatgaatcggcggtagtaacctgccgtccaggaaactctcgacttgatgtacagtggttgggggtttccactcccaaatatccttgactttgctgggatccaccacaatccccttggcagataatacttgtcccagaaattggatctcctccagcccgaatgcgcacttactgaacttagcatataactggtgttcccttaagcgccttaatacgatccgcaaatgctgagcatgctcctctntattcttggagtatattaagatatcgtccatgaataccaccacaaatttgtccaactcgggcatgaatacccagttcatctgatatgtgaagtgggcaggagcattntgtagtccgaaagatataactagatattcaaataatccgtacccgatggtgaatgccgtcttggtatatctttgg

SEQ ID NO: 48391 - DNA, 349 bp, Zea mays
tactgtttgtttcctaatttgaatggatggatgtatgtatgtttgcacttgcatagagaacgatttggtcgaggaactccaagaactctcatgagaagcacttgagcagcagtccgttggtggaggcaagtgtcccttgacctatctctatcctattcattctttaattcacctcccgcattacacatttatatctaacgagtcactagctgtggtatctatgtccttggttacctatctgggttggattattattgcttagtcttatgctattgctcaactcttatcaatgaacatgatgagaactatcaatgatacgctgtgttccctcttttactatgatgtatac

SEQ ID NO: 48392 - DNA, 437 bp, Zea mays
agcttgtgagcagtaccagtacagaagagagaatgctgcttccgctgatcacccgaagcgtgtgagcagtacaagtacagaagagagaaggctgcttccgctgatcaaccgaagcccatgcttctatgtgaagacatagcagaacaaaaggtattgctgaggtctcaattatctaaagaacaagaaaaaactttgataaggtttttattcaacaacaaaggtgaatttgcatggtcggccaatgatctttgcggagtcaacagggatgtcattgaacattcacttaatgtccatccatccttcaggcccagaaaacaaaggcttcgaaaaatgtctgatgataaagccgaaggtgctcagaatgaagtaaaaagacttctcagcgctggtgtcatcagagaagtaaaatatctagagtggctagccaatactgttat

SEQ ID NO: 48393 - DNA, 366 bp, Zea mays
  unsure (1)..(366): unsure at all n locations
agtccaacacttgcctactccacattgtggccgtccaacggacgagggttgcactcaacccctctcaagcggcccaaagacccacttgaataccacggtgttttgctttggttcactatatcccgcttgcgaggaatctccacaacttggagcctctcgcccttaccatttgatgttcacaaagaagcacggaagtaaggatgggatgagcaacgcacacaagacacaaaatcagagcacaaccacacacataagtcacaactcgagctcacaacacaacccggagagttctctactcanatggagctctagttgctatcacaaagaatcaaatgcgccgaattggagtcttgggcttangaatgc

SEQ ID NO: 48394 - DNA, 444 bp, Zea mays
tgccagcttgaagccatggtaagtagcataggctaataatatatcgaattgactcaagcctagctgcgggtgcataggtttcaccgaattccaaaccttcgacttgggagtatcctttggccacaagtcgagatttgttccttgtcaccacaccatgctcatcttgtttattgcggaagacccatttggttcctacaacattttgattaggacgtggaactaaatgccatacctcgtttctagtgaaattgttgagctcctcttgcattgccatcacccaatccgaatcttggagtgcttcctctaccctgtgtggctcaatagaggaaacaaaagagtaatgctcacaaaaatgtgcaatacgagatctagtggttacctccttatgaatgtcgcccaggatggtgtcgaccgggtgatcttcgtggattgctcggtggactc

SEQ ID NO: 48395 - DNA, 368 bp, Zea mays
  unsure (1)..(368): unsure at all n locations
gagagagatttgctgtgttcatttgagctcttgcgcttggattgcttctttntctcagtcgttcttgcgatcatcttaattgtaatcaaggccagagacactcattgtgtggtggtccttgcggggaagtttggttcccggttgattgagaagagaagctcactccgtctaagggaccctttgagagacggaaagggttgaaagagaccccgtcttagtgaccacctcaacggngagtaggtttgagagaaccgaacctcggtaaaacaaatccttgtgtctcacctctttattcgcttgcgaattgttttacgccctctctcggactcgcattatatttctaacgctaatctggcttgtagttgtga

SEQ ID NO: 48396 - DNA, 315 bp, Zea mays
atgaacacgtactctccggcggcaagattacaatctaatgaatgcaatgcgtcagatatatgcatgatatgacttgtgcttttagaaatcacaactttaaaggtgcatgatttttcttgagttaaacaaggctaactttacttatgtaaggcccttgggtggtatacttggtaaattggtttaaacttagctaaggtaagtagattaaattttggggttccactgaattccttttaagtcttagtgagaattgataagtactcaagttagacttattggggtggggcttatttcttctttccttttcttttattc

SEQ ID NO: 48397 - DNA, 472 bp, Zea mays
  unsure (1)..(472): unsure at all n locations
tataaaactaagctgagaggcatggtaagtagcatatgcaagtaatatacgaattgacttttgctagctaccggtgcctaaggttcgtcaaagtccaaacctttcacttgtgaatatccctttgccacaagtcgggctttgttccttgtcaccacaccaggctcatcttgctcgttgcggaatacccatttggtacctacaacattntgattaggacgtggaactaaatgccatacctcattccttgtgagggttgtgagctcctcttgcatagccaccacccaatccggatctcttaatgcatcctctatcctatatggctcaatagaagacacaaaagagtaatgttcacagaaatgagcaactcgagatctagtggttacccncttatgaatgtcaccaacgatggagttgatggggtgatctcgtaaatcgcttggtggactcataggtttggcggtctttgatccct

SEQ ID NO: 48398 - DNA, 368 bp, Zea mays
agcttgccttcgcctcattgtccacccacaatctaacggagtcgtggaacgcgccaatggtgaaattttcacagccatcaagaaaatgctcctcgacgacaagaaaggcaagtgggtcgacctgttacctgaagcagtctgggcgctgaacacgaccgagtgcagggcaactgggttcacccctttccgccttctatatggatcagaagccatgaccccgcaagaaataaaacatgggtcaccatagacagtcacttcatccgtccccgacgtagacgagcctactttcaaggacctcatcgacggagaccgcgtcttctccctacaggccctaaacaaataccaagctcaaacaaaagcatatcgcg

SEQ ID NO: 48399 - DNA, 295 bp, Zea mays
  unsure (1)..(295): unsure at all n locations
gacacaatgttgaaatttgtattctttattcaaatntgaattcaaaatagtttggagcacatgacaacacgaaaagaactcatccacaaagggaaaagagcttacctgggccaacaaacctgtgttcggcccacctggaaaacccttcgcgcagctatcaccgcgctcggnccaacgccctctcgcgccgacagatggggcccgcgtgtcagtcttctgtccaccgttctgcgcccattgtctcgcttccacgtggggccacgctgtcatcgcccagctccgcgcggaggtcgca

SEQ ID NO: 48400 - DNA, 438 bp, Zea mays
  unsure (1)..(438): unsure at all n locations
agctntcctgcgcacagcttcgtgattccttgtccttcgtcataatcgccttggtctcgctcaagcttcgtcctgaccatgctctgtatgctcatgatccgaatccgaagatacctgttcacatatttcacttggaaaacattgtcaaattatgtttttgaggaccttcggaagccgaaggcccccaacagtagcccctcgcaatattaatttgttagagtgataaattcagattgcgacatggacgaaggccttaagccgaaggtccgaaaaaacaccttccctttgctagaatagcaacagtcattgacaagcgggaccctccagttntcaacgcactaggcatataaataagagctcaccacgggttcatttagcacgctntcttgccatctgttcttactcacccgacttttagctcttgcgcaccaacacttg

SEQ ID NO: 48401 - DNA, 448 bp, Zea mays
  unsure (1)..(448): unsure at all n locations
tctagttttacctgagatgcactaagcangaatgagaggtgggaaattaaactaggtatgaagcacggataatacatgatcatgctttctcttcctttcataccagatatacaaagaatgtatagaanaggaagatttatgtacaagtttatatgaaaggagatagttntacctttatgtacctttacatagggacgctctcgtcattgtgcttgtccttagtcttagatgcttaagaccaattcttaatgacaatatatggaaatattntgcacaagagagagttctacaactagtgatcttttcaagttattgttagcatatatcaaatggatcacaagttgcataaatgtatcatgaattctccttttaacttagtgcataagagagatattgattgatagtatataccgcactaagaagcatgnatgatgatagaagtcattca

SEQ ID NO: 48402 - DNA, 213 bp, Zea mays
aatgtacacatataattactgtagatcataacaaattctaatgatcatataaacattacatggctagagtacgtgctttactaaatgcttaaggtagctctatctctgctatatcatctagattatctaatatctaattattaaaagcgatattagacaccgacaacatcttggtaggtgtctgcatattggactgtacacagtggcgcttat

SEQ ID NO: 48403 - DNA, 407 bp, Zea mays
  unsure (1)..(407): unsure at all n locations
agcttgccaatacttgtcanaacatcttcatctatcagcacagcaactgcagacggtaccagtaacttggcctttcgcatgttggggactggatatgattggacctttcaagaaagctcaaggaggatacactcatgtattggtagcaatcgacaaattcactaaatggatagagttcaagcccattgcttctttaacctcagctaaagccgtggaattcatacaagacataatattcagattcgggataccaaacagcatcataactgacctaggatccaacttcacaagttcagaattcttcgacttctgcgagcaaaaatgcattcagatcaagtatgcatctgtagcacatccaagagccaacgggcatgttgagcgagccaacgggatgatactggaggcac

SEQ ID NO: 48404 - DNA, 429 bp, Zea mays
  unsure (1)..(429): unsure at all n locations
ttctctctttactaagtatgaaaagaagggaaggtgtggtttcgccgaaagctcaaaaagaggtatgtgtgtatgtttcatgcatcgcaaagaaataaactacaacagtctacaaattcgattcaatattacatacatcaaatattacatagttntgttacaatagaggcctaatcttccttcaattgttccatacatcaagcatttcaaaatgtcattaaaataagatctattcctctctaaggactttctcggcaactttgttcaataatttatcgacgacttcatcgataatggagttcgccatgcttataatgtccagtgcttccttcatttctgaatcagctaggggattatacgactcctgtggcggngataagtcagctgtggtaggtaaatttgtaattcgaagccaccaagcaagtaatg

SEQ ID NO: 48405 - DNA, 388 bp, Zea mays
  unsure (1)..(388): unsure at all n locations
agcttcngagcgccgaagggctaaaaaacaccttccctgagctcngtgncgagagacgattcaatctctctgcgcgtagcggccccaccttgcagagttactgttcagtctctgcggtccaccgtacagcgagtgcgagcgggtgtccgcgtggtgtaaaacttttggcgcttcgccttcttacctgcggcactatataaacagacgagtaggtgtgaagttaccacaacatttactgctatttgcactgttttgctgccaaaatttttaaccgtcgccgaagcttgtttgtcggaatcgaacgaagctccatcttgaaacctgcttcggaggaaaaaagtattaaagtttcacaagttcatagtttaatggccagagtccgttctac

SEQ ID NO: 48406 - DNA, 285 bp, Zea mays
  unsure (1)..(285): unsure at all n locations
gagagtcatggtaagtagcataggcaagtaatatgcgaattgattcaagcctanctaccggtgcataggtgtcatcaaaatccaaaccttcgacttgtgaatatcctttggctacaagtcgggctttgttccttgtcaccacaccatgctcatcttgcttgttacggaatacccacttggttcctacaacattttggttaggacgtggaacaagatgtcatacctcattccttgtgaagnntgtgagctcttcttgcattgccacacccaatctgattccctaat

SEQ ID NO: 48407 - DNA, 327 bp, Zea mays
  unsure (1)..(327): unsure at all n locations
tgcagctatanagaaaattatcttaattggagaaggtgctatatgctggttaatggcctgctggaagcttcagcattactttcaagcatatcatataattgtaccttcgtcgcaacctttgaaagacataatgaggaatagagaagctactgggaggatcggaaaatgggccatcaagctcaatgaattttctattgactatgtacacaggtcctcaattcagtcctaggcgttagcggatttcatcgctgattggacgccacgggctcaggaagaagtaacaaaagacgtcgaagcctggatagtcttctgtgatggttcttgggg

SEQ ID NO: 48408 - DNA, 368 bp, Zea mays
  unsure (1)..(368): unsure at all n locations
taaatcccanaatcgaacgaaggtccgtctcgtctcttgcttcttcagaaagaagagcttctggaaagagaaaagataaaagaaaaaggtttctgacttccccaaactcagaatcaaatggcaagagtgcgatctactgccaaagttgttcgtgagggagacgaagctgaaagttcaggcactgtgcccatatccgaagcgatgcggcgctccggtctagtgactgcggaagaggggcctggtgccgaagcatacccgacaacagccgaagaagaaaacattgatgggactgactccgaagatgactacgacactgctacacccagcaagcccagtcacctggaatttggaaaatcaactggttcaaa

SEQ ID NO: 48409 - DNA, 353 bp, Zea mays
  unsure (1)..(353): unsure at all n locations
tcttcatacagacaatttgacttgtccgaagggttcgtgtccgaaggtacctgctcatgtattatactccagaaacattgtcaaatcacgtttttgaggaccttcggaagccgaaggcccccaatagtagcccctcgcaatattaatttgttaggataataaattcagattgcgatatggacgaaggccctaagccgaaggtccgaaaaaacaccttcctcttgctagaatagcaacagtcaatgtaaagcggggccctccttgtttcaatgcgccagatgtataaataagagcacaccgcaatgtcatttggtacgctntctttgccatctgctcttgcttactcagttttt

SEQ ID NO: 48410 - DNA, 373 bp, Zea mays
  unsure (1)..(373): unsure at all n locations
tgtgaaaccaatcgcgagtttattgaaaaattatactaaattccattggtcttcaaaatggtatgaagcttttgaacaattgaaggtattattaaccactgctccggtattggctcaaccagatattgaaaagccttttgatgtgtattgtgacgcatcangcaatggtctcggctatgtattaatgcaagaaggccgagtaataacttacgcttcaaggcagttacgccggtatgaggaacattacccaactcatgacctggagttagctgtagtggttcatgctctaaagaattggcgtcattatctgctggggaatgtctgtcatatctatacagaccacaaaagtttgaaatatatagagctcaatatg

SEQ ID NO: 48411 - DNA, 248 bp, Zea mays
  unsure (1)..(248): unsure at all n locations
ctctatatctaagtctctgagactaatacctgcttntaagactattatgtgtgtagtagtctcattgaaggacaatggagtccctatagaaagacaataagcttcccctgcaaatctacaagtgtgttcaagctccacaagtggttcattccactatcagtatcatctacatgccttctctagaattntgatagactatatttcacatcctatgattcataaatgcatatgtagttaaaatatatttg

SEQ ID NO: 48412 - DNA, 344 bp, Zea mays
cctcgaatttacctccataggtactcatagttttctaaagttttccaactgtaagagataacatctgagcctcgggggcgatcgtctcataaatgactgattttatactccgctccaagtgtctgaggtttagcactcgttcctgtctgactataaactacacctaatttttgagtggtgaatatggccacaataatcgtacatcttctttgggcacgtgaccttgtttgttttgctgtgagacaactcatctttcttacggtttactctcatttctggatggctcgcatatgatttgagaagtgtgtactcacgcaatgttcgtactagccactgtattacgg

SEQ ID NO: 48413 - DNA, 194 bp, Zea mays
ctcagcttgagtccgccacgcccgggcggcagctctcctgcgtgctgcccctcctttttcttcaaaaaacgaaccgggtgaactgaacaatcaacccatttcagagggatagcatctctagtggtaactaaccacagctttgggtttgtccacccctcatactctgactgttcggctctcgcagttctgtctgt

SEQ ID NO: 48414 - DNA, 183 bp, Zea mays
ttgtgtatacaattagcctattttgtaaaacaaatagtcctatacatcaaggatcttctcttgattaccagagagcatagaggctcgtgattgttgtaactcttcggagggcttaagtgaatgatgtcatctcttcctgtcaattcactccctgatcatgcatatggaacaacacaccttctt

SEQ ID NO: 48415 - DNA, 219 bp, Zea mays
  unsure (1)..(219): unsure at all n locations
atacactctttctagagtgcagttttctctctcgcctacaacacaatccgaattctccctctgtgacagatgatctcttaatactcgattngccaanaccgcatggcttggtcgcaaggtcgatctttggagtcttcgccaccactatcaacatcatagctatcgctgtcaccagtatcttcagataaaccttccacaanttctttagtgatcttctct

SEQ ID NO: 48416 - DNA, 347 bp, Zea mays
gaatcatgtggagtagcagagacaggtgtggttggattatgctcttaataacagctgccagcaaactaaacctgaaatgatctgatagcaaacagcgttgcatatcaccggatgcctcaagcaatttgtgagtcattctcagagctgaaggaaaattactgagaagttacctacctctaacgactgagacaattcttaagggtgattgacatcaaatcaacctgatttctaatgttaatcaataattaattatccacgttgttgagtgttacaaaaaaagcgcatatttcaactctaaaattcaaattccagacactattcttaaattgcaatttcctgacctaatt

SEQ ID NO: 48417 - DNA, 282 bp, Zea mays
  unsure (1)..(282): unsure at all n locations
tcctgacaaatctaggagaaacgggtctgtagtaagaaatgatgaagaccatacgtctggattgagttctggatacangcttttcgaattatgaggatttaaatgcagcatattcttgaaagaaagtatgacaaggtaacacttacataaaaagtgtgcccccatttgttgccactccaagatatcatggactggcagctgaggctacgagcagatgtattttatggactatgcactcttatgatgaccgtgctcctaattaactcattgacaggtatttcg

SEQ ID NO: 48418 - DNA, 152 bp, Zea mays
catgggagcatcggagagacttctgataccgcgccgagtgtactaaggccacgtcccgagcttcttcgagctggtccagtgagtcttctttggctggtctgtgtgcttcggcatcgtacgccttcgtcctccgggaaccatattctaagtct

SEQ ID NO: 48419 - DNA, 341 bp, Zea mays
tgaatgtaccacaccagctgcaggtgtagaataatataaagatgaggatatatgtactagttaactctcaaacaactgttttacctaggatgatggagcgacctatctgtttgacaatttatttttaccatactgcaatacctctatttaatatgaacccacaatatatgcgaccgattgctgtgtaaaaccatcttctatactttcatgtaacctgctgagatacctcttcatggttgaaaaactgaacaaccactgtaggacttcacaatgtacatgttgaccactaagaataggcttattactgtgtcaattaatcactttggaagactaatacctct

SEQ ID NO: 48420 - DNA, 293 bp, Zea mays
acagtggatcatctcaccaaactatacaccgcagcgtgactatccatggtcattggcgatgttctagctggggagagattgctgaaggggaatttcttatggatttttgcagaaatctaaccagaactaaggatttgacgctaaaattcgtaagtaaaataaacaacggcgatagatctaatgagttctagagagctacatatttttctccccacaaggatgagaatatttgatgagctctgtacaatcgacgtggcaaaaccttcctacgtttttcactaaatttactcacg

SEQ ID NO: 48421 - DNA, 193 bp, Zea mays
aaaaggcacaagaccccccagggactcagcatgaggcaacaaaactcggcaagcccagggcgcggactcagagaaaggaagggggcacacatactttgcagcgaaacaaattgcgccacaaaaagaacgtaaggctggggccaccttgacaaaatactataactaaatattcctaccaataacaagattcaaa

SEQ ID NO: 48422 - DNA, 314 bp, Zea mays
  unsure (1)..(314): unsure at all n locations
gttagaggtggggaccctaatacgccaacaatgtctatatacagctatacttactaagacctgctaatgagatcacactctgaagcataaaataagctgccaagattgtattcatcatcacgacatagtctaggtacttttacactctcatctcgccgctaccacgaggaaggctacttgattcattaaagtcctttgccacatagactgatgcgctataggggtatagccataaatacccaaactaactttcttgtcatctgatcacgataaatactattgccangataatcctgtattactgttcaacactt

SEQ ID NO: 48423 - DNA, 166 bp, Zea mays
tactattagcaaaatggagacacgcagactatggagtctcatatgactcttggccatgctatttaaatcgggagaagatggcttgaatgtgagattttccgctacttggtgtcttttgagataaacaaaccaagacttaagacttctaaaagctaaagagttgact

SEQ ID NO: 48424 - DNA, 221 bp, Zea mays
gtattattaaattcctgggaaacttctaacgagtacattatttttaagacttgcaccaatttggttacaggaggagactgtacatctactatatgagtcttgtctctgtgatgacaacatgtgaggttgctgaatgatggaaacagtaccagcattaaatcgaatgcaaatgtatatgtagtacaagatagaaattgggatgaaaaacataacagtaatat

SEQ ID NO: 48425 - DNA, 368 bp, Zea mays
  unsure (1)..(368): unsure at all n locations
tatctcttattacaatagagacgtttgtgtttatctttctaatagaaactgacgtattgcaaaatgttattataatactaccttatattcagaatatgtaatactatttggctttatacaaacatgtatttgactaataaattacaatatagaattaggcttcatatacacttatatatatatattaatttacatgacaaaatggactatctanttattctattataaacatctcacatactactaatattattctaatgaagtatcaaagattatctatacaataagagcggatactattattcaatcaaatgcctgtcaatatgcgacgtgatatataactatcatagggctctttatagtatact

SEQ ID NO: 48426 - DNA, 147 bp, Zea mays
ctagactgtctgagttcgagtcatgttctctgtcaggcgacggatctctctcgacagcgagggaggcgaccggatcttatgcactcaactaagtcgggaggagtgagtcttccgtcacacacttttacttgtttcgaacaacacaga

SEQ ID NO: 48427 - DNA, 338 bp, Zea mays
aaaaagaacaaccgcaactatcagccaaccaaaaagacccgacagcacaagcaagaacgccccgaagacaacaaccacacagggcacataaagaagtgaacccagcccaaaaggcagacaacaaaaggaaaaaaaacacctccacgggcacccacagaacccaaggaccgagccacaaggaagagagcagcccagaacgaacccaaaaaggcctaggcggggagcatcgaagaagggacagaactgccaccacgccacccaaaaaacacgcaaccgcggaaatacaccgacaggcggagcaaaacaaacaagcccagcaagcagcgaaccaccagcag

SEQ ID NO: 48428 - DNA, 168 bp, Zea mays
  unsure (1)..(168): unsure at all n locations
acacacactaacatactccccttactattcaacaaatgcccacaagcattnggaggaaagttatgtacatatctcaaaaatcaaacttccttttaccttgcccggatggggacttctctctgagagaataactcttggagctctcacacttggctgatccttatctac

SEQ ID NO: 48429 - DNA, 168 bp, Zea mays
  unsure (1)..(168): unsure at all n locations
taatgaaaccttctcctgcaagaggattttttgttgcctganaccatctatgcttatattataagcacaaatgcactgcttaagtacattacaacctccaagaatggtctaacttgttatacctacgaccatacaggaccaaactgaacttgagaaagaagaataact

SEQ ID NO: 48430 - DNA, 92 bp, Zea mays
gtgcttgttcgtcagtactagttagcctatcgggtcatcacgagtcccctagataatctgaggtaatatgccaaatcaactttttgacggcc

SEQ ID NO: 48431 - DNA, 59 bp, Zea mays
tcctaaaattatattttgacactaggaggtttgactcgatcaacttaatttacgtacta

SEQ ID NO: 48432 - DNA, 250 bp, Zea mays
cactgtgataatctgaacggagcaggatgttgtttcttgtccgaagacataagcgggctgttatgggaatgaaataaaaaggacaatactgaatggtgatttgcacaaattaaaacagcttatgctgacgggacttggacagtcttagactcgaataaaagggaaatggaaataaaaagatgccaaaaaaaacgacatgtcaagcttttcttgcgatctgcctgtcactctgcacgctgataaatctata

SEQ ID NO: 48433 - DNA, 104 bp, Zea mays
cacgagtgacttctaatatgaacgccaaagcctttttttttccatggaggacagtatgtttcttatgcatcatttattaggcgtcagaacttataacatgctcc

SEQ ID NO: 48434 - DNA, 343 bp, Zea mays
aagagctgtgtctgtactagcacacacaggctgcttacttcgaggtttgaacaaagccctcgggacttgaaacagtcttaattctgtttcaaatgaaacgaatatttacttaggaatttttcatacaactatacgagataagcaactcgtcttgttgataaggagtgcacatgatttggtcgtgtcaagcttcaaaccagttaagtatgaacatctcagctgtgattcatgattagcgatgaaatttcgcagttttgcgagactcatcacaatgtaaatcatgtgaaatgcaaataacacttctacatatcacatgctgaagggctctgagcttccgcagact

SEQ ID NO: 48435 - DNA, 293 bp, Zea mays
caccaacctgcgcgccgccgcacaatttatgtgaagtatatgatttgcttctcgtatatatattagcgacacagcgttaggacatacgctaaaatacccccctccttccaacgtgtatataacttgcgctgacctacacgtgaaactatcccggtacctgccttggtaattgctggaacgggcaactgctattccgtaaaaatggactccggtgcgacaaaaattaaacttggaagcgttacgaccccttgatttgtacgcgatgtggtctcacataactatgttgaaggcag

SEQ ID NO: 48436 - DNA, 141 bp, Zea mays
  unsure (1)..(141): unsure at all n locations
ctcatgctcgggcgactccagcttgtatcacctagtatgaaaactccactgccgcaccaagagggagctctggacangtcggccctggagacaatttacgactcagctcacccntcgccgatgatcacagactgcgacact

SEQ ID NO: 48437 - DNA, 361 bp, Zea mays
gatctattgattatgtacctctgacaatcacacactaaggtaaataataattctattttcaaataaagttaatgtatgccatggtctatgttatactctgaattcattacccactatgtagtattgtgttctctttaagaggagtcccaatgattgtacatgattggtgtgaagatcatttgtactttccaaatgaattgaatgcatgctcgctttatctatacaatgaacagaccgaggcttctgaatgtgttgtggagaccttcctaagcagccacctagtgaaagcaagtgtctttgacccattatgtcctactactttttgatacactgcccgcaatattttataacctaagattga

SEQ ID NO: 48438 - DNA, 385 bp, Zea mays
agcgcttacaggctcacaacgcctaatggtgaggacctggagcactcctggaacatcgacaaccttcgcaaattttttgtttgacccatttagggctgatttcgcccttgtaattcgccgcaaacaatcttgtaccggcctgcactcttttcctcccagggggtgagggttttaacgaggcggagccatgtaatatatgtgagaaaaatcccccgcaaaaacatgtgtcgaaaaaagaccgcgacaacggtcttcagcattcgaccaattcgaagtcaccgcgaggctaagcgctagccaccctcgcgtgcgacaaatccgcgcagaagtcgcctaatggtgcagccggactaagcacaacaagtgcgaaaaaatccgatgtcta

SEQ ID NO: 48439 - DNA, 296 bp, Zea mays
  unsure (1)..(296): unsure at all n locations
gagctcgaccatatgttataatagaaggggagctgtacaagcatggggtctggtctccactactcaaatgtttatcaagagccgaaggtatagaatcgatgaaggaaatacacacatgcctgtgtggatctcacattggatctangcctttgctgggaaaagtttttcgtccaggattttattggccaaaggcagcttcggatgcancggaattantccaaaagtgcgaatgctgtcagagatgtgcaagagatcaaaaacaaccttcggctctaacccagctaatacaacccact

SEQ ID NO: 48440 - DNA, 369 bp, Zea mays
  unsure (1)..(369): unsure at all n locations
agcgactgagctgcagctntaccggcaatttccaagcacgtacgtgcgcctttgttatcctgggacctccgaagctaccgacagcagccgggagagtctctccgggactacattcggcgattctcgaagcagcacaccgagctgcccaacatcaccgactcaaatgtcatcggcgcgttcctcgctggcaccacctgccgcgacctggtgagcaagctgggtcgcaagacccccaccagggcgagcgagctgatggacatcgccaccaagttcgcctccggccaggaggcggtcgaggctatcttccgaaaggacaagcagccccagggccgcccatcggaggatgcccccgaggcgtcaactcaacgc

SEQ ID NO: 48441 - DNA, 385 bp, Zea mays
agcttgctacaggccttcttctttgtctccatagcaagatccttactggaacactaccccacttaaaaagaatgagggtagaactcttgaatcttggggaattgaactccttgaagtacctcataacaagggtgttacggggccttcttctgctgttgttgcttgaccaggctgcagagagatgactgacacatggttgattctgggacaaccttcttctcatcttctcttcactatcttcttttcactgaccctttctttctctttagtcttcccactggaggattctatcaaagagtattactatcatacactggaggaaaccaaagactatgaaccatgtgcaaaagtcttcaacccaagaatcaccaagcattgtgatctt

SEQ ID NO: 48442 - DNA, 335 bp, Zea mays
atcgactcgcgtgcttgctatcagttatataacacatgttatgaagaactgcatgttcctattcctgtatgtaaactcagcttgccagtcaggcgcagtttctggaataatcgatggccggatgggcttataccccccagaatgcatcaagaggttcttatcactagcaaccaaatgttgccagcatgaaactgatgacaggccttccatgtgggagattgtcagagaacttgagctcatcttgaggatgatgcctgaagaggacctgattctgctggaaacctcagagacagactcgaccgatgtcagtaaagtcgtgtcatctttagcgaccg

SEQ ID NO: 48443 - DNA, 385 bp, Zea mays
agcttgtgaaggttcttcatccccacatgtgctaagcggcgatgccacagccagcccatgctagtcttagctattaagcatgcatctagaccggcctcttcttttgcaaaatcaactaaataaagtttgccgtctaatacacccttaaaagctagtgaaccatcacttcttctaaagacagacacatctacatttgtaaatagacagttatatcccatatgacataattgactaacagaaagcaaattatatccaagactctctactaaaaatacattagagatagaatgctcattagaaattgcaattttacctaaccctcttaccttgccttgattcccatcaccgaatataattgaatcttgggaatccttattcttgacgt

SEQ ID NO: 48444 - DNA, 252 bp, Zea mays
ctgggatgcggtccttacgggtggcatatgctatgtgaatttcctaaaagaagcatgtaatggaagatcaactcggctgtgaactgattcaaggggacaaaccagacggggaaatccttgctaccttacatgagtaagttcatgaagctgctgacctttgctctgaaatcggcgcgcatttatcgttgggatgggagagatatactgactgacacggaggggtggcctgtgacttctcgcctgtcggacact

SEQ ID NO: 48445 - DNA, 354 bp, Zea mays
  unsure (1)..(354): unsure at all n locations
tgcaagcttgtntgtcgaaatcaaacgaatctccatcttgaagcctgcttcggaggagaaaagtattaaagtttcaagagttcatagttaaatggccagagtccgctccaccgccagggttgaacgtgaggggaacgaaactggagcttcggagactgctcccatctccgaagctatgcaacgatccgcactagtggtttctgaagagatccctagtgaagatgcagaacaagcaaaacaaacagttgctgaagtggaagaagaagttattgaagaaactgatcccgaggatgattatcgttttgccatgccgagcaaacccagacacttggactttggaaaatcttaccgttt

SEQ ID NO: 48446 - DNA, 418 bp, Zea mays
agcttgtgaaggttcttcatccccacatgtgctaagcggcgatgcaacagccagcccatgctagtcttagctattaagcatgcatctagaccggcctcttcttttgcaaaatcaactaaataaagtttgccgtctaatacacccttaaaagctagtgaaccatcacttcttctaaagacagacacatctacatttgtaaatagacagttatatcccatattgcataattgactcacagatagcagattatatccaagagactcaactaaaaacacattagatatggagtgctcattagaaattgcaattttacctaaaccttttaccttgccttgattcccatcaccgaatataattgaatcttgggaatatttattcttgacgtatgaggtgaacatcttcttcttccccatcatat

SEQ ID NO: 48447 - DNA, 209 bp, Zea mays
atcactacttcatgtagaaaatctgctgtcatgcagtaactaagatttctgaggtaccaggaagagcgtgctgtcgacaaccatcctgctcttgggtccgcgatagagcgatgctcgctccgtttgctcttaatatatatgggatttggtttttgataaagcaattttattgaatttcagtctatagtgatacaagtcttgaaaaacac

SEQ ID NO: 48448 - DNA, 427 bp, Zea mays
  unsure (1)..(427): unsure at all n locations
agcttcaagcttgttggggacttgttctcaatttctatgaatcaagaacaaggcaacataaaatgttaaatatcaaagcccttcgtccttcggaacattatttcccttcggatataattgaattcggacgaaggttgtgaaggacataccttcacaatcataataaaagataagagagatttatacacaaaacacggaaaataacatgattaccttgaacattattattaatttatttctatttatcttacttgtataaacaacaaattacaaatgtaccttcggcttgaaagaaagtaagggtacaagcgtgatgctaacgcanatgcccagtcagcgtgaacagtacgagagtactgttcatctaattatatgcgccgggcgcaacccatgtaaaatacattaatgcccttacttttatcaatac

SEQ ID NO: 48449 - DNA, 433 bp, Zea mays
agcttcaaatgtgtcaaagttccttgttgtactccccagattcaacctttccatttcttgacataaagtggtgtcaggtgttcttactgtaagacaatgacaagaagccttgcgacttaaagcatctgccaccacattagcttttcctgggtgataatgaatttccaagtcataatctttgattagctcgagccaccttctttgtctcatgtttagctctgattgggtgaagatatacttcaaacttttgtgatctgtatacaaatggcacatattccccagaagataatgaaggcaaatcttaagggcaggaactaccttagtgttggggacttgttctcaaatgcttcgagttaagaacaaggcaacataaaaaatgttaaatgctaaagtccttcgtccttcgaagcattatctcccctcgggtataatg

SEQ ID NO: 48450 - DNA, 337 bp, Zea mays
tcggatttagctctggatcattggccttcggcaccatcactctggagaatgacgaagaacagggtaatcaagaacttggtaaggagccacataaaagaataaaggtaaaagagatatactttggtaagtaggttccgggcttcatcttcagccaactcgcattcgcccttatcccaaatttgagtgatgaacctgttccctatgcttcgggctttggctggaacatcaaccagatccgatgacgaaaggctaaagtacggcctattgacagcctttgtgtgattacactcagcctttatgaaagcagcaagtgtgccacaagaagctactaacgcac

SEQ ID NO: 48451 - DNA, 267 bp, Zea mays
  unsure (1)..(267): unsure at all n locations
agcttctaaagggataacacattgtatgactatcaaatgtncattntgagaaagacaggattcatagcgcatgccaagcagggaagcaagttggagctcatcatccatacaagaacatcatgatgaccaataggcctcttgagctactccacatagatctattcggcctggtcgcttacataagcatcggcgggagtaagtattgtcttataattgtggatgaatattctcgcttcacttgggtattaatttttgaggaaaaatctc

SEQ ID NO: 48452 - DNA, 369 bp, Zea mays
agcttagtgatgagcttagcaaaggagtggacctagcttataggccgaaaatccttgacctggcaggcatcgtccttcttgggcaagagaaggatgtatgctgagtttaacagatctaaattcacccattttctgctccaaacaactgtagcagcagccataatttccccttttatgatctgccagcacgacttatagaatttcccagtaaaaccatccgggccgggagccttatttagaggaagagataggactgttttccagacttcatcttcagtaaacgggctgtccagcgatgtcagatcatgggcagggatgtcaagctgagccaaatcaatggtgtgcgcccggtcaggtgaacatcccaac

SEQ ID NO: 48453 - DNA, 332 bp, Zea mays
tagctatatatgcgcgggcggtcatggtcgatgtgcgtggcgctcagcggacttgaccggacgccggggcgagcgcgcgcgcgggttgggcgatctctggcgtgccgaccaaggtctaacacttgtgcccgtgcgttctgcccaagctctggcgcgtgtggtcgctcattctgacctgttctcgcctgtgtcagtgcacaaaacctattctcctccctataagctaccattcttgtgtggaggtcataagatattgcctactggttgcagagatatggagccaggaaattctggtctgtttcactgccaaaacccgaggaaatcccaagttt

SEQ ID NO: 48454 - DNA, 316 bp, Zea mays
  unsure (1)..(316): unsure at all n locations
agcttatcaaagaaaaaatacagnaatggagaaggtgttgtatgctgtcttaatggcctccaggaagcttcggcactactttcaggcgttccatataattgtcccttcatctcagcctttgaaagatattatgaggaacagagaagctactggaaggattggaaagtgggctgcggaacttaacgaattcagcatcgattatgtgcatatatcctcgatccagtcccagaagttagcagacttcatcgccgactggacgccaggggctcangaagaagaacaaataaagatgccgaagcttggatactgttctgcg

SEQ ID NO: 48455 - DNA, 410 bp, Zea mays
  unsure (1)..(410): unsure at all n locations
acacttagatactaagcttaactacaacggacgcganctttgtatacctcgagccccgcctcnggcaagaactggagtcccgaacggattcacgccactcccgtaggcctccttatgcagcgggcgcaccctcgggtcgcccgaggctaagctcangcaaactttgtcgtatagcaaccttggccaaatcaccttactgccgaccgtatcgcatgcgcatttaatgcagggatcacctgacaccttatcctgacacgcgcgactcagntggcaaggtcgaaatgaccgcangcacttcgcccctttactgatcgttctgacaggaaaacaacactattcaccctgtttcgactactgtgccaaccactatggtaagactaacaacaataagtcacgggctctcccgagtc

SEQ ID NO: 48456 - DNA, 403 bp, Zea mays
  unsure (1)..(403): unsure at all n locations
agctntggccaccgtggccagcccaccctagccatccgtattccacgatatcgacttggttagctttgccagagacccgtgaagcaccccaagccctcaaacccagcagaacctcaccggagaccccgaatcaccctcgtcggacttcttccacccgccggcgaacatggaccgggtaagtctctacgccattntccaattcctcacgtgtaccgcctctaagtcacctggtaaagcctcccgagccaaccaattgaactatctagtcatgagcagccgaagtactcgccggcgacaaactcccccgcctacgcacgtggaccagccgactncgaccaccttcgacaccgacccatacctcgacgtgacgcgcgtaacctcccgaactccctgacgcctacta

SEQ ID NO: 48457 - DNA, 428 bp, Zea mays
  unsure (1)..(428): unsure at all n locations
accctttagcacaaagatgtctataaaagtagcttagctccgctaatgctttccagacatcattttttacaaaaccatgaaacataacaggaaggagtctttccattattatgtggtagtcatgactcttcaacccggaaaacttgcccgtcttcaaattcacagaccttctaaagcccgcggcgtaaccatctggaaacttaagttgttaaccatttatcaattgtttcttcttttaggttaatactgaaaggagcacgtggcttcttctggntctctcctatctccatagttggtcttctacagattaatgccaagtcttttctagccttatggctgtcttttggtttggtaatgataatcatgcaaagtgtgataatgctttcaaccatatatcggtccttgtgcatcacatcaatggtatgcat

SEQ ID NO: 48458 - DNA, 245 bp, Zea mays
gacaacactagatcacttttgactagagaaatgacttttccagattcttggaggctatctataaaagaaatcttgttttacacctgtacacttgccaggaataactgttgtacgccatataaagaccctacagaaaaggtgtactataaaacctaattaaactgtgtgaggacccgaaactaaattaactaaaagactgtataaataaaatttagaaaatcctacttaccttcttttggtataaa

SEQ ID NO: 48459 - DNA, 422 bp, Zea mays
  unsure (1)..(422): unsure at all n locations
agcttgaaataaaatatagggatgaataagctgccggagattgaccccatacaaataaatgtattgtatgtgcatatgaacatatagtntaatttatttcttcttttttcagctttaaattggaaagtggtagtgtcaaatgcattgcatcgcatatccaactcttatgtatatctggatctggaatccagatacgatatcagattgtctccaacatgtcctctaagtctggcttcaacagaccctgctgtagtctaaattgtagagaagattcttatcctctactccctcgagtagcgtcctataaatgatactctaaatttagaggatgctgttggattctctatatatagaagttctatccttttttctctattcattngaatacattanacaacgggtttagcaaaactaaaatatgt

SEQ ID NO: 48460 - DNA, 352 bp, Zea mays
  unsure (1)..(352): unsure at all n locations
tcttcgtcgccttgcggnctatacaccaatagggagtgctggttctgtgactcagtcttctgtccgataggttctgctgttggttctgagccttccactgagggaccaccttatactccaggtacttggccatggattctagactctagtgcttcatttcatatgactccttatcgcacctttctttcctctatgattccttcatctcgttctctcactgttcatactgctgatggatcaccactttctgtagttgggccaggcattctttcatctgactatntccatgtcggtgatgtttcttttatgcctcatctaaccatgcaactcatgtcccgtggccaacttactg

SEQ ID NO: 48461 - DNA, 385 bp, Zea mays
agcttaaaggagaaaagaaaaagaatgaacttgttcgactgccctatcacttcaaggtcaagaaacatttctaagagccttgccaagaatggttggaaatgattgaagctatgtgcaatgaaattttgggcaactatactaagaaagaagatcagctgatgaccgcggccttagcacccgaccgaaacgaaggctgaaccgagtaatggatgccctgaaattcgaataccctgactatgaacggttaagcaagggtgccgaatggccaacgcgaaaaagaattgtcagtgttatgaagaggcaagctgctataatgatataaaaagatgagaaagcgttgaaaaagaaaatatccaccctgagccgaaggtggttgtccgaaaaa

SEQ ID NO: 48462 - DNA, 445 bp, Zea mays
agcttgaaacgggaacaaccgtggtatgctcttcatctcttgaagaaaagtcaaggacttgatgattgcctacataaggaagccaaagaagaaaatcaacacctcttccaaaagcctcaaccatgcctccataaaaggtaacatccaaggtaataatcaagttacacttcatacaaatgaaaataagaagtgtaatgaatgctttgaataggggcacttgattaaatcatgtccctacattaaaagtgtcttgattattaacaaggatgatagactctgttttaaatgctccaagaagggacacttacttagatcttgtcctcatctaaaacaaagaggcatatggttagaacagatagattttactaaccatgtagtatgcaactaacaatgaaagaagaaagctttaaacttgaaaacgccatgctcacatgccgaagaagac

SEQ ID NO: 48463 - DNA, 360 bp, Zea mays
  unsure (1)..(360): unsure at all n locations
agctntaacccctgcgaggccttcccccgtttctttctaaccatggtaaatgtaatatcgtatgtcatattctatgcatgtttaatcgacttgttctcttgtatggtgtactgtttgtttcctaatttgaatggatggatgtatgtatgtctgcactcgcatagagaacgattcggtcgaggagcccgaagaactcgcgggagaagcccctgagcagcagtcggttggtggaggcaagtgtcccttgacctatctctgtcctattcattctttaattcacctcccgcattacacatttatacctaaggattgnactagtntgttattcatgtccttgttaacctactttgggtggataat

SEQ ID NO: 48464 - DNA, 253 bp, Zea mays
  unsure (1)..(253): unsure at all n locations
tgccgcagattgtggcagcctgtgtctcgtgccggcttcttgttgccgacggagccgccttgggcacctccacgtgcaccaccctcagcatgtcctcgcgccccggcctggccgcctccacacgccttgcgtggcttgccgcgtttgcggactcgtgtcgaggaggactncnccttcttcttgtcaccctggcaggccctccactgctcccgagtgagatgtagcttaccgccgatagtgatacgcccagata

SEQ ID NO: 48465 - DNA, 431 bp, Zea mays
  unsure (1)..(431): unsure at all n locations
agcttgaatgttcaaaatcaagaatttcaagttcaacttgaaaattgcaagaacatcaatgcctcatctttagtatttgaatctaagtctaactcaaatgataattcttgcaaacattgtgccaaatatcatgcttcttggtgnctaactaaccatgcaaggaataataacccacaggtaaaggtcaaagaaaatttgaaaagatgctctagcaatgatgggttaaagaaagttaaacccaagtacaagtcccttatacccaacaatggaagaaaggggcttgggttcaactcatccaaggaatacactagcacagtgcataaggtgtggagatccctcaaattcatagagggaaccaccctattgatgccttgtggaggattactcctaaatgaaagtcacctacggaaaggtaactgagtccacaaaat

SEQ ID NO: 48466 - DNA, 365 bp, Zea mays
cacctattacaaatttcaacatggtctacaccagaagtggatgtatctgctacttctaatttaacatttaaatcatttgtgacacctttcaaagtagaaaaggttttctgaccagtagatagttcaaaagaaaagctttcattacttttaacttctaaagcatatgatttttgtgcctcaacaaacttatcatgttcttcatataacaaaatctcttgcttttctaaaacgatatacttttcattcaggcatcaattaattaattaattttggctatcgtagaactatctaaagccctgaacaaacatgagtaatctacttcatcctcatcaactagattcggcctcacttgaagaagcataggt

SEQ ID NO: 48467 - DNA, 348 bp, Zea mays
  unsure (1)..(348): unsure at all n locations
agcttcgactcgtccgtcgcttctaagcgccatgagcgcaagaagtatagtaagatgtcacttcgttatccccgtatttcaaagtgcactcctttactttctgttcccttaggcaaaccaccatactttgatggtgaggattattgtatgtggagtgataaaatgaggcatcacctaacctcactccatgcaagcatttgggacattgttgagtttggagcgtangtacctaatgtgggggacgaaggctacgactcggacgaggtcacccaaattaggcactttaactcccaagccacaactatactcctcgcctccttgtgttgagaggagtataacaaggtgcaa

SEQ ID NO: 48468 - DNA, 404 bp, Zea mays
agcttctctgctgcctggccaagaatatagatgtcttcgcctggtccgccctatacctggtcggagtcagccgatccataattgagcacagcttgagaattgacccttcggtgcgaccaaaaaagcaaaggctccgcaaaatgtccgatgaaaagacagaggccgccaaggcggaagtgcaccgcctcctagaagctaattcatcgagccagtggcttaccccacgtggctctccaatgtcgtaatggtgcagataaaaagcgggaaatggcgaatgtgcatagacttcaccagtctcaataatgcctgcccgaaagacaaaatctcgttgtcgcggatcgacataatagtcgatagcgcggacggatgcgaagcattgcacttctcgactgcttctcccgcta

SEQ ID NO: 48469 - DNA, 232 bp, Zea mays
cttatcaacaccaaacaccccaatttaaatttatattacaatggttttcaagaggttggttatttggccaacatagaagtagtgattatggagtaggggaggctaagtcataattcacatgtgggataacatcatcttacaagagattgatatttaattcaaacttgattatttgttgcttggtgtgtgcatcaacaccaaaagggagatgtatgaaatggcctagcctttg

SEQ ID NO: 48470 - DNA, 420 bp, Zea mays
agctttatatgcgcgggcggtcatggtctatgtcgtgggcgcgcggcggacttgaccggacgcctgtgcgagcgcacgcgcgggttggtcgagctctggcgtgccgaccacggtctaacacatgtgcccgtgcgttatgcccaagctctggcgcgtgtgggcgctcattcgagcctgctctcgcctgggtcagtgcacaaaacctcttttccttcctataagctaccattcttgtgtggaggtcataagattttgcctactggttgctgagatatggagccaagaaattttgtgtggtctcctgtcctaaccctatgtaaatccctaggtttgtcgtggttatggctcgcgtccaatgccttttttggacacgaagaggggttagtttacaaaattttacatgggccattaggattcatt

SEQ ID NO: 48471 - DNA, 275 bp, Zea mays
  unsure (1)..(275): unsure at all n locations
agctntgcatggagcgaaggcgtttgcatgcatggntgcatgcaccaatttagttgcatacttgcatgtgtgattcgtgtgtgggtttaggggttgcatccggactgggaccggttgcatgtgtggccacgcacggggacgccgcagacgccagcagaggattgcatgcaaactggtgccggttgcatgcgtggtcacgcacgggaacgccatgcaaaggattgcatgcatgcatgcatgcataggacggagcggnggcatggatgtggtctaca

SEQ ID NO: 48472 - DNA, 361 bp, Zea mays
  unsure (1)..(361): unsure at all n locations
ccttctatcagcttcttgacttccgtggacagcgatgggcccttgtttcgaaggtatcttcatgcataagtatgctggatgaagtattgcttcgaaggcattaaatgtccctcgaccaatgaatgcattatatgggtattccatgtcaacaatgtcaaaaatgacttgctcagttcttgtgttgtggacatagcccaaggtaactggcattgtgaatttgccaagtgccacaatctgccttcctctgaagccacagagagggtgtgtagcatcatgaatcttgtcctctgggctctgcatctgtctgaaagcctcancaatatgatatccgctgcactacctgtgtcaaccagaacattat

SEQ ID NO: 48473 - DNA, 369 bp, Zea mays
agctggcctataatgtaagatcatcttttatcaaaaggtaaagattatccatccaatgtcattaattcatacaatagcactttttacatgtgaattatgcataatatttctaggaagtggctcaacattgtgaaagttaagctacatgtaataggatgcacaactctcctgcgtggttcgagaaaaaaaagttaagctacatgtacacatgcaaatattatcatcatctcattgagtctaagataaattccctactatgttctcatcatagtgagattgaataaagaaatcaaatcattactttatgagttatctcattaacaaaaaaaaccagtttggccaatggaattattgtcatcaatattttaa

SEQ ID NO: 48474 - DNA, 426 bp, Zea mays
  unsure (1)..(426): unsure at all n locations
cttgacatagaaccactccgatttccagcctgctgcccacttgcttcggtagctaattacagggaactttgtagntntccgataagcaaagttatagcaaccaaaattatcgtgcaatccatcttttctagcctttgtttgataatgtagctcgtgaacccgacagaagctgtctgcaaatggttccactgcttggcttcggagtgcccagatataaacaataagcctaacaatagcgttaggggtcagctgatgaaaatagataccgaacctcttcagtacctctccaataatcccatgtagggggaaccttaatccagcctttagaaaactttaaaaataacaatctcatccttctctggcttcggtgtagtctcttcttcaccgaagcgcaacagcttctttctgattntcagtaaaaaagcc

SEQ ID NO: 48475 - DNA, 436 bp, Zea mays
  unsure (1)..(436): unsure at all n locations
tagctttctgtantagacggagaatacaagcttatgggcatccatcgcagaatttgatactctatgtctagcatcttgtaacatattcaagctccctgaagccttgaggcacatggattcctttgcagttcttgacctttcaaacaaccacatccatggcactctacctcaatgggcatgggataattggatcaactctcttatcttgatgaacatatcacacaaccaattcaacggtggtattggatatggctctgtcatatctgccaataatgttgtctttgatattaagtataacctatttgaagggcctatacctataccacgaccacagaaccaacttgttgattgctcaacaaccattcttattcatgccattcaattttgttcttacttaactgtatttccttctcatggctatcgaacaaattgtccg

SEQ ID NO: 48476 - DNA, 401 bp, Zea mays
  unsure (1)..(401): unsure at all n locations
agcttcttaagagcaaaagaactataccttattttgtgaatttagaaaattagttccagaaatgaacattttgctccatgaagcagtcatataagggaaatgttactttattttttgtgtaggtaataaacttctatataataagtgtttacttatgttcttgtgggatttgaatttttatgtttttattgattcttttgtgccttgtctagttacaactgagtaaatcgttttgttgtgtgtatgattctatacaatctgaaatagtaacagtgacgatacattattgaatacacaactttcccattaggttaaacggagattacctaagttntcgtgattggaggcttactagagtgatganagggctgacatcatatatagtgaagataatctactga

SEQ ID NO: 48477 - DNA, 300 bp, Zea mays
atggtgggattgggttctgttctcagagccaacagatctgattaaaaatcctagtaaccacccaaaggcctgcaacaattccctacatctctaatcttgagaaaaactgctaagatagtctgatgcggccgaaactccagaaccaccattggcaccaattccctgaactgatggaactgtaaatacgccaaaccctgcggggaaggctcctcccccagtcacaggagccccttgtcatgacagacaaaacaaatacctaccacacccaatatagactcaagcaagtggactcactagtct

SEQ ID NO: 48478 - DNA, 429 bp, Zea mays
agcttgttcatgctttcgctacgctgagtagtattcattttcccttaataacgattcttgaaaaaggcaggcacccaatccttacgtattccatacatcttgttgagagttatgttatcgtgcagatggtaatcttcaagtagcattgaccatgcatattcaaactccaacttgatcaaaggatgatgtgttatagattggaactttggcttaaagaccatttccttaaaccttcatacaactctgttagaaaaagcgtataactattttgcacatgccataaacacaaccgatgtattatgtgtgggaaaaccctctcaagtgctataggcattgcaagatcttgatctgaatcatatatgtcaagttgattgaatctattccatgttagaaagaaataaatcacattaagacatatttatggatata

SEQ ID NO: 48479 - DNA, 330 bp, Zea mays
  unsure (1)..(330): unsure at all n locations
tagctngagcggtaaccggctacgtttgaaactcttggacaccggcgatcagcatgtccttcacctcctgccatgatgtgattgctcctggccgacaagaggagtaccaggtttgtgcaacattcttgactgccatgacgaaagatttcgccatgactgcagtattgccaccatatgaaaatatggttgcttcgtagctcatcaaaaactgcttcggatctgagtgcccgccatacatggggagctggggtggcttgaagatgagggccacggtgtaacctgctttctgctgccgaggaaagcatctctaagcacaattcatgagggaat

SEQ ID NO: 48480 - DNA, 404 bp, Zea mays
agcttctaaatatgtcgaggtgacaaatgatgatggtgtattggtagttacgaaggtcgcagctaagcaacttcgtcggttgcccatcattcctcggctttcaaggttgttcctcaacaaggaaatagctctgcatatgacgtggccaaagaatggtgtacgtctcgtcactgatccacacataatggtctatccgtccgacggtgatgcgtggaaggcatttgacgagtttgatcccgaatttgcaaacgaccctaggagtgtacggcttggtctatcgacggacggattcacacctttcaataccagtgcaagcccttactcgtgtggcctgtcttattggccatataatcttctctgagttggcataagaaaagtatgtcttgcctataatccagcccgac

SEQ ID NO: 48481 - DNA, 348 bp, Zea mays
agcttcgagaaaaaaacacacacacacattgtctgaaagttaaaggctaagaatggactgatccgatggcaccacaaacttgacagcaagctcacacattgcttgcacataggatactggaattacaaccaacttgatagaactcgacagacatactcttaattcaatcagaagaaggaaacgacgaaacacgatccagacaacacacacacacacatccttgcatgaaaaaggttaaaacactggctgcaaattaaacgcatcatcgtctgcgaagctcgatcacctgaggcagcggcaactaataacctctacaaaacccgcatgcatgcagtgctaattaacctg

SEQ ID NO: 48482 - DNA, 398 bp, Zea mays
agcttaacccaaagaaatgtgttttcggggtaccattcatgaaacttctcggattcattgtaagaaatcgagggatcgaggctaatccagagaagatcgaagccattctatggatggaaccgccatgatcgcaaaagaaggtgcaaaagctcactatgtgcttggcctcgctaagtgtttcatctcatgactcagcgagagggggatgtcattctataaactgctcaagaaagtggacagattcgagtggactcctgaggctcaagaagcactataggcactcaaaatactcttgaccaccctgctgattctcaagccaccccaccgagctaccaccaatcgactagctgaagaattactgctatacatcttctacacgactcacatgggtagcacca

SEQ ID NO: 48483 - DNA, 426 bp, Zea mays
  unsure (1)..(426): unsure at all n locations
agcttgtttaatgatcaaatgcctatgttgtttttttgatcgcatctgttgtgtgtttgatcattaaagagcttcaattaacacttatgcttcttagtgcatcatgtaatctcaatcgatatctctcttgtgcactaatttaaaaggagaattcatgatacatttatgcaacttgtgatctacttgatatataataacaatgacttagaacaggatcactagttgtagaactctctcttgtgcaaaatatttncatgtatttgcttgagtataggtcttaagcgactaagactaaggacacagcacaatgaagagagcatctctatgtaaaggtacaaaagggtaaaacaacttcctttcattttaactttacctaaatcttctttttcatacttcttgcatatttgtataaaagagataaacatg

SEQ ID NO: 48484 - DNA, 360 bp, Zea mays
  unsure (1)..(360): unsure at all n locations
agctntatgtgacgtcataaatctttgtaattttctctatangtttggncaaacttaagatactctgactttctcaagaaattggaatgccttataatttggaaagggagtaccagtcaatttggcttcttgacctatagtggaatgtagtcttgctggatacctgcctttaaaggatgatgcatgctatgtgtttcttttctttaaaaaaatataatattcatctgtgtgtacctaggtgacaaatgtaatttctctcaaatacataaataattgttagcataattacatggtgatttgtcattttgtgagtaattgttgcggaaagctgatgtgtatcaagcactaatatttactttc

SEQ ID NO: 48485 - DNA, 195 bp, Zea mays
ccgggatcttaagttactgcagctgcagcctgggtgccaagagtggcttctcttcttatgcgtgcgctccgcccgctttcacctggaacctgtgagccattgcttaatgatcggcaacgcaacccttggtgtgcgcggccggcgacctatcttgtgtggatagtctttcgttaatttttgccttcatccgtatta

SEQ ID NO: 48486 - DNA, 437 bp, Zea mays
  unsure (1)..(437): unsure at all n locations
agcttgtagtcacgatgatttgcttggtgtagtctaaatgtgtatggttatggtcacgggtaaaaactaatagtgctcatgtgatgtctaaattaaaacgcaaactgttgggtgattatcatgaggaatgcgtggttaattggttgtagtaattttagtgcactaaatgatttggataaaatttgtaagtatatttgttagtcctcatttaattaattcaactctaacgaagggcaaagtgttagaataattcaagcacttagaacgcggcaattcttgaattgtataggagctgaaattaattagttgctattttgggctgcacgcattgttntcgttgtgctgtttgtttgataaaccaaatcatgttttctgtagaaaagtcatggagaagagttgtagataacatgattatcttgctggtactaaaatatgac

SEQ ID NO: 48487 - DNA, 452 bp, Zea mays
  unsure (1)..(452): unsure at all n locations
acccgcatattctcaccggagacccatgatcgccttcgccggacttcggtcgcccgcggccgcgcgtataccgagcaatcctatgagccattctcaaattcctcgcgcgcataacttccttgatctctagtgaagctccctgacccattcaattgaactgtactgccctggttaggtcggattcctcgctgccgacgagctcccccgcctgcacgcgtggaccgacctactctgaccaccatcgtcgacgatccgtacctcgacgtgatcgccagagaccccccgacctcgcccgacccctcaccggagcaacccctctgcccttttcctctgccgcggtcactattccattangggaaggactgtgggtcaatttcgcaaaacctangggttttctgagagtcatagactcagataatagtgaacaanggactgtctgaatacattaaaac

SEQ ID NO: 48488 - DNA, 346 bp, Zea mays
  unsure (1)..(346): unsure at all n locations
agctnnggcctttatcttgattcanaaggcagcacatttctcttttgttgatgcttagtcttttcttctagagttaaaattgctattagtcttcacggctcacgcattntagctagaaaatttactcattctttattgaaaaggatcatatgttggtcgttatttcctggttctttccgttagatattgcaggactttgtctatgaacaacctacagaggaataaagtgggttgcccttgcctcgactcttgcttctattgtgttgaattctgtgatcaacagttttcatttactgatgaactgttgcaagttaacttgtaaccctgtaactattttttatttaat

SEQ ID NO: 48489 - DNA, 332 bp, Zea mays
ggccatggactcgtaccaggccggacttcaccggaagccctatatcgacctcaccgaacttcggtcttacgtcgccgctcgtggaccgagctaaccattgagtcttcgtccaattccttgcacccatatcttctctggcatcccgtgaacccttctgacccatccaattgatctattccgctgtgaccaggccggactccccgccgccgacgagcatccccgcctgcgcgcgtggaccgaccgactccggccatctccgacggtgacccgcacctcgttgtgatccccgagacctcctctacgtcctcgaccacttcaccggagccatctcg

SEQ ID NO: 48490 - DNA, 323 bp, Zea mays
  unsure (1)..(323): unsure at all n locations
agcttgctatgactttcagcttttcaatgttctgttttattttaataagncaagcccggagatgacccgcctctacatcagtagcatcgagggctgcacgagctacagtaaggcttccccggatctcgaaactaatgtcgatgggagagcattccgtgaacccgaccaagatgacccgatggcggaaggcacatcccgaccatcgtcggcgtgaagcaccacacttgagcanaataatggagagattatgaaataataataataatgacttggagccaataggataccttactccgatatgcgatggcgcaatagccttcttc

SEQ ID NO: 48491 - DNA, 396 bp, Zea mays
  unsure (1)..(396): unsure at all n locations
agattgcttggggatcgctttcgaagagcctctctttagccttattncccactgtatatgagttacatagaatgacccgggcgcgtgatctccacgttccttcttgtacacccaccgtggtgtcagtcgcagttaaccagagtcctgccgacttcatgcgcgtcacatgcacgggacacgatagagctctatcgcattcacacatattggntcccatccgattgaggacaactgacccacgagatgtaaccatgccgcgggtactcggggatatctatctctcatatggacgccgtcatgttcaagatgtgggatgcccaccgtgtaaccacacgtttatatttacaaattcggctgcaaccattcaggtggcccccggacacaggtgcggttgat

SEQ ID NO: 48492 - DNA, 312 bp, Zea mays
  unsure (1)..(312): unsure at all n locations
agctttgagtatatgatcaagggctcaaagaatatcaatgagctagatgatccctccacatccgaagcacaacctgtngcattcacagcaacggaggagaaggaggaggagtctacatcaagtagacaaccaatcgacgcctcanagctcgacaatgaggaaatggcgctcgtcatcaagagcttccgccaaatcctcaagcaaaggagggggaaagattacaagccctgctccaagaaaggttgctacaagtgtggtaagcccggtcactttatagcataatgtcctatttctaatgacagtgacaggggc

SEQ ID NO: 48493 - DNA, 427 bp, Zea mays
agcttaatgcccctaagaaatagtctaactttgttaagggcaaagctcccatggttcaagacaacgagggctacattttatatcctgttggttatcctgagcacaaaattaggagaattcattctagtaagtgatgattacaatttgctatcctgctccaatgtttttcttgtagattctttagattacaatttgctttctgtttctcaattatgcaaaatgggctacaactgtctttttacagatttaagtgttactgtctttagaagaagtgatcattcagtagcatttaagggagtattagagggtcagctatacttatgtgattttaatagagctgaactcgatacttgcttaattgctaagactaatatgggttggctctggcatcgccgactaacctatgttgggatgaagaatcttcaca

SEQ ID NO: 48494 - DNA, 429 bp, Zea mays
  unsure (1)..(429): unsure at all n locations
agcttgngcctctctataatagtgctctggatgttgaggcggagctggtcttctgaagctctttgaatactccaccttgattgtccgccccattacatcctggaaaagattattctcaatgttactatctaatttggagaaatctttaggtgtcaacattttaatgactagctcaatgataatgatacaagactgataaactggtcccatgttgtagaaaactgaatcattaagtgatattaggtcattctcagtgatcagttttaatgtactgtttccaaaactgccacatcagaatttcacccccatgaaactctaccatcttccatganactctccctatatctctcttattaattgcactgccatgtcactaaatgtgatgatgtgtcaccacatttaatgagtttgaaaatcccattgagaatg

SEQ ID NO: 48495 - DNA, 338 bp, Zea mays
ctcttcacaaaaggacttaccgcccgaagagatggatcccaaagcgaatggaatcgtgatcaaccacctagagaaagaatccttccgcaacgagccgaaggacgacaagcctaccgactcccgctcggggcatatacagaatgaagggaagaagaataagacaaggcgcatcaatgagatcatctactaccacgatagtgatgagtctacttcttccaaaaggatgatgacactactacaaaagacggcaattcgaactttcatttgattatttcgtactaacataagtcgaatcacatatgctttccatcctcttggcaaccttcacacttcgatgg

SEQ ID NO: 48496 - DNA, 438 bp, Zea mays
  unsure (1)..(438): unsure at all n locations
agctnggtcgngcgatcttgatcgggaggcctttgattttattaagcgttggcgtaacattgtccgtcgatctctgatccggcggcagtgggtttgtaccggttataaaacggatggtttaatcttggcggtccaatacagatcgaacggctctggttgcttcttacctcttcgccgttnggcgtttgcataagaaccctcgtgattttcttaaaccaacccgcagtccaccgcgggtaggttctgagtctgtggaacctttgcgttttaaccccaaactctctgcaaattatgcacgccatccaggactccaaagaaagagataaatgaatatagaaaatgaattcctagggtaaaaataatcctanaactttgttaattcatacaaaactcgtttaactccttttagaccatcaagttctcataatttgattaata

SEQ ID NO: 48497 - DNA, 421 bp, Zea mays
  unsure (1)..(421): unsure at all n locations
agcttgagaaactagcaagcactagttagcattatctataaaattgagaaaacaaagcaaatggcacaagcagcgtaccaaatgtggttggtgcgagttcttatttatacgctcggcacgctccaaattggagggtcacgtctgtcattgactgttgctattctagctaagggaaggtgtttttcggaccttcgacttaaggccttcgtccatgtcgcagtctgaattcgttatcttaaacaaattaatactgcgaggggctactgttggggggccttcgtcctccgaaggtcctcaaaaacataatttaacaatgtcttcccagcatggcttatggacaggtacctttggactcangttaaagcatacacgataagagaacatgatcgtgaccaatggtgctggtgctccaaactaccac

SEQ ID NO: 48498 - DNA, 344 bp, Zea mays
agcttatacttaatagcatcatgttcaaaacatatgggcttttcaataaggcaaaatgtgcaacctcaacaaaaaccctaattgagccctataaacaaaattcaagaaaatggggaaaagagtatgaaaaatttagaatcatggcttgggccaattataaacattaaagtatactaaataagaaacaacaaagattatggaagcttggccaaaacaatttaaataaaactctaaacaagcctctcaagtgggaattcattagggaattctgaaattataattctgaatttcaaaccctgaccaaagataagcgtgtcaccttgatccctaactaaatctaatgg

SEQ ID NO: 48499 - DNA, 414 bp, Zea mays
  unsure (1)..(414): unsure at all n locations
agcttgtagncacggtaaatagcttgttgtattcttaatgcgtatgggtacggtcgcggatgaaaagtattagtgctcatatgatgtctaacttaaaacgcaaatggttgagtgattatcggggagaatgcgtcgttgattggttgtagtagttttagtgcactaaatgacttgaataaaatttgcaagttgacttgttggtcctcatttgattattttaactctaacaaatgtcaaagtgttataataattcaagtctctagaacgcggcaattcttgaattgcataggagctgaaatgtattgattgctgttttgggctgcacgtactgttttcggtgtgctgtaagtttgatgaactanattgtgttttctgtagatatgtgctatagaaagggtgtaagataacttatta

SEQ ID NO: 48500 - DNA, 223 bp, Zea mays
  unsure (1)..(223): unsure at all n locations
tgctacttgatgtanactcctcttttcttttctccgctgtcttgaatgcgactggttgtgcttctggcgtggaggggccatctagctcgatgattatctttgagcctttgatcatcaactcaaagctcacaaaggttcctattacttccttgggagacattagtgtatatctaggattacctcgaattaattgaactgcgtaggataataaaaacaagggatc

SEQ ID NO: 48501 - DNA, 439 bp, Zea mays
  unsure (1)..(439): unsure at all n locations
agcttagggagatgcaatcagaataatctgtgttttcacttgcaattgctctcaaagcttcaatttggggtgtatcacacacaaattagagagttaggaagttntagtgatccttttagctttaatatttatctactttctcgcctctattgttttgtaactctaggctcatgacccaacaatgtaactaccattactgcttttttgccaaaactgtggtaatgaaattcaggtgggaatagtccatcctctccggtgatctaaaaaaatacaaatgcactaatacatgtgtagctacatgtattacctattaccatagccctctacaatgatttaagatatgtccaaagaattacataatgattgaaagatttgaacgcttcaaatttacattaatcatgaattcataaggcacatataatgataacaatagtacatg

SEQ ID NO: 48502 - DNA, 336 bp, Zea mays
agcttctgacaactgtgccaccggacagtcctgtgcgccttctggcgctgatctgacttctgcgcgcgcagtcgcgcactgtatcgattcactgtagcgttgcagacgaccgttggcggtgtatatccgttacttcgctggcacaccggacagtcctgtgctacaccgggcagtccggtgaattatagcggagtgactaccagaatttccgaaggttgcacgttcagagttgggttccctggtgcaccggacactgtccgtgggcacaccggacagttcggtgcgcagaccagagctggcttatggatgtcttttgctttttttatttgaaccctt

SEQ ID NO: 48503 - DNA, 470 bp, Zea mays
atccttaagcacctgggctgcagcttggctgggatggttgcggggagagtcaaaagaatctcttcttggttatagctcaacctgacggttctgagttcaatgttgaggattgccttgtgttgggttaaccaattcatacccaagattacatctatatcctggcctttcagaacaatcatgttagcaggaaagttccgttcggccattgttactggcactccataggccacttctttagtataaatgtgtcccccaggtgaatgaattttaaatccctcctttgattcatggtatgcaatatgatgttgttccacaaacttcttgctaataaatgtatgtgaagcaccagaatcaaaaagaataattgctgggtgactggccacgggaaacgtacccatcatcaccggctcttctttcggtgtagtagccacttgagtgtaatatatacgccctgtcttcttgtattcttc

SEQ ID NO: 48504 - DNA, 419 bp, Zea mays
agcttagaaaaatatggtatgaatcggcggttatagccttctagtccaaggaaacttcggacttgatgtgccgtggttgggggtttccactccaaaatatccttgactttgctgggatccaacgcaatccccttggcagataatacatgtcccagaaattgaatttcttctagccagaatgcgcacttactgtaactggcatataattggtgttcccttaagcgcgttaacacgatccttaagtgttgagcatgctcctcttcattcttgaaatatattaagatatcatctatgaagatgtaacatcccaaaattctaacccaggtttgaaaccctaatctactccccccttcttatcttctatctcaaaactcccttataattttttcccatcatatgcatacacctttgtttgatca

SEQ ID NO: 48505 - DNA, 358 bp, Zea mays
  unsure (1)..(358): unsure at all n locations
agcttanggcccanaaccgtggccacccacgttttatgatcanattcgacaacctcgacaggatgaagcattctggcctcaagcggagtccttgggactaccatgtccaaagcctgagaaaccgcaaggggggaaagggcgatcacttgtggtggggatttcccaagcaccgacattgcccgatcatggaccaagtctgctgatataccatcagtgaactccacggtcgagggcacctccgttatctcatagcttccaactctctaagcactctgattggcttctccttcatccctaggctcttcatcagacctcgngccttggcggccaatgacagatcgtctaccctcattcttat

SEQ ID NO: 48506 - DNA, 341 bp, Zea mays
  unsure (1)..(341): unsure at all n locations
agcttttgaggaaattatgaacgatcccagatatatttgttctttctccggcgcccggngaatcgcagctattctggagaaggctggatgcgatcacgtgaaaattgcggctcaagccgaagccgccttctccataggcgacacaaaggacccgtcagccgaagcaactttagtgggcggaaagttttgttctgatgtctgggtgaacggtggctgagaattggcccacgaaattataaaaaagaatgaaaaagacacccataacgcccgagaagaagctagacgaactgaagaggctgctgaacgagaaagacgcataggtattgtttttgaaatttaac

SEQ ID NO: 48507 - DNA, 410 bp, Zea mays
  unsure (1)..(410): unsure at all n locations
gagtctatctgaggcatgcaagcatacatacactntattggctgagagacattttttgttttcataaancaccatgcaaaggaccgactctatattgcatcatacctgactcaatcccttatgacacaaatgtagcacataagtatcttcctcatgtgtgcaacattaatatataaatatattccatataaaaccatattagcctgtgagcactaaatagagccaccgtactgtccagccctggggccggactgtccgcgcgcacgcagaacagattagggttccaagttcttgctatgtttcattaacgaaattcaccgaactaacttgggagtttgtttataacgggtccaaccccccttccctatataaacagaggaatacggctgatttaaaatatcaatccacct

SEQ ID NO: 48508 - DNA, 434 bp, Zea mays
  unsure (1)..(434): unsure at all n locations
aacttggccggtcaagaaagaaagatcttattcttcatccatctgccatttctccctttcctcaccagcagcctgaaggaggaaggagatacaaggggtcctgccatcaaacaccacgttgttcctatgattctagatcatccaggcccctaatgcaataagagaatccaatcctcttctttccatactgaggacctgagccgaagatctctcccaccagccaaaaaaggaagtctccgcttgctgaggggataagctgtgcagcccaaactttcttaagagggtgtaccaaaacactctngaaaaccacactaaccttaattattttttttaaatttaaactgttcgaagagccaagttcatagcaacaatcgatagncataatgctcaaatacattaattgggaactaaaactgagatgtactcacaaatag

SEQ ID NO: 48509 - DNA, 362 bp, Zea mays
  unsure (1)..(362): unsure at all n locations
agctngtgcaaagtccactcgaactaatcttttgtatttctcgtacctcgtgcaacatgacaccagaaggtccaacacaacaagcgttgaatgaattcagaattattgcagagcatatcagtacaagagacctggttcaggagtttttggctttcaaggtttttcctagtttaaaagaatgggaaatgccgaagctaaagggggagataaaagaaggtgaacttgtgcgtttaccttactatttcaagtttaagaaatactttaaaacaccttgccaagagtggctggatacaattgaagtaatgtgcaatgaaatacttggcaattactcccaaaaagaagatcaattgatgactgcgggc

SEQ ID NO: 48510 - DNA, 375 bp, Zea mays
agcttcatgaagaggaaccttcggtcatctcatacaaacagcttcagccgaaagccgcttcttcctacaagaccttcggcgacgaagcatagtcccaacagtagcccctttcgcggtgctagatcgtttttcgtaacgagcttgatccgtgaaaaaaaagtctcttaagcttcggggagccgaaggtccaaaaaacaccttccctgagctcgttgtcgagaaacgatccagtttcccagcgcgtagcggtcccaccttgcagagttactgtttggtctctgcggtccaccacgcagcgagtgcaagcgggtgtccgcctgttgaaaaatcctgcgcttcgccttcttacctgcagtactatataaacagacgagt

SEQ ID NO: 48511 - DNA, 298 bp, Zea mays
  unsure (1)..(298): unsure at all n locations
tggtatcttctagggtatgctttctgtgcatancttataaatttagtaggtaaactgacgctcctgatgtgcatgtagataccattatagaatcttgtgaagctactttctttgaaaacatatatccaatataagacattcatagcaattctagatattcttcagagataactcctgaacataatgcacatggtgagagttgtgaacaaccacataagaatgttctanatgaggatgacaatgatgcctctaaaaggagcaagatacanatggttgaaaatcctttggtgatgatttc

SEQ ID NO: 48512 - DNA, 396 bp, Zea mays
  unsure (1)..(396): unsure at all n locations
agctnggacagtattctatgatggttcatggtgaaccttcngggcaagtgcagctgccgttttaattgcaccttccaaagtcagaacatgctacgcagtgaaacttgactttagttgtacaaataatattgctgaatacgaagctttgcttttgggtcttcgaaagttgaaggcaatgggtataagaagggcggttctcaaaactgattcccaagttatttctggccatgttgacaaaagttgcaaagcaagagatccaaagcttgagaaatacttagatacagttcgaagacttgaagcttccttcaaagggttttctgttaagaatattccacgaagagaaaatgaacacgctgatctactatccaaatcagcggcaccaggggctgccttacc

SEQ ID NO: 48513 - DNA, 326 bp, Zea mays
agcttctccaaattgaacatagaatatgacttctttggatcaaggcaagcaaaaccaactagcaactcacttgaaacttcactgaaccgatgacacaactctgtattgattttatcaagaataacaaaaaaatatctcggtgcggtagtagtgaagatttgtgactgtgaatccatctcgccttgatcgacctctaataggtacttctgcatccatgtctaccacaagaatacccttattagcacatcaagtaactccatggcaagaacaatatcaacactcttcctttgcaacatttgagagagctagcggagggcgaaaggagc

SEQ ID NO: 48514 - DNA, 408 bp, Zea mays
  unsure (1)..(408): unsure at all n locations
tgactgctttattaactggagacctactctagaagctgttccctggttaaatacactacagctaatagttgactgcgtaaaatagctaaagacatccacacgatgtaactaatagtttagctagacatcacaacaccttacgtttagctatatattcagcggtgttcttcaggaattatataatgcagncttgtacgcacgcgagcaaagtataatgcgcgggactgagcaacgttgttatacaaagggagggtacaatagtcactgtctatgaaaagttataaccaatctttataactagtggatcaaacatctctatcattttttttctaaactcagttccgaaatcttaaactagtttaataacagagtggatcaacagaccttaaggactttgaacataaatct

SEQ ID NO: 48515 - DNA, 436 bp, Zea mays
  unsure (1)..(436): unsure at all n locations
agcttctatcttttcatggatatatttcatactcttatcattcntttgggggtcaattatctatggtaagatgactgacttaagctctaagtgatatgaagtcccatgttgaatcattcccaggttcaaattctccatctcctggcataatgtaatgtcagaagtcctcatggttagacaatggcaggaggccttgcgactgagtgcatctgccactacattagctttgcctgggtgataatgaatctccagttcataatccttgataagctcgagccatctcctttgtctcatattgagctctgactgggtaaagatatattttaaacttttgtggtctgtataaatgtgacagacatttaccacaagataatgacgccatatttttatggcatgaaccactgcagctaactccacgtcatgagtgggataatgc

SEQ ID NO: 48516 - DNA, 304 bp, Zea mays
agcttataacaggaggatagaggcaagagctcttccatatgtcatgatagaaggagagctgtacaagcatggagtttgtgctccgctactcaagtgtttatccagaaccgaaggtatacagttgatgaaagaaatacatgcaggcctctgtggatctcacattggatccaggccattacttggaaaaattttccgccaaggattttattgtgcgaaagcggcttctgatgcagcggaattagttcaaaagtgcgaatgttgtcaaaaatgtgcacgaaatcaaaaacaaccttcgtccctaaca

SEQ ID NO: 48517 - DNA, 417 bp, Zea mays
  unsure (1)..(417): unsure at all n locations
agcttgtgaagattcttcatcccaacatgagcaagtcagcgatgctagggccagcccatgttagtcttaacaattaggcaagtgtctagttcagcattgttatcaatgaaatcaactaagtatagctgaccatctaacactcccttaaaagttagtgaatcatcacttcttctaaagacggtaacatcaacatcagtaaataaacatgtgtagcccattttccataattgagaaagagaaagcaagttgtaacctagagattctacaagaaaaacattagaaatggaatggtcagaagatatagcaattntaccgaatcctttgaccaaaccttgatttccatcctagaatgtgattgctctntagggatcatcatttttctcatatgaggagaacattcttttctcccatgtcatg

SEQ ID NO: 48518 - DNA, 389 bp, Zea mays
  unsure (1)..(389): unsure at all n locations
tccgtatcattccgttgcatctcttgatgagctcctggcgtcnaatcagcaatgaagtctgctaacgcctgagaatgaattgacgatctgtgtacataatcgatagcgaattcattatattctgcgacccattntccgatccttcctgtagcttccctgttactcaatatgtctttaaggggtgtgatgaaggcactattatatgatatgctcgaacatagtgtcgaagctttctggaggccatcaatacagcatacaataccttctccaattctgtgtaatttttctttgatacgctgagtacttncgagacgaagtataccggtgcttgtctttttacttggccatcttgcttctcctgtacaagtgccacactgaccatatcatga

SEQ ID NO: 48519 - DNA, 199 bp, Zea mays
atctttctttatcaaaatacccctccagccataataaggattgggatttttgtctgggccataaagagccattggttaaaaactaacgccaaaggcctttgcaataagcaccaatttttatattagacgaaagccaccggttaaaacactaccacaacaagttcgggtggtatggatttatcgcccggcccaacgcaag

SEQ ID NO: 48520 - DNA, 295 bp, Zea mays
aggagctatacgttatgcccacaatacgaagacagaagagcggagttatctgcagcagcatatgggatgcacggtgcacaccggactgtccattgagccaaattcgctcaaacagagacggcttcaactctgggaggagcagaaaactataagcgttccaaaaagcacaagaccatcaaaataaggggacggagctaagagtatgggcaaaaaacaacaaacgagcatgggctgcctggtgcacaccggaccaaacagagcaccagcgcgaaagctacaatggctacctttaaca

SEQ ID NO: 48521 - DNA, 325 bp, Zea mays
  unsure (1)..(325): unsure at all n locations
agcttctaatgacattgccatcttcatcagtttattgcatgcccgttactttccgcagagcatatatatggggtcatccaagagacgagagcaactcctgtaaacacactcaacccacaaagaacagcaatgatcgtggctgattttatcaaggctcggtatctctgatctattaacgcaacctatttatccagtccagctacggcagtaacacttgtctgcagtacagagtggaaaggtttctagccccgccgagctaaggtacaaggaagaccttctgtntcccaaccgagttatagaagaagccggcagtgtgaaaatcggt

SEQ ID NO: 48522 - DNA, 178 bp, Zea mays
  unsure (1)..(178): unsure at all n locations
ctgttcggggggcctacccgtataatgatcttcaaattgggaatccttcttctttttcaccaccaagactgggatggatttacctgattttanctgcatgactgtggcataccccattggtctctaatagctttgggagggatgctaccacctaagtacagggcttctgtcaaaaaac

SEQ ID NO: 48523 - DNA, 370 bp, Zea mays
agcttaagttctacaggatcacctattcaccctctctcttgtgctctcagaaacaaaggcttatcttgagcacgctcttcaagatgcaactggtcgtctagtgaagtgtccttgcaatcgctgcgagaacaagtgtgctcagaagatagaagaaatggagaatcacctttgcataagtgggtttatgccccaactaccttgtatggtaccggcatggagagtctattatacacgttgacgcggaggtggaacttgatgacgatcatgataggatggatgacatgttgcatgatcctgtgtaggatgttgtaatgaacgcttaggagccctggctgcttcacgcgatgctcaagaattctttccgctactc

SEQ ID NO: 48524 - DNA, 378 bp, Zea mays
agctttatcaaatggacgtgaaaagtgcctttctcaactgttttatcaaagaagaggtctatgttgagcaaccttccggctttgaagatagtgagcaccctaaccatgtgtataaactctctaaggcgctctatgggctcaagccagccccaagagcatggtatgaatgccttagagatttccttaatgcaaatggattcaaagtctgaaaagccgatcctacactctttaccaaaacacttgaaaatgatatgtttgtatgccaaatttatggtgatgatatcatatttgggtctactaacgaatctacatgtgaagaagttagtatgatcatgacacagatattcgagatgtctatgatgggggagttgaagtact

SEQ ID NO: 48525 - DNA, 264 bp, Zea mays
atatatccgagactatttatgttcttagcgtctaataccgggcagagaacttacattgtgaaactataaaatatatcccttggaggatacaagaatgttttttaacaacatacacctaaataaaatcctagatacactactactcggcagaggcctatcaagctacccgccggatctgccatcctaaaagatatattatgtctatggcattaaaattctttactctataacaataaactttacattcatatgtacttgttatac

SEQ ID NO: 48526 - DNA, 452 bp, Zea mays
tcaagcttcacaccatggagcagagaacaacatagcgcttttcgtgtagccagactcctccatctggaggagttatggtgacttcggaatactacggagggaggagtctctctctccgagcctcgagggggatcttcgagctcctcgtcatctctccctcggctgtcgtatcgaatgacatcgtgacgacttccctaggggatagtccgctggagtgttctggatcgtacattccgggtccgttcgagcgccgccggtgctcgaaggcttcggatgaagtcggagtactctctcggatgatgaggactcggacggcggcgacgatggtgaagatgacgacgacgacgacgacgacgactacgactacggctacggcagtggcatgggcggcggccactgcagaggcatgggcggtggcgactgtatcatggacagcaccaatggcagcagca

SEQ ID NO: 48527 - DNA, 439 bp, Zea mays
  unsure (1)..(439): unsure at all n locations
agctnntaacccccctcgcgagacctttcccgtttctttctaaccataatgaatgtgatatcgaatgtcatacttgatgcatattcactttaatggttcccttgtatgatgtactgtttgtttcccaatttgaatggatgaatgtatgtatgcttgcaatcgcatagagaacgatccggtcgaagagcccgaggagctcgcaggagaagcccctgagcagcagtcggttggtggaggcaagtgtcctttgacctatctctgtcctattcattctttaattcacccccccccccgcattacacatttatacctaaggattgactagcttttgttatccatgtccttgattacctatttgggttggattattattacctagctttatgctattgctcaactctaatcaatgaacatgatgagaattatctatgatacgctg

SEQ ID NO: 48528 - DNA, 394 bp, Zea mays
agcttctccatcatctctatctttattactttgtctcacagacgtctataaaagtagcttagctccgataatgctttccagacatcatcttttacaaaaccacgaaacataacaggaaggagtctttccattattatgtggtagtcatgactctttaacccaaataacttgcccgtcttcaaattcacagaccttctaaagcccgcggcgtaaccatctgggaactttaagtttttcaaccatttcatcaattggttcttccttttacggttaatactgaaaggagcacccggcttcttccgattctcctcctactacatagtcgggcctctacagattaacgccaaatcttaccttgccttatgggtgtctcttgtttgtcactgatattcat

SEQ ID NO: 48529 - DNA, 416 bp, Zea mays
  unsure (1)..(416): unsure at all n locations
agcttaagtcgtacaccatgaactaccgctcttatactttgtagcagncgacaatgttcgccaccaccgcgacacatgtgttccacgagcacgacgaggcgggcatggccatcgcttgcgttgtcacgctgccacacacagagtgtccagtcagtcgagtcgcttacaatgatgcgcctaaacacatcgagacataacatccccatcccatgtttcgttggcacggccacgagcgttggctcgctgctatcctgcccctaccagcagcatgtgatgaacatgatgggggatcccatgtacatggcacatgccttgtgcacgcctcgttcctgtactgccaagcgaatgtaatggacgggtgccttggttgaatcaactaattggtacctcgtctgacaaactttgataacccgtta

SEQ ID NO: 48530 - DNA, 442 bp, Zea mays
  unsure (1)..(442): unsure at all n locations
agcttgttgaacccaacgatagccattagatgtattgcccatggaggtggcaaccagttgttaggtggtggacgcctactttgctctcttatagagtagtaaagattatcaagaaggttgcaacatttagatgtgaccaaagaattgagatagcaggttccatttgacaagaataagataccaaatcactgtcgcactactcaaaggaaacacggatctgtagatacataaaccacatatggaatagaactnggacaaagaatttctattcaagaaataaatacagacgctatacagcaaaccatgagaactatatgaactataagacctatatcatctaaagtgtatcagattttcatctctggaggcattctaacatctaagctaggaccaanaggcccacattctcggttctaatatattatagtgataaaaaatgaac

SEQ ID NO: 48531 - DNA, 442 bp, Zea mays
  unsure (1)..(442): unsure at all n locations
ncaagctgcttaataaaaaattatacagatatactttattatccctcaagatactgcctattccaggataaaaaaaattagaagcatggttcataacatgtaaaatcacttgggcaaagcaaaagttcagtgattgcacaataatggacaggattatgcacaacacaaaacagaagctcaaccatccatgctaattttaattcaatcaattgcatcaccaactgtgtgagaagcaattcaccgtccctacactaacctaaaaggcagtaggcagcgggcagctagtatagcaatcgggtgtaagaggcatactccaaatatttgcacttagtggaagcatcgaagcaggaataatactataccaccatggccatccctcagcggatcaaaagtctatgcaagcaagaatattcgatcaggggtgaactgaacgttattgtat

SEQ ID NO: 48532 - DNA, 393 bp, Zea mays
  unsure (1)..(393): unsure at all n locations
agcttcagctccatctatattgaggatggctttttagtcngaccaatatccctcagcctctctggcagcttcctagctttcatgaattgcaataagcccttgttccgaacgtatcttcatgcatacgtatgctggatgaagaattgctatgaaatcattaattgtcccacgaccaatgattgcattttaagagtattccttgtcaacaatatcaaacacaacctgttcactccttgcgtttgggacaaatccgaacgtcactggctctttgatcttgccaagtgctatgatctgcctctcttcgaagccacaaagagggcgtgtagcaatatgaaatatgttctctggctatgctgccgaaggcttacaaatatatatccggtgcctatctgt

SEQ ID NO: 48533 - DNA, 394 bp, Zea mays
  unsure (1)..(394): unsure at all n locations
ctttttaggccagattgaactcttcacacatgttccagttctgcggaactttgtcgagcacctgaaacggaaaattttcaacgtttgcgcttgttaccttcttgattcacgggtttgaatcatgaatagaaattttcttgacaatgaatatatattgaaccaaaacccaagcccgagtacggttattttttcatgatccagtttgtcagcgatgtaacaaaatacattagtggttgcatggcttctctatctgctatgattcagcttgaacttcctcatatcaacatcctttcaaagatggatctgatctccaacaaaaaagatgtagaagagtatgttntatttctttcctctcttgcaaatgttntatttctttcctcccttgcatagttct

SEQ ID NO: 48534 - DNA, 331 bp, Zea mays
  unsure (1)..(331): unsure at all n locations
tcttggcaaggagtgggaattggactgctcttcgttcgactccgacaatgaaggactcgccgccaccgccttcaacaagtcatccctcttccccaacgagcgtcacacttgcctcatggcaagggagaagaaagtaagcactcataatactagtacttatgcttcttcaagtgaggatgagtctagtgatgatgatgagatagattactcatgcttattcaagggattagatagaaccaaggtagacanaattaatgaattaattgatgccttgaatgataggaatatacttttagaaaagcaagaggatttgttgtatgaagagcatgat

SEQ ID NO: 48535 - DNA, 342 bp, Zea mays
gcaagctggcttggctcatcctatttttcatcaaattttgtgaagcccgagtagcagtccaattagctcatgaattccgaaaaagctgctgcatctacacaggagtctattcttggtaaagggaactcatcttttcggccttgccttgtgagatctgctgaatcaatacacgttctccatttcccattagccttcttcaccatgacagtgttagctaaccattctggatatgttacttctttgatgacaccagcactgagaagtctctctacttcattccaagcccttctgttttatctcagacattttcccgaatcttggtttcttggcctgaagatggat

SEQ ID NO: 48536 - DNA, 287 bp, Zea mays
agactaacgtgcaattcgaaaagatagacttgtgcagctgtcagcaagttttaagtgggatgagcgcattacaccaagaatgtgatgaccacttcaagacccctggagctggtgcatatggacgctttctgacctgtcgcctatctaatcataggagggaggaagtatgggctagttattgttgatgacttttcccgcttcacttgggtggtctttttgcaagataagtctgaaactcaagggaccctccagcgcttcctcaggagagctcaaaatgagtttgagct

SEQ ID NO: 48537 - DNA, 380 bp, Zea mays
agcttgtgaagattcttcatcccaacatgggctattcggcggtgccacaaccaacccatgttagtcttagcaattaagcaagtgtcgagttcagctctgtcaaaatctaccaagtatagctgaccctctaacactcccttaaaagctattgaatcatcacttcttctaaagacagtgacaccaatatcagtaaaaagacagttgtagcccatttgacataattgagatacagaaagcaaattgtaatctaaagaatccacaagaaataacattggaaatagagtggtcaggagatatagcaattttacccaatcctttgaccaaacacttggttccatccccgaatgtgatagctcgctggagatcttggttttctatat

SEQ ID NO: 48538 - DNA, 435 bp, Zea mays
  unsure (1)..(435): unsure at all n locations
agcttattgagttgtcattaatactaccaggttanatatttcagntgaaagagccttctctgcaatgaaaataattaagaacaaactgcgcaacaggatttcagatgaatggttcaatcacttgatggtgtgttacacagagcgggaattattcaaagcacttgataattctactataacacgacgctttcagagtataaagactcgaaaaatgagtctacctcgtgttatacgagactagcacattatatacatgtaagcaattctttaactactttatagtatatgtattatttttttacatcatatgatctcttaaagttgcccaggcttctaaaaatttctgggctcggcactgaccatgtgacgtgaagctcaaatgcttttgcgtacataaaacaaagctgatgaaacttngtcagttaaactatgctt

SEQ ID NO: 48539 - DNA, 235 bp, Zea mays
taaattttcacatattccaaattaaatgggcagggtgcgttctaccgccagagttgaacgtgagggggaccaaactgaagcttcggagactgtccctatctccgaagccatgccacgatccgggctaatgacttccgaaaagatccctaacgatgatgcagaacaagcagaacaagcaatcgctgaagcagaaaaagaagatgttgaggaaactgaccccgaagatgatatcgca

SEQ ID NO: 48540 - DNA, 417 bp, Zea mays
agcttgtagcccctactgcaagcacgccggtgcttaatattatatacctcatcccttctcttgtgtttcatcttgcatcaacccatctggatagggacacgcggcacaaaattcactattcggtccggttgagggtcctcgggtccgaaacgccgacacttaggctacctctagcagcttacctttctcgttcttatatgtaaacaacactctacacaaagtgtaatttatagtgcacaacaatgttttcgatatataagtgaagtgttgaagatatgatgatctcatcgactgcaaagaagtagattggatatgcttagaaacgagaatgtatatggaatattggctcgcatattaatctcgctaccttttattatatgtggtgaaaaaaactaacatcacaagatgttgcgtgac

SEQ ID NO: 48541 - DNA, 364 bp, Zea mays
agcttaaagccatggtaagtagcatcagccttttatatgcgaatcgactccaccccagctacgggtgcataagtttcacctaaatccaaaccttcgacttgagagtatcccttggccacaagtccagctatcgcacttgtcaccacaccatgctcatcttgcttgttgtggaagacccatctggtttctacaacatattgattaggacctggaactcaatgccgtacctcattcctagtgaagttgttgaactactcttgcatagacaccacccaatccgaatgttggagtgcttcctccaccctgcgtggctcaatagaggacactaaagagtaatgctcacagaaatgtgcagcacgagatc

SEQ ID NO: 48542 - DNA, 438 bp, Zea mays
  unsure (1)..(438): unsure at all n locations
agcttgtatatatagagttggactcttgcactttcattaacctactcggntatgtcatgaacttggtaatcaactcgatgcctaccatataactgatgtctgtccttaggatattaaaggaggggtaggcgaaaccccctaaagaggagaaaatataatagaaccaccacacacaaaatatagggtattatctcaatttgagatcctaaacctatataaatcttcgtatctctcatgccctaaccttcatatattgatcttgtgtcataccctgtatatttaccatctaacaatcttcaacaagtccattaccattatgatgggaagaaggatatgaagataagctccacctgatctagggtacatcatcatcagatgtggtagacaagcagcttgttatgagaagctttggcaccacttctttagatacaataacat

SEQ ID NO: 48543 - DNA, 385 bp, Zea mays
  unsure (1)..(385): unsure at all n locations
agctttgaccttcgtcatgctgcataatatatatcangaccaggggctgcactgcagccactagacgttaatcaagagacgctacacgaagctatgagccagaagaggaaggctaccaacccaacacctcaggaggaggagttggatcaagaaatcagggacctcgaagatatccatcaataggtttaaaagaagaaagaaaaaatgcttcgcctcgctgatctccagagaaagatagatgagaccgctgaggaaatgcgtcacctcacccaggatgaccaagaccaaagtccccagcacaaagagcttcgtcaagacaattcatacaacgatgatgaatggtatgatgaatttcatcatggccattttgcttttgatgatgctt

SEQ ID NO: 48544 - DNA, 384 bp, Zea mays
  unsure (1)..(384): unsure at all n locations
agctnttatgatctgtatagatatgactgacttttcccagcagatagtgacgccaaattttcagagcatgaaccacagcagctagctccagatcatgagttgggtaatgctcctcatgtcggcgcaactgccgtgaagcatatgcaattactcagccctcttgcattagtacacagccgagtccactgccagatgcatcacaatatacatcaaaaggcttggtgatgtccggttgagccaataccagagcagtggttaataatgtctttaattgttcaaaggcttcgtcacactttgaagaccaattgaacttaacatcattcttcaataaacttgtgattggcttcacaagcttagaaaagtctggtataaatctgcgatata

SEQ ID NO: 48545 - DNA, 425 bp, Zea mays
agcttttaagatactgacttcagatgatagagtttaggcaattctagtgaacatatttggtggcattatgaaatgtgatgtgatagcaagtggaattgttaatgctgccaaacaggtacatttttagcctttcttagctttatgtataacataggttcctgacaatgttggcataccccccaaccccctccccccccaacaacaacaacagaatcagtgtgtccatgcaatagttgtccttaccactagggacttctttatttcactgaaattggatatttcatttgcatgtctctgttttcagaaatttgccacttaaggatatacttactgcaaccttgtttctgtgcttcttttatattccacagtaatattgtcatgaatcaattgtggatgaatattcttgcaaaataaatttgtcacta

SEQ ID NO: 48546 - DNA, 440 bp, Zea mays
  unsure (1)..(440): unsure at all n locations
agcttctcctcttcagccagcttcgtctcggcggcaaccttcttgtcttgagacattnttcttcagaaatggtgaaaacgcgtcttttaaaccgaagctcagagagcttgaaaaactagcaagcgctagtgagcaagagctataaaattgagaaaataaagaaaatggcacaagcagtgtatcaagtgcagtcggtgtaagttcctatttatacgcccagtgcgctccaaattggagggcctcgtctgtcattgactattgctattctagcaaagggaaggtgttttttcggaccttcggcttaaggccttcgtccatgtcgcagtctgaattcgttatcttaacaaattaatactgcgaggggctactggtgggggccttcgtctttcgaaggtcctcaaaaacatgatttaacatcttccaagtgtgacatatgaaca

SEQ ID NO: 48547 - DNA, 405 bp, Zea mays
  unsure (1)..(405): unsure at all n locations
tcggtcgtagcggaagctctgtggatcctctgcaagtacctctacgtcanatcctactgagccgccgccgccggcatcttggaaagcgacttgtttctccttctctcgagctcggtctggcggagctgctccaccatgcttgggtacagcaacacattggcaccggactctggatcgtacggctcaacgagggaagactcgagtatttctggctggaacccttcccatttgaacgcagcaaatacggctccggcatacttgctaccgtcttgcttccgcgagatcactgcagatcgaggggcaactgctcgttcagccccctctgcaagagcatcggtggcttcttgttcctgcggcgccgtcaccgcaggcacagggattgctgcgctcgaaccctaagagcat

SEQ ID NO: 48548 - DNA, 442 bp, Zea mays
agcttccttgatctcgtagggtccaatgtaacgaggagcttacttgcccttgatcccgaatctctggacacccttggtgggtgacaccttaagataaacatggtctcccacttcaaactgtagaggcttccgcctcttatcatggtagctcttttgtctggcctgagcagcttctaagttcttcttgatgactctgacctttgcctctgcttcaagtaccaaatctgtgtggcggaaccgcccgaattattccagcttaagtgcccaagtcgcacccttaagggcagcaacacacttaaacaggaataacccgtcagtccctcggatctagtccgataaagccacttaccaggatcgaataccactagctcactcgaaggtgaggcacagagaaatacaataaaacataataccacaatttaataagtatcattagtgatta

SEQ ID NO: 48549 - DNA, 361 bp, Zea mays
tcgccatagagggtgtggccttggagtgagccgtctgagtttgtctccctcgcccttgcctccgctttcgccccccttgtgaaggccttgggcatccccttttatagatacaaggggatggtccagctgtacatatgggggtgtagctatgtgctaacgtggccggcggagaagtgcttgagcctggtagtagcgtagctggtggtacgaccctgggtcctgctgacgtttctttgccttcgtagagagctgagaacaatcgacgtcatggacgcatgcagggaaccatcattacctgttgccagagtaatctagatgtgacaccggtcttgttccctcgtagcttgagatggctagctag

SEQ ID NO: 48550 - DNA, 412 bp, Zea mays
atcttaagcaccgcagctgcagcttaacaatggggcaataagcaatttgatgtattttgcacaacaattaaacttaaagaggtagcacacttcacaagtcgttactttgcaaagaacataatgatttgctcgaaagaaaaagtaccatgatgatgaacgagagatgcctccttgtagtgatctttcgatcttttaaacaaacggcaaagccgttggtccacccaaggcatatcacctcagtatggaagaacggaagtctgctttactgtacatgttcacgaatatgcctgaggtggagaaatactctgtgtaagaccttatttcttagactgttcatatgggaatatggtatgttatcaaatatctcatgtcacacaataatatatgacagcgagtctgatgaacaaaacat

SEQ ID NO: 48551 - DNA, 418 bp, Zea mays
agcttggaccggagcactatgaaacagtggccaccgcctttctatgtccatctgctgctcttctatcactcgaacccaccatgtcagccacacatgcctgtccattgttccgaccgcatcattacgtagtacagattactgactgactgttatacccatcactagaagaaaaaaaagagctatacccactggtatgtatcgcgacatgaaaagttaccaacacatggtgccagttacacagtttactcggtccattccaaatgtagatatttcagctaggtttttttttgtctgtcatgagttaggcctgttcaaccttaaccatttctctgtaggatataatcctcctccccttcggggaaaaataaggagcgaggatggacatgcgattaaagcaccgtacggttgatgatggcct

SEQ ID NO: 48552 - DNA, 376 bp, Zea mays
  unsure (1)..(376): unsure at all n locations
agctntgctcagcagcatactctacacataaactacctccgttagaaaacatcttcgttattaaaaaacaataaaagtcaaagaaacgttgtttaccttgaaattggaataaaataaactaccgacgatgtgctgtcgtcggtagcggctgatatctgtctcgagcttcgggaaaccaatactctntgatagagtactgataaccttcgcaccagtttgatcccgcacgcagcccaacctttcgtcatcaatgccaccgaagagaagtgctccaggccgatatccgcaagatatagcatattcttttagctcttctttttcagcctttgtcagctcttggccaactaagtcttgaaagtaaaagcttcatcttctg

SEQ ID NO: 48553 - DNA, 403 bp, Zea mays
agcttcacaagcacgcagagctactaaaacaacgcttggattggacagaatcttaccagagcgggctggcctctgacgcgctgttctcggcggtgcggctgaccgatttgggggaaaacggcgtcgtggcgtgctcgggtgaaattgagggtggagcttggggctatacggccgtaagggactctagttttaccgtgcacaatcaatttgagaggagggggcagaggcagcgtgaatttggcttcgattcaacccactgtgtgtgtgatgttcatacctcgtccttgatcacgagctatttatagccgcggcggtccggcgatcacttcgcagccacggataacttctttagtgcatgcctagcacgtagaggagtggtatagtgaggtatgatcatggtgca

SEQ ID NO: 48554 - DNA, 343 bp, Zea mays
agcttcttgatggcttcattaggtgggatttattttcctgcaatatctttagagacatgcccttgcgagccattagattcatcaaatgtcacgtctatctctatttcaacaagaccggtggtattgttgaaaacacgatatccatgcgcatttgatgcataaccaagtaagaaaccctcgtccactctaggagcaaactttgagctcttgactttcttgttaagaatgtagcatttacacccaaaaactctaaagtaatcaaccttagatttgttaccggtgagaagctcgtaggcagtcttcttgtaaatcttgtgaagataaaggcggttgattgcatgac

SEQ ID NO: 48555 - DNA, 321 bp, Zea mays
agcttcgtattattccggtctgctgcaatgttctttttagtctgaaggtacctgttcacacattgtactacacaaatactgttaaatcctgtttttgaggaccttcaaacgccgaaggtccccaacactcgacctccctctctgtcgacgacctccttatgagggtagcgggtacgtaggaaggctagatgctggcattctcagccaacccgcgatgtgtcccgaccgtgggtatgtgtccctggtaagtgtccggtccttctcctgttttgcgccgagtttttttacctttttaactctcactattgggattttcgttca

SEQ ID NO: 48556 - DNA, 347 bp, Zea mays
agcttcccatccaatacacctttaaatgttttgtccatcacttcttctaaatagagatacatcaatatttgtaaataagaaattataacccatatgacataattgacttacagaaagtagattataaccaagcaattctactaagaacacgttagagatcgaatgctcagtggtgatggctattttacccaaacttttgaccttgccttgggtcccatctatgaagataattgtgtcttgggaatccttgttcttggcgtaagaagtgaacatcttcttctcccctgtcatgttggttttgcattcgctatcaataattcaactcgtgcccccggatgcataaactt

SEQ ID NO: 48557 - DNA, 362 bp, Zea mays
atcttgtgcacagaccactcgaactaatcttttgtgtaacccgacctcggtgcaacatgacaccagaaagtccaacacaacaagcattgaatgaattcagaattattgcatagcatatcactacaagagacctggttcaggagtgtttggctctcaaggtttttcctagtttaaaagaatgggaaatgccgaagctaaagggggagataaaagaaggtgaacttgtgcgtttaccttactatttcaagtttaagaaatactataaaacaccttgccaagagtggctggatacaattgaagtaatgtgcaatgaaatacttggcaattactccaataaagaatatcaattgattactgcggcc

SEQ ID NO: 48558 - DNA, 428 bp, Zea mays
  unsure (1)..(428): unsure at all n locations
agcttatgaagattcttcatcccaacatgagctatccggcggngccagagccaacccatgttagtcttagcaattaagcaagtgtcgagttcagctctatcaaaatctaccaagtatagctgaccctctaacactcccttaaatgccattgaatcatcacttcttctaaagacagtgacacctacatcagtgaatagacacgtgtagcccatttgacataattgagatacggaaagcaaattgtaatctaaagaatcaacaagaaaaacattggaaatagaatggtcaggagatatagcaattttacccaaacctttgaccaaaccttgatttccatccccgaatgtaatcgctctttggggatcttggtttttctcgtaagaggagaacatcttcttctcccctgtcatgtggtgtgtgcacccgct

SEQ ID NO: 48559 - DNA, 362 bp, Zea mays
  unsure (1)..(362): unsure at all n locations
gtcacctgcggcatgaagctttagttcttcagcttgatgcagttttttatacaatcctattcactcgntgaaatgtgtggagttcagatntacactggttcaaagctcaccatgattntattttttgataaatgagcttgccactattaaacaggcccacgcggtggcctcggtggatttggggtgaagagatgaagaggaggtgcaggagcttacaacaatggagaaatgtgcggcagggatctgaatctagcgctgggaaaggactggtggctctggagaggacgacgtggaggaggtagagccggatggggaggcatcgaacgaccccgtggctcggcgacggtctccgtggaccgtgc

SEQ ID NO: 48560 - DNA, 363 bp, Zea mays
  unsure (1)..(363): unsure at all n locations
tacaaagcttatagatggaccgaaggtcccttacgaatggaccaatcgttgtatcacgactacgatgcgcatccttacgcttatgaagatactgattaccgtgcccatgtctatgagcgctctatggccctctacgcactcaagcatgcccctaaaacatggtatgaatgcatcaaacaaatgctcagcactaatggagtgagagtctgaaaggccgatcatacactcttaactaagactctggaanatgacttgtgggtgtgcctgatctatgcagatgacactacttcacgggtctagtaacgagtctacctgtgacgaatgtaatggatcatgacgcaacagtccgagactctatgatgg

SEQ ID NO: 48561 - DNA, 370 bp, Zea mays
  unsure (1)..(370): unsure at all n locations
cagcttcacaccttgaactaactcggctgcgtcattcttctcttgtggccaatagaatcctgacctgaagaccttctcgactagtgtcttggatgctgcatgtattccacattgcccggcatggacctcatccagaagtcgcttcccagtagatgagagaatgcacttcatgaggacgcctgatgcaccccttctgtataatgtcttcccaatgagtgtgtagtgagccgactgtctggcgatacgctcggctgcattntttgtcatctgactcctcttcattctttatgtacctgatgattggccttcttcaatcatcagagtctgactctggttgattcacgatattacactcttctgcttgatctat

SEQ ID NO: 48562 - DNA, 456 bp, Zea mays
  unsure (1)..(456): unsure at all n locations
ctatgaagagtcttcattccaacatgggctagtcggcggcgccagagtcaacccatgttagtcttagcaattaagcaagtgtcaagttcagctctatcaaaatctaccaagtatagctgaccctctaacactcccttaaaagctattgaatcatcacttcttctaaagacagtgacacctacatcagtaaataggcagttgtagcacatttgacataattgtgaaacggaaagcaagttgtaatctaaagaatctacaagaaaaacattggaaatggaatggtcaggagatataactattntacccaaacctttgaccacaccttgatttccatccccgaatgtgataagctcgtggggatcttggttttctcgaggaggaaacatcttcttctcccgcatgggttgtgcaccgtgcgagatcaactgaccccgatgctaactacaaacaagtagt

SEQ ID NO: 48563 - DNA, 442 bp, Zea mays
  unsure (1)..(442): unsure at all n locations
cttctgcattggcaaccgacttaaagatagtatgaccttttaatccataaaggtctgagtcaatgttgtaagtttttataaggggcatacttgtaattcctcacaggctgcgtcctgtgcctataaatagtgaacagcattccgttactattcacgcattctggtattcgcaattgcatctctcggaatacaacctttgccaaggcataggtatcattggatttattgattcaatatattaagtgaatataatatgatacatctgcgattcattcatccatttcataccttntattttacaattatttataatgcttgttgaaagctattatgaacggtcaacttcgtaataatactctcgttaaccttcgccaagacacatatcctcacaggataatactcaccgacgaggacaagatcattacatttatgtgccttgtct

SEQ ID NO: 48564 - DNA, 452 bp, Zea mays
tcttgaccacctcaacgttcaccaagatgttgcaactaccaccgtttatgatggtatgtacacggcagtccttgacgatgaggaacatgttgaagaggttgtggcgctgtctgttgtcgtcgtcactagccatggcactcaaagctcgttgcacaatcaaagccttataggtctcggtcgttgttgtaccaagaacctcttcatcaccatcataagtctctgcaatgttagctccaacagtatcttcatcttccacatcagaagcactaacatacccaccatcaccagtagcaatgtatgcccatttgctggggcaatctcgctgaatatggccaagtctctggcagcggtggcacttgatgtcggaggagcggtctgtggaagaggtggtcgtagcaagttttgctgcaacacccgaacgcaccaaggactatgctgttgtgtgtccctgt

SEQ ID NO: 48565 - DNA, 405 bp, Zea mays
  unsure (1)..(405): unsure at all n locations
gaccttgatactaagctaagaaatacatggatcgaagcgatagatgccacgtcgtcttctattgctgcttgatacgatcccagntgaccggcgtgtattattgtacgtattgttaggacgatgtgtcctctaacacgtacatatgtctctgtgataaccaatggaattgcaacatatgctatgcacgatgtatatataagtatttacgtatctctgctagcgcggagcggcgtagaaatcaactctcgcttaattccttggagggtaatcactaatcagccagtgacgacggtggacgcgacacgtggtgggatgatacgtancgcgcgcgcgcgatgaggctgaggattcaattcgtcggtcaaccaagaatccgtgacgtatcgcctctatgtagtactccct

SEQ ID NO: 48566 - DNA, 443 bp, Zea mays
  unsure (1)..(443): unsure at all n locations
gcttaatgcccataaaagattnntctaatttgttaatggtaaggctcccatggnttaagataatgagggctatattntatatcatgctaattatcctgagcacaaaattaggagaattcatactagaaaacctcataatgtttctcaccatgcttttatttataagaatgaggcttctagctctaggcattccactcatgttaaaatgcctaaaaggaaaactcctgctgcatcaaatgagcctaacatttcatttaagacttttaatgcatcttatgttttaactaacaaatcanggaaagtagttgccaaatatgttgggggcaaacacaanggctcaaagacttgtgtttgggtacccaaggtgcttgtttctaatacgaaaggacccaagaactgttgtgtacctaagaacaaggcctaaattgtttgcaggttataca

SEQ ID NO: 48567 - DNA, 489 bp, Zea mays
  unsure (1)..(489): unsure at all n locations
tcgcacctctgaactaacttggctgcatcattattcgctgttggtaatataatcctgacctgaagaccttcccgactagtgtcttggacgctgcgtgtatttcgcattgcccagcatggacctcatctagaagttgcttcccagtggatgagagaatgcacttcatgaggacgcccgatgcaccgcttctgtataatgtttccccaatgagtgtgtagtgggctgactgtctggtgatgcgctcggctacatttttgtcatctggttcctcttcattctttatgtatctgatgatcggccttctccagtcgtcagagtctgactcgggttgatccacgatattacattcttctgcttgatctgttgagatgctcggttgtggtatttcttgcacaaagactccangtgggacctgagttcggctggatcctaacttggacaatacatcagctgccgtgtttcgatctctctctaaatgatgaaattcta

SEQ ID NO: 48568 - DNA, 384 bp, Zea mays
tgcagcctgtggtttagtaaggtattacatgatttcctattcatcccctctaggtgctctcagcatgcccttgacctacttgccttgactcttgagagacagagattacacatgaggggtagtgctagtagtctaaactcacaagagaaactaaagcactcgcctatttggatatgtctagtgccaccaaacttgtatctcaccaacccatgtcacgtgtcctctgtgtcaatggttgtgtgagagagaagagaggaatgggacctcccacacacctatggagctcctcagccatgttgcctctggtgaggcgcatcgactttgccaccagtgaggggcctatgtgtgatgccttcacgaaatcaaaatccactaatttgagta

SEQ ID NO: 48569 - DNA, 481 bp, Zea mays
  unsure (1)..(481): unsure at all n locations
agcttctaaagggagaacacattntaggattaacatttgttcattctgagaaagacaggatttgtagcgcatgtcaagccgggaagcaagttggaacccaacatccacacaagaacatcatgacgaccgacaggccacttgagctactccacatggatctattcggcccgattgcttacataagcatcggcgggagtaagtattgtcttgtaatagtggatgattattctcgcttcacttgggtattctttttacaggaaaaatctcaaacccaagagaccttaaagggattcttgagacgggctcaaaatgagttcggcttaaggatcaagaaaataagaagcgacaacgagacggagttcaagaactctcanattgaaagctttcttgatgaagagggcatcaagcatgagttctcttctccctacanctcacaacanaatggtgtagtggagaggaagaatcgaactctatttgacat

SEQ ID NO: 48570 - DNA, 270 bp, Zea mays
  unsure (1)..(270): unsure at all n locations
tgtgtcatccacggagaatgtagtttctacttgcgctacggntttgacatggtcgcaccctgccttctccaggatggtcgaaattcctctcgcaccagagaacgcgcagacatccccgcgatcatttagagtttcttcaaaagctgtagcctctccgcttatccactcgataacaccttcagggtagcctcatatgaagctatcttcgtttgaataggcgcccatgttggcgaaactagcctttatctattccacgcaacccaatgattt

SEQ ID NO: 48571 - DNA, 376 bp, Zea mays
  unsure (1)..(376): unsure at all n locations
gcttttcggacgaaggattcccatgttttctttgttctgnatccatagcacggtttcttgaactagtggaactttggaaaggcctcataatgctaccctgcctcgcttccttggtagaagagtatgggtctgatcaaccccgtgggaaatgggtaacacgacttgtgggtaaagatgtgcgacctctacagagtgtaaaactggtatatcagctgtgctcacggtcaagagcgactcatgactctcacatgattaatttatggaactaaacttaatctgtcatatgcatcgcatctcgggtgttattattaatctcgatctcttatttaattgggttgggatctacttatacctagtaacttctaataaattttga

SEQ ID NO: 48572 - DNA, 425 bp, Zea mays
  unsure (1)..(425): unsure at all n locations
acacatagaaactcagcttcgaccctgccttgctactttgctaatggcttttatttctngagaatcagcnttgaggagtgtccttattcccattgtctttagcttctgaagccctaacagaagagcttcgtactcggcaatattatttgtacaactaaagtccagctgtactgtatagcatgtcctgactttagagggcgctactagaacagcagccgctcctgcgccgaaggttctccaagaaccatcacagaataccgcccaggcttcggcatcttttggtgcttcttctctctgagcccctggcatccaatcagcaatgaaatctgccaacgcttaagatntatttgaggatctgtgtacataatcaatggtgaattcattaagctctacatgccattatccaatccttcctgtagattctc

SEQ ID NO: 48573 - DNA, 383 bp, Zea mays
  unsure (1)..(383): unsure at all n locations
accttaagncacctgaggcatgcaagcttttgggctgcaaagcgaacagatcctttattgttatntggaatacctgggtctaccttctcatgacctgtctgatttaaatgcgcagattgatgaaaatgacgttctggaatacataatgcaactaccttcagataaggctccatgaccagatgggtacacatgtcgattttataagagttgttggccaattattaaaagggatgtgatggctggtattgctgcaattcggtgcagaaaatttgggcagtttggaagacttaacactgcatttgttactcttatccctcataaggacggggcttatgaggtaaaagattttcgacctatcagttgtgtacacngcattggtaaac

SEQ ID NO: 48574 - DNA, 468 bp, Zea mays
  unsure (1)..(468): unsure at all n locations
ttaatgcanaatnntctcccctttgtcatacatctccaaaatttatactaagaatataaagggtagaaattatgattaagcaagatgggaacacactattatgaaaagggtccttatatggcacaaaggtaatggagaagtgacatgaagtgatgtacctttgcattttaccttttcaaggggagttccaaacttgtgttggatttacaattcatttgcaagctcttgttggtatagttgtgacataggtccaagatattaaatgaagattgtcatactaaatcgaaggtgacacttgatacctggagtctagatgtcacctagcattttcttatcacaacaagaggcaacatgaaaattgcacaagtatggattatgcaactagtgatcatgtatgaaaaatatcaattgaaaaacaccaattgataccatttgatagatangcagatcactaataacatattacac

SEQ ID NO: 48575 - DNA, 462 bp, Zea mays
  unsure (1)..(462): unsure at all n locations
gcttatgtgctttttgataccttgactattattgtcccgacagaaattgcatctcaatctcagttaagtttgcatttacactgctaccgtaattgtgtgttttatctttcctagcttagctacaggctangtggtagggctgaaacctaagttgtataaatccttttatgataaagatatcaacacttggacaaaaccttaattgcgtatatcaacgcttgttattcgtatatgttgtgtttaagagaaaaatagatgtttgcactagtgcaaaaaatagttgtcctaattcacccacccctcttaagcgtccatgtttctttcattgtgaatctaaactggttgactaaattttgataaactaaaggtacattntggtaaatctagagttagatggagtgtcccaaacatgctgtcacagtgtagaagaactattgagagagctatggtgatgaatgaata

SEQ ID NO: 48576 - DNA, 402 bp, Zea mays
  unsure (1)..(402): unsure at all n locations
cttctagtttagttttccaagataatgaaatcaggagtatggttttccaagacaatgaagtcaggagcattagttcccaagaactgactagaccaaagatgaaaaatgcaactcttcttccaccccttgatctttgtatatatgtacaactgtgtatggactgcactgcattagaatggtggcgaatgcaacaagtgagagagatgtggagaaactttntctgtataaagacaagagatgatgaagaaatggagattttagaggagtggttagctagcgattcgtttcatgagcgtacacctatccacacttctattcttacaggagaaaaacatgttgaagaacttctcaagggcataaagtacgagctatgagggaattttcatggagagggaaattttt

SEQ ID NO: 48577 - DNA, 332 bp, Zea mays
atatgttgggccatctagaaatcaaggaatagaatgtgctttgagaatattataatgaaatcacctaatggaattatctgccatgcgagcgctctgatgatttcatgggcaggtttgagcaaaagggagttgcagcctgcagggcttgattcaagaaggtgcaaagctgctggtctatgcagcgagcgtaacgttggatgctcgtgttgtcgatcaagtggaagaggataatgatgatacagagaattaaaagttcggtatagtgatcaactttccggtggaagcccgacgaggaatgtctacttcttgatcttggccgtgtagcttttgtc

SEQ ID NO: 48578 - DNA, 437 bp, Zea mays
  unsure (1)..(437): unsure at all n locations
gcctagctacgagtgcataagtttcatcaaagtccaaaccttcgacttgtgaataacacttggccacaagtcgggcttgtttcttgtcaccacaccatgctcgtcttgcttgttgcagaatacccacttggtacctacaacatattgattaggacatggaactaaatgccatacctccttcctcgtgaaattgttgagctcctcttgcattccaccacccaatccggatctcttaatgcatcctctaccctgtatggctcaatagaggaaacaaaagagtaatgttcacaaaaatgtgcaactcgagatctagtggtaaaccccttatgaatgtcaccaangatggagttgacggngtgatctctttgaattgcttggtggactcttgggtgtggcggatattgagcccttatttcttgatcatcttccttggcttg

SEQ ID NO: 48579 - DNA, 392 bp, Zea mays
  unsure (1)..(392): unsure at all n locations
tcnggtctntagccttgcnactcttgtcaatatgactcgttatattctgagaatcagntntaaggatcgccctcctgatccccatcgcctttagtttccgaagacccaggagcaaggcttcgtactcagcaatattatttgtgcagctgaaatccagtcttgctgcgtagcaagttttaaccttggacggtgaaaccaaaacagcagctgctcctgctccgaaggttccccaggagccatcacaaaacactgtccatgcttcggcatctttattcgcttcttcgccctgagcccctggcgtccagtcggcaataaaatctggcaatgcttgagattggatcgaggatctgtgcacataatccatgtaaaattcattaagctccgcaggccat

SEQ ID NO: 48580 - DNA, 296 bp, Zea mays
  unsure (1)..(296): unsure at all n locations
agagatggaagagctcgtccgttatcttntatagatagggngagggagagagagagagacgcactgacgggagcgggagataacggccggtggcttcaaggccattaatggcagtcgtttccaccattgaatgagagagggaagtgtgggaggaaatgagggaggagaggaagagctgggcgaggtcanggtcgacgcggacgacgaaacagcgcgagctgctcggccgagtggccgagcagagggggcacagccgagccggccgactgggcgcggccaggctacagcggcggcgc

SEQ ID NO: 48581 - DNA, 415 bp, Zea mays
  unsure (1)..(415): unsure at all n locations
ggtgttccactgattttcttttatgtctntgcgagaatntattaagatntttagttgaacttattggagcgaggtttatttttcctttctttccttctattccttttatgcctttaaggcgggtttgaactacaagttaacttaataaatttccaaaatttctgcaaaaattacaatggcttcttactggtgtataagtttctgtctcaaaatttggggtttaaaagtgagtggttctctttgtataaaattatcaaatattgnggtagaggggatgttcttaactacaactcattnttaacagagggttattctctaagacatttttngctggcatctagatattataacatgactttgggcaaattgtcaggcactaatacttattaggtaatttattatgagttttcaaagt

SEQ ID NO: 48582 - DNA, 383 bp, Zea mays
  unsure (1)..(383): unsure at all n locations
tggagatgtaaacactttttgtttctcatgctngcttggtcatgtttttttcactacagtatgattcaattgcagagattgttcttgcgtcaagctggttattaaatattcacctctctgtttatttattgtttttgtctactatgttgttgcacgcaatgggactgcactcgtgctcttcctctgcccagtgtaagaatcaattcatccatttgtgtctcagcgtacagtaagaaacaaaacacaatagaaacatgcaaaaatataatcatagtactagtacgtgtgcatagatacatacaattcgtacgatgtatccatggcatgtatgaccttttcttaanttcttgtcttatgttaatgagagccaaatttacccgtag

SEQ ID NO: 48583 - DNA, 486 bp, Zea mays
  unsure (1)..(486): unsure at all n locations
ataaaactaagcttctactagcatgcctacatccttgcgtgtcaccacaacattacattatcatcacagcagcacgtgcaccatgccttttccccgtctatgctgtagcattacaccaataccagtgccacagcgcagggcccaaaggacaaagcattgcgcgtcgcacccactccaccatgtggggtggcacgaccacaaaccggcatgcatggtcgacacacctacaacagctagtagcgcctagacgcctagcagacagcgcaaggcacaagttgtaaccagcacaagattttgaagcattttcaaggcataagaattcggacgataaatttgccttgcaaccgtagcttatgagttatatatattatatattgtatttacagatttcgtacatacttatttgctctacatgtttcttgaagattngaattatatgtattactttgtcatataaaatatagatattntatttagtatagtcta

SEQ ID NO: 48584 - DNA, 301 bp, Zea mays
tttattatttgtatggaatggtgcttaaatcattaccgccacgaacagctgtcttgttcatctttacgtaatttcaccgacgcttctttttctgtacagcaagcagatccacatgaatccgagcacagcgatcagggcaagagccaatgttgacatcgagccgatcacgacgccattcagaaagcgcgatgttcttttgttgttgctactgattggagagacacctgtttggattagaaaacgaatcaactccacgcagtaggtcaccacacaaacgttgccccgctcaccaaagtaaaaa

SEQ ID NO: 48585 - DNA, 487 bp, Zea mays
  unsure (1)..(487): unsure at all n locations
aactaagcttgcaaagaaattctagaatcaagaatattgagctcatgtctttatttttgtaaaagattgcncatcaagcggctcggtaaagatatcggctaattgatctttagtgttaatgtaagaaatctcgatatcccccttttgttggtgatccctaagaaaatgataccgaatggctatgtgcttagtgcggctatgctcgacgggattgtcggccattttaattgcactctcattatcacatagcaaagggactttggttaatttgtaaccgtagtcccgcaaggtttgcctcatccaaagcaattgcgcgcaacaatgtcctgcggcaatgtactccgcttcggcggtggaaagagcgaccgaattttgcttctttgtagcccaagacaccaaggatcttcccaagaactggcaagttctcgatgtgctcttcctattgattttgcaccctgccaatcggcatcgaataaccattaatcaa

SEQ ID NO: 48586 - DNA, 304 bp, Zea mays
  unsure (1)..(304): unsure at all n locations
tagaaagtcggcgtaataaatggacctcaacagcgccttccgcggtggtctattttatacagaggtatatgnngagcaaccgcccgggtttgaaaatattgagtaccctaatcatgattataaactctcaaaggcgctttataggctaaagcaagccccaagagcatggtntgaatgcctgcgagattttcttgtcactaatggcttcgaagtccgaaaatctgatcctaccctatttactaaaactattgcttaagatatgtttgtatgccaaatttatgaagaagatgtcatatttgggtct

SEQ ID NO: 48587 - DNA, 278 bp, Zea mays
ctgaagatatttgaaatctaccttcaccaacttacccccgaagcaatcataaggatgaatatcttcgtgtgggccgtcagaagccaaggcctggaacctgatgcgaaaagtttttgcaacatacacgaattgatatacgagacaaaaccctgtggtaaggaacagtatcacaacaattttgggtgctacagcttcagctcccggtctggatcaagctgcccggtgccgacctttcgaaagatgtggcctggtgactggatgaacggaatggtttacgt

SEQ ID NO: 48588 - DNA, 433 bp, Zea mays
  unsure (1)..(433): unsure at all n locations
tctaaagggagagcacnatttatgactaacaaatgttcattttgtttttacaaganttgtagcgcatgccaagcaggaaagcaagttgggtcccaacatccacacaagaacatcatgactagtgacaggccactggagctcctacacatggacctattcggcccgatcgcttacataagcatcggcgggagtaagtactgtctagttattgtggatgattattctcgcttcacttgggtattctttttacaggaaaaatctcaaacccaagagaccttatagggattcttgagacgggctcaaaatgagttcggcttaaggatcaagaaaataagaagcgacaacgggacggagttcaagaactctcaaattgaaggctttcttgaggaggatggcatcaagcatgagttctcttcttcctaaactccacaac

SEQ ID NO: 48589 - DNA, 178 bp, Zea mays
agcttggatgggattatatctttcattatatctgcttaatttcaaaattctcaacatgtagtttaaaggtgtctatgggtaggttcaataaattcatagttaccaaaactataaagtcataagtgttcataatttactacaagatctatttcagcaacctgtaacggacaaaaaatac

SEQ ID NO: 48590 - DNA, 354 bp, Zea mays
actcagcttctaagggagaacacgtgataggttggactaacgtgttattctaaaaaaatagaccttgtgcagcttgtcaagcaggtaaacaagtgggaggagcacatcacagcaagaatgtgatgaccacctcaagacccctggagctgctacatatggacctcttcggacccgtcgcctatctaagcataggaggaagtaagtatgggttagttattgttgatgacttttcccgcttcacttgggtattctttttgcaggataagtctgagacccaaggaaccctcaagcgcttctgtcggcgtttcgagacaagggggtccctaagccgacgagtgagtgtgctgcgtgccc

SEQ ID NO: 48591 - DNA, 409 bp, Zea mays
  unsure (1)..(409): unsure at all n locations
gcttatgaagattcttcatcccaacatgggttagtcttgggtgccagagccaacccatgttagtcttagcaatcaagcaagtgtcgagttcagctctatcaaaatccaccaagtatagctggccctctaacactcccttaaatgctattgaatcatcacttcttctaaagacagtgacacctacatcagtgaatagacagttgtagcccatttgacataattgggaaacagaaagcaagttgtaatctaaagaatcaacaagaaaaacattggaaatagaatggtcaggagatatagcaattttaccaagtcctttgaccaaaccttgatttccatccccgaatgtgatggctctttggggatcttggttnttctcatatgaagagaacatccttttctcccctgtcat

SEQ ID NO: 48592 - DNA, 429 bp, Zea mays
  unsure (1)..(429): unsure at all n locations
ngttggtgccattcattgatttctggaggggtgcatgaatgtgcacgtctggcgagccgggggcaaaaggaattcccatggtgatagactgacgacggagattgtcatccgtctcccgctgccgcctggccagctcatgaatgtcagcagaaatgtccctgcacatagagaaaaaggctgcaatcccatgagccaacctggctcccaggccacgacctcgaccacgaccacgaccacggtgagtgagagagccacgaccaagagaaggatgggagggaccagctgaggtctgctcacgagagctggcaggagccttcttcatcctgcctgctggattattggggtcaatccaaaaagggatgtangaaagatgtctggtgcctttntcatatctaaaatgggtgacaacctccatcatctacatgatgt

SEQ ID NO: 48593 - DNA, 458 bp, Zea mays
acatagaaactcagctgagcgtgccggttctctggaccctggaagctggttatcaacatgtccttcagctttagccatgaggtgattgttcctggccgaagagaggagtaccaggtttgtgcaacactcttgacagccataacgaaagactttgccatgacagcagtattgccaccatacaaagatatgggtgcttcatagctcatcaagaattgcttccggtctgaatgaccgtcgtacatggggagctggggtggcttgtaagactacggccatggtgtaacctacagttctgttgacagaggagaagcatcatcaaaagcaaaatttccatgatggaaatcttcataccagtcgtcctcattgtagaagccctcctgatggagctctctgcgcggaggccttcgattctggtcatcttgagcaagatgacgaacttcttccgaagcttcatctat

SEQ ID NO: 48594 - DNA, 312 bp, Zea mays
  unsure (1)..(312): unsure at all n locations
atttcaacaaaaaacggcggaaactgaaaaacatatntctcacaataaatattgttaaagtaccccgtcagggtttgggtatctcttgagcatttaccctctcgcccctactgtaataagcctatcccaactaccgagtctattaatacaactcttaaccccactcacgggttagggttttcccataattatagttggttgatgtattcacatttttggcacattgagaagtcttggttcttagaaaacgcgttttattcattaaaggggaaacaccgcatggctcaaggttcggtggtttgcaatttgaca

SEQ ID NO: 48595 - DNA, 356 bp, Zea mays
  unsure (1)..(356): unsure at all n locations
atggacgtganaagtgccttcctcaatggaccatttattatagaggtatatgttgagcaacctcccggctttgaaaatattgagtaccctaatcatgattataaactctcaaaggcgctttatangctcaagcangccccaagagcatggtatgaatgcctgcgagatttcttgtcactaatggctccaaagtcggaaaatctgatcctaccttctttactaaaactattgcaaaaaatttgtttgtatgccaaatttatgtggatgatatcatatttgggtctgctaccaaatctacttgttaaaagtttagttggatcatgatacaaaatattcgaatgttattgatgggggag

SEQ ID NO: 48596 - DNA, 370 bp, Zea mays
  unsure (1)..(370): unsure at all n locations
agcttctaaagggagagcacattntaggactttcctatgttcattntgagaaagacaggatttgtagcgcatgccaagcaggaaagcaagttggctctcatcatccgcataagaacataatgacgaccgacaggccactagagctcctgcacatggatctattcggcccgatcgcttacataagcatcggcgggagtaagtactgtcttgttattgtggatgattattctcgcttcacttgggtattctttttacaggaaaaatctcaaacccaagagaccttaaagggattcttgagacgggctcaaaatgagttcggcttaatgatcaagaaaataagaagcgacaacgggacagagttcaagaactc

SEQ ID NO: 48597 - DNA, 467 bp, Zea mays
  unsure (1)..(467): unsure at all n locations
ggtgaagattcttcatcccaacatgggctagtcggcggtgttatagccaacccatgttagtcttagcaattaagcaagtgtcgagttcagctctatcaaaatctaccaagtatagctgaccctctaacactcctttaaaagctattgaatcatcacttcttctaaagacagtgacacctatatcagtaaaaagacagttgtagcccatttgacataattgggaaacataaagcaagttgtaatctaaggaatcaacaagaaaaacattggaaatagaatggtcaggagatatagcaattntaccaagtcctttgaccaaaccttgatttccatccccgaatgtgatagctcgttggggatctttgttnttctcatatgaggagaacatccttttctccccggtcatgtggtttgtgcacccgctgtcgagtatccaaacttgagcccccggatgcataaacctacaa

SEQ ID NO: 48598 - DNA, 424 bp, Zea mays
tcaaaatatttcttttcttgctcttattttctgattgacggagcaattcattctttaatttgtcattttcagtttggatttcagccaaagagccctccatggtctgaataataaaatccttcttttctagtgcaccttcgtgctctttgaccatgatttcaagatcttgaattgcgaggtctttctttttcagattggcttcatgattttcaactttttcagccaaatcttgaatgacggttttgtttttctcttcctccagatcttggtgcatcttcagaaccttgcttaataatatgctcttgccaaatgatcttcgtcagaacacgactcaaaaagttaataataatagtaataaaataataaaaatattcgttacctttgaagtagcataaagcaaacttccccgcgatgtgttgtcgtg

SEQ ID NO: 48599 - DNA, 437 bp, Zea mays
  unsure (1)..(437): unsure at all n locations
taagacctactaactggacagttgtagacctgctatctatgcatgctntaactaacgactcccactgcaaggcacatattntctcggaggcaaaagtagcagatctttcagcgctccgaccaatcaagaaatcgatcccaacatcaataaactaaataaatacgtaatccctaggcggcttttttgtaaaaagaaaaaagaaaacaaattactaaacaatattcctcacacattgtctcgatccattctgaatcatttcatgcagaactggtgatctagcatgatggcgttaatattccatctgctcccttaacagccccaacccttccagttgggaagaaacaagcagccaggcaggcaagaacaacagcacggctccatctggtacctcgacaggcaccggtcggctgagtctaccgagtatactaagcatgaag

SEQ ID NO: 48600 - DNA, 233 bp, Zea mays
  unsure (1)..(233): unsure at all n locations
gccgcgcacaccgtgtagcttcgttcaatttgacagtggtgctcgggggaggccgattggggtcacaatccttcatcttcaccgcacggtcatggcggaacacccctgcttggttggtggggggggggggaaaacnaaccacaaccgtcccatctgatatgggcggaagagattaaaactaggattggaatctggcggatgagggttgactatgggcggtattaaatccgaac

SEQ ID NO: 48601 - DNA, 421 bp, Zea mays
  unsure (1)..(421): unsure at all n locations
tggtgtctntctccggggacttcattntccttacaatgagtctactacatganatagactcaaaaaagatattagtctcaaagtcttagattatagagtaacctccccctgaaagtgtgcatacaagttttgaatacttgtagaggacatgcactttgatttgatatcaagaggggcagattatccataatctgagctttggcacatataagttaaatgataccaattgtaggatataattttttgaagcattaatgtcatttacttaggaatgttaaataaactatgtgccatgcttaattaaacaatttaaaccgtgtaggtttgctcacgaatatgaattgaaaacgagcaatcctaccatgtgatttacctagtatgcatgcattggtaatctaaagtaagtatcaaatgaaatact

SEQ ID NO: 48602 - DNA, 464 bp, Zea mays
tgcagcttaactatagccacaaactttgataagcgttatctcagtttatgccaagtggctagagaggagtcaaaaacacaataaccacaagaattcaatcacagagatgacacggtggttatcccgtggttcggccaagtacaaaacttgcctactccacgttgtggcgtcccaacggacgagagttgcactcaactcctctcaagtgatccaatgatcaacttgaataccacggtgttcttgcttttcttttctcaatcccgtttgcgaggaatctccacagcttggagcctctcgcccttacaaaagatgttcacagagaatcacggagcaagggagggaatgagcaacgcacacaagacttcaaaagatcagagcaacacgcacacaagcagcaataagagctcgcaacacaactcatagagtacacaactccacaagagctctatatgctatcacaatga

SEQ ID NO: 48603 - DNA, 453 bp, Zea mays
  unsure (1)..(453): unsure at all n locations
gatcatcaaaatcggagttcggagctaaaagttatgcccataatacgaagtcggaattgctgaanaactgcagtagcatatgggatgtccggtgcacactggcctgtccggtgtgccaaatttgctcaaactgatatggcttcaactctgggatgtagagaatttcataagctttccaaaaagtacaagatcatcgaaatcggagttcggagctaaaagttacggccaaaatacgacaagcggacatgggttgtccggtgcacaccggaccgcccggtgcgccatgtccggtgcgccatcttcggaagctcaaacggctacttttaacggctagtacacgtgggatgtccggtgcaccaccggacagtccggtgcacctgtccggtgcgccgcagaaagctgcagaactgctttccaacggctatatttgaagtggggcctatatatacttca

SEQ ID NO: 48604 - DNA, 430 bp, Zea mays
  unsure (1)..(430): unsure at all n locations
tactaagctagtttcagaaaaatatgtggtgcccatagctggagaagtcattctattgcttcanagtctatgaacctaatagctgatgaaggctaaattgtcgttactttctaatccaatacaaaagagatagttaattccaatgcacagntatttatgctatgatgtatcctcaatgctacctgactcactctatacgaaaatatagataactcttgcaagtttagaataaacacataaaaggttgcacctcgctccatttctcctagcttttgcatgtttagaagaaactcgtacaagattgcactggctccctttctcctagcctttnttagtcttgcttggacaatcacgaagactcctttcattgtgagaattggttcatatcttggggcaggggtatggtggcaacaaactcaatatgcaccat

SEQ ID NO: 48605 - DNA, 180 bp, Zea mays
cgaaaaagatagaccttgtgcagcttgtcaagcaagcaaacaggtgggaagctctcatcacaccaaaaatgtgatgaccacatcaagacctttggagatgcttcacatggacctcttcggacccgtcgcctatctaagtataggaggaagtaagtatggtcttgttatagttgatgactt

SEQ ID NO: 48606 - DNA, 503 bp, Zea mays
  unsure (1)..(503): unsure at all n locations
gaccttgatactcagctttcttgaacagaacgttgatgatccgatcggattcctcctatgtctaaatcttccttgagggactntgtcaagaacctagtatctgtatcagaaagctgagtcttcccactcatgaaggcaacaaatgttggtggtcgtgccttcacttgagtgaagtacttgacttttggctgagtagctgaatctttccaggaatgtctgctcataacctagagcacaatcacaaggtattagaagtaatggtcgaaatagatgccacaatggcttcactggccagtgtagtcagtaactttgaacatcatgcagtcaaaataaaccaagtggtaggcgtggtaatgtacaaaataataataataaaaggatactggagaataccaagtcgactactagaacccactgaatgtttcaaaggatctcctaaatcattccatttttcactgataccaggtccactttcctgtcatataggtaactcatctggatct

SEQ ID NO: 48607 - DNA, 246 bp, Zea mays
  unsure (1)..(246): unsure at all n locations
agactntacactacaggaaacgcctaaattttcttgggccacaaacccacgaaaataagccgaaaccgactaaaataggctatgccgacgaaaatagccgccgaaaataagttcgacgaatatagggaaatatttacgttggtaccgacgaaaacgacttattttcggcggcttgcccaaggccgacgaaaatagttggtcggctgactattntcgtcggcctcggtggccgacgaaaataggaac

SEQ ID NO: 48608 - DNA, 470 bp, Zea mays
  unsure (1)..(470): unsure at all n locations
aactcaagcttcgggaanaaggagaangnngnttttatgcttcgttgcgtactattataatggaaggtgtttctttcgctttcggctcanaaaaggaaatttcgtccacatcaaagcatttattatacatcagtgaaaggttaaagatatattacaaggtatgaacagcatacattaaaaacaagttttgtttacattcacaaaagttatctcaaaagtttttcaagtactgtctgcagtctactatctaaatctccaaggagcttcagcttccgcattatttttgatcatcagcttcggcttcgtcatcctacacgaataaggtcgttggaagtcaaaatcaagtttacagaacaagtaagcacaccgtatgaattcttactggagtaaggtggcttcgagcttcttttccagctttctctcgaccacctttcgtccatatcatttttacaaatcgatntgagatgctt

SEQ ID NO: 48609 - DNA, 280 bp, Zea mays
  unsure (1)..(280): unsure at all n locations
cctgcggcatgcaagcttctaagggagaacacattgtaggattaatatatatgttcatttgagaaagacanggattgtagcgcatgtcaagccgggaagcaagttggaacccaacatccacacaagaacatcatgacgaccgacaggccacttgagctactccacatggatctattcggcccgattgcttacataagcatcggcgggagtaagtattgtcttgtaatagtggatgattattctcgcttcacttgggtattctttttacaggaaaaatctc

SEQ ID NO: 48610 - DNA, 335 bp, Zea mays
  unsure (1)..(335): unsure at all n locations
gacatggtcgcaccctgccttctccaggatggtcgaaattcctctcgcaccagagaacgcgcagacatccccgcgatcatttagagtttcttcaaaagctttagcctctccgcttatccactcgataacaccttcagggtagcctcatatgaagttatcttcgtttgaataggcgcccatgttggcgaaactagcctttatctattccacgcaacccaatgatttttcagagcatctttctttggacgcacaaagntcttcaactggttttctaaatagttcttccaatattcactgacatctcggttagcttctgcaagatcgcacttttcttt

SEQ ID NO: 48611 - DNA, 354 bp, Zea mays
aatgtgctgacttatgttgatgacatcatagtaaaaagcacgaagcaagagaatcatattgctgacttgcaggagacatttgccaatttcaggcaagctggtcttaaactaaatccagaaaagtgtgttttggagtaaagaagggcaagttccttggttgtctggtgtcaacaaagggaatcaaagctagcccaaataagattgaagctatccttcggatggagcctctaaattcaaagaagggggctcaacgattggcaggaaggctagcatcgttaaatagaattatatcaagatcagcagaaaggaatctaccattatttgaaatactaaagtcagccgaagttttccatg

SEQ ID NO: 48612 - DNA, 371 bp, Zea mays
  unsure (1)..(371): unsure at all n locations
tatgaagattcttcattccaacatgggctagtcggctgtgttatattcaacccatgttagtcttagcaattaagcaagtgtcgagttcagctctatcaaaatctaccaagtatagctgaccctctaacattcccttaaatgttattgaatcatcacttcttctaaagacagtgacacctacatcagtaaaaagacaattgtagcccatttgacataattgagatacggaaagcaaattgtaatctaatgaatcaacaagaaaaacattggaaatggaatggtcaggagatatagctattntacccaaacctttgaccaaaccttggtttacatcctcgaatgtgatagctcgttggggatcttggtttttc

SEQ ID NO: 48613 - DNA, 367 bp, Zea mays
ctgcagcttgaaccgacctgtgcacctagtttatgcttaacatgattcataagctcctagcataatgggcatgttgccttcttatcgatattgagagcttggcccattgaatatgtatattaagctaccgatatttccaagcagaaagatacctagcatgtcaacttcaaatttaggaagaactcctaagaagcccctgtgatcttctaacactcacaatgattatcgtctatccaaaatcttgttaataataactagtagcaaaatatggacatagattcttatccagaataaggctactaaagaaacatgacaataccacaaaactgttttacaagatcatatccacctcaaagaacaataatta

SEQ ID NO: 48614 - DNA, 454 bp, Zea mays
  unsure (1)..(454): unsure at all n locations
tgtagcatcgtgtagggcactatggttagagtctttgtgcgtcngtgcggnggantgngattctcgccggcgagattcgccgtggccctgcggattgcgccgtcgtccggcgtggttggtggaagaaaggctggtggccgttggatccaccaagagcggctaagattaaaacgtaagtgtacctggtcgtccaagtaaatctacggcgttcgatttggatctgatgggggcgattggaactaaccagtttaaaatccgaaccgtccattacagatctggcgatcggaaagaaatacagcacataacgagggtgcttttaatctgggcgcttcgtttaagatcggacgactgcgagcgcaccgtacaccttctgccctgtaactttgcgtaagagacctcgcgtttacccacaataaacccggcatccagtgcgacagcgctctgagtcttcgga

SEQ ID NO: 48615 - DNA, 270 bp, Zea mays
ctaccctctgtcttttatcgaccaaattgtagactccactgctgggtgcgaaaccctgtctttcctcgatgcttactcacggtatcaccaaatcaggatgaaagaagtccaccaactcgcgacttctttcatcacacctttcggcatgtactgctatgtcaccatgccgttcggcttgaggaatgcgggtgcaacgtaccaacggtgcatgaaccatgtgttcggccaacacattatccagacggtcgaggcctacatcgatgacatcgt

SEQ ID NO: 48616 - DNA, 390 bp, Zea mays
  unsure (1)..(390): unsure at all n locations
ctaccatgatctaatgatggacaatatagatgaagtggccgacaagagattggtgtctgtaagggagattgagaaagacaagatcataattgtcaaagcctacaacaataaggtaaaagctaagtcattccaggttggagatctagtctggaaaactatcttgccattaaggagtatggacaggnaagttggcaagtggtccctaatctgagaaggaacttatactgtgtccagcagttcacccatatggttaaccacaacactcgtatgtactattttaccctatagatggcattgttcgtagagtgaagtttgaatatgggtatgaggatgggtaagctgctatagataccctacagagtacacaggtgatctctgtaatgatatatg

SEQ ID NO: 48617 - DNA, 284 bp, Zea mays
  unsure (1)..(284): unsure at all n locations
caagcttgagcaccctcgggcgtcttgccgttgtctatatcaccaagtctctacttggaggtctcggggccgaacccctcgggcgtggtagcgtcgcagagactgctgatatcgcgccgagtgtaagaaggccacgtnccgagcctcttncagctggtccagcgagtcttctcggctggtctggttgctttggtcgtcgtacgcctttgtcctcggnggaccgtatttaagtctgtggcaagatagcctcagccccatagactagaaagaacggtgagaaaccc

SEQ ID NO: 48618 - DNA, 463 bp, Zea mays
  unsure (1)..(463): unsure at all n locations
tnctatggcgcccgaggctggacttggctgctgtcagtctcattctggcgggtggcacagcagtcggagcagggcaggcagcgctgttttcctgtcaggtcagtcagtggagggacgaagtgactgcggtcacttcagccttgtcgactaaggagcgcgcgtcatgataaggtgtcagacgatccttgcattgaatgctcccgcaatccggtcggctggcgaggtgatctggccaaggttgcttctccacgaagcctgcccgagctgggcctcgggcgagtctaaggtgtgcccatctcttgaggngaccctcgggcgagacgtgaatccttctgggtcggttgtcttctcccgacgcttgggtcgagcgaagcgagatcgtgtcccttgagtggacggagccttgacctgaattgcgcccatcaagcctttgcagctttgtgctgatggggggtaccagctg

SEQ ID NO: 48619 - DNA, 302 bp, Zea mays
  unsure (1)..(302): unsure at all n locations
gaagcctgcgacatacaagctggccaacgaccaaagcgaggtctacagcaacgcttggaacatcgaatagctacgtcgcttctatccttaaaatgtttcaagtcgntcatgtatctcactttctttacatgtataaataaagtctaaccatcaaggaaggatcagccttacctcggcaaagccagaccctccctcgggggctagaaggggggaaccccctctgcccaaaattttactcaaaaagttttctgccaaacgactgtctgcctttaaatatatcataacggaatcctaacacgacg

SEQ ID NO: 48620 - DNA, 407 bp, Zea mays
  unsure (1)..(407): unsure at all n locations
taagaagattcttcattccaacatgggctagtctgctgtgttttagccaacccatgttagtcttagcaattaaacaagtgtctagtttagctctatcaaaatctaccaagtatagctgaccctctaacactcccttaaatgctattgaatcatcacttcttctaaagatagtgacacctacatcagtaaaaagacagttgtagcccatttgacataattgagatacggaaagcaaattgtaatctaaatagtctacaagaaaaacattagaaatggaatggtcaggtgatatagcaattttacccaatcctttgaccaaaccttggtttccatccccgaatgtgatcgctcttttgggaatctggtttttctcataggaagagaacatcttcttcntccattcatat

SEQ ID NO: 48621 - DNA, 446 bp, Zea mays
  unsure (1)..(446): unsure at all n locations
tcgcatctctgaactagctcggctgcatcattcttcttctttggtcaatagaatcccgacctgaanaccttcccaactaatgttctggatgctgcatgtattccgcactgccctgcatggacttcctccagaagttgcttcccggtggacgggagaacgcacttcatgaggacgcctgacgcgcccctccgatataatacctccccaatgagtgtgtagtgagctgattgtctggcaatgcgctctgctgagttcttgtcatccggctcttcttcattctttatatacttaataatcggntgcctccagtcgtcagagtctggctcgggttggtctatgatgttgcactcttccctttgatccatcgagatgctcggctgaaggatttcttgcacgaagaccccgggcgggacttgagctcgaccagatccgagcttgacagtata

SEQ ID NO: 48622 - DNA, 360 bp, Zea mays
  unsure (1)..(360): unsure at all n locations
ctgcagcttaacaacttaagcctgtggagaagatattattttcttgtggcgaacaacgaaactattacatgagatttaaaaagtgtcctttattacacagaanataaaactgaatggaaaagactactatcaaggtaggatattngtcaataaatgtgcttcgactctggcacagtgctattgactgtgcgagcttcagactgttctctgaagtccctttggtgttgaacatattggcccccttctggctgctggccttgttgcagcggtggtggaggcggaggcttgtgccacgaaacttgaggctgactcgccgaaacaacagaactgcagggtgggtgcctacatattctgggatat

SEQ ID NO: 48623 - DNA, 484 bp, Zea mays
  unsure (1)..(484): unsure at all n locations
gcttatgaagattcttcatccaacatgggctagtcggcggtgtcagatcctttccatgttagtcttagcaattaagcatgtgtcgagctcagctctatcaaaatctactaagtatagctgaccctctaacacacccttaaatgctattgaatcatcacttcttctaaagacagtgacacctacatcagtaaaaagacagatgtagcccatttgacataattgagatacggaaagcaaattgtaatctaaagaatcaacaagaaaaacattggaaatagaatggtcaggagatatagcaattttaccaagtcctttgaccaaaccttgatttccatccccgaatgtgatcgctctttgnggatcttggttnttctcatatgaggagaacatccttttctcccctgtcatgtggtttgtgcacccgctgtcgagtatccaactngagccctcggatgcataaacctacaaaacaaatttagttctt

SEQ ID NO: 48624 - DNA, 419 bp, Zea mays
  unsure (1)..(419): unsure at all n locations
atcaatangtgggttgctttgatgntgtgctatctatangccatcaagggtcgcccatcagattgacctcatcagatcagtgaactaaaatgaggtgttgaaaccgtcgtttgcacatgaggaaggatgatcgatatactctgtactgaanaggtagatctagtatgactctcacatgagtaggactaaagaaatgacaacacagtagtattgagtaaacgttttgggtcgaggcaacctgctcagcgaanatagagccaatcaacgccttctacatggctattcgtttggttttaatccgtaccaacttcggagagtgttgagagtgaagttntttcactcgtttggaaaaatactgtagtattatatatagaaatgtgttgtgcagctagctcaaaatatatttctagaactaaagt

SEQ ID NO: 48625 - DNA, 431 bp, Zea mays
  unsure (1)..(431): unsure at all n locations
tcaanagggagaacacgtgataggtttgactaacgtgcacttcgaataagatagaccttgtgcagctggtcaagcagggaaacaagtgggaggctctcatcacaccaaanatgtgatgaccacttcaagacctctggagctgctgcatatggacctcttcggacccgtcgcctatctgagcataggaggaagtaagtatggtctagttattgttgatgacttttcccgcttcacttgggtgttctttntgcaggataagtctgaaacccaagagaccctcaagcgcttcctaaggagagctcaaaatgagtttgagctcacggtgaagaagataagaagcgacaacgggtccgaattcaagaatcttcaagtggaggagttccttgaggaggaggggatcaagcacgagttctccgctccctacacacctc

SEQ ID NO: 48626 - DNA, 346 bp, Zea mays
gaagaagaacgagaagctcaacactatgcccagaagctgaaatatccgaacggggcattagttgttaacggcagcggagaagaagaatttttgtactgtctcccggatagcaaagagatatctatttgctgggagatgggtagaagcttcgaattcccaacgttagaagatggcctctcagtactgtcgaaggatgaattggccgacagtttggcatagaatagtataaaggtgcgaaaatcaatttttgtatttaaaaactaattatctcacttggttatacttaatactatactccttttgcagggcttgatccttagcaatgccctcagggcacagaaaaata

SEQ ID NO: 48627 - DNA, 319 bp, Zea mays
catattagtcttagcaattaagcaagtgtcgagttcaactctattgaaatcaactaagtataactgaccctctaacacttccttaaatggtactgaatcatcacttcttctaaagacagtaacacctacatcagtaaatagacagttgtagcccatattgcataattgaggaacagaaagcaaattgtaatctaaagaatctacaagaaaaacattgaaaatggaatggtaaggtgatatagcaattttaccaagtcctttaaccaaaccttgatttccatccccgaatgtgatagctctttggggatcatcatttttc

SEQ ID NO: 48628 - DNA, 393 bp, Zea mays
  unsure (1)..(393): unsure at all n locations
agtcactgtgtacggtcgcttctatgctccaaaatctacctttttgctatgagttccaagtcgagatatggtcggggtaaggagatagagaggggagaagtttgctgtgtcagctaggtccgaaccgagacaaaagtggtgtcaagtcgtgtctagcgccctacggtaggtgtcacctctttccagggtgttctanggttaatttggcgccactttgtcaatgggtcgaagggtttgaanattgattaaggtgacatgtggatcttgtgcanggtaattttgtactaggcaaactgattcttcttgtgctgactangtgactnnttggactttctgaaacttttggggacttcttatataagttgggtataaagatatatactttatattggc

SEQ ID NO: 48629 - DNA, 356 bp, Zea mays
  unsure (1)..(356): unsure at all n locations
agcttcacggagacgcgcacaatcttcttttgttgtctggacggngctagngaaggctgggctggccggtctacagtggcagggggctcgggtgtccgcgggcgcgtcgcgtatgggcaaccggcggcgaactgagctccggtgaggcttgaatgcgtgcggaggggtactgccaaagctcctgggcgttttatagccgcggacacggaccanggcgctggctcngcttgngcgcggctcgggcgcgcgcgctggcgtgctctggcgcggcagacggcgtcnaacacgtggcggtttgtttcttccagtgttcaaatgtcgccagaggtcgcatacgtgcgaatctttgcaaaagt

SEQ ID NO: 48630 - DNA, 381 bp, Zea mays
  unsure (1)..(381): unsure at all n locations
acatagatactcagcttgtgaagccatcacaagtttgttgaagaatgacattaagttctattggtcttctaagtgcaatgaagcctttgagcaattgaagacactattgaccactgctccggtattagctcaaccggacatcactaaaccttttgacgtatattgtgatgcatctggcagtgggctcggctgtgtactgatgcaagagggccgagtgattgcgtatgcttcaaggcagttgcgccggcatgaggagcactatccaactcatgatctggagttagctgctgtggttcatgccctanagatttggcgtcactatctgctgggaaatatctgtcacatatatacagatcactaaagttgaagtacatcttcacc

SEQ ID NO: 48631 - DNA, 237 bp, Zea mays
tcgagccttctatcatgcactcaaaacttacaaaatgcccgataacttcctcgggggtcattttagtatatctatgagtaccacgaatcaattgaacttgagtgggattaagaaaaatgagagatcttaaaataacatttaccacttcgtgatcgtcccacttcttgctcccgaggatgcgaacttggttcaccacagtcttgagccggctgtacatgtgttgtggctcctcttctt

SEQ ID NO: 48632 - DNA, 410 bp, Zea mays
tgcgaatgctcaaaaatcatctattgtgcatgaagttgatgtggtcactaaggatgttggagtcacttgtgacttacttgatagtcttacaagtgaaccactacctactaactctatttgtgataaatgcaaaatttctctcaatgataacattgctcttgatgaatcaaaaattaatgttgagaatgaagtgttagtagatagaataaatactctaactcatgacctacaaaaagcatatggtggtaagactaaattggatttcatattgggaagtcaacgatgctctcttaaccgtgaaggtcttggatatgttcccaagaaaggaaagaatgcttttataaagcaaaagacattgtttgtgaaagaatgtgacaaagtgtgtcacaagtgtcacaaaaagggacata

SEQ ID NO: 48633 - DNA, 381 bp, Zea mays
  unsure (1)..(381): unsure at all n locations
agctntatcaaatggacgtgagaagtgccttcttcattggaccaatcaacgaagaggtctatgttgagcaacctcccggctttgaagatagtgagtaccctaaccatgtgtataaactctctaaggcgctntatgggctcaagcaagccctaagagcatggtatgaatgccttatggatttccttatagataatggcttcaaagtcggaaaggtcgatcctactttatttactaaaactcttgacaatgatttgtttgtatgccaaatttatgttgatgatattatatttgggtctactaacgagtctacatgtgaagaatttaataggatcatgacacaaaaaatcccagatgtctatgatggcggagttgaagtatttc

SEQ ID NO: 48634 - DNA, 463 bp, Zea mays
tcagctccatctatgttatggattgcttttgagtcagtcctattttcctcagcccttctggcagcttcctgactcccatgaatagcaatgggtccttgatccgaaggtatcttcatgcaaaggtaagcaggatgaagaattgcttcgaaagcattgagggtgccacgaccaataattgcattgtaagggtattccatgtcaacaatgtcaaacacaacttgctcagttctggtgttgttgatgaatccgaaggtcactggcatggtgatcttgcccagagctacaatctgtcttcctccgaagccacagagagggtgcgtagcatcatgaatcttatcttctggctcttgcatttgcctgaaggccttagcaaatatgatatcagctgcactgccttatcaaccaagacattgtggaccagagaccctttgataacgcaagagataaccatagcatcgttatg

SEQ ID NO: 48635 - DNA, 358 bp, Zea mays
  unsure (1)..(358): unsure at all n locations
agctnntcacaacatttgtctaatgtcaatgcttctgtatgtatttcaacaaaaaacggcggaaactgaaaaacatatttctcacaatagttattgttagagtacccgttagggttttggttatctcttgtgcatttaccctctcgcccctactgtaataggcctagcccaactaccgagtctattaatacaactctcaaccccactcaagggttatggttntcccatagntatagttggttgatgtattcacatttttggcacattgagaagtcttggttctgagacaacgcgtttcatccattaaaggggaaacaccgcatgtctcaagatcccgtgttttgcaatttgacacata

SEQ ID NO: 48636 - DNA, 451 bp, Zea mays
  unsure (1)..(451): unsure at all n locations
taatcanatggacgtgacaagtgccttcctcaatggaccaatctttaaagaggtatatgttgagcaacctcccggctttgaaaatattgagtaccctaatcatgattataaactctcaaaggcgctntataggctcaagcaagccccaagagcatggtatgaatgcctgcgagatttccttgtcactaatggcttcaaagtcggaaaatctgatcctaccctctttactaaaactattgcaaaagatttgtttgtatgccaaatttatgttgatgatatcatatttgggtctgctaacaaatctacttgttaagagtttagtaggatcatgatacaaaaattcgagatgtttatgatgggggagttgaagtatttcctaggatttcaagtcaagcaactccaagacggcaccttcatcagccagacaaagtacattcgagacatacttaac

SEQ ID NO: 48637 - DNA, 129 bp, Zea mays
cgccatgggctttgaatacccaccaggtcatgcaactcatatggaccattataaacacctattctgattttgcactagccaaacggccacttttcaaacacaaccctaggttcaatctagcgtttccgg

SEQ ID NO: 48638 - DNA, 346 bp, Zea mays
  unsure (1)..(346): unsure at all n locations
nttttcgttggtttttcgatgctctatattccttccttttcttataatcataacatccaggaagtcatgatcattgtttatatcagaatcatcatggacactgttgtccacatctttgtgatcgataagggggacctccaatgttgtatttttttacaagcttggattgccagtatttttctggaaagttccaggtctttgatcaactccagattatctattgcagcagactcagagggacccaaagaaactccaaatctattagctatatctagcaagtctacattattagaatcaagcagtgaaaaagagttagtgtacatacctctgttgaggaaagcatctt

SEQ ID NO: 48639 - DNA, 216 bp, Zea mays
  unsure (1)..(216): unsure at all n locations
acaatcangagactgtctctcttcgggaggcccgaagccaaaaaagaaaggttgtcagcccaacaccaccagaggacgaaatagatcaagaaatcagagacatggaaatgcttcatcaacaggtgcagaggaagaaagaaaagatggccaggctagctgagctgcaaaggcagatagacgaagcctctgaagaagttcgtcatcttgctcaggatg

SEQ ID NO: 48640 - DNA, 392 bp, Zea mays
tcttgactcccatggacagcaatgggcccttgttccaaatgtattctcatgcataaatatgctggatgaagtattgcttcgaaggcattaagtgtccctcgaccaatgattgcattataggggtactccatgtcaacaatgtcaaagacaacctgttcagtcctttgttgtggacaaagccgatggtcactggcattgtgatttttctgagtttcacaatctgccatcctccgaagccagaaagaggatgtgtagaatcatgaatcttgtcctctagttctcggatctgcttgaaggcctttgcaaatatgatgtccgctgcactgcctgtatcaaccagaacattgtggaccagaaatccattaatgacacaagatatgaccatagcatca

SEQ ID NO: 48641 - DNA, 464 bp, Zea mays
  unsure (1)..(464): unsure at all n locations
tgtgaagggtcttcatccccacatgtgctaagcggcgatgttacagccagcccatgctagtcttagcaattaagcatgcatctagaccggcctcatcttttgcaaaatcaactaaataaagtttgtcgtctaatacacccttaaaagctaatgaaccatcacttcttctaaagacagacacatctacatttgtgaatagacaattatatcccatattacataattgacttacggataacaaattatatccaagagactctactaagaatacattggaaatagagtgctcatttgagattgcaatcttgcttaaacctttcaccttgccttggttcccatcaccgaatataattgagtcttggggatccttgttcttgacgtaggaagagaacatcnttcttctccctgtcatgtggtttgtgcatccgctgtcgataatccagcttgagcccccggatgcataa

SEQ ID NO: 48642 - DNA, 375 bp, Zea mays
  unsure (1)..(375): unsure at all n locations
agcttgtgaaggttcttcatccccacatgtgctaatttgttatccacagccagcccatgctagncttagcaaataagcatgtatctagactggcctcctcttttgcaaaatcaactaaataaagtttgccgtctaatacacccttaanagctagtgaaccatcacttcttctaaagacagacacatctacattgtgaaatagacaattatatcccatattgcataatggactaacaaataacaaattatatccaagagactcaactaaaaacacattagagatagagcgctcattagatattgcaattttacctaaccctnttaccttgccttgattcccatcaccgaatattattgaatcttgggaatccttat

SEQ ID NO: 48643 - DNA, 446 bp, Zea mays
  unsure (1)..(446): unsure at all n locations
agctctctatgggcttaagcaagctcctcgcgcttgttattatatgcttanggatntcttgctttccaaagacttcaaaattgggaaggttgacactactctattcactaaaagaattggcaaagatttatttgtttgtcaaatctatgttgatgagtattattttggatctactaatgaattattttgtgaggagttcggaaaaatgatgtcaaaagaatttgaaatgtctatgataggagaattgagcttctttcttggccttcaaatcaaacaattgaaagatggaatttttataagtcaatcaaaatatttgaaggacatgctcaagaagtttggtttagaaaatgctaagcctatcaagactccaatggcaacaaatggtcatctagacttagatgaaggaggtactatggttgatcaaaaactctatcgttcaataattg

SEQ ID NO: 48644 - DNA, 320 bp, Zea mays
  unsure (1)..(320): unsure at all n locations
gtctgaggatgataggccaaactgaaattcaacttcgtatccatattcttatgaaagcctttccaaaatctggaggtaaactgtgatcctctatcagatacgatcttctttggtactccgtgtaaacacacaatccgagccatatataattctgccaactaagaccctntatatgtagttttgaccggaatgaaatgtgccactttggtcagtctatccacaatcacccatatagaatcatatcctttcaaggtgcgaggcaatccagtaatgaaatccataccaatctctntccacttgcattcgggtatctataatgg

SEQ ID NO: 48645 - DNA, 435 bp, Zea mays
aagcttaaccctgcagacctttcccgttcttttaaccatatgtttgttattcgaatgtcatactcgatgcatattcactttatttgttcccttgtatgatgtactgtttgtttcccaatttgaatggatgaatgtatgtatgcttgcaatcgcatagagaacgatccggtcgaagagcccgaggaactcgcaggagaagcccctgagcagcagtcggttggtggaggcaagtgtcctttgacctatctctgtcctattcattatttaattcacctcccgcattacacatttatacctaaggattgactagcttttgttgtccatgtccttgtttacctatctgggttggattattattattattagttagctttatgctattgctctactctaatcaatgaacatgatgagattatctatgatacgctggtttcc

SEQ ID NO: 48646 - DNA, 370 bp, Zea mays
gaaaatcttacagctggcaagagaatgcctcttgatgaaaacacgcagatggaccgatttattacctgaggcagtctgggcgctaaacacaactgagtgcagggcgactgcgttcactcctatccgccttctatacggatcggaggccatgaccccgcaagaaataaagcatgggtccccgcgtacagctccgtcagccgtacccgacgtggacgagccaacttcaaaagatcttattgacggagaccgggtcctcgctctacatgccctatacaaataccaagcccagaccaaagcatggcgcgaccacgcagtcctgcttacggagatcagcgaaggtgacctcgtactcgtccgaacagctcggacg

SEQ ID NO: 48647 - DNA, 266 bp, Zea mays
  unsure (1)..(266): unsure at all n locations
acgcaggccgacgaccgaggatcccacccttggatccgatcctcctcgtccttcggaaaagaactctgctaccaaacatcctgtaccacagagagtcagagctcgaacagagaaaaaagaccggttccaagccggcagggtggtttctggctcgcggcgcaaagccacctacaaacactgatctgangctcggtttacctaaggagcgacacctcgatcacactctcacaagtcgacagctcgacggatgcacagatctcgaatcg

SEQ ID NO: 48648 - DNA, 373 bp, Zea mays
  unsure (1)..(373): unsure at all n locations
cccccactatctactcgcatgttcatctattccccccccccccgccatgtgctcttaccccatnaaacaacccgaaaaaaacacagaccacacgggagcttattttttatgcttcagctcgtggcccatggacaaggaccatcacactttacttacaaaatcctgagtgaccgccgcagttactaagacacaccctccgaaggcatccccctcgcgagcacacatacaagacccatgacacacacgcaagcaacacacccagtctaatatcactaagggccctacacctaggcgccttttcccagggcatcaacaacactcacgaaacctcagaaccctcatccctaatgccaaatcactataaaaagaaaca

SEQ ID NO: 48649 - DNA, 393 bp, Zea mays
  unsure (1)..(393): unsure at all n locations
atattaggcttagcaatttagcaagtgtcgagtttagctttattaaaatcaactaagtatagctgaccctctaacacacccttaaatgctattgaatcatctcatcttctaaaaacagttatacctatatccataaaaagacaattgtagcccattttgcataattgagaaacagaaagcaagttgtaatctaaagaatctacaagaaaaacatttgaaatagaatggtcaggtgatatagcaatnttacccaattctttgaccaaaccttgaattccatccccgaatgtgataactcgttgggatcatggttttctcatcgaggagaacatatttctcctatcatgtgttgtgccccgtataatgatcaactgagcctcgatgctaactaca

SEQ ID NO: 48650 - DNA, 445 bp, Zea mays
  unsure (1)..(445): unsure at all n locations
ggacaatgaggagatggcgctcgncatcaagagattccgccttattctttacaaaggagggggaaagactacaagtcccgctccaagaaggattgctacaagtgtggtaagccccgtcactttattgctaaatgtccattatcaagtgataatgacaggggcgacgacaagaatgggagaagaaatgagaagaacaggtactacaagaagaagggcggcgatgcccatgattgtcgggagtgggactccgacgaaagctctatcgacttctccgacgacgaggacgccgtcaacatcgtcgtcaccaagggactcctcttccccaacgtctgtcacaagtgcctcatggtcaaggacggcanacggaagaaggtaaatctaaccctccactaaatatgaatttctatgatgatatgttgtgagagaggatactgcgtgtctttgc

SEQ ID NO: 48651 - DNA, 286 bp, Zea mays
  unsure (1)..(286): unsure at all n locations
aagaaaaatacaatattatttgactatggttagcaaaatttggagaacattatatctacctactgactcaattaaaaatgctaaacctctctgtccaccccattaagctagtttttaccctttgttttacaataggcttaaggctaagaaaaatagaccatgtgatttaaataatgaaccagagggtacccctatttttttangatacttattcacggtagtcactggaaaaatatatcataccctgttttagtataaaatacatacgatacctttttatttaaat

SEQ ID NO: 48652 - DNA, 350 bp, Zea mays
  unsure (1)..(350): unsure at all n locations
cctaagaaaatgtctaattttattaagggttggttcctatggctcaggataacgagggttacattttataccctgccggttatcccgagcacaaaattaggagaattcattnttggaagtctcactctggctctcatcatgcttctgtgtataagagtgaggcatctagctctaggcaatcaacccatgttaaattgcctaaaaagaaatctcctatagcatcaaatgaacctaatatctcatttaagacttttgatgcttcttatgtgctcactaacaaatcaggcaaagtagttgccagatatgttggggccaaacacaagggatcaaagacttgtgtttgggtaccc

SEQ ID NO: 48653 - DNA, 267 bp, Zea mays
accacatcaagacctttggagctacttcacatggacctcttcggacccgtcgcctacctcaacatcgggggaagtaagtatggtcttgttattggtgatgaattttcccgcttcacttgggcattctttttgcaggataaaacggaaacccaagggaccctaaagcgcttcctaaggagagctcacaacgaatttgaactcaaggtgaaaacgataaggagcgaccacgggtccgagttcaagaatctctaagtggaggagtacctt

SEQ ID NO: 48654 - DNA, 416 bp, Zea mays
  unsure (1)..(416): unsure at all n locations
tacccatgatgaggcatgtgaccagttaaagggtcctcgatcatcattcctacattgagaagggccttaatcgactcagacggagacactacaccgagcctctcttctcgtgcaagtcacccgcccggtatcagctttatcatttcaaacccaaagattggtacctagcagaggtacatcttttccgatgttgaaccatcacgaccatgatggatccaccctcaagttttattttgaaaacatcccacccacttgaagcatcatcttttgtcaaacaaaacattattgttttctaaagcaaagctaagcataagagaagcctttntgtaaaataggggatcaaggagaggtaatcaaattctcaaggaaggaattgccacaatttgtttagcacaccaactctataacctagtgca

SEQ ID NO: 48655 - DNA, 360 bp, Zea mays
tcttcatccccacatgtgcttttctgtgatgccacagccagcccatgctagtcttagctattaagcatgcatctagaccggcctcttcttttggcaaatcaactaaataaaggttgtcgtctaatacacccttaaaagctagtgaaccatcacttcttctaaagacagacacatctacatttgtaaatagacagttataccccatattgcataattgactaacagatagcagattatatccaagagactctactaaaaacacattagatatggagtgctcattagaaattgcaattttacctaaaccttttaccttgccttgattcccatcaccgaatacaattgaattttgggaatctt

SEQ ID NO: 48656 - DNA, 360 bp, Zea mays
acctggccgaagccccttgatcatggcctcaatgacaatttcattgggcaccgttggtgcctgtgccctcaaacgcaaaaaccttcggacatatgcctgaaggtattcttcgtggtcctgagtgcactggaacaaagcctgagcagtgaccggcttcgtctgaaatccttgaaagctggttaacaacaaatccttcagcttctgccatgaagtgatcgttcctggtcgaagggaggaataccaggtttgagcaacacttctgacagccataacgaaagatatggccatgactgaagcattgccaccgtacgaagacactgttgcttcgtagctcatcaaaaactgcttcggatctgaatg

SEQ ID NO: 48657 - DNA, 256 bp, Zea mays
cactggcctacacacggatgtcaacgtccaacgtgccctcgaacacagctgcctgatcctgtgccccacccgcgaggtctccgaaagcaccctcccagcgcacttgggccgcatgaacactgctagttcgagcctcccgacacaacacacggggcagatgacgccgccaacaagcctggcgagatgcacctgctagacctcagcgacagtgataggaaaccggttccaaccgtacccatgttgcccattctcgcca

SEQ ID NO: 48658 - DNA, 348 bp, Zea mays
  unsure (1)..(348): unsure at all n locations
tgccatccnctcccctcactcgcgccggcgacccctctcctncactccacgggatcatagagttagcacgggctttatgctagtatgagaaagcaatcactactggttcaagccaagaacgaatcgtgatgacccattataatcacgaggaataacatgaattccgatttgttatttgaaaactcttgtattcagaataacatgaattcatagttcttctgtgaaaactcttgtattcaaaccaagcttggaccatcgagggaagctttttttccccctcatctgaacatgagcttcagaagtagactaacagttcctttcctttttttaagaaagaaaagctcacag

SEQ ID NO: 48659 - DNA, 448 bp, Zea mays
tgccttcgcctcagtatatcacccacaatccaacggcgtctttgtgcgcgccaacggtaaaattttcacggccattaagaaaatgcttctcgacgacaagaagggtaaatgggccgacctgctacctgaagcagtctgggcactgaacacgaccgagtgccgggcgactgggttcactcctttccgctgcctatatggatcagaggccatgaccccgcaggaaatcaaacatgggtcaccacggacaagcacttcagccatccccgacgtagacaaaccaacttccaaggatctcaccgacgaagaccatgtcttcgccctgcaggccctcaacaaataccaagctcaaacaaaagcatggcgcgaccacacagtgttcccaagagaattcaacgaaggggacctcgtactcgtccggacaactcggatagagtcacggcgcaagctg

SEQ ID NO: 48660 - DNA, 398 bp, Zea mays
  unsure (1)..(398): unsure at all n locations
gcttatgaagattcttcatcccaacattatttttcggtggtgccagagccaacccatgttagtcttagcaattaaacaagtgtcgagtttagctctatcaaaatctactaagtatagctgaccctctaacactcccttaaatgctactgaatcatcacttcttttaaagacagtaacacctatatccgtaaaaagacagttgtagcccattntgcataattgagaaacaaaaagcaaattgtaatctaaagaatctacaaaaaaaaccattaaaatagaatggcaggaaatttacaatntacccaatcctttgaccaaccttgattccatccccaatgtgatcgctctttgggatcttggttttctcatggaggagacatcttttctccctgcatggg

SEQ ID NO: 48661 - DNA, 446 bp, Zea mays
  unsure (1)..(446): unsure at all n locations
taaaactaagcttctnagggagaacacgtgataggtctaaccaatgttactttctaataagatagaccttgtgcagcttgtcaagcaggtaaacaagtgggaggagcgcatcacagcaagaatgtgatgaccacatcaagacctctggagctgctacatatggacctcttcggacccatcgcctatctaagcataggaggaagtaagtatgatctagttattgttgatgacttttcccgcttcacttgggtattctttttgcaggaaaaatctgaaacccaagggaccctcaagcgcttcctaaggagagctcaaaatgagtttgagctcaaagtgaagaagataaggagcgacaatgggtccgagttcaagaaccttcaagtggaggagtaccttgaggaggaagggatcaagcacgagttcttcgctccctacacaccacaaca

SEQ ID NO: 48662 - DNA, 255 bp, Zea mays
atatcattgtccaatacaagatctaaaaattaaagggaccaatctgctagtctaatgcctcgaacatcgaggcaaaaccgaaggtttcgcaagagcatgtcttgcagttttttacattcaccccctagacacactctaagacacaacttaagacactcatttgtcatgccctacttaaagtagagataagcatttcattagagatgcgacattcatataaaaccaacacacatggattgagacagcgaacctgga

SEQ ID NO: 48663 - DNA, 402 bp, Zea mays
  unsure (1)..(402): unsure at all n locations
tacttaggtgattatcagttgttatcagttgggagctntctctttaaatcatgtattatccttcatttcgtgggataatttggccttaactaataatttccattaatatttgtaggccaggtttctacatatttacaagtgactgcttggttcatagatttgattacactgaagaacctgaggcatgtttatgcgaagttcccatatcaactaaagatgcaatgtcagctatgactatccagttacctcgaagattatcgtgcattgattaccattaacgtcactcgctatatgtcctacatggagattccaatgtttcatttaactccaatagatattctgggatgctcattcaccagccctgtctcaacttctacacttgctaatcctgcactatatagc

SEQ ID NO: 48664 - DNA, 384 bp, Zea mays
tcaggccgtcatacttcagcttcgtcatcctgcacatattatataacttattatgagatgtgcacatgcaaggagaaggtaaaagtaacaaatataagtttctcactggcttaaggtggcttcgagcttcgtcaccagccattttttgcccgccatttacccaaatttgggtcataaatctatttccgatgcttcgggctaagcttgggatatcaaccaaatctgctgctgacaagctgaagtttggcctattcacaatctttccgtgcgtacagccagccttcataaaagcgatagctgtgcctcgagaagctaccacggcgcacaagtcggcatgcccaccaataacttcgtcaagagcatcaacctcaccttcaatatgtt

SEQ ID NO: 48665 - DNA, 446 bp, Zea mays
  unsure (1)..(446): unsure at all n locations
catgtgctagtcggcgatgccttatacagcccatgttagtcttagcaattaagcaagtggtgagttcagctctatcaaaatctactaagtatagctgaccctctaacactcccttaaatgctattgaatcgtcacttcttctaaagacagtaacacttgtatctgttaaaagacagttgtaacccattttacataattgcgatactganagcaagttgtagtctaaagaatctacaagaaaaacattggaaatggaatggtcacgtgatatancaattttacccaaccctttgaccaaaccttgattcccatccccgaatgtaatagctcgttggggatcttggtttttctcgtaggaggagaacatcttcttttcctctgtcatgtggttggtgcacccgctatcgatgatccaacttgagctccccgatgcataaacctacaaa

SEQ ID NO: 48666 - DNA, 334 bp, Zea mays
ctcaagcctagctacgggtgcataggtttcaccgaaatccaaaccttcgacttgggagtatcccttggccacaagtcgggctttgttccttgtcaccacaccatgctcatcttgcttgttgcggaagacccacttggttcctacaacattttgattaggacgtggaacccaatgccatacctcgttcctagtgaagttgttgagctcctcttgcatcgccaccacccaatccgaaatcttgagtgcttcctctaccttgtgtggctcaatagacgaaacaaaagagtaatgctcgcacaaatgtgcaacacgagatctagtagttcccccctta

SEQ ID NO: 48667 - DNA, 410 bp, Zea mays
ctggcttcgtctgaaaccctgtgagctggttatcaacatatcattcagcttctgccaagagtgattgccctggtcgaagagaggagtaccatgtttgagcgacactcttgacggccatgacaaaagactttgccatgactgcggtattgccaccatacaaaaatatggttgcttcatagctcatcaagaattgcttcgggtctgtatgaccgtcgtacatggggagctggggtggcttgtaagactggtgcaatggtgtagcctgcaattctgttgatacaggagaagcatcatcaaaagcaaaatttccatgatggaaatcttcataccaatcgtcctcattgtagaagcctttctaatgaagctctctgcgcggaggtcttcggttctggtcatcttgagcaagatga

SEQ ID NO: 48668 - DNA, 364 bp, Zea mays
  unsure (1)..(364): unsure at all n locations
aaaatattatgaactatcacataaaaatattgaaccctatgctttctggtttaaattttagagtttgaaattaattaaagaaactgaccaaaccttattaaaataagaaaaattagttatgtttctgtgctgaacctaagaaaatttgtagaagtgtaaaccccacttatgcactgtttaaaaatagtgagcaccccagtattaaagatttagacaagattgcttattaaaagccatatntgcccaaaacttatgaaaatgtgaaaggcactagaaaataatgaacagtgaatgcanatatttttcttagaccacttaagtnatagagaacctatgaaaaatagagggaaccatagtccaaaac

SEQ ID NO: 48669 - DNA, 434 bp, Zea mays
  unsure (1)..(434): unsure at all n locations
tcgctttanaggctagcgttctcgctgaccaagctttgggctcttgtgatggtgccgagttggtccctgctggntcattgcaagctgcttccggtggcgaccttatgccaggtcatcaattgatctctcacgatttgggagtcccttcattcttctccaatctccaggtattgtgatatattctggcctgacttttacaccatatgaactgctatcaacacgctcatctgttctccctatcaggcattggtggacgggatggctagtcagctgaggttgcaaggtgcttctgttccagaaggagctttatctctggcacgttggaatccggtgttgctccaacatcgtgtctctgatttagaggcgacgaatgctggntagtactctttggcttctctntgnttatcttattgaactggcttacattntaactc

SEQ ID NO: 48670 - DNA, 409 bp, Zea mays
  unsure (1)..(409): unsure at all n locations
tgcggcatgcaagcttcaaacaagttcaaccaaaagacactgctatttttactctctagatcacgaatagcatcctctgcattcctcctgtcgtcaaaatcaataaatgcaaaaccaggtggtttgcgtgcgacccaaacactgcattgagaacaacagttagtggactgcaccacgtgttcatctgataaccaaagaagtcgtacagaaatataacagataaaacctctccatctcgctagatccaacatgaagatacacatgcacaccttcatctaaaatatccaaaacattttttttctgaaactaagacataattggaagagaatgcataatgaatataaacattacaaaccacctttgcggtcaaaatagttggacaatcatgtttcanaattcaaagttttac

SEQ ID NO: 48671 - DNA, 336 bp, Zea mays
  unsure (1)..(336): unsure at all n locations
ntcgccggcaatttccagggcacgtacgtgcgctccgggaattttgtgatctccgaagctgccggcagctgccgggagagtccctccgggactacatccggcgattctcgaagcagcgcacggagctgcccaacatcaccgactcggatgtcattggcgcgttcctcgccggcaccacctgccgtgacctggtgagcaagttgggtcgcaagacctccaccagggcgagcgagctgatggacatcgccaccaagttcgcctccggccaagaggcggtcaaggccatcttccgaaaggacaagcagccctaggaccgcccgtcagaagatgctcccg

SEQ ID NO: 48672 - DNA, 454 bp, Zea mays
  unsure (1)..(454): unsure at all n locations
gcttctaagggagagcacattntaggattatcttatgttcattntgagaaagacaggatttgtagcgcatgccaagcacggaagcaagttggtgctcatcatccacacaagaacatcatgatgactgacaggccactggagctcctacacatggatctatttggcccgatagcttacataagcatcggcgggagtaagtactgtctagctattgtggatgattattctcacttcacttgggtattctttttgcaagaaaagtctcatacccaagaaaccttaaagggattcttgagacgggctcaaaatgagttcggcttgagaatcaaaaagattagaagcgacaacgggacggagttcaagaactcacaaatcgaaggcttccttgaggaggagggcatcaagcatgagttctcttctccctacactccacaacanaatggtgtagtggaga

SEQ ID NO: 48673 - DNA, 418 bp, Zea mays
  unsure (1)..(418): unsure at all n locations
tgagtcagttctcttgcanaggataattgatgcccatattgattatgagggtatgaaacacattcgtgagaagttaagggctggaaaagccacatgtttcatagaagatgatcaaggcattgtatggtttaataaccgcatagtggtgccaaagaatgaagagctccgccagcaaattcttgatgaagcacatcttagctgctactctattcatcccggaagcactaagatgtaccaagacttgaagcaacattactggtggacaaagatgaagatcgaaattgcacgctatgtggcgagatgtgacacctgcagacgtgtcaaagccatacatttgaaagctgccggtccattacagtcactaccaataccaacatggaaatgggaagacataagtatggacttcattgtgggattg

SEQ ID NO: 48674 - DNA, 353 bp, Zea mays
  unsure (1)..(353): unsure at all n locations
catgcaagcttctgcaattcttttacctcggatggattgtttgatacctggcaacttanagcacccgagcactaaccaagtaactntacatgggcagactgttcaccctccaagtccggatggtccaggacttgtaatcaatactgttagagctaanaactcagacagtctgtagtactgaaagggaaatgtgcccttgggccatttctaaagtattatggtgattaagtgtccaacacaagtgccttaaagtattaataagtgccaaatggtggatgaagtgcaaatcaacacaaaggtataatctaaaactagaacattgnttttgtgcactaacatatttgtctaagtgc

SEQ ID NO: 48675 - DNA, 343 bp, Zea mays
tctgcaacatgcacgaattggtatacgagacagaactctgttgtttgaacaatatcacaacaattttggctgctacagcttcagctctcggtctgggtcaagctgcccagtgccgacctttctaaagagatggcctggcgactagacgacggaatggttttacgtgaaaaatgacttgaaatctcgagaggatataaaggagatcattatgtatcccatctggcaacgcttctgcctgcggaggccgaaggtggaaatgaatgaagcggccgaagaatgccagagagccttctgagttgtctgctcttttattgagacgagggatttaacacaagaacatatt

SEQ ID NO: 48676 - DNA, 348 bp, Zea mays
  unsure (1)..(348): unsure at all n locations
gcttggaagttcttatccaacatgtgtttgttgtgatgccacagccagcccatgcaagtcttagccattaagcatgcatctagaccggcctcttcttttgcaaaatcaactaaataaagtttgccgtctaatacacccttaaaagctagtgaaccatcacttcttctaaagacagacacatctatatttgtaaacagacagttatatcccatattgcacaattgactaacagatagtaaattatatcctagtgactctactaaaaacacattagagatagagtgctcattagaaaatgcaattntaactaacccttttaccttggcttgattcccaacaccggatatg

SEQ ID NO: 48677 - DNA, 422 bp, Zea mays
cttcggatgccgaagatccaaaaacaccttccctgagcgcgttgacgagaaacaattaaaataatcgtcgggcgcgcgatccatcttgcaccaattccacgctcgctagcgattcaccttctcgagctatgtggcccaccgttcagtgagtgcgggtgactgtttgttcggtgttggagaccttgccgattcaccttcccacctgcagcactatataaacagacgggtaggtgtgaagttaccacaacattcattgctattgtactgttttactgccaaatttttagtcatagccgaagcttgatcattgcgctcatacaaaatctgcttcagcgcaagtggaagagcttctgaaaagacacgaaagcctattcaaaaaatttccagtgaatcataatcaaatggctagagttcgctctact

SEQ ID NO: 48678 - DNA, 281 bp, Zea mays
  unsure (1)..(281): unsure at all n locations
caattcgaaaaagatagaccttgcgtagcttgtcaagcagggaaacaggtgggaggctctcatcacaccaaaaatgtgatgacgacatcaagacccttggagatgctgcatatgggaccttttggacccgtcgcctatctgagcatangaggaagtaagtatgggttagttattgttgatgacttttcccgcttcacttgggtgttctttttgcacgaaaagtctgaaacccaagggaccctcatacgcttcctcatgagatctcaaaatgagtctgagct

SEQ ID NO: 48679 - DNA, 430 bp, Zea mays
  unsure (1)..(430): unsure at all n locations
tctanagggagagcacactttgngaataacaaatgttctattttataaagacaggatttgtagcgcatgtcaagcaggaaagcaagttggtgttcatcatccacacaagaacatcatgacgactgataggccgcttgagctactccacatggacctattcggtccgatcgcttacataagcatcggtgggagtaagtactgtctagttattatggatgattattctcgcttcacttgggtgttctttttgcaggataaatctcaaacccaagaaaccttaaagggattcttgagacgggctcacaatgagttcggcttgaggatcaaaaagattataagcgacaacgggacggagttcaagaactcacaaatagaaggctttcttgaggatgagggcatcaagcatgagttatcttctccctacacacct

SEQ ID NO: 48680 - DNA, 357 bp, Zea mays
  unsure (1)..(357): unsure at all n locations
agctntagtgttaagtgagagtgacctgtttgtttttcttttagctcttgcgcctcggantgctgtctttctcattctttcttgagatcaaactcactggtaattgaggcaagagacaccaatcgtgtggcgatccttatatgaactctttggtccaagtgattgagaaaaaaaactcactctgtttgaaggaccgtttgagagagggacacggttgaaagagacccgatctctgtgaccacctcaacggcgagtatgtttgcaagaacccaacctccgttaaacataatcacgtgtcacactctttattcgcttgcaatttgttctgcgccctctctcttggactcgttctattac

SEQ ID NO: 48681 - DNA, 457 bp, Zea mays
  unsure (1)..(457): unsure at all n locations
tccatgcatataatcagatacagaaaaaataagatatatatttatgcatatgataagataagatagcattgttgttgctttaaaagcatttccatcacctcctttgtccattgtcttgtcctctgccctacccacggatgtcaacgtcgatcgtgccctcgatcacagatgcctgatcgtgtgccccaaccgcgaggtctccgtaagcaccctcccaacgcacttgggccgcatgaaccgcgctagttcgtgcctcccgacttatcacgcggngcaattgtcgccgcgaacaagcatggcgagatgcacctgcttgacctcagcgtcngtgtttggaaaccgctcccaaccgtcgccatgttccccattctcgccagagtcgacggcctttatgttcaacacctcggcggaggtggccttccaatcgatgacacttattgacatggagatgtgtact

SEQ ID NO: 48682 - DNA, 426 bp, Zea mays
  unsure (1)..(426): unsure at all n locations
ngacaatgaggagatggcgctcgtcatcaagagtctttgttntatcctcacacaaaggagggggaaagactacaaattccgctccaagaaggtttgctacaagtgtggtaagcccggtcactttattgctaaatgtccattatcaagtgatagtgacatgggcgacgacaataaggggagaagaaaggagaataagaggtactacaagaagataggcggcgatgcccatgtttgtcgggaatgggattccgacgagagctcaagcgactcctccgacgacgaggacgcctgcaacatcgcctgcaccaagggactcctcttcctcaacgacggccacaagtgcctcatggcaaaggacggctaatagaacgtaaatctaattcctccactaaatatgaatcttctagtgatgataatgctagtgat

SEQ ID NO: 48683 - DNA, 257 bp, Zea mays
acagccagcccctgctagtcttagcaaataaacatgcatctagaccggcctcctcttttgcaaaatcaaataaataaaggttgccgtctaatacacccttaaaagctagtgaaccatcacttcttctaaagacagacacatctatatttgtgaatagacaattatatcccatattgcataattgactaacaaataacaaattatatccaagagactcaactaaaaacacattagatatagagtgctcatttgatatt

SEQ ID NO: 48684 - DNA, 371 bp, Zea mays
tactcctcactgagaagggccgttcatcatcgccagtatattgaagcccgggacatacaagctagccaatgaccaatgcgaggtctacaggaacgcttggaacatcgaacagctacgtcgcttatacccttaaaatgtttcaagtcgttcatgtatctcgctttctttacatgcataaataaagtctaaccatcaaggaaggatcagccttgcctctgctaagcccgacccttcctctgtggctagaatgggggaaccccctctgcgtcaaaatttttctcggagaagtcttttaccaaaacgactgtcgcgctcttcgactgcgtcgataacataatcctaaagacgagcaatagagaccttgagcggta

SEQ ID NO: 48685 - DNA, 411 bp, Zea mays
tgcctgtgtccaatctgcctaagccgaaactattatatcttgccagatgcccccgttccgggcgaccacgaccaacacccaacataagaatttcctagttatttagccaagaccagagccatgatagttctcatggtagcactgttttcccgggtggtcactccatgttccaattaatatgcaataatcttgttaaccatcgggttaacaacaataatgtaaacttaccattttggaacattaatatcataagcgggagtgactgcataaagttaagttgtagcaatagcatagctacttgattagatcataatcccacgctaaacaaggagtaaggttggaaaggttatctaaataggtgacctcgtcaactattcatatattattaaaagaataaaccttattaaatgt

SEQ ID NO: 48686 - DNA, 254 bp, Zea mays
gcccactatacctctcgttaacctcagaaccccgggataatggaccaggctaagaacatttcttggttaggccacaggcaaccaactctgtcacatccatgatcaagacagtgctgcactcttctgaactatcacctattcaccatatttgcacaagaatacgcatgggttaaaaggcctcattcatatcacatttaatcttacgagatgtgggaattgaatgcatctaataccacaaattatacctacactaa

SEQ ID NO: 48687 - DNA, 280 bp, Zea mays
  unsure (1)..(280): unsure at all n locations
agacaaaatatactggggcctgctttttaatttgtacttaagcttcttctatacaagcaccgcactcactggcgattgcgaagctcgcacatacaatagtaatggagctcctagcgcacgtggagntaatgttgttagatcaatcaagtattgcttcagctcttcgaaggctctctgttgagctaggccccattgaaaaacttcggctgactntagtatttcaaagaatggcaaagttctttctgctgatctagatatgaatctactcaatgatgccagt

SEQ ID NO: 48688 - DNA, 442 bp, Zea mays
  unsure (1)..(442): unsure at all n locations
cttgatactttcttgataactgctattgtatgaaaactctgctaagggcaaacattcatcccatttctgggggaattccagaacacatgaccgtagcatatcttccagtatntggtttaccctctcagtctgtccactggtttgaagatgatatgccgaactgtggagtaatttagtacccacggatttatgaagttcttcccagaatttggatacgaattgaggtccacgatccgacactatggttttcggaacaccatgcagactaagaatacgagcaatgtacaattgggcatagacaataactgggtggtctgtcttgactggcagaaaatgagtaattttcgtaagccgatcaacgatnacccacatagagtcatacccttttatagtcctgngtaatcccacgataaagtccatacaatgtctttcccttttcatg

SEQ ID NO: 48689 - DNA, 365 bp, Zea mays
gcttcgtcaatttgtctttgcgactgagctatgctttctatcttctccttcttcctctgcacttgttgatgtagcatctccatctctctgatttcttggtctagctcttcttcctcaagcgtcgggctagcagcttttctcttctggcttctggcctcccgaagagagacggtctcctggttgtggtccagcggttgtagtgctgcagccccagccgctgaagctttcttcggcgccatagcgaaggtctatagcttccgaaggtgttcacgaagactcgaagtggaagtgagttcaccggaggtgggcgcccaatgtggggacttgttctcacatgctaagaattaagaacaacgcaacacaaa

SEQ ID NO: 48690 - DNA, 406 bp, Zea mays
ggtaagtagcataggctaataatatgcgaatggactttatcctatctacggatgcataggtttcaccgaaatccaaaccttcgacttgggagtatcccttggccacaagtcgagctttgttcctagtcaccacaccatgctcgtcttgcttgttgcggaagacccacttggttcctacaatattttgattaagacgtggaactaaatgccatacctcgttcctcgtgaaattgttgagctcctcttgcatcgccatcacccaatccgaatcttggagcgcttgctctaccctgtgtggctcaatagaggaaacaaaagagtaatgctcacaaaaatgtgcaacacaagaccgagtagttacccccttatgaatatctccgacgatggtgtccacggcgtgatctcg

SEQ ID NO: 48691 - DNA, 380 bp, Zea mays
  unsure (1)..(380): unsure at all n locations
ccggtcaacaaagccgaatgtcatggactacaacaccaccatatgccagcgatcactgacataacggcgcactcatggactgtggtcttctgatacttgctcaccccgagcgggataaacaagatacgccaaactaccctgcgaatatgcctattcaacaaaccctaatgggatgataagaagggtntctccgacacaacctgaacacagctggcgaatgtacgcctatctgcatgggcaaaggtgctatgtggaatcatatcgctaacaacctcaacatacttccacatgctattgccaataaacgaagcagagtagttcaccattgtatgacgacactctcacactagcccacaactttacatgcagggctatgcagc

SEQ ID NO: 48692 - DNA, 337 bp, Zea mays
  unsure (1)..(337): unsure at all n locations
agcttcggctccatctatattggggattgtttttttgtctgtccaatntccttcggcctttctggcagcttcttgacttccatgaatagcaatgggcccttgttccgaaggtatcttcatgcatagatatgctgggtgaagtattgcttcaaaagcattgagtgttccttcgccaattattgcattgtaggggtattccatgtcaacaatgtcaaagacaacttgttcagtcctggtgttatgaacaaagccgaaggttactagcattgtgattntaccaagtgccacaatctgtcttcctccgaagtcgcatagaggatgtgtagcatcgtgaatc

SEQ ID NO: 48693 - DNA, 465 bp, Zea mays
  unsure (1)..(465): unsure at all n locations
cttcgntctcctcaggcgcatgaacgttgttttctccgccagccctcacaatagacatatcccgaaaataccttcctctcatgttttcgaggtgactttgcttgatggtcgattttccgaaaattgcatgacttggtctccaaggtcgatcctcagaaactttgcccccactttccgcatcataactgtcactgtcacaagtatctttagacaggccctccagtatctccttagtaatcttctctgtatttgtttttgccattgactcaataaatccagcaatgtaaggattcatagccttcttcttctcaaaaagcttctcctcttcagttagcttcgtctcagcaacaaccttcttgtcttcagacatttctccttcagagatgaagaaaatgcgtctttttaaccgaagctcagaaagcttgagaaactagcaagcgttagtgagcaagagctatgaaattg

SEQ ID NO: 48694 - DNA, 330 bp, Zea mays
ttggtgtcttatgcggatagcatatatttattcattcctaaatttaacttggtcgaaaagtctaagtgccatgtgtgtgttgaatcaaaacaaccccgcaagcctcataaggctgctgaggcgaggagtttggcacctctagaacttgttcattctgatctatgcgagatgaatggaattttgaccaaaggtggtaaaagatactctctcacttttatagatgactccactagattctgttatgtgtatctcttaaaaacaaaagatgaaacgttcaattattttaaagcctataaagctgaagatgagaaccaacttgagaggaaaata

SEQ ID NO: 48695 - DNA, 329 bp, Zea mays
  unsure (1)..(329): unsure at all n locations
tccttgagatcttggctgtctaactgctctgccgtgtcaactgttagctcggacggtactccgaagcggccaacgatgttctgccagaagaatatttgggcagtctctgatgtgattgtggaaacagccctcgcttcaatccattaggtgaagtattcgacggctactaaggcgaacttatggttcccctgagcggtgggcaggggcccgacgatgtccangccccagcgctggagaggccatgtatgggcaatcagctttgtatattgcgaggggttgcctgaccgaggagagaacttctggcaggcttcgcaggaccttgtgacccg

SEQ ID NO: 48696 - DNA, 381 bp, Zea mays
  unsure (1)..(381): unsure at all n locations
agcttctggaatagcagctaacttttcaaacttttttgcatcttctggtggcaacgccatgtgctctgattccactgtttcanggccaattagttgccttattntactcgcgaattcatcctccatgtcctcctcgacttcctgagcaatttcctccatcacaacttcttgactcagatttgtttcaacatgtatctccttcgcaactatctggcttttagcttctgccaatctatttgtggtttttgatgtagcattcacagaccaaggttcctcttgtccctgctcagtgcctgaaagaatatgcttcctccctggcatgttattcctctcattcatcttatccatcttcttactacttcctccatgtgcatctgagtc

SEQ ID NO: 48697 - DNA, 421 bp, Zea mays
  unsure (1)..(421): unsure at all n locations
tgctggaggccatcaagacagcatagagtaccttctccaactctgtataatctttctgtgataaactaagaacctcggatacaaaatatattggggcctgcctcttgacttgaccatcaagcttctcctggacaagcgctgcacttaccgctgagtgcgaagctgccacatataataacaaaggagcccctggcattggtggagtcaatgttgttagatctatcaaatactgtttcagctcttcaaaagccttctgctggatnggtccccattgaaagacttcggctgacttcagcacttcgaagaatggtaagtttctctctgctgatctggatatgaatctattgagagatgccaatcttcctgtcaatcttttgagccccttctttgtagtttgtgggctcatccgaagtatagcttc

SEQ ID NO: 48698 - DNA, 423 bp, Zea mays
tgccttcgcttcagttatcatccgcaggccttctttttgtggaacgcgccaatgggaaaatattcacagctgtcaagaagatgctccttgatgaaaaaaagggcacatggaccgatatgttacctgaggcagtctgggcactaaacacgactgagtgcagggcgactgggtttactcccttccgcactctatactgatcggaggccatgaccccgcaagaaacaaagcatgggtgcccgcaaacagttccgtcagccgtccccgacgtggacgagccaacttcaaaggatctcatcgacggagaccgagtcttcgccctacaggccctaaacaaataccaagcccagaccaaagcatggcgcgaccacacagtcaatccgagggagttcagcgaaggggacctcgtactctgtctaacagctc

SEQ ID NO: 48699 - DNA, 179 bp, Zea mays
  unsure (1)..(179): unsure at all n locations
cttcattntggcatctcttgcgcccagctatataaacttcatcacgaactaccatatgcatggggcggagaggggccttaatgaactatgtggcatgctgaaaactgtagagggggacatgaagaanagcgctggcagcaacggtcatgtgatggcggtccaaaataaacccaacttta

SEQ ID NO: 48700 - DNA, 359 bp, Zea mays
gatgaagagattgttgagattaatcttgagcttgaatgagactctgtacaagtctaatgatgatagaccacacaaggtacttcattctcttgccacaaacatgtttagcgacaaggtagatgcactgttaagtctgtttttgacatggcaggtatgaaatagacagaaaatgtgaagaaaatactattgtatgaagaagggtgcgctagatggaaaagaatctagtcaagctgatcgaataagaagaatagtctcttatcaactccaaatccacccatgaaatggagaagattaacgttaagccactccaaacaaatagaacaagggtgggtctagtcattggttgctttttttatact

SEQ ID NO: 48701 - DNA, 275 bp, Zea mays
agtttctgctgcacaagcgtcacactcactgcagagtgcgaagctgccacatataatagtaatggagcccctggcgcaggtggagttaatgttgttagatcaatcaagtattgcttcaactcatcgaaggctttctgttgagctgggccccactgaaagacttctgctgactttagtatttcaaagaatggcaagtttctttctgctgatctagatataaatctgttcaatgaagccaatctttctggcaaccgatgggcccccttcttcgtact

SEQ ID NO: 48702 - DNA, 343 bp, Zea mays
tgtggcgccctcaggcttcctggcgtagccgaagtaccaagtctcccacctggaagtctcaaggccgaacccctcgggcgtggtagcgtcgtacagactgctgataccgcgccgagtgtagtaaggccatgtcccgagcctcttccagctggtccagtgagtcttctcggctggtctggttgcttcagtcgtcgtacgcctttgtcctcggagaaccgtattccaagtcggtgggcaagatagcctcggccccatagactacaaagaacggcgagaagcccgtggctcggcttgacgtcgtcctcagactccagaccaccgagggtagttccttcatccatcg

SEQ ID NO: 48703 - DNA, 410 bp, Zea mays
ccctctcctttctatctctatctctttttgtgatatcctggggggtttcaactctagcctaccctaacttgcttgggactaaaaaactatgttgatgtcgatgttgatgttgatgtgtttctctttcctactattaaacaagaatttgtacaagtacctttagctccataaaattacattgagagaggagaagattacatcttcgtataaagagaagtgaatcttgccatgtccaaaagtccgaacactacatgacattgttcctctatttataggtacgggatacagcttcaacgaatttataattgtgtccttaagcctatacatttaaattattatacatgctaagggaaaagttgtcctcttccagacctttagatggatctgtaagccgcaacttcgacttggga

SEQ ID NO: 48704 - DNA, 454 bp, Zea mays
  unsure (1)..(454): unsure at all n locations
tgtgaacaatacaagtacagaagagagagaactgcttcggtcgatcagccgaagcccatgctcttatgcgatgacatatcagagtagaaggtgctattgggatctcaactgtccgaagaacaggagaaaaccttgataaggtttctgtttaacaacaaagatgtttttgcatggtcagctaatgatctttgcggagtcaacagggatgttattgaacactcgctcaatgttgatccatccttcagacccagaaagcagaggcttcggaagatgtctgatgacaaggccgaaggtgctcggaatgaagtgaanagactcctcatcgccggagtcatcagagaagtaaaatacccagaatggctagccaacactgttatggtaaaaaaggtcaatggcaaatggaggatgtgtattgatttactgacctcaagaaagctgtgcgaaagatgagttt

SEQ ID NO: 48705 - DNA, 387 bp, Zea mays
  unsure (1)..(387): unsure at all n locations
atattaaaaatgggaagctcattcttgttgattctccacaaagaacaagggccgtgacaactatctaatacaaattctaacctaccattcattttaagttcgcggacacctgctttttttttaaaaaaaaaatatggagttgaagaaacatatagcagtacgtcggcgatgatcgaataaggaggctatagtcgagggagctacggaggtagcgtataatccacttggacggtaagatgggctctcgcggcgtgtgcatatacaaacacaactgctggacggcgtaaacgatgtcgggccaaaagataagttactggagcgtgtcgatcaggctcctgtattattatttaacaccgaatctttnacatactcatcatcaccaatctt

SEQ ID NO: 48706 - DNA, 465 bp, Zea mays
taaagatgacagcatagcattacaccaaagagaagcagttcctgtgctcgactagatgcagtgaagaaaccgaggcaaagttccttcaaacttttaagatgtgtggaacctcttcttggggttgggaccggtccgtttcaaaaaatctaagcactacattccaaacaggggcctaaacgcagaggttgagtaatagtgatcaagtgatgcacaaatgcaactgataaatccagcaagtagcaagtgttaacctgttgtcaggcgaggatacttggaagacaacagaatcaagctccatgtcgctagcaagatccctatccattttgcttatgcacacgttaatagttgccactctcaacactggaactgatataaacagtcagctccttatctacttcagagccctgcaaacaatacgaagaacagataaacctcatgaacctgcacaaggaaacatgttcaaac

SEQ ID NO: 48707 - DNA, 350 bp, Zea mays
  unsure (1)..(350): unsure at all n locations
gcttctanataatatatatgggtcatccaaacagtttggtgatttttggaatcattatttattttctaaaaatccaaaaacaagatgttagcctggtttaaacactctataattttctatttggattaaaaatcctaaaattatttttattaaattctatggaaaattaggaatctagcaaaattggtcctacatttttaggaatttttctacaattttctagaattgtttagctctggaagaaaaagaaaaagaaaaggaatgaacagtcttgggccanatccagcccaggcgggccaatcccgggaggaaaacacgcgcgcccacgcccgcgctgacagacttgcaca

SEQ ID NO: 48708 - DNA, 376 bp, Zea mays
gcgcatgccaagcaaggaagcatgttggcacttatcatccgcataagaacataatgacgaccgcaggccactggagctcctacacatggatctattcggcccgaacgcttacataagcatcggcgggagtaagtactgtctacgtattgtggatgattattctcgcttcacttgggtgttctttttacaggaaaaatctctaacccaagagaccttaaagggattcttgagacgggctcaacatgagttccgcttaatgatcaagaatataataagcgacaaccggacggaggttaagaactctcaaatcgaaggctttcttgaggaggagggcatcaagcatgagttctcctctccctacacgccacacacaaat

SEQ ID NO: 48709 - DNA, 428 bp, Zea mays
  unsure (1)..(428): unsure at all n locations
actacattangcctctggtagatttcaggtaatacaaaatctgacctgataacatgtacgcattttaatttcaaataatccacacaaagtttgctgtacatcttatggaagacatttcttttgaatggggtggataacatgcctttngtgctttatttcgctgtggattaattatctagagcatagagccgtagagtttgaaggctcctttcttttcatgacatgcaaacttattgtagtctgtagcacaatggcagaatggtaatttccaaataaaacaaattcgttggttagatatttccagcatgttgttcactgttgagggttatatttcgtcgactctaatatagatgaaggtgataatatgtgcttaacttatagtgtaacctttgttttcatctctggaagtctgccccatttatcaacat

SEQ ID NO: 48710 - DNA, 475 bp, Zea mays
  unsure (1)..(475): unsure at all n locations
ttcttgtattgcatctagggcttgtcttatctatttgagataaccgccaacaaagcgagtgaaaaagcttaactcggatcaaacttgacaagtcttagttttaagcttttagcacttaaattcttactttntatgcaattgttggttcttgaaatatgcatgaggcactgcacttagggggagtattcaaaactcaaatcactcatgaaaacccctagtgcaaggccaaaatgcaaatttcaccatttgcctattttctctgaaaattatctagcctatggcaaaatattttgaaaattatgagaaaagtatatgagggtgccaatacctgtcccaacaagtgttattntgtgtgtntataagttgggatttggtttggttgggaactagatagaanaattcataaaatccaaattttccctctgtctgggctcaccngacagtccggtgtgcacaggacactgcactatgcaat

SEQ ID NO: 48711 - DNA, 262 bp, Zea mays
acgcccacgacacactggagaagctagaccgcgccgaatatcatcctcgaagattgtgcccgaacgaaaatacaactttgctagatccatctagaagaaataaagaagaccaagtcagaggagagaggggaagcagaagagcaccttaaagcagaccaatctcgaaaaccataggaagacgaagagcgcgtcgtggaaaatagagattcacacgccatactcattaacggaagacgtcaatgtattggttgggattataatc

SEQ ID NO: 48712 - DNA, 482 bp, Zea mays
  unsure (1)..(482): unsure at all n locations
ttcttgatctantanggtccaatgtaacgaggttcttacttgcccttgatcccgaatctctggacacccttggtgggtgacaccttaagataaacatggtctcccacttcaaattgtagaggcttccgccttttatcatgatagctcttttgtctggcctgagcagcttctaagttcttcttgatgattctgacctttgcctctgcttcaagtaccaaatctggcccaaaaaattccctctctcctgcttgagaccaattcagcggggttctgcatcttctcccatacaaggcttcaaaaggtgccatctttagactggactagtagctattattataagaaaactctgccaaggaaagacacttgtcccaatcctttccgtagtgtagcacacatgccctcaacatgtctttcaaaatctggttaccctttctgtctggccatctgtttgggatggtatgctgagcttcgatgacatgggg

SEQ ID NO: 48713 - DNA, 220 bp, Zea mays
  unsure (1)..(220): unsure at all n locations
ccatcttctncttcttgcgttggacctgctgctgaaggatctccaagttntggatttcctgatccaagtcatcctccggaggtgttggactgacagccttcctcttctggcttcaggcctctctgagagaaaggacatcctgattgggatccagcggctgtaaagtaccacccccttgcgctgaagcttttttcggccgcatgacgaangtgatacttgc

SEQ ID NO: 48714 - DNA, 386 bp, Zea mays
  unsure (1)..(386): unsure at all n locations
cgatgactggattggccatccacactgggtgatgaacctcttcgatgaagctggcgtccagcagctttcggaccttctttcggatgaagtcctaccgctcaacggactgtctccaaggcttctgactcaccggattggtgttagggtggatcttcagatggtgcttgatcacctccctgnggatcccatgcatctacgatgactcccatgcgaacatgtcggcatttgcctggaggaaagcaacgagcgcgagttcctatttttcctccagatcacccgcaatgcgagtggtctgggggaatctgcgcataaccagatggccttgacggggacgtcgtccgctccggatggtcgcacctttggcaccttggtaggcgccttggtac

SEQ ID NO: 48715 - DNA, 441 bp, Zea mays
  unsure (1)..(441): unsure at all n locations
gcttctaaagggagaacacgtgataggtttatctaatgtgcaattcgaaaaagatagaccttgtgcagcttgtcaagcaggcaaacaagtgggaggagcgcatcacagcaagaatgtgatgaccacatcaagacccctggagctgctacatatggacctcttcggacccgtcgcctatctaagcataggaggaagtaagtatggtttagttattgttgatgacttttcccgcttcacttgggtgttctttttgcaggataagtctgaaacccaagggtccctcaagcgcttcctaaggagagctcanaacgagtttgagctcaaggtgaagaagataatgagcgacaatgggtccgaattcaagaacacttcagtggaggaatatcttgaggaggaaggaatcaagcacgagttctccgctccctacacaccacagcaaaa

SEQ ID NO: 48716 - DNA, 390 bp, Zea mays
gccgagtatgccactggagctcctacatttgaaaccttacccctgaggatcatttcaagtcggcttaccaagtccatagaaggaattctcctattggtaacccgagttgagtcggctagtcctctatacagatatgccggataggccctgtctttcagtggctgaatattcttgaaaacaaagtcagtgaccacagcttcagcagtcaaacctctctctttcagcaatccaacttcagttagcaacacacccgcctcagccacttcctgatctgtgggagactcagtccaactcggagtgcgaacgtctagctgtcttcccgaccgggaggggagagaatattcattattatcaactattaaccactctagacgccaccccttaatgcta

SEQ ID NO: 48717 - DNA, 430 bp, Zea mays
agcttgtgtgctcgatcccaattgtgcctagtttctacacgagcatcgacatacgtcttactctctcctaattctctttctttgcgggattttaagtacacatgcggtgttacacaatgatatgtatgtactccggcaatgcatatcggtgtattacatacattgaattagaagaagaggacacatgacatagatttatattggttagatacggggtatcctacgtttagtgaagactagatcccttatcgagtatgctcgagtttataagggatggtgatgattagttggctatgcaatacaacctataagttataagaatagtgatcgagggctcctcatatagtgcaggggtagggttacttataacttgattggaatgtaacatatatttctagctagttataagaatatctaagtacaataatta

SEQ ID NO: 48718 - DNA, 276 bp, Zea mays
cagagtaacttaaaaagaagcatcatctgacagacagacttaggttaacgggttgactgaatcttcgagacgcctttatatgatctccatttgttatgataatcatggtacatactatggttgttgtatagttgcatcatactagacagggacagatgaatatatgcctactatattctcatggcaaacaccaataacagcatgaggcactcttgctggattcagtagaggaccaaggatatagaaaactgtctttattttaagcttcttcctcac

SEQ ID NO: 48719 - DNA, 438 bp, Zea mays
cggcatgctatgctgctgcgtgtcttcatatgcgcttgtgtaactactctgctccattctcatgaggatgcgctcctacggcagccatatgctctgaccgcatctgaaacaccccgtatgtctccgaccttatgtctcatgcattgtccgccgctgcactgcactgcactgcgctgtgcacacactctctctctctctatcagagtgtctactccccccccactctagtctaggaggacgagtacacaacaaaatttaacacttccgactgcatgctcgctcactctcattcggagaatactcttgttattttcgccctcgatcctctctctagtggcaaaattaaaagtgttagagaggcaggcgttgcactggcactgctataactagccttggctgatggatgcatggtcgctcatgagcctaaacgtgcatgtg

SEQ ID NO: 48720 - DNA, 431 bp, Zea mays
  unsure (1)..(431): unsure at all n locations
tgcttaacagagtcaattcaatcttttgtgacttaagctaccgatatccaagattgacccaaggttattttaaattgttataccttaaactcatatcatctcgagggaagntgttgatgttgtacgaaataaagaattatcctatgccgaaaagtcaaagcctacaatatggaggaatgtcaaaggatggtaacatctatgcttttaagtgcaagtgtcttaacttatcatttctcatgtgtcttgtgtagtcacatagaaaaaggaagcacttaagatatttttaaatttatgtcaccattttttgaagaaactnctcccatatggtagaatgcatattcttcatttctatattatgaacatctacatgctttancattgttgctaatttccatgacaagggttacactaattattctattattgccttg

SEQ ID NO: 48721 - DNA, 378 bp, Zea mays
acttgaacgagaatccaagtgccactattgtgctaccacctgaagtgcgtactattgacaattctgacccctgcttcgcggaggtgctacaaagaaacactgatctccgtgctcgctcaactcatactcaacttatgacagattttgttgaacacatatggcaacgctatggaaacaatcaaaattagattgacatgaagctatgtattcatactaattgtctcctattatgcaatgccatttcatgattcgggtatcaaatgatataattataacatatattatggttatataaatcatgtcttaattgagtatcttgatgagctcttagacatgcagcagaatagctacaaagatccaatggatactcgatcaata

SEQ ID NO: 48722 - DNA, 201 bp, Zea mays
cacctgcggcatgcaagcttgatgtcacaaattcttatttatgaatgttaagcccatttctacttgatctcttgaaggaacaaactagatatccaacaaccattgagacactagttcatccaccaattaagtggtattccacttctacgtgcttagtttgtgcaagacaacttctcacttagtgtactagtcacatcttta

SEQ ID NO: 48723 - DNA, 416 bp, Zea mays
  unsure (1)..(416): unsure at all n locations
taataaaaacttagtaaactcatgtagaatgagaacacactgtacttatctatgtggctctgntatgggaggtgtttaattacaacatgtatatttgtttttttcagttcaaatcactangttagatactgttgcttttgcgcaaattattgcttgaagacatggtttcccttttttgctgtaagtagcctgtattatagcagattactttggtggatgagatgtttgaataggcttggtaaccctggtggatcatcactcgaagctgttcgttactgagaaagtgcaggcagcaactaatttacttatgatattggtctattccgggtggctcgcatggtaatgaattgagggggcacacatcgaaaggatgaatgtaatgaattgagggggcatttcatttcgtgatgcttatg

SEQ ID NO: 48724 - DNA, 306 bp, Zea mays
  unsure (1)..(306): unsure at all n locations
atgtcaagctcattnttagcctctcattttcttccttgagctcttgataagtatcatcttttgttcctgcaaattctagctcaaaaggaagatttgcttgtcgacggacaacaagcactaaccaatggtaatgtagtttcaatttgaatacatgtgcatgagtgaggggtgtggaattttaagttttctatcacaacctcatgagcaatatttaatatgatatgatcatccataagattttcattagaacatagaagcatattatattttcttgaaaagctagaatttcatcttttagcttttcta

SEQ ID NO: 48725 - DNA, 438 bp, Zea mays
  unsure (1)..(438): unsure at all n locations
caaaactaagacttggtcaagttgatccgagttaagctttttcacntcgcttgntggcgggtatctcaactaggttagacaagccctagatgcaatacaagagatttaaacatgcaatgcaagcttgacaacaccatttgacattttacttaaaatttctgagatcaagaatatttagttcattcctcaacatgcaaaagcgggtcttatcaagtggcttagtgaaaatatccgctaattgatcttccgacctcactccttctaaaatgatatctcctttagcaacatgatctctaaggaagtgatgacggatatcaatgtgcttggtgcgagagtgttgtacaggaatattagcaattttaacagcactcttattatcacacaacagaggtaccttttctagaactacgccatagtctagaagagtttgttcatata

SEQ ID NO: 48726 - DNA, 170 bp, Zea mays
agcctttttgtgatgaccaactactttttgctaagcaaggaaatcgctggagggctagcaaggaacagcgaacggacaaaccgcactgcgaatgcgaacatccaccgaactaagaagaatggtatagaccagattaagaagtcataggcaacaaaaaccctgaccaccac

SEQ ID NO: 48727 - DNA, 229 bp, Zea mays
  unsure (1)..(229): unsure at all n locations
tgagcttgtctatgggcaggagagcagtgttgtctgtgacaataaggttgaatgttgtcangttcgccagaacaaatgatctaactgctactgattattataattcaatgatggataatattgatgaggtgaccgactagaggatgatagctttaggagcaatagaaaaggacaagatcatggtagccagcgcctacaacaagaatgtcaatagcaaatcatttcaagt

SEQ ID NO: 48728 - DNA, 317 bp, Zea mays
  unsure (1)..(317): unsure at all n locations
atcttctggatactctnttgtattataagtaagccaatgcttcatgagaccactcacggattccattgtataggtcaattcatctactttctcttggtacattctttcttcctccgttggattaacaaacggtagaccttgaaaagcttgacttgactccagtacttatcatcatagtacccacgtgcttngaaatccttggcaacaatatcattgaacacttcattgtaatctttagatgaaagacgattaccatcattgtccctcttctttnttaaattcctcataagatgcagcctattgaacanagtatatat

SEQ ID NO: 48729 - DNA, 172 bp, Zea mays
ctcaccggagaataagctaaagattcttctcagttgatcgccatatctttctgcgaagcccctggcacctctgcctcttggtgctggtggtcggaaagagctctgctgctgccccgaagcctgtgatgagtattgtggcctttgctgcttgactcctttatcatcattttga

SEQ ID NO: 48730 - DNA, 316 bp, Zea mays
  unsure (1)..(316): unsure at all n locations
actattntggagtggaaagcaccaaaagacgttcaaggaatcaagaagttcattggaatggccggntattatcggtggttcattgaaggtttctccaagattgccagaccaatgacaagccctgtggcaaagaagggcgagttcaagtggacctcaacatgccataagttctttgagacattgaaggagaaattgacaacggcaccagtgttgattctgccagacgttcacaagccattctcagtatattgtgatgcttcgtacactggactgcgatgtgtgttgatgcangaanggagagtaatggcatactcgt

SEQ ID NO: 48731 - DNA, 300 bp, Zea mays
  unsure (1)..(300): unsure at all n locations
ggcagcttcctgacttccatgtatagcgatgggtccttgatccgaaggtatcttcatgcanagataggcaggatgaagaattgcttcgaaagcattganggtgccacgaccaataattgcattgtaagggtattccatgtcaacaatgtcaaacacaactcgctcagttctagtgttgatgatgaacccgaaggttactgacatggtgatcttgcctaatgctacaantctgtctcctccgaagccacagagaggatgtgtagcatcatgaatcttatcttctggctcttgcatttgtct

SEQ ID NO: 48732 - DNA, 122 bp, Zea mays
aaagacgcgatagcagcgagaagagagaaagaccgatagtggcatgaaaaaagaagtaaaaagacttaaaagatggaatatacccgaagaattatccttgaatacagctatccatgtgcatg

SEQ ID NO: 48733 - DNA, 332 bp, Zea mays
  unsure (1)..(332): unsure at all n locations
tatgcataaacattaatgttgaccttttcttatggtatctaacacattagtataaatatgaatcaaatattacataaacttttctatgtattatctggcttctacaacagagaacagtgaaaaattacgcgaatttttttgaatcatacttgagttatatctattattcagaacatatatgatgaacttgatgttgatttttatgaatcttcacaagctagatgttaaaacaagatacaaattngattatagatctatatatattattcgcatanaaaatgactaagaactaataccgaataagactggttcgactgtttatcctcacaggg

SEQ ID NO: 48734 - DNA, 210 bp, Zea mays
ctactctacgggtgtatttgcaaaatgccatatcaatacaacttgtttgaaacttttgcctagtgaatgccttctaggtgtatcaaacatatgaaatactaatgctggtgatggtatgcctcaagtttaataacaggaacacccagggtgttacacgtattgagctaaatgtctaaattcgcgtaactcggattgatctatagcatacat

SEQ ID NO: 48735 - DNA, 263 bp, Zea mays
  unsure (1)..(263): unsure at all n locations
agctgtatatggttngcatcaagcacctagagcatggaatcattatatgtatgatatattangtgttctgggttgtattaagtgccattctgagcatgctatctattgtcgnggagatggagctgaaaaactggtggtgggaagttatgttgatgatttaataatcactggttgtagcagtaacatcatttagaaattcaagtcacaaatgtcagatgtgtttaaaatgagtgaccttggagtattgcttactatctgagcat

SEQ ID NO: 48736 - DNA, 334 bp, Zea mays
  unsure (1)..(334): unsure at all n locations
cattttctaactcatgctcgatacatttagcagntaatttagatatgtgatcattatgtagcttaatcatggacaggtgatcatccatagcttcaatattaacatccctacatctacgacaaatagttacatgatcaataggagatatagatgtttgcacgcattccattcttctatcttagcatttaatcaagtattctcatcttcagataggaacttgaatcattgcanacattcaatntttcaatcttagatactagaatatcattttcagntctaacactctgaactgactatggctcatgtaagctcttagacacatttacattttcta

SEQ ID NO: 48737 - DNA, 388 bp, Zea mays
  unsure (1)..(388): unsure at all n locations
ctcacggatgaaatcctgccgctcgatggactgtctncgaggcttctgactcaccggnttagcgtcaaagtggatcttcagatagtgctcgatcacctnncttgggatcctangcatctgtgatagttcccatgcgaatacgtcgacatttgcttggaggaaggcgatgagcacgatttcctatttcttctctangtcacccgcgatgcgagtggtctgggaggaatccncgcggagccggatggtcttgatggtgacgtcgtctgcaccagatggttgcaccttgngcaccttagcagacgccttggtacangaagtcgaggggtcccttccctcgtcatccgggcgagcagctttctgccgcagggcgtgcaacttctcgatagct

SEQ ID NO: 48738 - DNA, 156 bp, Zea mays
  unsure (1)..(156): unsure at all n locations
tgggatgtaccataatatacactaatttcattgcaatataaaatgttcaatagtgcatataactctgacatcaaccatatatgtgcactaacttacaataatntaatctaccctcttgggttctaagaatgatgaatcattcgccatcctcatata

SEQ ID NO: 48739 - DNA, 209 bp, Zea mays
  unsure (1)..(209): unsure at all n locations
aacaccttgcctgagctcgttgacgagaaacgattcagtttcccagcgcataacggtcccaccttgcagagttactggttggtctctgcggtccaccgcacagcgagtgcaagcggctgtccgcctggtgtaaaaatcctggcgcttcgccttcttacctgcagtactatataaacagacgaagaggtgtgaagntaccacagcattca

SEQ ID NO: 48740 - DNA, 395 bp, Zea mays
actacaatgtcatttgagaagacttgtttgttccatgctacaggaacgggtgagtggtgattcacacaaacatcttaccatgacagccgttgactacttcactggactttcacccgatcctattagcctcgcagagaagatttgtttatgcgatgatatctccttactggatctttgagaaattcaacccaagacctagatatctagatggctaaatgatcgatgagactaaaataagcattggcggataaacttaatgagatctggagctcgctgatttttctccactccaagggatgaagaattaccttgttggagcatctgtaacaactcgtcgttgcgagcatacacgtgtctcttacgattacttcgatctagaaccattactctccaaa

SEQ ID NO: 48741 - DNA, 238 bp, Zea mays
  unsure (1)..(238): unsure at all n locations
ccaagctgtatataaactgaacctcaataatcaatgttagttggctcagctaattcagattttggtaaatcaattgacatcgcctcagcagggcggcacaaacacaacactgcaacatctactgacctcatgaactttttcaatttattcaaggaaaccgtanaggtaacgtaccttcttagtggaagaagtgttagcttgttagcataagcacttccacaaaccatacattcactaa

SEQ ID NO: 48742 - DNA, 320 bp, Zea mays
  unsure (1)..(320): unsure at all n locations
gtgaagatagtgagtaccctaactatgtatacaaactctctaaggcgctntataggcttaagcaagccncaagagcatggtatgaatgcctaagagaatttcttatcactaatggcttcaaagtcggaaaagccaatcctacactctntactaaaacacttgaaaatgatttgnttgtatgccanncattatgtgatgatatcatatttgggtctactaccgaatctacttgtgaagagttagtacgatcatgacacaaaaattcgagatgtctatgatgggggagttgaagtacttcttataatttcaagtgaagcaac

SEQ ID NO: 48743 - DNA, 247 bp, Zea mays
  unsure (1)..(247): unsure at all n locations
acgtcgtgcctattaaccgcatcttcgcgtcacgtcgtatggttcaatgggtgtgtgggtactgtgccaaataccaaccttatgggcgagcttgtgacctaacgcgacgacgatactagatagatctttgatgccgaccatgtnnctcagcatgccacgaaaagaggagaaagagaatgtcacaccgcgtgccaaccgctcctttngcatcgtgtctcgagggtgtctggaatgctctcgacgttgg

SEQ ID NO: 48744 - DNA, 351 bp, Zea mays
  unsure (1)..(351): unsure at all n locations
acggtatgtatgcacaattcatgcattcgtanagaaatngaaccatatatagaatatatattacattcaaaattacaaagattacacatgttacattccacatgtntttacaatangcattaatcttccctaagaactacttctgcagcttcgttcagtagctgatcgacaactntgtccatgatggcttcggncattnttctaatntcgtcgtcccccttcggtggnnggcccgagatgcctcancaggttctgagggaggagaagatacntgtatattactattacataccgcgaacanagtttganatcacaaattacaatagaaataaaaccactagttaatacata

SEQ ID NO: 48745 - DNA, 453 bp, Zea mays
  unsure (1)..(453): unsure at all n locations
cactataaagcatactacgagcaaatttaanattttcattttctaactcatgctcggcaatttaagcatctcaatttgctatatgatcatnnttgtgtttaatcatagtaatgtgatcatgaatagcatcaatgttaatatctctacatctagtgcaaatagtaacatgctcaacgatggatgtagagggtttgcaagaaattanttcaacaatcttagcatgtaaagtgtcattctcatctctaagaatggaaatagaaacattgcanacatctaattccttagccttagcaaaataattatcattatncaaattaaggctagaaagcgatgcattcaaattgtcaatcttagtagtcaaactagcattannttgtgggacttgtctcaaccgtatgaataagacaaggcacataaatataaatgacatgacctcgtccatgagcatattcc

SEQ ID NO: 48746 - DNA, 331 bp, Zea mays
  unsure (1)..(331): unsure at all n locations
gtcattgtgagaaagacataatttgtatcgcatgccaagcanganagcaagttggcacccatcatccacataagaacataatgacgaccgacaggccactggagcttctacacatggatctattcggcccgattgcttacataagcatcggcgggagtaagtactggctagttattgtggatgattattctcgcttcacttgggtgttctttttacaggangaatctcanacccaagagactntatagggattcttgagacgggctcaaaatgagttcggcttaaggatcaagacaattagaagcgacaacgggacgggagtcaagaactc

SEQ ID NO: 48747 - DNA, 351 bp, Zea mays
  unsure (1)..(351): unsure at all n locations
gcttgataatgaggagatgacgctcattatctagagcttccgccatatcctcaagcanaggagggggaaggactacaaacctccgctccaaaaggggtgtgctacaaatgtggtaagcctggtcatttcattgctaaatgtcttatgtctagtgatagtgacaggggcgatgacaagagggggaaggagaatgagaagaagaagtactacaagaggaagggcgacgatgcccacgtgtgtcgggaatgggactccaacgagagctccaccgaccccttctctgacaagggatgccgcaacatcgccgtcaacaagggactcctcttcccaacgtcggcacaagtgcttatg

SEQ ID NO: 48748 - DNA, 183 bp, Zea mays
  unsure (1)..(183): unsure at all n locations
gatannaattgacanaacagtgtcaggatcctcgaagaacgagtatgagaatgaccagacatgagagaattatgcttatcaacatccgatacatgagaacaggttatagcagatatccagataacgggacagggtcaataaaggatccggagatttggatgataaagccacaacatgattcac

SEQ ID NO: 48749 - DNA, 235 bp, Zea mays
  unsure (1)..(235): unsure at all n locations
tcgcacatgcgaagcatcttctgagtaacgaagactaatggtgtctttaattaattntaagagtatctgcacaccaaaataaattgaaccaaaataaaatattgctcctcttgattgctgatcgttaacctgggctttctcacctatcanatcgtctgtcaaaagtgtaacgcaagaaattgagaaaacaagtactacatattgttgacacttttttggcgccaaacactcaaca

SEQ ID NO: 48750 - DNA, 178 bp, Zea mays
tattcctcgtggagaacatgaatacgctgatctattggctaagtcagcagcccagaggctgcctgtaccttctgaagtattatttgaaacaataaaagcaccttcggtcgagcttcttgaaagagcaatccttaacatatcccctgtttatagtgaagattggagaactgagatcatc

SEQ ID NO: 48751 - DNA, 405 bp, Zea mays
  unsure (1)..(405): unsure at all n locations
cttcatctccacatgtgctaagcggcgatgtcacagtcagcccatgctagtcttagctattaagcatgcatctagaccggcctcttcttttgcaaaatcaactaaataaagtttgccgtctaatacacccttaaaagctagtgaaccatcacttcttctaaagacagacacatctacatttgtaaatagacagttataccccatgttgcataattgactaacagatagcatattataaccaagagactctactaaaaacacattagatatagagtgctcattagaaattgcaattntacctagcccttntaccttgccttgattcccatcaccgaatataatngaatcttgggaatccttattcttgacgtaggaggtgaacatcttcttctcccccgtcatatg

SEQ ID NO: 48752 - DNA, 458 bp, Zea mays
  unsure (1)..(458): unsure at all n locations
acacgtgatacgtctactaatgttatattcaaagagatagaccttgtgcagctggtcaagcanggaaacaggtgggaggctctcatcacaccananatgtgatgacaacatcaagacccttggagatgctgcatatnggaccttttggacccgtcgcctatctgagcatatgaggaagtaagtatggtntagttattggtgatgactnttcccgcttcacttgggtgttctttttgaggaaaaagccgaaacccaagggactctcanactgcttctcaggagagctcaaaatgagtntgagctcaaggtgaagaaaataaggagcgacaacgggtccgaattcaagaaccttcaagtggaggaatttcttgaggaggaaggaatcaagcatgagttctccgctccctacacaccacagcanaatggtgtggatagaagaaaacacgacgctatcatat

SEQ ID NO: 48753 - DNA, 323 bp, Zea mays
  unsure (1)..(323): unsure at all n locations
ccttcaatacatcttctatagtatcatgctaatccaagaaaacttctgatcttggacgcatccttgggttgcttncaattcagtatctcacttatctntcctggatccacattaattccaccatcggtaacgatatgtcctaagaaagcaacttccttcaaccaaaaatcacacttcgagaattttgcgtatagttggttgtcacgaagcttctgtaggactagccttagatgatcttcgtgtgtttcttcattcggagaatatatcagtatgtcgtcaatgaatacgaccacagactgatccagatattcactgaatactta

SEQ ID NO: 48754 - DNA, 320 bp, Zea mays
  unsure (1)..(320): unsure at all n locations
ctgcagctttgacattattaactcttcctcaaaagaaagaaaggaatatccagttgacttatctagtatcttacctatttacatagccctacccaagcaaagactcagcttatgcacgagaacagaaggagctgtaccggcaggctaaggagaagaggagtcagtccctcggcaggcatcatcgaacagagaagacangatatgagagttgcttatcaagtagtaccacctgagtaagaaaggaatagatttccgcatatagagaatctaagttaaagtatagttgaggaagctgacccacattngctcatgtctcatgt

SEQ ID NO: 48755 - DNA, 155 bp, Zea mays
tctagttcacccttaaaagctaatgaaccatcacttcttctaaagacagacacatctacatttgtgaataaacagctatatgccatattacaaagttgactcacagacaacaagttatatccaagcgactcaactaagaacacattataaataga

SEQ ID NO: 48756 - DNA, 205 bp, Zea mays
aagctctgctcctagcacacataagcaatcaagtaccttcagcagcaatcgctgcagcggcactccttcaccttgatgaagagaaagcacacgcctatctcggcgatagcttcagcaacgacatgatcgaaggatggtgcctcgacaccggcgccactcatcacatgaccgaccgatgggagttcttcaccgagcttgactctgg

SEQ ID NO: 48757 - DNA, 434 bp, Zea mays
  unsure (1)..(434): unsure at all n locations
atattgcatcccggttactcccagtcttaatgcatttcttcgcagccagcctaacacttgatcttctagtggtgggntggttctgaaatttaatggatgtgatgtggtcgtgctacttttcggtggggatggaatcaatggtggctctggtgggtttgttattgccgcgatgaagtcgaaaaactgagtattgtcggccgagctgttccctgtcctcagagcangagaagctcttaaggttcatgattatcactatcaactggttgaanatctggttgaatatcattatcgactggttgaaaaactangccgggccaagtcatggataatgaggcacccattangccgacccgatcagcagcaggcatgttgtgatctatnagcttgatatcattcacaangtgagagcctaanaactcaatcggtggacagct

SEQ ID NO: 48758 - DNA, 385 bp, Zea mays
  unsure (1)..(385): unsure at all n locations
atcgtctcgtgtcggcttcttattgtctacgacgccgnnctgggcacctgcacgggcaccaccctcagcatgtnctcacgcnccgacctgggcgcctncacgcgctntgcgtggcttgccgcgtttgcggcctcgtgtcaaagaactccccttcttcttgtcaccctagcaggcctcccatcgctcccgagtgagatgtagcttcccgccgatagtgataggcccagagggagcctgtggttcgttgccgtcgaccaccttgagacgacctatcggctaatctattgtcatcgtggagaggtctancagagactcaatcgagagattgaagcaatctgcttgacttctcgggatgaacggaaagctctaacaactcctcctatcg

SEQ ID NO: 48759 - DNA, 167 bp, Zea mays
  unsure (1)..(167): unsure at all n locations
actgtggatccattattgggaccaaaaacctgaaatttgtcacacaagagcttcctggcactacacttggggtacaaatgcttacatcctcatgtgatcatcttctgcaaaaacaagactctgaaagtctgagataaccaanggctcgatgagaaaaactctactgt

SEQ ID NO: 48760 - DNA, 393 bp, Zea mays
  unsure (1)..(393): unsure at all n locations
tgcagcttcttaccacgcgtccgtggatatcttgaagaggttgatttatgcgtcttctccttagntgctttgctatcttgtcctttctttngatcctgtagctcgatgctcattcannaaattgctttcttttgagcaacatgggttagcacatggtgatatattatctanatgtgcacatgtgcaagaatgaggttcacatgaatntaagtttgaaatacaacctcatgagcaacattaagcatgatatggtcatcaactaattcattatgagaataagatagcatatcatattnttcacttagagcaagttttctaaattatcatttcacttgactcttagcatagaatctcacgtttaattgagcacatcagaaatacatcatgattatt

SEQ ID NO: 48761 - DNA, 404 bp, Zea mays
  unsure (1)..(404): unsure at all n locations
atgaagattcttatcccaacatgggatagtcngcggtgctagagccaacccatgttagtcttagctattaagcaagtgtcgagttcagctctatcannaattaccaagtatagctgaccctctaacactcccttaaatgctattgaatcatcacttcttctaaagacagtgacacctacatcagtgaaaagaacagtgtaacccantttgcataattgagatacagaaagcaaattgtaatctaatgaatctacaagaaaaacatnggaaatagaatggtcaggtgatatagcaattttacccaatcctttgaccgaaccttgatttccatccncgaatgtgatagctcgtcgaggatcttgtgttttctcatatgaggagaacatctttttcttccctgtcat

SEQ ID NO: 48762 - DNA, 435 bp, Zea mays
  unsure (1)..(435): unsure at all n locations
cctgctggccacatgccttttattttatctcgactgagcttgccggcctacaaactccgcacgcagntgcaacaanaaaatgatggacgagaatgtcanatcccaccactctcgtctctatagaacggtaaacagcctcgctttcgacggctctaggattagccgtacaaacttatgaggtatttggtttgaagaatgagatagtcccgtatcttctcacttctcactacttttggttgattggtgaaacagaatcgaataatccatcaccatcttatccctcatcagtagttatttagtactaatatgaggaatgaagtcatcatactcaatctaacgacatgaacttataatgcactacctcaatttagatggagtgattcctcanaccanacatcatattagtataacattcgatagatgactctataaccc

SEQ ID NO: 48763 - DNA, 404 bp, Zea mays
  unsure (1)..(404): unsure at all n locations
tcgcggacttaatgagcatgctgatttgctaactaagtcagcagcacaggggctgcccttaccttcngatgtgtttttcgaaacaataaaagcaccttcagtggaacttcttgaaagagcagtcctcaatatatctcctgcttatagtgaagactggagaattgagatcatctcttaccttcagggtaatcttctttcagatgacgaaacttataataggaggatagaggcaagagctcgtccatatgtcatgatagaaggggagttgtacaagcatggagtttgtgctccattactcaagtggttatctaaagccgaaggcatagaattaatgaaagaaatacatgcaggcctgtgtggatctcacattggatctanngccgtacttggaaaagtttccgtca

SEQ ID NO: 48764 - DNA, 408 bp, Zea mays
  unsure (1)..(408): unsure at all n locations
cagcttgcccgctacacngtccgctggcattcttctcatagatagcatgctattgtgggacacacgtcgatcttctcatatgtcaacccaagaccagccaacatcttctttgcgaagtacatattctttggcaacttatgattctccgggagaacctcgcccatcactcggacgatgtcgttgtangcacctattgaaatggtgtgcttcgactttatcgccattagtcttgtgagagtcccaagaactgacatctgagtgtaacacctcaggtgttaccatggctagagcacacttggaactaaggactgtgacacatgtggtaatacttanggtgacataagaacctggagacatgtgtaaccaagattctaatgcctaagaagatactcaacctttgtgcctact

SEQ ID NO: 48765 - DNA, 182 bp, Zea mays
  unsure (1)..(182): unsure at all n locations
cacgcgtggaccgagctaaccagtgagtncttttcaattccttgcacccacgtncttcctagcatcccgtgaagctctctgacccgtcaatggatctatcgcgccgtgagtaggccgaattcctagccgccgncgagtatctccttctgcgcacgtggaccggccgactccgaaccatcccg

SEQ ID NO: 48766 - DNA, 323 bp, Zea mays
  unsure (1)..(323): unsure at all n locations
attatccgagaaattaattggtgtgataatcaatttatacctttctataggaagagagtggctctgcactcccatcggattgacaaaaagtgagtctcatgttntcttattcgtctgactcatgtnggtgtgatatattgctaaacacaatttgcatatcatagcgacatttggcattttcgatctatacgtttatgctaattttaactctcatggcaatgcatgggtacctaccctagtaatatctggaatgttaggatccttaatatttcatcactngccattcctcaaatatatatatattgcaactattatatggctct

SEQ ID NO: 48767 - DNA, 434 bp, Zea mays
  unsure (1)..(434): unsure at all n locations
gcttctanagggagaacacgtgataggtctaacaaatgttactttctgaaaagatagaccttgtgcagctggtcaagcaggtaaacaggtgggaagctctcatcataccaaanatgtgatgaccacatcaagacctgtggagttgcttcatatggacctcttcggacccgtcgcctatctaagtataggaggaagtaagtatggtcttgttatagttgatgaattttcccgcttcacttgggtattctttttgcaggataaatctganacccaagggaccctcaagcgcttcctaaggagagctcanaatgagtttgagctcaaggtaaagaagataaggagcgacaacgggtcccgagtcaagaaaccttcagtggaggagtaccttgaggaggaagggatcaagcacgagttctccgctccctacacaccac

SEQ ID NO: 48768 - DNA, 177 bp, Zea mays
  unsure (1)..(177): unsure at all n locations
gattggaagcatctccggcaagagacaagatgcacgtgaacctaaatggtagccgcttgcatgtgcatgcgatctgcacgatctgtaacaaccgntagcaagtctcacgcccctgtaatttcttgtctcattactacatataggctgtaacagtggaagggaatacaatacgctatt

SEQ ID NO: 48769 - DNA, 359 bp, Zea mays
  unsure (1)..(359): unsure at all n locations
atttattgctaactgtcccgaccatgatagtgattctgacctanggaacaaganggagaagaagaagaattattagaaggcaaagggcgaggctcatcttggcaaggagtgggattcggactgctcctcgtctgactccgacaatgagggactcgccgccactgcattcaacaagtcatccctctntcccaacgagcgtcacacttgcctcatggcaagagagaaaaacgtaatcactcgtaatgatgtcacttatgattcgtctagtgacgatgagtctagtgatgatggaatagattactctagtttgtcaagggattggatagaaataaaattgataaaatcaatgaattgattga

SEQ ID NO: 48770 - DNA, 525 bp, Zea mays
  unsure (1)..(525): unsure at all n locations
gcttatccgtcgtcacangctgactctgtgcnggcaggggcattgttgtcttttctgagcctaaaaatgatctgggacgttgattgtttcaaactgaattctttgtttcgcatttaagtgctttatgtaatcaatctttttattttcttgattcatgacgccaccttgcgtgttcgagaaagagaatcactatagaaaaatgacacttcatggcatgttctcgttgcttaattactcagatattgctttcctacaatcgtanacatatagtgttatttttagaataagagatcgaacaaacaacactactccttgttctataccttttcgcgaattatatgggcatggggtcaangactnggataccaccaatctacattgngtgtctcatatggtcttcacagcaggctcgtcagagagtgctcatgctagtggtgtgatgtgaagtgtcacttcggatgacgtgggatgcagagagaatcctaaacgtggattngacgcagaagcgcgtcatttcttacatga

SEQ ID NO: 48771 - DNA, 183 bp, Zea mays
agaaagacaggggttgtagcgcatgccaggcacgaaagcaagttggatcccatcatccacacaagaacatcatgacgaccgacaggccgcttgagctactccacatggatctattcggcccgattgcttacataagcatcggcgggagtaatgatatgcttgtaatagtggatgattattttc

SEQ ID NO: 48772 - DNA, 344 bp, Zea mays
  unsure (1)..(344): unsure at all n locations
atgaaaacttcgctaagggcgaacattcatcccatttgtgtgggaatntcagaacacatgcccgtagcatatcttccagtatttggtttaccctctcaatctgtccactggtttgaagatgatatgccgaactgtggagtaacttagtacccaacgagttgtgaagtgctatccaaaacttggctacaaattgaggtccacaatccgacactatggtctttggaacaccatgcagactaagaatacgagcaatgtacaattgggcatagacagtaactgggtgatcagtcttgaatgaagaaattttcgtaagccgatcaacaataacccagatagagtcatac

SEQ ID NO: 48773 - DNA, 437 bp, Zea mays
  unsure (1)..(437): unsure at all n locations
cgatccatcgagtcagagacgaacttgttacttgttgttacttggaacttgtatgattcacatttatttttgacaaattgattngttatttctttcataaatattagaatgctgacattaaaacaatgggtggttttctataatcaattacaatgtttggctaatggactntntacttntagaattaccatatgaaatagataanantaatggttaaacattcatctagactgtagaaacgcaaaagacaacaatgagtatatatcagacaaaatagaaaatataacctatcatgtgctccgattgangtcagaattacagtgattcagatatcatttacgacatatttgctaatcattctagtgtctctcaaatattgcactaaccagtcagagataacctctgaatgaatgagatggagaccatgatctaacatg

SEQ ID NO: 48774 - DNA, 390 bp, Zea mays
  unsure (1)..(390): unsure at all n locations
gcatataggtattctgagatgactaggggcttcggagtaagactccaccccaggcacgtcagaacaatccacaatcccaatacaaatgatgatagggccaaccatactcagagcagctagcacaactcatagtcttcagatatgcaacaaacttcctacaggccaccagccccgagaggcagaggggggtgaagctntgngggaaggtatggtaatcagcccaggaaactattcttcttattctgcggcaaagacaagggacacaccacanagacgtgccaagtcacggtccagaagtagaaggaaatcgctaaagccgaagcacggcagaaccagccgaagcaggtcttgcatactgcttcngtgtactctccgtacatcctagagtat

SEQ ID NO: 48775 - DNA, 346 bp, Zea mays
  unsure (1)..(346): unsure at all n locations
actgctgcagtgttggctcaaccgaacattgaaaagccttttgatgtgtattgtgatgcatcgggcagtggcatcggatgtgtcctgatgcaagagggacgagttatagcatatgcctcaagacagttgcgccgacatgaggaacattatccaactcatgacttanaattagctgctgtggttcatgccctanaaatatggcgtcattatctgctaggaaatatctggcatatatatacagatcataaaagtttgaagtacatttttacccagtcagaactaattatgaggcagaggagatggcttgagctgattaagganttatgaattggaattactatcacct

SEQ ID NO: 48776 - DNA, 375 bp, Zea mays
  unsure (1)..(375): unsure at all n locations
gcttgcatacagctgacaatctcgtagcctctgaagtactttcctcanatgctcctcatgctctngctcattctgggaatatataagaatatcatcaatgaacactactacgaacttgtcgaggtagtccatgaatacactgttcatcaagtacatgaagtaggctagcgcattcgtcaaaccgaatgacataatgaactcatatagtccatacttggtgatgaatgctgtcttcngtatatccgaaggtcagattctaagctgatggtagcctaacctcagatctatcttcgagaacacactggcttctctcaactgatcgaataagtcttcaattctgggcagggggtacttngtcttgatagtaacttcatt

SEQ ID NO: 48777 - DNA, 324 bp, Zea mays
  unsure (1)..(324): unsure at all n locations
agcgcatgtcaagcanggaagcaaagtggtgttcaccatccacacaagaacatcatgacgaccgataggccgcttgaactactccacatggatcttttcggcctgatagcttacataagcatcggtgggagtaagtattgtctttgtaatgtggatgattattctcgcttcacttgggtgttctttntgcaggaaaaatcacaaacccaagagacattaaagggattcctgagacaggctcaaaatgagttcggattaaggatcaaaaaaaatagagcgacaatgggacggagttcanaaactcacanatcgaaagcttccttg

SEQ ID NO: 48778 - DNA, 351 bp, Zea mays
  unsure (1)..(351): unsure at all n locations
atagatcacttatctagtttagcaggatgcaatatgcttgttgatatttaagaggtaaactaggtatgaagcangggataatgcanaggacatgctttctctttcttatgtataagatatgcaaagaatgcttataagaggaagattatgtacaaggttaaatgaaaggaagtgattntaccctcttgtaccttctcatagagacgctctcttcattgtgctttgtccttagtcttagttgcttaagatctatacttaatggacatatgtggaaatactttgcacaagagagagttctataactagtgatctttttcaagtatttgtagcatatatcanatggatcacaag

SEQ ID NO: 48779 - DNA, 327 bp, Zea mays
  unsure (1)..(327): unsure at all n locations
attaacaatcagtgtccggcatccagacactacgtacgcacgaattattggagatcctagattagaataaaccacctagagagcttgatgctttctagagctgaactcatccaggttaaaagcaaagccaggacttctcggggctctatgtcagatngtcagtgttgcaccttgtactgatcgggagacagccaggccaagcaaagtagataaacaaaccatgtctacgatngaggcattgatggtaccgcgcacggtgcacatggttactttcaagctagctaatgcaaggcgctatgcactaatgtccccttccagagaatcatg

SEQ ID NO: 48780 - DNA, 299 bp, Zea mays
  unsure (1)..(299): unsure at all n locations
tggcggagctagccgaagcactggctgggctggagggtggctggagtgngctggccacggcggccgaagctctggcggaatggcgggcggaattaagctcgccagagctaaggaacggtggctggccggtgagggtgagtgcngtgcaaagtggtgcgcgcctcgggaggctntatatgcacngcgcggtgcacgggcggtcgtggaccggcgagtgcgcgcgggcgtgcactgggaaggcgcggtgcgcgaacgggcgtgaaccangggtgtcagccgcggtcgaacacgtgttcccg

SEQ ID NO: 48781 - DNA, 178 bp, Zea mays
  unsure (1)..(178): unsure at all n locations
gcttgatggagctccgtgcgtcctggcgattgtngatggcatgtcgtatatcgttcggcgggtgagcgaagngtanaaggtggttggctgcttgagtgaacaaccgccgatagccctcagcgtcgggagttcgggggaggccatcagctatccgagccaacactcctctgacttcact

SEQ ID NO: 48782 - DNA, 275 bp, Zea mays
  unsure (1)..(275): unsure at all n locations
catctctgacttgcggtagaaataacaacactaagacanaaacttagttgcaccacctttgttggttatccacataggttnntgttaagagaataattattagcctagtttagagtgtgagaaatagaagtcctaattcaccgcccctattangcatncacattcctttcaatnggtatcgaagccaaaggctcattangaaccttttttgctttaaccgtantgagccaacactagaccgagagagaagggatggatacccatangccatctca

SEQ ID NO: 48783 - DNA, 416 bp, Zea mays
  unsure (1)..(416): unsure at all n locations
tggatatacttataactgagtaatcaggtgttgataataaaatgctgtccaactaanatgctaaccgcattanactttaaccttacctttgttaaccttgaatttcacccncttgctgagcccncaccataagtgagctcaccaattggcttaatttgatcagaagtctgcatgtgaagattttgatggtgaacttgatggatgctagtctaatgattcccccggtcatcttcctgtggaaggatgtctatgtnttgttgtacttngatgaataaaggttaagacattaagtctattcgaagtgtaatatgctaatatacatattagttatgcttatatgcatcggtctcttgatatattacacttgcgacatcaacatatgtgtgaaaaagatcctcgcacacataagttatgca

SEQ ID NO: 48784 - DNA, 311 bp, Zea mays
ttttcataacaagtaacttactcttctcattgggcctggactttgacactaatttttcttttgatgcatgttgctcacttggtgctaacaagtgggcatatatgagcccaaacccactaccatgaacctcactaaaatcgccaaaattgagacacctaaactatagctgggacccaacttgacatctattatatattgtatgagtgcaccatagtactactgatcacgactacccgaacaacatggtaaaacgacgtggatcatgcaggacaacgtagcactaccctttaactggatggccacgctatcac

SEQ ID NO: 48785 - DNA, 416 bp, Zea mays
  unsure (1)..(416): unsure at all n locations
gttctctcgagatgttcttggatctgaacaaggtctcgatcgaggaggtcgtcnggcggctgcgagtcttcgaagaacggggcaagcccaaggaggtcacggacgccatggngcgcctaatgctctgtgaggaggactgggaggcccgccgcanagcttgccgtgagcaggagcgctcanggagcggatctgggccggcggcgcngaaccgcgtggaccgaccngacaatgcacgcggcgtatggcaaactcgggacagcatgctacacgaagcgctcggcgacgtgacagtgggaaactgcattgccaaatgcgcgagaaaaggccgtatgtaccagccagaaaacaccctatgcacgcgcgaccaggacatgcgattgctgtacatcagtacgtgactctgaccgcgtatgtac

SEQ ID NO: 48786 - DNA, 430 bp, Zea mays
  unsure (1)..(430): unsure at all n locations
caccgaaatccaaaccttcgacttgtgaataccccttgaccacaagtcgggctttgttccttgtcaccacaccatgctcatcttgcttgttgcggaagacccactttggtcctacaacattntgattaggacgtggaactaaatgccatacctcattcctagtgaagttgttgagctcctcttgcatcgccaccacccaatctgaatcttgaagtgcttcttctaccctgtgtggctcaatagaggaaacaaaagagtaatgttcacaaaaatgagcaacacgagatcgagtagttaccccctttngaatgtcgccgaggatggtgttcacggggtgatctcattggattgcttggggactctngngtgggcggtctggaactggtcatctcctcatctgatcatgcatctcctttgatcatgtctctct

SEQ ID NO: 48787 - DNA, 228 bp, Zea mays
  unsure (1)..(228): unsure at all n locations
tgagttagaaacacgcacaaacctgtttggaacagcgagcttatccctgtgttattgagttgtgctgaggatgtangacgggtgtatatgctgggaagtatggaatgtttgcatgggaagaggtggcgcattgtaatcaacctatgtgaattttgtgcttggntntgtctgtgatgtcatgtggaccatttgaaattcagagaggttagagaacacctgcctagtatg

SEQ ID NO: 48788 - DNA, 267 bp, Zea mays
  unsure (1)..(267): unsure at all n locations
tacgtccccatccggggcagcgagagaaccctctctcacggcgtgaagacgacgcgctcgtgttccgttcctcgaacgggccgcgcacgcgcaacgggcgncccgcgaaccactcgccccgtcgcattaactccgtggcgggacaggcggcgcctctggcangggaagcgggcgacgcttcgccttcgccataatgaaccgcgtcgaaaaggtacgccacgttgttcaaattccgcatcctttntcttttcctctttctctctctta

SEQ ID NO: 48789 - DNA, 450 bp, Zea mays
  unsure (1)..(450): unsure at all n locations
ctcgaagtctttcttttcaacaatagctgattgctcttttattttgctctctaagctttcaattataacttcgtggtttttggcttctaaatcttgctgcattttcaaagccttgctcaacagcatactctgcaagtaaacaatcttcggtaggcatgtcttcatcattaaaaacaataaaagtcaagggaaaagtagttacccttgaaatagaataaaataaactaccaacgatatgtngtcgtcggtagcggctgatgtctgtttccagcttcagaaaaccgatactctttgatagagtaccgatgatcttagctcccagttggtctcggatacagttcaattnttcatcgtcaattcccccgaagaggagtgctcctggctttataaccgcagatttgcatattcttaagctcttcatttcgcctctgacaatcttgtcaataaatt

SEQ ID NO: 48790 - DNA, 250 bp, Zea mays
gatatcggctaatttgattttagtattaatgtaagaaatctcgatatcctccttttgttggtgatccctaagaaaatgataccgaatggctatatgcttagtgcggctatgctcgacgggattgtcggccattttgattgcactctcattatcacataacacaggaactttgattaatttgtaaccgtagtcccgcacggtttgcctcatccaaagcaattgcgcgcaacaatggcctgggcaatatact

SEQ ID NO: 48791 - DNA, 365 bp, Zea mays
  unsure (1)..(365): unsure at all n locations
cttttatatcttcagaagataatgcggtctcggcttgtgccaaggatttcacatgatcgcagcctctactctccaaaatagtggcaatccccctagcacccgaaaaggcacatacgtcttcgcggccattcaaaacttcctcaaaagcttcggcttcgtggctggtccattcaattgggccctcgaggtcgccctttacgaaattttcctcgcttgaatacgcgccaacgttggtgaagctagtttttattttctttacacactctatagactnttcataacacctttccttggatgcacgaagttcttcaacgttnttctctaaatgatatgtccatagttcactgatttctcgtttagcttct

SEQ ID NO: 48792 - DNA, 409 bp, Zea mays
  unsure (1)..(409): unsure at all n locations
caagcactgagctcagctgaaaattaaccgccgagatgagttttttatggttcgcaaaacatctgagaaaatgactgtgattgctaccagcacaccagggcgcctacttcgagatttttgaacataaagcacctcggtgaactcttgaatagcaatcctcaatatatctcctggtcatagtgaagaatggagaactgagatcatttctctccttcannggtaattcctttcagatgacgaagcttataacaagagaatagaggcaagagctcgaccatatgttataatagaacgggagttgtacaagcatggagtctgttctccactactcanatgtttatccagagccanaggtatagaattgatgaatgaaatacacacacgcctgtgcggatctcatatatgatct

SEQ ID NO: 48793 - DNA, 313 bp, Zea mays
  unsure (1)..(313): unsure at all n locations
atgtngggcaattcaaccaccaaaatcatttaggaaaaggtgaagcctatttccctttcaatctcccnctttntggtgattgatgccaacacaaaccaaagcaaatatataagtgctgaattgaactagtttgcataatgtaagagcaaagggttacttggaattaaaccaatatacatttcataagatatgcatggatggttntcttctaatttaacattttggaccacacttgcaccacttgttttgtttttgcaaatggtttggaaattctttttcaaagtctttggcaaatagtcaaaggtatatgaat

SEQ ID NO: 48794 - DNA, 279 bp, Zea mays
  unsure (1)..(279): unsure at all n locations
acaacaaaaccaatcgactcaacatgcatatgaactactatagcgcggagaaanattgcatgggccatggtgtgatctgacgctgcgtcctctcgtcattccttaagagaacatggatggcgatggaagtgagtgatcagattctcgctctcatcaatcaatcccctccctctctctgaccattacttggtaggaatgtgtattaccatctcggccggttgtgattccaattacgcatcatgccaatgacagacggactgtggcagcggtcccgatgat

SEQ ID NO: 48795 - DNA, 202 bp, Zea mays
tcttgagcactgagctgcagctgtgtgctatgaggactactacattatgctttgcctactgccgctttcagcgggaaactgcgtgcactgatatgatcgcaaccacccttgcgcgccggccgtgactatctatgttgcactatatgaatttgcatcatcgtatatatatcgggacacagcgtaggccatatgctaaaatacc

SEQ ID NO: 48796 - DNA, 152 bp, Zea mays
  unsure (1)..(152): unsure at all n locations
cacacatggtacgagtgcatttctccattggtattgattctgaatatgcggattgcgatgtagtacctatggaagcttgttctcttttggtgngtagaccttgggaatatgatactgatgcacgtcaccatgggaggagtaatacatacact

SEQ ID NO: 48797 - DNA, 298 bp, Zea mays
  unsure (1)..(298): unsure at all n locations
ctatctgaagtttttctcatgtttttttcgaagacctttactaggttaacctgtattaggagaatgtgatctgtgtttgttcaagggtctaactgagagaactaaatactaggaaggtttgcttcctgagaatagttaacactcataccgtatgaataataactcattctgacactcagtacatttaatatgaatgtaattatgttatgtaatccttntgttacttcatgatgtgaatgtctgcgtatgggtaagcgctcttggcgatatgatggagataaggtaatcagacctattg

SEQ ID NO: 48798 - DNA, 221 bp, Zea mays
  unsure (1)..(221): unsure at all n locations
acacatctangaattctgatactacgctgatagcttatgatgaaattgatttcctcaatatgggtggtgactnggtgacagcttccttttcttggtctagacaagaccaacttcactaacacnttctctnccaataaggacactaacttcaccattctcttgtcacagctaagactngcttaaaatattggtagccaattcatccctaagatgacatctat

SEQ ID NO: 48799 - DNA, 373 bp, Zea mays
  unsure (1)..(373): unsure at all n locations
tccctcgaggacagaatgagcatgctgatttttatctaagtcagcagcacaggggctggctntaccttcggatgtattcttcgaaacaataaaagcaccttctgtggaacttcttgaaagggcagtcctcagtatatctcctgtgtatagcgaagaatggagaactgagatcatctcttatcttcagggaatattcctttcagatgacgaagcttataacaggaggatagangcaagagcctcgtcatatgtcatgatagagggcgagntgtacaaacatggagtctgtgctgcgctactcaatgtgttatccagaaccgaaggtatagagttgatgaaagacatacatgccgggcctttgtggatctcacat

SEQ ID NO: 48800 - DNA, 299 bp, Zea mays
  unsure (1)..(299): unsure at all n locations
ttaacgctttgcttagcagcatactccgcaacaacaaattatagtcagaacatttaattcatcataaaagacaataataataacctagtcacaggtctcaccttgaagttagaataaaataagctatcgacaaaatgttgtcgtcggcagcagctgatatcaatttctagcttcnggaagccgacactctttgataaagtgccgactatcttcgccccggcgcggtcacggatacatcccaagatctcctcatcaaccccgccgaagactaaagctcccgggtggtatccgcatgacat

SEQ ID NO: 48801 - DNA, 148 bp, Zea mays
  unsure (1)..(148): unsure at all n locations
aatacagtagcttcctactaacctagannattgggtcaaaattaattacgttgtcctaagaaattggggtcaaagttaattaggatctgtcctagacaacaataacaaaaactatggcagagagggcacattacactaaacctcctat

SEQ ID NO: 48802 - DNA, 418 bp, Zea mays
  unsure (1)..(418): unsure at all n locations
tcaatctatcaccctcggtgcccggaagaagccaagccgcgatgagatgtacagaatcttgttctcttacgggacaacacaattgaagagagtatacaggagataaacacgtagctgattatataatacctttttattagagatggcactcttcttattatggaaaagtataaatctatatatagcctcactaaagagatattggatagaagttacaacttgatagttccattcaattcatttgttgtttctagttgctcagtggttntggcttgcttcacactgccctacaattaggttattctcaatgggtagttcatacacatntaacagtgtgccacatcagaagtnttgatgatatgccatcaacattaagataatngagtctcacgggatgaaattnagtttatgggaatga

SEQ ID NO: 48803 - DNA, 348 bp, Zea mays
  unsure (1)..(348): unsure at all n locations
ataaatacacagtagtattctagacattataatgagatcacaggaactagaatcattaatattggagttatagatnttaagatatgcattctctaatgctttatgtatttaatacaagattaagtactagataaatgttaatgtgtctctcatgccataacagtggcacatatggatagacaatactattnatgaaaattagggaactggatggaccaatctggagttcatatgcatcttctattgaatatacaagtttctgcatatattaatanacacatctattctaaatcattctctggttttctgtctctgactangctcataacaaaacacagggaatgggta

SEQ ID NO: 48804 - DNA, 457 bp, Zea mays
  unsure (1)..(457): unsure at all n locations
cgtggagatnaccttaagcccccgcgtaataatgacatagtctattaatttgatataattttggatattatttcaatgggtttggcttaaagatatggttaaacaaagaatgatgtactacaaagttatagatctctttgagctctacaattntcatataaactttatcttcattcgatttcatatgtaaaagttatgattntataactatattatgtagaanaaggaaaaacggtacccgaattctgggtactcgtatccgaccccgaatattcgggtatttaccaggtagtcctcactccgtattcgacccgaatccaaagctggagtatccgggtattaccggtatccgacacgaatataanaatacccgaatctgtatccgaaaaaatggatattaccctatccgatccgtacccgacagaatacccgacccgttcaccctaggacaattcta

SEQ ID NO: 48805 - DNA, 323 bp, Zea mays
  unsure (1)..(323): unsure at all n locations
gtagtttaatccatgagaataagttgcaccggtgctcaactntacttctttgtctttggcgtcataatgatagcatataataattatcgacatcgcttcttttttattgtaacaagaatgtcatatcggtccattgagtggctcaactctgccccatttgaattatgctcataacaagatagactgatcatgtgcatagagggtcctaagataatctttgtngtggcgaagctgctaccgacgatacataacctggtgaaaaaaatggcaaccaagcagcaagtggagcattagcatcagcaccttcagcctcacactctcac

SEQ ID NO: 48806 - DNA, 419 bp, Zea mays
  unsure (1)..(419): unsure at all n locations
ttaaactataggtgttaccacatttttataaaaacttggtcaaagttagatgagatcgacttagaacaaagtcanagtgaaccataatttggaacgaaggaggtatctgttatttctaattttcttttactactacaaggaaaacggtatgcacggtgtctaagaacagaagagataaataactggtgacgatggcagcataattcgaagcattagaattgaactataaacagtaggtttcatgttgtcagctactcagtttggatagcattattgttactaatgagatctctgtcgtgctaaagatgaatagatgaaagcatctggttntgggtgataggatacgtcagtcacgtactcacgtggctattagaaatgtganatccaattccttccaacattattcacatttctctatt

SEQ ID NO: 48807 - DNA, 374 bp, Zea mays
  unsure (1)..(374): unsure at all n locations
ccggctggcgtacatgtatgcacaacctagttacaaaagggagaaaaactcagcccctcagacttgctcctatgggtacaacttatggagatgctccatgctccaagggttggggagaggtactccagttgtagcaaggcgggtacccctgngtcggcacatttccatcaccttgaagggtccttcccagctggnggagaagttgtggatcccttcttggttcagtactcgccttaaggcttggtcccgaccctgngttccctactatgcacgagccgttagcagcgactgggcgcctggntgcaacgtgcatttcnggtcaccgcttgacgtctgagttcgtcgatgtagtccacatcctttgtactgtatcg

SEQ ID NO: 48808 - DNA, 160 bp, Zea mays
  unsure (1)..(160): unsure at all n locations
agtaggaaaagcaagtttgtgctcatcatccacacaagaacatcatgacgaccgacaggccgcttgtgctactccatatggatctattcnggtccgattgcttacataagcattggcgggagtaagtattgtctctgaatagtggatgaatattctcgct

SEQ ID NO: 48809 - DNA, 234 bp, Zea mays
  unsure (1)..(234): unsure at all n locations
tctgaacctactgccgttcacagttccactcatctttctaccgtccttgattggcagcctttctttcctcaagtcctagagcctagacgaatggcgctgcagctcactgttccttcttcagttcactcatgtagtcctattcatgtatgaaggtttctccttttaaattcatatgcacaacatggnttgagcctcccatcacttcagtcacactgtagtngacagacatcaact

SEQ ID NO: 48810 - DNA, 167 bp, Zea mays
  unsure (1)..(167): unsure at all n locations
tctctatatgactgcaagngcatcatttttttttcatngccggccgggactggtgctgcaccatgcatcatggtgacgattgaaagaaatcttaacttcatgaatctgctcaccaatctctgtaatagctatcagggcttatgggagaggcaataacacattgggca

SEQ ID NO: 48811 - DNA, 192 bp, Zea mays
tacctttacctgctgattcataccgatataatgatctgggatcttatctgacgagagtgacatttctctcccgctatgttgtgctcgtgcatatcactgaccccgtgctaactgaggaattagctggctagaccacttgtggtctcggtagacattctaggacaagagttatactgattgctactcacatac

SEQ ID NO: 48812 - DNA, 99 bp, Zea mays
catttgcgcatggaacctccaaacgatgtgaacctgatcgcacgcatacacctgtccctgcgataatattgcctgggaaacgggcaaaatgtctatggc

SEQ ID NO: 48813 - DNA, 349 bp, Zea mays
  unsure (1)..(349): unsure at all n locations
gcttgacnctgcggagttggcgtcccgtgctgtttttctcgcagcagcacaacgggggaggacagacaggcagacctttcaccgaaccttccgagcgcgcccatctcatcgagaggcacggcccccccctgaccccgagcgacactggctccaccagccaataaccctcagacctcatccctggggcaagagaagaacagacttcacgcaccatttttattattgctgcaccagcgcgcttgaacaccgagaccacgtggggttgaacggtcacacgacaccttatcccgcgcggatttgacacacagagagagggatgatggggcgcagagcgcgagacccaggacta

SEQ ID NO: 48814 - DNA, 263 bp, Zea mays
  unsure (1)..(263): unsure at all n locations
cctgcagcttcagcgagccatcaaaatacattcgccatacttctgcggnttctggattatccggcacttgctgntctgtccattctgatccgaagtcgaccagtgcttgagttttgatggcagtgcgaggtcngaactcgatatcgtgggaccccaactcgcaagcccacttggctattcngcccatggcttccttgntgtgaagaatgtccnctattggaaaaccagtaactactatgactttgtggtcgtcanagtagtga

SEQ ID NO: 48815 - DNA, 416 bp, Zea mays
  unsure (1)..(416): unsure at all n locations
cataactatgttatgctatgattttgatggaaaagaatgctatanacacttatatcatgacaggagtgtggacaacatagagaagtacaaggtagcaaaataagaccataaagcgagttctaactatggtaaagcgtaaggcatacaaggatctttaccaattgttgagtatgaaggaagtagatggcatatataggatgactagaatctgtgagaggaagataatatacttcaaccaagttaagtgtataaggatgaaatggaacacctattggtgaaggaggatgagatcatacatagatgacgagagtatntccataaattgttcaatgagaagaatacggacacaaccttntagttgaatgactcttttgatggtatcaataggtgcttcatgtgtacgatctaagaatatg

SEQ ID NO: 48816 - DNA, 290 bp, Zea mays
  unsure (1)..(290): unsure at all n locations
gaagcaaggtggcactcatcatccgcataagaacataatgacgaccgacaggccactgtgagctctgcacatggacctattcngcccgatcgcttacataagcatcggcagaagtaagtactggctagttattgtggatgaatattctcgcttcacttgngtattctttntacaggaanaatctcanacccaagagaccttanaggggatcttgagacgggctcaaaatgagttcggcttaatgatcaagaaaataagaagcgacaacggaacggagttcaagaactctc

SEQ ID NO: 48817 - DNA, 382 bp, Zea mays
  unsure (1)..(382): unsure at all n locations
gctcaacctgacgggtctgagttcagtgttgaggatngccttgtattgggtagccaattcattcccaaaattacatctatatcctggcccttcagaacaatcatgttagcaggaaagttccgtccggccattggtactggcactccataggccacttctttagtataaatgtgtcccccacgtgaatgaattttaaatccctcctttgattcatggtacgcaatatgatgttgttccacacacttcttgctaataaatgtatgtgaagcaccagaatcaaaaagaattattgctgggtgactggccacaggaaacgtacccatcatcaccggctctcccttcggtgtggtagccacttgcgtataatatactcgcccccgtt

SEQ ID NO: 48818 - DNA, 182 bp, Zea mays
  unsure (1)..(182): unsure at all n locations
cgcatgccaagctgngaagcaagttggaaccncacatncacacaagaacatcatgacgaccgacaggccgcttgagctactccacatggatctattcggcccgattgcttacataagcatcggcgggagtaagtattgtcttgtaatagtggatgaatattctcgcttcacttgggtgttct

SEQ ID NO: 48819 - DNA, 311 bp, Zea mays
  unsure (1)..(311): unsure at all n locations
catgctagtcttagcaattaagcatgcatctagaccggccctctctttttgcaaatcaactaaatagaggttgccgtctaatacacccttnaaagctaatgaaccatcacttcttctaaagacagacacatctatgtttgtgaataaacaattatatcccatattgcataattgactaacagataacanattatattcaagcgactctactaagaatacattagaaatagagtgctcatttgagaatgcaatcttgcctaagcctttaaccntgccttggttcccatcaccgaatatgattgaatcttggg

SEQ ID NO: 48820 - DNA, 377 bp, Zea mays
  unsure (1)..(377): unsure at all n locations
agcttactctctcatggcgcaactagccctgccctcaattataggctccgagagtggtggctctcaatntgaccgcgcagtgctggcggccggaggtgaagaagaacctgtgtgcggtgaattcgtggcaactggcgtggcgagctccccgtcgacgatgggatggcttataggagtcacggtagtgcggtggaaaggctatgccacgcggcacatggccgggaggcggcggtcaccggcgagtacttaccgcgggcggtgagccagggtgggaagaacgtgccgttggcgagcggggtgacttccagctcaccgccgttgaggacacgtatcggcagtgcttatccaaagaccaccgagcacgaatcgtgacgagt

SEQ ID NO: 48821 - DNA, 485 bp, Zea mays
  unsure (1)..(485): unsure at all n locations
ttaagcaccgcggctgcagctatgaaatcttatcccacatgggctagtcggcggtgccagagccaacccatgttagtcttagcaattaagcatgtgtcaagttcagctctatcaaaatctactaagtatagctgaccctctaacacacccttaaatgctattgaatcatcacttcttctaaagacagtgacacctgcatcagtaaaaagacagttgtagcccatttgacataattgagaaacggaaagcaaatggtaatctaaagaatctacaagaaaaacattggaaatggaatggtcaggagatatagcaattttaccaagacctttgaccaaaccttgatttccatccccgaatgtgaatagctcgtggggatcttggtttttctcatatgaggagaacatccttttctncccggtcatgtgtgttgtgcacccgctgtcgagtatccaacttgagcccncggatgcataaacctacaaaac

SEQ ID NO: 48822 - DNA, 173 bp, Zea mays
  unsure (1)..(173): unsure at all n locations
aacccatcattcacacaagaacatcatgacgaccgacaggccgcttgagctactccacatggatntattcggcccgatcgcttacataagcatcaacgagagtaagtattgtcttgtaattgtggatgattattcttgattcacttgggtattctttttgcaggaaaaatctc

SEQ ID NO: 48823 - DNA, 382 bp, Zea mays
  unsure (1)..(382): unsure at all n locations
agctntccatgttgtgctngaacattccaatccgagcccgcatctgaccgtggtgaccgncacaagttggtgttcttctgcagtccgaatccagcatgttcaaatccttttccctttcggtcttctccctgattcctaagcaaaacaagagtgcacgggtctccatggtctaaatatgatggacatgaactcaagagtgtaatcacctgatggttgagttgacgagcacgagcgcgagtaatgggaccagaaattggtacttgtattggtatagatgcatcagtagtgtggatgtcttcatcagtgacgtacgactacgaaattgggcgaaaccaccccaaacattgagtttggacctatagaagtggattgtgcatgttcg

SEQ ID NO: 48824 - DNA, 279 bp, Zea mays
  unsure (1)..(279): unsure at all n locations
aagctggtgccgaattaatttgctattggttcatatcgtgatgttgctgactgtgatgttgtgcctatggatgctcgtaatattctgctaggtagaccatggcacattgattcagattgtatgcatcatggtagatcaaatcaatattctctcatacaccatgataagaacantattttgcttcccattgtccctgaggctattgtgcgtgatgatgttgctaaagctaccannagctaaactgagaacaacaagaatattatagctgttggtaataac

SEQ ID NO: 48825 - DNA, 395 bp, Zea mays
  unsure (1)..(395): unsure at all n locations
tcttctaagtgtaatgaagcctttgagcaattgaagacattattaaccactgctccggtattggctcaaccggacatcactaaaccttttgatgtatattgtgatgcatctggcagtgggctcggctgtgtactgatgcaagagggccgagtaattgcgtatacttcaaggcagttgcgccgacatgaggagcattacccaactcatgatctggagctagctgctgtggttcatgcnnctgaaaattggcgtcactatctgctgggaaatatctgtcacatatatacagatcataanagtttgaagtacattntcacccagccagaattaaatatgaggcanagacgatggcttgagctttataaagactatgaactggagatccattatcaccc

SEQ ID NO: 48826 - DNA, 208 bp, Zea mays
  unsure (1)..(208): unsure at all n locations
tagaatagactatagtaaccaatggccacccactggtaatttgatatgaattttggaaaaagtaaactactggtgtagttcanacccacactatgaatcataaatagaanataaagaaggggaacatgatgggaaatagtgtcacccttaaaccctctatgaatngtccacttgaatatataagggaaatacaaatccactatgctca

SEQ ID NO: 48827 - DNA, 440 bp, Zea mays
acagcaacacaacagttactgtttaatcataactcttcaattattaattcacaactatgaaactatgattctctgtgaagcttaataagtgaacctacactctggtattgtcatcataacattgatcaacacttagcatggtcacacagtgctaatacaacagctctgtccagaattggacaaattcagacttgctacttcaaaattcacaactcaaactaagactgcaaacacagtgtcttagactctctggaaagtaattacatgtctaccattattataacatccctgctggttaaatgatatggtaaatacctataggtgtgtgtcaaatggcaatcagctacacttaacatctactaatcttaacaccaagaggaccagactttgaagctaaaatctccacttatatccagaggatatgtactataacaccattc

SEQ ID NO: 48828 - DNA, 376 bp, Zea mays
  unsure (1)..(376): unsure at all n locations
gcatgccaggcaggaaagcaagttggcactcatcatccgcataagaacataataacgaccgacaggccactagagctcctacacatggacctattcggcccgatcgcttacataagcatcggcgggagtaagtactgtctagttattgtggatgattattctcgcttcactagggtattctttttgcaggaaanatctcaaacccaagatactttaatagggattcttgagacgggctcaaaatgagttcggcttgaggatcaagataataagaagcgacaacgggacggagttcaagaactctcatatcgaacgctttctcgaagaggagggcatcaagcatgagttctcttcttcctacacgccacaacaaaat

SEQ ID NO: 48829 - DNA, 235 bp, Zea mays
  unsure (1)..(235): unsure at all n locations
aaacaggtgggaggagcgcatcacagcaagaatgtgatgaccacttcaagacccctggagctgctgcatatggacctcttcggacccgtcgcctatctaagcatanggggaagtaagtatggcttacttattgttgatgattcttcccgcttcacttgcgtgttctctttgcaggataagtctgaaacccaagggaccctccaacgctttctcatgagagcctcaaatgagtttg

SEQ ID NO: 48830 - DNA, 231 bp, Zea mays
  unsure (1)..(231): unsure at all n locations
tgacgttctgtgagtgtcctcgaacatgatgtatgtagaggagtagcgcatccggtggtgcaacggctagggtactacctcgctgatgagcccggngtgcactttcgttggcagcccagccaagagtcatcggtactcgtcatgtcgcgtgcgttcgacgactangaatgtggcgtcatcttggcgccggagatgacgcaganganggaccgacacgatgatcaatttgca

SEQ ID NO: 48831 - DNA, 346 bp, Zea mays
  unsure (1)..(346): unsure at all n locations
tcctgcagcttcagcgagccatcaaaatacattcgccatacttctgcagtttctggattatccagtacttgctgttctgtccactctgatacgaaatctaccaatgcttgagtnttgatggcagtgcgaggtcggaactcaatgtcgtgggatcccagctcgcaagcccacttggctattcngccaatgggcttcttgtgtgaagaatatccctatgnaaactagtgactactatgacttgtggcgtcaagtatgaccagcttgnggcagtagaagactgcgataatactctgacctgggatactttctcgagggctaaactactgagaataacggatgtgactga

SEQ ID NO: 48832 - DNA, 462 bp, Zea mays
  unsure (1)..(462): unsure at all n locations
gtatataagttatggtttataagtggcacccaagttttgttgatgaagcaccagatgaccaatcaaggatggaatccatgggtgaagttgtaagagaaaggtttgcgtgttggtatcgatgcttcttcaataagctagctgccatacganaactagaagcctgaggctgatcattggctagccagaaaaaacgtttgcaaccagcaataagatgctccttanaggccagatattgttgaagtttcatctcacctaagagtctgcataatgaagatatgtatctaaagtanagctatacccataacccttctaagtggggtaggtctgtgacacctccaaaattaaacctagaaagaactgtacaattcanaatgacttttataatttggttcanaatggttgatgcgaataagaaatatggtggctatattctctctannagtctccaaatatctacaaata

SEQ ID NO: 48833 - DNA, 345 bp, Zea mays
  unsure (1)..(345): unsure at all n locations
aatcatcaccgatttanatgatatagatgacgatgatgatgtngatgacgttgaggatgatggctattcatttgatgatcttgntagaatgttatgtgaagccgatgactacatgcacaaagaataagaaaagttaagaccttgaaggaatngtataaaaacctctaagtgtcttttgaggagctcaagacgtctcacaacgatctaaaagagaattgtgagaagcttgtggaagctcaaaactcatctattgtgcattgaagtgtggtggtcaccgaggatgttggngtcacttgtgacttacttgatagtnctacaagtgaaccacaacctactaactctatt

SEQ ID NO: 48834 - DNA, 286 bp, Zea mays
cactataatattcttttttcaccaagttttttgcataaatgctaatctagaataatctgccagaataagagactaaaactgcttatcaactgcatactcttgactgagtcgatgagtgtcttcgcgcacgaagactaaattatctcactctatcacactttattttttgagcctagaccacggaactgctgacaaaacttcaaattgcttctccaaactaatgagacaaattacccccatccatccacaaatgcgccataccaaggaaaaaatccctgactctttt

SEQ ID NO: 48835 - DNA, 422 bp, Zea mays
  unsure (1)..(422): unsure at all n locations
tgcacttcttctcaagttatcttgtgccttagcacgaaatttctcttttcaaaacattctacaaagatcaatactgtgtcctcttcttgttctacatgcaatatgatgtatgatgcttatgttatgcaaaatgatgtgatgatgttatgttatgccaaatgatatttgtgccgaagatacacacatccctgcaatagaacacacaatctttttatatcatggctgaactttcgctgtaagcctcccttaagagcttcttcgccttttacttcagcggaatcaacgtgtatttttcgctgtaagcctcccttatgagcttcttcgccttttacttttcagcggaatcagcgttaattttcgctgtaangctctgcattccttcagaacgactntngagcagaaaacttacactgcgctccctt

SEQ ID NO: 48836 - DNA, 359 bp, Zea mays
  unsure (1)..(359): unsure at all n locations
gtgtcgagttcagctgtatcaaaatctaccaagtatagctgaccctctaacactcccnttaaagctattgaatcatcacttcttctaaagacagtgacacctatatcagtaaaaagacagttgtagcccatttgacataattgagaaacagaaagcaagttgtaatctatagaatcaacgagacacacatcggaaatagaatggtcaggagatatagcactttaccaagtcctttgccaaaccttgatttcatccncgaatgtgatagctcgtgggatcttggtntctcatatgacggagaacatcttntctctcctgtcatgtggttggggacccgctatcgagtatccaacttgagc

SEQ ID NO: 48837 - DNA, 390 bp, Zea mays
  unsure (1)..(390): unsure at all n locations
agcttcgaagggagaacatgtgataggattaactaatgtgcaattcgaaaaagatagcccttgtgcagcttgtcaggcaggtaaacaagtgggaggagcacatcacagcaagaatgtgatgaccacatcaagacccctggagctgctacatatggacctcttcggacccatcgcctatctaagcatagggggaagtaagtatgggttagttattgtggatgacttttcccgcttcacttgggtgggtcttttgcacgataagtctgaaacccaagggaccctcaagcgcttcctaaggagagctcaaaacgagnttgagctcaaggtgaagaagaataggagcgacaatgggtccaaagttaagaaccttcaagtggaagagtaccttga

SEQ ID NO: 48838 - DNA, 171 bp, Zea mays
ctcatcatccgcataagaacataataacgaccaacaggccactggagctactacacatggatctattctgcccgatcgcttacataagcatcggcgggagtaagtactgtctagttattgtggatgattattctcgcttcacttgggtattcttcttacaggaaaaatctc

SEQ ID NO: 48839 - DNA, 260 bp, Zea mays
  unsure (1)..(260): unsure at all n locations
gaaatgaatgatactgncgaagaatgccagagagccttccgcgttatctggtcttttattgggactagagatntagtacaagagcatattgccttcacggtatggccgctcgcggagaaatgggaaatgccgcaagaaaccataaaagaggccgacgaaggtggacttatcangctgaagtacacttttaagttcggagataaattcgttgagccagatgatgactggttaaaaagcattgaannattaagtgatgaact

SEQ ID NO: 48840 - DNA, 320 bp, Zea mays
  unsure (1)..(320): unsure at all n locations
tgaccttattgattcngattcgtgcgggagaggaanggaaacaaccatagaaggccaactgtgtgcgcatgtgtgtgtgctgataattacccaaactgtgtgcgcatgtttatgtgctgataaagtgattattgtgctaatcgacgagtggggtcatccatcccggtatacggctaccttgccaacagaacacacgcaatgatgcatatgtctacccagacgacttgcacaagccaacaacggcagcatggataatgcataacatgtnctttcagttaaacatctgtgcaatacaggttaacaactcatacatgatacat

SEQ ID NO: 48841 - DNA, 309 bp, Zea mays
  unsure (1)..(309): unsure at all n locations
cagcttgccaagccctctgacccggccggacttcaccggatgtcctagatcaacctcaccggacttcggtcttccgccgccgcgcgtggaccgagctatccagtgagtctccgcccgattcctttcgctcatgtcttctctggcatcccgtggacgctcctgacctattttgatgaactatctcgctgtgaccaggccggtctcctcgccgtcgacgagcattcccgcctgcgcgcgtggaccgaccaactccggtcatctncgacggcgttccgcacaccgttgtgatccccgcgacctccccttcac

SEQ ID NO: 48842 - DNA, 221 bp, Zea mays
  unsure (1)..(221): unsure at all n locations
tggtaatgtctcattttaagacaatactagaatcttattctcttgccaatgctttaagatttgcataaacaactagtgcctggtattctcattgtcggngaccataattaggggtacccccaagactcctaatctcaactggtaaccctcatcatcacaaagctgcaaaggcctgatgggtgcgattaagtcaatgcttggtccactcaagggacacgatc

SEQ ID NO: 48843 - DNA, 423 bp, Zea mays
gccctgactctagagatctgcgcatccttggcgtgctggggaagcttcttgcagaagagaagatgagtatagcatgccgctcggcataggcacactgtttgccagcatacccagcaggcgcgccgcctgctggatgaccttgacaccgcctgctagtggatgggataggacgcattatatgctgatagggcacgtcgcccgtcagtgcagtagtaggcggcgcgtcttttcctcaataaatgcaggggctgcacgacttctcgtcaggtttagcccggtggcttatgtcatgggccacaagcagtgggtctccacctgagcgggaagtggagggcaaggcccgcacacgtgtcagtaccggacccctgcacacacaagggtcccctctcgtccgggaccctgctgggagttggacctacctgg

SEQ ID NO: 48844 - DNA, 252 bp, Zea mays
aacactacaaaaatgcaaggccgtgtggacctttgcaagcagctgggacctcgaagagaatttttgcaaggatactaactgcataacgaattctttgcgatgtacctaaacactcgatatgcgcgtctcgtgacaggcgccggacggtgcttttcttacgagacctgtgacactcgaagtcttgcgaggcccataatagactcgtaagaaccgtgcgactctgtcgcgactctcttgcaggtacactcgaag

SEQ ID NO: 48845 - DNA, 382 bp, Zea mays
  unsure (1)..(382): unsure at all n locations
aatccctgaagtcttggctgtcaatatgcttgccgtgtcaactgtgagctcggacgggactccgaaccggcaaacaatggtttgccagaagaatntctgggcagtcttcgatgttatcgtggatactgccctcgcctcgatccatttggtaaaatactcgacggcgacgaaggtgaacttgaggttcccttgngccgtgggtaggggcccgacaatgtccaggccccagcgctgaaggggccacgtgtgggcaattagctttgtgaattgtgaagggcttcccgagcgtggagaaaacttctggcaggcttcgcaggactttgtgacccgatttgcggcgcagatcatggtgggccagtagaatccttgacagatcaccttt

SEQ ID NO: 48846 - DNA, 394 bp, Zea mays
  unsure (1)..(394): unsure at all n locations
catgaccagcaataacgggagaatcagtctgtaaaatggcccttcttattcccattgcccttagcttccgaagccccaacagaagtgcttcgtactcagcaataattattgtgcaactganatccagttngactgcaaaacatgntttgactttngtaggtgccactangaccgcaactgctcctgcactgaanggttcccaagaaccatcgcagaacaccgtccaagcttcngtatctttgcttgtccttctttgtgagccccttgcgtccagtcagctatgaagtctgctagcgcctgagatngaattgaagatctgtgatgtatcaatggtgattcatgagctcgcggccactttccacccttcagtacttcttgttctcataatatctca

SEQ ID NO: 48847 - DNA, 387 bp, Zea mays
  unsure (1)..(387): unsure at all n locations
cctgagggcggaactgcaagcctaatactagatttatttactcacaagcagctggtatttctatgcgattcttcttatcctctgaggaaagataatcattgtgaaacatcacagaaatagcaatcatcttaatcactctgctntggagcgtcatagtttacaatagtgtcggggaccaaaattaggggtaccctcaagactcctaattcttagctggtaacccccatcatcataaagctgctaaggcctgatgggtacgattaagtcagggatcagtccattcgagcgactcgatcacgcctcgcccgagcctagcctcggacaagggcagccgaccccggaggaattccgtctcgcccgaagcctccctccgacggcgaacatatc

SEQ ID NO: 48848 - DNA, 299 bp, Zea mays
  unsure (1)..(299): unsure at all n locations
tagatgcatgcttaatttctaatactatcatgggctggctgtggcatcggcgcttatcacatgtggngatgaagaaccttcacaagcttctaaagggagaacacgtgatanngttgactaacgtacaattcgaaaaagatagaccttgtgcagcttgtcaagcacgtaaacaggtgggaggagcgcatcacagcaagaatgtgatgaccacatcaagacccctggagctgctacatatggacctcttctgacccgtcgcctatctaagcatangaaggaagtaagtatggttagtcatt

SEQ ID NO: 48849 - DNA, 274 bp, Zea mays
  unsure (1)..(274): unsure at all n locations
gtgagtcaggttgatgtgattaaaatcaaggataccacggaaaaaaggagatatgggaaggccgacgcccgcgaaaaagaaaagagtgttaaccactgactcgtgggtatcttctgttgggacagtagtcccgtgacaagaacgccaagaacagagttcccgtggagggagaaccccgatggaaacaacgcggagaagctcaacttcagaaatcacagacatatggttacctgcgaagggtaactggcttgtgtggtcgatggcggngatcact

SEQ ID NO: 48850 - DNA, 235 bp, Zea mays
  unsure (1)..(235): unsure at all n locations
tcttagcaattaagcaagtgtcgagttcagctctatcataatctaccaagtatagctgaccctctaacactcccttaaatgctattgaatcatcacttcttctaaagacagtgacacctatatcagtgaatagacagtcgtagcccatcttgcataattgagaaacggaaagcacattgttatctaatgaatctacacgaaannacatggaaataaaatggtcaggtgatatagc

SEQ ID NO: 48851 - DNA, 417 bp, Zea mays
  unsure (1)..(417): unsure at all n locations
atatcattntgtacagcattacatcattacatcattngcatagcataacatcatacatcatagtgcatcaacaacgcaagaaggngggtctcgatattggtattcgaagattgttntgaagaaatagtgacaaggcacanaaaatagctcgtgaaaagttataccatcgtcaaactctgaaatggaaggacctattgattattgattntacaaggattgatcattgattttacgaagcatgaaaagaacggaagggtgtttttcgccgaaggctcaaaaatggtacgtatgtgatgtttcatgcatcgtcaaaaatagaattataaacagctaaaatgctatatccaaagttacacaatattacacatgatactcagcangcattacaatctaaatgttntacagcagcatttaatc

SEQ ID NO: 48852 - DNA, 412 bp, Zea mays
  unsure (1)..(412): unsure at all n locations
cttagcaattacgcaagtgtctaggttagcattgttattagtgaaatcaactaaatatatgtgaccatctaacactaccttataagctagtgaaacatcatttcttctaaacacgataacatcaacatcagtgaataaacagntgtagcccattntgcataattgagatatagaatgcaagttgtaatctagagatntacaagaaatacattagaaatagaatggtcaggagatatatcaattntacccaatcttttgaccaaaccatgatttctatccccgaatgtgattgctctntggggatcatcattntctcatatgaggagaacaatctnttctcccatgtcatggtggttgtgcacctactggtcgatatccaacttggtccaccggatgcatanacctacaacac

SEQ ID NO: 48853 - DNA, 302 bp, Zea mays
  unsure (1)..(302): unsure at all n locations
gcttaatcctgagaagtgtgtcttcagggtcccncgaggcattgctcttgtggttcatcgtctccgagcggggcatcgaggccaacccggagaagatngcggccatcaccagcatgggtcccatcaaggacttgaaaggcgtacagagagtcatgggatgccttgcggctctgagccgcttcatctcacgcctcggcgaaagaggcctgcctctgtaccgcctcttaaggaaagccgagtgcttcacttggacccctgaggccgaggaagccctcgggaacctgaaggcgctccttacaaac

SEQ ID NO: 48854 - DNA, 245 bp, Zea mays
  unsure (1)..(245): unsure at all n locations
gctattaagcatgcatctagaccggcctcttcttttgcanaatcaactaaataaaggttgccgtctaatacacccttaanagctagtgaaccatcacttcttctaaagacagacacatctacatttgtaaatagacagttatatcccatattgcataattgactcacagatagcagaatatattcaagagactcaactaaaaacacattagatatggagtgctcattggaaattgcaatttacct

SEQ ID NO: 48855 - DNA, 156 bp, Zea mays
  unsure (1)..(156): unsure at all n locations
gctaccgcttcaaggaaacgtgagaatcttggcgtttaaggcctctgccatatgggaggaagaccctgaaaaagcacaatcatatgtgtgtcnaatctctgctgacgcaccatcccagcgtgaacccgatgcccactgcagcacaagccatccaca

SEQ ID NO: 48856 - DNA, 271 bp, Zea mays
  unsure (1)..(271): unsure at all n locations
agtgcgctctaccgccagcgttgaacgtgaggtggacgaaactgaagcttcggagactgtccccatttccgaagccatgcaacgatccggactagtgactntggaaaagaatcctagtgaagatgcagaacaagcaatcgctgaagcagaggaagaagatattgaggatactgatcccgaagatattatcgcattgtatgccnagcaaccgagcatttgacttcggaaatctctgttcaaagtgactgtcaaatggtaaacggctttttct

SEQ ID NO: 48857 - DNA, 427 bp, Zea mays
  unsure (1)..(427): unsure at all n locations
cgttcatggaagtacaagaaggagagcccgctcggacaccctcggnggctangtcacgngttgcgcttgccacttgagccggatcatctccggcagtaccctcgagggctgggcaatggcttgcgcttcccacccgagccgagtcattcccggcaacatactcgggggctgggcaagtgtcaacaccgtccttgaggaccaagttctctacagtagcctgctctaaggctgatggaccctcagttacttncatggtaccaagatgatccaagttagtctcctgaccctcaagaccgcgttctaaggtccatgaagcacgagatgacctcaacccagcatcgaacacatcagcacaaaccttcatcacaccatcatctgctggctctgataacagatcctctggaaccatatcctcaagagtctgatc

SEQ ID NO: 48858 - DNA, 412 bp, Zea mays
tctcagcttgcatcgtgactaactcgtgatcgtcttcgacgtcgccataatatctgacctgaaccttccgactgtgggtggtgctgcatgtctcacactgccccatggacttctcaaagtgcttccggggcgggaaacccttatgaggaccctgaccgccctctgtacaacctcccatgagtgataggactgatgctggaatgccttgcgagtctgcgtcggtctctcgtcttattctaataacgctttcagcataaattgctcagtgttatatgtgacttttgtgacctgaatctcgtgagatttgccaaaccccgcggactgatcacgatcattggcagctggcgcggtccacttttttgaaatccactcattttcacttgcgaggaattcatatatacatctctgattg

SEQ ID NO: 48859 - DNA, 476 bp, Zea mays
  unsure (1)..(476): unsure at all n locations
tctggaatgaatcgacggtaataactatcctttccaaggaaatttcggacttgatgtacagtgggtgggggtttccactccaaaatatccttgactntgctgggatccaccgcaatccccttggcagataatacatgtcccagaaattggatctcctccagccagaacacgcacttactgaacttagcatataattggtgctcccttaagcgcgttaatacgatccgcanatgccgagcatgctcctcttcattcttagaatatatcaagatatcatcaatgaataccaccatgaatntatccaacttgngcatgaataccgagttcataagatatgtgaagtgggcaggagcanttgttagtccgaaagacataaccagatattcaaacaatccataccacgtagtgaatgcggtcttgggtatatcttcnggttggataccgatctaataataacccgacctgnggcaatcttg

SEQ ID NO: 48860 - DNA, 182 bp, Zea mays
  unsure (1)..(182): unsure at all n locations
ggagatcagccaagaaaaatatactgcctattctgtggtgaagacaanggccataccaccaggatgtgccacgttaccatccagaagcagaaggagatagcagaagcagcagcgcaacaaagtcaaccgaagcaggtcatgcatactgcttcgtatcattcgccttatattccagaatacgt

SEQ ID NO: 48861 - DNA, 345 bp, Zea mays
  unsure (1)..(345): unsure at all n locations
tcgtctncatttcgattccaccaataatatcgctgaatatgaggcccttgtcaatgggctgcgaatcatggccaaagtaggggcacgacgactcctggtcagaggtgactccaaattggttgttgaccaagtcatgaaggcaatggagccacacaatccaaagatgtacgtgtactacgatgaaagctcgaagaaacgttcaaaggcttcgaactgcaccatagctacaaatgtttcaatgctaaggctgatgagctatcaaccataatgtcggngtgaaaacccatcctagagggggtcttcgcctctgacctctatgaaccctcaataacaatcaagcacaat

SEQ ID NO: 48862 - DNA, 419 bp, Zea mays
  unsure (1)..(419): unsure at all n locations
ctatccctggcgctctcttagaactggctagttcatatgcttggcatggagaatgccttcttgcatggcactatcactaagacattgtattactcatagcctacacagtttgttaatcctactcagccccatatcgtttgttgactcaacaagtccatatatgtctgaagcaagcgcctcgcgcttggcattntcactttgctgcgcacttgctcactttgngattcattaaggccaagtctgacaccttggtcatctatcaccacgacactgatagggcatacttactgctacgtggatgaaaatgtctgctgcctcaaacaggatctcattgcncatcatcactgcacttcagaaggaattctccatgacagatcttggtgtcctcatttcttggtgtgactgtcaacaacattcta

SEQ ID NO: 48863 - DNA, 346 bp, Zea mays
  unsure (1)..(346): unsure at all n locations
gagcttgtgcaagtccactcgaactaatcttcggagattccctatctcgctgcaacatgacacccgaaggtccgggcacagcatgatgaatcagaatattccgacctatcagaccaaggacctggtcangagttttggctttcaaagttttccccgtttgaaagaatgggaaatgctgtaaccttaagggggagaaagaaagaacgtgaaccttgtacgtttaacttactatttcaagtntaagaaatactttaaaatgccttgccaagagtggctagacacaactgaagtaatgtgcaatgaaatacttggcaattattccaaaaaagaagatccattgatgact

SEQ ID NO: 48864 - DNA, 237 bp, Zea mays
  unsure (1)..(237): unsure at all n locations
gtacctcataacaagggtgttacggngccttctttctgtgttgccgcttgagcangctacagagaaatgactggcacagggttgattctgggagaaccttcttcttatcttctcttcactatcttcttttcactgaccctttctttctctttgctctctccactgganggatctatcaaagagtattactaccatacactggaggaaaccaaagactacgaaccatgtgcaacagtc

SEQ ID NO: 48865 - DNA, 108 bp, Zea mays
ctgcggttggatgtctggacctccgacagacactgtgttttggtcccgtcaaggtaaactgctcgcctaagccggtttacctgccaataaatggtatacaaaccttgt

SEQ ID NO: 48866 - DNA, 104 bp, Zea mays
atgttgacactatatcgattctgcattcatcgtatatccttatcagcgtacaccaccgttaaggaccatactgcttaaaattacccgcctgcctatgcagctgt

SEQ ID NO: 48867 - DNA, 275 bp, Zea mays
ggaatcggctctgaagtgcgggtcgctcgtgtacctcgctaacctggcgtcttcagtaggtctttggatgaactatattacatcacgcattcgttaatgtctgtcctcatcctaagaggtgtaaatgttgcgcggtacaggtaatttgcgattctactgcaaatgttagacttaacttgacactgttgactcttctacctctgagtctcgaatgaatcttgttcttttgaattattgttcaggcaggacaaacggtgctacttaatttgtttttt

SEQ ID NO: 48868 - DNA, 51 bp, Zea mays
ctgtgagcgtgaatctcgtagcctgcaaataccgtgcctcactgcatctat

SEQ ID NO: 48869 - DNA, 275 bp, Zea mays
agcgccttggaagtgcgggttgctctcgtgggaccactgttaaacccgggtcttgcaggtagtcttggggtgactcatgatacatgacgcgctcgttaatgcctgcctctactctaaagtgtaaatgttcgctgatactgtaaactttggatcctactgcaactattagccttaacttgcagctgtatgactcttgctcttaccctcctatttacgaggtatcctgttcttgtggacaatgttgtggcagacaactggagctatttactggtccg

SEQ ID NO: 48870 - DNA, 244 bp, Zea mays
gatgacacactgatggattatttgtacctgactgcattctccacaagacttatatcaatgcttatttttacattaaaataagatatgttagaatcggcacttatgtcaatgctctttcataagcacggagaaagtcgctatactctcgaacgttattaggaaatgttatgacaggattacgtacatttggtgctgttacttacattaacaatccacttggccactcgaatactcttttacttac

SEQ ID NO: 48871 - DNA, 103 bp, Zea mays
attgaaatatgcacctcaacaatgttgagttacaataatgtttaacactgaaagatttccttattgggctagcatgaaattcacccgcaactgagattacaaa

SEQ ID NO: 48872 - DNA, 224 bp, Zea mays
ggattgactctaacactctacaagggtatgggcttttctttgtactgttgaccagctgcgaaatactgccaggtgattcggaaacttctccactctctcctactttttccttcaagtctttttctcttgttccctgagatcttcaaatatacctcccaagataacctaatttgaccatttcatcttatcccaatacatcctggattacggcaggaggaaatgat

SEQ ID NO: 48873 - DNA, 107 bp, Zea mays
acacccagactggtgagctaaattctatgtaggttaagcgaagcatctcctcttataacttgaatactgtggtgcaatatgtgtattaattggctctacagtctgga

SEQ ID NO: 48874 - DNA, 208 bp, Zea mays
cacttgcgagcccttttctcaacttgacaacttccacgacccttccgggctaacgtttcgacagcttgatcggaaaaagttctaacttcggagcgaagtcaaaacacttcctgactcgtgtcaaaacattagttccacgcgtacggccacctgcaagtactgttgttctgcgccacaccacgaggcagcggtgtcgctgtgaaaatct

SEQ ID NO: 48875 - DNA, 322 bp, Zea mays
  unsure (1)..(322): unsure at all n locations
tgtctgaatgcagcataccttcacggcctctccctgaagcaaaccccttctgacgtcacagacatgacagtggctacccgcccttacatgacgcgagatttccactattcgcagtccattggcctcggaaaaagcgcgtcacgttacgcgcttggagcagtgtacgattactacatccctagactatatatgaatgataacgcccgggcaccgagatagatggatcttgcctctgcagccaagcaatgttctctatggaggcactgtctgtgtntaacacgctgatgacacctcgccttattagctacgtatcagaagcagc

SEQ ID NO: 48876 - DNA, 323 bp, Zea mays
taagcttttgtggatctcggatctgatcaatttgaatcaactgccaaacaggagtccctgtcctactcaatctatggcccatgacaatggttactacccttgctggcaaaatgatggacacctaacaaacggatgtggtgcgaaaaaatctgtcttttcacgagcaacttactcccaatgtctgagaggaagttggctgcacgaacagtgtacacccccaactggaacacgccctgtactgtgccaagtgcaccccgctccgtcgtatcccccccctgcgtccgcaaactccggatttccatctacgagccgttatcgatatc

SEQ ID NO: 48877 - DNA, 366 bp, Zea mays
ataagtttgcttttttcacttacacttacatctctcttagagtgggcgacttttggctcacgcgtgtttgtgatggtaaatctgctcttgtcttttatttgactcaactacttgcactcgttactgctcatcaaggctcgataaccgtctatcctgcgaaacattttgatacacgaagctccgcaatcgcccaccatatgaccgcgggaaactattttcatacttacagtattagcgcaaaccttttttcctgccaggatgatgggacaacagcgaacctatttttccaccagtcaagcatttctgataccacacaatgatcacttacaatgtgtatataccactagtctccgcaactctatgggc

SEQ ID NO: 48878 - DNA, 347 bp, Zea mays
tgatttatacaggaaatgataactgaactcatctgttcaggaggaaaagaccagccatacaaatgtgtggtataagtcaatcgtcagaaaacaggctcataaataagactggcttcttgttgcagcctcacaattcatgtcagacagaattcgaacaaactccgcgacatcggaggatcgctttcgtagcgcgcgcttttacaatttacatggaaacgcggggagatattgcgcacgcctgcttggcggctgacggcgtctctctccgtggatacatatgcgaaggaatcaaagtgcgcccctatgacactcggagtacatatggtggtcgcataccgcctcctaca

SEQ ID NO: 48879 - DNA, 295 bp, Zea mays
gaataacatcccttaaataaacgccgtcgaatcgtggccaattacctaccttcgctggcaactacaaaaccctgaagttaaaaacacccgcgtctggcagtatcatgatctggtatttgccagagcctaccttacaattgagccagcacgctttaactgataatgatggaatgattatattaatatgtaactgtaagctaatcattatcaaactctcaattaattgagtatgtatactaacttgttgttaacgtaaatattcttatcattagctaactagaattatctcttatca

SEQ ID NO: 48880 - DNA, 154 bp, Zea mays
  unsure (1)..(154): unsure at all n locations
aaatactacccgttaaacaaagtaaaagaagttgaaattaaacagttgaagcggttatgctgaactgctttttctcttttatacaaaatgncaagaatgtaggaaagatttagtacatgtataattaagtattgaatggttntacctttttgta

SEQ ID NO: 48881 - DNA, 479 bp, Zea mays
ggatgtcattgtcgtaaccaaatttcctcaatacagtccatgtagttttcaaacgaaccttttcaataaatagggcatgcagaaaaaggaacccagtcaaagtaaggccagtttcatttacgccttcaggcatcttctcctgaacaactctcttaactcctgaaatttcagtaggctggagaggagcactaaaacaccggacctgcaaagcagtaataaaaataatctcagcaaaactaaaaacaaaagggtatatcattaagtagttatgctgtatgttgctagatagaaagcagggtagccttcatgaacacagacctggaattcattgagctccacgtcactgagagcaccatccttgtcattatcacatataatgaatatccgcttcaacgctctcacacatcgaggcttcagagattgtaattcttgatcaaaaaggggggcagtatggtgaagtactgccttctgggcatagt

SEQ ID NO: 48882 - DNA, 413 bp, Zea mays
  unsure (1)..(413): unsure at all n locations
tattattactgttagatgccaacaanataacacttaggacataacccacccctaattaagagatgtagggcaaagtggcccatttacacaactcttgttatttttgtctagagcatagcctttttcaattgaacctcaaagtcctaggacaagctatattgaccaaaggcaagccactgtaatttttatagaatttttggaaaaagttaaaccactgttctagttcaaacctacactagaaacataaatagaaaataaagaaaggagaaaatgaataatagaaattagtgtcatcctaaaaccctttgtaaattgtccacaaaattatattaaggaaataccaacccactatgcctatccctaacaaaacctacaccaagggtgataagcataaaccactanaagccccgcat

SEQ ID NO: 48883 - DNA, 401 bp, Zea mays
  unsure (1)..(401): unsure at all n locations
ctgtgtggaatngggagaggattagatctctntggtgtgtcttgtttttatgctacctcttgtaatgtagttggaaggtggaaaacttggatgccaatgaatgtggagtggttggggcatccatcacccctccctctcaacttctctcttctatactttcctctctaccatcctaccactcatctcttttaccttcctcacttactttttcctcctcctctttcctcacctctatctctctatttctccttctccttttccatcacccttcgttcctcgttcactttctctttccttcctctttctcctctcctctctctccttctctctatctttttctcctttttccttcgtctcctctcttcttcttctcattatcctttcctcctttcttttctccc

SEQ ID NO: 48884 - DNA, 194 bp, Zea mays
tctagaatcaagaatattgagctcatgcctaagtctggtaaaagattgttcatcaagtggcttggtaaagatatcggctaattgatctttagtattaatgtaagaaatctcgatatcccccttttgttggtgatccctaagaaaatgataccgaatggctatgtgcttagtgcggctatgctcgacgggattgt

SEQ ID NO: 48885 - DNA, 493 bp, Zea mays
  unsure (1)..(493): unsure at all n locations
tcggcatgatgacagatctcaagacgaaggggtgaaccgtcttatagatgaaatgacttgaagacccatgatgttntgtatcattagtgtagtcgattgtaaagggcataaatgtaattttacacaggctgcgccctgtgcctataaatagatgaacagtacccctgtactgttcacgcaatcttgtaatcgctgacacattacgctggaattattgctttctgccaaggcaaatgtataaatgtacctaaatattatgttttaatatttaggtttgtataataaaatatgtgaataatattatctgtttttggtacatctttctctaatgtttatatttcattntacattgtcttataagtctgatcacgaaggtatgaccttcgtgatattntgctcatggccttcgtccgaagtcattatatccttggggagataatgcttcagcggacgaaggacattatatattaacactttatgttgccttggtctt

SEQ ID NO: 48886 - DNA, 421 bp, Zea mays
  unsure (1)..(421): unsure at all n locations
tagatggtgtctntgaatggntgctagctcttgtattgtatgtagaggattggaatgcttggatgaagtgaatggaggtggttggggttgtatttatagccaccaaccacttcctagtcgttgctccttttctgccgaccgcggacggtccgcgcccctggtccggacagtccgcccctgcacatcaacggctacaatcgcaacggtaagcagtaacggctatatcaacgactactatgcattaaatgtgtcgtcagatgtcagataaagttagtcgcggacggtccggtcgtgcaccccggacggcccgcgaggacgctaaaaatatcatttaccgaacccgtcaccttctgggttttctgtgtttcaccgaccgaacggtccgcgcttgatgccggacagtccgtgcttggtctcaaac

SEQ ID NO: 48887 - DNA, 484 bp, Zea mays
  unsure (1)..(484): unsure at all n locations
tatctatgctatacttgttgcgtccaggaagttgcgccactattttcatgcacacagggtcgtggtggtgacctccttcccgttaagggccattctccacaactctaacgccataggcaacatcgccaagtgggccacagagcttgctgagttccaaatggacttccagcctcgccacgctgtcaagagctaggttctggctgactttatcgtggaatggaccccttccccgagcgctcctcggaccccacacctgcgaagcccagggctctagtcttcaccgagccccactggacgctcttcttcaacggatccgcccgccagtagggtggcggtgctggagtggtcctcgtcgacccaagcggagatcaagtgaagtacatggtgcaccttgcgttcatggccaccaacaacatggcagagtatgaagcactaattntcgacttgtctgcggccctatccctanggatccgctagctcctcg

SEQ ID NO: 48888 - DNA, 410 bp, Zea mays
  unsure (1)..(410): unsure at all n locations
ntagtaggatgtgtattagcaacttgctttccagcttgacatgtactacatggctggtctttttcaaacaccacatcctttaatcctctaaccatgtctttctttaataccttcttgagtgtgctcatcccaacatgtgcaagcctcctatgccaaagccatccaagtgaagctttggtgaagaggcaagttcttaagtctgcatcttctgaagtgaaatccactaagtagaggttgttgtacctaaatcctttgaacaccattgattcatcatccatctttgttaaaataacctctgttggagtgaataagcattgaagtccaagatcacagagttgacccactgataataaattgaagctcanaggtgcaaccaagagaacattngatattgataaatcatttgaaat

SEQ ID NO: 48889 - DNA, 365 bp, Zea mays
  unsure (1)..(365): unsure at all n locations
tgtgaaggttcttcatccncacatgtgctaagcggcgatgtcattgtcagcccatgctagtcttagctattaagcatgcatctagaccggcctcttcttttgcaaaatcaactaaataaagtttgccgtctaatacacccttaaatgctagtgaaccatcacttcttctaaagacagacacatctacattngtaaatagacagttatatcccatatgacataattgactaacagatagcaaattatatccgagactctccactaaaaatacattagagatagaatgctcattagaaattgcaattntacctaacccttttaccttgccttgattcccatcaccgaatataattgaatcttgggaa

SEQ ID NO: 48890 - DNA, 196 bp, Zea mays
  unsure (1)..(196): unsure at all n locations
agctngaagatttcacgttcaaagttttcattcgtttggtcgaagacctcataatgcctgcacccctcgcgggacaaggcattcatggccccctcgcangtgacgagggaggcgaaggacatgaaacctgtcacaatggacgggagcaccagcaactcctcctgcaaccattcaaggaaacgaaggcccgcttctt

SEQ ID NO: 48891 - DNA, 476 bp, Zea mays
  unsure (1)..(476): unsure at all n locations
tgtcatggggctgaagaaacgatggcagtgcctttatattgtataggcagcctatccttccaactgttcctcataactttctcaactatttctgtaccttctgttgctaccaaaggcagcggngagaacatttgcttgcaatgcagtgttccaggtatttccacctgtagtccatgtggccttggactctcgcctcatggtggggtcctgtcagaggtatacgtgcatgggttgggccatgatttggtaggattggaaggttagaatgaggctggcatagctcaaaaggtttgttgtcgctgctgtgtctgcctgtcatgcaaatgcgtaacttgtttatgacacatgtcttgcgttacaggaccaggagaacatgtctttngtttgctntagcatccgcgtgcagacaattaccaattaggctcagccattagaatcacgtgccgtatnnttgttccaagtctatcgtataatca

SEQ ID NO: 48892 - DNA, 433 bp, Zea mays
  unsure (1)..(433): unsure at all n locations
ggctggaatacacaacttgntagcgcggaacttatatccatcttgtatgtgaaattntccccagggtttgctatccttacaatgtatatagaaatctttaaaatcaatatcatccacatattgatctttcacagtttgcaagccaaagattctaaattctaactatgaaagcatggtatatctacgggacaacgcatcaacaatgaggttttccttcccgttcttatgtttaatgatgtaaggaaaggactcaatgaattctacccaactagcatgatgacggttaagatttgtttgggtacgaatatgttttaaagcgtcatgatcagaattaattataaactcacgaggccaaagttagtgctgccatgttttgcaaatgcgaactaaagcataaaagtccttatcataagtagaatatctcaagctagca

SEQ ID NO: 48893 - DNA, 319 bp, Zea mays
  unsure (1)..(319): unsure at all n locations
taatcccgaanagtgtgtcttcagggtccccttatgcatgctcttngggttcatcgtcttcgagcggggcatcgaagccaacctggagaagattgcagccatcaccagcatggggccaatcaaggacttgaaaggcgtacagagggtcatgggatgtctcgcggctctgagccgcttcatctcccgcctcggcgaaagaggtctgcctctgtaccgcctcttaaggaaggccgagtgcttcgcttggactcccgaggccgaggaagccctcgggaacctgaaggcgctcctcacgaacgcgcncatcttggtgcccccc

SEQ ID NO: 48894 - DNA, 163 bp, Zea mays
  unsure (1)..(163): unsure at all n locations
tatttaactttacactaaatctactactatgcatgttggttatctgaaantgncatgaggtatcgcacttaggggaatnttnnaaaatcnaaaacatccatgaaaaccctcatgcaaggccaaaatgcaaatttcaccatttgcctattttctctaaaaatta

SEQ ID NO: 48895 - DNA, 495 bp, Zea mays
  unsure (1)..(495): unsure at all n locations
taagaatacaacacaataaanactattaattaatacctaattgaccttctgcctctacgctcttttcagcagcgtcagctacttctctagcatcgtgaattcccttttcgctttttcgaataatttcaccggccatttctcggccaccattttcctagatatcagtaaaaaattttccaccaattatacttgcttcggccgaaggatctcttgcatcttcaaaagacaaagctgcttcggattgtgctaaagtttttacgtgttcgcagcccttcttctctaaaatggtggcaattcctctggcaccagagaaagcacttatatctccacggctatttaaaatttcttcgaaggcctcagctntgtggtcaatccattcaatgggaccttcgggattgcctctcgtanagttntcctcgcttgagaaggcgccgactctggcgaagctagttcttaacttcttaacacactctatagacttatggtagcatctct

SEQ ID NO: 48896 - DNA, 433 bp, Zea mays
  unsure (1)..(433): unsure at all n locations
tggactaggtcgtcccagttggagatttgccccggaggcttgtgctccaaccaggcgcgagcggtgtcggagaggaacagggggaggttgcggatgatgaggttgtcattgtccgttccacccagttggcaggccagacggtagtccgcgagccacagttccggtctcgtctcccccaagtactttgtgatagtagtcgggggtcagaaccgggtcgggaacggcgcccgtcgtatggcccggctgaaggcctgcggaccgggtggttcgggcgagggactccgatcctccccgctgtcgtagcgtcccccacgcctgnggtggtagcctcggcgcaccctctcgtcgaggtgggcccgacggtcgcggtgatggtgctcgttgccgaggcgacccggggccgcaggcgctgtgttgcgcgtgcgcccggtgt

SEQ ID NO: 48897 - DNA, 285 bp, Zea mays
  unsure (1)..(285): unsure at all n locations
atgggctcatagaatatctagacatcgtgctactaaagtatctccttttgagcttgtctatgggcaggaagcagtgttgcctgtggaaataagtctgaatgctgtcaagttcgccagacaaaatgatctaactattactgattattataattcaatgatggataatattgatgaggtgaccgacaagaggatgatagctttgggagcaataaaaaaggacaagatcatcgtagccagggcctacaacaagaaggtcaaaactaaataatttccagtangggacct

SEQ ID NO: 48898 - DNA, 194 bp, Zea mays
gcttgtacaacaactatacatatctcgctatttatagcacgcgtgtgccaacaatagtctgtcatttcccccactcgaaattcagaagtcccaataaattacttggtcgtgacactagcccaaagtgctatttttttataaggccccccaattcccaaagtgcattgctgagtggtcagatgagagggagtgct

SEQ ID NO: 48899 - DNA, 457 bp, Zea mays
  unsure (1)..(457): unsure at all n locations
actcagcttacaacacanaanagatatccacttcaaagggaaaggcaccacatgaatgcatatgaattatgtgggggatagatgtcccccgggtccactagaggagtgaaagacctcacgaaaggcccaagggcccgataaatcatgaggtcattccttcgtgggcctggggagaaacaaccaacaaggcaaagcgacgtaataccggattggtgcaagctcgggtggcccacgacgtccagcaagtaaatcgcaacagagacccgactttcccgcactgaagcccccatgcaacggagccatgcgaggataagtcggcgagggttacgtanggataaactcaagaggttcaccactttttagctacttgttgttatcatatccacatgtactgccccacggtcgagtatataaggcctatggggcaccccttcagaacgatcgaccctatcttact

SEQ ID NO: 48900 - DNA, 419 bp, Zea mays
  unsure (1)..(419): unsure at all n locations
gctattacgngacctatgatactcagcttcnctntaccccgaaacataatacaccctttattggtgttactttcatgtagacataatcttcaacttgaaagcacaagggtttgcatcgtttgtctgcataactcttctgacgagcttgagctttcttcaaattatgaattattcgttgaactttctcttctgtctcctttaccatatcaggcttgaagaaatttctttcacctgatttagaccagtttaacagagtacgataccgtcatccatataaggcttcaaagggtgccattttgatgctctcttgatagctattattatatgagaacttcgctaatggtaaacaatcatcccatttcttggggaatttcagaacacatgctcgcaacatatcttcaagtatttgattaccctct

SEQ ID NO: 48901 - DNA, 170 bp, Zea mays
  unsure (1)..(170): unsure at all n locations
tacctgtcgaagcaacagcatatgtccagcgcagcagctacaaacatacagtaatcggccttgcatgtcgggatggattgatggacctncaaagtccagaggtacacctgtttggggcaatgacaaatcactaatggatagagttccagcccattgcctctttgaactct

SEQ ID NO: 48902 - DNA, 449 bp, Zea mays
  unsure (1)..(449): unsure at all n locations
tagcaagtgcgagttctggatcagtgaagtcctattcttgtgtcacattataaaccgagaagggatggctgtagatccaaagaaggtaacagctatcttggactggaaagcaccaaaagatgtccgaggaatcaagagtttcatcggaatggccggttattatcgatgtttcattgaaggtttctccaaaatcgctaggccaatgacagccttgctggcaaagaaggtggagttcaagtggaccccatcatgccagaagtcctttgagacattgaaggagaagttgacaacggtaccagtactgattctgccagatgttcacaagtcattctcagtgtattgcgatgcttcatacaccggactgggatgtgtgtngatgcangaaaggagagtagtggcatactcgtctcgacaggtgaagatcatgaganaactatcctactcatgat

SEQ ID NO: 48903 - DNA, 439 bp, Zea mays
  unsure (1)..(439): unsure at all n locations
tcgtatcaacaattngattgcattcttgtacttcttcgaacaagcaagggctgattaattcatcttctagataccatacctctaagtctaagttctggtttgcacacaattctgagagctctagtgcggtgtctcttgggcactgcttcactctcttctttattaatagaaacgtgcacaatctcgtgccgttcgttcaaaaaaaaaacctgagatccttgtcctcccagaaaatccctggtctgaaccatcccctgtggtgttgtagcgtgtcctcaagatatctttgtgcaactcacctgtagaccattggatgaccaaaataaatcatttaagtttttttcgaacattcatttaagtttgacttggactgagttgatgagtctacattctatcatgtttncagtgtaagtgtcgtcgaggaagaacacatcaagaa

SEQ ID NO: 48904 - DNA, 370 bp, Zea mays
  unsure (1)..(370): unsure at all n locations
tctaaagggagaccacgtgatanggctaaccaatgttcatttcgaaaaagatagaccttgtgcagcttgtcaagcaggtaaacaagtgggaggagcacatcacagcaagaatgtgatgaccacatcaagacccctgaagctgctacacatggacctcttcggacccgtcgcctatctgagcataggaggaagtaagtatggtctagttattgttgatgacttttcccgcttcacttgggtgttctttntgcaggataagtctgaaacccaagggaccctcaagcgcttcctcatgagagctcataatgagtttgagctcaaggtgaagaagataaggagcgacaacgggtcggagttcaagaacttgcaa

SEQ ID NO: 48905 - DNA, 253 bp, Zea mays
  unsure (1)..(253): unsure at all n locations
agcttctaaagggagaacacgtgataggtctatccaatgttactttcgaaaaagatagaccttgtgcagcttgtcaagcaggtaaacaagtgggaggagcgcatcacagcaagaatgtgatgaccacatcaagacccctggagctgctacatatggacctcttcggacccgtcgcctatctaagcataggaggaagtaagtatggtctagttattgttgatgaattttnccgnttncattgggtgttnttttt

SEQ ID NO: 48906 - DNA, 435 bp, Zea mays
  unsure (1)..(435): unsure at all n locations
tgctcctaatatttctctttggctatctgtagtcactatcttccctttggccacaactctgcctttgtttatcagtgaaataaggtagacttgcttttgtctctacaaattacaaaacatgaacatatgatcttttggtaaaaacaacgtcataattggaaagaaacaaggcaaataaaaccacatactgattctgatatgcccatgctggcagcttgaacccttcgagttctctataataaacatcaaatcatagcatcacttaatcaaattatgctttatattttaattgaaacaataatacaattagcttagacataccatgttgtgcaatataggatcacttggcaaatctttgactacattgccatcaagttgtgccttctacanggtatagttcactcaattattatagaanaagaanatataaatatt

SEQ ID NO: 48907 - DNA, 390 bp, Zea mays
  unsure (1)..(390): unsure at all n locations
nttgccacttaattcaaaaaaaaaaagaagatataatctcttactgcttcgtagccgtaccatctctccactactgcacttacctgatttgtccagttgtccaaaccgttcggcgttacacgtgcatgacccacgtccttggggcgtggcgcatgccaacacggcactttttttttgtgcgttgaaacgctgacacgccacagcatatatgtagtagaaagcagaaagctactggctcgggagactcgtgccacgcaagagtccagaatcgacgtatattctgtttctgtccagttcgcctgtgtagatngtcgtccgtttccgatctggaaaatttgagcggctgctaatgtcgtagtcgtaattacaatgacgtgcangactgatgca

SEQ ID NO: 48908 - DNA, 448 bp, Zea mays
  unsure (1)..(448): unsure at all n locations
tgtactntgcctcaacatggcctgattgatgattggcgcgccgtttcagcgcgtctactgacccaccgtcaatccaccttcggttacgccaactgccatatctgtccccgcggctgactgaccacgggcccccacgcctggtggttttgccgggccacgcgcggggcgccttgttgctgctgcattggtttaaaaaattaccttttgtcttctgcagcggccacaaggaggcgcactacaggcgccacaaggaggcgcactacaggcgcgtgcgatggttcgctctttccgcacccaaagtctggcacacaaaccgtatgacttgtggacctgngccccccgtgtcatagactgggcttgtcttctgcaacggcccaaggaagcgcactacangcgcgcgcggcggntcgctctntccacactcggagtctggcacacaaaccgtatg

SEQ ID NO: 48909 - DNA, 465 bp, Zea mays
  unsure (1)..(465): unsure at all n locations
ggaagcctaagtccaacaaaattcagaattganaaaactattggcgggccttcaagacaaatgcttggaatttagcaacaaatgtattcaacgactgagaaaaattttccactcagtcggagctagcagtgagaaattcaccccgtcagctgaagatttaccaaagaccttcgaacatattgagggtgaaattgatgagcttgacgaatttatagccgggcatggtgacttctgcgcttgggtagcttctcggggcactgctgcagctttcctaaaagctggctgcgatcatggaacgattgtcaataggcccaattttactttatcaccatcaattctagatgacattcctgatctcgcccgaagcatttccaatagatttgaaaaatgatatggacaaaaggcgggcgagaaaaggctggagacgaagctcggagtcatcttgaaccacgtagaaatcatacc

SEQ ID NO: 48910 - DNA, 374 bp, Zea mays
  unsure (1)..(374): unsure at all n locations
ngatggccaagtcaggaaacaggtcccagtgtatnttgtatctgaagttcttagtatatcaaagaanaactacacagaattagagaaggtgttatatgctgttttgatggcatccaggaagctttggcactattttcaagcttacaacataattgttccttcttcacaacctctgaaggatattatgaggaaccgagaagctactggaaggattggaaaatgggctgcagagctcacacgaatttgtattgaatatgttcatagatcttcgattcagtcccaggcgttagcagacttcattgctgattggacgccaggggctcaggaggaagaaacaaataaagacgccgaagcatggacagtgttttgtgatg

SEQ ID NO: 48911 - DNA, 351 bp, Zea mays
  unsure (1)..(351): unsure at all n locations
cacttgaaactaagcttacatgacctcgtgactcaatttgtggcgcagatcatagcgggccagtataagccttgtcggatcaccttagcagcgagggccctatgccccgcgtgagagctgcaagttccgttgtggacttcgcgcaggatttggacaccttcggtctcggtgacgcatttaagcatgggttggctgacccccttcttgtaaagctggccctcaatgagtgtgaagtcttggcttcggtgtntgaggcgcttggcctcgttgatgtcgcttggatggtaatatccctgcatgaacagggtgattggcgctcgccagtcttcggccatgatgaggttggctatg

SEQ ID NO: 48912 - DNA, 215 bp, Zea mays
  unsure (1)..(215): unsure at all n locations
agcttcgtcgnctgaaagaanattaccctgtttgaaagagatgatctcagttctccaatcttcactataaacaggggatatgttaaggattgctctttcaagaagcttgaccgaaggtgcttttattgtttcaaaaaatacttctcgaagtataggcagcccctgcgctgctgacttagccaataaatcagcgtattcattttctccacgaggaa

SEQ ID NO: 48913 - DNA, 477 bp, Zea mays
  unsure (1)..(477): unsure at all n locations
ctgcccctagaattaaatcaatcttgtgctcaatgcctcgcacaggtggttatccattgtgatatctcagagggaaacacatccatatactcttgcaaaaggttagcaacagccggtggcaaagtaatatacgtatcatcaatggaatagaaagcatttttgcacactaaggcatagcaaagtccaacagaggcatgtaactcatcaagatcagatttagtagctagcacagcaggagtttttaacttaataggttgctgattctcagagttcaaaacacctttttgcttagcattagtctctntctcatgttcaaagtggacaatttcagtgggagtcatatgaagcaacacaattntctttcccttatgcatgaaagtatatntattggatctaccattgtgaatagcatcagtatcaaactcccaaggacgtcccaataaaagagagcaagcatccatactcaccacatcgaaa

SEQ ID NO: 48914 - DNA, 373 bp, Zea mays
  unsure (1)..(373): unsure at all n locations
tactcagctntatcanatggacgtganaagtgccttcctcattggacctttcaaggaagaggcctatgttgagcaacctcccggctntgaagacagtgagtaccctaaccatgtttataggctctctaaggcgctatatgggctcaagcaagccccaagagcatggtatgaatgcctaagaaattctcttatagctaatggcttcaaagtctgcaaggccgatcctactttattcactaaaactcttgacaatgatttgtttgtatgccaaatttatgttgatgatattatatttgggtctactaacgaatctacatgtgaggaatatattaggatcatgacacagaaattcgagatgtcgatgatgggggag

SEQ ID NO: 48915 - DNA, 482 bp, Zea mays
  unsure (1)..(482): unsure at all n locations
tcagttccatctatattatggattgcntttgagtctgtccaatttcctttggcccttctggcagcttcttgacttccatgaatagcaatgggcccttggtccgaaggtatcttcatgcaaagataagctggatgcagaattgcttcgaaggcattaagagtaccacgaccaatgattgcattgtaagggtattccatgtcaacgatatcaaacataacttgttcagtccttgtgttgttgatgaatccgaaggccactgacattgagattttaccgagtgctacaatctgccttcctccgaagccgcagaggggatgtgtggcatcaagaattntatcttcgggctcttgcatctgtctgaaggccctagcaaatatgatatcagctgcactgcctgtatcaaccaaaacattgtggaccacgaaatctctgataacacaagagataaccatagcatcattgtgtgggtaatacttgagttg

SEQ ID NO: 48916 - DNA, 140 bp, Zea mays
tgaaaaccagagtctttttttattgttttttttatatctgttggtgattgggttgttatgaatgggtatgtttctgttgtttggtttgttagagttggtgcattttgtgaatcaggtactgcttgaagaaaaatctcgtt

SEQ ID NO: 48917 - DNA, 449 bp, Zea mays
  unsure (1)..(449): unsure at all n locations
tcggcatggcccactctntcatagttgggaacactttgaaagccaaaaattcatgcactaagtccctagtgccaatgtgctctgcgataaccctaaattcagcccaaagcaattgggttggaccctctggtgtcatattgcacggnggtctggtctctctgaagatcaactccaacagactctgaaccagcttctccttatcatcgtcaactttgacgtagaaccattcagatttccaaccagctggccatttgcttcggtaactgatcacgggaaatttcgtagtcttgcggtaggcaaaattgtagcagccaaagttntcatgtaacccgtctcctctagccttggtttggtaatgcagctcatgtactcggcagaaaccttcggcaaacggttccaccccttggcttcggagagcccaaatgtaaacgataagcctaacgatagcg

SEQ ID NO: 48918 - DNA, 354 bp, Zea mays
  unsure (1)..(354): unsure at all n locations
nggaggtaggaatgatgagatcaaggcaacattatgatcaatggagttggaggaggtgatcctattctagccaaaggagttgaatctatggagctcaccatctaggagcaagacgttaacgttggccataaccttgttcgctgcaaaggtataaggtaactataatataatacccgaacaccattggattcatgccaattgatgtgtttcatttagcttgcacttgtttctcatttagtgaatgggagatgatgatgtaatcattcatatgcagattcataggctatgttgctatggctgatgctcctttgctcaagaggcatgatgttntggtcattaccttactgatttttt

SEQ ID NO: 48919 - DNA, 238 bp, Zea mays
agcttctcctgtagatgaacttatgcacatgttaaatgatcaactaggcaaactggttagtccacaaggtttgtgatggtcgtcaaacaccaaaatcgattataggaaatattgagactatttccctttcaatctcccccgttttggtgattgatgccaacacaaaccaaaacaaatataaagtgtagaaatgtaactagttttcattttgacaaatgtgctaagttattttaaatga

SEQ ID NO: 48920 - DNA, 427 bp, Zea mays
  unsure (1)..(427): unsure at all n locations
ggtgatttatccaatttanaacaagcaccatctcttaacatagattntctatggataaactcaacacaagagatggcattagtagcacaagcactagtttcttatttagcaaccctttttttatgtggaaggcaggtgagttgctaaaaaataaagaaacctcataatatggactaaatttcccttaatcccttatacacaatacattattgaatgacatagatttagatatgcatggttattcaatgaagtccaaaggtctaatttaagccatattatggcgagtgtctaatatggaagaatcaaatccaaattaattagagagagataatacatcacatnagtttgaattattgatcatatgataagattcattnttctttccaatggacctttatttcataatcaacaactgatgtatgtcctc

SEQ ID NO: 48921 - DNA, 182 bp, Zea mays
  unsure (1)..(182): unsure at all n locations
accgcagctgcaacttaaccactngactgaaacacagtagttcaatacctaacaccattaataaacagtatcagggttgaacgtttagacccactttagtatagncaggttgagtaatgctgagatggctaacccgaaaccttatctaacctcaaaaatggtggccttgccttagtagatgt

SEQ ID NO: 48922 - DNA, 105 bp, Zea mays
agttgggagaggatatgatctctttggtgttctttgcaatgaatgctaactcttgtatattggttggaagctggaaaacttggatgcaataaatggtggggtgtt

SEQ ID NO: 48923 - DNA, 100 bp, Zea mays
  unsure (1)..(100): unsure at all n locations
gtgtnatcccggttttcaccctgttgtttttcacaggagaattttatttccttatcttttggttagttacatcatgtggaggccttgaagcttaaaatgt

SEQ ID NO: 48924 - DNA, 400 bp, Zea mays
tgtggcttgtgccgctggaccacacgccacggttaagctataaggctcgcgcgcgtacctccgataccgaatcacatgccgagacgtgactcctaagtcctaagcccgccgaataattagagcttgccgctgaaggaactgatgaatagcttcccagcaactcagagcctgcctgtcccatcatcctcctctttcacccaagagcgaagttaatcacagataaatctggaagcttctttcttgggaggaaagagacagcactgccctggctctgcgctgtgtgcctgggaggaccatcccagctgctagctgcagcatacctccaagggtggtcttgtccacgccgggtcgggacccgtcattggctcgacgtggtatccctttttcttttgccactggt

SEQ ID NO: 48925 - DNA, 458 bp, Zea mays
  unsure (1)..(458): unsure at all n locations
ntgatcaattaaagaagagatngatgtcgccccagtgttggttatgccagatctacagaagggatttgacatttattgtgatgcatgtggctaaggctttggatgtgtgcttatgcaagaaggacatgtgattgcctacatgtcttgtcaattgcggaaatatgagttgaactaccccactcatgacttataaatgacagtcgttgtgcatgcgcttaagatttggagacattatattatgggaaccaagtgtcaagtatacacagatcatatgagtttgaagtatatattcattcagaaggatctcaaccttatgtaacaccgttggttggagcttattaatgattatgaattggagattcactatcacccgggcaaggcgaatttggttgcagataccttcagtcgaaaggagcatgttcattcagctgttgttgcccagctacccgatgagattg

SEQ ID NO: 48926 - DNA, 405 bp, Zea mays
  unsure (1)..(405): unsure at all n locations
tatgaagattcttcatcccaacatgggctagtcggcggtgtcttagccaacccatgttagtcttagcaattaagcatgtgttgagttcagctctatcaaaatctactaagtatagctgaccctttaacacacccttanaagctattgaatcatcactccttctaaagacagtgacacctacatcagtaaagagatagttgtagcccattttgcataattgagatacagaaagcaaattgtaatctaatgaatctacaagaaaaacattggaaatagaatggtcaggagatatagctattttaccaagacctttgaccaaaccttgatttccatccccgaatgtaatagctcgttggggatcttggtttntctcataggaggagaatatcttcttctcccctggca

SEQ ID NO: 48927 - DNA, 488 bp, Zea mays
  unsure (1)..(488): unsure at all n locations
tctaagggagaacacgtgataggttggactaacgtgcatttcgaaaaagatagaccttgtgcagcttgtcaagcaggtaaacaagtgggaggagcgcatcacggcaagaatgtgatgaccacttcaagacctctggagctgctgcatatggacctcttcggacccgtcgcctatctgagcataggagggagtaagtatggtttagttattgttgatgacttttcccgcttcacttgggtgttctttttgcaggataagtctgaaacccaagggaccctcaagcgcttcctcaggagagctcanaatgagtttgagctcaaggtgaagaagataaggagcgacaacgggtccgaattcaagaaccttcaagtggaggaatttcttgaggangaanggatcaagcacgagttcttcgctccctacacaccacagcanaatggtgtggtagagaggaagaacangacgctaatcgatatggcgaggacaat

SEQ ID NO: 48928 - DNA, 245 bp, Zea mays
  unsure (1)..(245): unsure at all n locations
aagggagaacacattntangactaaccaatgttcattttgagaaagacaggatttgtagcgcatgccaagcaggaaagcaagttggtgcccatcatccacacaaaaacatcatgacgaccgacaggccgcttgagctactccacatggatctattcggcccgattgccttcataagcatcggcgggagtaagtattgtcttgtaatagtggatgaatattctcgctctccttgggtnattttttt

SEQ ID NO: 48929 - DNA, 487 bp, Zea mays
  unsure (1)..(487): unsure at all n locations
tgtcaccacatcaactcctttctgccccgatgtcctcttcatcgggggaagagtggaatcatctcccatctccgatgacgagccaaccatgcctggggaagaacctcctcagcgagaagctcgccgacggaggaaccgacaccgaaatattcggcgacatcacgaagcaggggaacgggacccggcgcagcctgtatcccgagatgaaatttcggaggtgggagaaactcctgacgaatgagtctttagagagaggaggaactctcgccgacgtgatcgtcggcaggctcaagagcaagctgagcaggatgcgaggcaacgccaagagaaccctctcttcgcgcgaaacctgaaccctgacttcacccatgccatgaacacaccgagtgaggtcggnggagtattggctcggatagccgatggcctnccctagactctagacgcttaaggctatcggtgggtgggtcactcggcgggtaatcatctt

SEQ ID NO: 48930 - DNA, 428 bp, Zea mays
  unsure (1)..(428): unsure at all n locations
tgaaccaggacccgcgtcaccggaatagcgtaaccgtgctcaccggagttcattcccccgccggcgcacgtggaccgcgtaaatcactgagccattttcagattcaatgcacaggtagcctctacctcattccaggaagctcaccgtgccattggattggactaggtcgctgtggtttggccggcacacccgccgtcgacgaggacaaccgcctgcgcacgtggaccgagcgattccggccatccncgccggcgagccgtacgtcgttgtgaccgccagagcctccccgagctaaccctacccctcgccggacttctctcgtcgccggtaagccgcgccacccctctcttctctgcgggtactggttacatctgagagggaccgcgggtgagaggaagagaaagtcatggggctttttgaactgtcag

SEQ ID NO: 48931 - DNA, 111 bp, Zea mays
ttgatttttatcgtttcatgtttgccacagactaaaactttgagttttggggccctagttgcttctttacctgttcctattttatgtggacgcgctacgcctctcttttta

SEQ ID NO: 48932 - DNA, 483 bp, Zea mays
tcgcacctctgaactaactcggctgcgtcgttcttcgctgtcggccaataaaatcccgacctgaagacctttccgattagtgttctggaggctgcatgtattccacattgcccagcatggacctcctccagaagtcgcttcccggtggacgggagaatacacttcatgaggactcctgatgcaccccttctgtataatgtttccccaatgagtgtatagtgagccgactgtctggcaatgcgctctgccaagttcttgtcgtatggttcttcttcattttttatatacttgatgattagccttctccagtcattagagtctgactcgggctgatctataatgttgcactcttctgcctgatccattgagatactcggctgtattatttcttgcacgaagactccgggtgggacctgagttcgactggatcctagcttggacagtacatcggctgcttgtgtccgatctctttctacatgatgg

SEQ ID NO: 48933 - DNA, 469 bp, Zea mays
  unsure (1)..(469): unsure at all n locations
tgtgaaggttcttcatccncacatgtgctaagtggcgatgccacagccagcccatgctagtcttagctattaagcatgcatctagaccggccacttcttttgcaaaatcaactaaataaagtttgccgtctaatacacccttaaaagctagtgaaccatcacttcttctaaagacagacacatctacatttgtaaatagacagttatatcccatatgacataattgactaacagatagcaaattatatccaagactctccactaaaaacacattagagatagaatgctcattggagattgcaantttacctagcccttttaccttgccttgattcccatcaccgaatataatngaatcttgngaatccttattcttgacgtaggaggtgaacatcttcttctcccncgtcatatgggttgtgcatccgctgtcgataatccagctggaaccccccggatgcataaacct

SEQ ID NO: 48934 - DNA, 391 bp, Zea mays
  unsure (1)..(391): unsure at all n locations
tccacttttagaaattgttgtcttaagttcatgagttggtttttatttcttcgaaactttttcatcctccttcactacccgagcagcttgcctactcaggatgctaacaatccttttcctttttaccccttcggcccctttgtcaagcctcttgtaatccgggtattcgaagtttaacgtgtccatcacccgattcagccttcgtttcggccgggtgccgaaggcggnagtcattaattggtcttcctttttggtgtagttgccaaggatttcgttgcacattgtttcgatcatttctagcaactctntgcatggcttcttgaattgcttctcanatttaaatcagtaagggagccgaacaagttcgtactttntaccccccccttctttt

SEQ ID NO: 48935 - DNA, 184 bp, Zea mays
agcttggacagtgttctgcgatggttcttgtggaaccttcggtgcaggagcagttgcggtcctagtggcaccttcaaaagtcaaaacatgttatgcagccaaattggatctcagttgcacaaataatattgctgagtacgaagcacttctgttggggcttcggaagttaagggcaattagaata

SEQ ID NO: 48936 - DNA, 401 bp, Zea mays
gggccactggtccacggaatgtcgacaaccacgacgcggccaggccttcgtcgcacaggcggaggcggaggaggaagctctgctcctagcacacgcaagcattgagctgcctccagcgacaccggccgcagcggcaccccaccttgatgagtcgaaagcatgcactttcctcgtcgacggctccagcaatgacatgatcgaaggatggtgcctcgacaccagcgccactcatcacattatcggccgacgggagttcttcaccgagctcgactctagcgtccgaggctccgtcaagtttggggacgcctccggcgtagagatcaagggcaccggctcagtcgtatttactgccacgtctagtgagcacaggcttgggacaactggatgagaatggttcgcgt

SEQ ID NO: 48937 - DNA, 215 bp, Zea mays
  unsure (1)..(215): unsure at all n locations
agctngagacattattgcttatgtcatcatatatatgcaccaataaccactaaagcctncatgtnccataccantcatgtaatggaccacactgctnctcttgaaacataacaaaaatctaaccattnaaaatcagattttagataagagggacttataatctcatttccaatgatactcatcaagtatccttcttatgggaaaaaaatgaacca

SEQ ID NO: 48938 - DNA, 409 bp, Zea mays
  unsure (1)..(409): unsure at all n locations
tanaggatactattcaactaaagtaagatgaagttgataataggccaaggtatgaaaacttcctctccttcagttgttntagtattctatccttagtgggatgttccatagtataggttaatttccttgcaatataaaatgttcaatagtgcatataactttgacatcaactatatgtgtgcactaatttaaaggaatttaatctatctttttgggtttcaagaatgatgattcattttccatccacgtataaggattatcatttgtgaaaccctcccttgtgtttctaatgctctcttttctaagtgtttaaataaggtccttccaagtgctttcaaaatggattcaaaatccacggatataagagtcnntggtgtttcaatcattgagtttcaatgggtctcatatc

SEQ ID NO: 48939 - DNA, 361 bp, Zea mays
  unsure (1)..(361): unsure at all n locations
tctanagggagagcacattntaggattaaccaatgttcattttgagaaagacagggtttgtagtgcatgtcaagccgggaagcaagttggcacccatcatccacacaagaacatcatgacgaccgacaggccacttgagctactccacatggatctattcggccccattgcttacataagcatcggcgggagtaagcattgtcttgtaatagcggatgattattctcgcttcacttgggtattctttttacaggaaaaatctcaaacccaagagaacttaaagggattcatgagacgagctcaaaatgagttcggcttaaggatcaagaaaaatagaagcgacaacgggtcggagttcaaa

SEQ ID NO: 48940 - DNA, 67 bp, Zea mays
ctggacctcattcgcccgatagcttacataagcatcggcgggagtaaatattgtcttgtaattgtgg

SEQ ID NO: 48941 - DNA, 471 bp, Zea mays
  unsure (1)..(471): unsure at all n locations
nggctccaatccttgagtgctcctaaggtcgggagggtcctggaggctcctagcttataggatcctagagtcttggaggcacctataggccaaaagggctctggacctccggtagccttgagggtatctcgagatttagttgtctaggccaaagggccttgaagaccacgagaactatatgatttgttcccccagcctagagagcatcagaggtgtggaggaccctggaatttagttggaaatgggtatggcctcctaagggcatgagccctanggtacgagggtggcatgaggttggttcactttangttttcttttgctaatgatatctcatttaagacgtactactagtatatagcggtatggccttctctaacgctgacaactatattatttaccattatgtaacattcttgccctgctttccttataaggttaactgtcaaaaatagtttttgcatatgataatat

SEQ ID NO: 48942 - DNA, 487 bp, Zea mays
agcttcattggtccatcgatcagctagtcctagtaacacgaccgtttgtattcactgcttatcgggatgtataaataggatggctatctatgagttttaacgacattcattgccttcgtgctattttgctgctgaaatttttactacctccgaaggtctgttcacactttcaagctttcaacaaagcttcaacttgtcttacaatggctaggattcgcacgaccgttagattgggcaacgagggtgaggccacatacatgattgagacagcttcgatctcggaagtgatgagggagcccgacattgctgagcctagtactagggaagaagtgtctacttctggaaaaagtaattatgaagcccaacgtgaagccgaatttgatggtgacgaagaagatccgaatattctttgtccgagtaagcctagccacattgtagtgggaaatctattgtgaacgctacagacttagatgtgatgaacagactt

SEQ ID NO: 48943 - DNA, 501 bp, Zea mays
  unsure (1)..(501): unsure at all n locations
actaagcttctaagggagagcacattntaggattaacaaatggttcatttgagaattacagggtttgtagcgcatgccaagcaggaaagcaagttggtgctcaccatccacacaagaacatcatgacgaccgataggccactggagctcctacacatggatctattcggcccgatagcttacataagcatcggcaggagtaagtaatgtctagttattgtggatgattattctcgcttcacttgggtattctttntgcaggagaaatctcatacccaagagacattaaagggattcttgagacgggctcaaaatgagttcggcttaaggatcaagaacattagaagcgacaacgggacggagttcaagaactcacaaatcgaatgcttccttgaggaagagggcatcaagcatgagttctcttctccctacacgccacaacaaaatggtgtagtggagaggatgaatagaactctattggacatggcgagaaccatgcttg

SEQ ID NO: 48944 - DNA, 285 bp, Zea mays
gctttatgaaatggacgcgaaaagcgcctttctcatcggatctatctatgaagagggctatgttgagcaacctcctagctctgaaatagtgagtaccctaaccatgtgtataaactctctaaggcgctatatgggctcaagcaagccccacaataatggtgtgaatgcctaagagattttcttatcactaatgagttgaaagtccaaaaactgattctacttctttatcaaaatcttgcaaaagaattgtttgtatgcccaaatttgttgtagtataatatatgg

SEQ ID NO: 48945 - DNA, 477 bp, Zea mays
  unsure (1)..(477): unsure at all n locations
tgtagtccccaactctttgacccaccttagtatgacccattactgctcatttaatcctagcaatgcctagcgtaggagcgtgactaagctaatacaacataagagtttgaatgtagcatgattaacaacatggtgctaccatcaaataaaatattcttgataatgggaatgtcaggctttggaccaatcaacaaaacacataagaaatagcttcagagaaagatctatcatgtaagtgtctagaggcctatattagatctaagtggtcccatatgccaatcaccttcactcaagatgaccttcggcttagagattacccacataatgatgctatggttatcagctgcaacataaaaggcttcatcatccacaatgtgttggtcgatgatggaagtgcaacagacataattntctccanagctntcatgcaaatgcaagaaaataaataaatatcgcaagagtgaatggatccattgt

SEQ ID NO: 48946 - DNA, 185 bp, Zea mays
  unsure (1)..(185): unsure at all n locations
cggacctaatcacctgcgctgcactacctactactgaattggggtcactaccttagtcgttggtagtaatgccaatatttaggtntatcgatccttttgtttcagaaatttttattttcgcgaatgatgggggagatcatatctcccattcttcttttccccttttctttgtttaagggggtgaa

SEQ ID NO: 48947 - DNA, 447 bp, Zea mays
  unsure (1)..(447): unsure at all n locations
tcaaaggtgccatcttgatactttcttgataactgttattgtatgaaaactctgctaggggcaaacattcatcccatttttgtgagaagtccaggacacatgcccgcagcatatcctcaagtatctgattaactctctcagtttgtccactggtttgaggatgataggccgaactgtggagcaatntggtacccaaggatttatgaagttcttcccaaaacttggatacgaactgaggtccacgatccgacactatggtctttggaataccatgcaaactgagaatacggctgatatataatgctgcataagtggctactgtatanttggccctgacgggtaagaagtgggcaatctttgtgagtcgatcaacgataacccaaatagaatcataccctttggccgtcctgggcagtcccacaataaagtccatactgatgtcttccc

SEQ ID NO: 48948 - DNA, 94 bp, Zea mays
  unsure (1)..(94): unsure at all n locations
ttgtncctttggggctttgaaagctagggccatggggataaaatgagaagtacttaaatctgaatctccaatcatccaccgccccgttgnaaaa

SEQ ID NO: 48949 - DNA, 453 bp, Zea mays
  unsure (1)..(453): unsure at all n locations
tcatcatagagganatcttgagcattgtacacctcatgactaagattgtcatgatcttgcccatcgtaattttgatccctgaagttgttcagattttcatgtgctttgatattgcacatttcttcagttgcttcatcaatctttctttggagctctgaaagatgaagcatcttctccttgcgcttctccacttgctggtgaatggctntaaggttgttgattttctcatcaagctcttcttaacaaggggcgagctaatggccttcttcttctagttccttgcctctctgatgagagcttcattccctttattgtgatcgatcggtgcaaggatggagctagttcttgctgcttccttcggtggcatggtgtatgttgatgaggtagtgaaatcaccggaggtgggcgccaatgttggtcacttgttntcaattgctatatgaaatcaaaaac

SEQ ID NO: 48950 - DNA, 463 bp, Zea mays
  unsure (1)..(463): unsure at all n locations
ntaagctcnttgacaagaaaatcacttcacccagttntattataaaanaatgcatcaatgcaggaatggaaattttgagaggttaaactaggtgtgaagcaggtatatgcatagacatgctttctcttccttttataaaagatatgtaaagaatgtatatgagaggaagatttaggtacatgtataaatgagaggaagtagtttacccttttgtacctttacatagagatgctctcttcattgtgctttgtccttagtcttggttacttaagacctatattcaagatagtgtatggaaatatttccacaagcgagagttctacaactagtgatccttttctaagtcattttgtcatatatcaagtagatcacaaattgcataaatttatcctgaattctccttttgacttagtgcatatcaagagagacattaattgatagtatatgaggcactaagcaacat

SEQ ID NO: 48951 - DNA, 451 bp, Zea mays
  unsure (1)..(451): unsure at all n locations
tgtcttcgcctcagtataccacccacaatccaacggagttgtggaacgcgcaaatggcaaaattntcacagctgtcaagaagatgctcctcgacgataaaaagggcaagtgggccgatttgttacctgaagcggtctgggcattaaacacgactgagtgcagggcgactgggttcacccctttccgccttctatatggatcggaggccatgaccccgcaagaaataaagcatgggtccccatggacagtcccgtcagctgtccccgacgtggacgagcccacttcgaaggacctcatcgacggagatcgcgtcttcgccctacaggctctaaataaataccaagcccaaacaaaggcatggcgcgaccacacagtcatcccgagggaattcagcgaaggagacctcgtactcgttcggacagctcggacagagtcccggggcaagctggaa

SEQ ID NO: 48952 - DNA, 212 bp, Zea mays
agcttatgaagattcttcatcccaacatggtctattcggcgatgccagagccaacccatattagtcttagcaattaagcaagtatcgagttcagctctattaaaatcaactaagtatagctgaccctctaatactcccttaaatgctattgaatcatcacttcttctaaagacagtaacacctatatccgtaaaaagaacattgtaacccat

SEQ ID NO: 48953 - DNA, 379 bp, Zea mays
  unsure (1)..(379): unsure at all n locations
taaggacggaagtgcactttactcgnaaagatattgtggtgttggatgttgaatacagnggntgtgaaccattcaatctcgtgatgaacagttaaacaacgcagatcctaattaaaccctaagttgtacgaaggatcccagcattgccaagacacgggaacttaccacgcactcctcaacgcatcgcgtgaatgcagcattcctccttttgaccggtgcagcggtcacactggactccgcctctgtgctcgggaacgcggccaggtccatcccggagcctcggaagaagcgcgccgccctcgcctgcgacttgagcggtgacggctcgctcgtcaccacgaacacagggaacacgcccatctgcaggaatcgcagacac

SEQ ID NO: 48954 - DNA, 455 bp, Zea mays
  unsure (1)..(455): unsure at all n locations
taattcctattccaatatgttactctcttgatcgcatcctctgcttgtttgatcatagaataacatcaaatgacacttagtgcctcatattctttccaatcgatacctctcttgatatgcactaagttaaaaggagaattcatgattcatttatacaatttgtgatccacttaatatatgtcaaccatgacttataaaaggatcactagttgcaagaactctcttttgtgcaaaatattttcacacattgtcattgagcataggtcttaagcaaacaagactaaggacaaaagcacaatgaagagagcgtctacaagtaaaggtacaaaacgggtaaaacttattcctatcatttacatatgtacctaaaatcttcctcttatatacactctntccatatcttgtataaaaggaagagaaagcatgtcctttgcatttatctttgcttcatacct

SEQ ID NO: 48955 - DNA, 444 bp, Zea mays
  unsure (1)..(444): unsure at all n locations
tctaaatggagaacacgtgatatgtctaactattgtaactttcgaaaaagatagaccttgtgcagcttgtcaagcaggtaaacaggtgggaagctctcatcataccaaaaacgtgatgaccacatcaagacctttggaattgcttcatatggacctcttcggacccgtcgcctatctaagcaaaggaggaagtaagtatggtcttgttatagttgatgattcttcccgcttcacttgggtattctttntgcaggataaatctgaaacccaagggaccctcaagcgcttcctaaggagatctcaaaatgagtttgagctcaatgtgaagaagataaggagcgacaacgggtccgagttcaagaaccttcaagtggaggagtaccttgaggaggaagggatcaagcacgagttcttcgctctctacacaccacagcaaaagtgtgt

SEQ ID NO: 48956 - DNA, 402 bp, Zea mays
  unsure (1)..(402): unsure at all n locations
ntacgaagagggaccttcggctatcttatacaaacagcttcatccgatgatcacttctttctataagaccttcggcgacgaagcatagacccaacagtagcccctttcgcggtgctagatcgtttttcgtaacgagcttgatccgtgaaaaaagtttcttaagcttcggagcgccgaaggtcacaaaaacaccttccctgagctcgttgtcgagaaacgattcaatttccctgcgcgtagcggccccaccttgcagagttactgttcggtctctgcggtccaccgtacagcgagtgcaagcgggtgtccgcctggtgtaaaacttctggcgcttcgccttcttacctgcggcactatataaacagacgagtaggtgtgaagttaccacagcatttactgcta

SEQ ID NO: 48957 - DNA, 420 bp, Zea mays
  unsure (1)..(420): unsure at all n locations
aaatgtangggagctgaaggtgatgctgttcatggtgacaggactgaagacccgggagcagaggctgttgttcatgggtaaagagagggatgacaccgaccacctccacatggttggggtgagggacaaggacaaggtccttcttctagaggacccggcgctcaaggacatgaagctccgggctctctcagccccctaaacgaccttcttcttttattcaattgtaacccgcaccgcagcttgctatcgtgctaactattaccactgcttattagttacagagtacaagatcgtactactacttagtatctcgaaggtacttctagttcctggaagattttttataatccggaatccgagggttttgttctatgaagccctcttacttagtccactcgtactcttagtgccactccatgg

SEQ ID NO: 48958 - DNA, 458 bp, Zea mays
  unsure (1)..(458): unsure at all n locations
gtgacctataaaactcagctgctcaggccttctttntttccacagcaacaaccttactggaacactaccccacttaaaatgaatgagggtaggactcttgaatctcggggatttaaaatccttgaagtacctcataacaagggtgttatggggccttctcctgctgttgctgcttgagcangctgcggagagatgactgacacagagttgattttgggagaaccttcttcttatcttctcttcactatcttcttttctcttcttactgcctctttctttctctttgctcttcccactggaggattctatcaaagagtattaccatcatacagaggaggaaaccaaagactatgaaccatgtacaacagtcttcaacccaagaatcaccaagcattgtgatcttaagggcgagggagtggaaaatggagtngcttgcgatttgacagaggggattctat

SEQ ID NO: 48959 - DNA, 198 bp, Zea mays
  unsure (1)..(198): unsure at all n locations
cgcaggcatgcaagctntgacatatgcgcaagggacatatgagttaaaaatgtattttgaaagtgcatccatccctttttgtgaattttggtgatttggataacaacacatttaaaggtctaacaagtctgctaagtgttgaacaggaaatttagtatgatgaacatacttgaatagtgtataatgatcagtgaacaa

SEQ ID NO: 48960 - DNA, 411 bp, Zea mays
  unsure (1)..(411): unsure at all n locations
atatggaagaaagtgcaggactcctctatattgggatcagactggttatagacagttctttgagcctgaactgattcaagaagcagaagaacaagtccgtataatacgagagaatntgagggtggctcaaaccaagcaaaagagctacgctgataatagaagaaggccactggaatttgaagaaggagattatgtgtatctcaaggtgtcaccacttcggngaatgaggagattcaaagtcaagggcaaattgtcccctcgctatattggaccattcttgatctttacgcgagttggggagatggcataccaactcgagttaccggatagtctatcagatgtgcataatgtgtntcacgtatctcaactcaagaagtggtctcgtgttcccgacgaacagttacccatgga

SEQ ID NO: 48961 - DNA, 51 bp, Zea mays
ggcgaaaggtcttagataaagaaccgagtacatgaaatacagccctcgggt

SEQ ID NO: 48962 - DNA, 476 bp, Zea mays
  unsure (1)..(476): unsure at all n locations
tctaaagggagaacacgtgataggtctaacctttgttcatttcgaataagatagaccttgtgcagcttgtcaagcagggaaacaggtgggaggctctcatcacaccaaanatgtgatgacaacatcaagacctctggagctgctacatatggacctcttcggacccgtcgcctatctgagcataggagggagtaagtacggtctagttattgttgatgagttttcccgcttcacttgggtgttctttttgcaggataagtctgaaacccaagggaccctcaagcgcttcctcaggagagctcaaaatgagtttgagctcaaggtgaagaagataaggagcgacaacgggttctagttcaagaaccttcaagtggaggagttctttgaggaggaagggatcaagcacgagttctctgctccctacacaccacagcataatggtgtggtagagaggaagaacaggacgctaatcaata

SEQ ID NO: 48963 - DNA, 477 bp, Zea mays
tcttggaagcacgcaaatccctgatgggggaatccatggttgataacagctgtccaaatcgcagaacctcatcttgggctacttgcagctcatggtgatgatgatccaggtctgacatagtgaagtggtggctcctctccaatatagtcaaagagttactggcgtcacggtataacctgtccagattgtcacgagaggccgcgagtgcttgtttctcctcctacgaacaagaagcaacattcagcacccaatcaacaatagcatggcaaagtcaaccaagggagtttacctcatgtgccatccttttagagtcaagttgggcattgagggaagaattcaacaacatgcactgtccaaagaattagaggtctgggccaagtcggcttgactttgagaatacttctcctcaaggtcagagcaccgttgggccaagtcggcttgactttgagaatacttctcctcaaggtcagaagcact

SEQ ID NO: 48964 - DNA, 484 bp, Zea mays
  unsure (1)..(484): unsure at all n locations
tcagggttcgcctattcacccccctctaggcgactntcaatgggtatcagagcccggtgcttcattagagtctaacaacttgaagtgatgtctgccgaacacgccaagagggagatagtcatcagcgaaaagaccgaaggctcgagaaggaagaacgacgaacggactccgtccgacgataagcacaaggtggaaaccgcttcctccatcaagtcacttaggaagggtgataagaagaaaaagaaaatgaagaaggtggtctactacgagaccgactcttcgtcaccttccacatccggcgccaagtctacaacttcgaaacgccaagagcgtaggaagtatagtaagatgcctctacgctatcctcgcattcctaaatgtgctcctttactttccgtacccctaggcanaccaccatantttgatggtgaggattattgtatgtggagtgatatatngaggcaccatctaacctcactccatg

SEQ ID NO: 48965 - DNA, 463 bp, Zea mays
  unsure (1)..(463): unsure at all n locations
tgaggctgtgtatagattaccgccctcttaatgcggtaactatcaagaacaagtatcctttgcctcgtattgatgttctctttgaccagatggtcggggccaaagtgttttccaaaatagaccttcgctctggctaccatcagatcaaaatacgagcaagtgatattccgaagacggcattctcaaccagatatgggtcatatgaattcttggtgatgtcattcgggctgacaaatgcgccagcatatttcatgtatctgatgaattctgttttcatgccggaattggacaagttcgtagtggttttcatcgatgatattctggtgtactcgaagaacgaagaagaacatgccgggcatntgcatgtagtgcttcaacgtctgcgagagcaccacctttatgccaagctatccaagtgtgaattttggctaaaggaaatcaaattctttngtcacactatctc

SEQ ID NO: 48966 - DNA, 253 bp, Zea mays
  unsure (1)..(253): unsure at all n locations
agcttgggtgtttagttagctccaataaactctctagtctctcccgtctgnaagttgatagcgttaagttacatagcgtggtagtaggtttgagaaaggagtgagtctgtcgctttataatctgttgcttttttttctgtttggtttataaaataaaatggactgaaatgaagcaccaccgtcacttctgaagacagaatgagctaacctatataagtaccaactcatacatgctctcgtggtattggttggg

SEQ ID NO: 48967 - DNA, 368 bp, Zea mays
  unsure (1)..(368): unsure at all n locations
tctanagggagagcacattntgngactaacctatgttctatttgagaaatacagggtttgtagcgcatgtcaagcagggaagcaagttggtgttcatcatccacacaagaacatcatgacgaccgacagaccgcttgagctactccacatggacctattcggcccgatcgcttacataagcatcggcgagagtaagtattgtcttgttattgtggatgattattctcgcttcacttgggtgttctttttgcaggaaaaatctcaaacccaagagactttaaagggattcttgagacgggctcaaaacgtgttcggcttaaggatcaaaaagattagaagcgacaatgggacagagttcaagaactctc

SEQ ID NO: 48968 - DNA, 471 bp, Zea mays
  unsure (1)..(471): unsure at all n locations
acgtgacactataaaactaagcttctaaaggagaacatgtgttatgtctaacaaatgtaactttcgaaaaagatagaccttgtgcagcttgtcaagcaggtaaacaggtgggaagctctcatcatagcaaaaatgtgatgaccacatcaagacctttggagctacttcacatggacctcttcgggcccgtcacctaccttagcatcgggggaagtaagtatggtcttgttattgtagatgatttttcccgcttcacttgggtattctttttgcaggataaaacagaaacccaaaggacccttaagcgcttgctaaggagagctcaaaatgaatttgagcttaacgtgaaaaagataagaagcgacaacgggtccgagttcaagaaccttcaagtggaggagtaccttgaggaggaaggaatcaagcacgagttctncgctccctacacaccacagcanaacggtgtggtag

SEQ ID NO: 48969 - DNA, 461 bp, Zea mays
  unsure (1)..(461): unsure at all n locations
tcgtcatctganagggaaatgccctgaagaaaagacatgatctcagttctccaatcttcgctataaacaggagatatattgagcactgctctttcaataaggtcaaccgaaggtgcttttattgtttcaaagaatacttccgaaggtaatggcagcccctgtgccgctgacttggctagtagatcagcgtgctcattttctcctcgtggaatattcttgacagaaaacccttcgaaggacgcttcaagtcttcgaactgtatctaagtatttctccagctttggatctcttgctttgcaacttttgtcaatatggccagaaattacttgggaatcagttttgagaaccgcccttcttatacccattgccttcaactttcgaagacccaaaagcaaagcttcgtattcagcaatattatttgtacaactaaagtcaagttcactgtgtagcatgtctgactt

SEQ ID NO: 48970 - DNA, 282 bp, Zea mays
ctctatcaatatcactaacatagttgcacttaaacaccttaaagcttggaacacactcctttaaaacgtgcaccactcactaagaaactgtagccgttgcttatgaatacaaagaaatgaatcagtgactacataaaaacatgaaagacgggagaaataatattaccaaccttgccacctgatacatcccatgatactcggggatcttgtctataagagaaaatgtctctcctgctgggtggcaccgtgtatatcattgaccccgagataactcaacaatta

SEQ ID NO: 48971 - DNA, 479 bp, Zea mays
  unsure (1)..(479): unsure at all n locations
tgacattgtctccctggtggaatccaatgccatccttaataccagggcgtctcccgctataaagcatgctacgagcaaatntaaattttttattttctaactcatgctcgacaattttagcatctaattntgctatatgatcattttgttgtttaatcatagcaatgtgatcatggatagcatcaatgttaatatctctacatgttggggacttgttctcaaatgctatgaattaagaacaaggcaacataaaatgttaaatgttaacgtccttcgtccgcgaggcattattcccttgaggataatgaaccttggacgaaggttgatgagaatacgattacgaaggttaagtcttcgtaatcgaattttaatagattgtataagataacatataataaagggtatcaaaggtaaatgaatcatatacgaatcatattatatttacttaatatatagaatcattaaatacangtatacct

SEQ ID NO: 48972 - DNA, 494 bp, Zea mays
  unsure (1)..(494): unsure at all n locations
tgtcgatgaggagccgagaggcatggggtatggatttatactccgcgtcatgtccgaatcccagcaagaatttcccaaaatcttgtagtttgttgcggagcacagcgatggatatgtgcgagggtttgttaggaggaagaaggatgaggtgacaaggtgtccccacccgtcagtgagtaactgcaaacgcaggcgctgggagggaataatgggccgactggcatgccagttctacggaagatgggccagcacgaggggaaaatggcccaaggcgccaaatggggtcttctcctttttatttactcctgtctgcattttctccactaaatttcaaactctagtatttgaattcaaacttgtttgtgagtttatacacaggttgaattcccacataaggttatagtatacacaaatataaatatatatatatatatatttggatattcttttccatttctttttcttattnttcttgtctatttcaagttctattt

SEQ ID NO: 48973 - DNA, 213 bp, Zea mays
caccgcagctgcagcttatattgaaaacgtgccctgagaagatcattcatcctcatcttactatgtactgtgaaattggagcacttttttcctgagctcgaccgaagtgcttttattgtttcaaaaaatacttccgaaggtaaagggagcccatgtgtcgctgatttagctaataagtctgcatgctcattctctccccttgggatatttttt

SEQ ID NO: 48974 - DNA, 462 bp, Zea mays
  unsure (1)..(462): unsure at all n locations
tgtgaaggttcttcatccncacatgtgctaagcggcgatgccacagccagcccatgctagtcttagctattaagcatgcatctagaccggcctcttcttttgcaaaatcaactaaataaagtttgccgtctaatacacccttaaaagctagtgaaccatcacttcttctaaagacagacacatctacatttgtgaatagacagttatatcccatattgcataattgactcacagatagcagattatatccaagagactcaactaaaaacacattagatatagagtgctcattagaaattgcaattntacctaaaccttttaccttgccttgattcccatcaccgaatataattgaatcttgggaatctttattcttgacgtaggaggtgaacatcttcttctcccccgtcatatggtttgtgcatccgctgtcgataatccagcttgaacccccggatgcat

SEQ ID NO: 48975 - DNA, 221 bp, Zea mays
agcttctaaaggagttggagcagccaactcgtcttagccatttctattaacaacaaccgggtactgaacctcaacactggagcaggagactactggttgtcgcttggaaaaccaagagatgaggttggcctccataaaaccgcataactaaagttagaccggcgggagttcatgcacccgacctaatcgagtgcccatgtaaaagaatatcttgtgggtgg

SEQ ID NO: 48976 - DNA, 393 bp, Zea mays
  unsure (1)..(393): unsure at all n locations
tgtctaggaatggcctatntntacttacagccttcacgagtttgtcttgatcaacatatagatgatggtcactaaatgacacaagttatatgtttctttgtttggtatgtaactcactttagaccaatctccctgatatttatcgacttttacgtgatgaatgaaggcccgggtcacatcccaatgcataaaattcctgataacatggagaaacagttggagtggtgtaatgaagcgcctttctatacattgggtcctttgacaactgatattgcacctggttatgatcacatcacttcagccattggtgctgccaacattggagctcttggcactgcacttctttgctatgtaacaccaaaggagcaccttgggttgcccaatcgtgatgat

SEQ ID NO: 48977 - DNA, 455 bp, Zea mays
  unsure (1)..(455): unsure at all n locations
tataaaactaagcttatatcatctccttccnctacaaaactttgtcaagtatattntggtacccatcgctcgatgggtccatcacggttagttaacaaagatctaggaacccaaaagtcctttgtgttagcattaggtaaactcattacctttctagcacaagttgcaattttgggttgcctagttacatgagaagtaattgacaagctatgagtgggagaattacctatgggacaatccttgcattgatgtcccttctttcggcatatgtagcataggcgatcttcaactcttgaagatttcttccttccttgcttcttgcttgctacatggttagtgaatattttcttttctaaccctatgcctttntgttttaaatggggacaagatctaagcaagtgtcccttcttagagcatttaaaacaaagtttattatctcttgtaataatcaagcc

SEQ ID NO: 48978 - DNA, 483 bp, Zea mays
tctaaagggagaacacgtgataggtctaaccaatgttcatttcgaaaaagatagaccttgtgcatcttgtcaagcagggaaacaggtgggaggctctcatcacaccaaaaatgtgatgacaacatcaagacccctggagctgctacatatggacctcttcggacccgtcgcctatctgagcataggaggaagtaagtatggtctagttatcgttgatgacttttcccgcttcacttgggtgttctttttgcaggataagtctgaaacccaagggaccctcaagcgcttcctaaggagagctcaaaatgagtttgagctcaaggtgaagaagataaggagcgacaacgggtccgaattcaagaaccttcaagtggaggagtttcttgagaaggaggggatcaagcacgagttctccgctccctacacacctcagcaaaatggtgtggtagagaggaagaacaggacgctcatagatatggcaag

SEQ ID NO: 48979 - DNA, 173 bp, Zea mays
  unsure (1)..(173): unsure at all n locations
aagatcatgttcaaacatggttttaaaaaaagcaaatggcaaccccaataaaaacctcattgnancctctnaaaccaaatnacagaaagggccanacatgtgagaataaagaatctggcttgggcccattataaacattaaagtatactaaataagcaacaacccagattatg

SEQ ID NO: 48980 - DNA, 477 bp, Zea mays
  unsure (1)..(477): unsure at all n locations
tctanagggagaacacgtgatagggttgactaacgtgctattcgaanaagatagaccttgtgcagcttgtcaagcaggtaaacaagtgggaggagcacatcacagcaagaatgtgatgaccacttcaagacctctggagctgctgcatatggacctctttggacccgtcgcctatctgagcataggaggaagtaagtatggtctagttattgttgatgacttttcccgcttcacttgggtgttctttttgcaggataagtctgaaacccaagggaccctcaagcgcttcctaaggagagctcanaatgagtttgagctcaaggtaaagaagataagaagcgacaatgggtccgagttcaagaaccttcaagtggaggagttccttgaggaggaggngatcaagcacgagttctccgctccctacacacctcagcanaatggtgtggtagagaggaagaatangacgctcattgatat

SEQ ID NO: 48981 - DNA, 227 bp, Zea mays
ctgcagcttggattctttgaagtgttttgtgcttgctcagttgtccccttctcaagctttttcaccatattatcaccggtatcttgagaaggttgagcatgacactttccttccaatgaggtaagctccttattaacatttccacttcttccttgagctctttattccttgtgtgatagaaatatcactcattcttgaaatttttacctcacatggagaaaggcttt

SEQ ID NO: 48982 - DNA, 487 bp, Zea mays
  unsure (1)..(487): unsure at all n locations
ggaagtcacctcaagccggtaataaaatcataccttgtgcttaccttttcctcgaaacttggaatttccttataatgctntgatatgtacaggatgacgaagccaaagaacacagagccgaggcttagcagacgatccgaagctcaacagatggtgatgaagctcgaatacctagctgtggaaaaattctaagaaaactcttgtattaatcctttataaagaatattgtaacttaagaatcagattctactctgtaaatntgtccataccttgtaatatatttttacctttccatcaatgtatgaagtgctttgatgtggacgaaacttgtattttttgagccgaaggcgaaaaacacctttccttcttttcatacacaacgaagcataaatctggctttgaaactgtattcttatagccgaagcaactgtctgtatntgtatgggatgatgatgatgatcctatgtatgtctaaatgaatggttat

SEQ ID NO: 48983 - DNA, 203 bp, Zea mays
agcttcgtcgcctgcaggagatggatgggctctcgagggagccatcgccggaaatgcccgacgacgactacgacgatgaagatgatgacggggaggacgacatggccgcccgcctcggccctcgccccggcttggggtttggccaggagccgtcaaaccagcccccgagcgggctgatgccgtcagtccccggggtcaggacg

SEQ ID NO: 48984 - DNA, 414 bp, Zea mays
tgtcttaagttcatcctcgttcttcatccagaattgatgtttacctgagtagcagtccaataagctcatgagctctgaagtaatcgctgcatccacaagggaatctattcttggcaatgagaattcatccttcgggcattccttattgagatctgtgaagtcgatgcacattctccattttccattagctttctttaccatcacagtattagccagccactctgggtatgttacttctctgataacaccggcactcataagcctttttactttgttccttgcgccttcggctttatcatcagatatttttcgaagcctctgcttcttggcctggaggctgggtctacattgagtgagtgctcaatgacatctctactgacaccacagagatcattggctgaccaagcaaaaaca

SEQ ID NO: 48985 - DNA, 413 bp, Zea mays
  unsure (1)..(413): unsure at all n locations
tggctgtcttatgcgggtagcaaatctaaatctaatttctaaatttaacttggtcaaaaagtctaagtgccatgtgtgtgttgaatcaaaacaaccccgcaagcctcacaaggctgctgaggcgaggagtttggcacctctagaacttattcattctgatctgtgcgagatgaattggaatttgaccaaaggtggtaaaagatactttctcacttttatagatgactccactagattttgttatgtgtatctcttanaaacaaaagatgaagcgttcaattattttaagacctataaagctgaagttgagaaccaacttgagaggaaaataaaacgtttaaggtccgatcgaggtggagaatatttctctaatgtgttcgatgagttctgcgtggaacatgatattattcatg

SEQ ID NO: 48986 - DNA, 65 bp, Zea mays
aatgaaccatcacttcttgtaaagacagacacatctaccttcgtgaatagaccattatatcccct

SEQ ID NO: 48987 - DNA, 452 bp, Zea mays
tgccttcgcctcagtatatcaaccgcagtccatcggagttgtggaacgcgccaatggaaaaattttcacagctgtcaagaagatgctcctcgatgaaaaaaagggcaagtggtccgacttgttacctgaagcggtctgggcgctaaacacgactgagtgcagggcgactgggttcacccctttccgccttctatatggatcggaggccatgaccccacaagatataaagcatgggtccccgcgaacagttgcgtcagctatccccgacgtggacgaacccacttcgaaggatcttatcgacggagaccgcgtcttcgctctacaggctctaaataaataccaagcccagacaaaagcatggcgcgacctcgcagtcatcccgcgggaattcagcgaaagggacctcgtactcgtccgaacagcttggacagagttcatgggcaagctggagc

SEQ ID NO: 48988 - DNA, 425 bp, Zea mays
  unsure (1)..(425): unsure at all n locations
tatcccatcgactgcaaattccagtttctgcaattcanaagtaaatacttctcagcatataatattatgtagtacaacatacagtatttataccattattacctttctggcattatcattttgttcactgacaccactaacattcattattgcgtgatcatgcaaattaatctgtaattgacaacacattttgttaagctcaatcataacccaataactcaaacgtataaatcatgtatatgtataactgcaaatcagtaaagttgttaaagatattacctcttctaatggacgtactggtatatgtatttgatcattgaccacaccttgttcaagtataatagatacgtcttgaatttcctgaanatttggatgaaagatcattatacatcctttacaaataaacattaacaacagaacgattc

SEQ ID NO: 48989 - DNA, 432 bp, Zea mays
  unsure (1)..(432): unsure at all n locations
taatctcagaggactcattaccatagtcatgagctnttctctccttttctcaccagctcttcacgtaaaaccattcactagtccacccggttggccatttagtatggtagccaatcatcggggccttggtacccttccggtatgcaaaattatagcacccgaagttcttatgtagaccatcggctctggccttcgtctgatagtgcagttcatgcactcggcaaaacccttcgtcattcacacttttgccttggctttggagagcccatatgtaaatactgagcctaacaatggcattcagtgtcagctaatggagatatatttcaaaccttttcaaaacctcccctatcatatcgtacagggggaaccgaagccctgctctgaagaagcttttaaacacaacgacctcatctttctttggctctggaacta

SEQ ID NO: 48990 - DNA, 139 bp, Zea mays
  unsure (1)..(139): unsure at all n locations
gactccgggcgcgctaagacccggccaacccggcccccgccccctgaccacccccgccacgntataaagcccccccatggctggctgccttnnccgttgcctcctccgtacctcgcctgacttacccgagccagccatt

SEQ ID NO: 48991 - DNA, 434 bp, Zea mays
tagaaaaatctggtatgaatctgcgataatacccagctagtccaagataactccggacttggtgaacagttggtgggggtttccactccagaatatctttgaccttgctaggatctaccgcaattcctttagccgataacacgtgccccaaaaattgaatttcttccagccagaacgcgcacttactgaacttggcatatagctgatgttccctgagacgcatcaatacaatccgtagatgctgagcatggtcctcttcattcttagaatatatcaagatatcgtcgatgaagactaccacgaatttgtccaactcgggcatgaacaccgagttcatcaagtaagtgaagtgggcaggagcatttgtgagcccgaaagacattaccaagtattcaaacaatccataccgcgtagtaaacgcgggtttcggtata

SEQ ID NO: 48992 - DNA, 203 bp, Zea mays
  unsure (1)..(203): unsure at all n locations
agctngcaacctgtatgtggtcagaactgttactcccagctatggatggatcaaagtaattaaggctagtttacaagaaaatgaagataagtcttactaaaaagatcaatatctaaatgccttggaactataaactatgaagtatataagacacatcttacagggagtaaaatataacaagatctggtgagagaacatacccc

SEQ ID NO: 48993 - DNA, 366 bp, Zea mays
  unsure (1)..(366): unsure at all n locations
tctanagggagaacacattttatgactaacaaatgttcattttgagaaagacagggtttgtagcgcatgccaagcaggaaagcaagttggtgcacatcatccacataagaacataatgacaaccgacaaaccactggagctcctacacatggacctattcggcccgatcgcttacataagcatcggcgggagtaagtactgtctagttattgtggatgattattctcgcttcacttgggtattctttttacaggaaaaatctcaaacccaagagaccttaaagggattcttgagacgggctcaaaatgagttcggcttaaggatcaagaaaataagaagcgacaacgggacggagttcaagaactc

SEQ ID NO: 48994 - DNA, 437 bp, Zea mays
  unsure (1)..(437): unsure at all n locations
ggaatctggattaagcgccatgacgaaagaagatctcgcttacagtcttgcgtacaacagcctgaaggataggaattaaacacttgaaaaacccccttatttttacgcaactcattcctttcttcttatatgaattctttttcgtatagggcctgatcctaagcaacgcactaagagcccaaaagagcgccgaagatgaaagctatgaaattgcgtttaataatttacgctccgaagttatcagactgagaaacgaagctntggaaaaagataaaattctgcttacactggtaaataaagtgaaaaaagacgaagctgcttcaaaggcccaggccgaagctcataaacgcgagattaaagatcttcagaaacagctggctagagctaaagaggagcgcgcgctngatgaaacgaaacgagaacttagttgatttatg

SEQ ID NO: 48995 - DNA, 403 bp, Zea mays
  unsure (1)..(403): unsure at all n locations
cttggtcaaatcattcgtcaagtgcggagatttatttcatcaatcttatgaacaaaacttgnggaaaaacaagtgcctgcaggcaaactaaaggttgtaatcatgatgtaatagagagcaaatcgctaaggattcacaaaagacatttagcatgagttaaatcactccttanacataaagataaaaggaaagaagcatccgataactgattagagtaagatacgcctaataaagtagtttatgaaaaagttaataaatgcaatgaagaatacaaggaaatataacaccaaataaatgatcataagagggaaaccagacagaaaaaaactgcaacaagagtaagctggaatttacttctgggttgctgcttacttgtttcttcaggtaatggaatcgataaaaa

SEQ ID NO: 48996 - DNA, 402 bp, Zea mays
  unsure (1)..(402): unsure at all n locations
nntggaaaaagataaattctgcttacactggtagataaagtgaanaaagacgaagctgcttcaaaggcccaggccgaagctcataaacgcgagattaaagatcttcagaaacagctggctagagctaaagaggagcgcgcgcttgaggaaacgaaacgagaacttaatgattntatggtcagcagattggaatcaaaagttaaggagcttcgcacatctcaggggaaatgctatgtcaaatctgtagaatgtgtgaataaaattaaatccagcttcgccagcgtaggcgccttttccagcgaagagaatttctctcgaggcaatcccgaaggtccgctggaatggattagccacgaagcagaggccttcgaagagattctgaacagtcgcggcgacatatgc

SEQ ID NO: 48997 - DNA, 416 bp, Zea mays
  unsure (1)..(416): unsure at all n locations
tacccatgatgaggcatgtgactagttaaagggtcctcggtcagcatgcctacatcgacacggtccttaatcgacttagacggagacactacaccaagactcctttctcatgcaagtcaaccgcccggtctcagctttatcatttcaacccaaagtttggtacctggcagaggtacatcttttccgatgttgaacccatcatggccatgatggatccaccatcaacttttattttcgaaaacatcccacccactttgccacatcatcttttgtgaaaacaaaaaattttgtttttctagagcagcgctaagcttaagaanaacttttatgtaaaataggggatcaaaggaaggtaatcaaatccaaggaaggaaatgcatgaattggtttagcacacaactcctatcacctaatgc

SEQ ID NO: 48998 - DNA, 201 bp, Zea mays
  unsure (1)..(201): unsure at all n locations
agctntaccaaatggacgtgataagtgcctttctcaatggaccaatcaaggaagaggtctatgttgagcaacctctcgactttgaagatagtgaataccctaaccatgtctataaactctctaaggcgctttatgggctcaagcaagccccaagagcatggtatgaatgcctaagagatttccttatcactaatggcttca

SEQ ID NO: 48999 - DNA, 319 bp, Zea mays
  unsure (1)..(319): unsure at all n locations
taagaggatgaanatgaagatcaagaagagccacctcattatgtgacaatgatcaagggggagatgcccatgatcaagacaaggaagatgatgagggtccaagaccaccacatccaagagtccaccaagcaatacaacgagatcaccccgtgaactccatcctcggcgatatttataagggggtaaccactcgatctcgtgttgctcatttttgtgaacattactcctttgtgtcttctattgagccatacagggtggaagatgcattaagggattcagattgggtggtggcgatgcaagaggaactcaacaacttcac

SEQ ID NO: 49000 - DNA, 407 bp, Zea mays
  unsure (1)..(407): unsure at all n locations
tctaaaggggagaacacatttggaactaacaaatgttcattttgataaagacaggatntgtagcgcatgtcaggcagggaagcaagttggtgttcatcatccacataaaaacatcatgacgaccgacagaccactcgagctcctacacatggacctattcggcccgattgcttacataagcatcggcgggagtaagtactgtctaattattgtggatgattattctcgcttcacttgggtgttctttttgcaggaaaaatctcatacccaagagaccttatagggattcttgagacgggctcaaaacgagttcggcttaaggatcaagaaaataagaagcgacaacgggacggagttcaagaactctcaaattgaaggcttccttgaggagganggcatcaagcatg

SEQ ID NO: 49001 - DNA, 242 bp, Zea mays
  unsure (1)..(242): unsure at all n locations
ccgggatccttaatgaccgcggctgcagcttatgagcactgccctacccttttatatatgctactagtaagaaaaggtagtcccaagggtggattggcagatgtttcagaatttncagattgggaacagtatactgaaattgggtttagtgttttgataaactgtttggagttcatttatggctgatctaagaagttttggtctataatgtttatataggaaaggaaaaacctatgatggtg

SEQ ID NO: 49002 - DNA, 399 bp, Zea mays
  unsure (1)..(399): unsure at all n locations
tcggaaaatcccatattttggccatctnccggcaaacagtatttttcttgttgtctgggagacagtataggaaatcatctttgtccgtaccattgtacaccaaagcccccttcgggtatttcagttcccgggcgtaatgtttggcttccgcgatttcttcttcagataacctttttcccgaagaatgtcgaataataaagtcaagatcttcgtacggtgcttcgggaataggagatttagctntttcgggcgtgtctttcttctccagagccaagccaacatctggagatttttgttcagttccttgcccagttccagcagactctgtctcggcgggcactgacggtccagcttcggtttcagcgcgacctgtagcagcttcgacaattntcttcacag

SEQ ID NO: 49003 - DNA, 491 bp, Zea mays
  unsure (1)..(491): unsure at all n locations
atctctgagtcacctgcggcagcaagcttaagctccttgacataaaatacttcttccattttatacaaagatgtaaaaatgaatgtttgagaagttaaactatgtatgaagcaaggttaatgcatgaacatgctctttcttccttttatacaagatatgcaaggaatgtatgaagatttatgcacatgtataattaagtattgaatggttttacccttttgtacctttacatggagaagctctcttcattgngctccgtccttaatcttagttgctttaagacctgtactcaagataatatatggaaatattttgtacaagagagaaatctacgacttgtgatccttttctaagtcatgttattatatatatcaagtagatcacaaattgcataaatgtatcatgaattctccttttaacttaacgcatatcaagatagaagtcgattgacattactaattgaaatcaattggaattgcatgaagcactaa

SEQ ID NO: 49004 - DNA, 477 bp, Zea mays
  unsure (1)..(477): unsure at all n locations
tgatgtcattgtcgtnaccaaatttcctcaatacagtccatgttgtttccaaacgacctttttcaataaatagggcatgcagaataaggaacccagtcgaagtaaggccagtttcatttacgccttcaggcatcttctcctgaacaactctcttaactcctgaaatttcagtaggctggagaggagcactaaaacaccggacctgcaaagcagtaataaaaataatctcagcaaaactaaaaacaaaagggtatatcattaactagttatgctgtatgttgctagatagaaagcagggtagccttcatgaacacagacctggaattcattgagctccacgtcactgagagcaccatccttgtcattatcacatataatgaatatccgcttcaacgctctcacacatcgaggcttcagagaatgtaattcttgatcaaaaggagggcagtanggtgaagtactggcttctgggcatag

SEQ ID NO: 49005 - DNA, 450 bp, Zea mays
agctggaatcacttttatacccctgagagaccatatacttcttttggaaccctggaaaacactaaaaccaaaccctaggggcttatgtgccaaaatgatgaaccttgggactaaagagtgaaaactactatgtgtggacatataaagttatttggttcacaaatatgcgaatttacaagccacaccctaagctctggacttaaaggcaaaatggacctcatttgagctctataccaaatctgaaatttagtgttaaaggctccactttggggctttgtaactttcaaagtatagggtttttgccctaagacaccacatcaaagatgaagatcaatcttatgggaacaactttggttaaggatacatgctattgtcttatgtgacatctggagaaaaacccaatcaaagattggctgtcagactgcttgaagattgaatttcaaagataca

SEQ ID NO: 49006 - DNA, 370 bp, Zea mays
ataacctctaagacataacccacccctaattaagagttgtagtgcaaagtggcccatttacacaactctaggtcattttgacagagcctagcctatatcaattgaacctcagagtcctacgacaatctctattgaccaaatgcaagccactgtaatttctatagaatatttggagaaagtaagacactgttctagttcagacctcctcttaaacagtcattgaaaatcaagaacggagaaaatgaagtttttaaattaacgccatcctaaaaccctttgtaaattgtccacaacattatattaatgaaataccgacccactatgcctatgcctaacaaaacctagacacaaggtgataagcataaaccac

SEQ ID NO: 49007 - DNA, 471 bp, Zea mays
  unsure (1)..(471): unsure at all n locations
agcttataacaagaggatagaggcaagagctcttccatatgttatattataaggggagctgtacaagcatggggtctgttctccactactcaagtgtttatccagagccaaaggtatagaattgatgaatgaaatacacgcaggcctgtgtggatctcacattggatctaggcctttgcttggaaaagtttttcgacaaggattttattggccaaaggcagcttccgatgcagcggaattagtccaaaagtgcgaaggctgtcacaaatgtgcaagagatcaaaaacaacctttgtctctaacccaattaatacaacccacttggccattgcaaaggtggggtcttgatttgttangtccgttaccaccagcacaagggaacttaagatatgttgtagtggcagtagaatatttttctaaatggattgaggcagagcctttagccacaataactctggtcactattcaaaa

SEQ ID NO: 49008 - DNA, 231 bp, Zea mays
cttgtgtggaattgcgagaggatttgatctctctggtgtgtcttgtattgaatgctacctcttgcaatgtagttggaaggtggaaaactcggatgccaatgaatgtggagtggttggggtatctataaccccaaccaccaaactacacctttggtgaatgctgctgtcgacctgcgcaccagacagtcacgtgctccatcggacactgaccggtgcgccactcactatacc

SEQ ID NO: 49009 - DNA, 463 bp, Zea mays
  unsure (1)..(463): unsure at all n locations
agcttancanaagaaatttctagaatcaagaatattgttctcatgcctaagtctggtaaaagattgttcatcaagtggcttggtaaagatatcggctaattgatctttagtattaatgtaagaaatctcgatatcccccttttgttggtgatccctaagaaaatgataccgaatggctatgtgcttagtgcggctatgctcgacgggattgtcggccattttgattgcactctcattatcacatancaaagggactttggttaatttgtaaccgtagtcccgcagggtttgcctcatccaaagcaattgcgcgcaacagtgacctgcggcaatatactcagcttcggcggtggaaagagcgaccgaattttgcttctttgaagcccatgacaccaaggatcttcccaagaactggcaagtccccgatgtgctcttcctattgatcttacaccccgcccaatcg

SEQ ID NO: 49010 - DNA, 368 bp, Zea mays
  unsure (1)..(368): unsure at all n locations
actcagcttcgctgatgacgatctaagacgaaggggaaccgactttagatgatatgactcgaagacccatgatgttttgtatcattagtgtagtcgattgtaaagggcataaatgtaattttacacatgctgcgccctgtgcctataaatagatgaacagtacccctgttcttgtcacgcaatcttgtaatctctgacacattaccctggaattatagctntctgccaggcaaatgtattaatgtacctaaatattatgttttaataattatgtatgtataataaaatatgtgaataatattatctgtctttggtacatctctctctaatggttaatattctatttcaatcgcctattagtctgatca

SEQ ID NO: 49011 - DNA, 415 bp, Zea mays
  unsure (1)..(415): unsure at all n locations
agcttccncaccgtcgaggccgtcagcgccgtctactggccggtctccggctctttggctttgatgtctggttcacgtcccttgagcggggacgcgaacgagagccttccggtggccgcgtccgtcctgagaccataactgttgctgcagaggtcgctggtgagtcacccggaacttgtcgccccgcacgctccccggtgtggaggttgttcatacccgcggggaccgaaccggagttcccgttgtgatggcaccttggatgccggtctcttgttcattgcggctgtgggggcctgaacatgtatgtatttttggcgtggagccgcgttttttcctcattttgagcactaagactcgtctgtcggctatctgaaccgcttcaccaaatgtgagttgcctcttgcaaaggtgacga

SEQ ID NO: 49012 - DNA, 464 bp, Zea mays
  unsure (1)..(464): unsure at all n locations
tagatggtgtctntgaatggttgctagctcttgtattgaatgtagaggattggaatgcttggatgaagtgaatggaggtggttggggttgtatttatagccaccaaccactatctagtcgttgctccttttctgccgaccgcggacggtccgcgccactggtccggacagtccgaccctgcacatcaacggctacaatcgcaacggtaagcagaaacggctatatcaacgactactatgcattaaatgtgtcgtgagatgtcagataaagctagtcgcggacggtccggtcgtgcaccccggacggcccgcgaggacgctaaaaatacattntaccgaacccgtcaccttctgggttttctggttttcaccgaccgaactgtccgcgctcgaagccagacagtacgtgcttggtctcaaacggagcttgcttctccatcggacggtccatagtgtagacttgtg

SEQ ID NO: 49013 - DNA, 443 bp, Zea mays
agcttatctattattctattgagatctttgctatatttgcgtttctagaaacataccgcattatggtctcgaatatcctacaacctaagtcatctctgagagtaggaatgattgatatcttttgattgtgtacagacgtacatagatatagcagctaagggcagcatgcaagccaaccgcacagccacaatcacaggagcaatcacagccacaattacatgcctaattacattagtctaacactccccctcagtctaatcgagagcatcgctaacggttagactatgccggaactcctgaaagagcgaggtaggaagacccttggtgaagacgttcgtgtactgagatgtcgtgagaacatgaatattaagttgcatgcaccaacccattcaacccacaagtttaagctaataggaggggatggacaattcacttatattata

SEQ ID NO: 49014 - DNA, 473 bp, Zea mays
  unsure (1)..(473): unsure at all n locations
atgctatacttggtgcgtccaggaagtttcgccactattttcatgcacacacgggcgnggtggtgacctccttcccgttaagggccattctccacaactctaacgccatatgcaacatcgccaagtgggccacagagcttgctgagttccaaatggacttccagcctcgccacgctgtcaagagctaggttctggctgactntatcgtggaatggaccccttccccgagcgctcctcggaccccacacctgcgaagcccagggctctagtcttcaccgagccccactggacgctcttcttcaacggatccgcccgccaatagggtggcggtgctggagtggtcctcgtcgacccaagcggagatcaagtgaagtacatggtgcaccttgcgttcatggccaccaacaacatggcagagtatgaagcactatatttcgacttgtctgcggcccctatcctatggatccgctacc

SEQ ID NO: 49015 - DNA, 383 bp, Zea mays
gaagcccgggacatacaagctggccaacgatcgaggcgaagtctacagcaacgcttggaacatccaacatctacgtcacttctacccttaaaatgtttcaagtcgttcatgtatctcgctttctttacgcgtataaataaagtctaacctgcaagggaggatcggccttgcctcagcaaaaaccgaacctccctcgggggctaaaaggggggaaccccctctgcgtcaaaatttttctcggaaaagatttccgccaaaacgacatttcgtgcttttcgattatatcgataacggaatcctaaaaacgatgagaggaaccttaaactgcaaggccgaccgagccgaaggactcctacacctctgggatacagatacctcactca

SEQ ID NO: 49016 - DNA, 446 bp, Zea mays
  unsure (1)..(446): unsure at all n locations
ctagtaggatgtgtattagcaacttgctntccagcttgacatgtactacatggctggtctttttcaaacaccacatcctttaatcctctaaccatgtctttctttaataccttcttgagtgtgctcatcccaacatgtgcaagcctcctatgccaaagccatccaagtgaagctttggtgaagaggcaagttcttaagtctgcatcttctgaagtgaaatccactaagtagaggttgttgtacctaaatcctttgaacaccattgattcatcatccatctttgttaaaataacctctgttggagtgaataagcattgaagtccaagatcacagagttgacccactgataataaattgaagctcacaggtgcaaccaagagaacanttgatattgataaatcatttgaaaaatgcaccttgcctagtccttgcactttttctttgaa

SEQ ID NO: 49017 - DNA, 358 bp, Zea mays
ctgagctgcactgagttaaagactatcttttctttcttcattcaattgtcatgaaattttacttcctcaatccatggattgaccaagacaagagcatcaacataaagccacatacagactcaccccaccataccgatgaacacacgtgtcagattcattacacaaacagctgctgagagatataaactttatgccatgctaaggctgtttagcatacaatgatttatcaacttgcacaccttgtttttgacatcgcaagaccctttggtgaccatataactccatcactctccattagaagtgctacatcattgtaagataaccataagctgccgtttaaggcaatgatcatcaccct

SEQ ID NO: 49018 - DNA, 273 bp, Zea mays
cttcatccccacatgtgctaatcggcgatgctacagccagcccatgctaggcttagctattaagcatgcatctagaccggcctcttctttttgcaaatcaactaaataaagtgtgccgcctaatacacccttaaatgctagtgaaccatcacttcttctaaagacagacacatctacattcgtaaatagacagttatatcccatatgacatagttgactaaaagatagcaaattatatccgagactctccactagaaatacattagagataga

SEQ ID NO: 49019 - DNA, 447 bp, Zea mays
tacgttcaagatttatctctttgtctaagacctcataatgcctgcacccctcgcgggacaaggcattcatggccccctcgcacgtgacgagggaggcgaaagacatgaaacctgtcacaatggacgggagcaccagcaactcctcctgcaaccattcaaggaaacgaaggcccgcttcttggccggacacttcgaaatcagcagtccgcgcacccaacttgtggtacgcgtgcacaaactgcgcatgcgtccgctcgaccttcgcgcgcgtcgaggactcggccttgtccacgcagctgcgcacggcgttcaacctctcctccatctcctcggcgcgatggcgggcgagactgtcctccacccgcgccaccttggcttcggtctgcgcatcagcgatggccttattcgcctctctcctctcctccaacagctggagccagagatccg

SEQ ID NO: 49020 - DNA, 488 bp, Zea mays
  unsure (1)..(488): unsure at all n locations
attacggacacataaaactcagcttgcatgggctgaaaaacgatggagtgcctttaaattttaaggcagcctatccttccaactgttcctcataactttctcaactatttctgtaccttctgttgctaccaaaggcagcggngagaacatttgcttgcaatgcagtgttccaggtatttccacctgtaatccatgtggccttggactctcgcctcatggtggggtcctgtcagaggtatacgtgcatgggttgggccatgatttggtaggattggaaggttagaatgaagctggcatagctcaaaaggtttgttgtcgctgctgtgtctgcctgtcatgcaaatgcgtaacttgtttatgacacatgtcttgcgttacaggaccaggagaacatgtcttttgtttgctttagcatccgcgtgcagacaattaccaattaggctcagccattagattcacgtgccagattttgttttcaagtctatcga

SEQ ID NO: 49021 - DNA, 456 bp, Zea mays
  unsure (1)..(456): unsure at all n locations
agcttggagaaatatctagatgcatgtgtatctttcatatcangacgaaaacgataccttttatctgtacatgttcttcagttgactgacatccttgtctttggcctgatcaaggttctgatccagttcccacatgctgccctgttttgttgtctcgatgtttgacatcgacgccataagcatcttcttggaccatgaagttaaaataacagctcgaaacatcgccactgtgatcttcctaaaccccgaggctgaatgtgagtttccccttatccgacgcctgtgactccgccatgtactgacctgcctgtcgcatcatacaatgtgggatgccatcctcccaaatgttcagatatgaaggtatgaaatgcatatggcttaatgaaacccacggaatatgcatcatttgggccaaaactggcacattgcatgagttatcatatgacttaatatatg

SEQ ID NO: 49022 - DNA, 454 bp, Zea mays
  unsure (1)..(454): unsure at all n locations
tgctggaatacacaacttgntagcgcggaacataaatgcatcttgtatgtgagatgatccccacggattgctatccttacaatgtatatagaaatctttaaaatcaatatcatccacatattgatctttcacagtttgcaagccaaagattctaaattctaactatgaaagcatggtatatctacgggacaacgcatcaacaatgaggttttccttcccgttcttatgtttaatgatgtaaggaaaggactcaatgaattctacccaactagcatgatgacggttaagatttgtttgggtacgaatatgttttaaagcgtcatgatcagaattaattataaactcacgaggccaaagttagtgctgccatgtttgcaaaatgcgaactaaagcatannagtccttatcataagtagaatatctcaagctagcaccgcttaattttcactgaaat

SEQ ID NO: 49023 - DNA, 445 bp, Zea mays
  unsure (1)..(445): unsure at all n locations
agcttgcacgcttctttatatgttagtaaaatgagtggcacatcaatgagagtttgtatctctattgcatttaagctttcacgtttatattgttacctttggttgtatgctttatattattagcttaattataggctagtggatatgtctataacctacgtgaccaaactttttttgcgatagagatagcaatgcttaaccaaaatcttagttgcacatataaatgattggctatctatatatgttttggttaaaagaaaaatagaggcggatatgggttagtgagaaattagattgcctaattcaccccctcttagacatcaatgtttcctacataggccatgtgttgtgactactgctcgtttcactgaaatgattcatgccatcattgcttanaccacaccttttgtttctcgtattctttgcatactctaaggatatctat

SEQ ID NO: 49024 - DNA, 327 bp, Zea mays
tcttcaaggtcccccgacgcatgctcttgtggttcatcgtcttcgagcggggcatctaatccaacctggagaagattgcagtcatcaccagcatggggccaatcaatgacttgaaaggcgtacacagggtcatgggatgtctcgcggctctgagccgcttcatctcccgcctctgagaaagaggtctgcctctgtaacgcctcttaaagaaggccgagtgcttcgcttggactcccgaggccgaggaagccctcgggaacctgaaggcgctcctcacgaacgcgcccatcttggtgccccccgctgtcagagaagccctcttgatct

SEQ ID NO: 49025 - DNA, 453 bp, Zea mays
  unsure (1)..(453): unsure at all n locations
cttgacatgtagggtttgtgtaactacgactctgggtttgattaagcgtctgcatgttcttgcgtctcctaatacaaaaaatacacaaccagctaagggcccttttggcatggttctttaggtggctcaagctctcaagctcagacttattgtaaagccctactaaacactcacaaaaattaacttctagttgagagccctttaaaaactaatcgntttcttgttgagagacagagcgttttattgttgagagccacagcaccaaaacgtggtttctatagacttctctaattttcttgtacatcattccaaagaaacacaaaataaactatcttaccaaacaaattgcaaaacgtttttggagccaangagacacagctgaaactgttttcagaggagtgtgccaaagggaacctacataaatcgtagcctttagctactcacaccaaacaa

SEQ ID NO: 49026 - DNA, 408 bp, Zea mays
atgttctagctgtgatgtctcatacagcccatgctactgttagcaatgaagcatgcatctatgaccggcctcttgttttgccaaatcaactgagttaagcatgccggctaatacacccttataggctagtgatccatcacttgttctaaagacagacacatctacctttgtaagaagacaattatgtcccatattgcatacgtgactaacacatagcagattgtaaccaagagactcaactaagaacacattggagatagagtgctcattataaattgcagttttacctaacccttttaccttgccttgagtcccatcaccgagtatcattgaatcttgcgaatccctattctttgacgaggaggtgaacatcttcttcttcccgcgcatatgtgttgtgcattcact

SEQ ID NO: 49027 - DNA, 439 bp, Zea mays
cttgacaagtcttagttttaagcttttagcacttaaattcttacttactatgcaattgttggttcttgaaataagcatgaagtactgcacttagggggagtattcaaaactcaaaacactcatgaaaacccctagtgcaaggccaaaatgcaaatttcaccatttgcctatattctctaaaaattatctaacctatggcataaaattttgaaaattatgagaaaatatatgatggtgtcaatacctgtcccaacaagagttattttgtgtgattataagtagggatttggtttggtcgaaaactatatataaaatattaaaatttcaaaatttccctctgtctgggctcaccggacagtctggtgtgcaccggacactgcactgtgcactgtacggtgcaccggccacacgcgcacagatctccttattgttgtgcgct

SEQ ID NO: 49028 - DNA, 456 bp, Zea mays
  unsure (1)..(456): unsure at all n locations
aactattaattaatacctaattgaccttcggcctcttctctcttttcagcagcgtcagctacttctctagcatcgtgaattcccttttcgctttntcgaataatttcaccggccatttgtcggccaccattttcctagatatcagtaaaaaattttccaccaattatacttgcttctgccgaaggatctcttgcatcttcaaaagacaaagctgcttcggattgtgctaaagtttttacgtgttcgcagcccttcttctctaaaatggaggcaattcctctggcaccagagaaagcacttatatctgcacggctatttaaaatttcttcgaaggcctcagctttgtgggcaatccattcaatgggaccttcgggaatgcctctcgtaaagattatctcgcttgagaaggcgccgactctggcgaagctagttcttaacttcttaacacactctata

SEQ ID NO: 49029 - DNA, 467 bp, Zea mays
  unsure (1)..(467): unsure at all n locations
ctgcaagcttncccactaacactanagctgcaagctacatcattgtctgcactgngcaggcctnccacactacctatctacgatggcctaatagacccgaagtggttccttatgaactacgaagccaccatatcatcgtttggtggaaactcagcactcatcgcataatcctctcactaacactagagctgcaagctacaccatggccagcactgtgcaagcctcccacactacctatctacgatggcctaatagacccgaagtggttcctcatgaactacgaagccaccatatcatcgtatggtggaaactcagcactcatcgcaaaattcttcatcatggcagtttgaagtgtcttcgatacttggtactcgtcacttcgaccaatgactatcaacgagctctttctgctccgaggggaagggcagggctacagcttattggtagacttggtgcacctccaatga

SEQ ID NO: 49030 - DNA, 84 bp, Zea mays
tgccggaggtcattccacgggaagacggagcggagaagttattctcaccatgagcacgttcgacacatcgcttatccagacttg

SEQ ID NO: 49031 - DNA, 451 bp, Zea mays
agcttgacaacaactatacatatctcgctatttatagtacgcgtgtgccaacaatagtctgtcatttcccccactcgaaattcagaagtcccaataaattacttggtcgtgacactagcccaaagtgctatttttttataaggccccccaattcccaaagtgcattgctgagtggtcagatgagagggagtgcttcctaattccagtctaaaccagcaaagcgattgagcttatttccctcctgtaacattgtcaagggcagtagggacccggctctggagtttccagctcgaattcaaaatccagtacttatagaaaacccatgttcagattagccaaattctaatatatagagatattggacatgttagtaagcggacatttggatgcaagggtgtgtgcgtcgtctttcttgttacaaacaaaacaattgagggcctccgtgcatgca

SEQ ID NO: 49032 - DNA, 450 bp, Zea mays
  unsure (1)..(450): unsure at all n locations
tcacaacacanaanagatatccacttcaaagggaaaggcaccacatgaatgcatatgaattatgtgggggatagatgtcccccgggtccactagaggagtgaaagacctcacgaaaggcccaagggcccgataaatcatgaggtcattccttcgtgggcctgnggagaaacaaccaacaaggcaaagcgacgtaataccggattggtgcaagctcgggtggcccacgacgtccagcaagtaaatcgcaacagagacccgactttcccgcactgaagcccccatgcaacggagccatgcgaggataagtcggcgagggttacgtanggataaactcaagaggttcaccactttttagctacttgttgttatcatatccacatgtactggcccacggtcgagtatataaggcctatggggcaccccttcagaacgatcgaccctatcttact

SEQ ID NO: 49033 - DNA, 346 bp, Zea mays
agcttgtgaagattcttcattccaacatgtgctattcggtgatgtctgagccaccccatgctagtcttagcaattaagcaagtgtcgagtttaactctatcaaaatccactaagtatagctgaccctctaatactcccttaaatgctattgaatcatcacttgttctaaagacagtgacacctgtatccgttcaaagagagttgtagcccattttacatatttgcgaaacagaaagcaggttgtaacctaatgaatctacaagaaaaacattggaaatggagtggtcaggagatagtagaatgttaccctatcctttgaccataccttgatttccatccccgaatg

SEQ ID NO: 49034 - DNA, 394 bp, Zea mays
  unsure (1)..(394): unsure at all n locations
aacccttcttctgtttttgttcaagtctactacgatgtgggctaattactctccctcactactatagacagactcagattattgtgactgcatctgccactctatcagtgagagggagagatcgacttcactggaggaggaattgaggggctggcatgggcgaacctgaatggcggcacgccgtgctcccgcgcagagcggagctgagctcaagtgctcagcgcanctgcgcagggtggagctcatagcatggcggatttcagattnttagagctgcgtctacgcgggggccggcagcgcttatagcatggaggagcttggagctgtgtttgcccggngggcctgtgcgacacgagtggcttgcgagttgcggcttgcctgtgcggcacgggtg

SEQ ID NO: 49035 - DNA, 373 bp, Zea mays
gctcgttcacattgatgattttgacttcttcaattttcatggctgattaaatcatcttctagataccatacctctaagtctaagctctggtttgcacacaattctgagagctctagtgcggggtctcttgggcactgcttcactctcttctttattaatagaaacgtgcacaatctcgtgccgttcgtttcaaaataaaacctgagatccttgtcctcccagaaaatccctggtctgaaccatcccctggggtgttgtagcgagtcctcaagatatctctgtgcaactcacctgtagaccattggatgaccaaaataaatcatttaaagtttattcgaacattcatttaagtttgactttgactgagttgatg

SEQ ID NO: 49036 - DNA, 337 bp, Zea mays
gctgataaagaggtattgcaacatgggcagtactttgacgtgagattaagactaacccgggcatgagagcatggattgtggcgccatatataccggcttgtgactgcaggcgtgcaatacagagaccgcggtcgaccatgaaagtgaagatcatactggtccgggccgatgggccgcgagcgatgaatgaccagcgctcggccttgatcgatggattggagaagccctgtgactaccttggcggctgacacttgagataagcaccagcgcgaggacgaggcagagcggatcgatgcggtggcgtacgcgacgactggtggacacatgtcaggacgtg

SEQ ID NO: 49037 - DNA, 335 bp, Zea mays
accttgagcaacgtgccaagcatgcactcaagtggggagagcacatcactacaagaatgtgatgaccatatatcataacgtgatacctttacacatggacctattctgacccgtcgcctatctgagcatatgaggacagaagtatggactactgattgttgacgacttttaccgcttcacttgggtgatattcccgcatgataagtcttgaacccaaaggaccctcaagcccttcctcatgagagctcaaaatgagtttgagctcaatgtgaagaagattacgagcgactacctgctctgatgtcaagaacttgcaagtggtggagtaccttgag

SEQ ID NO: 49038 - DNA, 362 bp, Zea mays
  unsure (1)..(362): unsure at all n locations
ctcagcttgctcctatattcacatggctatcagttattctaacttccctatggtcacaacgctgcctttgctcatcagtgaaataaaggagacatgcttctgtctctacgaattaccaaacatgaacatatgatcgtctgtgctaaacaaccgtctttataggaagtaacaagggcaaataaaccacatactgattttgtatgcccatgtggcacttgaacccttctagttctctttaataaacatcaaattatatcatcacttaatccaattatgctttatttttaattgaaacaataatacaattaacttagacatacccttgntgtgcaacataagatcacttggccaaatcttatact

SEQ ID NO: 49039 - DNA, 489 bp, Zea mays
  unsure (1)..(489): unsure at all n locations
atactctaaaagtcacctgcacgcatgcaagcttgtgaagaattttcattccaacatgtgcttgtcggcgatgccagagccagcctatgttagtcttaacaattaagcaagtgtcgagttcagctttatcaaaatctaccaagtatagttgaccctctaacactcccttaaatcctactgaatcatctcttcttctaaagacagcaacacctatatccgtaaaaagacagttgtaacccattttacataactgtgaaactgaaagcaagttataatctaaagaatctacaagaaaaacattggaaatagagtggtcaggtgatatagcaattttacccaaccctttgaccaaaccttgatttccatccccgaatgtgatagctcgttggggatcatggtttttctcgtaagaagagaacatatatttctccgctgtcatgtggtntgtgcacccactatcgatgatccaacttgaagcccccgatgcat

SEQ ID NO: 49040 - DNA, 373 bp, Zea mays
  unsure (1)..(373): unsure at all n locations
ttcgccacttaattcaacataaaatagatgatattatctgtgactgcttcgnagccgtaccatctctccactactgcacttacctgatttgtccagttgtccaaaccgttcggcgttacacgtgcatgacccacgtccttggggcgtggcgcatgccaacacggcactttttttttgtgcgttgaaacgctgacacgccacagcatatatgtagtagaaagcagaaagctactggctcgggagactcgtgccacgcaagagtccagaatcgacgtatattctgtttctgtccagttcgcctgtgtagattgtcgtccgtttccgatctggaaaatttgagcggctgctaatgtcgtagtcgtaattacaatga

SEQ ID NO: 49041 - DNA, 252 bp, Zea mays
  unsure (1)..(252): unsure at all n locations
catatctgttcccgcggctgactgaccacaggcccccacgcctggaggttntgtcgggccacgcgcggggcgccttgttgctgctgcattggtttaaaaaattaccttttgtcttctgcaccgggcacaaggaggcgcactacaagcgccacacagaggcgcactacaagcgcgtgcgatggntcgctctttccgcacncaaagtctggcacacaaaccgtatgacttgtggacctgtgccccccgtgtcat

SEQ ID NO: 49042 - DNA, 441 bp, Zea mays
  unsure (1)..(441): unsure at all n locations
agctntaagtgggacatggactcccataggttttacatccgtagcgaagaagcgaccacttgagcccttgtccctttacgaacaacaggcaagacctgtctgaaatccccaccgaagacaatggttttaccaccgaatggcagtctgggccgacccattatatcgcgcatgctattgtccagtgcctccacagcttgtctcttagtcatagaagcctcgtcccagataatgagagatgctttccgtagcaactctgcggttccactctgcttcgtgaagctacatacagcgccatcgtcaatagtgagaggtatcttgaagcgtgaatgggcggttcttcctccaggcattatggaagccgcaacgccagatgtagctgttgccactgcaatcttgccctggctgcgtagcgtcgcgagcagcactctatataggtaagtc

SEQ ID NO: 49043 - DNA, 423 bp, Zea mays
  unsure (1)..(423): unsure at all n locations
actcaagcttctaagggagaacacgtgatatgtttgactaacgtgcaattcgaaaaagatagaccttgtgcagcttgtcaagcacgtaaacaagtgggaggagcgcatcacagcaagaatgtgatgaccacttcaagacccctggagctgctgcatatggacctcttcggacccgtcgcctatctgagcataggagggagtaagtatggtctagttattggtgatgacttttcccgcttcacttgggtgttctttttgcaggataagtctgaaacccaagggaccctcaagcgctttctcaggagagctcaaaatgagtntgagctcaaggtgaagaagataaggagcgacaacgggttcgagttcaagaaccttcatgtagaggaagtccttgaggaggaagggatcaagcacgagttcttc

SEQ ID NO: 49044 - DNA, 312 bp, Zea mays
ctttataattaaacttcgtttcctttgggcgtgtgacgtgtgtctccccagccctcacaaaaacatgtgccgaagtacctttctctcatgttctcaagatgactctagttgatggtcgatcttccgaagattgaatgacttggctgccagagccgatcctcagaatcttcattcccactctccgcattaaagctatcgctgtcaccagtatcttcagaccaaccttccactatctctttagtaatattctttgtgtttgcgtttgccatctattccacaaatccagcaacataaggatccacagacctttac

SEQ ID NO: 49045 - DNA, 469 bp, Zea mays
agcttgaagcctaagtccacaaaattcagatctgaaaaaactattgtggggccttcaagacaaatgcttggaatctagcaacaaatgtattcaacgactgagaaaaattttccactcagtcggagctagcagtgagaaattcaccccgtcagctgaagatttaccaaagaccttcgaacatattgagggtgaaattgatgagcttgacgaatttatagccgggcatggtgacttctgcgcttgggtagcttcttggggcactgctgcagctttcctaaaagctggctgcgatcatggaacgattgtcaataggcccaattttactttatcaccatcaattctagatgacattcctgatctcgcccgaagcatttccaatagatttgtaaaaatgatatggacaaaaggcgggcgagacaaggctggagacgaagctcggagtcatcttgaaccagtaagaaatcatacc

SEQ ID NO: 49046 - DNA, 356 bp, Zea mays
cagggaggagcaagcttgtggcgccctccggcgtcttgtcgtatccgaagcaccaaacttcccactcggaagcctaggggccgaatccttctggcgcgatagcgttgcagagactgctgataccacgctgagtgtagtaaggttatgtcccgagcctcttccagctggtccaatgaatcctctccgctggtctggtagatatgggcgaacaatgcctttgtcctcggggaaccgtattctaaatccgagggtaggatggcctcggcctccttcactatgaaaaacagcgaagaacccgtggctcggcttggtgtcgttctcacacttcacaccaccgagggtagctctcttatcca

SEQ ID NO: 49047 - DNA, 459 bp, Zea mays
  unsure (1)..(459): unsure at all n locations
cagcatgcaacctcgtcgcgcaagatctagagggcgctcatctggctgttttattatataggacagtngcaccgcctcgaaggcttatcacgacaaagctatggatagagccgtccgcgctaggcacatcctaatgaggaggcccggtgtcgtggtgcctgacgatatcgacgctgatgtcaaggccgcgcctgaagctgcaagccgaccatcttctgttgcacctgtgaaaaacattgccaacaaagatgtaacgatgcagtgatgacctgcaaagcactctcttttatcgtgacagcacctcttctacaggatgtaatatgaattctatgcgcaagccacagatgtgttaaaactctaatattttgtgaacagggcgccagaacacacgctagtgcgagcaagtaaaacgttcttttgtcctgaagagcctttaatcctaactaattattccgctgt

SEQ ID NO: 49048 - DNA, 297 bp, Zea mays
actcagcttacatgacctcgggactcaatatgtggcgcacatcatatctttctcttattagctctggcggatcaccttaacagcgagggccctaagccccgcgtgagagcttgaagttccgttgcggacttctcgcaagatttggacaccttcggtctcggtgacgcatttaagcatgggttggctgacctccttcttgtaaagcttgcgcctcaatgagtgtgaagtcttggcttcggttgttgaggcgcttggcctcggtgatgacccttggatggtaatatccctgcaggaaca

SEQ ID NO: 49049 - DNA, 487 bp, Zea mays
  unsure (1)..(487): unsure at all n locations
caaactcagctagccctagaattaaataatcttgtgctcaatgcctcgctcttgtggttatctcatggatatctcagagggaaacacatccatatactcttgctaaaggttagcaacagccggtggcaaagtaatagacgtatcatcaatggaatagaaagcatttttgcacactaacgcatatcaaagtccaacagaagcatgtaactcatcaagatcagatatagtagctagcaaagtaggagtttttaacttaataggttgctgattttcagagttcaaaacacctttttgcttagcattagtctttttctcatggtcaaagtggacaatatcagtgggagtcatatgaagcaacacaaatttctttcccttatgcatgaaagtatanttattggatctaccattgtgaatagcatcaatatcaaactcccaaggacgtccccaataaagagagcaagcattcatactcaccacatcgaaatca

SEQ ID NO: 49050 - DNA, 343 bp, Zea mays
agcaaccccccggctatggatagagtgagtaccacaaccatgcctataagcgttctaaggcgctttatgggctcatgcatgccccaagagcatggtctgaatgcctaagaaattctcttatatctaatggctcttaaggtcgcatggtcgatcctactttattcactaacactcttgacaacgatttgtttggacgccaatattatgttgacgatattatatttgggtctactaacgaaactacatgtgaggaatttattacgatcatgacacagaaattccagatgtctctgatgggggagttgcagctcatctctatagattcccagtcatatcaactcca

SEQ ID NO: 49051 - DNA, 477 bp, Zea mays
tgcggcatgcatacttatgacatgtttacaaagaataaatcttatcttttatctttttattataacctacgttgatgatgcttttgacaagcaaagtgctctttattattcgatttctttctagccttgttatggcgattggcgtatgttattgaatggcgtatgattcttgcttgcttgtgtattgctagaggttggtgcaattattgtgaatcaaggacctgctcgaggaagagccttcggttttttctaagcaaggcaagtggactttcccccctacataccatgtttgatcccaaataacatatgataattaagttcatatttattctatgcataacttgatgggttacctattaatatacacctaagcttttcaaccttattccttggttagcttgagttatgatttaatctagtaggtatgctattggtacaactttacgctgtgtgatggcactcctatctatgatatta

SEQ ID NO: 49052 - DNA, 466 bp, Zea mays
  unsure (1)..(466): unsure at all n locations
tcngcatggcccactctntcatagttgggaacactntgaatgtcatatattcatgcactaagtccctagtgccaatgtgctctgcgataaccctaaattcagccaaagcaatttgggttggaccctctggtgtcatattgcacggnggtctggtctctctgaagatcaactccaacagactctgaaccagcttctccttatcatcgtcaactttgacgtagaaccattcagatttccaaccagctggccatttgcttcggtaactgatcacgggaaatttcgtagtcttgcggtaggcaaaattgtagcagccacaagtttcatgtaacccgtctactctagccttggtttggtaatgcagctcatgtactcggcagaaaccttctgcaaacggttccaccccttggcttccgagagcccaaatgtaaacgataagcctaacgatagcgttaggagttagctgatg

SEQ ID NO: 49053 - DNA, 426 bp, Zea mays
  unsure (1)..(426): unsure at all n locations
agcctcaattagagagtggatctactaatnttctatctttaagagcattcgggtcatgtttcgtcagtggttctagggtttgttactcttggagcttgctcctagccggcttagcctctcccatgcacttgccaagtgttatgacttgtgatagccatgggatatttataatactcgaatcatagctaagaaatcaacctcacttcaagagcttggtctcttgatttgagaacgagggaaagggcaagccttggtggcaagccgaagccttttgtggctttctctacaacatggacttatgcaagcctctgtggtgagctaaaccacgagatanattagagtattatgtgcttcatttacctctctgcataattacattcgtgaattaaggtttatgatcgatctacttgctcactagttacatac

SEQ ID NO: 49054 - DNA, 465 bp, Zea mays
cggaggtaggaatgatgagatcaacgcaacattatgatcaatgtatttggaggaggagatcctattctagccaaaggagttgaatctatggagctcaccatctaggagcaagacgttaacgttggccataaccttgttcgctgcaaaggtataaggtaactataatataatacccgaacaccattggattcatgccaattgatgagtttcatttagcttgcacttgtttctcatttaatgaatgggagatgatgatgtaatcattcatatgcagattcataggctatgttgctatggctgatgctcctttgctcaagaggcatgatgttttggtcattaccttactgattttttagtttattactgtcaatagagaacgctttgtacctgtctctttaaagatgattgatatgtatctcaataatatcattgaatcaattttatggataatcatgttgaatgggt

SEQ ID NO: 49055 - DNA, 446 bp, Zea mays
tgtgatttatccaatttataacaagcaccatttcttaacatttattctgtatggataaactcaacacaagagaaggcattagtagcacaagcactagttcttatgtgcaaccctctttttatgtggaaagcaagtgagttgctaaaaaataaagaaacctcataatatggactaaatatgccttaattccttatacacaatacattattgaatgacatagatctagatatgcatggttattcaatgaagtccataggtctaatttaagccatattatggcgagtgtctaatatggaagaatcaaatccaaattaattagagagagataatacatcacatagttgtgaattatcgatcatatgataagattcatttttcttccaattggacctttatttcataatcaacaactgatgtatgtcctcaggtgcttcttcttcttaatg

SEQ ID NO: 49056 - DNA, 459 bp, Zea mays
  unsure (1)..(459): unsure at all n locations
agctttaaccaacttgtactagaaacatctatgtttgtatcgaaatacacataacaaccaaattaaataaacgaagtactaagtggttatgaacgggttatgaccaccacaattattgatttaggcgagggtctgagttaactgtctgatgagtgtgctaaccccgagaacctctactctaacctcgagaaaatggttggcccttgccttacgtaggaatgtccctagaggtacgacgttatgttcaatcctactctcaacggtctcatggtactagcggtctagataagttttttttttgtcaatctcattaaatctgatggacgacattgctgtccctcccgccttccaacagatcgatcagtagtctaaatccgtcgatcaaatcttatccaactttgctcaatccanacgccacctaaaagacataatatcgacttgcgcaggatcaaatgacgt

SEQ ID NO: 49057 - DNA, 112 bp, Zea mays
  unsure (1)..(112): unsure at all n locations
gtggagtggacagattgatcctttgggtgccttgctatgaagccactctcgataagggtgcgaactggaaaacttggatgcaataaatggtggggtggcnccccacatactc

SEQ ID NO: 49058 - DNA, 397 bp, Zea mays
tgaggcttgtgccgctggaccacactccagggttaagtcttattgctcgcgcgcgtacctccgataccgaatcacatgccgagacgtgactcctaagtcctaagcccggcgaataattagagcttgccgctgaaggaactgatgaatagcttcccagcaactcagagcctccctgtcccatcatcctcctctttcaccccagagcgaagttaatcacagataaatctggaagcttctttcttgggaggaaagagacagcactgccctggctctgcgctgtgtgcctgggaggaccatcccagctgctagctgcagcagacctccaaggttgttcttgtccaggccgggtcgggacccgtcattggctcgacgtggtatcctttttcctttgcccact

SEQ ID NO: 49059 - DNA, 342 bp, Zea mays
agcttggatattcttcatcagagaagtatgctttattcttgtgatatagaaaagaattgttcaccaagcatgaaaagaaaggaatgttgtttttctcccaaagctcaaaaaatggcatgtatgcaaaaattcatgcatcgtaaagaattaaactataaatagattatatattacattcaaaggtacaatgtattacacatgttatgttccaaatgtttctacaataacatttaatcctccttaagaactatttctgcagcttcgttcagtagctggtcgacaaccttgtccataatggctttcgccattttttctaatttcatcgtcccccttctggtgggg

SEQ ID NO: 49060 - DNA, 467 bp, Zea mays
  unsure (1)..(467): unsure at all n locations
cggcgactgtcacatcnacctctatatgcagtcctatgtggttgcatgcgtcgctgtgtacgacaagctcccacgaagccactgtttggacgcgtgccatagcagctgcaccgtgctgtccatcgttaagaggggggcctcatggttgtctccaatgtcgacgactgttgggttgttctggacatcgcatccgacgacgacgccatcacgcgatccagctcatcgtccacctaaagccctacctgctacgtaagtcgctactgaccggacatgaattcttgtgcattgtgacgatgctgacgttgtgtgagtgtcctcgaacatgatgtatgtagtggagtatcgcatccggtgatgcatcggccaattgtactacctcactgatgagccctgggtgctctttgtttgcagcgccaccaagagtcatccgtactcgtcatgtcgtgcgcgcttgacgactactatat

SEQ ID NO: 49061 - DNA, 470 bp, Zea mays
  unsure (1)..(470): unsure at all n locations
agcttcngtagattacgacttncatttctttgtgaacaggaacttttctgtctccgntgtcaaccctcacaatggacatatctcgaaaataccttcctctcatattatcaagatgactctgtctgataatcgattttccgaagactgcatgacttggtcgccagggccgatcttcggagtcttcgcccccacttttcgcatcataactgtcgctgtcatcggtatcttcagataagccttctagagtctccttagtaatcttttctgtatttgtctttgctattgattcaataaatccagcagtcttctcctcaaggagcttctcctcctcgctcagcttcgtctcagcaacagcttttttatcttgagacatcttctcttcggaaatggtgaaaatgtgttcttaataccgaagctttcaaaatctaagaaactaagcaaatgtnggccagcaagagctaagaaattaa

SEQ ID NO: 49062 - DNA, 453 bp, Zea mays
  unsure (1)..(453): unsure at all n locations
ntgatcaattaaagaagagattgatgtcgccccagtgttggttatgccagatctacataagggatttgacatttattgtgatgcatgtggctaaggctttggatgtgtgcttatgcaagaaggacatgtgattgcctacatgtcttgtcaattgcggaaatatgagttgaactaccccactcatgacttataaatgacagtcgttgtgcatgcgcttaagatttggagacattatattatgggaaccaagtgtcaagtatacacagatcatatgagtttgaagtatatattcattcagaaggatctcaaccttatgtaacaccgttggttggagcttattaatgattatgatttggagattcactatcacccgggcaaggcgaatttggttgcagataccttcagtcganaggagcatgttcattcagctgttgttgcccagctacccgatga

SEQ ID NO: 49063 - DNA, 358 bp, Zea mays
agctggtgaaggttcttcatccctacatgtgctaagcggtgatgccacagccagcccatgccagtcttagcaattaagcatgcatctagaccggcctcctcttttgcaaaatcaactaaataaagtttgccgtctaatacacccttaaaagctagtgaaccatcacttcttctaaagacagacacatctacatttgtaaatagacagttatatcccatattgcataattgactaactgatagcaaattatattcaagagactctactaaaaacacattagagatagagtgctcattagaaattgcaattttacctaacccttttaccttgccttgattcccatcaccgaatataattg

SEQ ID NO: 49064 - DNA, 364 bp, Zea mays
ctatgaagaaacttcataccaacatgggctagtcagcggtgtcttagccaatctttgttagacttagccattaagcatgtgttgagttcagctctatcacaatctactaagtatagctgaccctctaacacacccctaatagctattgaatcatcactccttctaaagacagcgacccctacatcagtaaagagatagtcgtggcccatcttgcataattgagatacagaaagcacattgtaatctaatgaatctaccacaaaaacattggaaattgaacggtcaggagatatagctatattaccaagacctttgaccaaacctttggtttcattcccgaatgttatatctcgttggggatctt

SEQ ID NO: 49065 - DNA, 373 bp, Zea mays
  unsure (1)..(373): unsure at all n locations
agcttggtgactancaagacttatgnngatattccatcttgtctcttgtatttcagncgcctagtcgaaccctgcgaccgaccaggcgacttatcgcgattaggcaacgactagggcgactagtcgacccctagtcggtcctagtcgctccctggtctgcctatactattagctatacttatataggtatatatataaatatacatgtgtacattatataaattagaacaaacaactaggataaacaaagttacatattgctttattgtttaaggttatttatgggctaggggggagaagtgggggagcaagagggaccttcacatgacgtgctcatctggtcactggatcgcagccaacgccggctggagac

SEQ ID NO: 49066 - DNA, 408 bp, Zea mays
  unsure (1)..(408): unsure at all n locations
nntanagggagaacacgtgatatgtttgactaacgtgcattttgaataagatagaccttgtgcagcttgtcaagcaggtaaacaagtgggaggagcgcatcacggcaagaatgtgatgaccacttcaagacctctggagctgctgcatatggacctcttcggacccgtcgcctatctgagcataggagggagtaagtatggtttagttattgatgatgacttttcccgcttcacttgggtgctctttttgcaggataagtctgaaacccaagggaccctctagcgcttcctcaggagagctcaaaatgagtttgagctcaaggtgaagaagataaggagcgacaacgggtacgaattcaagaaccttcaagtggaggaatttcttgaggaggaatggatcagcacgag

SEQ ID NO: 49067 - DNA, 397 bp, Zea mays
catgcaagcttctaaacgtgaaacacattccatgactttcttatgtttattttgacaaacacacgattcgtatcgcacgccacgcatgaaagcaagttgatgcccatcatccacacaaaaacatcatgacgaccgacaggccgcctgacctaccgcacaaggatctatgtcagcccgattggctacataaacatcagcggcagtaccgactgactcgtaatactggaagaatattctcgcttcactgggggatactttttgccggaaaaattctccaaccacgacaccttatagggatacttgagacgggctcaacatgaattcccgctacggtatcacaaaactagaagccacacacggacggagtataaaaactctcagatcaaaggcttccctg

SEQ ID NO: 49068 - DNA, 421 bp, Zea mays
  unsure (1)..(421): unsure at all n locations
cacttcanactcagctgtacccatcactccttctgcccgatgcctcttttctgggattttggaatcatctcccatctccgatgacgagccaaccatgcctgtggaagaacctcctcagcgagaagcttgccgactgatgaaccgacaccgaaatatttggcgacatcacgaagcatgggaacgggacccggcgcagcctgtatcccgagatgaaatttcggatgtgggagaaactcctgacgaatgagtctttagagagaggaggaactcttgccgacgcgatcgtctgctggctcaagagcaagctgagcaggatgcgaggcatcgcctagagaaccctctcttttcgcgaaacctgaaccctgacttcacccatgccatgaacacaccgagtgaggtccgtggagtatttgcttggata

SEQ ID NO: 49069 - DNA, 411 bp, Zea mays
  unsure (1)..(411): unsure at all n locations
ttgaaactcagctgaaccaagacncgcgtcaccggaatagcgaaaccgtgcttatcggagttcattctcccgccggcgcacgtggaccgcgtaaatcactgagccattttcagattcaatgcacaggtagcctctacctcatcccaagaagctcaccgcgccattggattggactaggtcgctgtggtttggccggcacacacgccgccgacaaggacaaccgtctgcgcacgtggaccgagcgaattcgggcatccccgcctgcgagccgtacgtcgttgtgacccgcagagcctcccgagctaaccctaccctttgccgacttttttgtggccggaagcgcggcaccctttctctttgtggactggtaaattgagaggaccgcgggaaaggaaaaaagccgggggtttt

SEQ ID NO: 49070 - DNA, 239 bp, Zea mays
agatcggttcctcggtggacggggagaatacacatttatgacggactccatgatgcacaccctcctgtataatgcttcgcccatgagtgcatagagagcctactgtctggcaacgcgctctgccaagcacttgtcgtatggagcttcttcatcttttatatactagacgattaaccctctccactcattagaagtcgactcgggctgatctataatgttggactcttctgcctgatcca

SEQ ID NO: 49071 - DNA, 378 bp, Zea mays
  unsure (1)..(378): unsure at all n locations
tgcgaaggggcntcatacccacatgtgctaagtggcgatgtcttattcagcccatgctagtcttagctattaagcatgcatctagaccggccacttctattgctaaatcaactaaataaagtttgccgtctaatacacccttaaaagctagtgaaccatcacttcttctaaagacagacacatctacatttgttaatagacagttatatcccatatgacataattgactaacagatagcaaattatatcctagactctccactaaaaacacattagagatagaatgctcattggagattgcaattntacctatcccctttaccttgccttgattcccatcaccgaatataactgaatcctgggaatccttattcttga

SEQ ID NO: 49072 - DNA, 367 bp, Zea mays
gccaccccatgctagtcttagcaattaagcatgcatctagaccgacctcctctttagaaaatcaactaaatagagtgtgccgtctaatacacccttaagagctaatgaaccatcacttcttctaaagacagacacatctacatttgtgaataggcaattatatcccatattacataattgactaacagatagcaacatatatcccagtgaatcaactaaaaacacattagaaatagagtgttcatttgagattgcaatcttgactaaacctttcaccttgccttgggtcccatcaccgaatatgattgaatcttggggacccctcgctcttgacgtaggaggtgaacatcttcttctcccccgtcat

SEQ ID NO: 49073 - DNA, 381 bp, Zea mays
actttttatacttcatcataccccagcagcttgcccactcatgatgctaacaatcctcttcctttttaccccctcggcccctttgtccagccctttagtatccgggtattcgaagtttaacgtgtccatcacccgattcaacctctcttattgccgggtgcccaaggcggaagcactaattggacatccttattggtgtaatgccaaggatttcgttgcacatctgttcgatcattattagcaactctttgcatggcttcttgaatagcttctcaaacataaaccactaagggagccgaacacgttctacttttacccccccttctttttttaggcattcccagcactagagtccgaaaattcaattgcaagactcttgac

SEQ ID NO: 49074 - DNA, 322 bp, Zea mays
gaggaagctctgctcctagcacacgcaatctttgagctgccttcaccgacaccggtcgtagtggcacctcatcttgatgagttcgaaacatgcactttccttgttgacggcttcagcaatgacatggatgaaagatggtggctcgacacctgcgccactcattacattattggcctaccgtgagtcttgaccgagctcgactctagcgtccgatgctccgtcaagtatggggacgcctccggtgtagagatcaatggcaccggctcagtcgtatttactgccacgtctagtgagcacaagcttgggacaactggatgagaat

SEQ ID NO: 49075 - DNA, 419 bp, Zea mays
taaggatactattcaactaaagtaagatgaatttgatatattgctcttgtatgacaacttcctctccttcagttgtcttgagattctatccttaacgggacgctccatactataagtgaatttccttgcaagataatatgtccaataaagcatataacttttgcatcgaccataattgtgcactaattgaaaaagaagtggaatctatcctctttgggtctccaagaaatgatagattcatatctcccatctcacgtatatatgattattactctgtgaaaacgctccccttgtgtttcataatgctctcttttctaagggtttaaataaagtccttccaagtgctttaaaatggattcaaaatccaccgatataagagtcttggatgtttaatcattgagttcaatgggtctcatata

SEQ ID NO: 49076 - DNA, 459 bp, Zea mays
  unsure (1)..(459): unsure at all n locations
ctcagcttctaagggagagcacattntaggattaaccaatgttcattttgagaaagacagggtttgtagggcatgtcaagcccggaagcaagttggcacccatcatccacacaagaacatcatgacgaccgacaggccactcgagctactccacatggatctattcggccccattgcttacataagcatcggcgggagatagcattgtcttgtaatagtggatgattattctcgcttcacttgggtattccttttacaggaaaaatctcatacccaagagaacttaaagggattcatgagacgagctcaaaatgagttcggcttaggatcaagaagattagaagcgacaacgggtcggagttcaaaaactctcatatcgaaggctttcttgaggaggagggcatcaagcatgagttctctttccctacacaccacaacaaaatggtgtattggagagga

SEQ ID NO: 49077 - DNA, 397 bp, Zea mays
agcttgtgtctgctactcatggagctatcacttcttgttgcatcgacgggacttcttgccaaccacaacattcaagacaacttcccatcaataagcgattatgcaacttactcgaatccattgatgaggatggtgcggctggttggactacaatacattgaaggcgtcgtgggagactcaattcggtagatcctttaaattagcaacaaccagtctcccaacttcccccccatctggtctagaaaaatttgcaggtgagtcttacaggtaaatgcttccaatttttggccaaaggctactatgccgttgattggagggatccactgaggtgcctttgtcgtggaggtgttgcccacaatgcctagcattgcccgaacaagcctatagctgctacttt

SEQ ID NO: 49078 - DNA, 450 bp, Zea mays
ataaaactaacttataaatgacggaaagtgccttctaattgatctttctggaagaggtctatgtcgagcaacctccctgctttgaagatagtgagtaccctaaccatgtttataaactctctaaggcgctgtatgggctcaagcaagcccaagagcctggtatgaatgccttatacatttatttatcactaatggattcaaagtctgaaaggccgatcctacactcttcacctaaaactcttgaaaatgacttgtttgtatgccaaatttatgttgatgatattatatttgggtctactaatgagtctacatgtgaagaattattatgatcatgacacaaataatcgagatgtctatgatgggggagttgatgaagtatctcttaagatattaagtgaagctacttctagaaggcaccttccttagccataccaactatactcaagatat

SEQ ID NO: 49079 - DNA, 473 bp, Zea mays
  unsure (1)..(473): unsure at all n locations
agcttctaaagggagagcacnatttgggactatcctatgttcattttgagaaagacagggtatgtagcgcatgtcaagcacgaaagcaagttggtgttcatcatccacacaagaacatcatgacgaccgacaggccgcttgagctactccacatggacctattcggcccgatagcttacataagcatcggcgggagtaagtattgtcttgtaattgtggatgattattctcgcttcacttgggtgttctttttgcaggaaaaatcacatacccaagagacattaaagggattcttgagacgggctcaaaatgagtttggcttaaggatcaaaaagattagaagcaacaacgggacgaagttcaagaactctcaaatcaaaagctttcttgaggaggagggcatcaagcatgagttctcttctccctacacgccacaacaaaatggtgtagtggagaggaagaatagaactcta

SEQ ID NO: 49080 - DNA, 479 bp, Zea mays
  unsure (1)..(479): unsure at all n locations
nggctccaatccttgagtgctcctaaagtcgggagggtcctgtaggctcctatcttatatgatcctagagtcttggaggcacctagaggccaaaagggctctggacctccggtagccttgagggtatctcgagatttagttgtctaggccaaagggccttgaagaccaggagaactatatgatttgttcccccagcctaaagagcatcagaggtgtggaggaccctggaatttagttggaaatgggtatggcctcctaagggcatgagccctanggtacgagggtggcatgaggtttggtcactttacgttttcttttgctaatgatatctcatttaagacgtactactagtatatagcggtatggccttctctaacgctgacaactatattatttaccattatgtaacattcttgccctgctttccttatnaggttaactgtcaaaaatagttnttgcatatgataatatgggtttgt

SEQ ID NO: 49081 - DNA, 487 bp, Zea mays
gtcacctgcggcatgcaagcttatgaaggttcttcattccaacatgtgctatactattgtaccaaagccaacccatgttagtcttagcgattaagcatgcatctagatcaacattctcttttgagaaatcgactaggtagagcttgtcgtctaatacacccttaaaagctaatgaaccatcacttcttctaaagacagatacatcaatatttgcaaataagcaattataacccatatgacataattggcttacagacaataaattgtacccgagcaattctactaaaacacatttgaaattgaatgcttggttttgatggctattttgcctaagcccttaaccttgacttggttcccatctctaaagatgatagtgtcttgggaatccctgttctttacgtaggaggtaaacattctcttcccccgtcatgtggtttgtgcatccgctatcagtattccagctagagcgcctggatgcataaacctg

SEQ ID NO: 49082 - DNA, 360 bp, Zea mays
  unsure (1)..(360): unsure at all n locations
ngagcttcactggtccatcgatcagctagtcctattaacactanctcgttgtattcactgctcatcgggatgcataaataggatggctatctatgagttttaacgacattcattgccttcgtgctattttgctgctgaaatctttactacctccgaaggtctgttcacactatcaagcttttaacaaagcttcaacttgtcttacaatggttaggattttcacgaccgttagattgtgcaactagggtgaggccacatacatgattgagacagcatctatctcggaagtgatgaaggagcccgacattgctgatcctattactatggaagaaatgtctacttcttgaacaagaattatga

SEQ ID NO: 49083 - DNA, 292 bp, Zea mays
agctctctaatggagaacacattttgggactattaatgttttttttataaacaggtggtacgcacgtctcctggtacaggcggtcacccaattccactttacagtctgacgacccatagccgctggagtactccacatggaattatttgaaccgatcgctgacttaagcatccttgggggtgagaattgacttgaagttgaggctgatcattctagtttaactttgggatacgttttatatgaatagactcatacccttgagaacattatgggagtgttgacacgggcttct

SEQ ID NO: 49084 - DNA, 457 bp, Zea mays
  unsure (1)..(457): unsure at all n locations
agctntatcaaatggacgtgaaaagtgccttcctcaatgtgaccaataaggaagaggtctatgttgagcaacctcctagctttgaagatagtgagtaccctaaccatgtgtataaactctctaaggcgctctatgggctcaagcaagccccaagagaatggtatgaatgcctaagagattttcttatcactaatggtttcaaagtccgaaaagctgatcctacactctctactaaagctattgaaaatgatttgtttgtatgccaaatttatgttgatgatatcatatttgggtctactaacaaatctacttgtgaagagtttagtaggataatgattaaaaaagtcgatatgtctgtgatgggggagttgaagtatttcttaagatatcaagtcaagcaactccaagagggcacctntatcagccaaaccaaatatattcaagacatactcaccaa

SEQ ID NO: 49085 - DNA, 481 bp, Zea mays
  unsure (1)..(481): unsure at all n locations
ccctngtagtcccaactctttgacccaccttagtatgacccattactgcacaatttatcctagcaatgcctagcgtatgagcgtgactaagctaatacaacataagagtttgaatgtagcatgattaacaacatggtgctaccatcaaataaaatattcttgataatgggaatgtcaggctttggaccaatcaacaaaacacaaaagaaatagcttcagagaaagatctagcatgtaggtgtctagaggcctatattagatctaagtggtcccatatgccaatcaccttcactcaagatgaccttcggcttagagattacccacataatgatgctatggttatcagctgctacataaaaagcttcatcatccacaatgtgttggtcgatgatggaagtgcaacagacatannattttccaaagctctcaagctaatgcaagaaaataaataaatatttgcagagtgaatggatcattgtgt

SEQ ID NO: 49086 - DNA, 456 bp, Zea mays
  unsure (1)..(456): unsure at all n locations
agctntaaccttactactagaaatttggtggttctcttatccatttaggtcaagtttggttaggttaaatggtcagattattttagtgttctactgatttcctttttatgttttagtgaaagtttattataattcctatctgaattgattgggggtgagattcattattcttcccaatttctctcttttttccccttttctcttatgttttaaggtggggttgaactacactctagttttataaatttccaaaaattctgtaaaaactacagtagcttctcactagtatataactctctgtctcaaaaagtggggcttaaaaagttaagggttctctctgtacaatattatcaaatcttatggcagagggagtgctttgaactacaactctcctctaacagtggattattctctaaggcttattntttttctagcatttacgtgtaataacatgac

SEQ ID NO: 49087 - DNA, 474 bp, Zea mays
ctcagcttcaaaggtgccatcttgatactttctagataactggtattgtatgaaaactctgctaggggcaaacattcatcccatttttgtgagaagtccaggacacatgcccgcagcatatcctcaagtatctgattaactctctcagattgtccactggattgaggatgatacgccgaactgaggatcaatttggtccccaatgattgatgaagatctatccataacttggatacgaactgaggtccacgatccgacactatggtctgtggaataccatgcaaactgagaatacggctgatatataatgctgcataagaggctactgtatagttcgccctgacgggtaagaagtgggctatctttgcgagtctatcaaagattacccacatagaatcataccctttggccgtcctgggcagtcccacaatatagtccatactgatgtcttcccatattcatgatgggattggc

SEQ ID NO: 49088 - DNA, 458 bp, Zea mays
  unsure (1)..(458): unsure at all n locations
acctgccgcatgcaagcttgatagtattctgtgatagattatggtgtaccttctgcgtangcgcagctgctattctaatttcaccatcaaaaatcaaaatctgctatacagccagattggagttcaattgcacaaacaacattgcagaatacaaagttgtccttttggggctttgaaagctagggccatggggataaaatgagaagtacttaaatctgactctcaagtcatcacaggccaggttgaaaaaagtagtaatgcaaggaatctgaagcttgaaaaatatcttgccacagtccgaaggatggaagcctccttcaaaggactctcagtgaaaaatatcccaagaggagacaataaacaggcagatctactagctaaatcagcaacacaggggctccctcttcctccacaagtattctttgtaactctcaaagcaccttcgatttaactcatgg

SEQ ID NO: 49089 - DNA, 417 bp, Zea mays
tctagagcattggacttctcatgacttatattgtcatgatcttgcccatcgtaattatgatccctgaagctgttcacattttcatgtgctctgatattgcacatttcttcagttgcttcatcaatctttctttggagctctgaaagatgaagcatcttctccttgcgcttctccacttgctggtgaatggctttaaggttgctgattatctcatcaagctcttcttaacaaggggcgagctaatggccttcttcttctagttccttgcctctctgatgagagcttcattccctttattgggatcgatcggtgcaaggatggagctatgtcttgctgcttccttcggtggcatggtgtatgttgatgatgcagcgaaatcaccggaggtgggcgccaatgttggtcacttggttacta

SEQ ID NO: 49090 - DNA, 439 bp, Zea mays
  unsure (1)..(439): unsure at all n locations
agcttatatatccaatgcatcaatgggtcttctttgtctcgacctaactggtgatgggtcatcagaaccttcaaggggtaacaataatcatctttgaaccagtcaatcaagacacagttggctggtccagatgcattggatttggttttggaagggtgcatgcgttatgtggtgctcctttacgggcatgctagatttttttcacacgatggcgagttcaacattaatgaagacatatttttcttgtggttacatattgaaggccggcgcacaataccattgcctggatggtaccagttattattctgcagttatttcagaagaatagcaatgacaactacatactaccagactagcagtcaagccagctganattagctgaaattagggggtgtttggttcataaatggctaaatatttagtcccttcattttatcta

SEQ ID NO: 49091 - DNA, 463 bp, Zea mays
  unsure (1)..(463): unsure at all n locations
ntaagctctttgacaagaaaatcacttcacccagttntaacttataataatgcatcaatgcaggaatgaaatttttgagaggttaaactaggtgtgaagcaggtatatgcatagacatgctttctcttccttttataaaagatatgtaaagaatgtatatgagaggaagatttaggtacatgtataaatgagaggaagtagtttacccttttgtacctttacatagagatgctctcttcattgtgctttgtccttagtcttggttacttaagacctatattcaagatagtgtatggaaatatttccacaagcgagagttctacaactagtgatccttttctaagtcattttgtcatatatcaagtagatcacaaattggcataaattatcctgaattctccttttgacttagtgcatatcaagagagacattaattgatagtatatgaggcactaagcaacat

SEQ ID NO: 49092 - DNA, 453 bp, Zea mays
  unsure (1)..(453): unsure at all n locations
agcttcggctccatctatattatggattgcttttgagtatgtccagataccttcggcttttctagcggcttcctgactctaatgaacagcaatgggcccttcttccgaaggtatcttcatgcatagatatgctggatgaagtattgcttcgaaagcattaagtgtcccatgaccaatgattgcattgtaggggtattccatatcaacaatgtcaaacacaacctgttcagtccttgtattgtggacgaagccgaaggtcactggcatcgtgattttgccgagtgctacaatctgccttacaccaaagccacaaagagggtgtgtagcatcatgaatcttgtcctctggctcttgcatctgtctgaaagccttancaaatatgatatncgctgcactgcctgtatcaaccagaacattgtggaccagaaatcctttgatgacacatgatatgac

SEQ ID NO: 49093 - DNA, 446 bp, Zea mays
acacatccaaactcagcttgtcttcgctcagataccacccacaatcttacggagttgtgtttcgcgcaaatggcaaaattatcacagctgtcaagaagatgctcctcgacgataaaaagggcaagtgggccgatttgttacctgaagcggcctgggcattaaacacgactgagtgcatggcgactgggttcacccctttccgacttctatatggatcggaagccatgaccccgcaagagataaagcatgggtccccatggacagacccgtcagctgtccccgacgtggacgagcccacttcgaaggaccttatctacggagatcgcgtcttcgccctacatgctcttaataaataccaagcccaaacaaaggcatggcgcgaccacactagcatcccgagggaattcaacgaatgagacctcgtactcttccggacagctcggaca

SEQ ID NO: 49094 - DNA, 462 bp, Zea mays
  unsure (1)..(462): unsure at all n locations
tagcttatgaagattcttcatcccaacatggactattctgtgatgccagagccaacccatattagtcttagcaattaagcaagtatcgagctcagctctattaaaatcaactaagtatagctgaccctctaatactcccttaaatgctattgaatcatcacttcttctaaagacagtaacacctatatccgtaaaaagacaattggaacccattttgcataattaagaaactgaaagcaagttataatctaaagagtctacaagaaaaatattgcaaatggaatggtcaggagatatagcaattttaccaagtcctttgaccaaacacttgattccatccncgaatgtgatagctctttggcgatcatccattttctcgtacgaggagaacatccttttctcccctgtcatgtggttggtgcacccgctatcaatgatccaacttgagcccncggatgcata

SEQ ID NO: 49095 - DNA, 398 bp, Zea mays
  unsure (1)..(398): unsure at all n locations
ctaagctaatgacggaagtgcactttactcganaatatattgtggtgttggattaggaatacagcgggtgtgaaccattctatctcgtgatgaacagttaaacaacgcagatcctaaataaaccctaagctgtacgaaggatcccagcattgccaagacacgggaacttaccacgcactccttaacgcatagcgtgaatgcagcattcctccttttgaccggtgcagcggtcacactggactccgcctctgtgctctggaacgcggccaggtccattccggagccttcgaagaagcgcgccgccctcgcctgcgacttgagcggtgacggctcgcctgtcaccacgaacacagggaacacgcccatctgcaggaatcgcagacacaatccaacggaaa

SEQ ID NO: 49096 - DNA, 462 bp, Zea mays
  unsure (1)..(462): unsure at all n locations
agctngagagacatgagagatcttggagattttgttttggaagatagctgtctttctccacggacttcattctccttacaatgagactatcacatgaaatagacttgaaaaggtgttattctcaaagtattatattatagagtaacctccccctgaaggtgtgcatacaagatttgaatacttgtaggagacatgcactttgatttgatatcaagaggggtaaattatctataatcccaactttggcacatataagttaaatgatacaacttgtagaaatcacaattttcaattgatgcatcatttactatggagtgatatagaagctatgtgccgtgcttaactaaacattttaagccatgtaggttcgcttaagtatttgaattgaaaacaagcaatcctaccatatgatttacctagtatgcatgatgttaaacaaaagtacataacaaatgtaatact

SEQ ID NO: 49097 - DNA, 467 bp, Zea mays
taattcctattccaatatgttactctcttgatcgcatcctcttcttgtttgatcatagaataacatcaaatgacacttagtgcctcatattctttccaatcgatacctctcttgatatgcactaagttaaaaggagaattcatgattcatttatacaatttgtgatccacttaatatatgtcaaccatgacttagaaaaggatcactagttgcaagaactctcttttgtgcaaaatattttcacacattgtcattgagcataggtcttaagcaaacaagactaaggacaaaagcacaatgaagagagcgtctacaagtaaaggtacaaaacgggtaaaacttattcctatcatttacatatgtacctaaaatcttcctcttatatacactctttccatatcttgtataaaaggaagagaaagcatgtcctttgcatttatctctgcttcatacctacgttaacctct

SEQ ID NO: 49098 - DNA, 461 bp, Zea mays
agcttggtgccaatggagaagcaaaattctttttgtttggctcgcaaactgcttgcacgtgtcaactgttagttcggacggtactccgaagcggcaaacgatgttttgccaaaagaatttctgggcagtttttgatgttattgtggaaacagcccttgcctcgatccatttggtgaagtactcgacagcgacgaatgcgaacttaaggttcccctgtgcggtgggcaggggcccgacaatgtccaggccccagcgctggagaggccatgtgtgggcgatcagctttgtatactgcgaggggctgcttgaccgacgggaaaacttctggcacgcttcgcaggaccttgtgacccgatttgcggcgcagatcattgcgggtcagtaaaagccttggcggatcaccttatcagctaatgccctttggcctgcgtgcgagcccgacgtgccactgtggacttccg

SEQ ID NO: 49099 - DNA, 431 bp, Zea mays
  unsure (1)..(431): unsure at all n locations
tctanatggagaacacgtgataggtctaactaatgttactttctgaaaagatagaccttgtgcagctggtcaagcaggtaaacaggtgggaagctctcatcataccaaaaacgtgatgaccacatcaagacctttggaattgcttcatatggacctcttcggacccgtcgcctatctaagcaaaggaggaagtaagtatggtcttgttatagctgatgagttttcccgcttcacttgggtattctttttgcaggataaatctgaaacccaagggaccctcaagcgcttcctaaggagatctcaaaatgagttngagctcaatgtgaagaagataaggagcgacaacgggtccgagttcaagaaccttcaagtggaggagtaccttgaggaggaanggatcaagcacgagttcttcgctccctacacaccac

SEQ ID NO: 49100 - DNA, 440 bp, Zea mays
  unsure (1)..(440): unsure at all n locations
agcttaacgacgatgagtgtgtctcttatctgttattgaaagagatgatgcgcgcgatgactgaagcttttaaaaaataccacgactctgtggcgacatcctatgagcagcttgatcgatgagttgctgaacttgttacacgcatggacgtactggaggctcgttccccaccaccaactccagccgcagctcactctcctgtggacgacgatgacgacgatgtttatgcaccactgcgacaatgccttgcacgtaatcgacaaggtatgggaggtaatggtagacatcgtcatcataatcttgaaccagaccatgatccatttgctaagattaagttctctattccaccgttcatgggttcttatgatgctgaagcttacttagactgggagatgacggtagaacanaaatttaattcccatcttgttcctgagcagcat

SEQ ID NO: 49101 - DNA, 409 bp, Zea mays
  unsure (1)..(409): unsure at all n locations
tagacctctaatttcaatcttagtctgagggcatgattgattgtctctaagttcacctcctggtgatcgaattaatagtttcttcttcaaggggtagtttggtatattatgttttttcacaaatgactttgttacgaaggaatgagatgctctanaatcaaataaaactgatgctatggagttaatatgaaacataccatacaccacatcggcatccttaggaactgattctgttatcacgtgattaactcttcccctactctggttctgtggaatcttgatctgtgcagttccacgagcaggtgtgttctggtcagtcctctagttgctattcttctggggtgtctgttgattacgccttgcgcaattgttagcatagttgccaaagttgccacacttgaaacaacca

SEQ ID NO: 49102 - DNA, 459 bp, Zea mays
  unsure (1)..(459): unsure at all n locations
actgaggatgaagctgcactgcaaacgaccagtgactcgtctttatatctacggnccctggcaacgacgcagaggtcgttactgagctcgacgccgacgaagcctctcccaccgctgcctcccaccatgtctcgaccaaggaaatgcacgtgaggatgaaaaatgtcgtggaaaccagtgggatggaggcactcatagcgattggggaggagtttacctcccgcatatatgcaggatgaatctgcgtggatgcgtggccgcgaacatgttggggaagtttgtgtggtccgctggaggagaaaaaaacacgatttcccctacaaaacatttttcgggagttctgcatgttttcttggagttgctctaaccgtcgtcgactcatcgttgtgatacatacatgatacatgcatacctattgataatagatcgngatgtaaatgcctcctacataattattat

SEQ ID NO: 49103 - DNA, 476 bp, Zea mays
  unsure (1)..(476): unsure at all n locations
acgaagagggaccttcggctatcttatacaaacagcttcatccgaggatcacttctttctataagaccttcggcgacgaagcatagacccaacagtagcccctttcgcggtgctagatcgtttttcgtaacgagcttgatccgtgaaaaaagtttcttaagcttcggagcgccgaaggtcacaaaaacacctttcctgagctcgttgtcgagaaacgattcaatttccctgcgcgtagcggccccaccttgcagagttactgttcggtctctgcggtccaccgtacagcgagtgcaagcgggtgtccgcctggtgtaaaacttctggcgcttcgccttcttacctgcggcactatataaacagacgagtaggtgtgaagttaccacagcatttactgctatttgcactgttntgctgccaaaaattttaaccgtcgccgaagcttgtttgtcagaatcgaacgaagcttcatcttg

SEQ ID NO: 49104 - DNA, 412 bp, Zea mays
tctaaacaatgtaggggagctgaacgcgatgctgtctatggtgacatgactgaacacaccggagcagaggctgttgttcatggtgaaagagagggatgacaccgaccaccttcacatggttggggtgagggacaaggacaatgtccttcttctagatgacccggcgctcaaagacatgaagcttctggctcttataaccccctaaacgaccttcttcttatattcaatcgtgacccgcaccgcatcttgctatcgtgctaactattaccactgattattacttacagagtacaagatcgtactactacttattatcttcaagggacttctagatcctggaagagtttttataatccggaatccgagggtcttgttctatgaagtcctcctacttagtccactcgcactctta

SEQ ID NO: 49105 - DNA, 326 bp, Zea mays
taccataccagtgacatgggcgtacgcatgctgaggactggatataaatggacctttcaagaaagcacaaggaggaaccctcatgactggtagcagccacacatcacaaaagaatgaatcaaccattgcttcttaaccccacgccaggccgtggaattcataccagacataatatccacatccggaacaccaaacactatcataactgactcaggatcaaactgtacgagctcaaaatcctttcatttctgcgaaccaaaaagcattcagatcaataatgctcctgtagcgcacccgatggccaacgcgcaagtcgaacgagctaa

SEQ ID NO: 49106 - DNA, 472 bp, Zea mays
agccgcatgcaagctttgacatatgcccataggacatatgatttgtaatatgtttttcgaagcgcattcatccccttatgcgaatatcggtgacctggataacaacacattcaaaggtctaacaagtgtgctaagtgtagaacaggaaattcactatgatgaacatacctgaataccgcgtgatgaccagagaacaaaggatcaacacacggttaaataaccacagagacaatgcaaatggatataatatggcctctacactggcgtgaatatatggacaagacttgagaaatcactatgataagaatgatcatactagaggtggaagcgactaagaggactggtcaacccaccgtgaatgagatatgatgaatcatgaattggcttgacacatattactattacaccatatatgcctatatgagaatcaaactacagcttgactaatcttaacatttatatctagatgaca

SEQ ID NO: 49107 - DNA, 487 bp, Zea mays
  unsure (1)..(487): unsure at all n locations
ctcagcttatatggaagaaagtgcaggactcctctatattgcgatcttattggagatttacagnactttgagcctgaactgaatcaagaagcagaagaacaagtccgtataatacgagagaatttgagggtggctcataccaggcaaaagagctacgctgataataaaagaatgccactggaatttgaagaaggagattatgtgtatctcaaggtgtcaccacttcggggaatgaggagattcatagtcaagggcaaattgtcccctcgctatattggaccattcttgatctttaggcgagttggggagatggcataccaactcgagttaccggatagtctatcagatgtgcataatgtgtttcacgtatctcaactcatgaagtgtctccgtgttcccgaggaacagttacccatggaagagctcactgctctaggtgatttgacttacacggagtactcgatcaagattttggatactttgacta

SEQ ID NO: 49108 - DNA, 203 bp, Zea mays
gcacgcagcgggcgggggctctatccaaaggcgacctagacctggcggcattgggctttgccctgcattgacatgaggaatcgcaaagggagagatacgctttgggacttcaatgctgaccagattcaccactagaacccagaaactaggaagaagagccgttctaaacttcggattcggagagctctatgttgagaaaacgc

SEQ ID NO: 49109 - DNA, 363 bp, Zea mays
tgtgtgacacccctgcgagggtgctccaatgaagattagtggagaatatctactaccgtgacaagaggaaacacttgaaaatctttaaatccttggataaatttccacaattatatttctaaaaaattacattcttagatttttcatgacagcatagtattggaatttacgcacaaattttttgtatacacattatgcactcacgtgaagttatgctaataaatatgataagcatatgtattgtcacgaacaaatcatgaagataaataaacatctagtgaagaattcaaattaaaatagactgttttctacgcccctctcatccccaactgatggcctattttgacacaagaaagtattggg

SEQ ID NO: 49110 - DNA, 480 bp, Zea mays
  unsure (1)..(480): unsure at all n locations
cgtcccggatcttaagtcacctgcggcatgcaagcttgtgaagattgtggtctcaacataacttttctcttgaatatncctgactcttcacttgctaataatttgtattcaccttcaaaggtatgtgcatgcatatataatattattattatgttcttacttctttcagacttatttgaatttcaaacacgcagaacgatttttttacccctgagggacacttcactgcgcatgcggagtaaagataacctggttttgttacttttcatttcagagatgtggatatcttcaaattgcgtccaataagcctgcttctatacctgacgcttgtcagactgagattgaggatggtgagttcatacctgatgtaggaaacatccagttntggtccatgcctggacatgggaagggagcagcaagttgtgatgctgctgctcacagtgngaatgggatgagttctcagtgcncaggccatagtaa

SEQ ID NO: 49111 - DNA, 470 bp, Zea mays
tcagggttcgcctattcacccccctctaggcgactttcaattggtatcagagcccggtgcttcattagagtctaacaacttgaagtgatgtctgccgaacacgccaagagggagatagtcatcagcgaaaagaccgaaggctcgagaaggaagaacgacgaacggactccgtccgacgataagcacaaggtggaaaccgcttcctccatcaagtcacttaggaagggtgataagaagaaaaagaaaatgaagaaggtggtctactacgagaccgactcttcgtcaccttccacatccggcgccaagtctacaacttcgaaacgccaagagcgtaggaagtatagtaagatgcctctacgctatcctcgcattcctaaatgtgctcctttactttccgtacccctaggcaaaccaccatattttgatggtgaggattattgtatgtggagtgataaattgacgcaccatct

SEQ ID NO: 49112 - DNA, 466 bp, Zea mays
ctgcagcatgcaacttcactatggttaaatttctgtttcttataaatgcaatagcaatgaatgctgtggtaacttcacacctacccgactgtttatatagagctgcaggtaagaaagtgaatcatcacgatttttacaccaggcaaacagatgctcgcacccgctgcacggtgggccgcaaaaacaaaaatagtaaacctgcatggtgggacctctacgcgctcgaaaactgtatcgtttctcgacaaccagctcatggaagggtgttttcggactttctgcttcctgaagcctaagagacttttttcacggatcaagctcgttacgaaaaacgatctatcaccgcgaatgggctactgttgggaccatgcttcgtcgccgaaggtcctgcagaaaggaaacaactttcactgaagctgcttgaacgtaatgccgaaggtatcattcatgaaacttccgtattata

SEQ ID NO: 49113 - DNA, 469 bp, Zea mays
  unsure (1)..(469): unsure at all n locations
ngaggctgtgtatagattaccgccctcttttgtctgtaactttcaagaacaagtatcctttgcctctgatagatgttctctttgaccagtcggtcggtgccaaggtgttttccaaaatagaccttcgctctggctaccatcagatcaaaattctagcaagtgatatttcgaagaccgcgttctcaaccagatatgggtcatatgaattcttggcgatgtcattcgggctgacaaatgcgccagcatatttcatgtatcttgatgaattctgttttcatgccggaattggacaaattcgtaatggctttcatcgatgatattctggcgtactcgaagaacgaataagaacatgcccggcatttgcatgtagtgcttcaacgtctgcgagagcaccacctttatgcctagctattcaagtgtggatttcggctaacgaaatcaaacttctgcgtcacactatttctctgat

SEQ ID NO: 49114 - DNA, 376 bp, Zea mays
  unsure (1)..(376): unsure at all n locations
tctcaacggagagcacatcttgggactaactctatgccattttgatacaacagggcccgggcgcatgtcaagcccggaagcaagttggtgttcatcatccacacaagaacatcatgacgaccgacagaccgctcgagctactccccatggacctattccgcccgatcgctcacataagcatccggcgagaagaacgagcggctcgctatagtggatgaatattcacgctccactacgggcggtctattctgcaagaaaaatctcaaacccaagagactttaaagggattctngagacgggctcacaacgtgctcggcttaccgatcaaaaagattagaaacgacaatgggacagagttcaataactcgtcaattga

SEQ ID NO: 49115 - DNA, 424 bp, Zea mays
  unsure (1)..(424): unsure at all n locations
agcttgttagtgttggacaacaactgattatttttctttatggaaatctgttttccctactgctgagatacaggagtttgttcattcgctctcttatttaatccatgtattccctaaccaagtggataattcatcttgcataaagaaacggatgaacaacatgaccaaatggatttttacccaaatgcatgaccttttgtttgcaaatgtgaactctcaaccccttggcttaccaatggtactaagaggatttgcttaatgtcaaaagtagttcaacaagttggttttaactaacttgtaactgcccgttgaacgaatgttgagtttagagatcgttttatcgagttgtctaagctcacttntgtacaacccctcttaatgaagaatattcaagaatcgagaataagtcggtcaatgaccacct

SEQ ID NO: 49116 - DNA, 372 bp, Zea mays
cctggccaagcaggtaaacaggtgggaagctctcttcattccaaaactgtgatgaccacatcaggacctttggactcctacacatggacctcttcggcccggacacctactttaatattgggggaagaagattgctcttgtatggtagggattttccccctccatttggtactctttgcggggaaaaaaaaccccaggggacctttacgcgcttcctagggagagctcaaaatgaatttgtcttagggtgaaaagaaaaacgcgaaacggtccgagtcaaaaccttaagggagagaccttgggagaaggaataaccgattctccgctccctaacacacacaaacgggttgtagaaggaaaacagacgctcat

SEQ ID NO: 49117 - DNA, 403 bp, Zea mays
gtgctcatagcaatgaatactgtggtaacttcacacctactcgtctgtttatatagtgctgcaggtaagaaggcgaagcgccagaatttttacaccaagcgggcacccgcttgcactcgctgcatggtggaccgcagagaccgaacagtaactctgcaaggtggggccgctatacgctgggagattgaatcgtttcttgacaacgagctcagggaaggtgttttttagaccttcggcgctccgaagcttaagagactttcttcacggatcaagctcgttacgaaaaacgatctagcaccgcgaaaggggctactgttgggtctatgcttcgtcgccgaaggtcttacaggaagaagtggtcttcggctgaagctgtttatataagatagccgaacgttcctct

SEQ ID NO: 49118 - DNA, 469 bp, Zea mays
  unsure (1)..(469): unsure at all n locations
tcgtcatctgaaaggaaattgccctgaagaaaagacatgatctcagttctccaatcttcgctatagacaggagatatattgagcactgctctttcaataaggtcaaccgaaggtgcttttattgtttcaaagaatacttccgaaggtaatggcagcccctgtgccgctgacttggctagtagatcagcgtgctcattttctcctcgtggaatattcttgacagaaaacccttcgaaggacgcttcaagtcttcgaactgtatctaagtatttctccagctttggatctcttgctttgcaacttttgtcaatatggccagaaattacttgggaatcagttntgagaaccgcccttcttatacccattgccttcaactntcgaagacccaaaagcacagcttcgtattcagcaatattatttgtacaactaacatcaagtttcactgtgtagcatgntctgactttggaag

SEQ ID NO: 49119 - DNA, 423 bp, Zea mays
  unsure (1)..(423): unsure at all n locations
atgcaagcttgtgaagggtcttcatccccacatgtgcttagcggcgatgccacagccagcccatgctagtcttagcaattaagcatgcatctagaccggcctcctcttttgcaaaatcaactaaataaagtttgccgtctaatacacccttaaaagctagtgaaccatcacttcttctaaagacagacacatctacatatgtaaatagacaattatatcccatattgcataattgactaacagataacaaattatatccaagagactcaactaaaaacacattagagatagagtgctcattagatattgcaattntacctaacccttttaccttgccttgattcccatcaccgaatattattgaatcttgggaatccttattcttgacgtaggaggtgaacatcttcttctcccccgtcatat

SEQ ID NO: 49120 - DNA, 451 bp, Zea mays
ggtcgtactcccacagctcgtatgttgctcggataactctcatcgtcgtcgcgctgtcgctgtggcgcaccaagtgccttagcactggacttcatcgcggagactcactggattgcatgtacggcgatcaccggagtaagcgccacggtgaaagccacccaccccttgctccagtattcttgattaactccggccgccgcgcgtgatctgctaaattcgcggccaccgctcgagggctctataaattgacctcgcccgtagctccctcagatagtcaagcaactcctacatcaatccgtgccctgaattatccacccgagagcctcagtttaggattatcccccaaatccaccaagaacaccgtgcgatgtgtgctccccgtggttagcctattccaggtgaattcatactcctctattgattgttctagcatccctaggctctcctaaaa

SEQ ID NO: 49121 - DNA, 450 bp, Zea mays
  unsure (1)..(450): unsure at all n locations
tcttgagcccctcaggctattaatgataataatatgtaccaccaggggttatgaagctggcttttggctcatcttccttcttcatccagatttgatggtagcctgaataacaatctagtatactcatgagttctgacgaagctgatgcgtctactatagaatctattcttggtaatgggaactcatccttcggacaagccttgttgagatcagtaaaatcaatgcacattctccatttaccattggccttcttcaccataacagtgttggctagccattctgggtattttacttctctgatgactccagcactaagaagtcttttcacttcattccgagaaccttcggctttgtcatcagacattntccgaagcctctgctttctgtgtctgaacgatggatcgacatcgagtgagtgttcatgacactcctgttgaaccacagagatcg

SEQ ID NO: 49122 - DNA, 482 bp, Zea mays
  unsure (1)..(482): unsure at all n locations
tgacattgtctccctgttggaatccaatgccatccttaataccatggcgtctcccgctataaagcatgctacgagcanaatttaaatttttattntctaactcatgctcgacaattntagcatctaattttgctatatgatcattttgttgtttaatcatagcaatgtgatcatggatagcatcaatgttaatatctctacatgttggggacttgttctcaaatgctatgaattaagaacaaggcaacataaaatgttaaatgttaacgtccttcgtccgcgaggcattattcccttgaggataatgaaccttggacgaaggttgatgagaatacgattacgaaggttaagtcttcgtaatcgaattttaatagattgtataagataacataaaataaagggtatcaaaggtaaatgaatcatanacgaatcatattatatttacttaatatatagaatcattaaatacagctatacctctg

SEQ ID NO: 49123 - DNA, 418 bp, Zea mays
agcttctccaccatgtcgctgatagccaaggtgttgcatttacctccatcaaagatcaaacgacatgaacgctccttaatgacacactcttgtttgcaacacaacaaatgtccagaatgtagttaaactgccaaaacggacatgatatgtagccgcggtggcaaaaacgaaccatagaagttcatggtgacggtggatctcgaggtgaccaaaacgcggcagaactcaaaaatctacaggaataaactaataccggcgactcgacacaagcgatgcaaccaataactcaacaagccctaactacgtgagactagaaaaagctcactgggctatatgactgcggcaaactaatctactatcgtccggcttgtgtggactatacgagactagaaaacagcgaagaaaatgaaatctctca

SEQ ID NO: 49124 - DNA, 440 bp, Zea mays
  unsure (1)..(440): unsure at all n locations
agccgagaggcatggggtatggatttatacttctgtantgttctaatcccagcaagaatttcccaaaatcttgtagttagatgcggagcaagatctatggatatgtgcgagggtttgatttgatgaagaacgatgatgtgactaggtgtccccacccgtcagtgagtaactgcaaacgcatgcgctgggagggaataatgggtcgactggcatgccagttttactgaatatgggtcagcactatgggaaaannnnaaaggcgccaaatggggtcttctcctttttatttactctgttgcattttctccactaaattcaaactctatatttgaattcaacttgtttggagttatacacagttgaatcccacttatgtttagttacaaattatcatatattattattattcgatatcttttcattctttcttatttttttta

SEQ ID NO: 49125 - DNA, 457 bp, Zea mays
tcatctgaaaacagttgccctgcttgtacgattctatttcaggcctccaatcttcactatgtactggtgaaattgtgagcacttctctttccatgagctccaccgaaggtgctattattgtttcaaaaaatacttccgaaggcaaagggagcccatgtgtcgctgatttagctaataaaactgaatgctcattctcttcccttgggatattttttacagaaaaacctctagaaaaggctttcaaccttctgactgcatctaaatacttttcaagcttcgggtcactcgccttactgcttttatacacatgacccgaaataacttgtgaattactcttgaggatagcccttcttattcccatagcctttaccttccgaagccctaagagaagagcgtcatacttggcaatattatatgtacagctgacgtcccattctattgcataacatgttctgat

SEQ ID NO: 49126 - DNA, 403 bp, Zea mays
agcttctaaatgagttggagccaccaactcgtcttctttctttctattagcaacaacctgtgactcaacctcaacactggagcaggagactacgggttgtcgcttggaaaaccaagagatgaggttggccccaagaaaaccgcatatctaaagttagaccggcgggagttcaggcacccgacctactcgagtgccgatgtagatgattagctcgtgggtggaggaacgctaaagatagagctcgtagtcgacaataccttggatcactcaagtgtgggtcacgagaatcgtgcctgtatagaacctgctggatagcatacatgatgtcaggcctgatataggtgagaaattgaagagtgtctgcaagactgcggtatgcagtactgacacgggcaacgttgtc

SEQ ID NO: 49127 - DNA, 168 bp, Zea mays
caccaaatgacacacgcgccatgattcccttcctcggacggaacccaccacacaccaaccgccctgatatttaccgacctccacgagaagaatgaaggcccggcgcacataccaacgcataaaatccccgaaaacacggccaaacagaaggagtggcgcaatgaagcg

SEQ ID NO: 49128 - DNA, 459 bp, Zea mays
  unsure (1)..(459): unsure at all n locations
agcatgccacctacgnaaaacattctccaaagctatactttatatatcaatatcgcncctccttgcgacctggcatgatatgcccctccttcacagcgttcttccgaagatagatatcatatttccttatgccacatgcagcatgatgtatgatgcttatgttatgcacagatgacgagacgatgctatgctatgtaacgcgatataccgaagatacacgcatatttgcgcgataaaacacataatctttttgtgaatcagcattgactttgcgctataagcctcccttaagagcttcttctccttttacttcagcggaaacaccgctgactttttgctgtaagctctgcaattccctcaggaacgtctttggagcttcttcgccttctacttaagcggtatcagcgctgacctttcgctgtaagctctgcattcccttaagaacgtcattggagcttc

SEQ ID NO: 49129 - DNA, 258 bp, Zea mays
catcttgtcaagcacggaaacatgtgggaagctctcatcaccaccaacacgtgatgacaacatcaagacccctggagctgctacatatggaccatctttgacccctccgctatctgagcatacgaagaagaaagtatgggctcgtgatcgcagatgactttacccgcttcacttgggtgctctttttgcaagataagtctgaaacccaacggaccctcaagcgctctctaaggagagctcaaaatgagcttgagcctc

SEQ ID NO: 49130 - DNA, 432 bp, Zea mays
  unsure (1)..(432): unsure at all n locations
agcttatacttaanagtatcatgttcataacattggttttttaaaaaaaaaagcaaaatgtgcaaccccaataaaaaccctaattgagccctataaacaaaattcaagagaaagggcaaaagagtgtgaagaatatataatcatggcttgggccaattataaacattaaagtatactaaataagcaacaaccaagattatggaagcttggccaaaacaatttaaataaaaccctaaacaagcctctcaagtgggatttcattagggaattctgaaattcagaattctgaatttcagaccttgagccaaagatcaagcgtgttcaccttgatccctaactcaaatcctaatgccccattgacaaaaacgtgcataattaacctctttgtcgtatgccagaagatggcatcgggacgcgtgccttggacacatc

SEQ ID NO: 49131 - DNA, 428 bp, Zea mays
  unsure (1)..(428): unsure at all n locations
tctaagggagaacacgtgatacgtttgactaacgtgcaattctatatagatagaccttgtgcagcttgtcaagcagggtaacaagtgggaggagcacatcacagcaagaatgtgatgaccacttcaagacctctggagctgctgcatatggacctctttggacccgtcgcctatctgagcatangaggaagtaagtatggtctagttattggtgatgactnttcccgcttcacttgggtgttctttctgcaggataagtctgaaacccaagggaccctcaagcgcttcctaaggagagctcaaaatgagtttgagctcaaggtaaagaagataagaagcgacaatgggtccgagttcaagaaccttcaagtggaggagttccttgaggaggaggggatcaagcacgagttctccgcttcctacacacc

SEQ ID NO: 49132 - DNA, 303 bp, Zea mays
catcgccggaaaagcctcacgacgacaacgacgatgaatatgatgacggcgaggacgacctggccgcccgcctcggtctcccgcccggcatggggtgaggccaggacccgtaataccagcccccgagcgggctgatgacccagaccccggagacaagacgcccaggcaccggcccgaggggcgagggccatcccagagggaccggacccctccgccggaagagctgacgcgacccacgggagccaggcccgagcgcctgtccccgagagccgccgcccgcgccggcagcgcaggggagcgacc

SEQ ID NO: 49133 - DNA, 402 bp, Zea mays
aagaaactaagcttgcttagggtctcctcgtcttatacatattgatgatattctgagtagcaggccaataagctcatgagctctgaagtaatcgctgcatccacaagggaatctattcttggcaatgagaatacatccttcgggcatttcttattgagatcagtgaagccgatgcccaattcccattttccattacttcttctaccatcacagcattagccagccactctgggtatgttacttctctgataacaccggcactcataagcctttttactttgttacttgcgccttcggctttatcatcaaatatttttcgaagcctctgcttcttggcctggaggctgggtctacattgagtgagtgctcaatgacatctttactgacaccacagagatcatt

SEQ ID NO: 49134 - DNA, 442 bp, Zea mays
  unsure (1)..(442): unsure at all n locations
agctttcaccgccccttgagacttgtgatggtgatcatgcttgggagtctggagttcatgtcgctcggaatcgagtatgacatggtgctcctccccccttgtccccttaccaacactcaagatcacccaggcacccttctcatcgcaggaggcagagacggagcaaccgcaatcgtgccacccatggcgccctgtgtcccggtgaagctcccgggctaactaatgacgtagactccctttcgagggacctggacaacgtcaatgtcgcgccctgagcaccaccagcggcatgaccatcccccgcatcaactctcttggcacctcctcctgattatgaaagggaaatgtgcccttgggccatttctagttgttntggtgattaaatgcccaacaaaccatnttgaactaaccatgttgataagagcatgagcacatgtgtaaa

SEQ ID NO: 49135 - DNA, 286 bp, Zea mays
ttggctgtctatgcgggtagcaaatctaaatctaattcctttatttaacttgggcaaaaagtctaagtgccatgtgtgtgttgaatcaaaacaacctcgcaagcctcacaaggctgctgaggcgaggagtttggcacctctagaacttattcattctgatctgtgcgagatgaatggaatattgaccaaaggtggtaaaagatactttctcactcttatagatgactccactagattttgttatggggatctcttataaacaaaagatgaagcgttcaattatttt

SEQ ID NO: 49136 - DNA, 300 bp, Zea mays
acacccagccatgctttacttatcaatttagcacgcctctatactggcctcatatttgcaaaatcaactagatagaagaatgccatctaatacgcccttgaaagctaatgaaccatcactatctctaaagacagacacctctacattcgcgaatagacacatatattccatattacataatagactcacggataacagaggatatcctagagacactactaagaatacaatggcaaattagagatcattagacatagaaccttgctaaacgtgtaccttgcttggtcccataccgatata

SEQ ID NO: 49137 - DNA, 381 bp, Zea mays
taaaactcagcctgcctacctcgctataaccgtaatcacttatttttgacgcgccaatggaaaacatttcacagctgtcaagaagatgctcctcgatgatatacagggcatgtggtgcgactttgtacctgaatcggtctgggcgctatacaccactgtatgcacggcgactgggtctacccctttccgacttctatatggatcggaggctatgaccccactagatataaagcatgggtgctcgcgaacagttgcgatagctatccccgacgtggaccaacccacttcgtaagatcttatcgaccgagaccgcgtcttcgctctacaggctttaaataaataccaagcccacatcaaagcatggcgcgacctcgcatcatt

SEQ ID NO: 49138 - DNA, 271 bp, Zea mays
  unsure (1)..(271): unsure at all n locations
ngcttgtgaaannactattcctcttgtgttatatcgcgaagccacacccagnctatgcttgtattagtcattaagcatgcatctagaccggactgctcttatgccaatcaactagataaaggtgtgccgctattacacccttataagctgagagacttatcttcttataaaacagacacatctactatttgtaaatacaccattattagccatattacataattgactaacagatctcaaagtatcttccagacactcatctaaaaacaca

SEQ ID NO: 49139 - DNA, 461 bp, Zea mays
  unsure (1)..(461): unsure at all n locations
agctgtgaatntcttattccacatgtgctttctgttatgtcccagccagcccatgctaatcttagctattaagcatgcatctagaccggcctcttcttttgcaaaatctactaaataaagcttgccgtctaatacacccttaaaagctagtgaaccatcacttcttttaaagacagacacatctacatttgtaaatagacagttatatcccatattgcataattgactcacagatagcaaattatatccaaaagactctactaaaaacacattggaaatagaatgctcattggaaatngcaattttacctaacccttttaccttgccttgattcccatcaccgaatatgatngaatcttgggaatctatattcttgacgtatgaggtgaacattttcttctcccccgtcatatgggttgtgcatccgctgtcgataatccagcttgagcccccggatgcat

SEQ ID NO: 49140 - DNA, 298 bp, Zea mays
catcgactgcgaataccagttcctgcaatccaaattaatacttcttatttatcatataatggagtacaacatacagtatttataccatcattacctttctggcattatcaatttggtcactgacaccactgacattcattattgcgtgatcatgcaaataaaccttgtattgacaacacactttgtgaagctcaattctaacccaataactcaaaccgataaaccatgtatatgtataactgcaaatcagttaagatgttaaagatattacctcttctaatggacgcactggtatatg

SEQ ID NO: 49141 - DNA, 472 bp, Zea mays
  unsure (1)..(472): unsure at all n locations
gcttatttactcaanacttatgaaaaatcagtattgctttatatattaatgaacaacgagtggaattatttttcctagtttgcttaagtaacaaagaacctaggaaaaataaagagacctttagttcagatcagttttaaaataaaatgttttagttagcattatttgaactggaaatccattattagaattacaaaaccatacccaaaattaataataaaaattcagtggacttataaccaccagagccccactgcaaaaataatgacaccccagcccaatattttaagtaaggaaaataaatataaaatgataatgaggcattttccaaataaatcatgaataacccctaatgatgcaataatgggcaaacaaaaatttgctaagtccatattgagacaaaccaccagagaaaaatgcaaacccatgaaaaaggagcaaaatcatacctattgctaataatttatacgaa

SEQ ID NO: 49142 - DNA, 376 bp, Zea mays
  unsure (1)..(376): unsure at all n locations
tacacacncaagctaaatctcaaaggacgcattaccatagacatgagcgtctctcttctttactctatatccttcacagatgaccaataagtacacgcaccggctgggcattcaatatggaagacaatcatcagggccttggtacccttccggtatgcaaaattatagcacccgaagttcttatgtataccatcggctgtggccttcatctgagagtgcaggtcatgcactcggcacaaccactcgtcaatcacactttagccttggcattggagaacccatatgaaaatactgagcccaacaatggcattcagtgtcaactaatggagaaaatttcaaaccttttcaaaagcctccctatcatattgtacacggg

SEQ ID NO: 49143 - DNA, 390 bp, Zea mays
aagcttcacgtgtcacgcgagctgacatttgtggcttgttttatcacgcccgcgcgcaaacccccgcgcgcgcgcgggcgcccgtgagcacactcgcgccactgttattaagcccgccccactgcttggctgcctttcccgttgcattctccgtacctcgcctgaattacccgagccagacattaactcccgtgaactgcccgagacccgacagtgtcgcccgagagcaaccaccgaggccagcccctatgccgtcctcctcaggtctatccaagacctcagatagattactggtgagggcgtgagactagctcaatgctgacccgtggacccgcgttagcggaataactcaattgtgcttaccggagttgaaaaaacttcggcgcacgt

SEQ ID NO: 49144 - DNA, 321 bp, Zea mays
atctggtctgaatctgcgataatacccagctagtttaatataactccggactcggtgaacagacgggggcggtttccactccagagtatctctgaccctgctatgatctaccgcgaaatcctttacgcgctaacacgtgccccaaaaattgaatttttttcagccagaacgcgcagttactgaacttggcatatagatcgatgtttcctgatacgcgatactacattccgtttatgctgagcatggacctcttcattcttagaatatatcacgatatgcgcgatgaagactacctcgaatttgtgcaactcgggcatgaac

SEQ ID NO: 49145 - DNA, 411 bp, Zea mays
  unsure (1)..(411): unsure at all n locations
agcttgcaacctgtatgtggtcagaactgtttctctcatctatggatggatcaaagtaattaaggctagtttacaagaaaatgaagataagtcttactaaaaagatcaatatctaaatgccttggaactataaactatgaagtatataagacacatcttaaagggagtaaaatataacaagatctggtgagagagcataccccacatccagtatcaagtgcagttctgatagtgccatcagcgagtgggatgatggatgcaagttcatcaaggtaagcattcgctccattgggaaacattgttcctcctcctggaaatttgaacacatctccctgatattggatccagttctgaacagctttctcaactgtcagactcttatacggagcattngcatatggaacatagtca

SEQ ID NO: 49146 - DNA, 427 bp, Zea mays
  unsure (1)..(427): unsure at all n locations
tctaaagggagaacacattttaggactaacaaatgttcattttgagaaagacagggtttgtagcgcatgccaagcatgaaagcaagttggtgcacatcatccacataagaacataatgacaaccgacaaaccactggagctcctacacatggacctattcggcccgatcgcttacataagcatcggcgggagtaagtactggctagttattgcggatgattattctcgcttcacttgggtattctntttacaggaaaaatctcaaacccaagagaccttaaagggattcttgagacgggctcaaaatgagttccgcttaatgatcaagaaaataagaagcgacaacgggacggagttcaagaactctcacattgaaggcttccttgaggaggagggcatcaagcatgagttctcttcttcctacatg

SEQ ID NO: 49147 - DNA, 246 bp, Zea mays
tgcgcacagctgaggttggaataacctgaaaaccctatttaccactattcttatcttagaacctttcggaaggctgcctaaccccactaaacccaaaagccccagagaagctagaatgcgttatattacctcgagttataacgaaacaaactcgaaaaacaaactgttcatggaataaggaaaaacaaatgttaaagcccgccaactaaaaccaataaaattcaacactgctaactaaagaccccc

SEQ ID NO: 49148 - DNA, 393 bp, Zea mays
agctcatgaagattcttcatcccaacgtgggtctttctgcgatgccagagccaacccatgttagtcttagcaattaagcatgtgtcgagctcagctctatcaaaatctaccacgtatagctgaccctctaacacacccttaaatgctattgaatcatcacttcttctaaagacagcgacacctacatcagtaaagagacagctgaagcccatttgacataattgagatacggaaagcaaattgtaatctaaagagtctacaagaaaaacatcggaaatggtatgggcaggagatataccaattttacccaatccctcgaccacaccttgagtccatcccacaacgtgagagcccgttggggatcatggatattctcatatgaggagaacatct

SEQ ID NO: 49149 - DNA, 452 bp, Zea mays
  unsure (1)..(452): unsure at all n locations
cttggcaatcatcgcaaggggagattatttatattttatgaacaaacttggggaaaacaagtgcctgcacgcaaactaaaggtngttatcatgatgtaatagagagcaaatcgcttaggattcacaaaagacatttagcatgagttaaatcactccttaaacataaagataaaaggaaagaagcatccgataactgattagagtaagatacgcctaaataagtatgttatgaaaaagttaataaatgcaatgaagaatacaaggaaatataacaccaaataaatgatcataagatggaaaccagacagaccaaaactgcaacaagagtaagctggaatttacttctgggttgctgcttacttgtttcttcaggttatggaatcgataaaaaaagtgctgctgaactttaaatcttaaatagaagtgagagtagcaccatctggaatcatcaa

SEQ ID NO: 49150 - DNA, 455 bp, Zea mays
  unsure (1)..(455): unsure at all n locations
ggaccttaagtcacctgagctgcatcttagccaactcaagccggttatgttatatatattagcgagtccgagagagagagatggtgatatacaaaacgcgggcaaataatagagtgagacacgatgatttgttctactgaggttcggttcttgcaaacctactctccgttgaggtggtcacaaagaccaggtctctttcaaccctttccctctctcanacggtcacttagaccgagtgagcttctcttctctatcacacgggacacaaagtccccgcaaggacctccacacaattggtgtctcttgccttggttacaattgagttggtcacaagaagaatgagaaagaaaagaagcaatccaagcgcaagagctcaactgaacacaaatgtcgctctctctagtcactatttgatttggagtgattcccgactcgggagaggatatgatctcctt

SEQ ID NO: 49151 - DNA, 409 bp, Zea mays
ttggaaaagataaaattctgcttacactggtagataaagtttatatagacgaagctgcttcaaaggcccaggccgaagctcataaacgcgagattaaagatcttcagaaacagctggctagagctaaagaggagcgcgcgcttgaggaaacgaaacgagaacttaatgagtttatggtcagcagattggaatcaaaagttaaggagcttcgcacatctcaggggaaatgctatgtcaaatctgtagaatgtgtgaataaaattaaatccagcttcgccagcgtaggcgcctttttcagcgaagagaatttctctcgaggcaatcccgaaggtccgctggaatggattagccacgaagcagaggccttcgaagagattctgaacagtcgcggcgacatatgcgctttttc

SEQ ID NO: 49152 - DNA, 280 bp, Zea mays
tacccatgatgaggcatgcgactagctaattgtgtctaggtttgttagcctacatccacacgggccttaatcgacatagacggagacactacacctagactcatttctcatgcaagtcaaccgccggggctcagcttcatcatttcatcccaaaccgattgcctctgtaagaagtacatgtattacgatctgaacccatcttgtgcatgatggattcaccatcaacttgtattttctatacagtccacccactttggcacaagatcttatgtgaaacaaa

SEQ ID NO: 49153 - DNA, 345 bp, Zea mays
  unsure (1)..(345): unsure at all n locations
agcttntaaaaggagaacatgtgatatgttttttaatgtgcgactcgaaatagatagaccttgtgcagctctgccagtatgcaaacacgtgggaagctctcatcacaccagaaatgtgatgaccacatcaagacctttggagatgcccacatggaccacttcggaccccgcgcctatctaagaataagaggaagtagagatggtcctggtatagatgatgactttttccgcttcacttgggtattctctctgcaggacaaaactgacaaccaagggaccctctagcgcttcctaacgagagatcaaaacgagcttgagctctacgcgacaaaaaaaacgagacac

SEQ ID NO: 49154 - DNA, 265 bp, Zea mays
aactcactctaagggaaacacatttggaactacaatgttatttgttaacacggatacgagcgcatgtctgcaggacacagttgggacatcatccacataaacatcatgacgaccgaagaccactgagctccaccatggacctattggcccgatgcttacataacatcggcggagtaggacgtcaattattgagatgatatctccttactgggtgtctttgaggaaaaattctacccaaagacctaagggatctgaacaggtaaaa

SEQ ID NO: 49155 - DNA, 265 bp, Zea mays
  unsure (1)..(265): unsure at all n locations
aactcagcttcgaaatacatattntggccatctccggcaatatttttttcttgtgnctgggagacagtatatgaaatcatctttgtccgcaccattgatcaccaaaaccctcttcgggtatttcagtttccgcgcgtaatgtttggcctccgcgaattcttctttaaataaaccttttcccgaagaatgtcgaataattaagaccagatcctcttaccgtgcttctggaatatgagatttagctttttcgggcgtgtcatttttc

SEQ ID NO: 49156 - DNA, 420 bp, Zea mays
  unsure (1)..(420): unsure at all n locations
tagcttctgtacagaacgattgaaatgtattttatttcgcttccncacaacgacgcatgaaggcgacacacggagaatgtgttattcaagttgctatgagcaaatgacaaagctatccctatgatatttgtaaactgcgtgtgtaatccataagggcatgaatgttatgtcctactacagtgtaccactccctataaatagatgaacaatgtcctacataaagtacctttttcgtggacggtgcaatcactctataattctctctcagcaacatctctgttgtagctctctctacaactgccaaaggtacaattgtaaagttaatttaagttaagaagcagatatcaagaaagatatcacgatcaaactattatatctgaaccctcttgtattaacttgacgtctatgtattcacgtgat

SEQ ID NO: 49157 - DNA, 451 bp, Zea mays
agcttgacgagatgattaatttccctgagctcataatgaaaatgtcgggagctaaaatctctggttctcattggagctctcaggctaaacctaaatctaaactgcatgcagtttggatttgtgctgaaaatgttccagtggaactgcaaaactaccaagcaatatgtgaattaagatctacaatcggggctgttgaagaagtggacatcctatctttagattctaaggatatggttagattcaaagttcatgtcaagagtgtcgccatgatcccgcccatcattgaagtgggggttaaacctttcctttatgacattttctttaagattgatgatatcactgatgagggttggaacgatgagtctatcaaccttggcaaaagagcttcagtggatagacatggccttgatgacccttatgaaaaactggcaaaaaagctaggaatgtggga

SEQ ID NO: 49158 - DNA, 435 bp, Zea mays
  unsure (1)..(435): unsure at all n locations
agcttgacttttgcattcaaacgaagctccagtttggattgtgcttcgtcacgagaagagcttcggaaaaaggttattaactttcaaagaatttttcaagaaaatttaaaatcaaatggccagaatacgctccactgctagggctgagcgtgatggagatgagaccgaaaccgttgaaactgttccaatttctgaagcaatgaggcgctctgggttggtttcgtcagaggacacacctgttgccgaagcaacacaagctgatgttgaagaagttggttccgaagatgagtacaactgtgggatgccaagtaaacctagtcatttgggctttggaaagtccaccatctctgaagctgatcttccaaaaatggtgaagctgggctactntattgaagcanaaaaaggagctggttcgttttggtggagaggaaacta

SEQ ID NO: 49159 - DNA, 435 bp, Zea mays
gcagcttactcctcctaagaaggccattcattattttatgatcttgatgcccgcgacatacgagctggcccacgatccaagcgaggtctacaacaacgcttggaacattgaacagctacgttgcttctacccttaaaatgtttcaagtcattcatgttcctcgctttctttacatacataaatgaagtctaacccgtcaggaagggttagtcttgcctcaaccaagccccaccctccctctgggctagaaagggggaacacctctgcgtcaaaattttcctctaaaaagttctctaccgcaacaactcccgcgctttcccactatgtccatttcaggccctatatacgactagagtacacataagcgtgcaaggccgactgagccgacggactcctacgcctctgagatacagatacgtcactcatcaccttccg

SEQ ID NO: 49160 - DNA, 310 bp, Zea mays
ttgtttatttatactttcactgtacttaaaaaggtgaaacgtcaagtctttctcaccggacgaacacttgcttgtactctctggatggtgggccactaaacttgtgaaggtagatatgcatgatgggactactccaccatcagaagttgtatctttttttcgtaactagctcacggaaagttgatttttgaccttcggtttacccgagctttatagactattttacgggttaagactgttaccgaaaaccatctggcgcccgcaaatgtgtactgtagggatcatgctctcttaccgaacgtcctgctgt

SEQ ID NO: 49161 - DNA, 461 bp, Zea mays
  unsure (1)..(461): unsure at all n locations
tatctcaacctgagaggaaagcttatcctaaggggtgatgttttattttgagctctgctagtgtgttattcatatgcttcgtgcagtattatatgtgttgcatcatatggactaatgcttccgctgctatgaattaattggcatctattgtgttcattctaaaatagatagtcatgtggataatggtgcatgtggttaatggtgctctaagaatgttntaaattagtatcttagtttaaattggtatcttaatggtgaatagtgttaggttgatattcctgtgatatatccactaaattgaatggtgtttaactctgattatatgcatttgtgtgttatagcatcatggtttggattctgacacaatgcatcccaaaaagtgctaagttgtagaaatgttatcaattgcctaagatgtgcaaatggcgtctgagccaaatatgttatgagtaagcactatt

SEQ ID NO: 49162 - DNA, 400 bp, Zea mays
agcttatgaagattcttcattccaacatgtgctattcttctatgcctgagccagcccatgttagtcttagcaattaagccagtgtcgagttcacctctatcaaaatctactaagtatagctgaccctctaacactcccttaaatgctattgaatcatcacttcttctaaagacggtaacacctacatatgtgaaaagacagttgtagcccattttgcataattgagaaacagaaagcaaattgtaatctaatgaatctacaagaaaaacattggaaatggaatggtaaggagatatagaatatttacccaatcctttgaccaaaccttgatgttcatccccgaatgtgatagcttcgtggggatcttgggttttctcgtaggagaagaacatcttcttct

SEQ ID NO: 49163 - DNA, 469 bp, Zea mays
  unsure (1)..(469): unsure at all n locations
tcaatgttcaaaataaatgccttatgttaggtcatttcttatgaaatttaaagagtcaactgccccactcaagaatgcttgctatatctgctttgaacacattattgcaaggatcacctcataagacatctgcacaaaattctaagcaaccaatagatcaccctgaagattgcaatatttcatcaacagaagagattttgaatgagataatccgggaggaaggattcatgaatgagacactgaacagtttatctcatgttcatattatttccgacaatgatggttcgtcaaaagcgagttatggggcatcatcttttcaaagcggatctgacaaagcaataacttacttctantttgatttctctgcctcatggccacgtactcctagttggatttctttactgcgtggtcacacattctattccagttttgctaggatattcaaaaggcttatacagcaatgtggaat

SEQ ID NO: 49164 - DNA, 277 bp, Zea mays
tcatatactgtcttaaaatgtattcatcaagggaaaactgcgaaaataggttgacttgtcccttgtggctcgggttgatgatgagtgattgttcacatacaacaccctagggtagtcagtggactgactagagtgtgagatttatatatgtgcaaccatgtcgatcggcttgtggtgtgtaagtgtggagcacacggacaatggttgacggctaacgtgaaggtcacgcgggctcgtgctgatggaccgggagcggtgaacgatgagtgttgggtct

SEQ ID NO: 49165 - DNA, 356 bp, Zea mays
  unsure (1)..(356): unsure at all n locations
acccatgttcgtcttagcgggtaagcaagtgtcgagttcagctctatcaaaatctactaagtatagctgaccctctaacactcccttaaatgctattgaatcatcacttcttctaaagacagtgacacctacatcagtgaatagacagttgtagcccatatgacataattgtgaaacggaaagcaaattgtaatctaaagaatctacaagaaaaacattgganatagaatggtcaggagatatagctattntaccaagacctttgaccaaaccttgatttccatccccgaatgtgatcgctcgttggggatcttggntntctcatatgaggagaacatctttttctcccctgtcat

SEQ ID NO: 49166 - DNA, 323 bp, Zea mays
acaaactctggtccaatataccaagtgatactctttttttctccaccaccttgccaaagaaaacttcttctttcggcatctagctctttaatagaaactcttggaagaagatacatggacctatgataaataggtgaattaatcaagccagcatcaataaggggaattctcccaaccatggataggcaatttcctttccatgtttcaagtctcttatcaaatatttcttcaagcccaattcagtctgcaatgcgaaagctatagtggctcacagggacacctaagtacttcataggcaaagaacccatctggcatttgaaaag

SEQ ID NO: 49167 - DNA, 418 bp, Zea mays
  unsure (1)..(418): unsure at all n locations
ncaccaaatggacgtgaaaagtgccttactcaacggaccaattattgaatatgtctatgtcgagcaacctcccggctttgaagatagtgagtaccctaaccatgtatataaactctccaaggcgctttatgggctcaagcaagccctaagagcatggtatgaatgccttagagatctttttatcactaatggaattaaattcggaaaggccgatcctacactctttactaaaactcttgaaaatgacttgtttgtatgccaaatctatgttgatgacattatattcgggttcaactaacgagttcaactgtgtaaaatatagtatgatcatgacacaaaagtttcagagtatataatggggagtttaaatttttctatgatattttatgattctactccatatgtactttgtaatgtc

SEQ ID NO: 49168 - DNA, 376 bp, Zea mays
tttcatgcgcacttaattatatgacccaaacgacagagcccatgtatgttggacttagaatcttaagcccatgccttttagcactaataatacagataggtgcatcatcaagatgtaaaatgaacaacccattcataatggatgcaaaagccacagacatgccattcttatagatcacacacccattgttttcactctcaaatgaataaccatccttcatcaaacatgaaggagacataatgtttctactcatactaggaactatataacaattatctaactcctaaataaatactgatgggaggtggaggtgcatcgtccctacagtcaacgcagcaactcttgcattaatgcctacccggagatcaacttgttc

SEQ ID NO: 49169 - DNA, 424 bp, Zea mays
agcttgaagccatggtaagtagcataggccaattatatacgaattgactcaagcctagctacgggtgcataggtttcaccgaaatccaaaccttcgacttgggagtatcctttggccacaagtcgagctttgttccttgtcaccacaccatgctcatcttgcttgttgcggaagacccatttggttcctacaacattttggttaggacgtggaactaagtgccatacctcgttcctagtgaagttgttgagctcctcttgcatcgccaccacccaatccgaatcttgaagcgcttcctctaccttgtgtggctcaatagaggaaacaaaagagtaatgttcacaaaaatgagcaatacgagatctagtagttacccccttatgaatgtcgccgaggatagtgtcgacggggtgatctcgttgga

SEQ ID NO: 49170 - DNA, 470 bp, Zea mays
  unsure (1)..(470): unsure at all n locations
tggtcattttattgctaactgtcctgataatgatagtgactcattaaaaggggaacaagagggaaaagaagaagcattacaagaaggcaaagggcgaggcgcatctatgcaaggagtgggactcggattgctcctcgtccgactccgacaatgaaggactcgccgccaccgccttcaacaaatcaaccctcttccccaacgagcgtcacacatgccttatggcaagagagaagaaggtttatgcatccggaggttcaagctggattattgacagcggatgcacaaaccatatgacggnggagaagaagatgttcacctcctacgtcaaanataaggattcccaagattcaattatattcggtgatgggaatcaacgcaaggtaaaagggctaggtaaaatngcaatttctaatgagcattctatatcaaacgtattcttagtggagagacttggatataatatgctatct

SEQ ID NO: 49171 - DNA, 423 bp, Zea mays
  unsure (1)..(423): unsure at all n locations
gctctacagccactgtatttttatttgagaccctttctcttcgagaggcccgaagccagaagaggaaggccactattccaacatcccaggaggacgagttggacccagaaatcataaacatggagatacttcaacaaccagtacaaaggaagaatgagaagatggctcggctggccgatcttcaaaggcagattgacgaagccactgaagaagtactccaccttgctcaagatgaacaagaaccaacgcctctacacagagagcttcatcaagaaggcttgtttcacgatgatggatggtatgatgattctaatcatggtacctttacttttgatgacgcttctccctttgcagcagaactgcangctattccatggacttcattatacaaggcaccttagcttcccatgtatgatggacatt

SEQ ID NO: 49172 - DNA, 202 bp, Zea mays
gctgatggggggtatcaactgagaatatagagccctgaggggacccctaattatggtccccgacagtaacccccgaacctctaagggagtggtaacactcgcttggaggcttttgtcgcacttttttgcaaagggaccaacatttctcgggtgcgttttgttcccgtgggtgcgcgcgaatgcacccgcttggtgtaacccc

SEQ ID NO: 49173 - DNA, 311 bp, Zea mays
tcatgtgagagacagttgccctagagaaaggatattatttctgtcctccagtcttcactatgtacaggtgagaatgtgagcactgctctttccatgagctcgaatgaaggtgcttttattgtttcaaaaaatacttcagaaggcaaagggagcccctatgccactgatttaactaataaatctgcatgctcattctctccccttgggatattttttatagaaaaaccttcgaaagaagctttcaatcttcggactgcatccaaatacttttcaagctttggatctcttgccttgctgctcttatccacatg

SEQ ID NO: 49174 - DNA, 445 bp, Zea mays
agcttgtgaagattcttcatcccaacatgtgctagtcggcgatgccagagccagcccatgttagtcttagcaattaagcaagtgtcgagttcagctctatcaaattctaccaagtatagctgaccctctaacacccccttaaatgctattgaatcatcacttcttctaaagacagtgacacctatatcagtgaaaagacagttgtatcccattttgcataattgagatacagaaagcaaattgtaatctaatgaatctacaagaaaaacgttggaaatagaatggtcaggagatatagctattttaccaagacctttgaccaaaccttgatttccatccccgaatgtgatagctcgttggggatcttggtttttctcataggaggagaacattttcttctcccctgtcatgtggttggtgcacccgctgtcgatgatccaacttg

SEQ ID NO: 49175 - DNA, 473 bp, Zea mays
  unsure (1)..(473): unsure at all n locations
tatgtggatgatgtggtgatcaagacagagaactcagaatatttcattgaagatttacatctggtcttcaatagtcaacggcgataccgatggaagcttaatcctaaaaaatatgttttcggagtaccagcaggaaaattgctcgggtttattgtcagccaccggggaattgaagccatttcagaaaagatcgaggctatcatgaggatggaagcaccgcgatcacagaagaaagtacaaagactcaccggatgtatggcagctctgagccggttcatatcaaggctgggagaaaaaggcttaccattctataagttgctcaagaaggtggacaaattccagcggacttcagaagcacaggaagctctagatgcgctgaanaagttcttgacaacaccaccagtgttaaagccgtcgcgccgagccacgccgactcaaccagctgaagatctgctattatacacgactcacgt

SEQ ID NO: 49176 - DNA, 420 bp, Zea mays
  unsure (1)..(420): unsure at all n locations
gtagcataggcaagttatatttttattgactcaagcctagctacgggtgcataggtttcaccgaaatccaaaccttcgacttgtgaatagcccttggctacaagtcgggctttgttccttgtcaccacaccatgctcatcttgcttgttgcgaaatacccacttggtacctacaacattntgattaagacgtggaacaagatgccatacctcattccttgtgaagttgttgagctcctcttacattgccaacacccaatccaaatctcttaatgcatcttccaccctgtatggctcaatagcagaccaaaagagtaatgttcacaaaaatgtgcgactcgagatcgtgtagttacccccttatgaatgtcaccgagacttgagttcatggggtgatctctttgaatcgcttgatggactc

SEQ ID NO: 49177 - DNA, 446 bp, Zea mays
  unsure (1)..(446): unsure at all n locations
gtggatacacttgtaattacatgcgacgatgtacatctctcttataaatagatgaacaatatcatccatagattcactcttttttccagtgaagggaacactcatttattcagcttccgacgtaaccttcgttctctcattcatgtaaaaccaaaggtatgtttataattatttatcaatcactacgaatggaagttgaaatgaatatgcacataagttagaatgctcgttctttattacctattctagttagttatataaacattctgtatttgccaccctcttccttcgtatgaccttcggaaagatgtcatatgaaggaagagacaggtagcgtataaattcatgttaaatntattttgacacccccaacgattccaaaacaagtgtccctcactaccttcgttcttggatcattaatgccccanagacgaangtccctacta

SEQ ID NO: 49178 - DNA, 452 bp, Zea mays
  unsure (1)..(452): unsure at all n locations
agctagagcaattcttctgcagaggattttttatgttctaagaagtgataagggtatgagatatattcatgggaaaataaaagccggtaaagcaaattgtttcagaacagatgatcaaggcatagtatggtttaataaccgcatagttgtgcctaaagatgatgaagttcgccagtaaattntggatgaagcacatcttagtcgatatttcattcatcccgaaagcactaagatgtatcatgatttaaagcagcattattggtggacgaagatgaagattgaaattgcacgctatgtagcaaaatgtgacacctgtagacgtgtcaaagccatacatatgaaaactgctggtccattgcaatctttgcccatcccaacttggaaatgggaggccattagcatggacttcattgtgggattacccangacggccaaagggttttattctattt

SEQ ID NO: 49179 - DNA, 308 bp, Zea mays
tactaagcttctgccatgacatgattgtccctggccagagagaagagtaccatgtctgttccacactttggactgccatgacgaaggactttgccatgacaacaacattgcctccatatgaggatattgttgcctcataactcatcaagaattgctttgggtccgagtgcccatcgtacatgggcaactgggtggcttgtaggattatggccatggaatagcctgcaattttgctgccaggggagaagcatcatcaaaagtaaagttagcatgatgaaagtcatcataccatttatttttgttgaatg

SEQ ID NO: 49180 - DNA, 448 bp, Zea mays
agcttgtgaagccaatcacaagtttattgaagaatgataccaaatttaattggtcttcaagatgcaatgaagccttttagcagctgaaagtgttattgaccactgctccggtattagctcaactggacattgaaaagccctttgatgtgtattgcgacgcatcaagaagtggtctaggctgtgttctaatgcaagagggccgagtgatagcctacgcttcaaggcagttacgccggcatgaagaacattatccaactcatgacctaaaattggctgctgtggttcatgccctgaaaatatggcgtcattatctgctggggaatatctgtcatatttatacagatcataaaagtttgaagtacatttttacccagtcagagctgaatatgaggcagaggagatagctcgagctgattaaggattatgaattggagattcactatcacct

SEQ ID NO: 49181 - DNA, 299 bp, Zea mays
  unsure (1)..(299): unsure at all n locations
tgaatgttcaaaatcaagaacttcaagtgcaacttgaaagttgctagaacatcaatgcccccactttagttnttgaatctaagtctagctctaatgataattcttgcaagcattgtgccaaatatcatgcttcttgttgtctaactaaccatgcaaggaagcatagctcacaggtgaaggtcaaagaaattttgaaaagatgctctagcaatgatgggttaaagaaagttgagcccaagtacaagtcccttaagcccaacagggtagaaggggcttgggtttcactcantcaagaaaac

SEQ ID NO: 49182 - DNA, 414 bp, Zea mays
caagctgtgaagattcttcatcccaacatgggctatgtttgtggtgcgagagccaacccatgttagtcttagcaattaagcaagtgtcgagttcagctctatcaaaatctaccaagtatagctgaccctctaacactcccttaaatgctattgaatcatcacttcttctaaagacagtgacacctatatcaaaaaaaagacagttgtagcccatttgacataattgagatacagaaagcaagttgttatctaaagaatcaacaagaaaaacattggaaatagaatggtcaggagatatatcaattttaccaagtcctttgaccaaaccttgattttcatccccgaatgtgatagcttggtggcgatcttgtgttttctcgtaagaagagaacatccttttctctccggtcatgt

SEQ ID NO: 49183 - DNA, 453 bp, Zea mays
tatgaagattcttcattccagcatgtgctagacagcggtgttctatcctgcccatattagtcttagcgattaaccatgcatctagataaagctggtcgtctaatacacctttacaagctaatgaaccgtcactacttctaaagacaaatacatcaatatttgtaaataaacaattatatcccatattacataattgacttaaagaaactaaattgtaaccaaacgtttctactaagaacacattagaaattgaatgcttggtagtgatggctattttttccaaacctttgaccttgccatgattcccatctccaaagatgatcgtgtcttgggaatccttgttcttgacgtagaaagtgaacattttcttctcctccatcatgtggtttgtgcatccgctatcaatgaagcagctggtgcacctggatgcataaacctacaatgtgatttaag

SEQ ID NO: 49184 - DNA, 450 bp, Zea mays
  unsure (1)..(450): unsure at all n locations
cacgcatgcaagctttatttgaagtgcacgacatttttttatttatcttctattccgctgcaacctactcgaagggtcttctcattccactgcgtgctaagtcttcgagtagagcaagattttaagttttaaagtgataagttttattcgcctattcaccccctccctctatgcgacatccagatcctgttcccgggtcaaagggaactttcaattaaggatataaattctatgttcttaaatgtgccaatcacatggttatgctactttttcaacaagatttcataaaaggtaattgaccatgatgagttggcatctcttcagaaattcacattggagacaatatcacagtttgagatgtgttcgcctcatcattctttgatatgatggcgcaccttgtgttgcactnggtgccacaaatagaggcattgagtcccatgttcttgcatg

SEQ ID NO: 49185 - DNA, 341 bp, Zea mays
gagtaatttaccaccgtcgtgtcacctatttttgtgcggcctactaatttttaaaaactgtatcttctatgtcaaataatttgttctaatctgtataagacatgttacgttcatattaattatgcgtacgtagtaataacattgctttaattatgccacatgttttaaataattagttaattatctgtttaattaatgttaactagctagacaatctagataatctaatttatagttgtaacctatgcttattataaataattattaaattgattaatatcaactcagatattttaacttaatacatgcttagtttaaatgcaacatctattataattatg

SEQ ID NO: 49186 - DNA, 256 bp, Zea mays
  unsure (1)..(256): unsure at all n locations
tgctagcttatgctcnaggcgcactacgggtttattttttattttacgcaacgcgccctcactctgcgtaggcttcgatatataagtaggtccctcatgcactaacaggacgcgtgaccacctttagtagattatcatttgatgaggcacacactctgctgtataaattaactaacgccaccatagggtacactgaatatcgtatattatcaacacagaatatgcgatcaccacccataacaatataaaaaggggg

SEQ ID NO: 49187 - DNA, 453 bp, Zea mays
  unsure (1)..(453): unsure at all n locations
tcacggctcttctaagaagccgtccacgggctcagttgatgttgaatgtctctgganacggatggccacggtggccggcgctcgggtggctcgggcgagtggcgtaaagctcgccggagctaacggtggtgtctggccaatgagggtgagcgcggagtgaggtgaggcgcgtttgggggtagtcttaaaggcgctggcgagcacggccaaggggtggctctgacacgcgctcggggtgtgtgcgggcgagcgccaatgcgcgcactggcgcttgggcacggtgtctagcacgatgcagcgcatagagaggtcatgttcaagcgcggattggctccaaattcttgcgaatatggccatcatcccattgagagatctcttaccctgacattcctttgttcgttgtgtgtggaggcttatgggtctcgctgactggatcaacagatatggagggat

SEQ ID NO: 49188 - DNA, 433 bp, Zea mays
agctatggactttgcggcccacgtatttatcttttattattgccagccagttcgtcgtccgtcaggttcttgcgccccagttggggacaataggggacgtggaacagtacggcgacctacgccacccggaatggggacattgacgccatttttgcttctacagcgccgcgaaaaggcttctgagcgcacctgtcagccttgcgtgcccctgccgacgccccgctgttaaaggacctctcgtagtaatcaccctagatggggacattcgcgccgattcatcatagacgcgcgcgcatcgcgggcacgctcaccccaagcggggacattacgccgattaacctattatttacgggaaatagtggcgtgccgtacgtgtttatcaacgaagaggcgatcggattctctggtcgaaaaagccagaaagacttatttc

SEQ ID NO: 49189 - DNA, 234 bp, Zea mays
cgactatgtgatcgcgtatgcgttgccggataagtgatgctcgctcactgcttcgcgagataacgctgcgccagcgcttcgtaaagcggtggcgcaaacagcttcgacacctggctggaaattagcgcagtcgccatcagcgagaggaccagcgcgtgttcgttgatcatttcgatcacgatcacgaacgccgtgatcgggctttgcgtgacggcggctagatagccgaccatg

SEQ ID NO: 49190 - DNA, 450 bp, Zea mays
catgcaagcttctaaagggagaacacgtgatatgtctatcttatgttcaattcgaaaaagatagaccttgtgcagcttgtcaagtaaggaaacaggtgggaggctctcatcacaccaaaaatgtgatgacgacatcaagacccttggagatgctgcatatggacctttttggacccgtcgcctatctgagcataggaggaagtaagtatggtttagttattgttgatgacttttcccgcttcacttgggtgttctttttgcaggaaaagtccgaaacccaagggaccctcaaacgcttcctcacgagagctcaaaatgagtttgagcttcaagtgaagaagataaggagcgacaacggatccgagttcaagaaccttcaagtggaggagttccttgaagaggaagggatcaagcacgagttctccgctccctacacacacacagcaaatg

SEQ ID NO: 49191 - DNA, 446 bp, Zea mays
ttaggccctcggacccggccggacttcaccggaagcccgagatcgacttcaccggacttcggtcttccgccgccgtgcgtggacagagctaaccagtgagtctttgtccaattccttgcacccacatcttctctagcatcccgtgaagctctctgacccgttcaattgatcaatcgcgccgtgagcaggccggactcctcgccgccgacgagcatccccgcctgcgcacgtggaccggccaactccgaccatcctcgacggcgacccgcacatcgctgtgatccccgagacctcccctacgtcctcgaccatctcaccggagcaatctcgccgccggttagcccctctgccctttcttccgccgcggttactgtttaagttaggagaaggacctcgggttaggattagaagaacccgaggggttttctgtaacgtcagtgactcat

SEQ ID NO: 49192 - DNA, 410 bp, Zea mays
  unsure (1)..(410): unsure at all n locations
agcttncggctgactaggccgttgtgctgtatttatccgggatcaccatgccaacaagttgtggcagaacttcgggtggtagccgagcagatcagcacaagagatctagtccaagaatatctggcctatagggtgttcccgacgttgagtgaatggaacatgccgaagctaaaggggacaaaggagaagaaagaacttgtgcgactaccttataaattcaaatttgagaaacagttcaaagggccatgtcaagaatggttagaaatgatagaaaccatgtgcaacgaaattttggggaattacactaacaaagaacatcagttgatgactgcagccttcggcacccgaccgaagcgaaggttgaatcgggtgatggatgccctgaacttcgaatatcctgattatgagcg

SEQ ID NO: 49193 - DNA, 397 bp, Zea mays
  unsure (1)..(397): unsure at all n locations
tgtctgttagaatcgaacgaagctccagtttgaaacctgcttcggaggaagaaaatattaaagtttcacaagttcataattgaatggccagagtccgctctaccgccagggttgagcgcgagggggaggaaactgaagcttctgagactctccccatctccgaagccatgcaacgatcgggtctagtgacttcggaaaagatccctcatgatgatgcagaacaagcagaacaagcaatcgctgaagcagaggaagaagatattgaggaaactgattccgaagatgattatcgcattgccatgccaagcaagccgagccacttggacttcgggaaatctactgtttcgaaggctgatctgtccaagatggtaaaatcgggctntttcactgaaaatca

SEQ ID NO: 49194 - DNA, 258 bp, Zea mays
actagcttaggtaagcataaataccccagaaaaacttgtatacctttatacccctgggataccaaaaaccctaattggagccctgtgaaaaccctaaaaccaaaccctaggggcctatgtgcaaaagcagtgcatatttggaccaaagtgtaaaaactactatgtttaaatatgtaaagtcacatggttcacatttaagatgatttgcaagccaaaccctgagttttggacttatttgcaaaagaagtcacatttgaa

SEQ ID NO: 49195 - DNA, 468 bp, Zea mays
  unsure (1)..(468): unsure at all n locations
ntagtgactagtgagagagatatgcttgtgttctttccagctcttgcgcttggattgctttcttccttcttgattctttcttgcgatcaaactcacttgtaattgaggcaagagacaccaatcttgtggtggtccttgtaggaactttgtgttccaagtgattgagaagagaaagctcactcggtccgaaggaccgtttgagagagggtaagggttgaaagagacccggcctttgtggcctcctcaacggggagtaggtttgagagaaccgaacctcggtaaaacaaatccgcgtgtctcacttcattattcgcttgcgatttgttttgcaccctctctcgcggactcgattatatttctaatgctaacccggcttgtagttgtgtttatttntgagaatttcagtttcgccctattcacccnccctctaggcgactntcattatcaaatatctcatgccacttcttt

SEQ ID NO: 49196 - DNA, 369 bp, Zea mays
  unsure (1)..(369): unsure at all n locations
agcttaccacatntgaagcatgagcgcctcccttttgttttggtcttgcttggctgccccttgcgaccttttatcgccgtcttgaatctcttgatgatgagagccatctctttatcattaagtccggccgcctcaatatgtgccaccttgctaggtagcgtctccttgcttcttgttgccttgagagcaaggggatgaagctcattgaatggaccattcaatgtgtcgttcacatatcaagctttcgtgaccatacatcaaccggtcactaacgattctagtatatcatagatgcgcatctaggccagcgtatgctttattttaattttgattgctgcatgactatggaaacgcgtagatgatgctaaa

SEQ ID NO: 49197 - DNA, 164 bp, Zea mays
cccccccaacccaccaaacaacaacccccaccccacccgggtgtgcctgcgccaaaaaacccagccaaacagacgagaagtggcggcaagaccaccaggcggggagaccaggcgccgccaaacgctccacaaagcagcaccaaggagacacgccagaccgccac

SEQ ID NO: 49198 - DNA, 449 bp, Zea mays
  unsure (1)..(449): unsure at all n locations
agctttcatccttcttcttcacaaatagcgctgtacatcctctaagcgaagtgcttgngcgaataaatcccttatccagcaactcttgcaactgcttcttcaactctgccaactcagcgggtggcattcggtagggcctcttggaaattggggccgttcctggttgcaactcgatggcaaattcaatatcccggtccggtggcattcctggcaattcatcaggaaagacatctgcatactcatagaccactgggatcttcttcaggggtaactccgtcatagagaaagcacatgactgagaagaaccctgactaggcagaatcaaagtgaaattcccgcagaaaggagaattaacttccacggtacgactggctatatcaagcacaacttggtgcaaggtcatccaatttgctcctagaataatgtccacattttccaatcccaataca

SEQ ID NO: 49199 - DNA, 246 bp, Zea mays
cgccaagccctcggacccgaccggacttcaccggaggcccgagatcaacctcaccggacttcggtcttccgccgccgcgcgtggaccgagctatccagtgagtctccgcccgattcctttcactcatgtcttctctggcaacccgtggacctccctgacctatttgattgaactatctcgccgtgaccaggccggtctactcgccgccgacgagcatactcgcctgcgcgcgtggaccgaccgact

SEQ ID NO: 49200 - DNA, 153 bp, Zea mays
cttttccacacaaacacttttgacgaccgagggcgcttgagctactccacatggatatatattgccccattgcttacatataacattgggggagaaaatattgtcttgttattgtggatgagtatactcgctttacttgggtattctttttac

SEQ ID NO: 49201 - DNA, 359 bp, Zea mays
tgtggaattgtgagaggatatgatcacttgggtgtgtctatatattgaatgctagagctcttgtaagtagttggaaggtggaaaacttggatgatttgaatgtggggtggttgggggtatttatagccccaaccaccaaactagccgtttggtggaggctgtctgtcgtatggtgcaccggacagtccggtgtacacccatccatgtcccgatttacctccacataggccgaccactctttttcggcctacgtattctatcatgctagggaccactgtgaatctactggtgcgacctactataaacgtctactgtctattaacggggcagagtcgactgcgacctctgctaattcggcg

SEQ ID NO: 49202 - DNA, 438 bp, Zea mays
agcttggaggcgtctattgagagcctacttgatgtatactcctcttctttcgtctctttgaatgcgacgggttgcacctctggtgtggaggtggcaccttgctccaagttgacaatatgtttggagtctttgatcattagttcaaagctcacaaacttgccaattactttctcgagagacatctgtttatatctagggtctccacggattatttgtacttgagtggaattacgaaaaacaagtgatctaagaataaccttgaccatttcatggtcatcccacttggtgctcccgaggttgcgcacttggttcaccatagtctttagtcgggtgtacattgcttgtggctcttcttctttattgagaacgaatcgaccgagttctccctcgatcgtttcgtgcttggtgatcttggtcacctcgtctccttcgtgcgcg

SEQ ID NO: 49203 - DNA, 444 bp, Zea mays
  unsure (1)..(444): unsure at all n locations
ccggcgcccttttcgcacctaccagtagtcctatttctgtcctttnggtttattagattctgctttttttttaaatataccattttaggattcttttggtggccaaaaggatgctgccggcctgctctgcgaccgcgagagagttcagtttggtaggcagtcaaaaagtgagtccttacgaatgtttagatcatctccaaactactagtactcaataaactttttttccgaggaattattgggccctttccggtccgcatgtagcttgctgatcatttcatctgaagcaccattggttatctggtgaatcaacatcttccaagttaataatgttcatttgccgatctgaacaatctatggaaccattctcagggccgccactccagcacgccagggtgacagagcagtgcagatgcangaagctctaaaaaacatgcttcatca

SEQ ID NO: 49204 - DNA, 444 bp, Zea mays
  unsure (1)..(444): unsure at all n locations
agcttctttcatcatcctcatcctcatttgtgttttctctatcattttcattagccacacaacatatgtgggaatcgaaattggaagacaaaccttttggagaggtggattcatcgtttggtctccatcgttcattttcttctttttccttcaaagggttagtctcacaaaaactaaaggaagtagaagcatcaaatgaaccatcatgtttggactcatcaaattngtttttaattctagtccaaatatcatgcgcatcatgaataggttcatcatatctcattatgaaggcacgataatcttctttgctaagagatttacttaagatgtcataagctagatagtttaagcgtatacatctttgatcttcctcggaagcatntttcctatcataactagaaggaattatactcttgtctataattngctctaattgtgaatcta

SEQ ID NO: 49205 - DNA, 401 bp, Zea mays
acctataaaactcaagcttgaggactgcttctgaggagagcttccgagcgtgatgtttctttctgtccacggagtcgctttatccgagcgcaagttacttatcgcagaacgtgatgagtgaggtatccgtatcccggaggcgtaagagtccctcggctcggtcagccttggctgcttacgtgtacctcgtcgtttctaggacccgcttttccgaagtagtgaggaagcacgaaagaaatcctgctaaaaagagatcctttttcgaggaaaaattcgacgcagagggggtctccccccttttagcccccgagggagggtcgggctttgtcgaggctaggccgacccttccttgacgactaaactttgcgtatgtgcgaggtatataaacaacttgtaaacat

SEQ ID NO: 49206 - DNA, 443 bp, Zea mays
agcttgattgctgagccttgccggacagcacatcttcgtgccatggaaattgccaaagaggctggtgcactgctctcttacgacccaaacctgagggaggcactttggccatcccgtgaggaggcccgcacccagatcttgagcatctgggaccaggcagatatcgtcaaggtcagcgaagtcgagcttgagttcttgacaggcatcaactcagtggaggacgatgttgtcatgaagctgtggcgacctaccatgaagctgctcctggtgactcttggagatcaaggatgcaagtactataccacggtatgctttattttatttttgattgctgctgtcctatggaaatgtgttgttgatgctaaatattcatgggctgcttatattgaactttcactagtgtcttggccaaattcaaagcgtacactctttttagcatatct

SEQ ID NO: 49207 - DNA, 460 bp, Zea mays
  unsure (1)..(460): unsure at all n locations
ctcagcttaaggatctattcactaaagaagaagngttgatcttatttcttgtatgaaaacttcttctccttcggttgtgtcggcgtttcgagacaggggggtccctaagccgacgagtgagtgtgctgcgtgccccagcccagatgggtcgagcgcgtgggcgagcgcgaatgggggagaggcgaggtggccggagtctagcgtgagagaggtgtaagtcccgcggccttcgtgttcgtcccgcgcccaggtcaggtgcgcttgcagtaggggggttacaagcgtccacgcgggtgagggaagcgagcggccccaagagagcgcctgtcccgtcctcggtcccgcgcggccaaccttctctgagaaggccctggtccttccttttatagtcgtaaggagaggatccaggtgtacaatggggggtgtagcagagtgctacgtgtctagcggagggagagct

SEQ ID NO: 49208 - DNA, 304 bp, Zea mays
tagttctatggttggtacaaaggaagagtcgaagggtgcttatctgaagaattcaaatataaagaggtagcaacgttcacgagtgtatactttgcagacgagcacaatatcaatgcccctacattgaggtatcatgatgacaaagtagggactcacaacaatctccaaatttttgagattgagggcaagactgtcggagcatccaccgaatatcatcccgagcgcgaagaaaagttggatgctttgctctatatgtatgaaaatatggatgagatgtactcctatttccagtaagatgaaattg

SEQ ID NO: 49209 - DNA, 432 bp, Zea mays
agctctgaatgtgtcttaaaatggattgcttgctcttgtattgaatgtgtatgagtagaatgctcggatatattgaatggacatgtttggggttatatttatagccaccaaccacttcctagtcgttgttttgttctgccaaccacggacggtttgcgcccctgcacatcaatggctgaaatcgcaatggtcagcagtaacggctatgttaatggctataggtgcatttaatgtgtcgtgggatgtcacataaagcagtaacggttatatcaacagctacatgtacaggtctccaacagggggagtatgtcctttcttttatgacataaaaggagagtatattctttcaaagggggagaatactcttttatgggggagtaattttctataggacaagttttacttgctttctattattctttaatggccttc

SEQ ID NO: 49210 - DNA, 261 bp, Zea mays
taaccttgtaacgaggataagctgcctttattccaaaggtttattgttcttaagcctatttgaaatccttaagggaaaaagcttgaaatgtttacaacatgctttcataagtgcatcaactgtcatgagcatcacacttataatatgacacaatgcacttcacattccgtataatatagatatgttctcattaacctaattatgtgcaattggcatttaaggccaaaatatatttttctctccatgcacatacttaggggg

SEQ ID NO: 49211 - DNA, 341 bp, Zea mays
  unsure (1)..(341): unsure at all n locations
agcttgacattgtctccctgttggaagccaatgtcattcttaatacctgngcgtctcccactatagagcatgcttctaacaaatttaaatttctcattntctaagtcatgctcattaatcttagcactaagttgagctatgtgatcattttgttgtttaattaaagctaggtgatcatgaatagcatcaacgttaatatctctacatctagtgcaaatagtaacattctcaacggtagatgtagagggtttgcaagtatttaattcaacaatcttagcatgtaaaatagcgttctcatctctaagaatggaaatagaaacattgcaaacatataaatcttt

SEQ ID NO: 49212 - DNA, 407 bp, Zea mays
  unsure (1)..(407): unsure at all n locations
tgtgaagattcttcatcccaacgtgggctagtcggcgatgtcttagccaacccatgttagtcttagcaattaagcaagtgtcgagtttaactctatcaaaatcaactaagtatagctgaccctctcacactcccttaaaatctactgaatcgtcacttcttctaaagacagtaacacctatatccgtaaaaagacagttgtagcccattttacataattgagaaactgaaagcaaattgtaatctaaagaatctacaataaaaacattggaaacataatggtcaggtgatatagcaattttacccaatcctttgaccaaaccttgatttccatccccgaatgtgatagatctttgnggatcatgggttttctcgtaggaggagaacatcttcttcttccctgtcatg

SEQ ID NO: 49213 - DNA, 436 bp, Zea mays
  unsure (1)..(436): unsure at all n locations
agcggcggagggcgagcctgtgatggagcctgtgggggagtangggaaggcggcggggccgaagccctggcccttggagcggatgacgaagtcctggcactgctgctgctgatcggcggctgcctccatcttggcgccagcgagcgcagcagcgtcgtctgagaggccgccgtggacgaacctgcagctgccgccagtcttgcacaacccgcgcgcgtagtagaggcagggctttcatccgaaaccatcggcgccgccgtcgccgccgccaaggcagagctcgttgactgacgaactcctacggtgcgctgggcccccgttgtgccacccgaggccgaacgcgaacatcccatctgcatcaccgggaccggtgcttcggcacttcccgccgtctaaccccaagagctggtgggccgggttcccgccgccctcgttg

SEQ ID NO: 49214 - DNA, 419 bp, Zea mays
  unsure (1)..(419): unsure at all n locations
tcgccctgcctttctgccgatttgccggattcgaaattattatgtccattttgctaccaaaactgaactaagatttctgtagatgcaaatatcgccctgagtctcaaaacgatgtggagaagagtagcatcccttttctgccaaaactataatacaaacagacgagtattctgcaacggcaggcgcccgagggaggacggaagatccggacaaagcttcattcaggacggaatccatgcccataatctggttttgaaaatggcgaattggagagatcaagatccatgcacaggtcacgcaacttcgaattgaacacctactttnttttcctgggtcctcctcctcccggacaacagtgaaaataagaaaccaaactggtatctgcacacggtcattgatccctcaaaagtctgcacact

SEQ ID NO: 49215 - DNA, 419 bp, Zea mays
ttcacatgtctcgtatgattcaaaatcatatgtaattaaaagcccatcagaatgaagcttcttcatgccaatctcacttatatgacccaaaccacagtgccacatgtaggtgggacttaaatcattaggtcgaggccttttagcactaatattacagatatgtgcctcatcaagaattaaaatgaataacccattcataatggatgcaaaagccacaaacatgccattcttagagaacacacaaccatttgtttcactcgcaaatgaataaccattcttcattcaacatgaaggagacataatggttcgactcatactatgaactagataacaattatttaactccaaaataaattctgatgggaggtggagttgcatcgttccgacaggcaacgcagcaactcttgcattattgtcta

SEQ ID NO: 49216 - DNA, 280 bp, Zea mays
tatgaagattcttcatcccaacgtgggctagtcggcgatgtcttagccaacccatgttagtcttagcaattaagcaggtgtcgagttcagctctatcaaaatctaccaagtatagctgaccctctaacacacccttaaatgctattgaatcatcacttcttctaaagacagtgacacctacatcagtaaagagacagttgtagcccatttgacataattgagatacagaaagcaaattgtaatctaaagaatctacaagaaaaaattggaaatagtatgg

SEQ ID NO: 49217 - DNA, 444 bp, Zea mays
  unsure (1)..(444): unsure at all n locations
agctngatgaatggtgccttcggcgtcatgtacgagcagcttcagccgaagctggttctttctgcaggaccttcggcgacgaagcatggtcccaacagtggtaaatgtggtcttgggtacatcttcgggtcgaatacggatctgatgataacctgacctgaggtcaatcttggagaatacccgagctctagtaagttgatcgaacaagatatcgatccggggaagagggtacttattcttgatagtgacctcattaaggggtctgttgtccacgcacattcgaagtgtttgatccttctttttaacgaaaattgcgggacatccccagggtgatgaactacgcctaatgaatcccttctcaagtaagtcttgtaattgagttttgagttctgccaattcattaggtggcattcgatacgaccttctagaaataggagccgtacc

SEQ ID NO: 49218 - DNA, 472 bp, Zea mays
tgtgaagattcttcatcccaacatgtgctagtcggcggtgccagagccaacccatgttagtcttagcaattaagcaagtgtcgagttcagctctatcaaaatctaccaagtatagctgaccctctaacactcccttaaatgctattgaatcatcacttcttctaaagacagtgacacctatatcagtgaatagacagttgtagcccatttgacataattgggatacggaaagcaaattgtaatctaaagaatctacaagaaaaacatttgaaatggtatggtcaggtgatatagcaattttacccaatcctttgaccaaaccttgatttccatccccgaatgtgatcgctcgttggggatcttggtttttctcatatgaggagaacatccttttctcccctgtcatgtggtttgtgcacccgctgtcgagtatccaacttgagcccccggatgcataaacctacaaaacaat

SEQ ID NO: 49219 - DNA, 449 bp, Zea mays
  unsure (1)..(449): unsure at all n locations
agcttgtctggtggccttcaacactatgtgtagctacattaacaccagagaactggtccaagagcacatagctttcaaggtatggccccttgttaatgaataggaaatgctgaaggagaccattgatagttcaagcgaaggtggtatggtttatttgaagtatacatatcgctacagaagtcagttcgaggagccagatgatgaatggcttgaggccattgaggcgactactgatgatttgttgggggcatatacgaaagatgaagatgaagccatgaatattgcctttggtgcccgtgggaagaaaaggctgaatagagtatttgatgttattggttttgtctatcctgactactgctttctagctcggaagcaagggacgaanaggaaaattgcatcaatgactgcttcggccatgtcgaaattaaagagaaacgaaagtgtaactc

SEQ ID NO: 49220 - DNA, 467 bp, Zea mays
  unsure (1)..(467): unsure at all n locations
ntactattcttagtggaccttaagttgcacaactccttttgcggtagatagagcaacacatagacaaactctagtttgcacaatctagttaagatatttgcataggttttgttctagggattattttgtggcgtagtctagaaagaagttttagaagtcctaattcacgtcccctcttaggcatcaccatttcctacatgtattttcgataaccgtttccgtttccgtttagctctaaatttcggtaaaatttggaaaatgattcctgttaaccgaaaatttctgttttcgttttcacccctagcctgcgacaatggctgaagcaaagatgaagctaaagagcttcgaccctatgggagcaacacgttaataaaagtcgaaggggagagcttcgactccacaatgatcatctatgaagcaaaagtaaagaaaagaaggatctatatgaccgaccaactagacaagat

SEQ ID NO: 49221 - DNA, 449 bp, Zea mays
  unsure (1)..(449): unsure at all n locations
agcaaggacacaaccgttccaacagctgtccctccgccaggctccgtcgctcctccgacagccacgacatcacgccagcagggtgccaagatctctccggctgccacgttggcatgtacttagggcactagctctccccccgctagacacgtagcactctgctacacccccattgtacacctggatcctctccttacgcctataaaaggaaggatcagggccttcttagagaaggttggccgcgcggggacgaggacggngacaggcgctctcttggggccgctcgcttccctcacccgcgtggacgcttgtaaccccctactgcaagcgcacccgacctgtgcgcgggacgaacacgaaggccgcgggattcccacctctctctcgccggactccggcctcctcgctccttttcccccttcgcgctcgcccacgcgctcgacccatct

SEQ ID NO: 49222 - DNA, 266 bp, Zea mays
tgcattgcatgattaaattacttgtattgcatctagggcttgtctaatctagttgagataaccgccaacaaagcgagtgaaaaagcttaactcgggtcaaacttgacaagtcttagttttaagcttttagcacttaaattcttacttatttgtgcaattgttggttcttgaaatatgcatgaggtactgcacttaggggagtattcaacactcaaatcactcatgaaaatccctagtgcaagccaaaatgcaaatttcgccatttg

SEQ ID NO: 49223 - DNA, 376 bp, Zea mays
agcttgccaagccctcggacccgaccggacttcaccggatgcccgagatcgacctcaccggacttgggtctttcgccgccgcgtgtggaccgagctatccagtgagtctccgcccaattccttgcgctcatgtcttctctggcatcccgtggacctccatgacccatctgattgaactatctcgccgtgaccaggccggttcctcgctgccgacgagcatccccgcctgcgcgcgtggaccgaccgactccggccatctccgacggcgtcacgcacaccgttgtgatccccgagacctccccttcgtcctcgaccacttcaccggagccatctcgccgccggtaagcccctctgccctttcttccgccgcggttac

SEQ ID NO: 49224 - DNA, 369 bp, Zea mays
tctagagatgtatctaatctcatgagatcaaataaaatactatattaattcatggccaacaaccaaaaacatttgccactgcactcacacaaaaaacagagtgtcttaaagaaggacaaatatgtatatcatatccatgaaattatatttttcaataatcataactaatcagtattgccacaacacttacaaatatacaaaattagtaatgacataacagagagcagataaaactagatttgcctccaaaacggcttcatttggaagatggacaacatgaaagtcagaaaatgccagagtttgctaaaccttcaaaactgatgctcacgtcgttgcagttcatggcgtggtcagtaaatgtaaacttaa

SEQ ID NO: 49225 - DNA, 438 bp, Zea mays
  unsure (1)..(438): unsure at all n locations
agcttctaaagggagaacacattntangattaacaaatgttcantttgagaaagacaggatttgtagcgcatgccacgcacggaagcaagttggagtccatcatccacacaagaacatcatgacgaccgacaggccacttgagctactccacatggatctattcggcccgattgcttacataagcatcggcgggagtaagtattgtcttgtaatagtggatgaatattctcgcttcacttgggtattctttttacaggaaaaatctcaaacccaagaaaccttaaaaggattcttgagacgggctcaaaatgagttcaacttaagaatcaagaaaataagaagcgacaacggaacggagttcaagaactcacaaattgaaggctttcttgaggaggagggcatcaagcatgagttctcttctccctacacccctcaac

SEQ ID NO: 49226 - DNA, 451 bp, Zea mays
  unsure (1)..(451): unsure at all n locations
atctcaacatttcttgttgctcattaaatatacttcaatttttataattggctcaagtcataattntaaacttttcatcccctttttcttattttcttgattttgctcatggggctcacttatggtttttaattagggttgcacattctacccttttcaaggactcaattgttttgatcatgatacttttaagtatatacttggtgaattctttattacttaagttattttgatgctcatgcttactttgattcacatgaaataatggttcttggtttggcatttgagagaaaccctacgtgacactgggtgtcacaaccttccccccttaaaggaatctcgtcccgagattcgggccagagtcctcccagggtgaagcgaagggtgagacttataggaaatgggtgaatattgttattattagggtaaaactgctcttcgaatgtcattc

SEQ ID NO: 49227 - DNA, 442 bp, Zea mays
agcttctaagggagaacacgtgatatgttttctaacgtgcatttccaaaaagatagaccctgtgcagcttgtcaagcaggtaaacaagtgggaggagcacattacagcaagaatgtgatgaccacttcaagacccctggagctgctgcatatggacctcttcggacccgtcgcctatctgagcataggagggaagaagtatgggttagttattgttgatgacttttcccgcttcacttgggtgttctttttgcaggataagtctgaaacccaagggaccctcaagcgcttcctcatgagagctcaaaatgagtttgagctcaaggtgaagaagataagaagcgacaacgggtccgagttcaagaaccttctagtggaggagttccttgaggaggaaaggatcaagcatgatgtctccgcttcctacacaccacagcaaaatg

SEQ ID NO: 49228 - DNA, 476 bp, Zea mays
  unsure (1)..(476): unsure at all n locations
gtgccgtctgactttctgatccagtcttgcacgatggagtatttattctgcgcgaggcttaattcctacacacgatcaaacatgttacgatcagcgttgctgaaggcgtttgagccgactagggaggagggataggcacatgcacatacgctcgctacgtacctgcgccaactcctccacagatataactcgtgtgccctcctgttcgaagtgctgaagagccgctccagcgatttcttcccagctttccaaagcctccagctggtacgggctgattgctgccgcacagaattcttccaagtccatctttctgtacgcaagcgggtccaactgagacacangcatgtgaaggtggtcagcaacttctaccatcaaatacaattaactgctatcgctgtataatcacgacatctgctcacaactgggcgtatggcattatatgctcaacattacaatngaagacaatatacggaaac

SEQ ID NO: 49229 - DNA, 442 bp, Zea mays
agcttccccagcacgccgaggatacgcagatctctatcgtcggggcacaagaagattgcctcggcaacaaacattagtggcaccaagcgctatattctttatgtccctgggcccacatgtcgaggcctagtacccttgtgcatgccccccttcagctataaaaggggaggcatgcaacgttacacacaagctcagtcttttagatcacaccttagactgacaagctcacaagcaatacatctcacagtggagtagggtattacgctccggcggcccgaaccactctaaatccttgtgtgttcttgagttattcccgtttattcctactgtcaagcaaaacgcctaagcccctcctcatcttatgatttagggcgggtgcactccgccactcggccggagatttactctccgacagactacaactggctttttagtgatattg

SEQ ID NO: 49230 - DNA, 473 bp, Zea mays
tactcacgcttctgcttcatctatattatggatggccttcgaatccgtcctacttactattgctctcctgacagcttcttgactcccatgtacaacaatgggcccttgatccgaatgtatcttcatgctaagatatgctggatggagtattgcttcgaacgtattgagcgtccctcgacccatgattgcattgactggatactccatatcaataatgtagaacacaacctgtcctgtccttgtgatgcgaacgtagccgaaggtgaccgacatggttatcttgcctaacgccacaatctgtctttctccgaaaccacaaagggggtgtgttgcatcaatatatcatcgcaactggctcttgcattgcctgaaagccttcaggaaaagatatccctcgtctgactgtgtcaccatcacattgtggaccatacatccttgatgacacaaatataacattgctcattggaggataa

SEQ ID NO: 49231 - DNA, 447 bp, Zea mays
  unsure (1)..(447): unsure at all n locations
agctnttgccaaatcctcaagcaaaggaaggggattgattacaagccccgctccaagaaggtttgctacaagtgtggtaagcccggtcactttattgcaaaatgtcctatttctagtgacagtgacaggggcgatgacaagaaggggagaagaaaggagaagaagaggtactacaagaaaaagggcggcgatgcccatgtttgtcgggagtgggactccgacgaaagctctagcgactcctcctccgacgaggacgccgccaacatcgccgtcaccaagggacttctcttccccaacgtcggccacaagtgcctcatgacaaaggacggcaaaaagaagaagttaaatctaaatcctccactagatatgaatcctctagtgatcgaaatgctagtgatgaggaagataacttgcgcactctntttgccaacctcaacatgcaacaaa

SEQ ID NO: 49232 - DNA, 310 bp, Zea mays
  unsure (1)..(310): unsure at all n locations
tgtgaacagtacangttcaggagggaaaaagcagcttctgctgatcagccgaagcccatgctgctgtgtgaggatatagcagagcagaaggtgctattgggctcgcaattatctgaagatcaagagaaaaccttgataaggtttttattcaacaataaagatgtttttgcatggtcagccaatgatctttgtggagtgaatcgggatgttattgaacattcgctcaatgttgacccatccttcagaccccgcaagcagaggcttcggaaaatgtctgatgacaaggccgaaggggctcgcaacgaataaa

SEQ ID NO: 49233 - DNA, 444 bp, Zea mays
  unsure (1)..(444): unsure at all n locations
agctatacagaatgttaaaaagtgcattcatattatttatgaaactctagntatgtttggtttactgtggctgtctctgtttgcgtgacaaaaatgagcgggtctgttcactggtaggtttcatcaggtaaatggacgaattggctctttccactatggagacttcagtagagggataaaagttcttactgccacgagaatttcatgatttttggttgagtgtttcgtgagatatcgaattttgaagttaactacgctgctgtctgaaacagattcagtctgttatcttgtcagatgttttagaacttataaatggcagaatttaattatccgttgaataccgaagttgtagggtattttgtgtagatactcctagattattctgttgatatcaccactggtatagtttcatagatacataattaacanacagcgctgctgctg

SEQ ID NO: 49234 - DNA, 264 bp, Zea mays
  unsure (1)..(264): unsure at all n locations
cgaacggngtaaatcctgttgaccttgacacgacagtgttgttgtttcacaccacctttattaattcatctggccactttcctttgggttggttgaagattgacttcattattcctgttgttataattcctgttgggggccttcgtcttccgaaggtcctcaaaaacatgattttactatgtcttccaagtgtgacatatgaacaggtaccttcggactcgggttaaaagcatatacgacgtgaaaagcatgatcgtgaccaag

SEQ ID NO: 49235 - DNA, 436 bp, Zea mays
  unsure (1)..(436): unsure at all n locations
agcttgcaaaaggtcctctggtgagatcaactctataaacaaataaacaaaactaatttcagaaatcagaacacaagtaacaaggaaattctatatatattattaacagaaaaaaaacacagacctgttcccctagcacggttgaagagacaataaacatcgactagtgccatcataccacctgctttctcaagtggtattcttacaaagtccgccagctgacaacaaatggacaaaataatcattggacaataacaagtctgacactttttagtactccctctgtcctaatttataattccgttgacttttgtgtgtcaagtttgaccagcttgtcttattcaaatnttttgtgaaaaaataaaaaaatcaaaggcatacctaaagtatattataaagtacacgatatcatagtaaaaaataattattattatga

SEQ ID NO: 49236 - DNA, 423 bp, Zea mays
  unsure (1)..(423): unsure at all n locations
actgctagtagttagttacttttactcaaccggnttatcatgtataccatcaaccgactcttgtgtattatttgttccttgaaatcgaaataaaacttatccatgtctcgcctgatacgctcttcgccttatttataggtgggtggattgattgtttctatcctcacgtacctttcatgcatcaccggatcggtgcacaacgtcgaaaaggaaggctgttgctgagcatagtgacatgacagaatcggcaaaaacagatacgagcacctcagcgtctagttcgtcttttttctcaagggcttactcggcaagaaaaaaatgtattataatcttgcttggaactcatactgtgcgagtttggttttggacagcgccagtattgtttggacagcacgagtgttggctcgaagaacacacccggac

SEQ ID NO: 49237 - DNA, 440 bp, Zea mays
  unsure (1)..(440): unsure at all n locations
agcttgaggctgtgtatagattaccgcctccttattgcggngactatcaagaacaagtatcctttgcctcgtattgatgttctttttgatcagttggtcggagccaaagtgttntccaagatagaccttcactctggctatcatcagatcaagatacgggcaaatgatatttcgaagatgactttctcaaccagatatgggctatatgaattcttggtgatgtctttcgggctaactaatgcaccagcatatttcatgtatctgatgaattctgttttcatgcctgaattggacaaattcgtagtggttttcatcgatgatatcttggtgtactcaaagaacgaagaagaacatgtcgggcatttgcatgtagtgcttcaacgtctgcgagagcaccacctttatgccaagtaaaggaaatcaaatttttgggtcacact

SEQ ID NO: 49238 - DNA, 466 bp, Zea mays
tcggcacagagacaaatctcaagatgaagggtcgaaccgtcataaagatgaattgacttaaagacccatgatgttttgtgtcattattatagttgattgtaaaggacataaatgtaattttgcgcaggttgcatcctgtgcctataaatatgtgaacagtatcccggcactgttcacgcgatcctgtaatcacggatacgtcacgcttgtacttttgctttcattcaagccgaaggtacacttgtagttatgaattactgtagagttattatcaaatgcaaagggcctggatgtaattttacataggctgcgacccgtgcctataaatagatgaacagtactcccgtactgttcacgctgacttggcatttgcttttgcgtcacgcttgtattctttatcttccttcaagccaaaggtacacttgtaataaattattatctttattcatagtaataaaataaaaat

SEQ ID NO: 49239 - DNA, 442 bp, Zea mays
agcttgtgaagattcttcatcccaacatgggctagtcggatgccagagccaacccatgttagtcttagcaattaagcaagtgtcgagttcagctctattgaaatcaactaagtatagctgaccctctaacactcccttaaaagctactgaatcatcacttcttctaaagacagtaacacctgtgtgacggaacctcccaagtaattaggcccacctacagttgtccttgtctcacagacatcagacaaccctgtaggtgcccctgaactacttgacaagttcggtatctttccttaccttaccaggaacgtctcacccatcttgtagacattatagaacatcggagataaagaaatgcggaagcgaattacataaactctacatttattttagaagtaagcttgagttatattattacagaccagcctaaaagtgagtgcat

SEQ ID NO: 49240 - DNA, 308 bp, Zea mays
taagcttttggcttgaactggttggtgcatacaacttaataatctgttacctcccaggctgcctaagccctcatgtctgatctgttagacccagaatggtcctgccgcctgcgctgcctctgctctggctgacgatgacaaaaatggcagctttgcaattcagctaaacatgttcagtacactaaactatgaatataattcttcctggttggtttctcttgctgtcctctgactgctggaaagtgtcctgtatttatgtcgctagtgacaaattacagagcggcttactctgccctattgctagcata

SEQ ID NO: 49241 - DNA, 427 bp, Zea mays
agcttagccattgtcagcctcaccctggcgggtggcacagcagtcggagaggggcgagcggcgctgttttcctgtcaggtcggtcagtggaagggcaaagtgactgcggtcacttcgaccttgccgactgaggcacgtgtgtcaggataaggtgtcaggcgatcctcgcattgaatgcgcctgcgataccgtcggttggtgaggcgatctgaccaaagttgcttcactgcgaagcctgcccgagctgggcttctggcgagtcgagggtgcgcccgttgcttgaggaggccctctggcgaggcgtgaattcgtctgggacttctgtttccgcccgaggctgggctcgggcgaggcgagatcgcgtcccttgagtagacgaagccttgacctgaatcgtgcccatcagtctctgcagcttgcgctgatg

SEQ ID NO: 49242 - DNA, 416 bp, Zea mays
  unsure (1)..(416): unsure at all n locations
cgtggaggttcttcatccncacatgtgctaagcggcgatgccacaactcagcccatgcaagtcttagccattaagcatgcatctagactggcctcttcttttgcaaaatcaactaagtaaagtttgccgtctagtacacccttaaaagctagtgaaccatcacatcttctaaagacagacacatctacatttgtaaataaacagttatatcccatattacataattgactaacagatagtaaattatatccaagactctccactaaaaacacattagatatagaatgctcatttgatattgcaatcttgcctaaaccttttaccttgccttggttcccatcaccgaatatgattgaatcttgggaatccttattcttgacgtaggaggtgaacatcttcttctnccccgtcatatg

SEQ ID NO: 49243 - DNA, 433 bp, Zea mays
agcttctaaagggagaacacgtgataggtctaaccaatgtttatttcgaaaaagatagaccttgtgcagcttgtcaagcaggttaacaagtgggaggagcacatcacagcaagaatgtgatgaccacgtcaagacctctggagctgatgcatatggacatcttcggacccgtcgcctatctgagcataagaggaagtaagtatggtctagttattgttgatgacttttcccgcttcacttgggtgttctttttgcaggataagtctgaaacccaagggaccctcaagcgcttcctaaggagagctcaaaatgagtttgagctcaaggtgaaaaagataaggagcgacaacggatccgaattcaagaaccttcaagtggaggagttccttgaggaggaagggatcaagcacgagttcttcgctccctacacacc

SEQ ID NO: 49244 - DNA, 472 bp, Zea mays
tggggccttaccgttacaggcggcggtgcaagcaagcagtcatgttcgtgcccaggcaacgcagccgccagccgagcaggagcagcgcgcgcccgagaagcaagcatgagcggcacgccggcaagcaagcagttgcatgcttgcagcgcgcgcgcacccgagcagcgagcggccgagcgactggagcgagaaagctgcaagcagcagggcagcatgccgccgtccgctggctggctgggcatttgggcaagcaaccgaagcaatcagccaaggaggcaatcaggcaagcaattaagcaaagcaagagcggccagcaagcagcgatttgagtcgcgcaacaagcaagcagaccagcgcatgcgcagcaagcagcaagcaggtctgtttttgttgtttgacactgagaaaacatattgtgtttgtgtctaattacagtgaattgtgtacaattacagtgtacaatatgaagaga

SEQ ID NO: 49245 - DNA, 448 bp, Zea mays
agcttagccatataattactctcatataatacaagttgtttgtttaatacttgattaatctcttcctctcacatagtgttttgaagtctactagtagtctacttttaggtagctactagtgagcaactcgcttccttttctctccatttatgtttattcatatcaccataaatctgatgtgacatctcttacaacccgcttatgtcaccttattatacttattcttaagagacaatctcgcacatttcacgatgtattactctccccatcacgatgacgaggacagaatctttctccaccatatagcttatgggcatgtttgatccatgaggtcaaacaaagtgactataaattagtcactctgggtgctaaaaatctaaacaggaagagctaacaagtattaaaattgtaaaaatatatatttttagtcactcttagttcttccctt

SEQ ID NO: 49246 - DNA, 460 bp, Zea mays
tgaccgtcgattcctcgaagatcggacatggatcgcagtctattctctacgcgcaacgaatacaaacaggcacaagcaaacatatacaagcataagaacattacaccatacaagataaaatattataaaagcaagtaatataaaatagagagcgcttctacggttatgcgaggaaaagaatcgcgatagtcgaagctacagtcgaggggttagcgtgtttacattaagcaagtgttaattagaatatttaatccgatatttcttaaatataaataatatctactacttagttttggctaacttactgttttaattgtggatgattaaataaataactaattaactcacatgagtaattataagggaatggtttaatctcgcgtgcggataacgcgcgatatgcgcgaacggcgcacggcaaggcgtgcgacacacgcgaacggcgcgcgacaactgtgcg

SEQ ID NO: 49247 - DNA, 446 bp, Zea mays
agcttgtgcttgggccgtaagccagacacgatgtccttatcatcccggtacgacaggcacgacgtgccatgccggcccgaaaccatacgtgttgttcctacctcatgctcgagtcgtgccgaaccggatcggcccgctggacataaactatatgcataagcaatacaaaagcgaaaaagaatccagggaacacgtacaagagagcagcgtcctaattggccgtgttcttggctgctcatcagctagattatactagaagtatggaacctacctgtagctaatcaaggcaggtgtaagtgtgtgggttgtggcaatccacctcgttgccacatcaaccgaactccaatcctgtttaggtcttattggttctaccataaatctatatgaattaggtgatattgaatcggtttatttgaattgaaataaccaaacaaataatcgaacaa

SEQ ID NO: 49248 - DNA, 300 bp, Zea mays
gagaacacgtgataggtctgactaacgtgcaattcataaaagatagaccttgtgcagcttgtcaagcaggtaaacacgtgggaggagcacatcacagcaagaatgtgatgaccacttcaagacctctggagctgctgcatatggacctcttcggacccgtcgcctatctgagcataggaggaagtaagtatggtctagttattgctgatgacttttcccgcttcacttgggtgttctttatgcaggataagtctgaaacccaagggaccctcaagcactttttaagaagagctcaaaatg

SEQ ID NO: 49249 - DNA, 446 bp, Zea mays
atagtcgacactgcaagcgtgcaagctctgaaatgaagagatggcgctcgtcatctatatcttttttcaaatcctcaaacaaaggagggggaaagactacaagtcccgctccaagaatgtttgcttctaatgtggtaagcccggccactttattgcttaatgtcctatgtttaatgacagtgacccatgcgactaccagaacgggagaataaacgataataagaggtacttcatgaagaagggcggcgatgcccatgtttgtctcgagtgggatgtcgacgagagctctatcgactccttcgacgacgaagacgccgccaacattgccgtcaccaagggatttctttttctcaacgttggtcacaagtgcctcatggcaaaggacggaaaaagaaaaacggtaatcccactcctccctaaatatgaatcgctagtgatgataatgc

SEQ ID NO: 49250 - DNA, 468 bp, Zea mays
  unsure (1)..(468): unsure at all n locations
tctatagggagagcacattntacgactaacaaatgttcatttttataaagacagganttgtagcacatgccaagccgggaagcaagttggcactcatcatccacacaagaacatcatgacaagtgacaggccactggagctcctacacatggatctattcggcccgattgcttacataagcatcagcgggagtaagtactatctagttattgtggatgattattctcgcttcacttgggtgttttttttgcaggaaaaatctcatacccaagagaccttatagggattcttgagacgggctcaaaatgagttcggcttaaggatcaagaaaattagaagtgacaatgggacggagttcaagaactcgaatattgaatgctttcttgaggaagagggcatcaagcatgagttatcttctccctacacaccacaacanaatggtgtagtggagaggagaatcgaactcta

SEQ ID NO: 49251 - DNA, 401 bp, Zea mays
  unsure (1)..(401): unsure at all n locations
agcttggcattntttgctactgccggatttgttttgaccagcaaaggggaacaaatgagagaagaagaagcactacatgaaggccaacggcgaagcacatatcggaaaggagtgggattcagactgctcctcctctgactccgacaatgaaggactctccgccaccgcctttaacaagtcatctctcttcctcaacgagcgtcatacttgccttatggcaagggagaagaaggtaagtactccagataccacttatgcttcttctagtgatgatgaatctagtgatgaagatgaaattgattattcatgcttgtttaaaggtctagatacaaccaacgtagacaaaactaatgaattgattgatgccttgaatgataagaacatacttgtagaaaagcaag

SEQ ID NO: 49252 - DNA, 468 bp, Zea mays
  unsure (1)..(468): unsure at all n locations
tcatctcacttgaactctntgcctttctccagtagagatatattttgttttactaacttggaaaaaccttcaataaatcttctatagtatcatgctaatccaagaaaacttctgatcttggacgcatccttgggttgcttacaattcagtatctcacttatctttcctggatccacattaattccaccatcggtaacgatatgtcctaagaaagcaactttcttcaaccaaaaatcacacttcgagaattttgcgtatagttggttgtcacgaagcttttgtaagactagccttagatgatcttcgtgtgtttcttcattcggagaatatatcagtatgtccgtaatgaatacgaccacaaactgatccagatattccatgaatactttattcatcaagttcataaagtatgctggtgcattagtcagtccaaacgacatgatcaaaaactcatataatccatatctc

SEQ ID NO: 49253 - DNA, 431 bp, Zea mays
  unsure (1)..(431): unsure at all n locations
agcttcacaggccactggcggagctagccgaatcttggctcgacttgngggtggctggagtgggctggccacggtggccgaagctctggcggcaatggcgggcggaaaagagctcgccggagctaaggaggggtggctggccggtggatgagcgccgtgtgaagtgaggcgcgcccggtgaggctttatatgcgcggacgagcacagncgagggcggggctctgacaagcgctcggggcgtgcgcggcgaacgccagtgcgcgctctggcgtctggcacaacgtcgagcacaaggcagtgcatagagaggtcgagttcaagcgcggattggccccaaatctttgagattatggccatgatcccgttgagagatctcttcctctcacgtccctttgtcgtttgtgtgtggaggctaccaagctttgctgact

SEQ ID NO: 49254 - DNA, 301 bp, Zea mays
  unsure (1)..(301): unsure at all n locations
attacacagatcatatgacatntacccctcttaatattatgtttatctaacctactaatccggtaaggtatctacactaaactccttaagaccggcatacacaaaacctattgttaacctatgcctctatctgacccacatccaatgattatgattctccaacactagctattttatgtgtgccatccctgcattcttatatctccaagaaccgatagcccacacgcagttataattaattaccaaaacatcaccaaaggggcctagatgagtcacatccgaagatatgatgggtgtggat

SEQ ID NO: 49255 - DNA, 396 bp, Zea mays
ctgcagcatgcaagcttggaaacaccacaagttattgtatatgtttctaaatctaactggtcctcaagatgcatcacagccttttacagttgaaggtattattgaccactgctcctgggcttagctccaccggatattgagaagccttttgatatatactatgacacatcaagtagtggtctacgatgtgttttaatgcaatagggtcgagttatatcatattcttcaagacagttgcgtccgcatgaggaacattatccaactcatgacttagaattatctgttgtggttcatgccctttaaatatggtgccattatctgctgtgaaatatctggcatatatatacagatcataaaagttctgaattcaattttacccagtcataactaaatatg

SEQ ID NO: 49256 - DNA, 326 bp, Zea mays
  unsure (1)..(326): unsure at all n locations
tcagctccatctatattatggattgctnttgagtcagtttatttttcctcggcccttctggcagcttcctgactatcatgaatagcaatgggtccttgatccgaaggtatcttcatgcaaaggtaagtatgatgaagaattgcttcgaaagcattgatggtgccacgaccaataattgcattgtaagggtattccatgtcagcaatgtcaacacaacttgctcagttctggcgttgttgatgaatccgaaggtcactggcatgtgtgattttgctcaatgctacaatctgtctttcttcgaagccacagagagggtgcgtagcatc

SEQ ID NO: 49257 - DNA, 407 bp, Zea mays
  unsure (1)..(407): unsure at all n locations
agctttaccaaatggacgtgaaaaggccttctttcatggaccaatcaaggaggaggtctatgttgagcaacctcccagctttgaagatagtgagtactctaaccatgtatataaactctctaaggcgctttatgggcttaaacaagccctaagagcatggtatgaatgcctaaaagatcttcttatcactaatggcttcaaagtcggcaaagccgaacctactctctntactaaaataatcacaaatgatttgtttgtattgccaaattatgttgatgatattatatttgggtctactaacaaatctacttgtgaagagttagtacgatcatgattcaaaaaatccagatgtctatgatgggggagtcgaaatatttcttatgaattcaagtaaagcaactcccaaa

SEQ ID NO: 49258 - DNA, 410 bp, Zea mays
gttagtgaattcaacgactggttctatttgattgatactctacacgcacaggtatagcatgcattcccgcggtacgtgataaattcaataccccattgcttgagcccaaattctcccaatccacctttaaaaccactcgcagacgtgcaaggttaaaaaaacgatagcgacagcaagcgtatgaggggatcttactgaggtcatatacaacgttagaagcagaagaaacattcggtcccaaaccaacagcagcctgcaaaccaagcgagaaattgtactctgagaaactgatggataaagcgagcgagcgagaacaaaacctacgcagtacgtaagcacaaaagtaaaatgagcaacagaacgcgcacagatagtacaaacaccacagctcgtcctcgtgacatgagcac

SEQ ID NO: 49259 - DNA, 435 bp, Zea mays
  unsure (1)..(435): unsure at all n locations
agcttcggcatgtcccactctntcaaagttgtgaacactctanaagctaagaattcttgcaccagatccctagtgccaatatgctccgcaataactcgaaattcgcccagtgcaatttggcttggactcttcggtgtcatgttgcactggggcctggtttctccgaagattaattctagtggactttggaccagcttctccttttcttcatcaactttgacgtaaaaccattcagtcttctagccagctggccacttggtacaatagatgataactagaaatgtcgtatttttgcgataggcaaaattgtagcagccgaagttttcatgcagcccatcttctctagctnttgtttgataatgaagctcgtgtactcggcagaaaccttcggcaaatggttctacccctggcttcngagggcccaaatgtagacac

SEQ ID NO: 49260 - DNA, 449 bp, Zea mays
tcgcacctctgaactaactcggctgcatcactcttcgttgttgttcaatagaatcctgacctgaagaccttcctgactagtgtcttggacgctgcgtgtattccacattgcccagcatggacctcctccagaagtcgcttcccagtagatgagaaaatgcacttcatgaggacgcctgatgcaccccttctgtataatgtctccccaatgagtgtgtagtgagccgactgtctggcaatacgctcgactgcatttttgtcatctggttcctcttcattctttatatacctgatgattggccttctccagtcatcagagtctgactctggttgattcacaatattacactcttctgcttgatccattgagatgctcggctgtagtatttcttgtacaaagactccaagtgggacctgagttcgactggatcctagcttggacaatacatc

SEQ ID NO: 49261 - DNA, 455 bp, Zea mays
  unsure (1)..(455): unsure at all n locations
cctgcggcatgcaagcttcttaaccaaatctgaactcaccaaattattgcagcttccaccatcaataataacacgtgcacgccgattctcgatggcgaagaaagtctagaacaaattatggcgttgctccttctctgatgattcacgctgagaactaaaaacacgctgcaccacgatgcttcgaaggttcaccgtagcatcagcaccaagcatggcatcatcattagcagcaacatcactggagtcatcatcgtcatcctcaccgncggaagcactaatgtagccatcatccgtagcaatgtatgttcgctgactcgggcaatcctacttcacgtgaccaatcccatgatagcggtggcaaacaatactcgaagaatgaccattggaaggtgctgcaggtgctggtgaattatgtttcttggcgggtacatgcaaaggaagattaccaacatgtg

SEQ ID NO: 49262 - DNA, 394 bp, Zea mays
  unsure (1)..(394): unsure at all n locations
tcacggcctcccagatgagctatntaggggcttggatcgatcggaggagggcgggaaagggttcgactacggtggttgccctcggggcggctctggcgggtcgcggagaggtcgtcggagctatgggcgagctccggggagtttggcgcggtacagaggatgcaacagggaagatagccggacactaaggtgtgctttatagctgtggcgcgggcgtggtcacggtgcggccacgagcgcgtgggggttcgcgcacgggcgtgctctgagtgcgcccccgagtgtcagccctcgtcgaacacgtgtgggtttgcttctgccatggttcaacggccgatttgagccacctagcgtgtagatcttggcaaaaccccgtgtacagtctttcctgcac

SEQ ID NO: 49263 - DNA, 443 bp, Zea mays
  unsure (1)..(443): unsure at all n locations
agcttctatagggagagcacattttatgactaaccaatgttcattttgagaaagacagagtttgtagcgcatgccaagcgggaaagcaagttggtgcccatcatccacacaagaacatcatgacgactgacaggccgcttgagctactccacatggatctattcggcccggttgcttacataagcatcggcgggagtaagtattgtcttgtaatagtggatgattattctcgcttcacttgggtattctttttgcaggaaaaatctcaaacccaagagaccttaaagggattcttgagacgggctcaaaatgagttcggtttaagaatcaagaaaattagaagcgacaatgggacggagttcaagaactctcaanatgaaggcttccttgaggaggagggcatcaagcatgagttctcctctccctacacgccacaacaaaat

SEQ ID NO: 49264 - DNA, 462 bp, Zea mays
  unsure (1)..(462): unsure at all n locations
tgtggaggttcttcatccacacatgtgctaagcggcgatgccacaactatcccatgcaagtcttagccattaagcatgcatctagaccggcctcttcttttgcaaaatccactaagtaaagtttgtcgtctagtacacccttaaaagctagtgaaccatcacatcttctaaagacagacacatctacatttgtaaataaacaattatatcccatgttacataattgactaacagatagtaaattatatccaagactctcaactaaaaatacattagagatagagtgctcattagatattgcaatcttgcctaaacctttcaccttgccttggttcccatcaccgaatatgattgaatcttgggaatccttattcttgacgtaggaggtgaacatcttcttctcccccgtcatatggtttgtgcatccgctgtcgataatccagcttgaacccncggatgcat

SEQ ID NO: 49265 - DNA, 450 bp, Zea mays
agcttatgaaggttcttcatcccaacatgtgctatactactgatgccacaaccagcccgtgttagtcttagctatcaagcatgcatctagatcggcattctctcttgaaaaatcaactaaatagagcttgctgtctaatacacccttaaaagctaatgaaccatcacttcttctaaagacagaaacatctacatttgtgaataaacaattataacccatgttgcataattgactcatagacaataagttgtacctgagcgattcaactaaaaacacattggagatagaatgctcggatgtgatggctatctttctatctttcccaatcctttaaccttggcttggttcccatcttcaaagataattgcatcttgggaatccttgtttttgacgtaggaggtgaacatcctcttcttccccgtcatgtggttggtgcatccgctgtcgata

SEQ ID NO: 49266 - DNA, 405 bp, Zea mays
tcaaccagacccaatcacccaccgcataagtgacctcacggtgattaatatcataacgttgtttcatccggttctgggcggtcaacaaatgatgacgagctcgattcagtaaggcatcacgatccaccaacctgctatcaactgcatctaccatagtggtgccctggctgttaggaaccaatggagggggtttgcgaccatagactaattcaaaaggagtcattcgaagtgccgaatgatacgaggaattataacaaaattccgcccaaggtaaccattgagcccaagtggatggtcgctcagtagctaaacagcgaagatacatctcaatagtacgattcaccacctccgtctggccgtccgtctgatggtgatatgatgaagaggtgaggagttgtgtgccac

SEQ ID NO: 49267 - DNA, 431 bp, Zea mays
  unsure (1)..(431): unsure at all n locations
nagcttatcatgctcccaattcaaacgctaccgtattttttgttggcaacggacccggaaaggcttaaatccgcgggtgctcatagaccgagctctatgatggagttcgtgcctaattttttatactagtggagcgcccagagttgaattagatgtaagaacaaatttgagcaaagattataagatagtgcggccggtacacgtttgccggaacaaattgtgccgtcgtccggtgtctgggacctaatcagtgagacatgtgaatagggtgtacggattctttactggtttttcaaaaagccaagggcctctgcgcaaagtcgcaagcgcgggtgcgcacatgcgtgtttccccgctcgcgggcttgtttggcctgaatagagcccagtactattcatagtttttccttttcttttactggcagacttgga

SEQ ID NO: 49268 - DNA, 409 bp, Zea mays
tctaaagggagaacatgtgatatgtctaaccaatgttcatttctaaaaagatagaccttgtgcagcttgtcaagcagggaaacaggtgggaggagcgcatcacagcaagaatgtgatgaccacttcaagacccctggagctgctgcatatggatctcttcggacccgtcgcctatctaagcatagggggaagtaagtatggtttagttattgttgatgattattcccgcttcacttgggtgttctttttgcaggataagtctgaaacccaagggaccctcaaacgcttcctcaggagagctcaaaatgagtttgagctcaaagtgaaaaagataagaagcgacaacgggtccgagttcaagaaccttcaagtggaggagttccttgaagaggaagggatcaagcacgag

SEQ ID NO: 49269 - DNA, 444 bp, Zea mays
  unsure (1)..(444): unsure at all n locations
agctntaccaaatggacgtgaagagtgccttccttaatgtaccaatcaaggaagaggtctatgctgagcaacctcccggctttgaagatagngagtaccctaaccatgtttataggctctctaaggcgctttatgggctcaagcaagccccaagagcgtgggatgaatgccttacagatttccttattgcaaatggcttcaaagtcggcaaggctgatcctactttattcactaagactcttgacaatgatttgtttgtatgccaaatttatgttgatgatatcatatttgggtctactaacgaatctacatgtgaagaatttagtaggatcatgacacaaaaaattcagatgtctatgatgggggagttgaagtattctctatgagtccaagttaagcaacttcaagagggaccttcatttccaaacgaatacactcaaacat

SEQ ID NO: 49270 - DNA, 446 bp, Zea mays
  unsure (1)..(446): unsure at all n locations
atatgattcanacacaagggcatatagagtctttaacaagtcctcaggactagttgaagtttcttgtgacgttgtgtttgatgaaactaacggctcccaagtagagcaagttgatcttgatgagataggtaatgaagaggctccgtgcatcgcactaaggaacatgtccattgtggatatgtgtcctaaggaatccgaagagcccactcaagcacaagatcaaccatcctccttcacgcaagcatcttcaccaactcaaaatgagaacgaggctcaagttgatgaaggagaaaatcaaaatgatgagccacctcaagatgacggcaatgatcaagggggagatgcaaatgatcaagacaaggaggatgaagaaccaagactgccacacccaagagtgcaccaagcaattcaacgagatcaccccgtcgacaccatcctcggcgaca

SEQ ID NO: 49271 - DNA, 423 bp, Zea mays
tgcaagctcgtggaggatcttcatacacacatgcgcttagctgttatgccacaaccagcccatgcaagtcttagccattaagcatgcatctagaacgacctcttcttttgcaaaatcaactaaataaaggtagccggctagaacacccttaaaagctagtgaaccatcacatcttttaaagacagacacatttacatttgtgaatagacaattatatcccatattacataaatgactgacagatacgtaattatatccaagagactccactaaaaacacattacagataaagtgctcattaaataatgcgaacttgcctaaacgcttcaaccttgcttgtgtcccatcaccgaatatgattgaatcttgggaatccttattcttgacgtaggaggcgaacatccttcttctccccccgcatat

SEQ ID NO: 49272 - DNA, 433 bp, Zea mays
  unsure (1)..(433): unsure at all n locations
gattcttcatcccaacatgggctagtcggcggtgcctattctaaccaatgttagtcttagctattaagcaagtgtcgagttcatctctatcaaaatctactaagtatagctgaccctctaacactctgttaaatgctactgaatcatcacttttctaaagacagtaacacctatatccgtaaaaagacagttgtagcccattttacataattgtgaaacgaaaagcaaattgtaatctaaagaatgtaccagaaaaacattggaaatagagtggtcaggagatatagcaatnttacccaatcctttgaccaaaccttggtttccatcctccaatgtgatagctctatggggatcttggtttttctcatacgaggagaacatcttcttctctcctgtcatgtggattgggcacccgctatcgatgatccaactt

SEQ ID NO: 49273 - DNA, 445 bp, Zea mays
  unsure (1)..(445): unsure at all n locations
agcttcagcctgtcattcttcagcttcatcattctgcacatattaaagcagaataagaaaggtgcacacttcaaggagaaggtaaaagtaacatgtataagtttctcaccggcttaaggtggctccgaacttcgtcaccagccatttctcgcccgccatttacccaaatctgggtcataaatctgtttccaatgcttctggctatgcttgtgatgtcaaccaaatctgctggtgacaagctgaagtttggcctatttacaattnttctgtgcgtacagccagccttcaggaaagcggtagctgtgcctcgagaagctagcaaggcgcagaagtcagcatgcccagcaataacttcgtcaagtgcatcaacctcgccttcaatgtattccaaggtgctgggcaacgtttcagctgaaagtgtnaaattatcagagctggctccaat

SEQ ID NO: 49274 - DNA, 470 bp, Zea mays
tcgtaaaaatatccatgcttcgtaaacaagggatcccttcttttataacagggctgatgaagctgtatttctcatcttactttgtgccttaacacattatcgtttttacaacgctttctccaaagattgacctcgtattcaattcatgtcattggtgtgatatgatgtatgatgtgatgttatgcaagatgatgtgatgatgtgatgcataaatcgtgctaatgccgaagacacacacccacacgcccatactgaaacacacaatcttcgcgttcccttatgaacgactggaatctcattgccatttatttttcggcttcaccgtttatttttcggtgtaagttctgcatccccttacgaacatcttttgaacttcttctacttatatttcagcggtataagatctgtatccccttaggaacatcctttgaacttcttcaccttatatatcggcggtatttggctctgca

SEQ ID NO: 49275 - DNA, 448 bp, Zea mays
  unsure (1)..(448): unsure at all n locations
agcttctaaagggagagcacatnttgggactaacaaatgtttattttgagaaagacagggtttgtagcgcatgtcaagcacgaaagcaaattggagcccatcatccacacaagaacatcatgatgactgataggccgcttgagctactccacatggacctattcggcccgatagcttacataagcatcggcgggtgtaagtattgtctagttattatggatgattattctcgcttcacttgggtattcttttttacaggaaaaatctcaaacccaagagactttaaagggattcttgagacgggctcaaaatgagttcggcttaaggatcaaaaagattagaagcgacaacgggacggatttcaagaactctcanattgaaggctntcttgaggaggagggcatcaagcatgagttctcttctccctacacgccacaacaaaatggtg

SEQ ID NO: 49276 - DNA, 439 bp, Zea mays
  unsure (1)..(439): unsure at all n locations
tctaaagggagaacacgtgataggtttgactaacgtacaattctattaagacagaccttgtgcagcttgtcaggcaggtaaacaggtaggaggagcgcatcacagcaagaatgtgatgaccacatcaagacccctggagctgctacatatggacctcttcggacctgtcgcctatctaagcataggaggaagtaagtatggtttagttattgttgatgactattcccgcttcacttgggtgttctttttgcaggataagtctgaaacccaagggaccctcaagcgctttctcaggagagctcanaatgagtttgagctcaaggtgaagaagataatgagcgacaacgggtccgagttcaagaaccttcaagtggaggagttccttgaggaggaagggatcaagcacgagttctccgctccctacacaccacagcataat

SEQ ID NO: 49277 - DNA, 436 bp, Zea mays
agcttagaggcgtcgatagggtggctacttggtttatattcctccttcttctcttccgccgccataaatgcgaccggttgtgcttccgacgtggaggggccgtcaagctcgttgatctttcgtgagcccttgatcatataatcaaagctcacaaaattcccgattacttcctcgagagtcattagtgtatatcttggattacaacgaattaattgtacttgagtaggggtaaggaatataagagatcttagaataaccttaaccacctcgtggtcattccattttttgctcccgaggttgcgcacttgattcaccaaggtcttgagccggttgtacatatcttgtggctcctccccttggcgaagacggaagcgaccgagcctcccctcgatcgttcccgcttgggatcttgggagttcataccctcgtgcgccgc

SEQ ID NO: 49278 - DNA, 449 bp, Zea mays
tgcctaaagtagagctgtctgaaagtgtggatatcactcttggtgaaattcagagtctgaatttcagcaattggagcaaactttgggctattgaagtttggagtccaagaggttttggttaatggttactatatcaaacttgtagaggaactataagagtataaactgtattaagcaacttgcccctgtaaacatttggaacccaggaaaaagagtggttccaagtggtgctgctgtttttctgaatttttagattgaaaacagtaactgaaaccgagtttcagtgttttgatagcagtttggaagcctatttgtggctattctataaggttatgggctgtgatgtttgtagaggaaaggaatactatatgatattgaataactgtctttaatggtgagggacatgatcctatacaaaagttggagtaacagctgctcaaatttggact

SEQ ID NO: 49279 - DNA, 222 bp, Zea mays
agcttctttccttctctggcggaaatcgttattggcccatatatactcatccattttctgaagcagcttctctagtgtctgaggggaccttctatcgaagtattgagccataagtcctgaccaaagccctttgatcatggcctcaatgacgatttcattgggccctgtgggcgcttgtgctctcaaactcaagaaccctcggacttacgcctggagtgattc

SEQ ID NO: 49280 - DNA, 448 bp, Zea mays
  unsure (1)..(448): unsure at all n locations
agatcacaacttcattctcttcgggagtaggcactgttctctctccgtcatcagcccttacagtagacatgtcttgcaaatatctatccctcatattgtcgagacgactctgtttaatagttgattttccgaaaactgcatgacttggtcgccagggtcgatcttctgagtcttctacgccactttccacatcataactatcactatcaccggtgtcttcagataaaccttctaaaatctccctgggaatcttatctgaatatgtctttgctatcgaatcaataaagccaagattcttctcctcagaaaggctcagctttgtttcaacaacacactgttttgtcttgagacatctttagaaatgttgaaaacgagctcttaatgccgaagctataaaaatctaanaagctatgcatgcgtggtgtgctaaaactaataataggaatgc

SEQ ID NO: 49281 - DNA, 399 bp, Zea mays
agctttacagctaccgggtgaacaagataatgttgacgcataattgaggggagctagaatccatttaaaggcaaatggacatttagaggcaaaagatgctttgggctgcccaactttggtggcacatttatgaagctttcaaagaacttgatcgcatgataagagaagaagttgaacaaatataagagtagtgaggtttgaacacaaaaaccattgatgaacaagtccatgccagttttatctattacaacaccgtctccactctcatgttatatacaagtgtcatcatggctagctttgtacaaagcacatcaacttcccattcatgatggcaaaattgttccaaaacaatttctcatgagctacgaagcaacaatatgttccttcataaggaatact

SEQ ID NO: 49282 - DNA, 362 bp, Zea mays
tgactgtcatgctggtttcattctgaaattagctttttttgtaacagggtcaactttgagtgtgaattaaaccttgatccagtgctcaaataagtttaatccctatagtcgatttgtagctggtatgtagcactacaactttgatgcagagacgcggggatgttgccatataaacttgggagaaaaaggagctccaaggtgctctatcagtcgttctaaataggtctcgccatggtacaatgctctattggggatcagatcgccgcggcagaaaaatctcaccgccgacgacctatccgcaccgtgatttgcgccggggtcgagatgatcgggcggcgagcatctccccgcgaagacctttt

SEQ ID NO: 49283 - DNA, 437 bp, Zea mays
  unsure (1)..(437): unsure at all n locations
cagcttctatagggagaacacgtgataggttngacttacgtgcaattcgaaaaagatagaccttgtgcagcttgtcaagcacgtaaacaagtgggaggagcacatcacagcaagaatgtgatgaccacttctagacccctggagctgatgcatatggacctcttcggacccgtcgcctatctgagcataggagggagtaagcatggtctagttattgttgatgacttttcccgcttcatttgggtgttctttttgcaggataagtctgaaacccaagggaccctcaagcgctttctcaggagagctcaaaatgagtttgagctcaaggtgaagaagataaggagcgacaacaggtccgaattcaagaaccttcaagtggaggagttccttgaggaggaagggatcaagcacgagttctccgctccctatacaccaca

SEQ ID NO: 49284 - DNA, 444 bp, Zea mays
ctgtaagtattgaaaggtcaagccaaactaaaccgtcgctatgccaaatgggttgagtttatcgaaatatttccatacattgtgaaatataagaaaggtaaggacaatgtggtcgctgatgccttgtctcgaaggaatgtgttgttgaatcaactagaggtaaaagttttgggtcttgaaaatttgaaagaaatgtataatgatgatcctgaatttttagaaccatacaatcattgtaaagatggaaaaggttgggaaaaatatcatatacacgatggatttttgtttagagctaacaaactatgtgtaccaaattcttcggttagattgcttttattgcacgagtcacatggaggaggtttaacaagtcattttggacaaaagaagacttatgaactgcttagtgatcatttctattggcccaagatgaagagagacattatc

SEQ ID NO: 49285 - DNA, 434 bp, Zea mays
agcttgaatgctcaaaatcaagaacttctagtgctacttgataattgcaagaacatcaatgcctcatctttagtgattgaatctaagtctagctccttaaatgataatttttgcaaacattgtgccaaatattatgcttcttgttgtctaactaaccatgccaggaagaatatcccacaggtgaaggtcataggaatattgaaaagatgctctatcaatgatgggttaaagaaagttgaacccaaataccaagtcctaaagcccacaatggaagaagggggcttgggttcaactcatccaaggaaaaccctatcacagtgcataaggggtggagatcctccaagttcatagagggaaccaccctatatgatgccttgggaaggattcacttctcaaatgacaagtcacctcaagtaagggtaacttgagttcca

SEQ ID NO: 49286 - DNA, 494 bp, Zea mays
ctattacggacactataaaactaagcttacaaagtccttaacaattgcatcataatcacgatgaataatgtgagctattgcttcgatcattccatacttttgatcatctgtcagttttgttacaagccctgcaaagtaaaattacacatttttattgttttttccaggtagaaggttcgaagtagtctctccgcatctgctgggggatggttccctttcccataccccactcatgtggaagcttccgacacgggtctacccccttttttattgttttttccatgtgcttaaaaatgaaaaaaaagatagcaaaaagtaggctgaacaaaaagctaaagacacaaataattttgtgcaaacttagtcagcagaattcttgctaaaggcaatgcaaacaggctatcagatgctactgaaaaggcctgcactttcatgctttagtctagtacgagtatgcacagttgcagttactagttagtaatgcagagtgaaag

SEQ ID NO: 49287 - DNA, 449 bp, Zea mays
agcttgggctaccaccatgcaactagagtgtggaggagatcctgcgtgaacatccatggaagtacaagagggagaccccactcggacaccctcgggggctaggccatagtttgcgctacccacttgagccggatcatctccggcagtaccctcgggggctgggcagtggcttacgcttcccacccgagccgaatcatccccggcaacaccctcgggggctgggtaagtgtcaacaccatccttgaggaccaaattctctggagtagccgcctctaaggctgagggtccctcagttacttccatgggaacaagacgatccaagtcagtttcctgaccctcaagaccgcgctataaggtcgatgaggcgcgggacactgcccgggatgaccccaacccggcgtcgagcacatcagcacaaacattcgtcgcaccatcatccgctggctctg

SEQ ID NO: 49288 - DNA, 459 bp, Zea mays
tctcatatgtgggaatagttcttgaattagcccaagtgaattgtcttcccgacaattccaactctctcaaattcaagccatctattaccgcattaaagagaaaaggccatctcgtattaaaattatcattatttttctctgatgagttcctaagaatattaaaatctcccccaataagaattgggtcggtaacatggcttaccatgttaaccagttcggctaaaaaactctccttgagattatcttgtgccggtccataaacacacgcaagaatccacttgaacccatcttctttatttcgaagaagaaacttaacataaaaatcaccttcatctatcgaacctatgtcatacacatttaggtcaatccccataaggatacctcctgagcggcccttatgttccttacaatgccaaataaattctctaccagcacacagattttttagaaacccatctg

SEQ ID NO: 49289 - DNA, 449 bp, Zea mays
agcttgataatgaggagatggcgctcgtcatcaagagcttccgccaaatcctcaaacaaaggagggggaaagactacaagtcccgctccaagaaggtttgctacaagtgtggtaagcccggtcactttattgctaaatgtccattatcaagtgatagtgacaggggcgacgacaagaaggggagaagaaaggagaagaagagatactacaagaagaaaggcggcgatgcccatgtttgtcgggagtgggactccgacgaaagctcaagcgattcctccgacgacgaggacgccgccaacatcgccgtcaccaagggactcctcttccccaacgtcggccacaagtgcctcatggccaaggacggcaaatagaaggtaaaatcaagatcctccactaaatatgaaacctctagtgatgaggatgatgcttaaaatgaggaggataacttg

SEQ ID NO: 49290 - DNA, 394 bp, Zea mays
  unsure (1)..(394): unsure at all n locations
acatgtgctaagcggcgatgtcccttccaacccatgctagtcttagcaatcaagcatgcatctagaccggcctcctcttttgcaaaatcaactaagtaaaggttgtcgcctaatacacccttaaaagctagtgaaccatcacttcttctagagacagacacatctacatttgtgaatagacaattatatcccatattgcataattgactaacagataacaaattatatccaagagactcaactaaaaacacattagatatagagtgctcggatgaaatagcaattntacctaacccttttaccttgccttgattcccatcaccgaatattattgaatcttgagaatacttggttttgacgtaggaggtgaacatcttcttctaccccgtcatat

SEQ ID NO: 49291 - DNA, 469 bp, Zea mays
  unsure (1)..(469): unsure at all n locations
tattctcggtccactagtttccctcttgaactagctaaccaccatgctcaactggggctcacggcacgacacctagctcaagaccgactgaaggtatgcattntcttcctcgattcgggtcttgttgtgtcgtaggactcaagagctgactgcaaaccctcacaaagtgcacactgcacaagtgtaggggcactcactgagctagccttctcaagcaaggctatcctggcgtttgtctctactagctcagtctgcaagccatgacaagcggtacacacacctaacaagatagatttggacctcaacttgttgcactcatctagcaaggtggcggttacttggtctagaaagttgtgatattcgacatgtgtagagcgcactcatcacattatgtctcgttagacaccacaactgaagctctagtataactcaagctcctaagcgtgctctcatacttggatcacaattc

SEQ ID NO: 49292 - DNA, 414 bp, Zea mays
agcttcagcgtgacagtagaacacgggaaccgacttatttatgtacagccaaattagaccctgaagaattactatagagatattgataaatgagaagggcctatctgtaatcttacacggtctgtgtgccctgcctataaatagatgaacagttctctccttctgttcacactgactcgacattgtcatcacgcttgtaccctcactttcctttacatctaaagaacatttgtaattcgctattgtctgtatcaacacatcgcatttctatgattatacatatgttaatgtataatgtttcctctgacttcagcctaaacttgattgctattatttgacactaatgtataacctctacctccttcaaattattatcccaagggaaatatgctttaagacaaggcttgatattat

SEQ ID NO: 49293 - DNA, 340 bp, Zea mays
gcttcgcatgacgtgcctcggtgctcatatccacatggccagttatatttttagaaccagcccttaggatggcccttcttattcgcattgcccttaatatccgaagacccaatataagtgcttcgtactcagcaatattatctgtgcaactgaaatccagattgactgcaaaacatgttatgactgttgaaggagccaatatgaccgcagctgatcctgcactgaaggttcccctcgaaccatcgcagaacatcgtccaagcttcggtatccttgcttgtcccttcttcgcgagcccctggtgtccaatcagcgatgaagtctgctagcgcctgggattg

SEQ ID NO: 49294 - DNA, 411 bp, Zea mays
ccccatactttggcatcttcctgcaacaaaaattctttgttggctgggaggcaatacaagaagtcatcttcatctgtgccatttaacattaaggcccctttcgggtacttcaattctcgaacgtagtgtttatcttccaaaatttctttttcagaaaatctttttcccgaagcgtgtcgaataatataatcaaagacttcggaaggcgctttgggagtagaagcaaacagttttttaagcaaaatatgttctaccacttctctcgctgccttttctccaattttcgaggattatctcctggagggctctgaaggcccaccttctgcgtcagcccgactcattgtagcttcagctctcgtcagctttgtctccgattcaatctgcgctttccaagccttggcaacgttccct

SEQ ID NO: 49295 - DNA, 466 bp, Zea mays
  unsure (1)..(466): unsure at all n locations
gggagaacacgtgatatgtttaactaacgttcatttctaanaagatagaccttgtgcagcttgtcaagcaggtaaacaagtgggaggagcgcatcacagcaagaatgtgatgaccacatcaagacccttggagctgctacatatggacctcttcggacctgtcgcctatttaagcattggaggaagtaagtatggtttagttattgttgatgacttttcccgcttcacttgggtattctttttgcaggataaatctgaaacccaagggaccctcaagcgctttctaaggagagctcaaaacgagtttgagctcaaggtgaagaagataaggagtgacaatgggtccgagttcaagaaccttcaagtggaggagtaccttgaggaggaagggatcaagcacgagttcttcgcttcctacacaccacaacaaaatggtgtggtagagaggaagaacatgacgctaatc

SEQ ID NO: 49296 - DNA, 428 bp, Zea mays
  unsure (1)..(428): unsure at all n locations
aagatgaacaactcgtgaatatgttggatcctcttcgtgaccttctgcgaaagagtatgagttctaaacatgcaagtgtcctctcagccacatttagatgttttgccttgttggtgaaactttcgttgccatctttgagggacaatgcaattactataaaaaatgttcttatggagattttacagagagctggaaactccaatggtcatttaatcacatcttggtttaagctacttgctgatctacttagaggattcaggatttcactttcagataatgagcttcagatgcttggtcatacctctatgtttgtagatcttcagacagacccttcccctgtngccttatcgcttctcaaaacaataagtaagctaatattggtttctcacgaaatttatgatatagctgctaacataggagagttgatg

SEQ ID NO: 49297 - DNA, 430 bp, Zea mays
  unsure (1)..(430): unsure at all n locations
agagcacattntatgactaaccaatgttcatttttataattacaggatatgtagcgcatgtcaggcaggaaagcaagttggaacccatcattcacacaagaacatcatgacgaccgacaggccgcttgagctactccacatggatcttttcggcccggttgcttacataagcatcgacgggagtaagtattgtcttgtaatagtggatgattattctcgcttcacttgggtattctttttacaggaaaaatctcatacccaagagaccttaaaaggattcttgagacgggctcaaaatgagtttggcttaaggatcaagaaaataagaagcgacaacgggacggagttcaagaactctcanatcgaagggtttcttgaggaagagggcatcaagcatgagttctcttctccctacacgccacaacaaaat

SEQ ID NO: 49298 - DNA, 433 bp, Zea mays
agctttccataaagtcttggatcactatttttggtggtctgaagtttaagttatggatgtttaaagtctgaagactgaatctgttcaggtctggacagcacagtcttcatagtgtatttcacccttgatacatgttaaaccaaccagtgatgtttataaataatttgtagaacattttattacctttccaaaaagtctaagatcactctgtttggatgtctgaatcttcagttgtgaatttttgaagttgcaagtctgaatctgtccaaatctggacagagttgctgtgtttgcacaattcgaccttgctaagagtctaataatattgagatgataataccaaaattgtagaacactttctaagctctacagaaagtcctagtttattatttgtgaactaataattgaaaagttatgatcaaaacaagtgact

SEQ ID NO: 49299 - DNA, 448 bp, Zea mays
tctaatgccgaaaaggatagacaaattgcgttacatgatatctgaaaggaacgagtaaaagaggaccacatagctaaaacaacaaagttgatgcaagcatccgccaaagtggctatcaaccttagcagcgctcaggtgaagattgatgatctgaaggatgaagtaaatgatgtgagaggacttaatgaaaactacagaatcctgctagccaattgtcacaccctcggcaacagatgtcataatgagttgctgaaaaccttctcctttgtcagggctctatctaaagagataaaaaattaagattgtgacttggagggccaaatgaggtgggtgcttagtgagacccattctttcataggtgttctctcagcatgagaggactactgtgcttggataggtgcccaaagcactgcttcagttttgctgaaagccaagtgcagtcatgtga

SEQ ID NO: 49300 - DNA, 447 bp, Zea mays
cgctgcatgccagctttgataccaattgatattcgcctatatgttttgtgttattggcgaaactgaaattctcacaaataatcacatactacaagccgggttagtgtgtgaaatataatcgagtccacgagagagggcggcaaacaaatctcaagcgaataatgaagtgagacacgcggatttgtttaccgaggtgtggttctcttaaacctactccccgttgaggaggccacaaaggtcgggtctttttcaaccctttcctctctcaaacgggcccttagaccgagtgagcttctcttctcatattacttgggaataaaacttcccgcaagggccaccacacgattggtgcctcttgcctcaattacaagtgagtgttcgatcacaagaaagaatgcgaaagaaaagaagcgatccaagtgccagagctcatatgaacactacaaa

SEQ ID NO: 49301 - DNA, 411 bp, Zea mays
  unsure (1)..(411): unsure at all n locations
tctnagggagaacacantttgggactaaccaatgttcatttttataataacagggtttgtagcgcatgtcaagcatgatagcaagttggtgttcatcatccacacaagaacatcgtggcgacctacaggccgcttgagctactccacgtggcctattcggcccgatagcttacataagcattgatgggagtaagtattgtcttgtgatagtggatgctattctcgcttcacttgggtgttctttttgcaggaaaaatcacaaacccaagagacattaaagggattcttgagatgagctaaaaacgagtttgccttaaggatcaaaaagattagaagcgacaacgggacgaagttcaagaactcacaaatagaatgctttctcgaggaggagggcatcaagcatgagttctc

SEQ ID NO: 49302 - DNA, 192 bp, Zea mays
cttaccactacccgcctgtttatatattgccgcacgggggaaggggaaatctcatatatttcccacctgacgaacagtcgcccgcacccactgaatggtgggccgccccccccacaaagagaattccttggacgcacgtacccgttgcatggtgggaccattttacgcgtcgaatattgtgatcgtttctcg

SEQ ID NO: 49303 - DNA, 448 bp, Zea mays
  unsure (1)..(448): unsure at all n locations
cggaactatgaaactaagcttgtctcggaacagcttttttatcttgagtcatcttctttaatgttganaatgtgctcttaaggccgaagctaataaatctcaaaagccaggaaagtgttggtatgcaagagctaaaaagttgggaaagcaagagcagatggcaagaaagcgtgccaaatgtgctcgcggtatgctcttatttatacgcctagtgcgttgcaagtgggagggccccgcttgtcattgactgttgctattctagcaaagggaaggtgtttattcggaccttcggcttaaggccttcgtccatatcgcaatctgaatttatcattctaacaaattaatattgcgaggtgctactgttgggggccttcggcttccgaagggtctcaaaaacatgatttaacaatgtttctggagtatgatacatgaacaggtaccttcggac

SEQ ID NO: 49304 - DNA, 433 bp, Zea mays
  unsure (1)..(433): unsure at all n locations
tgcaatntgtgaagtaagcggccaactcctgttggcgggtcacattatccctcaattcctttctcttgagttccatcttcagaccaagaatatactccctcactatctcaattaattccttcacttcatcaacttctctccgtgagtctacaacgattacaggaatcgtatgtaagatgctaaggaactgcctcagtgcttctgggaacctgccctcagttgtggctttgtaggcagccttgagtctgtcttccatttgtgagaagctgaaaataagtgcaggagggcctcttacattaggacttgcggactcattccaacctttctctacagcaactgatataactggagcagcagcaagggcacgcagatatgaatgactgcccatatgcagatcaagaaacaagggcttcagcggagcaaagttcttgat

SEQ ID NO: 49305 - DNA, 423 bp, Zea mays
  unsure (1)..(423): unsure at all n locations
agctntggaagatgtacgatgataaagccgatcgtgctagacatgtcatcgaaagacccctctgtgtcacagcgatctgacatgtgacacacccagaatggctaccccacactgggatggtgaagaaggtcaatgtgcagtggacaatgccattagtttccagatctcactaggcgtgcctgatgatgaattgcccttaccaagaaaacgtccctattgatgcatcaaccacttcagagctcatgagcatgttggactgccatttacgctatcaatagtctatatgaaggtcgacgagcccaactccaacttcatagcccctagtggacatattattgctatcttcggatgccccaagggctcaagaatgctgattgatactttatcaagagtaccagatgacttctagagttctctgtactc

SEQ ID NO: 49306 - DNA, 441 bp, Zea mays
  unsure (1)..(441): unsure at all n locations
agcttattgagaggcgacaaacgtcaagcgctgtctacagttttattacatcaagtctaaaacttgaaagttgattcttggtttaagtggtccatcgtaagtctacactttggtgtctaacttttaaattgaacttttgggtctacaaaatttgtcgggcttttagatcgaacttttgggtagtaaactttttagctagttatgtacttacatatggagtcaagaatcgacatggcaagaaattntgaaagctcgtaattatcacggctcatacctatcacttactacatatgtcacgatagatctaaaagacaaaagggtatagactgaaatgcatgtcctacgaattaattataaagtttaactactttaaagtgcatctagaccttctacgaacttgtcggttagaggggggtatagagtattaacatctccctattc

SEQ ID NO: 49307 - DNA, 462 bp, Zea mays
  unsure (1)..(462): unsure at all n locations
cttcttaatcacgacatataantgattatttatttggcatatatgtgttgccttangaacccacatatgctttgaactctaatatgcgatggtgatggactttttttagcacaaattaatgaatagtacaactaattctggcatgcatgaatatatttgtgagaagtgtttgataatctcaattgttactgtgtgaaatttgatttgaagatgtcaatctggggcttgagccaaatttggtggagttacaaaatgtcaaggctccgaacatcttgtattatgcatagtttttgggcattcttctagatagtccattactacatcagtatcttgtcagatttcatagatagaggttctacgatccagttggtatcaccagatgtcaaatatgtgttgccattggcattatatgattgacaggtttgttaagaattagctggttggcaacaatgaaattcatgt

SEQ ID NO: 49308 - DNA, 385 bp, Zea mays
tgcagcatgccagcttgagcacagaaaatagcttcggctttgatcgatattttttctgctaaacagtataatagcaatgaatgctgtggtaaattcacacctacccgcctgtttatatatcgccgcatgtaggaatgtgaatcctctaagtctttttcaccggacaaacagtcacccgcactcactgaacggtgggccacagagtccgggaaggtgaatcgcttgggtgcgtgtaattgctacaagatggggccactccgcacgtggattatattaatcgtttctcgccaacgagctcaagtaagggtgttttcggatcttctgcattccgaagcctacaagactttttcacggatcaagctcgttacgaaaaacgatctatcac

SEQ ID NO: 49309 - DNA, 469 bp, Zea mays
  unsure (1)..(469): unsure at all n locations
ttgtatgtccgtggccgcactgatcaganaaagtccaactcatgtggtttatgaaagggaaagaaccagaggggtcgctccaagtcaagggggccatccgatgaattattttgcaaatactgcaagaagacgaaccatgtaattgagaactgttacaaactgcagaacaaggagaagagaaacaaggagaagggtaagaccggaggtactgtctctgttgcatccgaaaataattctgataatggtgatgttcttattgcctttgctggttgtgctgctgatgatgcccaatggatcctcgattctgcttgctcgtatcatgtttgcactacaaaatctctgttcagtacctatgaagctgtgcagaacggaggtactcttcggatgggtgataattccccttgcactgttgttggcatgggcaccatgcagatcaagatgttcgatgggattgtacgcacattgactg

SEQ ID NO: 49310 - DNA, 430 bp, Zea mays
agcttggaacaccgagtggggtttcaacggttgtgcttgcttgcttagtaccaagtgtcgggaaccaaggtttaggccacagattggggcttttcatttgagcgccatgagcctaatttgcatttatgatccaatctgagcggagtacaagattacgtttagcccgttcgttggacccagggatggatcctaaacatccgaattatatgacaatttttatatcttaacatatatatatatatatatataaatataatttagtgctaaattttagtcatgttgttaagaatattatagaagacaagaataaaattttgtatatatttttttgcattattttctcactacgatgtaaaaggtgaaacaacattccaatccgaattcatatctgtatccaacatttatatcaattatttaaaatatatagaac

SEQ ID NO: 49311 - DNA, 470 bp, Zea mays
  unsure (1)..(470): unsure at all n locations
tgtcaatacttatcaaaacagcaacatttaccagcacagcaactgctaaccatacccgtaacatggccattcgcgtgctggggactggatatgattggacccttcaagaaagctcaaggaggatacactcatgtactggttgctattgacaatttcactaagtggatagagtacaagcccatcgcttctctaacttcggctaatgcagtggaattcatataagacataatattcaggttcggaataccgaatagcatcataactgacctgngatccaatttcactagttcagagttctttgatttctgcgaacaaaaaagcattcagatcaagtatgcatcagtggcacacccaagagccaacgggcaagtagaaagagccaatggaatgatattggaagcactcagaaagaaagtcttcgacaagaatgaaaagttcacaggaaagtggatcagagagctgtcgtatgt

SEQ ID NO: 49312 - DNA, 446 bp, Zea mays
ttaagcactgagcatgcccaggatgttcttatcacataatatactaattcttgccatatagaaaagattttcttcacgaagcatgaaaagaagggaaggtgttttttcacccaaggctcaaaaaatggtatgtatgcaaaatttcatgcatcgtaaagaattaaactgttaatatattacatattacattccaaggcacaatatattacacatttcaaatgtttccacaatagcattcaattctctttaagcactatctctgcagcttcattcaatagttggtccacaaccttgtccattatggcttcggccatttttctaatttcatcatcccccttcgggtgggggcctggagatgcctcagcacgctctgagggaagagaatataccgctatattactattacaaaccgcgaacagagtctggtattaacaattacagcatga

SEQ ID NO: 49313 - DNA, 352 bp, Zea mays
  unsure (1)..(352): unsure at all n locations
cttgtctcatttatgaaattagagcgtgggtctttgtcttattgtntaaataaagataaccttttcgtccaactagaatagtttcgtattttatatgtactttatttaaatatatttctgctacaacgatggtgtgttgctctttgacgacagactaaatcgagatctaatgtgtgggcggaggaagcaaaganatagtgggaggccggtgacgctacgcgttggcctatggacatgagactgcctgacgctgaaacgtctggtgcgccgtatgtcggggacatcgaccgatacattaagtttttcgtcatttaactgctgctagctaggtaagtggacaatgggtacacta

SEQ ID NO: 49314 - DNA, 384 bp, Zea mays
catggtaagtatcatatgctcaattatataccaattgactcaagcctaactacgggtgcataagtgtcaccgaaatccaaaccttcgacttgggagtattccttggccacaagacgagctttgtttcttgtcaccacaccatgctcatcttgcttgttgcggaacacccatttcgttcctacaacattctggttaggacgtggaactaaatgccatacctcattcctagtgaagatgttgagctcctcttgcatcgccaccacccaatccgaatcttgtaatgcttcctctaccctgtgtggctcaatagaggagacaaaaaaatattgctcacataaatgtgcaacccgagatctagtgagtacccccttatgaatgtcgctg

SEQ ID NO: 49315 - DNA, 449 bp, Zea mays
atctatattatggatcgctgtggagtctgtctatttaccttcggcccttcttgcggcttcctgacttccatggatagcaatgggtccctgttccgaaggtatcttcatgcaaagataagcaggatgaaggattgcttctaaggcattaagagtaccacgaccaacaattgcattataaggatattccatgtcaacaatgtcaaacacaacttgctcagttctagtgttgttgatgaatccgaaggtcactgacatggtgatcttgcccaatgctacaatctgtcttcctccgaagccacagagagggtgtgtagcatcatgaatcttatcttctggctcttgcatttgtctgaaggctttagcaaatatgatgtcagctgcactgcctgtgtcaaccaagacattgtggaccagaaattctttgataacacaagagataaccatggcat

SEQ ID NO: 49316 - DNA, 429 bp, Zea mays
cgaacatgaagtctgccatctcaagacctataagcgcacggtgttaccctttcacgccgttcgtaacgacctcctgctggagatcaccctagacacctcgggacctggcttggcctccgctatgaatagcgctactactggctctggtaacatcgattaatgcccgaccacctgcaactcttgccggcattcctgctggtgctagcgccaggcgcaacaaggggcgctacataggctgcagaggcggcaacgacgcctacaaggcaacaacgacagctttggaggcaacatcagtggccacacctttggtgcccctgacaaggcacctgctccctcctggccctcctacaacctctggaacggtcacatcaccatgtggtctgccctgatgaatagtgggaggttcagcagcaacaacatacccagcag

SEQ ID NO: 49317 - DNA, 446 bp, Zea mays
agcttgtggaggaccacatcatcaaagcatatatgtttctggatgagaagtggtcacccaagtttcgttgatcaagcacccgaagacttattattgaaagaatccatgtggaagttcgctaaagaaacgatcgcgtgttagcatcaatgcttcttcaataagctagttgccaagcgaaacctataagcctgaagatgatcttgagtagcccgaatcagcgtttgcaatcggcaaccagatgctcctcaaggccagatcttgttgaagttccatctcctcgaagagttgcaaagtgaagatatgtagctaaagtaaagctatacccataacccttctaagccaaatctcgaggacgagagttcttttaagtggggtagaattgtagcatcccaaaaattcatatcctgaaattttctcaaacttgctctatattcacaatgaatttc

SEQ ID NO: 49318 - DNA, 463 bp, Zea mays
tcatgtattgatcatcaagttgacacctctagggcaaactaatatggcattcagtgtctcgcaattgtaatcaatattaagcattcgctccccctgacgatgacatctatcaaagtctttatccctcgtaactcaaacacatccttcaatatatgttcactgttcatctggaataatgagggtggagaggctagggagctacacctttcattctatcatacaccacaatgtatacatagttttgcaaagcaaataacttatccttccacatgacttaggggatattatagttgtgatagtacatattctagatatgactcatcgctccaggcgttcgttcatcaagtggaaaataccatgagtaaaactcgtggaatgcacatgtgcttattcggtgaacttcaagtcctttggtacctcatcttattccttattgggtctgtgtggatctttatccctttat

SEQ ID NO: 49319 - DNA, 487 bp, Zea mays
  unsure (1)..(487): unsure at all n locations
gcattacggacctatgaaactcagcttctaacatntctgttgatcatcctagctgatcatgtttgtctacctctcctttgtccgaattaggtaatcattttccttgtgaatcatgttgtggccttgtcatccaaatctctagatcatccaatgattatgccccatcatctggttatctgctataacccgttctcaagtatcggatgtcgatctcatgctcttcctccaagcctcatgacgccattttatcaattttatctctaaacggcatatccatgtggattaatggaatgtgctgctatcttgggatctctcatgtctcttaaagcttatcaatctcgatctcatggctgattcctcctcgtattaaatattgtatcgatcttcggctgataatccccatgatgatcaagaaatagttcttggagttgaagagattctcggtgatgttctttgccgaaatctctgcttaactctaacatgtttc

SEQ ID NO: 49320 - DNA, 354 bp, Zea mays
agctttagtgactagtgagagagatttgtgtgttttttttagctcttgcgcctggattgcttctttttcttcctcaatctttctttggatcaaactcacttgtaattgaggccagagacaccaattgtgttgggggccttgcgggaactttgtgttccaattggttgagaagaaaaagctcactccgtcgagggaccgtttgaaagaggaaagggttgaaagagacccggtctttgtgaccacctcaacggggagtaagtgtgcaagaacccaatctctgtaaaacaaatccgcgtgcacactctttattcgcttgcgatttgttttgcaccctctctcggactcgatatattt

SEQ ID NO: 49321 - DNA, 450 bp, Zea mays
  unsure (1)..(450): unsure at all n locations
tgaccaagcataggaagacatgctcatcagagtttctatatggacaactaagacaaattcatgtggaaacatgtacagatgcatagagttccaagagaattagttgagaacaagttggaattgaaacctaggtttaagctactcaaataaagactatattgattcacgccagatagaaatgttgccatcaagaaagtcctcacaaatctcttagtagtaaggttcattaaggagatccttattctacatggacttgtcaacttggtgctaatgaagataaaagaactccaaagaatgttggatgtgtaaccactatatggacctcaataggctttaccttctttgggatacctcttgccgaccaaaccatggatacactagccatgccctactctacttgattgctactcaggctaccatgagaacgcnctcaagaaataagatcgagcg

SEQ ID NO: 49322 - DNA, 428 bp, Zea mays
tagcttctgccacgatgtgaatagtcccttggccgtaagagaagaataccatgtttgagctacattccggactgccatgacgaaggacttcgccatgactacagtattgcccccatacgaagatatagttgcctcgtagctcatcaaaaactgctttgggtctgaatgcccatcatacatgggaagctgaggtggcttgtatgacgggggccatggggtagcttgcaattctgttgccaagggagaagcgtcatcaaaagtaaaggtatcatgattaaaatcatcataccatccatcttctgtgaataagccttcttgacgaagttccctgtgttggggccttcgatcttgttcatcttgaacaagatggcacacttcttcagtagctttctcaatcttcctttgaagatcagccagccgcgccatct

SEQ ID NO: 49323 - DNA, 153 bp, Zea mays
gcttcgctatggtgaaattattggcgcacaacagtgcaattgcattgaatgctgcggtaacttaacacctacctggctctttatatcgcactgtagctaaaaactccaatgacacctcttgacacactagatatgtcatatattattacaact

SEQ ID NO: 49324 - DNA, 407 bp, Zea mays
  unsure (1)..(407): unsure at all n locations
agctntataagaatattgtgatcaaattggcactaagatccatttcgcatcagttcgacatctggagtcaaatggacttgttgaaagagctaatgacatcataatgacaggaataatgaagttaatcttcaatcagcccagggggaagtggccagacgaattaatcaaagtggtgtggagccacaacacaacaatatcaagatcaacaggctttacgctatttaaactattgtttggtgacgaagcaataactccggaagaagccaaagcacgatcaagaagaatagtagcttctgcagaaggcgaagctgattactctgtggaaaaagatgctatagaggggatcaggcttcaagctgtggaaaacatcaacaaataccaagctgaaacaataaaatggtgtgata

SEQ ID NO: 49325 - DNA, 396 bp, Zea mays
  unsure (1)..(396): unsure at all n locations
tgcatctcgcggaattactctatctgtgtgtcctgaccccccgcagggactgggaccacagctagctcacgtgggatgtcaacgcgagacgcangcacagggacgttgccatcttgcggcatgtcgaggcagttgtcctcgtcgtgatccccctgatcgatgtggaaacactcgcgactcgggtcgcaaccctcgtcgccgaggctgtggccatcgtcagagcagccggagaggcagtagtcacacgcggacatgaagtctcgcatggcactatgatcactgagtccggagaaatcccaaccgaagtccgagtcgtcgtctttctcggaacccacgagttcggaggttgagacggccgtcagtcggtcccaagatgaccacatatggtaccccgga

SEQ ID NO: 49326 - DNA, 440 bp, Zea mays
  unsure (1)..(440): unsure at all n locations
catttttagaaagacagggtctgtaacgcatgttaagcagggaagcaagttggtgttcatcatccacacaagaacatcatgacgaccgacaggccgcttgagctactccatatggatctattcgccccgatcgcttacataagcatcggcgagagtaagtattgtcttgtaattgtggatgattattctcgtttcacttgggtgttctttttgcaggataaatctcaaacccaagagaccttaataggattcttgagacgagctcaaaatgagttcgacttaaggatcaaaaggattagaagcgacaatgggacgaagttcaagaactctcatattgaggctttcttgaggacganggcatcaagcatgagttctcttcttcctacacaccacaacataatggtgtagtggagaggaagaatagaacactactcgacatg

SEQ ID NO: 49327 - DNA, 381 bp, Zea mays
  unsure (1)..(381): unsure at all n locations
tgcacaaaagcattgtatgcaataccactctcgctgcttttcatgacagngttcataagcagctcattttggaggtatagacccttgttgaactttagcacacttgttgcaagaggttcatcgtcactttttagcttcttgacctcatttttaagcctttgattatccactgccaactcattgctgaaatcattggtctcaatagcaacctttcctttagtaactgcatcactgacggatttcttcaaattttgggtggctaaagtcaggacttccactctgtcagtcacttcagcgtgtagactaagttggtcttcttgagtgcaatcatcacatgacggtggtgcatcaatcataacaacangggtaatagcctcatgt

SEQ ID NO: 49328 - DNA, 443 bp, Zea mays
  unsure (1)..(443): unsure at all n locations
agctntttaagatctgtacaatcgatgcacattctccacttgccattggccttttttaccataacagtgttagccagccattctgggtacttcacttctctgataactcctgcactgaggagtctttctacttcgttgcgagcaccttcggccttatcatctgacattttccgaagcctttgctttctgggtctgaaggatggatcgacattgagtgagtgctcgataacatctctattaactccgcagagatcattggctgaccatgcaaaaacatccttgttattgaacaaaaaccttatcaaggttntctcctgctcttcggataactgagagcctaacagcaccttctgctctgctatgtcctcacataagagcataggcttcggctggtctgctgaagctgctctctcccttctgaatttgtactgctcacaaacttc

SEQ ID NO: 49329 - DNA, 325 bp, Zea mays
tttatacccctgggataccagaaacccttattggaaccctggaaaaccctaattccaaaccctatggacctatgtgcaaaattagtccacttttggactagagtgccaaaaccaggttaataaggtatcctaagtcatatggttcacaagaaggtggaattgccatccaaaacttgagatttggacttaagtgcaaaagaaccacacttgaccctttttagcctaagtctgaaatcagtgtgattggctcaactttggagccttgcaactttcaaattataaggtttttgccctatggaaccacatcaaagttgaagaccaacat

SEQ ID NO: 49330 - DNA, 449 bp, Zea mays
  unsure (1)..(449): unsure at all n locations
agcttcgacattactttcaagcatatcatatttattgccttcatcacaacctctaaaggatataatgagaaacagagaagctacaacaaggatcgaaaaatgggctgtggagcttaatgatttcaccattgattatgtacacagatcctcaattcaatctcacgcgttagtaaatgtcattgctgattggacgccacggcctcatggagaagaaacaacaaaatatgccgaagcctggacaatattctgtgacggctattggggaaccttccgcgcaagagcgaccgttgttctagtagcgccctctaaagtcaagacatgttatgcgataaagttggactttacttgtacaaataacattgccgagtacgaagctcttcttttanggcttcggaagctataggcaatgagaataataagggcactcctcaaaactgattctcaagtta

SEQ ID NO: 49331 - DNA, 417 bp, Zea mays
actagtgtatttatgaaatttaattatattttgatgaatttatgtagaaaaaattaataatgtatagatagcctcagaaatctatgtaattatacgaaggtacaacatatggtcacatatagtcataaaaaataatgggaccataaaatccataggatgtcaacgtttcttttattttatttccacttattgcgtgagttacacgtgaaatcactctaagtatctaagtttcaacataatcaatacttcactttaccatttttatgtggaaacttgagattatcttctattaaatgtttattagtattaatttacttgcaatttcgtggtcgaacaagaatattttttataaccaattaatgtattatccgacaagtatccgatatccgatcaaataatattcgtatccgtcactta

SEQ ID NO: 49332 - DNA, 424 bp, Zea mays
  unsure (1)..(424): unsure at all n locations
agcttctaaagggagaacacgtgataggtcttttcttgttcaattcgaaaaagatagaccttgtgcagcttgtcaagccaggaaacaggtgggaggagcgcatcacagcaagaatgtgatgaccacttccagacccctggagctggggatatggacctctttcgacccgtcgcctatctaaccatagggggaaggaagtatgggttagatattgctgatgattttatccgcttcacttgggtgttctttttgcaggataagtctgaaacccaagggaccctcanacgctttctcatgagagctcaaaatgagtgtgagctctaagtgaaaaagataagaagcgacaacgggtccgagttaagaacctttcatggaggagttccttgaagagaatggatcaacacgagttcttcgctcctacaca

SEQ ID NO: 49333 - DNA, 464 bp, Zea mays
  unsure (1)..(464): unsure at all n locations
tactcagcttagcatctttactcgcttcttcctgagcccctggcgtccagtctgcaatgaagtctgctaacgcctgggactgaatcgaagatctatgcacataatcaatgcaaaagtcattgagttccgcagcccattttccaacccttccagtagcttctctatttctcataatatccttcaatggttgtgaagaagggacaattatattgtatgcttgaaaatagtgccgaagcttcctgaaagccatcaaaacagcatacagcaccttctccaattctgtataatttttatttgataaactaaggacttcggagacgaagtatattgnggcttgctttttgacttgcccttcaagcttctcttggacaagtgccgcacttaccgctgagtgcaaagctgtcacatataacaacagaggagccattggcgttgtggaagtaatgtcgtaggtctatcaaaac

SEQ ID NO: 49334 - DNA, 421 bp, Zea mays
  unsure (1)..(421): unsure at all n locations
agcttcggtattacaacatatccgaatactattggtcgaaccgacttanagatagaatgaccttttattccataaaggtctgagtcaatgttgtaaacttttataaggggcatgattgtaattcttcacaggctgtgtcctgtgcctataaataccgaacaatattcctttactgctcacgcattcctgtaattgcaatcgcatcactcggaaattattctttgccaacgcagatgtataaatgtatttaatatttgaatatatcaagtttatacaatataaaagtgatgttatttacttataatacacttgtctctgatgtttcatatctcatattggtttatataatctgtgaaagtacaattacaaagattcaaccttcgcaattatattggttttaaccgtcgtgcgaagctcatta

SEQ ID NO: 49335 - DNA, 281 bp, Zea mays
  unsure (1)..(281): unsure at all n locations
attaccttcagaatctcttctacttcggcagcagaaggtgtcgcaagagtgtcttcttctcgaaccaacgtttntggttctggagatgcagatttcctttatcttgcagcagccaccttcggctcanggctcagcttttcagaaatctcctttttctttttggtcactttggtgctctcttcatcaacggcgctggcaattctttntctctttgggcctccagcatctccgcccaatcgcccataatcaggatattcaaagcctatagcattaagcactct

SEQ ID NO: 49336 - DNA, 402 bp, Zea mays
  unsure (1)..(402): unsure at all n locations
gagcctagtgaataaagtaaataaaaacatgcatatatattattggtactggcataaagtttaattgaaaaatataataactgtgaataaaggaaaacaaacatgggattttggagtcttgtcaaaaataggggcatccataactgattttttttcgcaaacgtttccactaacaatctgtaatggaaacataggaaatttgagtaaacaataacttgtatgctatatttaatacatgatttatataaagtttgtatgaaaaaacttacctgttctgatactttgatatcatcagaaggaacatgtacttcctgatcatgttgcttattatcaggggttggaacaggtggagaggatactggagcatttgttggagacattgangtagtgaggggatacctg

SEQ ID NO: 49337 - DNA, 420 bp, Zea mays
  unsure (1)..(420): unsure at all n locations
agcttgtgtctntnnttctgaagggcttattcataatattccgcttcttttcttctaccatttcggcgtttctaaggaaaaggtgacaagggtgtgatcgtcacacattgcatttttccctctacgatctgcgacccgagtacccgacgatcggtatggttaaggacagatctagaattttctcatgtcccatgtcccgagctgagactactaaattttcttctggtctttttatcttgactattttcaactagatcaaatatgtacttatatacagntaattggatcataccctcgatttctttttatcttgactattttcaactagatcaaatatgtacttatataaagttaattggatcataccctcgatcacagaccgggtagctcgggtgtagatccacccctgngtatgattaa

SEQ ID NO: 49338 - DNA, 294 bp, Zea mays
actagaacaaagtggtggtagcttaaaggggatgtggcccaaactttcaaggagagagttatcgaggtaggcccttgggcagaatagggagacgcacacatcatgtggaggaagatggcgacatgcatctgaaagatagcttcagaagaggttgggttgagtcaacgaaatagaatggaagtaaagacacttggtggtggaacgaacatgtccaaaatgctatcaaggagaagaaagattgctacaaacgcttacatcatgacaagtgtgcagaccacatagagaagttaggat

SEQ ID NO: 49339 - DNA, 402 bp, Zea mays
agcttcggcccaacagcagagttcctttctgtcgccttctgccaagggcacaggcgccatgggcctttggagaaggattggagaccacccaagaaaaatataatgccttttctgtggtgaagacaatggccatactaccaggatgtgccatgttaccatccacaagcagaatgaaatagcggaagcagcatcgcaacagagtcagccgaagcaggtcatgcatactgcttcgtatcactcaccttatattccagaatatgtaggcaaccaccctgcatattctgttgcttgggcgagtcaatcccaagcatactggcagcaacctgcaccgccaccgccgatccagcgaggacaacaaccagaagggagtcagcacaatcatcatcagagggatttcagaga

SEQ ID NO: 49340 - DNA, 336 bp, Zea mays
tatgtcgagcacaacaggagaggcttcttttcttatgcagcagcggcaatctgccatatgcgtgcacaagcccaaagtagaagaagccccttctctggatgacgtgtgggcccaacgcacggtaagggtgtttgaattccaaatttcctaatatcttctaaaattcatatcttgagtttggtagctccaaaaatcacgaaacttgctttattgcctttcttatgaaattatctatctgttagatctataggttggcatgtattaatggaaaagtttttctgtagaaattcgtatttaaaaactgggttagagaaaaaggaacttgcttctctccat

SEQ ID NO: 49341 - DNA, 424 bp, Zea mays
agcttgaggtacctcgtagaaaagtacgtttatattggtatgttgggctaaatccagatccagttgaccgctcccatccagatgttaatgacagttcaattgccaaagtggctacttctaatgaaactcccctaatagatcaaaataaatcaggtatccaataatcttctatgggagtgcagtcttatatgttactttattgatagaaatgtcttgtttttgaatctcatgataaagcttaccttggtttgatggtttcagttagcagaactctctgattccatcgacttgctttaaggaaaaaagaattgcatgcatgtttcagcagtaccaactatactaagttactaacttatgtggatatgaaccttctatgcatttgtttttgtagaatttgtaagaaatatccgtttggtgtatttac

SEQ ID NO: 49342 - DNA, 464 bp, Zea mays
ctctatgtctcttagctttgggatctccttcatgtgacattttaagaatattccaaatgtcgcgggcatcttctcttccttgaactttccggtattcttccggacaaagacttcctttaattatgctcactgcttgagcattgcgatgaacctcttgcatcatttctggagtcatctcttctccttgggcgggcttatacatacctacattaacaatctcccaaagactatgatgcacaccgattaaatgcgacttcatcttgtcggcccactcgtcatagttcaactcactaagagttggtaactttccaagtggggcggaagagaagttgggaatataatttctagagtaatcgaattgaactttgctaaattcgttacctttgcttttggtagatgatccttcggtgttgagacttaccttgctcaataccttagacaccaaaagatccactagatcgtca

SEQ ID NO: 49343 - DNA, 241 bp, Zea mays
ccaaccaatctggaatccttcctgtcatgtagctctcggtggcactaagcattgtgagtcctgtaaggttcaacactgataaaaggatgcttcctacgatgtcattgtcgcggaaattcagaatttcgagttcggaaagactgccgatggactgaggaacgttccccgacaggtggttaacacttatgttgagaaaatggagagcaaacaagttaccgatactggaagtatctcgccctct

SEQ ID NO: 49344 - DNA, 316 bp, Zea mays
caactttctgactgccatgaataacaatgggtccctgtttcgaaggtatcttcatgcataaatatgccggatgaagtattgcttccaaagcgatgaatgtcccactaccaatgggctgcattgtaagggtattccatgtcgacaataatccacacaacctattcagaccttgtgttgtgaacagatacaaagggtactggcattgtgatcttgccagtgctacgatctgtcttcctcctaaggcacaaagagggtgtgcagcatcatgaattatgtactctggcagctgcatctgtgtgaaagccttaaccaatat

SEQ ID NO: 49345 - DNA, 375 bp, Zea mays
  unsure (1)..(375): unsure at all n locations
ctatcaaactcagcttcttgcaaaggatgcttgtttctaactagttgtgcacactggttaatttagctcatgccgttatgggtgtcttcccattgctagcagattattaatgttgattatgctttcttatcatgatatctatttatactttgttgcttccccgtttatgcaattttcaaaggagatgctatcgaaattttatatacgaatgttagaggtgtagtttagtagcattctggngtgtttgtggatcccggggtgttacagttggtatcaaaggataagctttagattcttgctaatttgaagataaatttgacacacttgcacatataggaagggtatangttcaaatatcttttatatatggtaatg

SEQ ID NO: 49346 - DNA, 452 bp, Zea mays
  unsure (1)..(452): unsure at all n locations
gcttctccttgtcatcatcaactntgacgtagaatcattccgatttctagcctgccggacacttgcttcggtagctgatcacaggaaattttgtagttttccgataggcaaaattgtaacaaccaaaattttcatgtaacccatcctttctggctttggtttggtaatgtaactcgtgcacccggcagaaaccttcggaaaacggttccaccccctggcttcggagagcccaaatataaacactaagcctaacaatagcgttaggagttagttgatgaagatagatcccaaacttctttagcacatcagcaatcatcctattcaaaggaaatctcaaaccagctntgaggaaactcttgaaaatcactatttcatctttctgtggcttcggggtagtctcttctccaccaaagcgaatcagctntttctcatcttcgctaaagtagcccaac

SEQ ID NO: 49347 - DNA, 318 bp, Zea mays
  unsure (1)..(318): unsure at all n locations
ccctgtgcttgngagaaagaaaggatggaaatggcggatgtgtgtaaactacactggtctaaacaaagcatgtctgaaggttccctaccctctgnctcgcatcgatcaaatcgtggattccactgctgggtgccaaaccctgtctttccttgatgcctactccgggtatcaccaaatcaggatgaaggagtccgaccagctcgcgacttctttcatcacgcccgtcggcatgtactgctatgtcaccatgccgttcggcttgaggaatgcgggcgcgacgtaccagcggtgcatgaaccatgtgttcggccaacacat

SEQ ID NO: 49348 - DNA, 305 bp, Zea mays
gtgaaagaacgcgtaagccggcacgccgaccgagccgatggattcccacgcctttgggatacggatacctcactcgttccttccgcgaaaagcagctcttgctcacacaaacatccctggtaccgacgaagtccagatgctcgaaacaggaggaaaaaaggcgcaccttctcaagtgcagcgagggtgttttcttatggcctcggcggccgcaagaagcacacgctacaagatgatcggatcctgcatgctcaggtcttcatgccgaatggagctgtagcacccttggcatcgacgacgtcttta

SEQ ID NO: 49349 - DNA, 350 bp, Zea mays
  unsure (1)..(350): unsure at all n locations
tcttanaacggaagncagctacgacaagcttatgttgggttaccacacactctccacgtataaccttgcaatctaagcaggcatgtctgtcctcttttctcaagaggacgaaatcaatctggctaatgtgttggccactactgaaggtcaccacgtgggatatcctcttcctaaagaaagtgtttgctataaacatgtcataggctagggcaagagtcaggatttcctctccttgattcctagtcctaaagccgaagcctccatgcacaccctcgaaactggtgctagatgtacccacatggccattgagatcttctatgaagagcttctcgccaactggcacactacta

SEQ ID NO: 49350 - DNA, 438 bp, Zea mays
agcttctaaagggagagcacattctaggactaattcttgttcattctgagaaagacagggtttgtagcgcatgccaagcaggaaagcaagttggtgcccatcatccacacaagaacatcatgacgaccgacaagccgcttgagctactccacatggatctattcggcccgattgcttacataagcatcggcgggagtaagtattgtcttgtaatagtggatgattattctcgcttcacttgggtattctttctacaggaaaaatctcaaacccaagagactttaaagagattcttgagaagagctcataatgagttcggcttaaggatcaagaaaataagaagcgacgacgggacggagttcaagaactctcaaatggaaggcttccttgaggaggagggcatcaagcatgagttctcttctccctacaccccacaac

SEQ ID NO: 49351 - DNA, 263 bp, Zea mays
tcaaacaaagagagcaaaagacaacacaaaggcagccttggtctggcgcaccggactgtccggtgtgccaccggacagtgtccggtgcaccagggagttccagtttaaacttgccaccttcgggaatttgggaggccgctccgctataattcaccagattgtccggtgtaacaccgaactgtctggtgtgccaagcggagcaacaactccaagcgccaacgatcgtctgcaacggtacaggaacagtgaacagtgttcaatgc

SEQ ID NO: 49352 - DNA, 376 bp, Zea mays
tcaatggagaaattattttttctttggccaaagacttaacatgttcgcaccctgttttctccaagatagctgcaactcccctcgcgcagagaaagcgcagacgtccccacggccactcaaaacttcctcaaaagcttctgcttcgttgctgatccattcaattgggccctcaagatcgcctcttatgaagatgtcctcgcttgaatatgcgccaacgttggcgaagctagtttttattttcttcacgcacgccatagatttttcaaagcatctttccttggatatgcgaagatcttcaacgttcttctccaaatgatatggccattgttcgctaattccccgtgtagctttgcaacagcgcatttctctttatctc

SEQ ID NO: 49353 - DNA, 386 bp, Zea mays
tgcatgctagctctaagagatttgaagtttcatgttgtttcattccgaggttcaacctctccgtcacttgacatagcggcatgtcacaagtcttcattgtgagacactgacagaaagccttgcgactcaacgcatctgccaccatgctggccttgcctgtgtgataatgaatatgtaactcatgccccttaataagctcaagccatctcgtctgtctcatatgcatctgtgactgcctaaagatgtacttcaaacttctatgatctgtatagatatgacagagattacccaaccgataatgattccctcttttgggggcatgaccctcaacggataattctaggccatgagctggataatgttgttcatgactgcgcaactgtctt

SEQ ID NO: 49354 - DNA, 425 bp, Zea mays
  unsure (1)..(425): unsure at all n locations
gaacacattntatgactaacaaatgtttatttttataaagacagggtctgtagcgcatgccaagcatgatagcaagttggtacccatcatccacacaagaacattatgacgaccgacaggccgcttgagctactccacatggatttattcggcccgatcgcttatataagcatcggcgggagtaagtattgtcttgtaattgtggatgattattctcgcttcacttaggtattctttttgcaggaaaaatcttcaacccaagagaccttaaagggattcttgagacgagctcaaaatgagttcggattaaggatcaagaaaataagaagcgacaacgggacagagttcaagaactctcaaattgaaggctttcctgaggatgatggcttcagcatgagttctcttctcctacacaccacacaaat

SEQ ID NO: 49355 - DNA, 259 bp, Zea mays
gctggatcttacttcaggcgacgcgaataaattgcgcccgaaggcatgtccgctcagcttgtcgtattaagcgtaccatcggagggtgtcaagccgcgcgcgcgcacttgtgtgtagacgtaatcatgctgttgcaccggacgggatcgctgtattggccggcatatggctcgctgacacaacggggttggcacacacttaaatgtacatgttccatgcctatttttgggcacccttggcttatctgtctgaggcttgc

SEQ ID NO: 49356 - DNA, 372 bp, Zea mays
agcttcacacacatctctgctatattatcttaatcttttttgaatcaacgctgacttttcgctgtaagcctcccttaagagcttcttcgccttttactttagcggaatcagcgttgacttttcgctgtaagctctgcattcccttacgaacgtctttggagcttcttcgccttttactttcggcggaaatagcgttgactcttcgctgaaagctctgcattcccttatgaacgactgtggagcaaaaaactgacactgcgctccttttggaacgactttatattgcttcgaagaattcataccgtgtctattgcaagatgataatccgaaggtcctccttgctattgcaagatttcaagctccgacaactta

SEQ ID NO: 49357 - DNA, 315 bp, Zea mays
  unsure (1)..(315): unsure at all n locations
tacaacaaggagcccctggcattggtggagttaatgttgtcaaatctatcaaatattgcttcagttcctcgaaagctttttgttggcttggtccccattgaaagacttccgctgatttcagcacttcgaagaatgggaaatttctctctgccgatctggatatgaatctattgagagacgccagcgctcctgtcaatctttgggcccncttttttgtagttggtggctccatccgaagtatagcttcaattntacttggattagcttcaattcctttgttgaaaccaagcataccagacattttccttttttact

SEQ ID NO: 49358 - DNA, 433 bp, Zea mays
  unsure (1)..(433): unsure at all n locations
agcttcgggaaccccatacttctagctcatctttcggcagacagatnattctttggtgtctgggaggcagtataagaagtcatcttcgtctgtgccattaaatactaaagccccctttggatacttcagttctcgggcatagagattagcttcaaaaatctcttcttcagataatctttctcccgaagcatgtcgtataatataatcaagggctttggaggatgcttcgggggcagcagtgtcagtttcttcaaccaaaattggctctgccatttttgtttcttcagcttccaaaggatttaccttggtgggctctgaaggcccagctttagtttcagattgttgctgtgaagcttccgcgacaaaggctntagtatgcacttcataagtttcaacaattttcttcggagttgtgcttgaagacttaattgtc

SEQ ID NO: 49359 - DNA, 373 bp, Zea mays
agcttaacctagttctcaacattaaaggctcttaaatgaattgaagcctatgggttatgggccaaaaatgaattcaaggactatgggccgagagatgaaggcccttgttggtttaactttttcagcttctggcaaccaaaaactgctgcagagtgccaaacgtctagtttttcagcacggttctataagaatcactttagtcaaaatggttcaaaattagcaaaaacacataatcggccgagtcattgtgatagtaggaaaccatcactttctacatactaaaccctatggactcttttatcttcttccgcacgtaatctccatgataatcatattctctacatagtcaagtcttcccacaactagattctca

SEQ ID NO: 49360 - DNA, 348 bp, Zea mays
  unsure (1)..(348): unsure at all n locations
cccatcccttccccacacacacaaatggtattcggtgtagcctctcctggacgatccctaatatcttcaatatcgagtttccgaccaaaatgttgtgggtctagttgcttcttgtacacagtgatgaccacaccacaaacacatttgatgtggtcttgcanaattacaagcccatctagtgcaactattacaatggtgtgtgcaagcaccaaggtgtagagttgtttgtttctcatttcagactactaggcaaaacctacagcaagcgctaatggaagcagtctaactatatactgagcacttcacaaattacctacaataattactaagtgatatttgaacacttgg

SEQ ID NO: 49361 - DNA, 352 bp, Zea mays
acctcattaaatagcttctgattttcagcaagaaccttatgggaaatgtcagcagcatctaccaagcctttcaactcacgtgctaaccaagtttgactagttaagagcaggatgaacaaagtatcagcaaacatacatatacaataatgccacaacaaaaatcacgagaacccacataccaatgctagatatttcatctatccatttcatttgaagggcaaacatttcctgcttaatggactgagatgatatccttatgtcctaacatagtcaaatattttaaaaagtgagaacataaacaaactaaaatactacaaaaaatgatatagaaagataacagaaccttaatgga

SEQ ID NO: 49362 - DNA, 424 bp, Zea mays
  unsure (1)..(424): unsure at all n locations
tgatcatatctcttctatatgctatgactaatgtggtttcaaggctatttcaaaccaagtcatatgtatattgaaagggaattggagtcttctgcgaagacaaaggctctcactccgtaactcatgcttcgccatcactccgagcaactctctattccttgggagaaatgagcatataaaaaaaggactctatccttgggggagagaagaaaagctcaaaagccaaaggaccggacctcgtctttggtataatcttaactcatttacttatgaccaaaggggaggaacttacttcgagggctctaatgattcccgttttggcgattcatgccaaanagggggagaaatgagcccaaagcanaaggaccgcaccaccaccacccaaatcaaaaacttagtgctttccaaaagtctttatcatttg

SEQ ID NO: 49363 - DNA, 420 bp, Zea mays
agcttatacatacgctctctctattccaaaacaaggcatttgagtttttttaggtacatagtttttctatacatctagggcttgtttgggccaattttttttctgaaaatcttttatgagaatatggattcctgtataatctagccatcacgaaaatatggatatcgtaaggtctgcatgtgcagaaagatgaagtggtctgcacggtttaaggtttaggaagcgacagttccttccatcgtgatgactcgacggattctgcatttatgctgatgatttggacgattttctgcttgagaagtgaagtatttagctgccagaagttaagttgacgaccataatcgagtctgaagacaaaataaacagggccatacactatatctagataaaaaaactatgtatctagaaaatcagaatgac

SEQ ID NO: 49364 - DNA, 309 bp, Zea mays
  unsure (1)..(309): unsure at all n locations
gcttcatcgtagaggaaatcttggaaggtgactggttttgacttatatgtcatgattgaggccctcgtaattctggtccctataantgttctaatcttacgcttcaatgttgcacatttatttaactgattcgtcaatctttttctgaagttcagaaagatgaagcaccttctccctgtgcttctccaactgctggtggattgcttcgaggttatcaatctcttgatcaagttactcgtcttgtggatctagggtgatagccttcctcttttggtttcttgcctccctgaagagagcttcatccccttg

SEQ ID NO: 49365 - DNA, 425 bp, Zea mays
agcttgatgtttaaaatgacatcagcttcttccttatttttatttcgaaattgctcgatagaagatttttaacttcctcaatcacattgagatttgatccaaagatcaagatgtcatcaacataaaggcacagcataacagactcacccccaccataccgatagtatacacacgtgtcagattcatttacaacaaatccagctgctgtaagagtattatcaaacttttcatgccattgcttaagtgcttgttttaggccatacaatgattttatcaacctgcacaccttgttctcttgaccatccgcaatgaacccttctggctgatccatatagatctcctcatccaactctccatttaggaaagctgtcttaacatccatctgatgaatgataagaccataagaggctgccacggctattaat

SEQ ID NO: 49366 - DNA, 433 bp, Zea mays
  unsure (1)..(433): unsure at all n locations
tgaagaacaaccacctataaagaagaaaattgtctttattatttatatcaacttcaaagcgaagactatccgaagaagaggggacccccacaccaccttctactagcgacgtggaggaaattctaaaggtaatgactgaacccatgcccacgaagctaagtccattatggcctcgactgacgaagctttttcaaaaggtggcggagccggaaaaaacgaagatagccaaagcgaaaaggcaaagaattattgccgtaacagaagttattgacaagacgccaccgagggcgtcaattcagaaaacaccagccgttgatggcacaaaatatgtcgaagtcgcaccttcggaggtcgcggctaccgaagccgctacagccgaagatgtaaacttagaatctactattgaagacatcaacaaaattntaacagacat

SEQ ID NO: 49367 - DNA, 441 bp, Zea mays
tcttggagttatttcttgactcttttcattttttcatttttgggtcttggacctgatgcaacgacggagctaaaactatgtgcaagtgatagtccatccattaatgtaacactcacgtgattctttttggagttgggcatccttgtgatgtttcctttttggaatacctagcaattcatcgactgacagtgcattaggtattaaagaatctgttattagttgttcttagggagaccattgtctttttatgccagaaaacaaaattcggttcttatgttttgtaatttcactttcgtttgtactgatctagcaacaaggaattccatagtacgcacaacaacaacatgttccaagatcatttgtctgttggtgtgcatccttttgtgtctgttcatcaattggttcatttctagtgacggttcgacttgtcaacacttgctg

SEQ ID NO: 49368 - DNA, 355 bp, Zea mays
tcaagctacttatgttgtttcttaatgggaattctgaatttcagaattctgaaattcagaccttgagccaaagatcaaggatgttcaccttgatccttaactcgaatcctaatggccccattaacaaaaatgtgcctaactaacccctctgtcatgtgccaggagatggcattgggacgcgtgcctcggacacgtcaaaccagatatcttctccctgtgtgtggcagtgagacaaacaggatttctcccctctctatctcttaatccagtcagcgaaacttgctagcctccacacacaaacgacaacgggacctgagaggaagagatctctcaacgggatcatggccataatctc

SEQ ID NO: 49369 - DNA, 446 bp, Zea mays
  unsure (1)..(446): unsure at all n locations
agcttgtgaaaccaatcacaagtttattgtataatgatactaaatntatttggtcttcaaagtgtaatgaagcctttgaacaattgaaggtattattaaccactgctccagtattggctcaaccgaatattgaaaagccctttgatgtgtattgcgacgcatcagacagtggtctcggatgtgttctaatgcaagaaagccgagtaatagcttatgcttcaaggcagttgcgccggcatgaggaacattatcccactcatgatctggagttagctgcagtggttcatgccctaaaaatctggcgtcattatctactgnggaatatctgtcacatctatacagatcataaaagtttgaattacatattcacccagtcagaattgaacatgagacagaggcgatggctcgagcttattaaggactatgaattggaaattcattatcac

SEQ ID NO: 49370 - DNA, 385 bp, Zea mays
gaacatccgcactgactccgtggaccgattgattcaaacccccgctggtgaaattgattgaggggaaatgggcaggaggggtccaatctggtgtctgccgcatgggagccccagccgctgaggaatcctgccggcataagctcaccagaattcggccccgtgctgtttaccggctgggacctcgggctggcaagaaatctaacattggggggggttcttgttaatagtctacgacttatacaaatagcgtgatgaactcaattccggttatataaaaaacacgtgtaatattctaaatatgcaccgagcgcgcgcgtgcgctatcttcagtattaggccacatgtgcacgtccgccccggactgacaattatttgctcttctttc

SEQ ID NO: 49371 - DNA, 381 bp, Zea mays
caacttgcttggacaacgcggctttggaaaagtatacaaggcggcgcaatttaaatagtacaagttcaatctaactccatcatgttcatgctctacaacgctgctgatgatataccgtatggtatccgcgcaagggacactgtaacatggcatggaagttgctgacaagaggctgaacatcggctctgagcaaggtaaagaacatctcagaaacgaactaatcctcattgcgagtctgcagcacaagaacctggtcaggcttgtgggctgttgcattcactaacacgagaagctgctcatatacgaataccttgccaacaagagcttagacgaatttctcttcgggacggaatatacatcacacacaatttatctacaggg

SEQ ID NO: 49372 - DNA, 352 bp, Zea mays
  unsure (1)..(352): unsure at all n locations
tcacagtgcacaagatctttattatttatgagcangagtggttggccagaaagcgtgcgaaataagcttgcggcatggccgtatttatacgcttgatgcgttgaaagttgaaagaccccacttgtcattgaatgttgctattctagcaaagggaaggtgttttttctgaccttccgctcaaggccttcgtccatatcgcaatctgaatttattatttacaaattaatattgcgaggggctactgttgggggccttcgtcctccgaaggtcctcaaaaacatgatttgacaatgttttccgagtggattatgtgaacaggtattttcggatccagaattatgaatatggagca

SEQ ID NO: 49373 - DNA, 301 bp, Zea mays
agctcgaaggactgcttcggcaggattatttctctaacgtgaagacttgttcggtccatggagtcgctttatccgagcgcaagttacttatcgcagaaggtgatgagtgaggtatccgtatcccggaggcgtaggagtccctcggctcggtcagccttggctgcttacgtgtactccgtcgtttccaggatccgctttccgaagtagtcaagaagcacgaaagaaatcctgctaaatagagatcctttttcgaggaaaaattcgacgcagagggggtctccccccttttagcccccgaggg

SEQ ID NO: 49374 - DNA, 294 bp, Zea mays
agcttgctaaatatgattggactatgtgtgtttatcttaatcactctctgatcgggtgatggtgttggtaaacaaaataagagtgcttgtgaagtgaatattggagtgactccaaggtcacaagactattcatgagagcatacagagaataggacaagagtctagcaaggatgataagggaccgtgatgactatgaggaaatgatgcctcgtcaattatttgcaaagattcaacaacatgaattcgaagaagccccaatcaagacaagagactctcatgccttgatctcaaatg

SEQ ID NO: 49375 - DNA, 418 bp, Zea mays
  unsure (1)..(418): unsure at all n locations
agcttgnngattggctatatgctgattctctctgtaagactgctcctatcttgcttgagcttaaccaagacaaagttggtgctgtagcacacgttaaaagtagggaaaactgttattctaaaagtggagaaaatctgggatgatgtagacacctttttttggggatgaccttgttgagttttgtgatccaaattctaaattgaaatctcctgcgatctgtaactacccgaaaatagtgagaagttgctggccggcgcccgtggtttttttccccttcgctttagaggggttttccacgttaaattcgtgtcttctctgtgattgatcctctntgtgtggtattcatttataacaaacctgatatagttaagtggaaactcagaaaggatgataattttttctggtaagtccgtgtaca

SEQ ID NO: 49376 - DNA, 408 bp, Zea mays
  unsure (1)..(408): unsure at all n locations
ctgagcaatccttcgcctacgatggaacagctccatcgttatctttctaattntctcagctaaatcacacacgggaaggtctttgtggtctttaacccagttattaaaaacctcagccatgttatttgtgatgtaatcacatttgatatctttgttgaaaccactcctgtaccaaaggaatttgtggtgatggtctaagtactcagcaatcttatgaacatttctgacctggctaacatggtgttcaaatacatcgctcctatatgccctcgctgctggatacatgtgctctgaaccagcatggtgtttgacatagtttcccattaagtgtctgaagcattctcttctctcagcaaacggtatggcatctcggntggtgaatcggtatggcagaacgaggaatcggta

SEQ ID NO: 49377 - DNA, 378 bp, Zea mays
agctttccacccgggagtttatgtgggtgtcttgggaggaaaggtcgtcgtagtggttatcgagagtgtggagatatccgaccatgtagacgatggtggggtcatccttggtaggatctctccctgactgggcctgaagtcttcctccaggtgggggtatttttgttgctaggtgggaagtaacgaaggggggtttcaaagacctctctgctgtagttctggcatagctgtttaagggcttttcgggcaacattttggcaagtgtctgggaagccgcgcctgatgaaggtgacttggaagggagggtggtttgggtaacttccactttctcctacgtagaccgccatagagcacttctcaactctgttttttcggtat

SEQ ID NO: 49378 - DNA, 229 bp, Zea mays
gcaactctatttaaatccacttagtattgctgaccctctaacacacccttcaatgctattgaatcatcacttcttctaaagacagtggcacctatatcagtaaaaagacagctgtacgccatttgacataattgggaaacagagagcacgttgttaactaatgaatcaacaacaagaacattggaaatggaatggtcaggtgatatagcaattttaccccaacctttga

SEQ ID NO: 49379 - DNA, 294 bp, Zea mays
agctggactctgcgctatgacgaaagacaatcttgctgatagccttgcatataatagtctgaaggtatgagaattgtatatttggaaatctgtaatttttgaatcattcttttattcttatactaattcttttttcatatagggtttaatactgagcaacgctttgagagcgcaaaagaatgccgaagacgagagctataatattgctttcaacaacctacgaacagaggttattaagctgagaaacaaagctttggaaaaaagataaattctgcttacactggtggataaaat

SEQ ID NO: 49380 - DNA, 400 bp, Zea mays
  unsure (1)..(400): unsure at all n locations
tacagcatacagaacaaaaactaggaatatcttgtatttcttatgcccaacacagntattaatccatatacagtggtggtcctgcaaaggaaaagttattaaatgcagattaaaattaagaatacaaaaagaggagtagcacatagcactagtcagtaccattcttagaacacatcttttgcaggcacgacaatggtgcgctcgaggaggtttataatgcgaacatttctggcagtatctcaaatcaccaccctgcaatgttctggtgtaagttagcacatagtcccctgtattagtctgatttagtcatatagatttctttttaacattcctgacaaaataaaattactacactaggatgacactgccgacgatgagatgaaggataacagacaatatg

SEQ ID NO: 49381 - DNA, 345 bp, Zea mays
gcatatttagacccactttgatgttcatcaagtagcaacaaagatctagaaccaaaatcctttggttagcgcttggaaactcattacctttctagcacaagttcaattttgggttgcctagtacatgagaataattgacaagctgaggtggattgttaccaagggacaatctgcattgatgtccttctttggatatgtacatagcgacctcaagccttgaagattttctttccttgttctttcttgtacatggtagagaaatttctttttaacactatccttttgcttaatgggacagactaaaaagagccttttggacattaaaccagttatatcttgtatatc

SEQ ID NO: 49382 - DNA, 298 bp, Zea mays
  unsure (1)..(298): unsure at all n locations
gagcgcatgccaagcatggaagcaagttggctctcatcatccacataagaacataatgacgaccgataggccactggagctcctacacatggatctattcggcccgatcgcttacataagcatcggcgggagtaagtactgtctagttattgtggatgattattctcgcttcacttgggtattctttntacaggaaaattctcaaacccaagagactttaaagggattcttgagacgggctcaaaatgagttcggcttaaggatcaagaaaataagaagcgacaacggaacggagttc

SEQ ID NO: 49383 - DNA, 423 bp, Zea mays
  unsure (1)..(423): unsure at all n locations
atctagctctcaggctctccaaaagagcatatttttatcattatgggcatgccatcctctgtcacagtagattctccaaaatcaagatgactgggcttcgtagggatcaaaatgccatagtcttcttcactctcatacaggttttcatcaacaatctcgccttcaaccatagtttgttgagatcccgcgttataaacacctttttcagcaacctctgtcgcaaccagacctgatcgatcattacttctgaaatcaacgctgtttaagaggactcggctgcgtttacatcacgagacaccctagcatttgatcggactctggccatttcnatagatttactgttagacgaagctaaccgaatacgatgatagcgttgcttgtaaacgcactacanaaaacttcagctatggttaaattttttaa

SEQ ID NO: 49384 - DNA, 379 bp, Zea mays
  unsure (1)..(379): unsure at all n locations
tcagtctatcatccgctttttatctgggtcgnggaacgcgccaacgggaaaatcttcacagctgtcaagaaaatgctccttgatgaaaaaagggcagatggaccgatttgttacctgatgcactctgggcactatacacgattgagtgcagggcgaccgggcttactccctttcgccttttatacggatcggaggccatgaccccgcaagaaataaagcatgggtccccgcgaacagttccgtcagccgttcacgacgtggacgagccaacttcagaggatctcatagacggagaccgagtcttcgccctacatgccctatacaaataccaagcccagaccacagcatggcgcgatcacacagtcatttctagggagtt

SEQ ID NO: 49385 - DNA, 307 bp, Zea mays
  unsure (1)..(307): unsure at all n locations
tctatgttgagcaacctgctggctttgaagatagtaagtaccctaaccatgtgtataaactctctaaggcgttttatgggctcaagcaagccccaagagcatggtatgaatgcctaagagattttcttatcgctaatggcttcaaagtcggaaaagtcgatcctactctctttactaaaacaatggctaatgatttgttgtatgccaaatttatgttgatgatattatatttgggtctactaacanatctacttgtgaagagtttagtaggattatgattcacaaattcgagatgtctatgatgggg

SEQ ID NO: 49386 - DNA, 368 bp, Zea mays
gtagcatatgctaataatatacgaattgtctgaagcctatctacgggtgcataggtttcaccgaaatccaaaccttcgacttgggagtatcctttggccacaagtcgagctttgttccttgtcaccacaccatgctcgtcttgcttgttgcgaaaaacccatttggttcctacaacattttgattatgacgtggaactaagtgccatacctcatttctagtgaagttgttgagctcctcttgcatcgccactacccaatccgaatcttgtagtgcttcctctaccctatgtggctcaatagaggaaacaaaagaataatgctcacaaaaatgtgcaacacgagatctagtggttacccccttattaat

SEQ ID NO: 49387 - DNA, 275 bp, Zea mays
  unsure (1)..(275): unsure at all n locations
acgccacgaatattattggctgaccaatcacaaacatccttgttattgaacaacaattttaacagagcnttttcttgcttatcagagcagtatgaccccaacaacaccttttgctcggctatgtcttcgcacacaagcatagactggtggccttagcttcatctatgttggcttatgttgtcatgagctttacttcatctatgtagcgaaagaccttgaatctgccgattccttcgcccttctagcagcctctggcttcctgcacacaatggacc

SEQ ID NO: 49388 - DNA, 440 bp, Zea mays
  unsure (1)..(440): unsure at all n locations
agctntacacttcatgagctcccatcccatctttggtgagttcatgccacattattccccacaacttgttgagcgatgaacatgtgtgagctcacccttgctgtctcacaccccccacaggagaagaacaggtggttcaaaaggagccgcatatcgaggaattcgattcgatctatgaggcgtctcccagttgactttctagcgccaaggatggattatagatcctgttatatttatcttttattttgtaagtcttccgctatgtaataagtactctgattattgtgacatttatctctatacactctgtgattatatatgttgtcttctttggcgcatgtatgagatgcacccggctttgtccgttaaaaccgggtgttacactcttcctcccgctggccggtggggccggatagtccgcgccgatttcccccacgcat

SEQ ID NO: 49389 - DNA, 422 bp, Zea mays
  unsure (1)..(422): unsure at all n locations
ggtgtattgatgtaaaaagttctttctcttgttccattacgaacttgtagttattttaactttctatttttaatctattctgtccttataaatagattaaaggagagaagatcatgttactgtaactgtgttgccttgtctcgatttctttcagaaattgtaacaggtgaccaacggtatataaatatacttcacataaaatcatattagcttatttatctctaaattatgattattagaataaattctaatttaaaagattcaaacggngcttaaagatgctctangtaccctcgatcaaggattacattattgttttcaattntcgaaaatcattttattgaccaaaanttgacttttgtgtttaaattctanactgaaactcaataaaaaccgacccggntttcgtttctcggtgagta

SEQ ID NO: 49390 - DNA, 271 bp, Zea mays
aattggcttgcacggttatgcatccgggggctcaagctggattatcgacagcggatgcacaaaccatatgacgggggagaagaagatgttcacctcctacgtcaagaataacgattccccaaaatcaatcatattcggtgatgggaaccaacgcaagggtgaaaggttaggcaagattgcaatatccaatgagcactctatctctaatgtgttttaggtgagtctcttggaataatttactatctgtcagtcaattatgcaatatgggata

SEQ ID NO: 49391 - DNA, 429 bp, Zea mays
agcttgcttggtttggagcaattggtgatggtgactttcagggaagttttctcggatgcgcgtgagtgaggacaaagtatgcacaaaaaacccgtgttggtctatagggacaatatatgatcctagaaagttaacaggagtaaatatcaccgaaccgggagtggacggtgtgttacagacttcatgtgaatgtgccatagtatctcttccacttcctcattatatgagttaaggtcctcctcaatgtcatcagcgacaacaacatcctaactagaggtttgtgcgcgcccatgcgcgcgtagtggcacgtgttttttttataattttgcaatgtcttgattcagttcataattcacatgaaatacacataagaggtgcattgcatttcttaaggatatgtgcaagctaatatcatctacgtgtcataaa

SEQ ID NO: 49392 - DNA, 273 bp, Zea mays
tatattatggattgccttggaatcagtctatcttttctttggccttctggcagcgtcctgacttctatgaatatcaataggcccttggtccgaaggtatctttatgcagagataagctgggtgaaaaattgcttctaaagcatttagggtaccacgaccaatgatggcgttgtaagggtattccatgtctacaatatcaaacacaatttgctcagaccttgtgttattaacaaaacccaaggttaccggcatggtgatctttccgagtgccac

SEQ ID NO: 49393 - DNA, 379 bp, Zea mays
agcttctaaagggagaacacatattgggactaacaaatgttcactttgagaaagatagggtttgtagcgcatgtcaggcagggaagcaagttggtgttcatcatccacacaagaacatcatgacgactgacaggccactccagcttctacaccatggatctatccggcccgaatgcttacataagcatcggcgggagtaagtactgtctagttattgtgaatgactattctcgcttcacttgggtgttctttttgcaggaaaaatctcatacccaagaaaccttaaagggattcttgagacgggctcaaaatgagttcggcttaaggatcaagaagataagaagcgacaacgggacagagttcaagaactcacaaatcg

SEQ ID NO: 49394 - DNA, 371 bp, Zea mays
cttcattcccacatgtgctaaacggcgatgttccagtcagcccatgcaagtcttagcaattaagcatgcatctagaccggcctcctcttttgcaaaatcaactaaataaagtttgccatctagtacacccttaaaagctagtgagccatcacaccttctaaagacagacacatctatatttgtgaataaacaattatatcccatattgcataattgactaacagataacaaattatatccaagtgactcaactaaaaacacattagaaatagagtgctcatttgagattgcaatcttgcctaagcctttcaccttgccttggttcccatcaccgaatatgattgaatcttggggatccttgttcttgacgt

SEQ ID NO: 49395 - DNA, 426 bp, Zea mays
  unsure (1)..(426): unsure at all n locations
agctnttgttaattacaaagctacaagtatttgcgaagctaaatcctgacaaacatacctataagcctttcacgttatgcggcttctttagctttcctcgcttcttctaaggtagtatgggattctttttcattttgtttaatagcctcatctgctattttcttggccaccattcacccgtacttcaaaataaaattttccactaaaggcgatggcttccgctgaaggatccttgacgtaattcgatgaaactgagaattctggttgagttacagccttcacatgctcatagccagctttttcaagcaaagaaacagctcctcgagcgtcgatgcaggtacaaaaatcttctctatcactaaggatctcatcaaacgcttcggcttcgcctttaatccatctgataacttcgccaggatcaccatg

SEQ ID NO: 49396 - DNA, 251 bp, Zea mays
  unsure (1)..(251): unsure at all n locations
cccatgttaggcttagcaattaagcatgtgtcgaggtcagctctatcaaaatctaccaagtatagctgaccctctaacacgcccttaaatgctattgaatcatcactttttctaaagacagtgacacctacatcagtaaacagacagttgtagcccatttgacataattgagatacagaaagcaaattggtatctaaagaatctacaagaanaacattggaaatggagtggtcaggtgatatagcaatttt

SEQ ID NO: 49397 - DNA, 420 bp, Zea mays
  unsure (1)..(420): unsure at all n locations
agctttaagctctttgacaataaaaccactttatctagttttaacaaagatgcaataatgcatgagtgagattttaagaggttaaactaggtatgaagcagggataaatgcaaaggacatgctttctcttccttttatacaagatatgcaaagagtgtatataagaggaagatttangtacatatgtaaatgataggaattagttttaccctttttgtacctttacttgtagacgctctctccaatgtccttggtcttgtttgcttaagacttatgcttaatgacagtgtgtgaaaatattttgcacaagagagagttcttacaactagtgatcctttttctaagacatggttaacatatatcaagtggatcacaaaatgcataaatgaatcatgaattcntcttttaacctagtgcata

SEQ ID NO: 49398 - DNA, 337 bp, Zea mays
  unsure (1)..(337): unsure at all n locations
ttgtctgtgaatgtaggtgaactacaagacttgttttagccattgngttattgacagtggatgcacacaacatatgacaggcaacccacggatgttcacctcactagatgagaatgttgatggtcaagataaaatcacatttggagacaactcaaaaggaaaagtgcaaggacttggcaaggtggcaatctcaaatgacttatcaatatcaaatgttctcttagttgcacccttgagcttcaatttattatcagtgggacaactctgtgatcttggacttcaatgcttattcactccatcagaggttattgtaacaaanatggatgatgaatcaatg

SEQ ID NO: 49399 - DNA, 439 bp, Zea mays
  unsure (1)..(439): unsure at all n locations
agcttcggaagatcacaacttcattttcttcggaagtaggaacggccctgtctacgtcagccctcacaatagacatatctcgaaaataccttcctctcatattatcaagatgactctgtttgatagttgatttcccgaagactgcatgacttggtcgccagggccgatcttcagagtcttcgcctccactctccacatcatagctgtcgctatcatcagtatcttcagacaagccttccagtatctctttactaatcttctctgtatttgtttttgcaattgactcaacaaatccagcagtcttctccttaaggagcttgtcctcttcggttagcttcatctcagcaactgtcttcttgtcttgagacatcttctcttcgaaaatgacgaanacgtgtccttcaaaccgaagctcanaagcttgaaagctatcaagcgc

SEQ ID NO: 49400 - DNA, 420 bp, Zea mays
  unsure (1)..(420): unsure at all n locations
cttataatatgctttcctacacaaattcttggagaaactcttgttatatagatgcggaataacttatgtaaatttgtacataccttgtaatatatcctgtctcccttatccgtattcaatctgctttgctgtggacgaaacttctcttttgagccgaaggcgaaaaacaccttcccttcttttcgtacacaacgaagcatagaaaatttttccttcgaatcttttccttattttctgaagcacctgtcttttttgtgtagcataatgatgattctatatatgtctaaatggatgtttatgaatgcaaatgacatgatgacatgtaatgtgcaaatgaatattangacaaatgttcaaaaaccataagtacggcccttcatcccctcaagaatgataaanatctttttgcccgttactttt

SEQ ID NO: 49401 - DNA, 413 bp, Zea mays
  unsure (1)..(413): unsure at all n locations
agcttcggcgatggctaaaaattttggcagtctatctttgcaaatagcaatgaatgctgtggtaacttcacacctactcgtctgtttatatagtactgcaggtaagaaggcgaagcgccaggatttttacaccaggcggacacctgctcgcactcactgtgtggtggaccgcagagatcaaacagtaactctgcaaggtgggaccgctatgtgctggggaactgaatcgtttctcgacaacgagctcagggaaggtgttttttagaccttcggctccccgaagcttanagagactttnttcacagatcaagctcgttacgaaaaacgacctaacaccgcgaaaggggctactggtgggtccatgcttcgtcgccgaaggtcttataggaagaagcggtcttcggctgatgctg

SEQ ID NO: 49402 - DNA, 408 bp, Zea mays
  unsure (1)..(408): unsure at all n locations
tctatcatcttgcanagaataattgatgctcaaaaggatattgtgggtatgaagcacatacgggagaagataaaggctggaacagccaaatgtttcaaagaagacgatcaaggtgtgatatggttcaataaccgcatagtagtgccaaagaatgaagaactccgccagcaaatcttagatgaagcacatcttagtcgctattctattcatccgggaagcactaagatgtatcatgatctcaaaccgcactactggtggacgaagatgaaaattgaaaattgcacgctatgtggctaggtctgacacttgcagacgtgtcaaagccatacacatgaaaactgctggtccattacaatctttgtcgatcccaacatggaaatgggaagacataagtatggactttatcgt

SEQ ID NO: 49403 - DNA, 434 bp, Zea mays
agcttctccttgtcgtcattaacctggatattttctcctcttacttccagcctgctgcccatctgcttcggtagctgattacaggaaattttgtggttttccgataggcgaaattatagcaaccaaaattgtcatgcaatccatactttctagccttcgactgataatgcagcttcggaacccggcaaaagctgtccgcaaatggctccactgcttggcttcggagtgcccagatataaacactaagcctaacgatagcgttaggggtcagctggtgaaaatagataccgaacctcttcagtacctctgcaataatcccatgtagggggaatcttaatccagcctttaaaaagctcttataaaagacaatctcatccttctccggtattggggtagtctcttctaccccgaagcgtaatagcttcttctgactc

SEQ ID NO: 49404 - DNA, 279 bp, Zea mays
  unsure (1)..(279): unsure at all n locations
cccccgcctngtctaagttctagcactatttttttttttccggggtagattatacattttctcatttactctggttgaaatatatttctgactccagagtttaagagctcaaaaagtggtctattcaatccatagaattccacctcctttttcttattcgtacattagtacaccgtgtgatcgcgccgcgcatacttaggtcatcaagacccctttatgaactctggctgaaaccactatctgaggactccaataaaaggctcgttgatattactcctc

SEQ ID NO: 49405 - DNA, 412 bp, Zea mays
  unsure (1)..(412): unsure at all n locations
agcttcgtcagatgtggccccagtggactttcttgatcggctaagattcagtcattacctttaagatttcctctacttcggtagcagaaggtgttgcagaagttccttctctttcatcaattgctttttgcttcggagacgaagcttttctcttcttcgaaatacctgttttcggctcagactccagttntttcttcttcgattgatcttcatagtctttattcaaagcaacagctactctttttctcttttggccttcagcatccttgtctagccgctcgtagtcggggtactcaaagtctagagcatccattactcgatttaacctccacttcggacgggtgccgaaggccgcagtcatcaatcggtcnttctttttagaataatntctgagtatttcattgcacattac

SEQ ID NO: 49406 - DNA, 341 bp, Zea mays
  unsure (1)..(341): unsure at all n locations
tcctctctaaaatagaagaggatgttgctaagctcagcgggtctgtcccctacactatgtttgcaagctactcgattgatttaacattctcaaaacttcacttgtcaatgtcgacaggtttaccatttgaacccaaacattgcaccagacatatcagatttttagttggagttaggtacttaacttttattttagttttcccttttaagtttcaagctttgttttttaatccaacactactagaaactcaaaacttcaattgtgaatatggttacctttggtctccaacaaccggtaggcatctcanaacttagttagagttgggttacttaactttattt

SEQ ID NO: 49407 - DNA, 412 bp, Zea mays
ccgagaagctactggaaggattggaaaatgggctgtatagctcaatgaattttgtattgattatgttcatagatcttcgattcagtcccaggcattatcagacttcattgctgattggacgccacgggctcaagaggaagaaacaaagttaagacgccgaaacatggacagctgttttcgatgggtcttggggaaccttctgagcaagagcggctgctgtgttggtttcacctttcaaagttaaaacttgttatgcggcaaagacttgattttatttgcacaaataacatcgccgagtatgaagctctgcttttgggtcttcggaaattaaaagcaatgggaatcataaaggccattcttaaaactgattctcacagtatttctggtcatattgacaaaagtaccaaacaag

SEQ ID NO: 49408 - DNA, 395 bp, Zea mays
agcttggcgactgccagttcgacctctggattcatactatgtggccacatgcgtcactatgttcagcaagctccggcgcaatcgctgcttggacgtggtccaaagcggctgcaccgcgctgttcatcttcaaacaggggggacctcatggtcatcgtcaacgccggtgactctcgggttgttccgggcaccgcatccgacaacgacgccgtcacgacgtccagctcatcattcacctgaacctcaacctgccacataagtcactactgaccggccagcggccatgaattcttgtgcgctgggacgacaaccgttgctgacgttgtgtgagtgtcctctaacaagatgtatgtagaggagtagcacatctggtggtgcaacggctaggtgtactac

SEQ ID NO: 49409 - DNA, 324 bp, Zea mays
  unsure (1)..(324): unsure at all n locations
tgcccttagaagtaactaatattgttaagggtgttgtctctcatggtttacgatagcgaggggtatattttatattctgcaaactatcccaaacacaaaattaggaagattcatgctagaaaacgtcacaatatttctcatcaagcattcatgtataaaaatgaagcttctagctctaagcataccactcacgttaaaatgactataaagaaaactcctactgcatcaaatgagcataatgtttcttttaagactttcgatgctaactatgttntaactaacaaatcaggctaaatagttgcctaatatagtgggggcaaacat

SEQ ID NO: 49410 - DNA, 379 bp, Zea mays
actcagcctgatcagtctctattgaactttgctccttcaatgacatgttaatctttatctggtctccctactatctcatcacctatagattataatcatgagcaagtaaaaaattgattgccaaaatgatcatatttcatgaatacccatttagaatggttgagcacacatggtttaatattctcatgaagtatatgaatccgctgtatgaatttgttggtaggaagaccataagagctgaatgtttaaagatttatgagtctgaaaaggaatcattagcaaaggtccttaaaggtgtggatttcatttccttaaccactgatttgtggacatctaatcaaaccttgtgctatatgtgtttggttgcacattacattga

SEQ ID NO: 49411 - DNA, 411 bp, Zea mays
  unsure (1)..(411): unsure at all n locations
agctcttaaaaggaagaanaagcactcattctcaccttaagtagaagcagatcatgcccaaagctggcacgcctcacgaagagacagccaccacaacgacttggaacgtggaaggaccgacatcgcccgacctagggaaaagagagaaaagccctcgaggggagacactcccccgcgggctcggaggcaactgttggggagaagatccttgacccctatggcccactggtcagtgagcgcactgggcaaaagcctctcacaacgagagtccactagtcagctggaggagataggtaacggctaccctggtagcaaccactctcgaacgaaccccgtggcactgagcctgggatcgggcgtggagcaacctaacagggggtgcccaagggaaatcactcgaatagatcccgc

SEQ ID NO: 49412 - DNA, 366 bp, Zea mays
  unsure (1)..(366): unsure at all n locations
caagaggatacaagaagttggagtgcttttgttattgcttttgtgactcacttgaagctttggtacttttgtgaatgattctgtaaagtgtttgtaaatatgtgcaaaatataataacatgtgtaagttttgtgaatgattttgttgtggtgcttgttgatgagttatgtgatgtggatctatcattgtgcaatactaattaaatttgtatatctatgtgattatgtgtataaaaattggtgatttgtgatgcttttgtatatataacagttgttgaatgctaattaatggtatattatcattattaacgactataactangggcaactttctgttggntgctaatgtatagcataacgactcatg

SEQ ID NO: 49413 - DNA, 426 bp, Zea mays
  unsure (1)..(426): unsure at all n locations
agcttgcatgacaaaaacgtgaatgccattttatttttctcatcaganaaattaacagaattcaccattctattacacacatcatgcagtgataagcggaacaagcctccacagtcatatcctttaccaacaaaagtaccatgtttcggcacaacacatttattagactcaagaacatttttgtacccatctcgacacagcaaagaagcactaacgagaatctttttaataaagggcacatgctgcacgctcttcaatagcaccgtctttcccgaagtaaacttcagaatgaccgtactaacaccaataacatgagcacgcgacccatttcccattaacaaggcgccagacctctcgacctggtatgaggagaacatagaggcatcagcacacacatgaatattngcaccactatncatccactac

SEQ ID NO: 49414 - DNA, 365 bp, Zea mays
  unsure (1)..(365): unsure at all n locations
cccaagggagagcacattntatgattaacaaatggtctttttgagttatatcaggaatgnaacgcatgccaagcatggaagctagttggagtccatcatccacacaagaacattatgacgaccgacaggccgcttgagctactccacatggatttattctgcccgattgcttacataagcatcggcaggagtaagtattgtcttgtaataatggatgattattctcgcttcacctgggtattctttttacaggaaaaatctccaacccaagagaccttaaagggattcttgagacgggctcaaaatgagttcgccttaaggatcaagaaaataagaagcgacaacgggacggagttcaagaactc

SEQ ID NO: 49415 - DNA, 292 bp, Zea mays
  unsure (1)..(292): unsure at all n locations
agcttattcaaatnttgttctttccgttttcttaatgctgngactggactcatttgaaggtaccgcgatgattatcgagatgactaccaggatagagattatagaaggcgaagcccgtaccagagtaaagatagatacccccgtgacaaggacagaaatagggattaccgccatcgtagcctgagtcgcaggtacagtcctgatgatacaagaagcgtgggaggacaggcatatgcacaaaacatttggttaattgctccatattgctggttngcacttattcaccacatca

SEQ ID NO: 49416 - DNA, 381 bp, Zea mays
tcagctccatctatgttatggattgcttttgagtcagtcctattgttttctgcccttcttgcagcttcctgacttccatggatagcaatgggtccctgatccgaaggtatcttcatgcaaagataggcaggatgaaggattgcttcgaaggcattaagagtaccacgaccaataattgcattgtaagggtattccatgtcaacaatatcaaacacaacttgctcagttctagtgttgttgatgaacccgaaggtcactgacatggtgatcttgcccagtgctacgatctgtcttcctccgaagccacaaagaggatgtgtagcatcatgaatcttatcttctggctcttgcatctacctgaaggccttagcaaaaatgata

SEQ ID NO: 49417 - DNA, 315 bp, Zea mays
gaaaaagatagtacctgtgcagctcgtcaagcacggaaacaagtgggaggctctcatcacaccaaaaatgtgatgaccacacttaaaaccttggagatgctgtatatggacctttttggacccggcgcctatctgaacataggaggaagctagtctggtttacgtattgttgatgaatcttcccgcttgacttgggtgttctttttgcaggaaaagtcccaaacccaagggacccttaagcgcttcctcaggagagctcagaatgaagttgtactcaacgcgaaaaatataatgagcgactacgggctccaattc

SEQ ID NO: 49418 - DNA, 276 bp, Zea mays
  unsure (1)..(276): unsure at all n locations
aatttcaatctagaggtcctgaacttcttgcccgtacaaagagcagccaaaacagaagtgtgtgtctgtgattgttatgaagtacagagcataactctgtcttgcaatattgagctcattacgtgaaattgtgcctgtanaagagctctgtatttacctgtctgtttgtgcttttgtgcatggaataaacaatgatattatactgaataaacatgaatgttctgagacaaatcatctctaactgcaaatgcaatatttaatgacattgaactggga

SEQ ID NO: 49419 - DNA, 441 bp, Zea mays
  unsure (1)..(441): unsure at all n locations
agctttaaaggtgggagngagtaatatctactcttttaattataatatctatccttctgtaacacaaaggaacattatatgcagtggttaaggggcgtggctttggtccttgcagtccacgtttgaatcctggagccatcttccttttctccttttttgattaattcagctangcangcgggaggagcggagacgcgtggcgacgcacgaagagagattattcccatttaaatatagtagagattatgtgaatctaacttatcatctaagattattactccaatggtgctggggtgtggttctacagtaccaggcccaacagttgcatcttgtgccctccaaatagatccaaaccttgattgagttgtgaaatggtactaaactataactttatatgtcatcgcatacaaatagcacaatataatactccctccgttcttt

SEQ ID NO: 49420 - DNA, 324 bp, Zea mays
ctatgttgagcaacctcccggctttgaagacagtgagtattctaaccatgtctataagctctctaaggcgctttatgggctcaagccagccccaagagcatggtatgaatgccttatagattttcttattgcaaatggattcaaagtccgaaaggccgatcctacgctctttaccaaaacacttgaaaatgatttgtttgtatgccaaaattatgttgatgatattatatttgggtctactaacgaatctacatgtgaagagtttagtaggatcatgacacaaaaattcgagatgtctatgatgggggagttgaagtactttct

SEQ ID NO: 49421 - DNA, 417 bp, Zea mays
cttcgctctctctcgttaccatagcacaacaacataataactgacaagcactttaggcgcaactaatcatgtattgttgtttgtatacaaataggtgttttacgcacataagaccggtgtcatcgcttatggatcacgaatgcttttatgtacatataaccaaactgatgaagcctttccaactctgtgtatgttcatgcaaccccgacgaatgaactctaattaactcttgatgtaagctactcaaacgctacttaatattaattgctcgctaagtacacaactgatgtaagcgctacaatccgcttaagaatggctgtgtacttatgtacttatatgctacataactactgttgtcgatgtcatgtgatcgtgagcaatatccaatgcaacatgctcatataaatgtttcacact

SEQ ID NO: 49422 - DNA, 402 bp, Zea mays
ctgtggattcttacattgctggatttgttgagtctatggccaaaacaaataccgagaagattactaaagagatactggagggcttgtccgaaaatactggtgacagcgatagctatgatgtggaaagtggggacgaagattctgaggatcggccctagaggccaagtcattcaatcttcggaaaatcgaccatcagacaaggtcacctcgaaaacatgaggggaaggtactttcgggatatgtctattgtgagggctcgcggaggcaacaacgttcctgcccctgaggagaacgaagttgtgattttccgaagcttcttcaaggctggactttggttccctttgagctaagttgtagttgaagttctgaagacgtaccaaatctttcttcatcagatcaccc

SEQ ID NO: 49423 - DNA, 384 bp, Zea mays
cgcgtcgtgccaagcgcccccttgttttatgctgcttcatcgacatcgctacactcctcgctaaataccttcgcctgaggccgccgatgactgcgtctacgactttgctcatcgaagctcgatgtgctaatcccttgcaccgaagattttcctgctgttgtcgtgtcgtctgcactgtccgatggtatgagaaagggttcaattttatacgctaccccctatcgtgtacgtttaatttagaactaaccgctgcgataatttttcctgttttaaaatgcgcatgtgacgcttaaataaattaagtattaatttattaacttcgtaaatttatgtgtaacatttgaaatcagtgttttcaattatctgcatgtgtattcaatatct

SEQ ID NO: 49424 - DNA, 357 bp, Zea mays
cctgtaagcatgcacgctggctgcactgatgctcaggcgcgcggtcgtttcgctttttgagggcatactgcgcgttagctcgctgagcgggagctgcggggcacgcgcctatgcgcttgcagcgacagctgtggcgagccacgcccgtgatttagactactgtggctaccgctgcgaagcccgccttcgtacttggcagtggaggagcttgcacacgtgctcaaccgcggaggcacattctgcgcacttggctcgcggcggagaccgcctgagtgcttggacatggcggagctcgatcgcttgcgtgcggctatgacgcggctacatgctcacgtcccattgtgacagtggcagcat

SEQ ID NO: 49425 - DNA, 355 bp, Zea mays
  unsure (1)..(355): unsure at all n locations
gcgaatgatacgaagctgtatgcatgacctgcttccgctgagcttggtgtgctgcggcttccgctatttcctttngcttcttgatagtaacatggcacatcctggtggtatggcccttgttttcaccgcagaataggcaacagattcttctcggttgatcgccaaatctttctccgaagcccctggcgcctctgcctcttggagctggtggtcggaaggagctttgctgntgccccgaagcctgtgaggaacattgcggcctttgctggtggcttcctctatcatcaattttgtgtagagatatgaattgatctcacgtgtttcgggtagaaccctcctccgcagcccctgggca

SEQ ID NO: 49426 - DNA, 415 bp, Zea mays
  unsure (1)..(415): unsure at all n locations
agctagtgaagattcttcatccccacatgtgcttatcggcgatgccacatccagcccatgctagtcttagcaattaagcatgcatctagaccggcctcctcttttgcaaaatcaactaaatagagtttgtcgtctaatacacccttaaaagctaatgaaccattacttctcctaaagacagacacatctacatttgtgaatagacaagtataccccatattacataattgacttacgggaaataaattatattcaagcgactcaactaagaatacattagaaatagagggctcatttgagattgcaatcttgcctaagcctttaaccttgcattgattcccatcatcgaatattattgaatcttgggaatctttattcttgacgtagggtgtgaacatcttcttcntccccgcat

SEQ ID NO: 49427 - DNA, 287 bp, Zea mays
gtgcgcaaggcgaccggcaccgcggcacgtcaaggagccggacgcggcacacatagagatccacggctggaaaaaccccggccagcatagaagtaaaggtgagggcgcaccatggacagagaaagcagtgcgcacccacggaacaagcagatgcgagcgtgtatcgtccgatgggtgaacgactggagcacggcgcggctgatgaatgggcaaaggccaagctggggcaccgcagcgccagagaggacgcgcatggagatgaacgccgcgagggaacttctcgagct

SEQ ID NO: 49428 - DNA, 459 bp, Zea mays
taagcttctccttcgcgttcgaaagcgctggttctggcttcagaggcctcttttgtttatgttctgaatggctgcttcactctgcattcgacggtaactctgcaccttcttttccatgacttgcttatctgaaggtttactttgagcttgccttctcgtttgatcagtcttggcagttttgccattatttcctagagtcttgtttccaggattggcaaggttctccttgttaaacttctctctcgtcttcctcggcttcacctcactgactctctgttttgtgcttgtggattgcttcttcccgagcttctgtttattatcttcaacagtgactttctcttctgtggctggtttgttctttccagtcttcctaaacctctgaaggaaactcatctttcttcctgcactgactggtgtcttatgctggttgctgtcttcagccaccttcgtattctgatg

SEQ ID NO: 49429 - DNA, 336 bp, Zea mays
  unsure (1)..(336): unsure at all n locations
aacttnacgcactcctaacacccagtattggcataacactctctctatatattctataaatgcaaagtaagcattggaatctacttccgcttattactccctccgatgtgatgtaatatctgcgacgacgggcaaaacgctcttgggcgaagcaaggaagacacatagcaccgaacttgacgagtgattatccgtatctacaggagtgtccgaggtccttatgataaagacaactggaggcgagcctaatcccttgggaggatcagcgacaaccggaatcggagcgaagcccatcttctcagatattacgtagtacttcaaaagaatcttcaacac

SEQ ID NO: 49430 - DNA, 417 bp, Zea mays
ttcttgttcgaaatttctgattgagaaattatcttctaatttaactctgttattttggctgcaagatccgctaataagctctcggctgtttgaagctcaaagtctttcttttcgatagcaactgattgctcttttatcttgctctctaagttctcaattataacttcgtgcttttcatcctctaagtcctgctgcatattgaaagccttgctcaacagcatactctgcggacaaataaccttcgttagaaaacatttatgttattacaaataataaagggtatacaaaagttgttaccttaaaatggaataaaaaaactaccgacaatgtgttgcgtccgtagcggctgatatctgcttcaacttctggaaccgatctctttatgagtacgatactttcgcgtcgtctgatctcgat

SEQ ID NO: 49431 - DNA, 324 bp, Zea mays
atctaccttcatcaacttactccggaatcaatcataaggatgggcatcttcgtctgggtcgtgaagagccaaggtttaaaaccaaatgcaaaaagtttctgcaacatacatgagttattgtatgagacaaaaccttggggtaaagaacagtatcacaacaacttcggctgctacagcttcggcttccgttctgggtcaagctgccccgtgccaacctttctaaagaggtggcccgtcgactggatgacggagtggttttacatgaaaaaatgacttgaatcacaggaagatattaaaagatcattatgcgtccatctgcaatgc

SEQ ID NO: 49432 - DNA, 366 bp, Zea mays
  unsure (1)..(366): unsure at all n locations
agcttgagacgggaacacaccgggcatgttctacattcctcgaagaaaatgtcaaggatttgaggattgccaagaggaagaaacaaaagatgaaattcaacacctcctccaaaagcctcaaccacgcctccacaaaaggtaacattcaaggtaatgatcaagccacactttacattaataggtgtaatgaatgctttaaagaggggcactngattaggtcatgtccctacattaaaaatggctcgattattaacaaggatgatagacttttgtttaaatgctccaagaagggacacttgcttagatcttgtccccatttaatacacaaaggcatagggttagaanagaaaattcttactaaccatg

SEQ ID NO: 49433 - DNA, 420 bp, Zea mays
  unsure (1)..(420): unsure at all n locations
atctcttggcattaggcattacatttggggtgatgttgtgttgntgntgngcttgctgcatggctgctagagtctgcccaattgcttgcacggcttgggtctgcatgaagaacgttatctaagcgagtgcgaacacacattcaatattctttgaacagaanagaactatacaccatacaaggggaaaacatgtgccatatcaaatagtgctcgtttctaccgtcacacgagaaagagaaacgccgagatcaaagctacgattgagaagtcattgcatgtacgttctacaaatatgaaatgtaacatttaattctacatacttgcattattcaaaatttattaatgcaattagagctatcgcttattcctaattaatctactacgctcacaaccttcagttagatgagtgatttaataata

SEQ ID NO: 49434 - DNA, 322 bp, Zea mays
agcttaatcacaactacaagccgttgttatttttataattaaaatcgagtccgagagagagggcgaaaacaaatcacaagcaaataaagagtgtgacacggtgatttgttttaccgaggttcggtttttgaaacctactcctcgttgaagtggtcacaaagaccgggtctctttcacccttttcctctctcaaacggtcacttagaccgagtgagcttctcttcttaaacaaacgggacactaagtccccgcaaggaccaccacacaattgatgtctcttgccttggctacaattgagttgatcacaagaaagaatgaagaa

SEQ ID NO: 49435 - DNA, 377 bp, Zea mays
tccaccacatctgatctttggagcacccacattaacattctaaagcatagcccaagcagaaacaactatgctggaggacattgttgtactataggaaaaaccactaaatgtggtcattcattcggccagataccacctaaccctgaggcgctatcacgacaaagcagtacgacatcgatccttctcaatgggagatttggtcctccttctaatgctgaccggggagggatggcaccaattgttaccaccatgggaaggaccattcatcatcgcagaggttacaccgtcggtattctaccggctcactcaaatggacgacaccgaagtggggaattcatggaatattgagcacctcacgaaattctacccataataat

SEQ ID NO: 49436 - DNA, 308 bp, Zea mays
cggggtcagggaacgcgccaaccgaaaaatgttgacagttgtctagaagatgctccttgatgaaaaaaatggcatatggaccgatttgttacctgacgcagtctgggcactaaacacgactgagtgcacggcgaccgggtgtactcccttctgtcttctatactgatcggatgccatgacccctcaagatatgaagcatgggtccccacgaacagttgcgctaaacgtgcccgacgtggacgagccaacttcgaaggatctcattgaccgagaccgagtattcgccctacaagccctaaacaaatacc

SEQ ID NO: 49437 - DNA, 311 bp, Zea mays
ctatatcctgcgcatttatgtttgtcacgaagaactatgtttggattggatctttgtaatgattggcaccagagcgtgggtataccctgcattttggtttacatactatgtcaatagagttagttatatagtcgggaaacccattattctcctcttctctttatctgagaagctgtgtggtctgtgttggagatcagtgaaaatgctcatctgttcactgctgttggagaagtctatactctatttttatgctgcaagctttgccacaacagatctgatgtgtgcgtgcgttcttgctaaggcatagaaca

SEQ ID NO: 49438 - DNA, 314 bp, Zea mays
agcttctaaagggagaacatattttatgattaacaaatgttcattttgagaaagacagggtttgtagcgcatgccaagcacggaagcaagttggtgcccatcatccacacaagaacataatgacgactgacaggccactggagctcctacacatggatctatttggtctgattgcttacataagcatcggcgggagtaagtactgtctagttattgtggatgattattctcgcttcacttgggtgttctttttgcaggaaaaatctcatacccaagagaccttaaagggattcttgagacaggctcaaaatgag

SEQ ID NO: 49439 - DNA, 343 bp, Zea mays
tcgcacctctgaactaactcggctgtgcattcttttctttggccaatagaatcctgacctgaagaccttcccgactatggtcttggacgctgcgtgtattccacattgcccagcatggacctcatccagaagttgcttcccagtggacgatagaatgcacttcatgaggacgcctgatgcaccccttctgtataatgtctccccaatgagtgtgtagtgagccgactgtctggcaatacgctcggctgcatttttgtcatctgggtcttctttattctttatatacctgatgattggccttctccagtcattagagtctgactctggttgattcacaatatta

SEQ ID NO: 49440 - DNA, 443 bp, Zea mays
  unsure (1)..(443): unsure at all n locations
agcttcttcaccacgtgttcgtagatatcttgatgaagttgttcatggcatcttctccttaattgtctttgtttcttgttcccaagcaatttcctttctgaccctacaacttgttgctcattcaaacattcgcttccttttgagcgacagggattagcacatggtgatatattatccaaatgtgcacgtgtgcaagaatgaggttcacatgagtttaagctggtaattactacctcatgagcaatatcaagcatgatatggtcatcaactaatttattatgagaatatgataacttatcatactcttcacctagagcaagtttttctaagtttatcatttctacttgactcctaagcatagaattttncagtttaagttgagcaacattagataatacatcatgattatttctttgctcaattaaaacagattcataccgttg

SEQ ID NO: 49441 - DNA, 369 bp, Zea mays
ccaattaccttccagacacacaatggaggtgtgaatgtctatatattcacacgactctggcgaggcggagcgcgttaagcatggggagatcacctgaaaagagataacgtgcctttacatgagcatggtacacctatctatacggagacgaccgcatacaacttcgtatgagagtacattaatggcccctaagatctattcacacggtatacacaacctactaagggaaatatggcatgtttctccacaagacgtgttgtgcacacgtctttcactctccttcatatatgtgtcgacaagacatactaaagccatggtgaggtgctttaactgagccattacaacgaaactaatgctacttccgaaatt

SEQ ID NO: 49442 - DNA, 169 bp, Zea mays
agctaggcgtttactccatgcgcctaaggtctctttttatagctccaatgaaactaggatccgctggaggccaacttgtaaagccaaacccgccttctgtcggggggtgcacctgacacactctgacaccagcgtacagtcactgtacttgtccggagcgcgaactcat

SEQ ID NO: 49443 - DNA, 382 bp, Zea mays
atgatctgcagcgcatgccaagcaggataacaagttgggtcccaacatccacaccagaacatcatgacgaccgacaggccacttgagctactccacatggatctattcggcccgattgcttacataagcatcggcgggagtaagtattgtcttgtaatagcggatgattattctcgcttcacttgggtattctttctgcaggaaaaatctcatacccaagagaccttaaagggattctggagacgagctcaaaatgagttccgcttaaggatcaagaaaataagaagcgacaacgggacggagttcaagaactctcaaatcgaaggctttcttgagggggagggccatcagcatgaattctcttctccctacatcccacaac

SEQ ID NO: 49444 - DNA, 286 bp, Zea mays
  unsure (1)..(286): unsure at all n locations
agcttcacnggtataggcctcttcgccttcatgttctagaggctctctcgaagggacgctttttcttctgaaagatccctgactttctgctccagctttcacctaggcgctanggatgtccacccgagcgaagcatcatatggtatcaagggtataaagtatcctgccatgagacaaaggggggaacattctcaaaggacctctctgaaaggcctgaaggcttttactccaggaggcggtattcttgttgctgggtggaaagtaacgaaggggggtctcaatgatt

SEQ ID NO: 49445 - DNA, 291 bp, Zea mays
  unsure (1)..(291): unsure at all n locations
accactaaagataaagaccttntttcctatatgtctgagtcaacgttgtaagtccccaataaggggcatgcttgtaattcctcacaggctgcgtcctgtgcctataaatagtgaacagtattccgttactgttcacgcattctggcatttgcaatcgcatctttcggaatacaacctttgtcaaggcataggtatcactgtattaatgaatctatatattagtgaatataaaatgatacatcagcgattcattcatccatttatacctttaatttacattacttataatgt

SEQ ID NO: 49446 - DNA, 350 bp, Zea mays
  unsure (1)..(350): unsure at all n locations
cactcacgcacacatttgcttgtgcgcggagatcataaacactaattgtcataccacaccagacttgtgcataccagtggacactgactattccaatatgtttcaactctgcccaaagggtacactttacccactattccggtcttcggtcttatggcaatgagacccgaatccaatcttttttttcctncacatcctaccttaacgttataccggaagattatgccatcccatgttcaaccggacaaaacttcccctccttatcttcagggctccccaccatataaccctgggtttggaccgaccattcaactgatgactgcctacagcttagtggtgtcttgcatgac

SEQ ID NO: 49447 - DNA, 439 bp, Zea mays
  unsure (1)..(439): unsure at all n locations
gcttcacctttacacaaaggatgtaaagggaactatatgatanttctctaccaagatcaaaagaaataagaccacatatgaaagtggtatgcccttctgatccaacggaaatgacagatgttgcttgatttcctcacagacaacaagaaattgttttaaggaaggagtccacagaagatcacacatcagtgtagtttcacaatggatcatgaccagatacttcgataccaacatgcgccaagcagcagaatcctgtgtgtacattcacaggaggctctcagtttcgctgcggtaccataagttcttaaccatgacaccattacaaaactggcaccaataatggatctcaagtaataagaacaatttgcgtacggataacatattgatataatctcataatggattatgacttctaactgtgatacaagcgtgcatcgag

SEQ ID NO: 49448 - DNA, 442 bp, Zea mays
agcttctaaatatgtcgaggtgactattgttgatggtgaattggcagttacgaaggtcgcagctaagcaacttcgtcgggtgcccatcattcctcggctttcaaggttgttcctcaacaaggaaatagctctgcatatgacgtggccaaagaatggtgtacgtctcgtcactgatccagacataatggtccatccgtccgacggtgatgcgtggaaggcatttgacgagttttatcccgaatttgcaaacgaccctaggagtgtacggcttggtctatcgacggacggattcacacctttcaatagcagtgcaagcccttactcgtgttggcctgtcttcattgtgccatatcatcttcctcctgagttggtcaataaagaagagatcatgttccttgcactagtcattcaggccccgagcatcacggccaagcttgaatat

SEQ ID NO: 49449 - DNA, 401 bp, Zea mays
cttcagctgaaaaccgattttttttatgccaccgccaattaactcaactgatgtacagggtggcagtttcactctaaaatatccttgaccttgctgggatcaactgcaatcccatttgtaaacaatacatgtcccagaaattggatttcctccagccaaaacacgcacttgctaaatttagcatataattgatgttccctcaagcgcgttaatacgattcgtaggtgctgagcatgctcctcttcattcttggaatatatcaagatatcatcaatgaagaccaccaaaaatttgtccaactcgggcataaataccgagttcattatatatgtgaagtgggcaggagcattcgtttatccaaaagacataaccaaatattccaataatccgtaccgcgtagt

SEQ ID NO: 49450 - DNA, 397 bp, Zea mays
  unsure (1)..(397): unsure at all n locations
agcttggaggcgtcaatagggagccttttgtttggtgtaagctcttcttcttttcttctggtgccttgaatgctacgggttgcacctcaggtgtggaggtgccaccttgcgccaagttgacaatgtgtttggagtctttgaccataagttcaaagcttacaaacttaccaatcacttcctcaggagacatttgctcatacctagaattctcacggattaattgcacttgagtggggttacgaaaaacaagggatcctacaataaccttgaccatttcatggtcatcccagctggtgctcccgaggttatggacttggttcaccatggccttgagccggtgttaggaacttgtactcaaatgctatgaattaagaacaaggcaacacanatgttaatg

SEQ ID NO: 49451 - DNA, 260 bp, Zea mays
  unsure (1)..(260): unsure at all n locations
gcaacaccaacttgtggggggccccagtttggagatgcccccggggaggaaaaccgactacctcgacatcccactcaaggacagcattaaaggatggcgcctggaatgggttattcgggaccacttctcttcccctactgtcagcgagacagccagatgttcgcactccgagctggacccaattccccacaaacctagaggtggctgatgcaagggctctacttgctgaggntggattgttgaaagaaaagggtctgact

SEQ ID NO: 49452 - DNA, 398 bp, Zea mays
  unsure (1)..(398): unsure at all n locations
agcttatgcaaagctcaccgnggcctatgttctggcagaagcccagcgacgatggcggaacggcgaagcaacagagggggcggcgctgcgggctgggggagtgcgagggcaaggagagagccaatgagggccacggcgaactgggggagtgcgcgaggctttacctattgctcggccgatgtgagcgagtcttgggggcgtgggcgtggtttgaccgcgcgcgaggcgcacgccatatgcgcggacgcggcggttgctggggaggggatggatctgacgggcgacacccgcgggtcagcaagagtgggttcacacgattgtgcaacggcactgacggggcgaccccaccggtcaaagagagagaggaggacaagcgggtgcgcgcgggccagcggggc

SEQ ID NO: 49453 - DNA, 449 bp, Zea mays
  unsure (1)..(449): unsure at all n locations
ctaattaaatcatgactgtgcctaagcagcgntattatattattgtatgtggatgngctgctacttcccacttcccttgatgagcaacaagcacctgcattgagtaatgcaagagtgagatgaaacatctcagcaagcgaataattttgacgagatatttaaaccacaaattgaattcatcaacattttaaaagagtcacaattaaaatcagaaatacttgtagatatggaactcagtagtcccactataaccaataccatctcatttcctcgaacaaccacaataggttctataacacttccctgcgtcaacaatacctgcaaatatcacttcaatgtatgcataggaatgcaatgtgtaggtactctatcttcatacctctgagagtataaaaccacatcatctgcaaatatcactctcatgaatgcatatgaatgcaatgcatatg

SEQ ID NO: 49454 - DNA, 311 bp, Zea mays
agcttgggaagattcttcattccaacatgttctagtttgcggagctagagccaacccaagttagtcttaactaccaagcaagtgtcgagttcagctctatcaaaatctaccaaggatagctgaccctcttacactcccttaaatgctattgaaatcatttcttcttctatagacagtaacagctttatcagtgaataaacagatgatgcccatttgacataattgggataccgagagcgaattgtaatctatagaatctactataaaaacattggaaatagtatggtcaggtgatatagcaattttaccca

SEQ ID NO: 49455 - DNA, 353 bp, Zea mays
  unsure (1)..(353): unsure at all n locations
aactgttatgtttgagaccaccttaattttattttattgattnttaaaanctgaatgcttccaaacaaaccttaaaccatcctgtatgcttttttacatcgcacgtacactcgcaaacgggtcgaatagagtagaatgcaatcagagacaaagcctaaaagattagaagagagattgaactaaactaacccacatgtgatatgttagcggggtttttatcgggtgacgggtataaattaagagaatatatccgtgcccataccaatatatatatatatatatataacaaatgacccaataaaatactcataggaaattgccatatctatactataattgaatattatccatca

SEQ ID NO: 49456 - DNA, 300 bp, Zea mays
  unsure (1)..(300): unsure at all n locations
agctnggtgccgacggagaactttaatccttgaaatcttgattggcgaactgcttgccgttgtcaactgttagctcggacggtactccgaaacggcaaacaatgttctggcagaaaaaatttttgggccgtcttttgatgtgaatgtgggaaacagccttcgcttcaatccatttggggaagtattcgactgcgtatgaaaggcgaacttaaggttcccctgagcggggggcaggggcccgacaatgttcaggccccagcgctggagaggccatgtatgggcaatcagctttgtatattg

SEQ ID NO: 49457 - DNA, 359 bp, Zea mays
gagctgcagcgggatggacccagacaacactttcttgtctagtagacgttgaccaagatggtgcattgctcgagctcgggagatatcacgccggagagcatcacagtgtaaatggcgatggtgtcgaggctcttgagttggcccaggatcgccaggagcggaccggagattctggtctcggcgaggcccaacatggtgaggttggagcagctgtcgatctccggaactggagagggaccggaactgcaatcacggcatgcggggatcacgattcacgaccggggaggcgcccgatgggctgccggcggggatcacagccgtgggcggtatcgcggtgcgggctgggtcaagggcggaca

SEQ ID NO: 49458 - DNA, 359 bp, Zea mays
  unsure (1)..(359): unsure at all n locations
gacaacatcggagttcttgcggattctagtcatggntcattttccgagcgcaatgagtatatcaacaacaggtacgaccaactacatgatgcagtcaaatataatcagttgcaggttgatctaatccaccaccactgggcgcggcttggatcgggagctgcttaagtatgaagattatgtctcccatgtgttaactatgtttgtcattgtctagtctagtgtgctatgtcgtgaagctatggtaatccgaaggtagtatgtgttaagtaacaagtctggcatgtcgtctcgttcgttattccgaagctactatgtgttaagtaccatgcagattatgtttgactatgtttgtagtaatc

SEQ ID NO: 49459 - DNA, 249 bp, Zea mays
cccatatcttcaactttaaccccaggatttcccataactattttaaaaattccgcataaccttatttacaaccccaggatttaaaaaattatcctttgaccaaagaagtccttactttttcatccccagctttctatagggctttccaaaaaaagggttcccaggaacctttcgtcaccggaaaattaacctcggtggggagatttttttaaatacccaacggtgaaaatttattgtaccaaggataat

SEQ ID NO: 49460 - DNA, 151 bp, Zea mays
agcttggctattggctaacgaagtgaccattttctaattaccaacatacaccacctttcaccatttgtggacacttgcacgacacacagctattgtgatacatcacaaggacatacaaccccatcagtgaagcacccgcacattttccaaa

SEQ ID NO: 49461 - DNA, 365 bp, Zea mays
ttcttcgttaattccgccgaagagcatcgctcctcactggtagccacatgatatagcatattcctgcagctcctctttcttagccttggataatatttgaccaattatattttgaaagttgaagcctttttcctccgaaatatctttggcaatttccttccctttttcaggcgctgtggccagggtttcttcggcagccgcagcagcttcttccgcagccatctccaagagtattttatcaatatcagagaatgtgctctccagattggtggcttcagccgttgtagcttccgcagttgtaacttcggtgggagcagcttcggtagctgcagcaacttcggcagctggtgttatttttgacgctg

SEQ ID NO: 49462 - DNA, 448 bp, Zea mays
cttcacgggctactggcggagctagcttattttctggttcgactagagggtggctggagtgggctggccactgtggtcgaagctctggcggcaatggcgggcggaattgagctcgccggagctaaggagagggggctggccggtgagggtgagtgcggtgcgaactgacgtgctcccggagaggctttataggcgcgggcggtcaccgacgatggcgtgggcgcgcggcggacttgaccggacgccagggctagcgcgcgcgcgggttgggcgagctctggcgtgccgaccagtgtcgaacacgtgtgcccgtgcgatctgcccaagttctggcgcgtgtggtcgctcatccgatcctgctctgccttggtcagtgcacaaaacatgttctcctccctactagctgccagtcttgtgtggaggccatatgattttcccactggttgcc

SEQ ID NO: 49463 - DNA, 427 bp, Zea mays
  unsure (1)..(427): unsure at all n locations
tgttcttgtgtcatattatataccgagagggattggctgtagattcaaagcaggtgttggaacttgctctctggtgcaaggggatccaacgggggtgtgtagtgacgtaaacagtgttctcgcacgagatggcaatagctctgttaatctagcctctcaagggcactgtgcggcggtatttataggtatctgagtgcccagcgtcctgtgttaaggacgcatgtaccctaagacacctacgttatccccgaaatattcccataaaataaggttacagaccgtaattacagggatgcctttacaaatcangcccgtaacgcgcaacggccacgcagggcctggtacaatgggtcggatcacacgtgggcctccatgctggacgaggtcgcaagatgggacgacctcgtcacatgtctttctctgatga

SEQ ID NO: 49464 - DNA, 451 bp, Zea mays
  unsure (1)..(451): unsure at all n locations
gcttgccaagccctcggacacggccggacttcttcggaagcccgagatcgacctcaccggacttcggtcttccgccgccgcgcgtggaccgagctatccagtgagtctccgcccaattgcttgcgctcatgtcttatctggcaccccgggaacctctgtgactcatccaattgctctatctcgccgtgaccaggccggactcctcgccgncgacgagcatcctcacctgcgcgcgtggaccgaccgactccggtcatctgcgacggcgacccacacaccgatgtgatccccgagacctcccctacgtcctcgaccacttcaccggagcaacctcaccgccggtaagcccctccgcccattcttccgncgcggttactgtttaaggtataataaagacctcaggttatgaattgtagattccgatgggttttctgaaacgtcagtgactcat

SEQ ID NO: 49465 - DNA, 423 bp, Zea mays
tcatattcttctaccattctagccagctggcctcttcataacacttacaactctttttcgctttggcccttcggcacccttacttaaccgttcatagtcagggttttcaaatttcagggcatccattactcggttcagccttcgtttcggtcgggtgccgaaggccacgatcatcaattgatcttctttcttagtatagttgcccagaatctcattgcacatagcttcaatcatttccaaccattcttggcaaggctctttgtaatgtttcttgaacttgaagtgatagggcagtcgaataagttcattcttcttcttttctcctttaagcttcggcatattccattcctttaacgtcggagatactctattggttaaatattcctgcaccaaatctctagtaccgacatgctcagacacaac

SEQ ID NO: 49466 - DNA, 462 bp, Zea mays
ttgtgtccaatccacccgtgactgatagcaatttttgtcttatagtgcgaccttctgccgaggaagtcagtactttggttgcttcgctcggcgcaattcctgatgatgaacggcaggtttatttcgaagtgcctctgaaccccagtgatgctgacataaatgacatgcttgatctattagctgaggattcgtccgatgctgctcctgatgatgccttggcagtggtgccccttccagaggttgatacaactttggatgtcccaaaacctgtcagtactcgttcgaggcgccctagccgaaccagccagcccgagccttctgctgatgaacaaaagaagaagagaagacgcctgcggcgagtatctagttctgatgaggacgccagtaccttacctcctgctgctgagaagtgcctgcaaccggccttgctgacactgatcccaatgggtgtgctccatctac

SEQ ID NO: 49467 - DNA, 410 bp, Zea mays
  unsure (1)..(410): unsure at all n locations
tgtgatattatcttattgtttgggtcagatctaatcatgtagtgtacaatgcatgtttgtttccaaatactactaaattaactataaacattaagctttaatgcagctatctgcaatttttatataatatgcttttccccggcctggccttttatcattcatatcctcccggctctaaacttgcagggacttgagcaacaactacttgcacgattcaattctttaccagctgccatcaaaccttacctatcttgaatgcgcccccaacctgtacatgttntgttcatgctatttgaatcttgagattngaatcccaagcgaacgcaggaacctggccgaaaacaacttctttggaaatcttccgtactccatatcncaattggcctcgcttgagtacctgtaagttacta

SEQ ID NO: 49468 - DNA, 421 bp, Zea mays
  unsure (1)..(421): unsure at all n locations
gcaaaagaagaggccggtctagatgcatgcttaattgctaagactagcatgggctggctgtggcagcgccgcttatcacatgtggggatgaagaaccttcacaagcttctaaagggagaacacgtgataggtttgactaacgtacaattcgaaatagatacaccttgtgcatcttgtcaagcaggtaaacaggtgggaggagcgcatcacagcaagaatgtgatgaccacttcaagacccctggagctgctgcatatggacctcttcggacccgtcgcctatctgagcatagggggaagtaagtatggtctagttattgtcgatgacttttcccgcttcacatgggtgttctttttgcaggataagtctgaaacccaagggaccctcaagcgcttcctcaggagagctcanaatgagtttg

SEQ ID NO: 49469 - DNA, 344 bp, Zea mays
gcttgtcaagcatattttgtttctccatcttttgatgggcccatcaacggtagtccacaaagatctatgaacccaaaagtcctttgtgttatcactaagtaaactcattacctttttaacacaaattggcatttttggttggctaagtccatgagaattaattgacaagctatgagtggaattgtaccaatgggacaatctttgcattgatgtcccttctttcggcatgtgtaacataggcgttttttaaatttgaaaatttcttctttccttgtttggtgcttgctacatgggtagtaaaaactttcttttctaacactatgcccttttgtttaaatggggac

SEQ ID NO: 49470 - DNA, 439 bp, Zea mays
  unsure (1)..(439): unsure at all n locations
agcttgcattcccatatctcaattcttttttatagagaaagaagaacaaaaaatcattccacaaacactcacatcgatgcagcccttataaagatgctccctccagaaccaccaccacccttctcattgctatccccaccgttggcgagaactgtgccattcatgaccaggtcctcagcaaacagccacacgatgccaccaccgtcaccaccatagtccttctcaacgctggtcgagccccctttgctcccgtagctccaggggtgttcgaggtcagaccatgcataggcatcgccgccccatgaatcctcctgcgtctgcccttccttgacgaagcagctggcgccacgaccaccgtgcccgccaccgtcgccgtgcgtncccgtgggaacgccactggtccggtctggcggatcaccagcgagcgcggtggtattca

SEQ ID NO: 49471 - DNA, 400 bp, Zea mays
  unsure (1)..(400): unsure at all n locations
attttgtctcttaagtcctaagnttatcaaagaacaactatacagagttggagaaggtgttgtacactgtgctaatggctttcaggaaactccggcattattttcaagcatataacataattgttccttcatcacagcctttgaaggacattatgagaaacagagaagctactgcaaggattggaaagtgggccgcagagcttaatgaattcagtattgactatgtgcataagtcctcaattcagtcctaggcgttagcagacttcattgctgattggacgccaagggctcaagaagaagaagcaaataaagatgccgaaacctggatggctcctcgggaaccttcggtgcaggtgcagctgctatcttagttgcacctttccaagtaaaaacatgttat

SEQ ID NO: 49472 - DNA, 443 bp, Zea mays
  unsure (1)..(443): unsure at all n locations
agcttctaaagggagaacacgtgatatgtctaactaatgttcaattcgaaaaagatagaccttgtgcagcttgtcaagcaaggaaacaggtgggaggctctcatcacaccaaaaatgtgatgacgacatcaagacccttggagatgctgcatatggacctttttggacctgtcgcctatctgagcatangagggaagaagtatggtttagttattggtgatgatttttcccgcttcacttgggtgttcttcttgcaggataagtctgaaacccaagggaccctcaagcgcttcctcaggagagctcaaaatgagtttgagctcanagtgaagaagataaggagcgacaacggatccgagttcaagaaccttcaagtggaggaagtcctttgagaggaanggatcaagcacgaagtcttcgctccctacacaccacagcaaaat

SEQ ID NO: 49473 - DNA, 363 bp, Zea mays
  unsure (1)..(363): unsure at all n locations
gagatcatcaaaaaagtgaatcctgtggcgtatgaactagctntgccatcagacagtgcgattcatcctgtgtttcatgtttcacagcttaaggcagcagtgggcactcgagttgttgtcaatgattcgcttccagatttatccattggcttgcaggtacctgaagaggttcttgcctctcgtctgcttcgaagaggcagtagggtgatacctcaagtgctggtcaggtggtctaactgtccggtgtccttgtccacctgtgaggatgaacaagccatcaagcaaagtttccctatggcgtccagcttgggacaagctgttattcaaggagagggggatgttagcatctctaacgctggtgaa

SEQ ID NO: 49474 - DNA, 312 bp, Zea mays
tactgaacagatgaacatcttcactgatcttccacacaagtaagcacatcttctcagataaaaaggaaaggggaataaaaagggccttccaactaaataactaatttcataacattaacaggtaaccaaggtgcgggaatacccacaccctgtgacaatcattaaaaagaccaaatccatataggttatctgacaagcgtaaagccaggatatgcaactaccttgctaactagactactaaagtagactgaataagactagattttatctaaacttcttacagacctccactgacatcatgggttaaattat

SEQ ID NO: 49475 - DNA, 94 bp, Zea mays
gcggaaccatacgctacgaaacacaagagccgcaaccaccgacaaggcccccgaaacacgggcaccaagtggaaacaaaaaaaaaccggccgga

SEQ ID NO: 49476 - DNA, 343 bp, Zea mays
agcttcacgaagaggaaccttcggctatcttatacaaacagcttcagccgaggaccacttctttctataagaccttcggcgacgaagcataatcccaacaattgcaaaatgtctatacctgaacataacgactgatgtggtggtggcaacacgtgcctcttacatgggagcccctgtactgggagggatgcatctagttcttcaccatcactaggagtaggtgccattttagatgaatctgtacaacaaaatcaacagtaagtgtagtaagtatgtgccattttagttgtaggttatcagatccaaacacacagcttaaattaggtcccccacgcccctgcgc

SEQ ID NO: 49477 - DNA, 435 bp, Zea mays
  unsure (1)..(435): unsure at all n locations
agcttgttgaaacaaagagacatattgtgtttgatatgggttatttgcttctcaaattggtattgcttttgccggcggcgacaacaagtgttgaaagggcattttctgcaatgagtttggtaaagactaaattgagaaacaagatgggtgaaagtcttttggatgattgccttgtacatacatcgagagagatattntcttccaagtgaatgaagaagatataattgaaacttttatggcgttgaggaagcgcagccagataagtagtattattgcaattcttatggttaaatgtatgcaattttcatgcttatttgttgagtgtcaaactctatatctatatatcaaattggttaccaaatttactatgaacatatatgtacattagatagaattctatatgaaaaatttggtacggcacactctatataaaaa

SEQ ID NO: 49478 - DNA, 329 bp, Zea mays
accactcatcgttgcggtgctcaagtggctcaagtctcccaccgcccacatacaaactgacgagaggattctgggctctcaaaaatcctactggagcacctgatgtctgtaccactggcaagcccactcattgctttaaaaatagtacagatcaactgcccgcctgctttattatatctgctgcaagagacaccgctcatcattgcaatgaacaagtgggtcatgtcttcactattcataatccaactgtctgaagtgttgcagaggtttcacacgctaactgacgacactgattatggtatcactaccacgcgacagcattgatcgta

SEQ ID NO: 49479 - DNA, 300 bp, Zea mays
taacttgacttataataaattcatttgtcctttcattcatctcggataaaaacagtctgtgatgactcacgatcaggtggtaccttcgagggatgcgtataataaagtagaagatggtagcaaatggccaacattttgataaaacgtaaagatgcgtcgatccgcctggcctgtcttgtccgcagttccgagagggtgtgtgcgcttactggcccgaacgatatgtcgcaaactggttgtaaatttataatgacatccgcctggatctctggatggcgtggttaccactcctttaggcta

SEQ ID NO: 49480 - DNA, 440 bp, Zea mays
  unsure (1)..(440): unsure at all n locations
agcttcctctcccatttcagttcaagagtgttgtcttacccatcccgctcttggttgtttctttttcctctatcgngttgcaagtcttgccttaacttgatcttttggtgtgcttttgcctgttacttcccttatctttataataactagatcttttcatgatgcttatcttatgcctacccttttgaaatatcatcttttccatctcgatttgagaatggtgttctacctatcctgacctgngttgcattctctcccttgctagttacaatccttgctttagcttcatcctttattatgctcatgccactatcctgcatgtcttatcggtccccttgcctttcgatggccttagagtagtttcccttggtaaggaaagaccaccatctaactaacaataacgtntagcaacgagatgtnttgtgatgtgtgctcatgaa

SEQ ID NO: 49481 - DNA, 374 bp, Zea mays
  unsure (1)..(374): unsure at all n locations
gcttctnagggagaacatgtgataggtttaactaacgtgctattctaaaaagatagaccttgtgcagcttgtcaagcaggtaaacaagtgggaggagcgcatcacggcaagaatgtgatgaccacttcaagacccctggagttgctgcatatggacctcttcggacctgtcgcctacctaagcataggagggagtaagtatggtttagttattgttgatgacttttcccgcttcacttgggtgttctttttgcaggataagtctgaaacccaagggaccctcaagcgcttcctcangagagctcanaatgaagttgagctcaaggtgaagaagataatgagcgacaacgggtccgagttcaagaaccttcaagt

SEQ ID NO: 49482 - DNA, 322 bp, Zea mays
  unsure (1)..(322): unsure at all n locations
aagaacttgtgcagcttgtcaagcaaggaaacaagtgggaggagcgcatcacaacaagaatgtgatgaccacttcaagacccctggagctgctgcatatggacctcttctgacctgtcgcctatctgagcataagagggagtaagtatggtgtagctattgttgatgacttttcccgcttcactcgggtattcttnttgcaggataagtctgaaacccaagggaccctcaagcgctttctcaagagagctcataatgagtttgagctcaaagtgaagaagataaagagcgacaacgggtccgaattcaagaaccttcaagtg

SEQ ID NO: 49483 - DNA, 199 bp, Zea mays
  unsure (1)..(199): unsure at all n locations
cccccacccccnnnaacacantcaacaagaccatacggaagcaatttcaaaaacacaaaaccccggggggcgaaaaagcccagccaaaaaagcggacgtcaaagccctgaggacgcccaaagaaacaaagggcagagccccaaaaacgaatcgcccgccaaacaagaacggggaaaagacagcgcggcacacggccccc

SEQ ID NO: 49484 - DNA, 398 bp, Zea mays
agactttgtgagggaattccagcgctctttgtatttattaatgttgtggaaccaccgggatagaaatcaattcctttgtatagattggcaagccattcatactataagcaaaataaagcgaaacatggaagacaggagtagattgttactctttttctgatagtacagtgttcgacttgtaactcttaactgtagtctaaactataaattctgacatccaaacaataaaattgaattgacatctcatttcaatactatgggtgatttgatattggaccaattcaatttcatgccctctaatatcgacatccaaacggagcatgcgttatttctgatcacgacaaaagtttgccaccacatatcactgtaaataagaaaattacattatagataacgct

SEQ ID NO: 49485 - DNA, 434 bp, Zea mays
tatagccatattccctacaaccaacttaatattcctgtattattatgttcacacgccaagctgcttggatttggatatggctgaatctgtgttgcaagaagtggcggtgtctgctcgaagtcaagtgctgacaggctgccaggctcaaggtatcaaagttgcttgcaacctgccagagagatccatgaagcaaaacgtttaccgggatggtattcgactccaacagatcgtctgtgacttcctatttgtttcggcgaagtactctcctgcttggggctctgttgacatctctttcaagctgactaagaacagcattggggaaaaccttcacctcatagaccttcaacttaggtatgctgggcatgctagtctgcagcatacattcattctgaactgaaagcatgaggtgcgaagctcaagcactctcgcgttat

SEQ ID NO: 49486 - DNA, 377 bp, Zea mays
  unsure (1)..(377): unsure at all n locations
aaacacatatgcgcggaccgttcgggcccttgtggcggatcatccccgacactagggtgagcctcggacagggacactgcaaaaactcaagttaacactatggaccgtccgatggagaagcgagcactgcccgaaaccaagcgcgaactgtccggcctcaggcgcggaccgtccggtcgttgaaaacccagaaaaaacctgaaggtgatgggttcggtaaaattcatttttagcatcctcgcggactgtccggggtgcatggtcggaccgtccgcgactgctttatctgagatctgacaacacattaaatgctctatagctgtngatatactcgttactgctgaaccgtgcgatttcagcccgtgatgtgcacgggc

SEQ ID NO: 49487 - DNA, 415 bp, Zea mays
ccacatgtgctatacagcgatgcttcttccattctatgctaatcttaggaattaaggctgcatctagaccagccttctctcttgcaaaatcaactaagaacagcttgtcggctagtacacgcttcacagctaatgaaccatcactttttctatagacagacacatgtacatttgtgaataaaccagtatgtcccatattacaaagttgactcacagacaacaagttatattcaagcgacttaactaagaacacacttgaactaaagggctcggatgaaatagcaatattcctaaccctttaccttgcctggttccatacccaatatgatgaacttggcatccttgtcttgcgtatgagagaacaccgcttttcccccgtggggttgcgacccgcgggatatccgcttagccccga

SEQ ID NO: 49488 - DNA, 379 bp, Zea mays
gcaaataacaaagaatgctgtggttgcttcacacctactcaactggttatataccgctgccagtaagaatgcgaagcgccctaaaatttacaccaggcggacaccgctcgcactctctggatggtggaccgcacagaccgaacagtaactctgcaaggtggggccgctatacgctgggagattgaatcggttctcgacaacgagctcacggaaggtgttttttagaccttcggcgctccgaagcttaagagactttcttcacggatcaagctcgttacgaaaaatgatctatcaccgcgaaaggggctactgttgggtctatgcttcgtcgccgaaggtcttacatgaagaagtggtcttcggctgaagctgtttatat

SEQ ID NO: 49489 - DNA, 381 bp, Zea mays
  unsure (1)..(381): unsure at all n locations
agctacctatgggcttggatcgagcggaggaagacaaggaatggttctgccatggtggttgtcctcnggcggctctggcgggtcgcggagaggtcgccggagctatgggcgagctccggggagtttggcacggtgcaaaagatgcaacggggaagacagccgggctctgggacgggctttatagccgtggcgcgggcgtggtcactagcggccgcgggcgcgcggtggttcgcgcacgggcgtgctctgagcgcgcccccgagtgtcagcccgcgtcnaacacgtgggagctngcttctgccatggttcaacggcgggtttgagcaccatagcgtgcgtatttttccaaaaccactgtgtacgggctcttccctgtccata

SEQ ID NO: 49490 - DNA, 288 bp, Zea mays
tcataaatactaaataaatcatggttggggcccacaatcttggaactattttttattaaatgctagatgaatttgggagtctagtaaaactggtcccattaatttatcatttttctagaattttctaatatatatttctaaagccttggccgacaaaagaaaaacccacaaatgatgtaacagtgaatgtgctgaaaccagcccgagccggcccatgaaccgggaaacgcttatagaagacacggttcgatcttctcggatatacgataacttgattgagtggagatc

SEQ ID NO: 49491 - DNA, 350 bp, Zea mays
agcatgcaaacatttatattctactacatgtcatcctcatactgttggtcaaactgaaggtgtgaatagaactcttgctactatgttaagggccgctctcaagaaaaaatttaagatgtgggaggactggttgccccatgttgaatttgcttataaacgatcattgcattctactaccaaggatgtgcccattttcaaattgtatatgtgtttgtcgccctcctgcttctattggattaaatgcgcttgccatcttctgaagaaactaaatttgatgctactaggcgtgctgaattgatgtaaaactgcatgaactactaaagaaacatagagcgtataaatgcttcata

SEQ ID NO: 49492 - DNA, 147 bp, Zea mays
cacgaaaaattacccgaattggacaacgtgctgcatgctgcattaacggcctccagcgaaactcctggcattaatatcccagcttaccatataattgttccctcgtcacagcttttaatgatattatgacgaacacataaactactg

SEQ ID NO: 49493 - DNA, 409 bp, Zea mays
agcgactgcgaaagattattttcttagtggaagcctctgtctttgccgaagactccaatttcctcttaatatacctatgactaggtttgaaataaactcgaaaacacattagtcatagcatataaaagagatatgatcaaaagtatattaatgagctatgtgtgcaatctaacaaaagaagttgcgagaatcaagaatattgagctcatgcctaagtttggtaaaagtttgttcatcaagaggcttggtagagatatcggctaattgatctctattgttaatgtaagaaaactcgatatcccccttttgttggtgatccctaagaaaatgataccgaatggctatgtgtttagtgcggctatgctcgacaggattgtccgccatcttgatagcactctcattatcacat

SEQ ID NO: 49494 - DNA, 333 bp, Zea mays
  unsure (1)..(333): unsure at all n locations
taggtaacaccatggnaagccacataagctacaaatatgttaatttctcaagcctatctaccggtgcacagggttcaccaaaatacataccttcgacttgggagtatcccctggccacaagttgaactctgtttcttgtcaccacaccatgctcatctcgcttggtgccgaagaaccatctggttcctacaacattttgcgttttgacgtggaactaaatgccatacctcgattctcctgaaattgttgagcttctcttgcatctgcaccacccaatacgaatcttgaagtgcttcctctatcctatgcgcgtcaatagaggaaacaaaatga

SEQ ID NO: 49495 - DNA, 314 bp, Zea mays
  unsure (1)..(314): unsure at all n locations
gacatctgtcttcctgacgaggtatgtgtgccttataatgggagtgacagccatcttgacaacctaataaacttcgttnttccaaatcttaacgaagatatgtttgattcgacctacatcacttcaagggcgatactgtcaacacggaatgactgggtggatatgataaatgctaagatgatcgatccgtttcaaggggagcatatggtgtaccatattttcgatagcgtcatggatgatccacataactactaccctcctgagttctaaacacactgacgcctaatgggctggcaccacatggtttgaagctc

SEQ ID NO: 49496 - DNA, 385 bp, Zea mays
  unsure (1)..(385): unsure at all n locations
atgaagaatcttcatcccaacatgggcgagtttgctgtgtcttaaccaaaccatgttagtcttatccattaagcaagtgtcgagttcagctctatcacaatctacctagtatagctgacccttctaacactctcttaaatgctattgaagcatcacttcttctatagacagtgacacctacatcagcgaatagacagttgtagcccatttgacataattgggaaacagaaagcaagctgtaatctaaagaatctacaacaaaaacattggaaatacaatgggcaggagatatagcaattntactcaatcctttgaccaaaccctgatttccatccccgaatgtgatagctcgctggggatcttgcggtttctatatgaggagaac

SEQ ID NO: 49497 - DNA, 348 bp, Zea mays
tgcatgctgatgagtgcactatacatataatcagtgaaaaaatctttacatacagatttgttatgggtgtcacgccaaaatttgaagctattcttaccagaatgcttcatgggtctgcaagactgactatgacagaggctgtaattgatttgcttgctgaggagacctcgctctcatttatgtgtgtgtctcatactcatagggtccataatgtggtgggatcttctcacacaaattcttacaagtctggtggaaaagggtggtactttgagccttgcaagcatcgcaacatagaaaacacatcggtctaatcaatgttttcttaagcatccagagaagttagctatg

SEQ ID NO: 49498 - DNA, 382 bp, Zea mays
cgtgtaagtatcttatccccacatgtgctaagctgctatgtcacagccagcccatgctagttttagctattaagcatgcatctagaccggcttctcttttcgctaaaacaactaaataaaggttgccgtgtagtacacccttaaaagctagtgaaccatgacttcctctaaagacagacacatctacatttgtgaatagactggtataccccatattacataattgactaacagataggtaattatattcaagtgactcaactaagaacacattagatatggagggctcatatagataatgcaactttacctcaaccttttaacctggcttgattcctatcaccgaatacaattgaattttgcgactccttattcttgacgt

SEQ ID NO: 49499 - DNA, 394 bp, Zea mays
  unsure (1)..(394): unsure at all n locations
taatagtaccaagtttgtgcgacacttttgactgccatgacgaaggatttcgccatgactgcagtgttgcccccatatgaagatattgttgcctcgtagctcattaaaaactgctttgggtctgagtgcccatcatacataagaagctgaggtggcttgtatgatgggggccatggggtagcctgcaactctactgctagaggagaagcatcatcaaaagcaaaattaccatgatggaaatcatcgtaccattcatcatcgttgtgcgaattgtcttgacgaagctctctgtattgaggccttcggtcttggtcatcttaaatgagatgacacattntcttagcggcctcatcaatctttctcttgagatcagtgagacggagcatcttttctt

SEQ ID NO: 49500 - DNA, 309 bp, Zea mays
atctgtggagaatatgggtgtgagaagaatttgagcatcatgagaattatgtgcagagtaagatgaagaagtctatataatttaaaattagaaagagatggatctgtactcgttcgacttaccgattttgtattcacggctaattttagatagtttttatcaaatcgattctcataaaagtagactgaagccagacgtttgagagtttacaacagctggggtcagaagtgtaaataaattgaaacatacaccccataagttgaaacaaacacccctttgtcatcggttgaatattttgtcttgagcgtc

SEQ ID NO: 49501 - DNA, 417 bp, Zea mays
  unsure (1)..(417): unsure at all n locations
aaaaaatactangtcactgatatatccattaagagatatactctttatgtccatttgatataacttgatgtcatgagcacatgcatatgccaataatattcttattgcttccaatctttgtaccagtgcatatgtttctccaaagtcaaggccttcaacttgagtataaccttgagccaatagcctcgattttttcttactataataccatcttcacttaatttgttcttgaagacccacttagtgcaaataacattattcttcttggcctctcaactaattcccaaactttatttataagcaaatggcaagctcttcatgcatggactaacttaataaatattcaaaatgcttctcaaatcttaattggctcaatggttgactgttgtagcgaggacataacgaccnctcgatcac

SEQ ID NO: 49502 - DNA, 441 bp, Zea mays
tgcggacatttaattctataataacgcatccccttttgcggccgaaggcaacggataaccggagcgcctgacgcgagcgcaacaaatggaacgccgacgtccataaattcttcacgacgccggccaacttccgatccgcctcgcagaggagaggttgatccttccgtcagtgagtccggtcagggtgcgggtccttgcccaccagccaactgagcctgtagtagaagcgtgttcccacctttaaacacctgcaattggaacccgtgccaaccttctctccatacttctagactatgttcgacattacatggttgacatacaacatctccacgtatgcgtcatgtataaacactttaacactaataatggctggaactaaactagcacttaaatgggtaaaaaaatagcaccaacagtaatcatcttacatatacatataca

SEQ ID NO: 49503 - DNA, 386 bp, Zea mays
aattaagcaagtgtcgagttcagctctatcaaaatctaccaagtatagctgaccctctaacactcccttaaatgctattgaatcatcacttcttctaaagacagtaacacctacatcagtaaatagacagttgtagcccatttgacataattgggatacggaaagcaaattgtaatctaaagaatctacaagaaaaacattggaaatagtatggtcaggtgatatagcaatcttacccaatcctttgaccaaaccttgatttccatccccaaatgtgataagctcgtggggatcttggttttctcatatgaagagaacatctttttcttccctgtcatatggtttgtgcactcgctgtcgagtattcaacttgagccccccgatgc

SEQ ID NO: 49504 - DNA, 453 bp, Zea mays
  unsure (1)..(453): unsure at all n locations
gcttgaaatataacagacaacgccaagaattcattttttctgggaaaaatcaccatataactagcttttgatgaagcaaatgatgataactgcttggcaagaacaaaacaatactggtatccgcctatgatccatcttcaacaacagatattactgctctcatacgaagaaatcatcaggagtagagaggatacaacaggtctctacaagatcttcacatttctataacaaattatcatcactagtagtctagtggtcaagacatatgactcttctggctccgaggaccaaggacaagaataatgcccaattancttcatgctctgcggngatgtgggatttcatgtctatntttctactcttcttacttctgggatatctgagatagaatgtggtaagcatactaagagatagaatacaatgtagttccgctacataacctntagatatatg

SEQ ID NO: 49505 - DNA, 389 bp, Zea mays
ttcttatcaaagcagcagcatttaccagcacagcttctgcataccatacccgtaacatggccatttgcatgctggggactagacatgattggacccttcaagaaagctcagggaggatatacttacgtgttggtcgccattgacaaatttaccaaatggatagaatacaaatctattgcttctctaacttcagccaacgcggtggaattcatacaagatataatattcaggtttgggataccgaatagcatcataaccgacctgggatctaacttcattagctctgaattctttgatttctgcgaacaacggagcatccagatcaaatatgtgttagtagcacattcaagagccaacggtcaggtagaaaaggcttatggaatgatact

SEQ ID NO: 49506 - DNA, 413 bp, Zea mays
  unsure (1)..(413): unsure at all n locations
tctcttcttgggtatagctcaacctgacggttctgagttcagtgttgaggattgccttatgttgggttagccaattcatacnccagaattacattctattatcctgggcgcctttctagaaacanatcgatggtgtaagcagggaagagtatcccgtcccgggcccattatttacttggcagctccatagagccaccttctttagtataaatgtgtcccccaggtgaatgtattttaaatccctcctttgattcatggtatgcaatatgatgttgttccacaaatgtcttgctaataaatgtatgtgaagcaccagaatcaaaaagaataattgctgggtgactggccacgggaaacgtacccatcatcaccggctcttccttctggtgtagtggcactcgagtataatacac

SEQ ID NO: 49507 - DNA, 209 bp, Zea mays
cggccatacccaccactacgtgccctcgtaccatacagaaacacaagtgagatatctgtaagcaaatatcgcaacaaaaatagtccgaagcacggcatgcatactgcttccgatcactccgcttatattccagaatacgtaggcaaccactctgcggattctgatgctttcgcgaagccactccaagcatcttggtagcagctcccacc

SEQ ID NO: 49508 - DNA, 193 bp, Zea mays
acatctctccccccttttttcaaaaaccaaaattttctctatcccttaaacttatacctaattttaaacaacacttctttaataacatattcctttcaaatcctacaaataatattcaacttactaaatcataaataatctataaatcaattctaacttacttctgttcctacaattataattttatctattt

SEQ ID NO: 49509 - DNA, 445 bp, Zea mays
cagctgttcagcgtggatgttgtctgtggagtcgagaatccattccgaggttcgatgaaggcctagcttaacctcttgccgtaccactattaccttctgccacttctcccacctctcggggagaccatcgccttcaagcatcctcacaacctccgacatcttaggacgttccatggggttgctctgagtgcagaggagcgccacctggatcagagattccacctcgacatcgatgtagttgtggtctagatcttcgtcgaccagactctccagtttcttctccttgagcaaccccttgacctaagtaaagcaattgaacatggtattatattgctagccaaatcatgtcatatcaaaagaatgccatgaaataaatcctaacaggcttaaagcatattctaacaaatatatgacgactctcagagacacgagcatgtcactctac

SEQ ID NO: 49510 - DNA, 352 bp, Zea mays
  unsure (1)..(352): unsure at all n locations
acagcttcatctgaggatcacttctttctataagaccttccgcgacgaaacataaacccaacactcggttatctcttctattgagcctcttcaggtagaagaggccttgcatgatcctgactangtgttggccatgccggaagagctcaacaacttcaagaagaataatatttggagcctggtgccacgtccaaagcaaaatgttgtgggaaccaagtgggtgttcacaataagcagatgacacatggtggtgacaagatacaggctcgacttgtggcgaaatttatgcccacagtgcaggtttggatttccaagagactttctcttctgtggctatgctagagtctattcg

SEQ ID NO: 49511 - DNA, 301 bp, Zea mays
  unsure (1)..(301): unsure at all n locations
gcaacaagcttcttggaagcacgcagatcctttatggtggaaaccttggtcgataacagntgtccaagtcgcagaacttcatcttgggatatctgcagctcatggcggtgatgatctangtcagacatggtgaagtggtggctcctctccaagatggtcaaagagttactaatgtcacggtacagcctgtccaaattgtcacaaaaggcaacgagtgctctcttctcctcctaccaacaaaaagcaacattcattactgaaagtcccttgaggggggtggataggccgaatatgaaaacta

SEQ ID NO: 49512 - DNA, 58 bp, Zea mays
atgctacagctcttgtaagtggttggaagctgagaaactcggttgacttgaatgtggg

SEQ ID NO: 49513 - DNA, 333 bp, Zea mays
ttgcaaaatgagggagagagatgggctccaaagcctaagacctttctagaaaacgcaaaggaaagggcaaacacacacactgttgattgttttgacttacagtcagggacatatgaggtattccttcaagctggtactacttctgacggcgagtcacaagagtcgaggaagcatgtgggtgtccttaatgacttgtcatgtacttgtggcgcacccaggcaataccattttccatgttctcatctaatcgcagctgctcgagctcgtaactttgacttatagaggaggatacctcaagagtttactattgataaactagtgttgacttggagt

SEQ ID NO: 49514 - DNA, 456 bp, Zea mays
  unsure (1)..(456): unsure at all n locations
atcttatgccaatgtctaggattatcttatatttttctttttatcaaattaatcaatgtcctattgctagactcggcctgaccattggcctgagcataatatggagatgaattaagcagcttaattttgtataattcagcaaattcacgtaccttctttgacataaaagaagtaccttgatctgtagttaaggtctggggaatgccgaatctatgaataatatgctcagttataaactcgattacctccttgtgtgtcatgttctttagagcaacgactttagtccatttggtgaagtagtcagtggcaactaacacaaaccgatgcccctttgatgatgaaggatgaatatctccaataaagtctaatcctcatcctctgaacgaccaatgctngataatangatgtaattcggctgcacggaccaactgtaggtcgccgaattctgacacactt

SEQ ID NO: 49515 - DNA, 428 bp, Zea mays
  unsure (1)..(428): unsure at all n locations
tccagtttttgccttcttctttagatgaaaagcttcaggagaacaagttatttagctccccagaaatctttcaagaaattcacaattaaatggccagagtgcgctctaccgcttgagttgagcgtgagggaggtgaaaccgaatgagcggagactgttcctatcttctgagcaatgcgacgatccggattggcgaccttggaaggaatccccactgccgagacagaatatactattgccgatacacaacaagttgcttgcgaagtggaggaacgagatattgatgaagctgattccgatgatgattaccatatcgccgtaccgagcaagcnccgncattttgacttcggaaagttcacttgcttcaacgctgatttcttcaaaatggtgaagtcgggctatttagtgacaatgagaagaagctacttc

SEQ ID NO: 49516 - DNA, 416 bp, Zea mays
  unsure (1)..(416): unsure at all n locations
cccatattagtcttagcaattaagtaagtatcgagttcagctctattaaaatcaactaagtatagctgaccctctaataatcccttaaatgctactgaatcatcacttcttctaaagacagtaacatctatatccgtaaaaagacagntgtaacctatnttgcataattgagaaactgaaagcaagttgtcatctaaagaatctacaagaaaaacattggaaatggaatggtcaggtgatataacaattttaccaagttctttgaacaaaccttgatttccatccccgaatgtgatagctctttggggatcttcgtttttctcgtaggtggagaacatacttttatcccctgtcatgtggntggtgcatnctctatcaatgatccaactctgagccccgatgcataaacctacaaa

SEQ ID NO: 49517 - DNA, 438 bp, Zea mays
tcatctcaacgcgcgcaacataacttattacaaaacttggaatgtagaaacattcccaaaagttcatacataaacatcccatcctccaaaagctgcaacaattttcaactaacaaaagttaaaagtatcgatgacctctcctgcaaaaacataagaataaaactctgagtagtcacttggcctaatctagctttcatttaccaactttagtttcactgtttaactacgatgcatagcagtgatccagtctttatttcgaagtaacgacaatctaaatcgattaatacccaactgaggatctctcattacaacccttgcatatgtcaactcgcctttggggtttttaagactaagacgggttcacgcgacccgagaccaccaaaatgggacggaaggagtattatattatgccatttcaacacatgtgacaccgataag

SEQ ID NO: 49518 - DNA, 323 bp, Zea mays
  unsure (1)..(323): unsure at all n locations
tgcaaacttatacatgangatattctacaagtgattagttatgtattaaaaacacaannaccttaataagggaagaaccattgtacaaatgtgttcattttgatgtacacataatgcgcttgttaattcaaatttttctgtaagcttttttgaaatcaagatgtgggaagaaactaaatattgtcttcttcggtctttatcctaacaaggctcatgatatattatacaatcaaattaacctctacttccaatgatatactttgcactcaactttggcaattattcctcccctttctgtggaatattctttatttaattctccc

SEQ ID NO: 49519 - DNA, 444 bp, Zea mays
ggcacctctgtacgttggtccttttcctattctcgaacaatgtggtccactggcatactgactccaattaccgatacattgtctgccgtgcacaatgagttccacgtatcttaattgaagaagtatcttcgggttccagatcaaaccgttgaaatgatggatgttgtcttataaccagacttgacatattcagaacatcctattcgagtcttggatcaaaaggacaggattacccgaaggagaactctcatgttttatatgacacaatggaaccaacacacggaagatgaagctacatgggaaactcaagaacttttagaaaagaatctcccaagcttcttagcttcatgtaaactcgaaaatatgtacactcgttgtaacaaaagaatgaacctcataacacccctgtcttgaccaaaaataatgaaagaaatatgtgacacg

SEQ ID NO: 49520 - DNA, 303 bp, Zea mays
tcctaatattgggttttgagtgggtttcttatttaattctaaacttcagaaagaaatacagaagctatgggttctatgatttttctccgatagctcataaatttctgaatctagcaaaattggtttgaacatttttggatgattattctgcaaggtatgcatttacttagctatctgttataacaaaagaaaagaaattcgaaaatggaaaaagaaaacgtgtttatgccgaggcccctggggtttttccttttcttttctcacagaacagcccttggtccactattggcttgagtcactgac

SEQ ID NO: 49521 - DNA, 402 bp, Zea mays
gacacttaaaactcaagctttaagggagagcacattctacgactaacaaatgttcattttgagaaagacaggatttgtagcgcatgccaagcaggaaagcaagttgggtcccatcatccacacaagaacatcatgactagtgacaggccactggagctcctacacatggacctattcggcccgatcgcttacataagcatcggcgggagtaagtattgtctagttattgtggatgattattctcgcttcacttgggtgttctttctgtaggaaaaatctcatacctaagagaccttaaagggattcttgagacgagctcaaaatgagttccgcttaaggatcaaaaaaattaaaagcgacaatgggacggaagttaagaactctcaaattgaaggcttcttg

SEQ ID NO: 49522 - DNA, 377 bp, Zea mays
tccagagcgactgagctgcagcttgaacacaactggagtgaactgggcctttttttcaccagaaaccttcgaagcgagaagtaaattgcaacgcaccgaaaaatgaaatgcagagccagcttcgtcgaagaaattgaaccgcgtcccgaacatcttcaaatatatgatatatcggcgacatgctttgggaaaagtatcgagaaaaattttgagctaccacttgcaagaattgaatatcaaggggcctatgttaatggacgaacaaaaatttcttctgctcccaacacaaaattatcttgtcgggaggtaaagatgggtttgactcaactgttatccttacaaaaaactgcgtagctgcgtaacctgagtggaataac

SEQ ID NO: 49523 - DNA, 452 bp, Zea mays
ttacgaagaggaacccttcgctatcttatacaaacagcttcatcctaggaccacttctctctataagaccttcgacgacgaagcatagacccaacagtagcccctttcgcggcgctagatcgttttacgtaacgagcttgatccgtgaaaaaagtttcttaggcttcggagcgccgaaggtctcataaacaccttccctgagctcgttgtcgagaaacgattcaatctccctgcgcgtagcggccccaccttgcagagttactgttcggtcactgcggtccaccgtacagcgagtgcgagcgggtgtccgcctggtgtaaaacttctggcgcttcgccttcttacctgcagcactatataaacagacgagtttgtgtgaagttaccacagcatttactgctatttgcactcgcttgctgcccaaatttataaccgtcgacgaagcttatctg

SEQ ID NO: 49524 - DNA, 322 bp, Zea mays
cattcatacagtcacaggagcaagcgccctgggtatgcaaaattaattttcagtgaaaaataacggttctgaaagcacttgccattcaccacaataacaaaccctttttaatatcaggtgagctgaagtcaactaaggggtatgagaaatgggctaaaaagatctcacggatggagccaccaacaaattcgctagagaagagagcgaagtaagtttcaatcccaccaacacatgagggggtaaatccttactattaatagctcctcaattccttcttcaaacagcccttagggtcagggtacattctgtaacattgcttgtt

SEQ ID NO: 49525 - DNA, 406 bp, Zea mays
  unsure (1)..(406): unsure at all n locations
acactataaaaactccgcttgccacggccaggatgttgcagcactactttcttttcaacttncacaagccgacgcggaggatgaggctctgctactggcacacgcaattatacacccatatacagcggcaccggccgcagcggcactcctacaccttgatgagtcgaaagcacgcgcttttctctgcgaccgctccatacaagacatgatcgaaggatggtgcctcgacacccgcgccactcatcacatgaccggccgacgggagttctttaccgagcttgactctagcgtccgatgcttcgtcaagttggggacgccttctgcgtatagatcaagggcgccggctcagtcgtcttcaccggcgcgtctggtgagcacaagctgctcaccggagtctactacatcc

SEQ ID NO: 49526 - DNA, 462 bp, Zea mays
  unsure (1)..(462): unsure at all n locations
agcttgcttctgccatggttcaacggcggtctatatcaccatagcgngcgtatcttggcaaagtcactgtgtacggtcgcttctctgctccaaatcctacctttttgctgtgagttccaagtcgagatatggtctgggtagggagatatagaggggagaagtttgctgtatcagctatgtccgaaccgagacaaaagtggtgtcaagtcgtgtctagcgttctagggtaggtgtcatctctttccagggtgttctatggttaatttggcgccatcttgtcaattgggtcgaagggttttgaaaattggattaaggtgaacatgtggagtctttgtgcaagggttagtttttgtacctangcaaaaactgaattctcccttgtgctgaaccttatgtgaactctttatggctgttcttgaaactttttgggggtacttcttaccattaaattgaggtattaag

SEQ ID NO: 49527 - DNA, 451 bp, Zea mays
tctacttgtgaaggtcttgctgaagcattgaaggtattaacaagttaatgttgcttggattctttttttcagatgatgaggtcttcgtggcccaaagttaccagttaaaagattttgttcacctttcaagatctcaacatttatcatattttgaattttgttgttgtgagagcatgatgtccacatcctgctcttgtttgccatttttcctactattcgctattccattggtttggtttgttgttaaccagctctctatgtaaaaagttgttttatagttcgacccggcagcaaacatctatttgtatctatacttgcatttgaaaatacaccccatattttcttatattgttggttaactacctctcatagctggtaaattactctgcacgtacatgataattgttccaatatatgccacaatgtgatttggcaaactattgtttgactg

SEQ ID NO: 49528 - DNA, 386 bp, Zea mays
cgtgaagattcttcatcccaacatgggctaatcggcgatgttatagccaacccatattagtcttaacaattaagcaagtatcgagtttagctctattgaaatcaactaagtatagctgaccctctaatactcccttaaatgctactgaatcatcacttcttctaaagacagtaacacctatatccgtaagaagacaattgtagcccattttgcataattaacaaactgaaagcaagttgtaatctaaagaatctacaagaaaaacattggaaatagaatggtcaggtgatatcgcaatttgaccaagtcctttgaccaaaccttgatttccatccccaaatgtgatagctctctcgggatcttgcgttttctcatatgacgagaac

SEQ ID NO: 49529 - DNA, 394 bp, Zea mays
  unsure (1)..(394): unsure at all n locations
cacctcatgagaaaggatgcagctagcgacgtcggctattggacatgttatatatgaaaaaatattacctataagagtattaacatgatttaaaataaaaaatttattgcagaagtcaatatatatgaagaaactagtgtgctaaaaaatcatccttgccagtattatatccctacaggtgcgggtatctaagacaccgtagatgtttctctctctacacacgtgatggtagcacacacgcgccatggtatctttattcttacatagattgtggtgctacgggggtaatcancaacgaacttaaggagaaagaatgaacatgttgctgctgatggtacttgaaaatgtgcgactacttctactacataactgtgctcttcttccgttggttatg

SEQ ID NO: 49530 - DNA, 409 bp, Zea mays
  unsure (1)..(409): unsure at all n locations
cataaaatggtacatcagtacaacatgtatgaactttttgcctagtgaatgcattctaggtgtgacaaacacatgatatgcaaatgcttatgatgttatgctcaagttttagtggcagtaacaccaggggtgttacaaaatgagtggagtaattttaaattagtaagcttaaatgaagtgtactatattttgctagcatgagtaaatttgtctagaatgcatcttatatgaggataaatataaaaacttagtgtcggtgctttgactagagtggnctaaccaactattaaatttgtgacgtgtgccctaatcctcgaaggttgatgcaagaagatacacaagatttatcctacttcgagcaagagaacggcctacatccaatgagggagggaggctcgtattatcttga

SEQ ID NO: 49531 - DNA, 388 bp, Zea mays
  unsure (1)..(388): unsure at all n locations
aaaacttctatagaaactcttgaattatccttgttaagaatattgtgagttaagaatcaaatactactctataaatttgtccatacctctgaatatatatttacctttccgtccatgtatgaactgctttgatgtggacgaaacttgtattctttgagtcgaaggtgaaaaanaactatccttcttttcgtacacaacgaagcataaatctgcttcttttcctttcgccgaagcctcatcattagagccgaagcaactgtctgtatttgtatgacatgatggtgatgatcctatgtatgtctaaatgaatgtatatgaatgcactgaatgatgtgatgtattgtgcgaatgaatgtcccacacacgactacgaagcctataaaacttc

SEQ ID NO: 49532 - DNA, 466 bp, Zea mays
tatgagtggttaccaaacgaacatgtgttcataaagacatctgaagctctacgaacgtgattaagagaaaatatttatctgttaccaaaatcaaacggcactggaaagaaacgaacataccttgttcggtactcaagagctccttgcaggttctctgctaattcccattcctaggagaaatgtacatcatttaagtggagtttccacttatgacacggataaggaaaaaaaaagaaattgaatacttacctgcactggctgcatgttttgagcatcataaaagtcaataccttctctattgataaacctggattatgtcaaggtacattttcataaatatcatgccatgagaaagagaaggacaaggacaataaaagctatatctctaaaactaacgctctattcttgacgggctctgtcatcagcaccaccaacaacagaaatgctcttgatcttaacatctgat

SEQ ID NO: 49533 - DNA, 450 bp, Zea mays
agcttgtaacaaaagttttgatatatattttctcaacaactctgactgagactaagatgaaacaagtatgcttcaacaaactactgctaaccagagatcaattgggcatgaagtcatgactggaattatacaatagataatagattgacatcttaaatattcatacaaagacacaatcttgccaccatctaaaaggtacaaccttatcttctaaggctgatcttgatcttcacggctggaggtagtcctaactgctgtgtaccggcatgaccacaataatggggagatggggacttcaataaatatttaagcatggtggattctattaactcctggcatgttgtctgctgctatgctctccaaaggttggccgatagttgttcatgtacacaaagacacaaagatgctgatcattttcacttcagaatgctgaatgcaccataagaatat

SEQ ID NO: 49534 - DNA, 444 bp, Zea mays
  unsure (1)..(444): unsure at all n locations
cgcatttccttgcataccctgtgagccacatcatatcgacttactttcttgcacatacacaccatcattgcatgtgagaatctattggcaattaccctaactttcaaactgtcaaaaacctcacatgcttccttcaccatacaatgatcactatatagatcaatcatgcgattagatgcataaaggatggcattggtatccaatgatttgagtaacttatatgctcctcgggcctctggcacataccctacttttgtgtagagctttatcaaagaattgtacattgttacattctcatataaaccatcccttttcattagaccaaaatatgctgaagcttgttggacatatccaacttcagcgtatgcatcaattcagatagagtacacaaaatatcangacggactcctgacatgatcatttctcttaataggtattctgaca

SEQ ID NO: 49535 - DNA, 342 bp, Zea mays
  unsure (1)..(342): unsure at all n locations
aaaagtattaaagtttcacaagttcatagttaaatgggcagagttcgttctaccgccagggttgagcgtgagggggatgaaactgaaacttcggcggctgtccctatcttcgaaacaatgcgacgttccggaatggtaactacaaaagaaaaccctactgctgaaacagaacaaacaactgtcgttgaagaagaagaagaagaaaacactgnagaaactgatcctgaagatgattttcatattgccgcaccaaacaagcccagccatttggactttggcaagtcaactgttttcaaggctgacttccccaagatggtgaagtcgggctattttactgaaaat

SEQ ID NO: 49536 - DNA, 474 bp, Zea mays
tcgtattctgtcgcattattggatgctgagaacagtaactgaagagcatatttgagttgttcacctctaggtgcaatgaaaaggattcctgcgcctgccccctgcagtttcaacgagccatcgaaatacatcctccatacttctgcagtctccgggttatctagcacttgttgctcgatccattctgatacgaagtcaactagcgcttgggtcttgattgcagtacgaggtcgaaactcaatgtcgtgagcccccagctcgtaagcccacttggctattcttccgatgacttctttgttgtggagaatatcccctattggaaatccggtgactactatgactttgtgatcgtcaaagtagtgacagagcttgcgtgcagttagaagtactgcatacaatagtttctgaacttgaggatatttcttcttcgagggacccaagacttcactgatgaaatagacgggatgtcgcact

SEQ ID NO: 49537 - DNA, 416 bp, Zea mays
ctgtgtgtccttggacacaattatattgaaaataatatatgtcaaaatttgaattataaatcaaatgttgatgtgtatacgtgacaaaaacataagctgttaactgtactcaaaaaacgtatacacatgtcaaaagataaaatgttctgaatagtgaatacctgctgaatcagccgaattcaccgggtgctgtggctcatccgtctcgttttccaaatattcagactcggcacgtagtacctcgtctatcaattctataaacttgtctgctatgtcatattgcttgacaataattttgtcgatgctgtcttttatggctacgcatgacttgtcaaccttcaagtcatatgcagcaagaatatcttgtgaattagatcgatgacgatgggggagatcggtgatcttacttgacatca

SEQ ID NO: 49538 - DNA, 188 bp, Zea mays
gattgttgtaagattgagtgcttgatgaaggaaggaggtggtttccttacataatccttctaatcttgcgcaatctcttactcccaatctagttttgctagccctctttaaatcctactacccccttaaacattcctttaccgtcgtaaatggtgtagcgctctctcttatagaatcatttctgtttc

SEQ ID NO: 49539 - DNA, 458 bp, Zea mays
  unsure (1)..(458): unsure at all n locations
cttagaagtgctttcgtttcttaaccctttctacatgatcttttcctcacatgattaagcgttaaaatgaggattatgctctgatatcaattgaaagttgcctagaggggggtgaataggcaagcataatttttttcaacaaaaattaaaagcgaactgggtaaaatcggttcaaccggtctacacgagtccaactaaagaatgagatataaaactaaattgatctcgaaattcacacatttaactttgcaaatgggaattctagatgatccacaaggttcaaagtagtagatctgagaagggcacttctcataatcaacacaccaaanagatataaaaaaatcttccatagaatggtgagagaacgaagaacacaaatnaacacaatgagaaagaatataagagacacangggtaatctcgaggttctgtcacaccaccaaggtggcctacttcctc

SEQ ID NO: 49540 - DNA, 360 bp, Zea mays
  unsure (1)..(360): unsure at all n locations
tnttgtttcttgtactcctcaccatgatataggatacagttattataccatgcatgtatctcttgcacttccaaatcaataggacaaacaatctctttagcaatttgttcccctctagaatgaacttctttatgagctttaatatatgattaaaaaccctcatcaatgataccatgtgttgtctttcactacaacagttacattatgttatgcaacttcgtatggccctctttacacatgtgattgtgcagtccagggatagaggagatccacgcgaagagagggtggtggtcttgaggtgacaccagccagcagcaacgggtgcagcagcctgcacgtgactcggacgaagaagatccg

SEQ ID NO: 49541 - DNA, 417 bp, Zea mays
tgacaagctacttataacgcggtatgtacctacataggcactattgacttagtccaagagcacattgcctacaaagtgtggccactcgggagtgggtgggagatgccgaacgaggctgctgctgggtctagccaaagtggcttgatttacttgaagtatacattcaaatacaggagccaatttgatgaaccaaacgacgactggctagatgccatcgaagccaccaacgatgaattagttggtgcctatttaagggctgaagatgacgctatgactgtgtccttcggaggctgaggcgagaaaaggctaaataggattttcgatgttattggttttgtatacccagactactgctatccctcgtgaaagcatggaaagaaacgaagagttgctgcttcggcgatttctactacgccg

SEQ ID NO: 49542 - DNA, 441 bp, Zea mays
gcagacagacggtcagactttaagaaccaattttattcttgaagacatgttgagagcttgtgcgttgcaagatcagtccggatgggacaagaggctaccttatgcagagttctcctataacaacagttaccaggccagcttgaagatgtcaccatttcaggtgctttatggaaggagttgtagaactccactgcaatgggatcaacctggagaaaagcaagtgttcgggccagacattctgcttgaagctgaagagaacatcaagatggtttgggagaatctgaagatagcgcaatcaaggcagcgaagctatgcagacacaagaagaagagagctgagtttcgaggttggagaatttgtctatctgaaagtgtcaccgatcagaggagtcagaagaattggagtcaaaggcaagctatcacccccctacattggtccgta

SEQ ID NO: 49543 - DNA, 470 bp, Zea mays
  unsure (1)..(470): unsure at all n locations
tcgtggttagttcgttatttctgcttcagcttacgccaatttaccttctgttgcctggagctcaaagttctttttttcgatagcatctgagtgctcctttattttgctgtccaaattatcgattataacttcgtgcttcttatcttcaaaatcttgctgcattatcaaggctttgctcaacagcatactctgcacganatcaacctttgtcagacattgttttattattagaaacaataaaagttaagggaaaagtagttcaccttgaagttggagtaaaataaactaccaacgatatgttgtcctcggtagcggctgatgtctgtctctagcttctgaaaaccgatactctctgacagagtaccgataactttggctccagtttgatctcgaatacaatccacattttcatcatcaatgcctccgaagaggagtgctccacgtctgtatccgcacgacttggcatactc

SEQ ID NO: 49544 - DNA, 410 bp, Zea mays
  unsure (1)..(410): unsure at all n locations
gctggggacgagagggacagattttaccgtctcatctggctcgaaggtgccggtgtggcgcttcgcatctggcgccttcttggagaggttctccacgtcggcgatgagggcctctgattcggcgagggcctctgcgtactccacgcacttcatgtcgcattagtacgcgtgtcggtacatggggccgacggtgatgagcccgttggggcccggcattttgagcttgaggtacgtgtagttggggacaaccatgaacttggtgtagcatggcctccctagtactacgtggtaggttgctcggaacccgaccaccttcaacgtgagggtttcccttctgaagttggagggagtcccgaagaagaccggctgatcgagttgttcgaggtggttgacgcgtttccanggatgat

SEQ ID NO: 49545 - DNA, 387 bp, Zea mays
  unsure (1)..(387): unsure at all n locations
ctcacacttgcgaccctcatatgctgctcagacgtgaaaattgttttctntgtgcgttgaggagacctctcagctggaggaggtgctggatagccctgggctcctatctcatgcacgaagcacacaaaaaacgttctgaaaccgagtgccatcatcctcggataggaaagatccatattgtgccataacttggttccagaccgtacccatgctgtacattgaaggtactcacacaaaaaatacatgagattgaactcaataagtgtagcacattcgaggcaaccatctcaaataaatagaaaccatgagactttaaacaggatatgcacaacacagccacaagtgctgaagactacatatattggaaagatgataacattaagcatt

SEQ ID NO: 49546 - DNA, 460 bp, Zea mays
  unsure (1)..(460): unsure at all n locations
gctttccctttacaccgaaactatgatcccactttattggtgagactttcagggagacataatcttcaacctgaaagtacaggggttgtcgtcgtttgtctgcataactctttttgtcgagcttgtgcttccttcaaattatgcataattccgtgaactttgtcttccatttctttaaccatatcaggcctaaaaaaccatctttcttctggttcagaccaattcaatggagtatggcaccgtcgtccatataaagcttcaaaaggtgtcatcttgatactttcttgataactattgttgtatgagaattctaccaacggtaaacattcatcccatttctgtgggtattccagaacgcatgctcgtaacatgtcttcaagtattnggttcactctctcagtctgcccactgggttgaggatgacagaccgaactattgagtagcttagtacccaaagatt

SEQ ID NO: 49547 - DNA, 333 bp, Zea mays
gatgaaggcattctgcgatctggacaccagctgctcaaacctaggtgctaatctttctgctagtagctttgttagaaccttcgctaagctgtttatcaaactaaacgggctaaaatcagcaatgcagagtgccccctctttttttggaaggagaacaatgtttgcttcattcgcaagacgggagctagaagtgcggggattatagaatgcaatgagagcattgccacaatttgtctaacatactccacatttttataaaacaaccaagtatcctacgacctgagcttctggaaggattgccgaataacttgtatttatctcaaaaggggttct

SEQ ID NO: 49548 - DNA, 403 bp, Zea mays
  unsure (1)..(403): unsure at all n locations
aacttatgaagattcttcattcctacttggtctagtcagcgangccagaacccacccatggtagtcttattaattaagcaagtggcgagttcagctctattaaaaccaactaagtatagttgaccctctaacactcccttaaatgctaccgaatcatcacttcttctaaagacaagaacacctatatctgtgaaaagacaattgtagcccattttacataattgagaaacagaaagcaagttataatctaaagaatctacaagaaaaacattataaatagaatggtcacgtgatataacaattttaccaaggcctttgaccaaaccttgatgtccatccccgaatgtgatagctcttgtgggatcttggtttttctcatatgaggagaacatacttttctccc

SEQ ID NO: 49549 - DNA, 463 bp, Zea mays
  unsure (1)..(463): unsure at all n locations
agcttgtgaagaatcttcattccaacatgtgctagtcggggatgccagagccagcccatgttagtcttagcaattaagcaagtgtcaagttcagctctatcaaaatctactaagtatagctgaccctctaacactcccttaaatgctattaaatcatcacttcttctaaagacagtgacacctgtatccgtaaaaagacagttgtaacccattttacataattgcgaaactgaaagcaagttgtaatctaaagagtctacaagaaaaacattggaaatggaatggtcaggtgatatagcaattntacccaatcctttgaccaaaccttgatttccatcctcgaatgtgatcgctctttggggatcttggttnttctcataggaggagaacatcttcttctcccctgtcatatggttngtgcacccactgtcgatgatccaacttgagccccggatgcataaac

SEQ ID NO: 49550 - DNA, 344 bp, Zea mays
tctcatacattgtgatacggtatgttctaacacacaactctacacacattgcagcgtgatatgacctattgcatataatttaatataaatctcaacgattatctaaagtgtcacatctggaggtcgtgtccacatagaaaatgcttttcagttcacactttctaaagcgagacggtgatgttgaaactaatacatacgagctatatccaattcaagacatgtcacacatatgtagtgctgaatgaagggttttactttacctagaccatgacatggtaaatatgagtttaaaatttacactgttattgtttgcatgtattttattttttatgcaatatttataa

SEQ ID NO: 49551 - DNA, 364 bp, Zea mays
acgaacaaattataacgattagaattaacaaaaaatagttcaccataacaaaaattaccaaatgcgaagccaaagtgtacaaaccttcaagctgttgtaggcgaggctatccgcaaagtgatccttcgtcattgcagacatacatcatttcacggcaaacattgatttccttactatctggcagacagtaaaggaaatcatcttcgttgtctcctccgtataccaaagacccacgggggtatttcagctccttagcataatgtcgtgtttcggcaagttgctctgctgatagctgctttctcgaagcatgtcgaacaatatagttccaatcaccctgtgaaggtgcatcgggagtaggtgatgt

SEQ ID NO: 49552 - DNA, 402 bp, Zea mays
  unsure (1)..(402): unsure at all n locations
tcctctcaaaggttttctgtcaaaaatatccctcgaggactatatgagcatgctgatttgctagctaagtcagcagcacaggggctgcccttaccttcggatgtgttcttcgaaacaataaaagcaccttcggtggaacttcttgaaagagcagtcctcaacatatctcctgtttatagcgaggattggagaactgagatcatctcttaccttcagggaaaattcctttcagatgacgaagcttataacaggagaatagaggcaagagctcgtccatatgtcatgatagaaggagagttgtacaagcatggagtttgtgctccgctactcaagtgtttatccagaaccgaaggtatagagttgatgaaagacatacatgcangcctctgtggatctcacatt

SEQ ID NO: 49553 - DNA, 448 bp, Zea mays
agctttgctccaagttatggaccgttcagtctctggtcgcggaccgtccgcgcctgtgcagagagcaccgtcgctggttctcaacagagtgattggcgcctgaatcggcgccaacaatgtggtcgttaccgagagctgaactttgccaagtgcccaataaaaagtacttggcaaaacgccgagcactcgacaaagagccaaattctggtagtggttcccaatgataactgctgcgttgcacctttcgccgacaatgatactgtctggtagtggttcccaaattcggcgacatttgcgcgaggacggacatcgacttgtgacagcaacacgaaccacactaccacagagacacgtggtggggcggcacatgctatcagcagcgacaagcacgccacgtgagctgtgggaggcggtgttcatggtctatcaagtaccaactcaagtactc

SEQ ID NO: 49554 - DNA, 447 bp, Zea mays
ctggtgatattctcatttgacgcccaggggtgcctacatgttgtggagctggtcctaaccctaaaccacaaatacaatctcgtggctctttctctccaaacacatgtgcatataaaatcaccatccttcaatacctactgtccttcaattctgggttctcagcacaactccttcaaatttattcttaagaggaccacacatatattatattgtgttcacttatattttaattattacataaatcaaaaatatgtgtgtactcacaatgaatatttctgctctaggtagaggcacaatatcccctcttttggtcttacgcgagtgtgtgccaacatataattcatctcttctcgcaaggcgtcctcgttgctctggctataagaaaaaatgatttcgtccagccattgactagattcttcatatattaaactaatgatatacaaacta

SEQ ID NO: 49555 - DNA, 453 bp, Zea mays
  unsure (1)..(453): unsure at all n locations
agctttcctaattantcaaccaagggcgttctttaccactcttgttgtaacactatattcccaggcggtcctcatgttccaattaacaatatgatcttatcatgaacagggaataacaaattgataataaaagcctgatcatgaataatgggtatctccatacccaaaaccacataaagcaatagcacgtactacccaaaagttcattagtaaccaccgtataaagatagtcaaactagggtaacctattggatcccatcaacaataacctatgcagatcataatgattgaaaggaacattattgggtcaaaagaagtgatcaagggcacaacttgccttcaacgagctactactcaatagtctccacctgctgaacacctggatcctctgtggctngttcgtctactcgcaacaatacaaacaaacatggtatagcagaaaataacgtcaca

SEQ ID NO: 49556 - DNA, 462 bp, Zea mays
tactcagcttgatcagctcttctgcacaagattatcgatgcccacagacttgataatggtatgaaacatattcatgagaaaatagaagccggtaaagctatattgcttcaaaaaggatgatcaagggatagtatggtttaataatagcatagttgtgcctaaggatgcgggaatttgccaacaaattatggatgaaggctcagtcttagtgcgatatttccattcatcctcggaagtactaagatgtatcaagatttaaagcaacactattggtggacaaaaatgaagattgagattgcaccctatgttgcgagatgtgacacctgtagacgcgtcatagcaatacatttgaagactgctggtccactgcaatctttacccatacttgacttgaaatgggaggacattatcatgtactttattgtgggatacctaggacaacaaagatttattctactgggt

SEQ ID NO: 49557 - DNA, 367 bp, Zea mays
  unsure (1)..(367): unsure at all n locations
ttatttggacccacaaattatgtcagtgccggaggcaacctctactgtctagtgattgttgatgacttctcaagatacacttgggtgttctttctccatgacaaatctgaagttgcatctatattctagaagtttgcccagaaaacacaaaatgaatttgattgcacgattaagaagattagaagtgacaatggccaagaatgtgacaacaccaacattcatgaatactgcgatgaaatngggatcaagcatgaagtatctgccacatatacacctcaacaaaatggagttgttgaaaggaaaaacatgaccttgatcatccttgcaagaacaatgattgatgagtataacacacctgagagggttt

SEQ ID NO: 49558 - DNA, 257 bp, Zea mays
cggaccgccgcgcagcaagcatgtaaccccaccccggttgtgcacccttaacgccccgccgcatacgaccgagcaacatggaggcgtcggcccacatgtcatgtaaccggcgcaacggttaccgcgggcaacggaaacctcaccgccacattggccaatgccgagttcttatgactgtggaaccactaccctgaatcgaggcagtcctgcacctgacccaacattgccaaatgagcgcaacgatcacgggtcattca

SEQ ID NO: 49559 - DNA, 352 bp, Zea mays
cttcatccccacatgtgtttacggtgatgccacagccagcccatgcaagtcttagcaattaagcatgcatctagaccggcctcttcttttgcaaaatcaaccaaataaagtttgccgtctagtacacccttaaaagccagtgaaccatcacatcttctaaagacagacacgtctatatttgggaatagacaattatatcccattttgcataattgactaacagacaacaaattatatccaagagactctactaaaaacacatttgaaatagagtgctcagatgaaatagcaattttacctaacccttttaccttgccttgggtcccatcaccgaatattattgaatcttggg

SEQ ID NO: 49560 - DNA, 451 bp, Zea mays
  unsure (1)..(451): unsure at all n locations
tgagctncggctgtccttaatgtcgaatgaccatctggctttctgctttgcatacaatagcttgaaggtttgtgcttacctttntttcttcgagctattgacaattattttgattaaagtgtttaactgttttattttcgttgttattagggtcttattttaagcaaagctttgaaagcgcaaaaagattgtgaggatgaaagcactaaaatggctttcaaaaatctgcggtcggaagttataacacttctgaatgaggcccttgagaaaagacaagattctgctttctttagtcgagaggctaaagacgaacaaagctactctggccaaattctctgaagtggatcaaaaaatcgaagcttgagaaagaaaaagaagcggatgcaaaacacatagcagatctggaatatgctctatctgtccaagtggaattgaacagatttgaagtgac

SEQ ID NO: 49561 - DNA, 414 bp, Zea mays
  unsure (1)..(414): unsure at all n locations
agcacctgagctgcagctgttctcaatagccaaccccatggtcttgtttttttgccatcccgcggagcgggcgcgcgcttctgcgttgtgggccggtcaggccggaataacccacactattgaaattttctttttctttttcaggaacacttttaaatatgtgaaaaatgtgaaaaatgataaaattgtgaaacaatttcctaagcttttattttcctagaattaaaaaaaaagtttggattttagtggaataaaaatttagggttttaaagagtaaaagattagtatggattttaaaataagggtagcccaaatgccaacttttatgggaattaagaaaatgtaagccttggtagagttgaatgattcgacatgttgatacaaacccaaacaccnctgctatgactcttacca

SEQ ID NO: 49562 - DNA, 342 bp, Zea mays
  unsure (1)..(342): unsure at all n locations
ttggagctaaaaggtatggctaaaatacgataagcgagcatgggctgtccggtgcacaccggaccgtccggtgcgccatgtccggtgcgccatctttagaagctccaacggctcgtacatgtggcatgttcggtgcaccaccagaaagtccggtgtaccttgtcactgcgccgcggaaaggtgcagaactgctttccaacgactatatttgagttggggcctatatatacttcacccaatcggccatttggaggtgtgggagcccaagagacataccaaggcacatagttcacgttntcaagagctcatacacccaagtgcttaatagaatcactcgatgat

SEQ ID NO: 49563 - DNA, 303 bp, Zea mays
tgacacaggtgccgaaggggttaaaagaaaaagaattgttattattctgagcaggcaagctgctagaatggtgaaggaggatgaaaaggcttcaaagaagagaaaatccactcctgagccgaaggcggcagtttcgaagaagaggaaggctgaaactccggagccgaagataactaaggcaacagaggagactcctttgacgcctcctgctgccgaaatagcagaaattttaaaggtaatgactgaatctttacccatcaagctgctaagttctctggaggcagaactgacaaaactttacag

SEQ ID NO: 49564 - DNA, 347 bp, Zea mays
  unsure (1)..(347): unsure at all n locations
agcttctaaggacgtcaaaggattctganaattttaattttaatcttagcccttgagccaaagaccgagcttgttcaccttgatccctagctcaattcctaatgaccccattgacaaaattgtgcctaactaacccctctacctcatatcacaagatggcgtcgggacacatgccttggacacgtcaaacccgtgatcttctctctgtgcgcggcagtgagacaaacccgatttctcctctctctatctcttgatccagtcaacaaaacctgcaagcctccacacacaaacgacaaatgaatgtcagaggaagagatctttcaatgggatcatggccataatctcaa

SEQ ID NO: 49565 - DNA, 407 bp, Zea mays
ccctagctctaccccttatgcttcatcttcatctgctatttatgagctctcagcctacttagacagtgacaatgtcacttcttatgaggatgatcttgatatacttctctggtggcgtgaccacaagctaacatatccaggtttatccatatatggcaagggatattatgtctgttcctgtatctactgtctcttcggagacttgtttcagattgacagggatgataatcgaggagcgacgaggacgcttattgcctgagaatgttgagatgctgacttgcttaaaagagtgggaattaggagaaaagagagaacaacttgctcgtgacaatgcacagcttgatgactcattccagaatttatgtcttgatgaagatgaacttcttgctgcttacctgtagtcttct

SEQ ID NO: 49566 - DNA, 452 bp, Zea mays
  unsure (1)..(452): unsure at all n locations
agcttcaagctctgccgataacttgggagtttgtttctccttttcttctttcaattgagaaaggaagttaagtagcaaactagattcagtgtcatcttcaccgatggaaactggtgcctcatctaacaaggagaaatcctgacccccatttatcaatttaaatccaagaatctctctgaaaaaacagtatgctgactgttaggcacgaacagccatataattattatttccagtcttcagatagcaaagaaacatcangtagaagggcatgaaagggataatattaagcatacctaacatatttccacataaatgaatggcagaagtaatcttcatacttggaaacattntggtcagctcacactggattgcattgcttgatggttgattttgtaaaaaaagaattatggacgtactcttcatcttttggaaagaaatagaacatcaggaat

SEQ ID NO: 49567 - DNA, 287 bp, Zea mays
atatgctggtttgatggcatccacgaagcttccgcattactttacagcatacaatattgttgtttcttcttcgcagccgttgaaggatattatgagaaatagaaaagctactgtgcggattggaaaatgggctgcacagcttaatgaattttgcattgattatgtgcatagatcttccatccagtcccacgcgttatcaaactttatttgctgactggacgccaagggctcaggatgaagaaaccaattaagatgtcaaagtatggaccatgttttgcgatgggtct

SEQ ID NO: 49568 - DNA, 409 bp, Zea mays
atcttgtgcattgcaccacccttaatattgtttcttttcctgtactcaaaatcgaaatataaaatggatttaaatgtttgtgagctgattatccctttatgttttagacctagtgattggaattgaggttagacacacctcttaccccttgatgtttgcgtgcaccattctaatagatgtactgagtggaacttgtaagtcttgctagatcacatcaactgtgtttatggattggccgccatcaagtactggaggaaaagatccacgcgacatttcaatcaaaaacttgatagcggagacgacatgagcactcgagagaggtcacgaccggagcactacttttgcatggagaatgcatggagctatatatagagttacctgaccaggagcttggcccttacatggacat

SEQ ID NO: 49569 - DNA, 423 bp, Zea mays
tcttaggcatgctagtcatgagaggacaagattttttattctattatgagagctactctgggagcttgagtttgctagagcttgagttaattattgtagcatcccaaaaatcctaatccaggtttgaaaccctaatctactattttttcctcccttcatcctctaattctaagagctccactaagttttctttcatcatatgcatgcattttgtttgatcacaaagcacctcacttaaattctattttctaaacacttagagtattcacaaaatatttttgttcaaagaaaaaggggcaaaatgggaaatacgaattgaaaagtaaaaagaataagggaaaaaccctcccctctccctgctggagcgatttccggcccaagacccgcaaacccccctgtccacgcgcccgcacttctccggat

SEQ ID NO: 49570 - DNA, 421 bp, Zea mays
cagcttgtaccaccacatatgtatcatatttctatatatacccttctttttcaaaagaaaaaccttgtagaaacaaatgttggatagatccgtaatgcgataggtatggatatagagcatgaagccttatgggaataaaagggaggctaggtggctaattgaatgagccctacacgctactataggggatggggatctttccctattccctataaggtgatgtgagggcgtttaagacgaacatgcatgcatcatttaatcaaactacttggcaattaggtaacagctttaaaatgctatgagacatgacaacaacgattaagtacactccatgaccttcacataaccttagaaagccaggcactgattcccttctattttataataatatttctttataccttacgcttacacttacaca

SEQ ID NO: 49571 - DNA, 391 bp, Zea mays
  unsure (1)..(391): unsure at all n locations
tggccaanacaatntaaataaaaccctaaacaagcctcttttgtgggagttcattacggaattctcaaattcagaattctgaatttcagaccttgagccaaagatcaagcgtgttcaccttgatccctaactcagatcctaatggccccattgacaaaaatgtgcataactaacctctctatcttgtgccacaagatggcatctggacgcgtgccttggacacgttaaaccagagatcttctccctgtgtgcggtagtgagacaaacaagatttctcccctctctatctcctaatccagtcagccaaacctgctagcctccacacacaaacgacaaaggaacctgagaggaagagatctctcaacgggatcatggccataatctcaaatat

SEQ ID NO: 49572 - DNA, 471 bp, Zea mays
tgcaagctttatagaaaagacctgtgaaaccatcctgtccagtggccttttctggggggaattccttgattatttcccacacctcttgaccagaaacaggagcttccaaaacatattggttgtgtctgtgcgggccagcgcttccagatcaatgactctatccctgtccatactgcttctaatgaggttagaataaaacatgtccacaatagcagtcttttcctcgtggctggttagaatatggtctccgtctaccaatcttgcaacaaaattctttctctttcgatggagagtgtgcttgatggaaaaacttgtgttagcatcgacatctttgagccatggtattctagatctcaaccatgctatggtctgcttgaaggaagacaacaacagagagtgtttcttcaaccggttcattaaccataattcagctgggcttagagatctttcatcctgagcaatcttcaattt

SEQ ID NO: 49573 - DNA, 462 bp, Zea mays
  unsure (1)..(462): unsure at all n locations
ttggtatgattctcctatcgacagaagagaatcactcatctttttcttatcgcgaagntcatttgctaccctttttgtcccttttgagaattccttgtgctggagaacaaataattacatgaatgagccaagaaattactatattgcgccccggtgcattgttgatattagtgaggtgagcataaatgcctttttcatatttgcacaatgttttaatcatttcagttctgaaattcagaaagtaaataaactgatcaatagtcggttttcaaacatgatataccagatgaaagttatctatgattggctctaatattttatcacgctcccacatttatgttatatctcaggagttcaaaatgggaatgggcagtgtgacttttctgacgaagctggtcacacatagactatggaccaaaccatttcccttggcaccaatctaacattagaacactgacaaat

SEQ ID NO: 49574 - DNA, 287 bp, Zea mays
  unsure (1)..(287): unsure at all n locations
ttaacttgggtaagttttacccctttaaccactatntaggggtaaagccattgaccacggtttcatttgcaaaaacattaaaacaatacaacttggttgaaatttttgcctagtgaatgcactctaggtgtgtcaaacatatgcaatgccaatgctcatgatgtcatgctcaagttttagttatagtaacaccaggggtgttacagcgggggcccgctccttcactcantgatggggggaggagcggntgttgtccgtggcgctggctgctgcaacgtgcccggtct

SEQ ID NO: 49575 - DNA, 252 bp, Zea mays
ctatcttgcgaggtgttcaacatgaaccaactggttatgagaaaagaccggataaaccagtggaggagaatattaagaagatgccagatttgggtctgaacaaatatacttctggtcttaataatttgtctcaccatctgcatcaacaaaggggaaacatgcagcaaacaagataaataatagttcagaatccgattcatatgtctctttctattctcttgaccatgatgatcaaggagatactggtgatga

SEQ ID NO: 49576 - DNA, 431 bp, Zea mays
gattgatctttcatgctgctgagactgcaggagtttgctctttcgctctcttatttaatccatgtattcttgaaccaaatcaattcatcttgcatgaagaaatggatgaacaacctgactgaatggatctttatctaaatacatggcctcctgctagcaaacgtgaactctcgaccattaaattgtcgatgggtaataagaggacttgctcaatgtcaaaagtagttcaacaagttggttttactaacttgtaactgcccaatgaacaaaggctgggtttagagaacgctctatcgagttgtctaaactcactttagttcaacctatcttgaagagactcttgtgaagatcaagctaaggttatgaacatatgcgcagatcttatgccatattggattatattatgagcatatgtatcttaactttacctt

SEQ ID NO: 49577 - DNA, 336 bp, Zea mays
  unsure (1)..(336): unsure at all n locations
aagcacctgaggctgcagcttctaagggagaacacgtgataggtttgactaacttctattcgaaaaagatagaccttgtgcagcttgtcaagcaggtaaacaagtgggaggagcgcatcacagcaagaatgtgatgaccacttcaagacccctggagctgctgcatatggacctcttcggacccgtcgcctatctgagcatatgaaggagtaagtatggtctaattattgttgatgacttttcccgcttcacttgngtgttctttttgcaggataaagttgaaacccaagggaccctcaagcgctttctcangagagctcaaaatgagtttgagct

SEQ ID NO: 49578 - DNA, 367 bp, Zea mays
  unsure (1)..(367): unsure at all n locations
tagtcggnaagcaaacgatgcagctgtctggagctggtaaaggtcggcttgtaaagttgtagccagttcagcatccgcggcattatcacttgatacaacgaatacagcatacagtagcctgcggtgtaaaaaaattgggcactggttttaacagctacataaaaatctagcagttggctacagttaagtagggaatgcacgttcgtacagcttcacagaagactactgatggagactactcactcttcaattggatcttcgtaggactgatccttgtatgaaacgaaaccttcaagcctggaaactgaagtggtggtatgaattcaaaactgaagcgtcacaaaacagatgggtggctacaacaaac

SEQ ID NO: 49579 - DNA, 425 bp, Zea mays
  unsure (1)..(425): unsure at all n locations
gcttataagaataaggacgtctgttgcattatagctttctatgagtgggtccttaanaatccattgttattatcagattaagtaattacctgcatctagagttctttctaccctagatcaaacacttggcctatgctagccatcttttatcatccctttaattcaatggattgctatgtgtaagtcagtgaccaagtcttcatgttcgagaagtaacggcgatccgaatcgataatacccagcttgggatatccaaccacacgacatatgtagcacttaacccttgcatatgtaaactcgccaccgggtttctcaataccagaatgggttgatgccaaccgagagcacaaatacanccaccgccatcctcttgcatggagggacacactactcttgcatctttcactccattgcgggtggctttt

SEQ ID NO: 49580 - DNA, 325 bp, Zea mays
  unsure (1)..(325): unsure at all n locations
atactcangcttgcgcgccgtgccctggtgcctcggacgcgtgatccttccctgtattgacttcgctctctccatgggtataaaatcggagcccttcatggaccctccatggaaaacctatcgcgccatcgccatattgccatgcatgtgtgtgagggcagactgaatcctcgccgccaccggacgttccacgtaatcatcgctggcgtggccccgcgtttgggctcagggcactcgcggttcgagtgggagcctagagtgaaggcgggtaacccgttgcgcccaccggccggtgttaattgctcatcggagcactttatcgccg

SEQ ID NO: 49581 - DNA, 304 bp, Zea mays
  unsure (1)..(304): unsure at all n locations
gcatgcgtcgctgtgtttggcaagctccgccgcagcccgcgcttggacgcggtccaaagcggctgcaccgcgctatccatctcaaacagggggacctcatggtcgtcactaacgccggcgactcttgggttgntctgggcaccacatccgataacggcgccgtcacaccgtccagctcatcatcacttgaagctcaacctgccacataagtcactactgaccggccatgaattcttgtgcgctangatgacaagctgtgctgacattgtgtgagtactctcgaacaagatgtatgtagaggagt

SEQ ID NO: 49582 - DNA, 370 bp, Zea mays
ggccttaatctactcgcttataagtctgattgaccatttcttgtatcagactggctctggaagaaccacagggctgatcttactcagtatctgaaatcacaagatgaggagagggattcgcgtaagaccaccattggcatcaacacttgaaacaccgattttaaatttacacttgaaagaacccatcctttcatcaactcggaagtattctctcaacggaagtttccccattaaacttgggcgaccccatgacaatgttgctgcagtcctaatcatcgtactcaccctaatgcgatccactatgttacaatttatggctggacctcagatttacttcaaagatgcacgaaacacgtgctacctgtaaaaa

SEQ ID NO: 49583 - DNA, 313 bp, Zea mays
tgagcaggagctccaaccaggcgcgggcggtgttggagagaaacaaggggagggtgctgatgatgaaggtgtcatcgtccgttccacccaacttgcaggccataccgtagttcgcgagccacagtttctgtctcgtctcccccgagtactttgtgatataattccggggtcggaaccgggtcgggaacggcgcacgtcgtatggcccggctgaatgcctgctgaccgggtggctcgggcgagggacttcgatcctccccgctgtcgtaacgtccctcacgcctggggtggtagcctcggcgcaccctcttgtc

SEQ ID NO: 49584 - DNA, 194 bp, Zea mays
cattcatatcatgttatttaaaatcagagcccaagggtccccatcccttctgaagtattcttccaaacactaatgcaccttcttggaattatggaagagccgaccaccattctccagtacactcggaggaccggagaccataacaaacactcttttcccacgcaattgtacttcaagtgactaactttattatc

SEQ ID NO: 49585 - DNA, 404 bp, Zea mays
tcatccccacatgtgctaattggcgatgccacaaccagcccatgctagtcttcgctattaagcatgcatctagaccggcctcttcttttgcaaaatcaactaaataaagtttgtcgtctaatacacccttaaaagctagtgaaccatcacttcttctaaagacagacacatctacatttgtaaatagacagttataccccatgttgcataattgactaacagatagcaaattatattcaagagactctactaaaaacacattagagatagagtgctcattagaaattgcaattttacctaacccttttaccttgccttgatgtccatcaccgaatataattgaatcttgggaatccttattcttgacgtaagaggtgaacatcttcttctcccccgtcatatgg

SEQ ID NO: 49586 - DNA, 368 bp, Zea mays
cctactaccatatgtgacccacataatgcgtgaaccaagcaatgtgggttgaaagaggttcggcatagaacaacttctaagctgacctaattagctaaagaaacatgttgaaagtgggaaaggaagaagaacgacatggcatggcaaacaaaacgtatcatgtctgtcaattcgtaaactgggcagacaaaataagaacgagaccatgccacatcttgatcacaagttcacctcaacaaaagagtaacacctacctatgctacgacattgctgaatctggcccaaacatgaaaacaacgaaaataatattcatgacaaataaacggcatctgaaattcaaagagtgggtacacgacataccttggtat

SEQ ID NO: 49587 - DNA, 453 bp, Zea mays
  unsure (1)..(453): unsure at all n locations
agcttgatagtggagattatggggagcattctatagagacgggaagcggagcaccacttgcgcatggagaaggctcgtggctatctacaaattttcctatccgagagattggtcctcgtgtgggctaccctttgtgtatggctccaatggggattagtatgaagcttgcgcgatttttgataccttgataaaaatactggcatgtcggtggaagtttgcatctctagctcatttatgcttccatatttatattgctttacttgattgtgcgctttatcgtttgtagcttagttatagtctaattggtaggactggaatctaggtgcgtaactccatttagagataacaacacttagataaaaccttacttatactaacttacttggttatccatgtagaatttattaanaagtaaaattagagtattagatcagaagcgaaaatagttgtcct

SEQ ID NO: 49588 - DNA, 407 bp, Zea mays
  unsure (1)..(407): unsure at all n locations
tggatcaatcaaagaagagggccatggtgagcaacctcccgactctgaagatagngactaccctaatcatgtttataagctctcaaaggcgctttatgggctcaagcaagcctcaagagcatggtatgaatgcctaagatatttccttatcactaatggcttcaaaggcagacaagacgatcctactctctttactaaaaccattgcaaatgatctgtttgtatgccaaatttatgttgatgatatcatatttgggtctactaacaaatcaacttgtgaagagtgtagtacgattatgattctaaaattccacatgcctatgatggtggagttgaagtactttctatgatttaagtcaagcaactcaagagggcaccttattagccaaccaagacattcaaatatac

SEQ ID NO: 49589 - DNA, 405 bp, Zea mays
ttagctatgcagaactgtgttgctcgttaagatgaaaaccaactcgagttgggttcatcaagatatttttgttatttgagagcttcaatgtattcatttattgatttaggaaacaaccaaattatttgtgagcttcaatgtattggtgagcttcaatgtgttcatgtactttatggtacgctcgatgtgtgcagtaattacaatcagtctaaatacaaaaataacacctatttgttgttgatgttgtcatgtttattaatacatgcttgcctagattaatgatcgcactgagttcacgcttgaacttgatgtggatagagatggtggcagatacattgctccatatgcagatcgaagtacacgaaacctttacattcttcacatagaatggctgttaccacatac

SEQ ID NO: 49590 - DNA, 386 bp, Zea mays
ttatctattgcaccttatgttaatgcaatgatatatatgcatacagatcttgtctgctcgatctaaattcgacagctgataccattgtgggtatgctagagttcatttataacgctacatcacgtgatggtggcggaagagtttaactgctaaatatgacataccgttgaatctagatgtaatggaggaaaacatctgtttgcacgctctcacctactaagtgcatgattgcacattagcgctcgccttcttttaatcaaagccatgtctatatataaccgcggtgctttttaattcacgtgacgtgacgttaatagcaaccgtaattacactcaattgtcatacgaacaatattatatagacgaattaattctttccagaattta

SEQ ID NO: 49591 - DNA, 442 bp, Zea mays
  unsure (1)..(442): unsure at all n locations
agcttcaagccttgattctattacttcctttatcttaattcttagcgagtctaccatcagcactatggaactctccttcttggctggtatccagttatcgaaagcatcaacaatgttcaaggagaaatgatcataccggaagcctcggaaaatggcatctgaccaatgctctggcttgctcgctatgatccagtcagcagcttcactggatatattccttatgctctcgatggatgcaataaaatcctcgatgctgcatgcttgggctgcacgagtgaaatcttcaaccatcccctccctaatttgntgtgaccatggtcccttcctcagctctcctttgaattcctcaatgatatgatgcanacagaaggcatgttcgccatcctcaaacacgtgagaaacagcagcatccagacccatttgttcgtggacaagaatgtat

SEQ ID NO: 49592 - DNA, 320 bp, Zea mays
cagagtgcgctctaccgctatagttgagcgtgagggaggcgaagccgaaggagcggagactgttcctatctccgaagcaatgcgacgatcctgattggtgacctcagaaggaatccccactgccgagacagaacatactgttgtcgatgtagaacaagttgctgccgaagcggacgaaggagatattgaggaagctgcttccgatgatgattaccatattgccgtaccgagcaagcccagccatttggacttcggaaaatcgactgtctccaaggctgatttctccaagatggtgaagtcgggctattcagtgaaaatga

SEQ ID NO: 49593 - DNA, 301 bp, Zea mays
aactcatattaggtttattactacaccaatactggtaatgccagacattcacaagggatttgatgtgtattgcgatgcatcacaccttggacttggatgtgtgctaatgcaaaaaggaaaagtgatagcttatgcttcaagacagctgaagaaacatgaaaagaactatccgacgcatgaatttggaactagctgcccgagtgcatgctttgaagatttggaggcactatatgattggaaacaagtgcaagatcctcacggatcacataagcttgaaatacatattcactcagaaagaact

SEQ ID NO: 49594 - DNA, 391 bp, Zea mays
ctcattatgtacggttgctcggaggcggtctattttctttgcccttcttgcagcaacctgactgtccaggatagcactgggtccctgatcctaaggtatctttacgcctagataggcacgatgaaagattgcttctaaggcattgacggtaccacgacccataatcgcattcgaagggtcttccatgtcaacaatgccaaatacaacctgctcagatctagagttgctgatgaaccccaaggtcactgacatggtgatactgccccaggctacaatttgtctttcttcgaagcacagagaggatgtgtcgcatcatgaatcttatcttctagttctcgcatctgcctgaaagccttatcaaatataatgtcagatgcactgcctgtgtcac

SEQ ID NO: 49595 - DNA, 441 bp, Zea mays
  unsure (1)..(441): unsure at all n locations
agcttncttgtgcatagcttcggaactggtttaaccttctttctaaccctgcttttcatattgtgtacagctttattccgagtccaaaggttcctgtacatatattacacttgggaaacattgttagtcatgtttttgaggaccttcggaaggcgaaggcccccaacaagtgttaaggatagctttgtgctgggccaaccaattcatgcctagtatcacatctatatcttgcccttttaagacaatcatgttggtgggaaactcccgttcagccaatgttactggtgtaacaccccanagtgtactttgggtgttactcaaggctacaccattaaacctactatcacatgtggtttagttgagccaagacaccaaacttgggaatcaaatcctaagtagtgaacccatttagatgcatgtcttgcttgtatgcagtataag

SEQ ID NO: 49596 - DNA, 449 bp, Zea mays
ctccgagccgcggattgaatatcacctcaccagagacgcctgattgacgtcgccggacttcaatcggccgtcgtcgtacgtataccgagccccacggtaagccattcgtcgattccttgtacccatagcatccttagcatctagggaagctccccgtgccatttgattgaaccctaccatcgtgagcaggccagagcacacgccgtcgacgagcccgaccgcctgcgcacgcgggcagccctatttcgaccatcaccatcggcgatccacacctcgacgtgaccgccaggaccttccggacctcacccagccctccaccggacctccctcgccgccggtaagtcgcgccaccctttttcctctccgcgggtactgttacggtgtggaatgagccccggttgaaagatagatataccaggagggtttgcgaggtcagagacttaaggaac

SEQ ID NO: 49597 - DNA, 388 bp, Zea mays
  unsure (1)..(388): unsure at all n locations
ctgcaaatcttcaatgaagatttctgagttttctatcttgataccacgtcatccacataagcttgtacacgcttgccccaatgatcggctaaacatgtctgaatggctttctggtaagtcgctccagtgtttttgaggccaaacgacatggaggtatagcaaaaagccccaaacggggtgatgaatgcagttntttcctcatcttcttttgccaggctgatctgatggtacccagagtagcaatccaagaaggacaacacagaacacccggcggtcgagtctaccacctagtctattctaggaagtccgaagacatccttcggacaatgtttgttgagatccgtatagtcgacgcacatgcgccaatccactttattctttttgagta

SEQ ID NO: 49598 - DNA, 366 bp, Zea mays
  unsure (1)..(366): unsure at all n locations
ctgacttccaccgcgcaccgtcagaggtcagacgcttctttcttgtcacaactgctgaggggggagccgattgcgataacctcaaacatctacgccgaggcttccaccgccttttgtctgatggccgtggcacgactgctcatgcgccggttgaaatctacagcgagcacctatgatgggccacctctcttgccatttcgccacacgacagcaaagtnccacagcacctataggggaggcgaatacgagaccctcgcaaaacatctcacaaaacacaacttggactaatattggattagagacaccaaaagccaacccccaatgaagagaatgagaagagaaaaccgcctcacctaatcggtctca

SEQ ID NO: 49599 - DNA, 358 bp, Zea mays
ctatatattacaaagcatcaaagggttttaaacatgccaacacacgatttttttattaagctggtttgcgttcatcctttactttaatgtaacatatgtaaccaatatgagggaatgaaaaaaataccttagtgtgagaaagcctggtattattaatagtatgggtatattcatgagcgaacacgttgataaaaatttctagctcccgccctggactctacttctctattttgtagtgagatgaactatggttactccacctattcctgcttcattaattggattaggtggtcatcgattatgtatgaaaagaggacataactaaatgagtataagttgttcaatataaataattttc

SEQ ID NO: 49600 - DNA, 415 bp, Zea mays
cttcataatctttaatgcagattatatagtgtatctcaatttttataatcagcctaagccatgatttcatgttcttcatggcctttcacccattttcttcttttctacttaaatagcttcattacggttggcattagggtttcaacatttttccttcttttgaaaacctcatttgttttgaacatgattctctagatataaacttagcggatcttttattcctaattttattcggtgcttcatgctcactttggcttacatgaaatgatggctcttgggttagcactgagaagaaccctaggtgacactagggtgtcacatggataattcccttaatatcctctccttcaataagattatttttaacataaaaccattcctccattcaagccccgggccatccttttcggtatgt

SEQ ID NO: 49601 - DNA, 288 bp, Zea mays
tccacccatgctagccgtaggacttaagcagtgtcgattcagatgtatgagaatctaccagcgtttaaccgactctctgacactcccatagaagctatcgaatcatcacttcgtgtaaagacagcagacacctaccttacggaatagacagctgcgggcccatttgcactatcgggatactgaaagcgaattgtaatctacggaatcaacacgacaaacatcggaaatagaaaggtcaggagatatagcaaatttaccaaggcctctgaccaaaccttgaatgcatcc

SEQ ID NO: 49602 - DNA, 374 bp, Zea mays
  unsure (1)..(374): unsure at all n locations
gcaacatgacaccagaaggtgcaacacaacaagcgttgaatgaattcataattattgcagagcatatcagtacaagagacctggttcacgagattgtggctttcaaagattttcctaatttaaaagaatgggaaatgccgaagcttaagggggagaagaaagaagtgaacttgtgcgtttaccttactattncaaggttaagaaataccttaatacaccttgccaagagtggctggatacaattgaagtaatgtgtgatgaaatacttggcaactactccacaaaagaagatcaatngatgactgcggccttctgcacccgctcgaagcgaagactgaatcgagtgctggacgccttgggttttgaatactctg

SEQ ID NO: 49603 - DNA, 325 bp, Zea mays
  unsure (1)..(325): unsure at all n locations
ctccatcatagataccgatgcatgccggcgaattgctcatctatactcacactgtntgcacacagcggaatcttcgcacccaacgattataccggcacccatcgatgcgcgtgctgcgggcgcatgcctaggagcaccacactgcaagcgcgctacagcctatcatcctatctagtatggtgcatgcccatgcacttgctcctatatatcactctgccaacaatgagaaaagatagggctctgggcctcgcgccagccaccctgtcattagactcacacccacgcacgggtaaaccaatgcttccctccgcccccggaataaaac

SEQ ID NO: 49604 - DNA, 362 bp, Zea mays
  unsure (1)..(362): unsure at all n locations
agcttgaccaaaataccatttatgatacattgtccgctccatgacttagttctgacacatagttaactacttgcgcgcaaacataaatcgctggatccctattggaagtggcagcgccttgttcatgcgatggaatgtgagatgatatagggcatgaacacgtaggtctcgagaattgtcctgcaatacaagcatagcattaattatacacgtatatagctaacatgtacaacgatggcaacctgaagataaatatttagcataatcacttactagttgagtgtaagaagtgatgacacctgaattgtgatcataatacttcatgtaactcataacataaaagccacagntgtttgaccctg

SEQ ID NO: 49605 - DNA, 305 bp, Zea mays
aagatcgagtcagcttataaaactaccaagatgctgacccttaaccctcctaaagcattgaacatccttttctaagacaggaaccttatcacgaaagacagtgagccatttgacataattgaatacaaagcaaatgtatctaagaatctacaaaaaaaatggaaggaaggccggaaatacaatttacaaaccttgaccaacctgttccatccgaaggaagctcgcgggactggtttttcgagagagacatctctctccctgaaggggtaggacccgtgcgagtatcactgagccccgggataacc

SEQ ID NO: 49606 - DNA, 448 bp, Zea mays
  unsure (1)..(448): unsure at all n locations
agctttatcaaaaggacgtgaagagtgtctttctcaatggaccaaacaaggaagaggtctatgttgagcaacctcccggctttgaagacagagagtaccctaaccatgtctataagctctcgaaggcgctttatgagctcaagcaagccccaagagcatggtatgaatgcctaagagatttccttattgctaatggcttcaaagtcggcaaggccaatcctactttatntactaaaactcttgacaacgatttgtttgtatgccaaacttatgttgatgatatatatattgggtctactaacgaatctacatgtgaagaatttagtaggatcatgacacaaaaattctagatgtcaatgatgggggaggtgaagtatttcttgggatttcaagtaaagcaacttcaagagggcaccttcatcagccaaacaagatacactcaagacat

SEQ ID NO: 49607 - DNA, 448 bp, Zea mays
tttttcggcggcatgacgaaagtgatgcctgtcgtaagtgttcaagactcaacaaatgaaagtgagttcaccggatgtgggcgccaatgttggggacttgttctcaaatgctatgaatcaagaacaaggcaacataaaatgttaaatgtcaaagcccttcgtcctttgggtcattatttcccttccgatataatgaatctatgacgaaggctatgaaagacatgccttcatgaccatgatgagacatgaagaacattcatacaaaatatagaaagtaatataatcttttgtaaacattattattaatctatttccatttatcttatttgtacaaacaatattagaatacaaatgtaccttctgcttgtaagagtgaaaatacaagtgtgacgctcaaagcgaatgccaagtccgtcttgtccgtacgggagtactgttcattatttat

SEQ ID NO: 49608 - DNA, 404 bp, Zea mays
  unsure (1)..(404): unsure at all n locations
agcttaccacatttgaagcatgagcgcctcctctttgtcttggtcttgcttggctgccccttgcggccttttagtgccgtcttgaatctcttgatgatgagagccatctctttattatttagttcggccgcctcaatttgtgccaccttgctagggagcatttccttgcttcttggtgccttgagagcaagaggttgaggctcattgattggaccgtttagagcgtcgtcgacgtatctcgccttcttgatcatcatccgcccgcttacgaattttccgagtacctnctcgggcgtcatcatcgtgtacctgggattctcacgaatattggtcacgagatgaggatcaagaacgggtaaggaccttagcattaggcggacgacgtcgtggtccgtccatcgcgt

SEQ ID NO: 49609 - DNA, 482 bp, Zea mays
  unsure (1)..(482): unsure at all n locations
gacctataaaactaagcttgggcaccctncggcgtcttgtcacagccgaagtaccatatctcccatctggaatcctcggggccaaacccttcgggcgtggtagcatcgcagagactgctgatatcgcgccgagtgtagtaaggccatgtcccgagcctcttccagctggtccaatgaatcttctcggctggtctggntgctttggtcgtcataagcctttgtcctcggggaaccgtgttctaagtctgtgggtaggatggcctcggccccatagactagaaagaacgacgagaaacccgtggcccgctcggcgtcgtcctcagactccaaatcaccgaaggtagctcttttatccatcgcttgccgaactttgtgaggtcgttgtagatcctcggctatagtccctgcanaatcatacccgtggcacgctccacctgcccatttgtcattaagtgagctacggcggcccagtccatacagat

SEQ ID NO: 49610 - DNA, 347 bp, Zea mays
  unsure (1)..(347): unsure at all n locations
cttgaatcccttaaatccagcatactcttgagagtcttttctttagtcgggtaagtcttgctgagtaattgcgtactcagggttttattccctgttgtttttcaagttgtaattntgttctggtggggatggtgctaaatgcccgggggctccgccttcttatataagtatatcccatctttagcttccctattgaggattgtcacttaagctagcatgtattttaaaacttataaatgttttatacattcaaactgtaatctttttgaatcaatttcttttgtaatcacctccgatgatatatattgtaatcttgttataacttgtaaatgttgaacttgtaatca

SEQ ID NO: 49611 - DNA, 382 bp, Zea mays
ttcacgacgatcaagaaaatgctcctcgacgacaagaagggcaaatgggccgacctactacctgaagcagtttgggcactgaacacgaccgagtgtcgggcgaccggattcactccttttcgcctgctatatggatcggaggccatgaccccgcaggaaatcaaacatgggtccccgtggacaaccgcttcagtagtacccgacgttgacgagccaactttcaaagacctcatcgacagagaccgcgtcttcgccctacaagccctcaacaaatatcaagcccaaatgaaggcctggcgtgaccacgcagtccgtccaagagaattcaacgaaggggacctcgtactcgttcgcataactcgacagagtcacgggtagctgg

SEQ ID NO: 49612 - DNA, 466 bp, Zea mays
tatgaagattcttcatcccaacatgtgctactcggcgatgtcttagtcagtccatgttagtcttagcaattaagcaagtgtcgagttcagctctatcaaaggctaccaagtatagctgaccctctaacactcccttaaatgctattgaatcatcacttcttctaaagacagtgacacctatatcaccgaaaagacagttgtagcccatttgacataattgagatacagaaagcaaattgttatctaaagaatcaacgagaaaaacattggaaatggaatggtcacgagatatatcatatttacccaaacctttgaccaaaccttgatctccatccccgaatgtgattgctctttggggatcttggttcttctcatatgaggagaacatcctcttctcccttgcatgtggcttgtgcttgtctcctctccgatgcggcttgtgagacgaagatttctcttcttctct

SEQ ID NO: 49613 - DNA, 326 bp, Zea mays
gcttatcaagtcagctttcgaacgcatccatccccatgttatttggagattcctaggagaagttattatcaaaatactctaataagcgcagaagtcaaacaaccacacaaaattcagctctgtagatctttcgaagaggctccttcacatttgcacgttaaaatactttcttttcgtgtttatacctatctaaggctggtcattgctagtaataaataccccctatgtctatgatgtaagacaactttggatgatctaaaaacagaacccttttgttcagttgtgtactaacaaatattgagagtgatctctaccactttggtctt

SEQ ID NO: 49614 - DNA, 448 bp, Zea mays
  unsure (1)..(448): unsure at all n locations
nttcataattggggtattcaaaattcaaggcgtccattacccggttcaatcttcgtttcggccgggtaccaaaggctgcagtcatcagctgatcttctttctggtataattcccaagtatttcgttgcacatggtctcaatcatatctagccattctttgcaaggctttttggattgtttctcaaacttaaagcgataagggagccatacaagctcgtgcttctttcccacttcttttctcttcgacattccccaaccactagaagtcggatatgttctgtttgataaatactcttgcactaagtctctagtactgatgtgctcggctaccactctaaattcttcttctgccagctagcaaggtaaccccaatngcatatagcataanggtcgagtcatgccgaagttcaatattaacgcgactcattagcttctcctctttttctca

SEQ ID NO: 49615 - DNA, 381 bp, Zea mays
  unsure (1)..(381): unsure at all n locations
agcttctgacttgtgggcccgcctgtgtgttctgtgcacaccggacatctactgttccttgtncggtgtgccggaatgggcgcgcctgacatctgcgcgcgcagagcgcgcattaaatgcgcggcagagagccgttggcgcggagacgaccgttgcttctgagtcgcaccggacagtccggtgcacaccggacagtccggtgaattatagtggactagcccgtggcgatttcccgaagctggcgagttcctgaggccgacctcccttggcacaccggacactgtcctgtgtacaccggacagtccggtgaattatagcggagtcgcctctgaaattcccgaggtggcgagtggcgttggagtcctctggtgaccggacact

SEQ ID NO: 49616 - DNA, 441 bp, Zea mays
  unsure (1)..(441): unsure at all n locations
cgacattgcttccctgtcgganaccaatgntattcttaatgtcatggcgtctcccattatagagcatgcttctagcaaatttatttttttcattctcaagttcatgctcattaattttagtagctaatttagctatatgatcattttgttggttaatcatagcaaggttatcatcaatagcttctacattaatatctctacatctagtgcaaatagtaacatgatcaacactaaatgtagatggtttgcaaacatttaattcttctatcttnagatttaacttagcattctcatctctaagataggaaatagtatcattgccaacatttaaatatttaaccttataatctaagctagcattttcatttntaaggctagaaaattagtcataacaaatgcttagctccttagataagttttcatttttatcaacttcctgag

SEQ ID NO: 49617 - DNA, 391 bp, Zea mays
  unsure (1)..(391): unsure at all n locations
cacacttgaggtcatcatatagatgcaccaaagaaccatataaagccttcaatgtccatactatctctgttatggaccacactcgntcctttgaaacaattcaaagaacttaaccaattcagatcagaatttaagataagaggaacttaaaatctcatttctgatgatactcatgaagtatccatcttatgggaaaaacatgaccaataagaatggtcataacttttcatttcatcccaacaatgggatgaccaattcaatcttacccagcatggtaagtatcatcacttgaaaagttataacatatgcaacactctgtatgggaggatgtatgtagaatacagtccataagaaatgtntctgagaaacatatgcaatattcatcactatc

SEQ ID NO: 49618 - DNA, 434 bp, Zea mays
  unsure (1)..(434): unsure at all n locations
tgttgaactaaaatcttgcaaaccctctacatctatcgtttatcatgttacaatttgcactagatgtagagatgttaacattgatgctattcatgatcacatgaccttgattaaacaacaaaatgatcatatagcacaattagatgctgaaattgccgagcatgagctagataatgaagaaattaaacttgctcgtagtatgctttatagtgggagacgccctatcatcaaggatggcattggcttccaaaagggagacaatgtcaaaattaatgcccctcctaaaaaattgtctaactttgttaagggcaaggctcccatggctcaggataacgagggttacattttataccctaccggntatcccgagcacaagattaggagaattcactctaggaagtctcactctggctctaaccatgcttttatgtata

SEQ ID NO: 49619 - DNA, 327 bp, Zea mays
tatgtcattggcgggacgggaataacgcgtggcggcactcttttgatctctaactctatctctcgatgggcttggtggtgatcagtgctggcttcggatggggtgtcgtgtatactccgagacgaatgcaagttcattcccggggcacaacgactggcggaacaatctgttgctggaagtcaaaggagtttgctcgagtttggtacgctttatggagtttgtttctgggatggaggagatgatctgacgaaacggacccatgcgacggcgacaccatactgtgagcgcgggcgcggacaccactctgatgagtgggcccctattggc

SEQ ID NO: 49620 - DNA, 440 bp, Zea mays
tacaacataattgtaccttcatcacaacctctgaatgatattatgatgaatcgagaagctactggaacgattggaaaatgggctgcacagctcgatgaattttgtattgaatatgctcatagatcttcgattcagtcacaggcgctggcagactttattgctgattggacgccacgggctcatgaggaggaaacaaataaagacaacgaagcctggacagtgtattgtgatggatcttggggaaccttccgagcaggagcggctgctgtgttggtttcacctttcaaagtcaaaacctgttatgtggcaaaacttgattttaattgcacaaataacattgctgagtacgaagcattgattttaggtcttcggaagttaaaagcaatgggaatcagaacggccatacctaaaactgattcccagttgtttccgtcatattg

SEQ ID NO: 49621 - DNA, 328 bp, Zea mays
aagtgcctcacagtacctgaagaaatagtggaagccaagggtctaaagattgggtctgacctagtgtatcaagaacaacctatcaagattttggacactaaggactggatcacatggaatagcacggtcacgatgtataaagtattgtggagtcaccacgatgagcgtgatacaacatgggagacagatgcctatctatgagaactctaccccgatttttaccaatatggttagtaatcctaaaatctcggtgagagagatctttaatgggaggattgttacacccatggtgttagcatgctcatacatttgtattgctcatgaagca

SEQ ID NO: 49622 - DNA, 347 bp, Zea mays
gaagcacaagccccacagtagcctccttttcggtgcttgatcggtattcgttacgagccttatccgcgaaaaaaaccttttgagcttcggagcgcccacagtatgaaaaacacctttcctgagctcgttcgccgaaaacgattcaatatttcagcgtgtggggggcccagcttacagagctactgttcagtctctgcggtacaccatgcagcgagtgccagcgggggtcggctggtgaaaaattctggcgcttggcttatacctgtgcacttataagagcgggtggtggtagtaccacagcttcattgtattggactggttggtgcaaaattttaacggcgcgaagc

SEQ ID NO: 49623 - DNA, 299 bp, Zea mays
gctgcttacaatggtatatatctaggcgccggcacttatggtcactacaagagcgatcggaaatactgggcgccctctaagagcccgcattatcatctggatggctgctcaaaaattaagtggactgctgacagactaccaagacggggctgaaacacccacaagtagtctgctatgtgacccgagcctgaactatacacacctgctggtcacttgtgttgacaaggacgacctctaaagttactgacaaagtagggtgccacctcgaccttgatccaggatattccttccggatgggg

SEQ ID NO: 49624 - DNA, 444 bp, Zea mays
  unsure (1)..(444): unsure at all n locations
agcttgtgcagagtccgcttgaacttttttttgttaaacccgacctcgctgcaacatgacaccataaggcccaacccaacaagcgttggatgaattcagaattattgcagagcatatcagtacaagagacctggttcaggagtttttggctttcagggtttttcctagtttaaaagaatgggaaatgccgaaactagagggggagaaaaaagaaggagaacttgtgcgggtaccctactatttcaagtttaagaaatactttaaaacaccttgccaagagtggttggatacaattgaagtaatgtgcaatgaaatactcggcaattactccaaanaagaagatcagttgatgaccgcggccttctgcacccgtccgaagcgaagactgaatcgagtgctggacgcctcgtgttttgaataccctgactacgaaaatctgaataa

SEQ ID NO: 49625 - DNA, 409 bp, Zea mays
  unsure (1)..(409): unsure at all n locations
cgaagtacatctttacccagtcagagttgaatatgatgcttatgagatggcttgagccgattaaagattatgaattggaaattcactatcacccaggcaaggccaatgtagtggcagatgcattaagtcgtaaggcttcctgccattntcttgaaatgaagacttctgacattacattatgccaagaaatggagaagttgaacctgtgaatgattcaacatggaacttcaaatcacttgaagcttgagtcagttcttctgcaaagaataattgatgcacaaagaaatgatgagggtatgaaacacattcaagagaaaatgaaggccagcaaagccaactgtttcagaaaagatgatcaagacgttgtatgggttaataaccgcatagttgtgcccaacaatgatgaaat

SEQ ID NO: 49626 - DNA, 371 bp, Zea mays
ttcgagagcactttctcagtgttttgtatgatgtctgaagataaaaaaggtggtggtgattctaagcttagtctttctgaggagatgcatctgggctttcttcaatcaatgtcggagactaatacccacaagattactaaagaaattttggagggtttattttgagatactggtgacagggacaactatgatgtagatagggggggtgaagactctgaaggtcgaccttattgaccaatccatgcggtttttggtaaatcaacgattaaagaacatcatcttgtcaatatgaggggcagatatgttcacgacttgtccgctgtgagggctgatgaaagagagaagacttggccgacttctgaagaaaatga

SEQ ID NO: 49627 - DNA, 429 bp, Zea mays
ctctgccatgacaagaatgaccctggctggagagaacactctatgtatgggccacacctcggactgccatgacgaatgatcttgccatgacagcaacattgcttccatatgaggatattgttgccttataactcaccaaaaactgctctggggtcgagtgcccatcgtacatgggcaactgggggtggcttgtatgactgtgggcatagaatcgcctgcaattctgctgccacgggagaagcattattaaaagttaagataccatgatgaaagtcatcataccattcatctctcgttgaatgagttgacttgattaagctacctatgctgaggccctctgacctggtcatctttggtgagatgacgcattatttcagcaacctcatcgatcttcctctgaaaatagccagacaaacatcttctcccttt

SEQ ID NO: 49628 - DNA, 429 bp, Zea mays
agcttctaaagggagagcacattttatgactgacaaatgttcattttgagaaagacatgatttgtagcgcatgtcaagccggaaagcaagttggcgcccatcatccacacaagaacatcatgacgactgacaggcctctcgagctactccacatggatttattcggcccaatagcttacataagcatcgacaggagtaagtactgccttgttattgtggatgattattctcgcttcacttgggtattctttttgcaggaaaaatcacaaacccaacagaccttataggattcttgagatgggctcaaaatgagtttggatcgagtatcaaaaagataagaagtgacaatgggacggagttcaagaactctcatatcgaaggctttcttgatgaagaagcatcaagcatgagttctcttctgcctacaca

SEQ ID NO: 49629 - DNA, 452 bp, Zea mays
  unsure (1)..(452): unsure at all n locations
cgttgacacatttaanaaatcccgtacttctgttgctgttcatctgatatatggactgggaatgctaaagaagattactcgagcgtcgtttcgcattatatcaattctgcatcggaatcggaaaaacgataatacgactaatgctaattgatgtctcacatagtggtgaaaacatatctgagagaatattacaggtgttaaaagaatatggtcttaatgataaaaccttttttgtacactggacaatgcttctgctaatacctctgctatggggagacctactcctctacttattggttatgttgcggatgcttgtttgcatcaaacgagtgcatgtcatattctgaatctatcgctcagttctcttaaaaagaatcaccttatctaacatcattaaaactgcttatctcttctgaactctttaatccaccacttgtttatacaatcatatt

SEQ ID NO: 49630 - DNA, 388 bp, Zea mays
agcttgtgaagattcttcatcctctcttgagcaagtcagcgatgccagagccaacccatgtcagtcttagcaattaagcaagtgtctagttcagcttggttattattaaaatcaactaaatatagttgaacatctaacactaccttaaatgttattgaatcatcacttcttctaaagacagtaacacctatatcagtaaaaagacagttgtagcccattttacataattgagaaacaaaaaacaaattgtaatctaaagaatctatgagaaaaacattagaaatggaatgatcaggggatatagcaattttacccaaacctttgaccaaaccttgatttccatccccaaatttgatagctctttggggatcttcatttttctcgtatg

SEQ ID NO: 49631 - DNA, 396 bp, Zea mays
cttgacaggtcgcccagtggagatctgcctttttgcagtgcttcaaccaggcgcgagcggtgtcggaaaggaacccggggaggttgcggatgatgaagttgtcatcgtccgttccacctagttggcaggccacacggtagtccgcgagccacagttccggtctcgtctcccccgagtactttgtgatagtagtcaggggtcggaaccgggtcgggaacggcgcccctcgtatggctcgactgaaggcctgcggacccggtggctcgggcgagggactctgatcctccccgctgtcgtagcgtccccaatgcctgtggtggtagcctcggcgcaccctctcgtcgacgtgggcccgaccgtcctggtgatggtgctctttgccaagctacccggggc

SEQ ID NO: 49632 - DNA, 392 bp, Zea mays
  unsure (1)..(392): unsure at all n locations
agcttgccttcgcctcaatctatctttcgcagtttaacggggncgnggagcgtgccaacggaaaaatcttcacagctgtcaagaagatgctcctcgatgaaaaaaaggcagatggaccgatttattaccggaggcagtctgggcgttaaacacaactgagtgcagggcaaccgggttcactcctttccgccttctatacgggtcggaggcaatgactccgcaagaaataaagcatgggtccccgcgtacagttccgtcagccgtccccgacatggacgagccaacttcaaaagatctcattgacggagaccgggtcttcgccctgcaggccctaaacaaataccaagcccagaccaaagcatggtgcgaccatgcagtcatcccgagggagt

SEQ ID NO: 49633 - DNA, 438 bp, Zea mays
tcactatacacaactcaagcttgaaggccaagttaagaggcaggccccaatatattttgtatccgatgttcttagtttgtcaaagaaaaattatacagagttggagaaggtactgtatgctgtcttgatggcctccaggaagcttcggcactattttcaagcttacaacataattgttccttcttcacaacctctgaaggatattatgcggaaccgagaagctactggaaggattggaaaatgggctgcagagctcaatgaattttgcattgaatatgttcatagatcttcgattcagtcccaggcgttagcagacttcattgctgactggacgccaggggctcaggaggaagaaacaaataaagacatcgaagcatggacagtgttttgcgatgggtcttgggaaccttcggagcgggagcggctgctgtgttggtt

SEQ ID NO: 49634 - DNA, 388 bp, Zea mays
ctgccgcatgcaaacttttaaagggagaacacgtgttttgtttgtctatctcgcaactttataaagatagaccttgtgcagcttgtctagcaggtaaacaagtgggaggagcgcatcacagcaagaatgtgatgagcacttcaatacctctggtgctgatgcacatggacctcttcggacccgtcgcctatctgagcattggaggaagtaagtatggtctagttattgttgatgacttttcccgcttcacttgggtgttctttttgcaggatatagctgaaacccatgggaccctctagcgcttcctaatgagagctcaaaatgagtctgagcttcatgtgaagaatataatgagtgacaacgggtccgaattcaagaaccttcaagt

SEQ ID NO: 49635 - DNA, 394 bp, Zea mays
aagatccatttgcagcctataggtcttcaaccataacgatggacaacgatctcccaagttccattagacataatagattccatcacactccttacagcttccttccacaagtcagcactaccagaggaatatgcctcactaatgcgacttggtgtgtcttccacagggcacactatacagtcattaccacacgattttgcaaccctctgcctcttgctctttcgagtgactatagtgctatcctcctcagggatgtgcacgcgaagatcctctacatgatctatatgaataaacaattcatgctcatggcgaattatagcctcatgactggcatcactacgtgtattcttcatgggaaactcattctcaaaaaatgtcgcgcctcttgatccat

SEQ ID NO: 49636 - DNA, 387 bp, Zea mays
agcttgagctgtgtgtaagcttgtatgacttgcgttcaagtttccctgtctagtgcttgcattgtaacgttgtatgcctccccttttatagttcaacaggggcatgtacaagggttctaagccccgacacatgggcccagggacaaatagaaggatggaacttctgcttgccatgcccgtgtaatcttcgtgcgccctgacacctgagatatcggtgtgcagggggaaacttctcatataagggatgagtacagtgcaccacgtagcacgggcacactatttcgacaatggactggacaggtgcgccgtctgcagggtggccctagcgccacctgccagtggaaaggacatgatgcaataaatgccgtgggggcacatcatctgtca

SEQ ID NO: 49637 - DNA, 417 bp, Zea mays
tgattcgtcccttggggaggagtgcggtacatttatgaaacctaacgggcggctacagccccgaggaatctttgtaaaggctacgtagtgaaaccctgcctattcaccttggtagtgtttaaaggtttgatcggcccgaagcaagagggaatcacgacttgtgggtaaagtgcacaacctctgcagagtgttatgaaactggtatatcaaccgtgctcgcggttatgagcggccaagggagctccagtgattagtggtacttgatcagagacattatggtacaggtggttatgagattgatggttctggttatgactatggtgctggtaagtggtattctttccgtttggaaagggtacatcgggttaataacttgggtaatgctaaaacttggctttctactagtaagtaataatc

SEQ ID NO: 49638 - DNA, 382 bp, Zea mays
  unsure (1)..(382): unsure at all n locations
agcttcggcacggngacagatcttatgacgaaggggtgaaccgacttaaagatgaaatgacttaaaagacctgcaatgttttgtgtcattattatagtcgattgtaaggggcataaatgtaattttacacaggctgcgccctgtgcctataaatagatgaacagtacccatgtactgttcacacaatcctctagctgctggcacattacgctggaattattgttttctgccaagacgaaggtataaatgtacttgaatactgtattttaatatttaagttcatataataaaatgtgtgaatagtgttatctatttttagtatatctttctataatgtttcatgttttatattttattccatattgttttataagtctgatca

SEQ ID NO: 49639 - DNA, 408 bp, Zea mays
ctctcgactaagtcggggacagggcctcatggactggtgaaagtacgcgtaagcggcaaggccgaccgagccgagggattcccacgcctctgggatacggatacctcactcgtcccttccgcgaaaagcaactctcgctcatacaaacatccctgttaccgacagagtccagatgctcgaaacaagaggaaaaaaggcgcagcttcgcaagcgtggcgagggtgtgttttttctggcctcggcggccgcagaaagcacacgctacaagatgatctgatcctgcaggctcgggtcttcacgctgaagggagccgtagcaccctcggcatcgacgacgtcttcagcaaagcccgacccagcctcgggcggcgacgcggcccagggactcctccgggaatccggcccgagc

SEQ ID NO: 49640 - DNA, 328 bp, Zea mays
  unsure (1)..(328): unsure at all n locations
ctgcatgcctgtcaacctctcagtgcttatataccaatatctcaagagagccatatgtattccattagatgtggggaaaaagtggtaacccttcatagagctgcttccaagtgaaagctcttctttccccttgtaatatcttggtctgcctctgtttatgaccaatctatgcagaaattacactctcagtatttttgccattatatatgatcagcatgctgtgtctacacctgacatgaagactgggtccccacgaacagntccagctcactttcccgtgatgggcaaggccacttaacttgaactgagtgagaacacacgttcttag

SEQ ID NO: 49641 - DNA, 346 bp, Zea mays
tcactggagatttacagctggtcttcaacagaattgcgcaatatctatggaagcctaatcctgaaaagtgtggctttggagtaccagcctgaaaaatgcttgggtttattgtcagccaccggggaattgatgctaatccacaaaagatcaggctatcatgagaatggaggccccgcgatcacagaagaaagtacaaagacttactggatgcatggcagccctaagcacgttcatatcaaggctgggagaaaaaggcctaccattctacaagttgctcaagaaggtaaacaagttccagcggactttacaggctcacgaagctctatatgccctgaaaaattcctga

SEQ ID NO: 49642 - DNA, 378 bp, Zea mays
  unsure (1)..(378): unsure at all n locations
agcttgtactttttctcaacattatctgatcggngattggcgcgccgttttagtgcgtctgctgacgcgcccactgtcaatccgccttcagtcacgtcaactgccatatctgtccccgcggctgactgacccgcggcccccacgcctggtggtttcgtcgggccacgcgcggggcgcctcgttgttgctgcattgatttaaaatattaccttttgtcttccgcagcggccccaaggaggcgcactacagacacgcgcggcggttcgctctttccgcacccgaaatctggcacacaaactgtatgacttgtggacccgggccccgtgtcaaagattgggctgcctgtgtcctaggtacccgtcgagcgagtttttctac

SEQ ID NO: 49643 - DNA, 403 bp, Zea mays
  unsure (1)..(403): unsure at all n locations
tcaccttcaatntagtatgacaatcttcatttaatatcttggacctatatcacaattatgccaacaagagcttgcaaatgaattctaaatccaacacaagtttggaactccccttgaaaaggtaaaaatgcaaaggtacatcacttcatgtcacttctccattacctttgtgccatctaaagacccttttcataatagtgtgttcccatcttgcttaatcataatttctaccctctatattctttgtatcctttttggagatttatgacaaagggggagaaattttgcattaaagcttacctttagtcttatgtaactaattgttagaagacttttaagaaggggagatataattaacaaaaagggggaatcataagaaaaacataagatgtagaaaattgat

SEQ ID NO: 49644 - DNA, 369 bp, Zea mays
  unsure (1)..(369): unsure at all n locations
agcttatccacttatgacgtgtttttcaaacaaggngtgaaataatactctaccctgaaactcgaaacaaggatctacaaacgggtggggtgaagtggcggagcccatatatggatgcctgttgggcacgtgcccagacttcggcccaagtactcatagacccagcacacaaggacgtacaaatgcttgtgtgaagaaagcgactctgggatggaaaggaaaggtaggggaggccgcgacgtgtatatcgacagtaacggaagcgtgtggaacagtgaatttgaaatatctcgacgagtggcagaaaattatttaacatgtcctatgagaatgttgatgttggtgcactatatatgagcagacggcgat

SEQ ID NO: 49645 - DNA, 387 bp, Zea mays
atgcaatcttgaactgcgagtaagacattatgacttgcgttctaaattccctgtctagtgcttgcaatgtaacgttgcttgcctccacttttataggtcaacaggggcatgtacaaaggatctaagcccctacacatgggcccatggacagactaaaggatggaacttctgcttgtcatgcccgtgtgatcattgtgcgctctgacacctgagatatcggcgtgcaaggggaatcttgtaatataaaggatgaatacagttgacgacgtaccaggggcacactatttctacaatggaaaggacaatgacgccatctgcacggtggacctagtgacacctgccaatggaaaggacatgatgcaacatatgccgtgggggcacattgtc

SEQ ID NO: 49646 - DNA, 366 bp, Zea mays
ccataaccttatgatccacgtaccgccacgcttacgagtgcgacggggaatgcgtggagtacgctcaggccattgccgaattcgaagacctcatcgacgacctggattgcctatgcaaggaggcgcctgaggagaagcgccccgcccgtgacttttaaccggacgatgcggttaaatctgtgcctctcgaccccagcaacgacgctggcaagaaagtcatgattggctccgagctcgaccccaaataagaagcagtgcttgtagactttctccgtgcaaacgctgaaattcttgcgtggagtatctctgacatgcccggcataccgagggatgtaccccaacactcactggacatacgagccagtg

SEQ ID NO: 49647 - DNA, 318 bp, Zea mays
gccatgaagtgatagtccctggccacacagaagataaccatgtctgtgccacatttttaactgccatgacgagcgatttgggcatgacagctgcattgcctacctatgaagatatggttgcgtcataactcataaaaatctggtttggatctgagggtccatcatacattgtatgctgacgtggactgtatgaagggggccgactgatgacctgcacttctgctgccaatggagaatcgtgattataaggaaaggtacttgtgaataaaatcatcaaaccatccatcgaaattgaaccatgcctcttgatgaaggacc

SEQ ID NO: 49648 - DNA, 383 bp, Zea mays
tggactggattggagtccccggtttatttcttaccgtgaccagggagagtgggctccatacgatggtccaaagtatgtagctgatccaggcagtcgttggaacaagcgtggattcagaaagagaaagaggcacaagatggttatggatcagatacctggtagtagtaagcggggaagaagaacaccatttcttaccgaccctgaatagtacgagtgtggcaagtgcggtagacttggtcacaattcacgcacctgcagttggcagattagtggggtgtgtattattcgtaaatttaataatttggatattcattactagtatggatttgtattctattatatgaagtatttattttatccgtgctaacccaaattcgattttt

SEQ ID NO: 49649 - DNA, 278 bp, Zea mays
  unsure (1)..(278): unsure at all n locations
agcttgcaatcattatttttatctaacccacccatacggattccctccattactggtatattgacatccagattgagtagccaggctgtgtagcctatgggccagtccaagagaacggataatcgtccctggggaggtccggagccgtgcggccgcttagcttggtctagtaccctaagcccacacactacaggaaacgcctaaattttcgtgggccaaaaacccacgaaaataagcctaaaccgacgaaaatagagaattntcgtcggcaggccgac

SEQ ID NO: 49650 - DNA, 395 bp, Zea mays
tggtgccgatggagaagcagaaatccttgaagtcttggttgtcgaattgcttgtcgttgtcgactgtgagttcggacgggactccaaagcggcaaacaatattttgccagaagaatttctgggctggcttcgatggtatcggggatacagccctcgcctcaatccatttggtgaaatactcaacgacgacgaaggtgaacttgaggttcccctgagccgtgggcaggggtccgacaatgtccaggccccagcgctgaagaggccatgtgtgggcgatcagcttcgtgaattgcaaagggcttcccaagcgtggagaaaacttctgataggcttcacaggaccttgttacccgatttgcggcacgaatcatggcgggccagtagaaaccttgacga

SEQ ID NO: 49651 - DNA, 390 bp, Zea mays
agctttaccaaatggacgtgaagtttgccttcctcaacggaccaatcaaggaggaggtctatgtagcaacctcccggctttgaagataataagtaccctaaccatgtttataggctctctaaggcgctttatgggctcaagcaagccccaagagcatggtatgaatgccttagagatttccttattgctaatggcttcaaagtcggcaaagccgatcctactttattcactaagactcttgacaatgacttgtttgtatgccaaatttatgttgatgatatcatatttgggtctactaacgaatctacatgtgaagaatttagtagaatcatgacacaaaaattcgagatgtcgatgatgggggagttgaagtattttctaggatttcaa

SEQ ID NO: 49652 - DNA, 412 bp, Zea mays
agaaatatttagacacagtccgaaggattgaggcttcctttgaagggttttctgtcaaaaatattcctcgaggagaaaatgaacatgctgatttgctagccaagtcagcagcacaggggctgcccttaccttcagaaatatttttcgaaacaataaaagcaccttcggttgaacttcttgaaagagcagtcctcaatatatctcctgtttatagtgaagactggagaactgagatcatctctttccttcagggtaactttctttcagatgacaaagcttataacaggaggatagaggcaagagctcgaccatatgttataatagaaggggagttgtacaagcatggggtctgttctccattactcaagtgtttatccagagccgaaggtatagaattgatgaaggaaataca

SEQ ID NO: 49653 - DNA, 389 bp, Zea mays
agcttgtgaagccaatcacaagtttattgtagaattacattaacgccaatgggtcttctaagtgtaatgaagcctttgagcacttgaagatattattaaccactgctctggtattggctcaaccggacatcactaagccttttgatgtatattgtgatgcatctggcagtgggctcggctgtgtactgatgcaagagggccgagtaattgtgtatgcttcaaggcagttgcgccgacatgaggagcattacccaactcatgatctggagctagctgctgtggttcatgccctgaagatttggcgtcactatctgctgggaaatatctgtcacatatatacagatcataaaagtttgtagtacatcttcacccaggcagaattaaatatg

SEQ ID NO: 49654 - DNA, 414 bp, Zea mays
tggaggcgtctattggttgtctacttggtgtagactcctccttcttctcctccgttgccttgaatgcaacgggttgggcttcggatgggtcgccaagctcgttgattttcctcgagccttctatcatgcactcaaaacttacaaaatgcccgataacttcctcgggggtcattttagtatatctaggattaccacgaatcaattgaacttgagtgggattaagaaaaatgagagatcttaaaataacatttaccacttcgtggtcatcccacttcttgctcccgaggttgcgcacttggttcaccaaagtcttgagccggttgtacatatgttgtggctcctcccctttgtgaagccggaaccgaccgagctccccctcgatcgtttcccgcttggtgatcttggtgagctcat

SEQ ID NO: 49655 - DNA, 388 bp, Zea mays
agcttgtccgtggcctcaaccttttgctcgcccacaccgtcccgaccctaagcttgctcgccgcctcgccccctaacctcacccttggcccttgcgcatagtcgcctcgttcgccgctccccgccttgagttcgtcgcagtgccactttacttctcgccccaagtacgtctgaattgctgatataattatttacatttttacaatgtactaacggtatatttttcttattttgtaggacaacacagttccacttgttggaccctcactatgacgagcaccataggggacgactcatcgcagaagggcacgtaatggctgagtccatttattaaatttgagaatactaaatgtaactgccgcttgtctaatcaaataaatcttattgct

SEQ ID NO: 49656 - DNA, 417 bp, Zea mays
  unsure (1)..(417): unsure at all n locations
tggtcattntatcgctaactgtcccgataatgatagtgaccaggaaaaggggaacataagagaaacgaagaagccatacaagaaggcaaagggcgaggcgcatctaggaaaggagtgggactcggattgctcctcctccgactccgacaacgaaggactcgccgccactgccttcaacaaatcggctctcttccccaatgagcgtctcacatgtcttatggcaagggagaagaaggtgagtactcaagactccacttatgcttcttctagtgatagtgagtctagtgatgatgacatagattattcatgcttgttcaagggcttagatagatctaagatagataaaatcaatgaattgattgatgcattgaatgaaaaggataggcttttataaaagcacgaggatttattgtatga

SEQ ID NO: 49657 - DNA, 392 bp, Zea mays
  unsure (1)..(392): unsure at all n locations
agcttntaaagggtgaacacattttatgactaactcttgttcattttgagaaagacaggatttgtagcgcatgtcaggcaggaaagcaagttggagcccatcatccacacaagaacatcatgacgaccgacaggccgcttgagctactccacatggatctattcggcccgattgcttacataagcatcggcgggagtaagtattgtcttgttattgtggatgattattctcgcttcacttgggtattctttttacaggaaaaatctcaaacccaagagaccttaaagggattcttgagacgagctcaaaatgagttcggcttaaggatcaagaaaataagaagcgacaacgggacggagttcaagaactctcaaattgaaggcttccttgag

SEQ ID NO: 49658 - DNA, 407 bp, Zea mays
  unsure (1)..(407): unsure at all n locations
tatgaagattcttcatcccaacatgggctagtcggcggtgccagagccaacccatgttagtcttagcaattaagcaagtgtcgagttcagctctatcaaaatctactaagtatagctgaccctctaacactcccttaaatgctactgaatcatcacttcttctaaagacagtgacacctacatcagtaaatagacagttgtagcccatttggcataattgagaaacgaaaagcaaattgtaatctaatgaatctacaagaaaaacattggaaatagaatggtcaggagatatagcaattttacccaatcctttgaccaaaccttgatttccatccccgaatgtgatagctcgttggggatcttggtttttctcgtaggaggagaacatctttnntctccctgtcatg

SEQ ID NO: 49659 - DNA, 387 bp, Zea mays
agcttatgaagattcttcattcttttgtgggctattctgcgatgccatagccaacccatgttagtattagcaattaagcaagtatcgagttcagctctattaaagtcaactaagtatagttgaccctctaatactcccttaaatgctactgaatcatcatttcttctaaagacagtaacacctatatccgtaaaaatacaattgtagcccattttgcataattgagagacagaaagcaagttgtaatctaaagaatctacaagaaaaacattggaaatagaatggtcaggtgatatagcaattttaccaagtcctttgaccaaaccttgatttccatccccaaatgtgatagctcgttggggatcatggtttttctcataagaggag

SEQ ID NO: 49660 - DNA, 410 bp, Zea mays
tgcacagtcaacagtactgtgccagaatcgaagttcatctactaagatatatcctacctctgaaacaacttttacatttgttatcatttaccttttcaataaagagcaatcattgaaaacttagttcttttgttgttttcaatttcttgtaatagcttcgtcattatcataatgaatataccttcttcaaacatcgacgaagtcctaaaggtcttgacaaaggaatgcactgcaagtttttgtcgaagcaacaaaagtcgttcttaagggaacgtagcgtaagttttctgctcaaaagtcgttccaaagggaatgcagagcttacagcgaaaaataaacgctgataccgccgaaataaaaggcgaagaagctcctaaggtaggcttacagcgaaaaataaacgctgatac

SEQ ID NO: 49661 - DNA, 374 bp, Zea mays
agcttcggaaattttatacttctttccatctcccgacagacggataattctttgttgtctgggaggcagtataagaaatcttcttcgtctgtcccattgaacactagtgcccccttcggatatttcaattctttggcatagtgattagcttcaaaaacttcttcttccgataactttttccccgaagcatgtcgcacgatatagtcgtatattttggaagatgcttcatggacggcggtatcaatttcttcgaccaaagttggctgtgacattttcatttcttcgattacctttgcaactttttcttcttctgcttccgaaggtattaccttggttggttctgaaggcccggtttcaactccggtctgttgctt

SEQ ID NO: 49662 - DNA, 345 bp, Zea mays
ttgactgtcctcatgcctgcttataactcatcttgggcttggggtgcaatgctgcacctgacggtaatcaagatacgttacgtgaagctaggagccaacaaaagaaggcttcccctccacctccttacgaggaggagttggaccaagaaatcagggaccttgaagccattcatcaacaggtccagaatataacagaagagatgcttgatcttggcgaatttcagaggaagattgatgatgctactgaagaaatgtgtcatttcaccccatattaccaggaccgaaggccttaacacacaaagcttcgtcaagacaattcgtaaacaatgatgaatggtatgatga

SEQ ID NO: 49663 - DNA, 381 bp, Zea mays
agctttgaaagactgactgggctttccatttctaactaatctagcgacctacggtcacattgctttgataccacttctgtcacacccgtttccaaggggcagagccgggtgcatagcatatgtgtgccaggatctatttccacacatatgttgacgtcacaagtgtaatatatcaaaagaacaatgcataagagcgtaaataacgattatattaacatattacacctcgaacagacataatgtcttaacctttattcatcaaagtacagcgaacatggacatccatccacaggaagatgaccgggggtatcactagactagcatccatggagttcagcatcatatcttcatctgcaacttctgatcaaaattaagcaaggg

SEQ ID NO: 49664 - DNA, 396 bp, Zea mays
tgaagctgggttaagtgccatgacgaaagaggatctcgcagacagcctcgcgtacaacagcctgaaggtacgggaattaaacacttgagaaaaaaccccctatttttttttacgcaactcattccttttttcttatatgaattcttttttcatatagggcctgatcctaagcaacgcgttaagagcgcaaaagagcgccgaagatgaaagttatgaaattgcgtttaataatttacgctccgaagttatcaaactgagaaacgaagctttggaaaaagataaaattctacttacactggtagataaagtgaaaaaagacgaagctgcttcaaaggcccaggccgaagctcaaaaacgcgagattaaagatcttcagaaacagctggctagagctaa

SEQ ID NO: 49665 - DNA, 380 bp, Zea mays
agcttttaagtttatgttttttcttaataagatttaaaaatgaggaatcttattttaaaatacattttaaccctaaatcttataaagaaatatttataaatcttagaataagattttgggtgttacaaatcctacccccttaacagaaatctcgtcctcgagatttgtaagaaaatggatgtatactcatattgtatgagaacatatgcacaaacaaagaattctcggcatgatgcataactcattaacgaaacatagggtcaattagaccttattattattattaaaatagtaaagtactggctatactaaattaatatttaagtcttacaaatagtaaaaaaatatatctatgtatatatctctaattagggttattt

SEQ ID NO: 49666 - DNA, 381 bp, Zea mays
  unsure (1)..(381): unsure at all n locations
tgacctgttgtatgggngaactcattttttgaggaggttttgttgcccaacgataaggacaactagtgtgctctatggcatgcatgatacacgtgtgaaaggttctcatcttacaccaataacaatgaccaagacttgggttccgcttgagatcctagggacggccctatgcacctctattgtggcgccacccgacagtgtccggtgcaccagaggactccaactcaaactcgttaccttctggaaaatgcagaggcgctccgctgtaatttaccggactgtccagagcttcaaggaactgtgcgctacgaactcgccagcttctggaattcgcgacggctagttcacaataattcaccggacatgtctggtgaacaccgg

SEQ ID NO: 49667 - DNA, 378 bp, Zea mays
agcttcaacattatcggagtttttgtggacactactcatggttccatggccgagcgcaatgagtacatcaacaataggtacgagaaactgcatgatcccgtcaaaaatactcagttgcaggttgatcttatccaacaccacttggcgcgccttggatctggagctgcttaagtttgaagtttatgtttgcatcaacaataaaatgacgacattttatgaaatgtcgtagtgtcaggtgtaatgtgtcatgtcgtagtttcagtttgtggcaagcttcattgtgtaatgtgtcatgtgtgtcaaagaagagtaatatgtcgatgtgtcatgctgaaagtttgtaataaaataacaagtccagtatcatcaaccaacatt

SEQ ID NO: 49668 - DNA, 395 bp, Zea mays
taaagccatggtaagtagcatatgctaataatatgcgaattgactcaagcctagctacgggtgcataggtttcaccgaaatccaaaccttcgacttgggagtatcccttggccacaagtcgagctttgttccttgtcaccacaccatgctcatcttgcttgttgcgaaaaacccatttggttcctacaacattttggttaggacgtggaactaaatgccatacctcattcctagtgaagttgttgagctcctcttgcattgccaccacccaatccgaatcttgaagtgcttcctctaccctatgtggctcaatagaggaaacaaaagagtaatgctcacaaaaatgtgcaacacgagatctagtggttacccccttatgaatgtcgccgaggatg

SEQ ID NO: 49669 - DNA, 372 bp, Zea mays
  unsure (1)..(372): unsure at all n locations
tttaactttccttctcgcattccatgtcgtangttggagcacgacgggtgcggtctagttcgtcccgaagaggttcccgaagctgggtaggtccagcggcggagcaatcgccacgggccactatgtgtggtggtgcacgtctactccacctgctaaacactcaaccatatgcacaacactgcaactttgggagcaatggcatcctcgatctctgtcgccttgatcccccacgctctcttccaccaccttgctgttacacaacacgaccagcaactggagcaccaacagcaggtccgacaacatgaagcaaagcatcgcaaggagagagaaggtgantttttacgacacattacccaagaccgataaaaaaaa

SEQ ID NO: 49670 - DNA, 388 bp, Zea mays
tccttagggtcggcttggaatcttgcacacatgcatacggaaagcataatatccgggcgagatgcacataaatagagtaaagaacctatcatcgaccgatataccttttgatccacggacttacctcccgtgtcgaagtcgaaatgcccattggttcccatgggtgtcttgatgggcttggcatccttcatcccaaacttggttagaatgtcttgagtgtacttcgtttggctaatgaaggtgccctcttggagttgcttcacttgaaatcctaagaaatacttcaactcccccatcatagacatctcgaacttttgtgtcatgatcctactaaactcttcacatgtagactcgttagtagacccaaatataatatcatcaacataaa

SEQ ID NO: 49671 - DNA, 367 bp, Zea mays
agcttgtgaagattcttcattctaacatgggctagtcggtgatgccagagccaacccatattagtcttagcaattaagcaagtattgagttcagctctgttaaaatcaactatgtatagctaacctcctaatactcccttaaatgatactgagtcatcacttcttctaaagacagtaacacttatatccgtaaaaagacagttgtagcccatcttacataattgagatacagaaagcaaattgtaatctaaagaatatacaagaaaaacattggaaatagaatggtcagatgatataacaattttaccaagtcctttgaccaaaccttgatttccatccccgaatgtgatagctctttggggatctt

SEQ ID NO: 49672 - DNA, 398 bp, Zea mays
tgaccgggacgaaaggcgatcacgacgaaggataagacgatcacgaagctatgtgcagaaaagcttcggcataacggcagaaaaggggaaccgacttaaagatgaaaagtcaaattagacctcgaagaattactatagagttattgttaaatgtaatgggtattaatgtaattttgcatgggctgcgacccgtgcctataaatatgtgaacagtattcccgtactattcacgctgacttggcactttgctttcgcatcgcacctgtattcacattccttcaagtcgaaggtatatttgtaatttactattatttacatgagtaatttaagtaaaaaaataaattaataataatgtttacagagattatgttatttcttatattctgtgtttaaatatt

SEQ ID NO: 49673 - DNA, 390 bp, Zea mays
  unsure (1)..(390): unsure at all n locations
agctntacaaatggatgtaaaaagtgcatttttaaatggcttcataaatgaacttgtatatgttgagcaaccacctagatttgaagaccctagatatcctaaccatgcttacaggttgtctaaggcgctatatgggctaaagcaagctccaagggcttggtatgagcgtcttcgcgacttcctcatcgaaaagggcttcaagatcgggaccgtcgacacaactctattcacaaagaaacataacggtgatattttcatttgtcaagtatatgttgatgacatcatctttggctcgacaaatgactatcattgcaaggaatttggtgagttgatgtcaaaggagttcgagatgtcaatgattggtgagctaacgtacttcctcggctttca

SEQ ID NO: 49674 - DNA, 417 bp, Zea mays
ttcttcggcgccatagcgaagggttatgatcgccgaatgtgttcaaaaactcaaagagtggaagtgagttcaccggaggtgggcgccaatgttggggacttgttctcaaatgctatgagttaagaacaaggcaacacagaaaatgttagacgataaagtccttcgtccttcgaagcattatttcccttaggatataatgattttcggacgaaggttatgaagggcgcaccttcataagcacaacatacgatgatgaagaatgaatcatataagatataaagaataatataaacaattatatgttattatcaacttatctctgcattattattatgaaaaaatagaaatgacatcaaattacaaatgtaccttcggcttggaaagagatgaaagtacaagtatgacgcaaaagcaaaa

SEQ ID NO: 49675 - DNA, 405 bp, Zea mays
ctgtagacatgcaatcttgaacacatggttaagactcttggggtccttattaccgggggggctgagcaacatacactagtggactaatcttaccatttaagaacgcgctctatgcatccattgggtgaaacttgatatcgcgcgcacaggcgtaaacaagtagaatccggatggcttataatgttgctactgtagcaaaaggaatgcgcaaaatccagaccttcaatgtgaagatatccttcgtgaactaatctatgccttgttatcttactaccacaccatcttcattgtggttattgctaaagacccattgtgtaccaatgacattttggatctgtagtgtctcaacaagctgccaaacttgattgagagcgaagttatttaattcttcatgcatcgcattca

SEQ ID NO: 49676 - DNA, 417 bp, Zea mays
tcacccgcccaggattagaattggacggtcggtttcctatcgggctgaaggatatcctcccacctaatcctgttcgtccgtgattggatcgacggtccgcgatcgtcaccaaccccagacagtagagaacccagcgccgccacggcaatagagccattgcggcggcgcaacgccggtgaggtgtccaaccgaggcgcccagggcacatacttccaatctacgagacctagagagagagaacccaaaagcgaatgcgttggtctgctacttacaagtggtgcgtacggcgttgaggctgtcctcggagcgaagcgatggtgcagcagcgcgacaagaaattcacacagcgccagcgcccaatgcgcgaaatttgcggtggccgaagctcaccgaagctcccacatggcacccggagag

SEQ ID NO: 49677 - DNA, 384 bp, Zea mays
agcttgtgaggctaatcaactttatgttcatgatcaagaacctgacataaaaaattactctacttagcgaaattaaagaataaaaatatcttgaatttgacctatgttatatacaattaaatattatactcactctgatctttttttatttgtcgcgttttaattcaaaataaaattaacgggtgtctaaatattcgagaacagatatgttagtttttttgtggaatatatttttatattatactagatctgtttggtgtcttgaatatcactgtttgttatgaacttgattgaactgtgtatcgttttactaaggacagttagggttccctttggaatgtgagatttgttttttttctttcttttctggtgaaaataaacctg

SEQ ID NO: 49678 - DNA, 417 bp, Zea mays
tctaaagggagaacacattttgggactaacaaatgttcattttgagaaagacagggtttgtagcgcatgtcaagcagggaagcaagttggagttcatcatccacacaagaacatcatgacgaccgacagaccgcttgagctactccacatggacctattcggcccgatagcttacataagcatcgacaggagtaagtattgtcttgtaattgtggatgactattctcgcttcacttgagtgttctttttgcaggaaaaatcacaaacccaagtgaccttaaagggattcttgagacgggctcaaaatgagttcaacttaaggataaaaaagattagaagcgataatgggacggagttcaagaactctcaaatagaaggctttcttgaggatgagggcatcaagcatgagatctcttc

SEQ ID NO: 49679 - DNA, 386 bp, Zea mays
agcttcggctctgtctatgttgtttattgcctttttttctgtccaactcccttcaccccttctggcagcttcttgacttccatgaatggcaatgggcccttgatccaaaggtatcttcatgcacaagtatgttggatgaagtattgcttcgaaggcattaagtgttccttgaccaatgatcgcattgtacgggtattccatatcaacaatgtcaaaaacaacttgctcagttctttggttgtgaacataaccgaaggtaactgacattgtgattttgccaagtgccacaatctgccgtcctccgaagccacagagagggtgtgtagcatcatgaatcttgtcctctggttcttgcatctgcttgaaggcctttgcaaatataatgt

SEQ ID NO: 49680 - DNA, 415 bp, Zea mays
tcggcatctttacttgcttcttcctcctcagcccctggcatccagtcagcgatgaagtctgctagcgcctggggctgaatcgaagatctatgcacataatcaatgctgaactcgttgagttccacagcccactttccaatccttccagtagcttctctatttctcataatatccttcaaaggctgtgatgaaggaacaattatatggtatgcttgaaaataatgtcgaagcttcctcgaggccattaagacggcatacaacactttctccaactctgtatagtttttctttgataaactgagaacttcggagacgaagtatactggagcctgctttttcaattgtccttcaagcttctcctgaacaagatccgcacttactgcagagtgcaaagctgccacatacagcagcagag

SEQ ID NO: 49681 - DNA, 385 bp, Zea mays
agcttctaaggcgcaagccgaagtttaatcgaaatatgcagaagtctattctacaataattcaaactgaaaccaaagctgggcctttagagcccgctgagataaagcctgccgagattgaagaaaagacaatagaagaatgtaacaccccagatgttatattctgctcgacaacgagtatggacttacgcacgaaatatcagtgaataaaacagatgctttattctaattattttcaccattgcgattttaggatcgcatatgttccgtctgtcgcaagtgcgacgtcgtttttatttttatctatccgggctcttccgaaattttcgtgatattcggaacatagttgttccaaaaatcggtgcgttcggtgaatattcatcgct

SEQ ID NO: 49682 - DNA, 419 bp, Zea mays
  unsure (1)..(419): unsure at all n locations
actcaagcttgagtgagacggaaggtgattatgacnaacgattttatgatcactaagctatgcgcagaaaagcttcggcatgacagtacaaaagggggaaccgacttaaagatgaaaagccaaattagacctcgaagaattactatagagctattgataaatgtaaagggcattaatgtaattttgcatgggccacgacccgtgcctataaataggtgaacagtattcccgtactgttcacgctgacttggcattcacttttgcgtcacgcctgtattcttttccttcaagcccaaggtacatttgtaatttatctttgtttacacaagtaatacaaataaaaagagattaacaataatgtttacagaaattatgttactttctgtattttgtctgaatggtctccattttttatcatg

SEQ ID NO: 49683 - DNA, 389 bp, Zea mays
ctggcgcgggggctggactgttttgtttcaaatggtggctcaactgggggacagattcaactcgcgcaggcataataattaataatttttgctggacacctgcgtgtacggcctgtgggggcagaaccagagccatggcagaacaagtcaatggcagactactattacttacttaataagtagtagagatttattacacattgtaaactttattgctcccaatttatttggtgctttcaatttaatttgagtctagtcttatttcattgataattttgtatttgatgcatagacaaaagaaatacagcatgatgcatatttttacgtgtttttatttacaaatttatttgaaataacatgtgtctcatgcataatcacttcattccaag

SEQ ID NO: 49684 - DNA, 379 bp, Zea mays
  unsure (1)..(379): unsure at all n locations
agcttaacaaattaaatttctattatctgaatattgtgctcctgcctaagtctggtaaaagattgttcatcaagtggcttggtaaagatatcggctaattgatctttagtattaatgtatgaaatctcgatatcccccttttgttggtgatccctaagaaaatgataccgaatggctatgtgcttagtgcggctatgctcgacgggattgtcggccatcttaattgcactctcattatcacatancaaagggactttggttaatttgtaaccgtagtcccgcagggtttgcctcatccaaagcaattgcgcgcaacaatgtcctgcggcaatgtactcggcttcagcggtggaaagagcgaccgaattttgcttctttt

SEQ ID NO: 49685 - DNA, 371 bp, Zea mays
tcttcttgtgctcatcaaccttgacatataaccattctgatttccagcctgccggccatttgcttcggtagctgattacaggaaactttgcggttttccggtaggcaaaattgtagcaaccgaagttttcatgaagcccatcttttctggcctttgtttgataatgcaattcatgaactcgacagaaactatcagcaaaaggctccactgcttggcttcggagggcccaaatataaacgctaagcctaacgatagcgttaggagttaactggtgaaggtagatgccaaacctcttcaatatctccgcaacaatctcgtgaacagggaatcttagcccagcctttaaaaagcttttgaagatgacaacctcg

SEQ ID NO: 49686 - DNA, 380 bp, Zea mays
  unsure (1)..(380): unsure at all n locations
agcttcggcatttctacagantttttgaaccgactcaaagatgaaaagccaaactagaccctgaagagttactatagagttactgataaatgtaaagggcatcaatgtaattttacacgggctgcgtcccgtgcctataaataggtgaacagtactcctgtactgttcacgctgacttggcattctctttttacattacgcctgtacctttacttttcattaatccgaaggtacatttataatttgtcattatgaatttgataatgcaaataaaaataagttgatgataatatctgtattattatttgtatttcatacatgtattcttcattattatctatcgaggtcacgaaggtttttttcttcataaccttcatcca

SEQ ID NO: 49687 - DNA, 412 bp, Zea mays
cttcttagggagaacacatttcgggactcacaaatgttcatttcgagaaagacagggttcgtagcgcatgtcaagccgggaagcaagttggagtttatcatccacaccagaacatcatgacgaccgacagaccgcttgagctactccacatggacctattcggcccgatagcttatacaaccatcgacaggagtaagtattgcccttgaattgtggatgactattcccgcttcacttgagtgctctttttgcacgaaaaactcacaaacccaagtgaccttacagggatccttgagaccggctccaaatgacttcaacttaacgataaaaaagattagaagcgatcatgggaccgagcccaacaactctcaaacacaacgctctcttgaggatgacggcatcaagcctgaca

SEQ ID NO: 49688 - DNA, 389 bp, Zea mays
agcttcggatctgactatgaagtgtatagcctttttatctgtacaacttccttcaccccttatggaaggttcttgacttccatgaatggcagtgggcccttgatccaaaggtatcttcatgcacacagtatgttggatgaaatattgcttcaaaggcattaaatgttccttgaccaacgatcgcattgtataggtattccatatcaacaatgttgaatacaaattgctgaggactttggttgctaacataaccgaatgtttctgacagtgagattatgacaagtgcaaaaatctgccggactcctaagacacacagagggtgtgtatcatcatgagacttgacctatggatattgcatctgctggaaggcctttgcaaatataatgtcc

SEQ ID NO: 49689 - DNA, 389 bp, Zea mays
actcaagctctatcaaatggacgcgaaaagtgttttcctcaattgaccgatcaatgaagaggtctatgttgagcaacctcccggctttaaagatagtgagtatcctaatcacgtatttaaactctctaaggcgctttatgggctcaagcaagccccaagagcatggtatgaatgcctaagagattttctcatcactaatggcttcaaagtcgaaaaggccaatcctacactctttactaaaacacttgaaaatgatttgtttgtatgccaaatttatgttgatgatatcatatttgggtctactaacgaatctgcatgtgaagagtttactacgatcatgacacacaaattctatatgtctatgatgggggagttgaatacttcttaga

SEQ ID NO: 49690 - DNA, 376 bp, Zea mays
agcttgtacacatggttaggtctttcggggtcctcaaaatcaggagggttgagagcacctagagagggggtgaataagtgatcctataaaaatcaagtctaaacaacacaaacttggtttataataaataataatgggattaaaaccaaggtgatatgaatagagagaagagaacccttcacttgattgttcctttaggatatgtattgaacttaagaacaatagcgcaagtgaatagatgagaactctatggaagaaaacaatcacaatagaaagatgcataagtgacacagtgactttatcccatggtttggccaatgcctactccacgttgtggtgacctccttcggtcaaggattgcacttaatccctctta

SEQ ID NO: 49691 - DNA, 402 bp, Zea mays
taatctccgaaaatgtgtctttgtggtaccactttgacagctactcggatttattgtcagccaccagggaattgaagctaattcggataagattgaagctatcatgaaaatggaggcaccacgatcacaaaagaaagttcagagacttacccgatgtatggcagccctgagcagattcatatccaggctgcgagagaaaggtttaccattttacaagctactcaagaaagtggataagtttcagtggacttctgaagcacaggaagccctaaatgcactgaaaaaattcttgacgacaccaccagtgctgaagccgccacgacgagccgcgtcaactcaaccagctgacgatttgatgctgtatatctcttgcacgactcacgtggtaagcaccgcgttggt

SEQ ID NO: 49692 - DNA, 368 bp, Zea mays
  unsure (1)..(368): unsure at all n locations
agcttgttatgttaaaaatgcttatgctcaggaagtagaaaaatgtgaaaaattaactagtgagcttagcatttgccatgacactatctccaaccttaggaatgagaatgttaaattaattgctaaggttgagaaattaaatgtttgtgatgattcacttgtcaaacttaaaaatgataatgttagtttgattgctaagattgacaagttgaatgaatctctttctagccttaagattgagaatgataaattaatttctaaggctaaggatttaaatgtttgcaatgtttgtatttccaatcttagaaatgagaatgtcatgttacatgctaagactgatngaataaatgcttgcaaaccctctacat

SEQ ID NO: 49693 - DNA, 385 bp, Zea mays
  unsure (1)..(385): unsure at all n locations
ctcagcttcatactcggctgcattgttggaggctggaaatatcaactggagggcatatttgaggggcgcgcctccaagtgcggggaagagaattcccgctcctgctccctgcaacttcagcgagccatcaaaatacattcgccacacttctgcagtctctgggttatctggtacttgctgttcagtccactctgatacgaaatcaatcagtgcttgagttttgatggcagtgcgaggttgaaactcgatgtcatgagatcccagctcacaagcccatttggctattcggccagtggcttccttgttgtgaagaatatcccctattggaaaaccagtgactactatgactntgtggtcatcanagtagtgacgtagcttgcgggca

SEQ ID NO: 49694 - DNA, 367 bp, Zea mays
  unsure (1)..(367): unsure at all n locations
tcaagcttgcccgagcttgagccgatgaccagccccaccggaatagtgcaatcgcgctcgccggaattcgtgaacccgccggagcacgtggaccgggtaaccctctgcaccatttctcaattccttgcgcacatggccctctacatcaccccgtggagctcctcgtgcactttaattgaaccccaccgcttgggtttggccggagcaggagccgtcgacaacctccgccgcctgcgctcgtggccagggcagctccaaccacctcagacgccgacccgcacaccgacgtgactgacgtgacctccccgacgtcactgaccaccccaccagagctctactgccgccgtgattnttaccacggttacta

SEQ ID NO: 49695 - DNA, 395 bp, Zea mays
  unsure (1)..(395): unsure at all n locations
tcgctagcttctatgatgggcgctaccaccggtgtttcagcaggggccgcatcagaggaatcttcaactaacatatccagcatggcacttatctttgcatcactgggattcaaaggcacctcaaaatgaacctgcctctcgtcgtcaagaatttcgtccagtgaggcaacaaaagcatcaacttcttcgggagagggtcgcactctaaggcccaaaccgctatcaccggcaggaggattcgacacaaaactggtaaaggccttggaaggaggcagattccaggctgagtatgcaacaggagtgccgatgttcgacaccttgcctctgagtatcatttcgagccggctcaccaagtccacagcangaattcttctgttggttacccgggttgaatc

SEQ ID NO: 49696 - DNA, 389 bp, Zea mays
agcttgtgatgcgtcttgaatgtatcgatgcggacaagatcgaactccagtttcttctcaaacaggcatgtcagaaccctggagacatcagtagacgccggctggccaaacacctgcaagcctgctgccatgcctcgctccctctggtttctttgatctctggctcaggatatgagatgacaacgaggggtgatgccaacatgtctcgctgccaggtacttatagggtgtttgtttcgagaaataagttaatcccttctcacttcttactttttgtttagtttatggattggataagtttctcttagttagttagtactaacatgaaaaatatgatagagtcatgatacgccacctcatctttgatggaatcattcctcacaccaaaca

SEQ ID NO: 49697 - DNA, 411 bp, Zea mays
taccacatttgaagcatgagcgcttccccttggctttggtcttgcttggctgtcccttgcgacctttaagcaccgtcttgaatcttttgatgatgagagccatctcttcatcattaagtccggccgcctcaatccgtgccaccttgctaggtagcgcctccttgcttcgtgttgccttgagagcaaggggttgcggctcgttgatcggaccattcaaggcgtcgtccacgtaccttgcctccttgatcatcattcgcccgctaacaaatttcccaagaacttcttcgggcgacatcttggtgtacctgggattttcacgaatattgttcaccaaatgaggatcaagaatggtaaatgaccttagcattaggcggacgacgtcgtggtccgtccatcgcgtgctcccgtagc

SEQ ID NO: 49698 - DNA, 359 bp, Zea mays
tgtaggcatgcaagcttacatggtatgccgtggttttctcagtatttaccgcgacccacagcgcctatcgagggccctagtacccaacttatccaatcctccttttaaatagaagcgtccacatgtgatccaaaggaaggaaacgactagtaccagtgaatgctcggtctaaccgacgttaacaacatgactgataagaacaggggtgcccgaccttcctgcaagcgaagataactatcgatttggaggagatgtcacacagacgatccggattcccatatacactactacaacccggcaatcgcaacaccacttctcctctggttatgaaccgtgcgctgcgcgattgacctcgccac

SEQ ID NO: 49699 - DNA, 413 bp, Zea mays
  unsure (1)..(413): unsure at all n locations
aagacgntgggtatatcatcttatgttaatattatgaaatgtcttacacatnactagctactttgcttttagaagatggtagagatagagaaaataacttggagtatggtatgaaaaaagtccagcaaatttatacatgtaacactcaaatttgtcaactaaattaattacatgggttgacatgagtcctaatattggaggatgtatgtaacaacgttgaaaatcctagagccaaaaatatatacttacatttttttcctaaaccttacttggtaagtgagcatactaggaaccccaccctagatgcactagtttaaccctatttagatttgtggacatgtgcattaaagaatatgtgtttgccacttatttggttatcatgaaatgtcgataaataagtgattaacttttat

SEQ ID NO: 49700 - DNA, 391 bp, Zea mays
agcttgacccagggacccgcgttttcggaatagtccaatcgtgcgcaccggagttcaagaacccgccggcgcacgtggaccgggtaagcccctgcaccattttccaattccttgcgcgtatggcctctgtgtcaccccgtgaagctcctcgtgcaccctaattgatctatgccgccgtggtttggccggagcaggagccgccgacgacccccgccgcctgtgctcgtggccagggtagctccgaccacctccgacaccgacccgcacatcggcgtgaccgttgcgacctcctggacgtcactgaccaccccgccggagctctactgccgccggtaagccccaccgccgtaaaatgtaccgcgggcactgtttaagccggtcagggagcgcg

SEQ ID NO: 49701 - DNA, 421 bp, Zea mays
ctaagcttcgcgatggtaaaaattttggcagcaaaactttttttatagcaatgaacgctgtggtaacttcacacctactcgtctgtttatatagtactgcaggtaggaaggcgaagcgccaggatttttacaccaggcggacacccgcttgcactcgctgtgtggtggaccgcagagaccaaacagtaactctgcaaggtgggaccgctactcgctgggaaactaaatcgtttctcgacaaccagctcaaggaaggtgttttttggaccttcggctccccgaagcttaagagacttttttcacggatcaagctcgttacgaaaaacgatctatcaccgcgaaaggggctactgttgggactatgcttcgtcgccgaaggtcttgtaggaagaagcggctttcggctgaagctgtttgtatg

SEQ ID NO: 49702 - DNA, 378 bp, Zea mays
agcttctaaagggagaacacattttatgattaacttatgttcattctgagaaagataggatttgtagcgcatgccaggcatgaaagcaagttggagcccatcatccacacaagaacatcatgacgatcgacaggccgcttgagctactccacatggatctattcggcccgattgcttacataagcatcggcgggagtaagtattgtcttgtaatagtggatgattattctcgcttcacttgggtattctttttgcaggaaaaatctcaaacccaagagaccttaaagggatttttgagacgggctcaaaatgagttcggcttaaggatcaagaaaattataagcgataacgggacggagttcaagaactcttaaattg

SEQ ID NO: 49703 - DNA, 393 bp, Zea mays
cggcactattttcaagcatattatataattggttcttcgtcacaacctctgaaggacataatgagaaatagagaagctactgggaggatcggaaaatgggctgccaagctcaatgagttctatattgattatgtccataaatccacaattcaatctcatgccttagcaaactttattgttgattggatgccacgggctcaagaagaaaaagcaacaaaagacgctgaagcttggacagtcttctgtgatgggtcttgggaaacctttcgcgcaagaacggttgctgttctaatagcgccttccaaagtcagaacatgttatgcagcatggctagaatttaattgtacaaataacattgctgaatacgaagcccttctctttgggcttcggaag

SEQ ID NO: 49704 - DNA, 374 bp, Zea mays
agcttggatccggtcggaatcatgtcccgcccggggtcttcgtgcaagaaattctccagccgagcatctcgacggatcaaatagaagagtgcattatcatagatcaacccgagtcagactctgatgactggaggcaaccgattgtcaagtatataaagaatgaagaagagccagatgacaagaactcggcagagcgcattgccagacaatcagctcactatacactcgttggggaggtattatacaggaggggcgcgtcaggcgtcctcatgaagtgcgttctcccgtccaccgggaagcaacttctggaggaagtccatgcacggcagtgtggagtacacgcagcatccagaacgttagtcggaaaggttttc

SEQ ID NO: 49705 - DNA, 166 bp, Zea mays
gtcattttccacagaacatatgatccgcaggcactggcttctccatggtctatttgccattgttaatacatcgcggagaagattgtctgtattgggagatattctcgttacttgggattttttcggaaaattcaaccagaacttaaggattttggacactccaaga

SEQ ID NO: 49706 - DNA, 415 bp, Zea mays
aactcaagctttgcaccagctttgggaatgttatgttcttggatacaatctgagcaccgtaccagcaaagccatatgctgcaaacaaagagagacaacggagaggaggaaaaaaaatgaacacgaagaagaagaagccgagagagagaaagcgaagattcttccaatcaagaggtaatgatgggaactttcatcacctgctgcatgcctgccagatgcacagagatgcacagagaaaggaggggtcaaaaggcaggccatcattacaccaatcttgcgctgctcctcgatttcgcagcaagcaagcaagcaaacaaacaaacaaaaaagcacagtggagtagtagtaaagatccaggagcggaagtacggtgctccacaccatgcatactactaagaacgggcaggaatctcacg

SEQ ID NO: 49707 - DNA, 368 bp, Zea mays
agcttgtacttttcctcaacattatttgatccgcgattggcgcgtcgatttagcgcgcgtgcttacgcgcccgctgtcaattcaacttcagtcatgtcaactgccatatctgtgcccgcggctgacttacccgcggcccgcacgcctggtggtttcatcaggccacgcgcggggtgccttgttgctgctgcattggtttaaaatattaacttttgtcttccgcagcgggcccatggaggcgcactacagacgcgcgcggtggttcgctgtttccgcacccaaaatctgggacacaaactgtatgacttggggacccgggaccccgtgtcatagattgggctgcctgggtcctacgcacccgtcgagcg

SEQ ID NO: 49708 - DNA, 362 bp, Zea mays
agctcccacacttatctcatatttttatctcggaccacagtatctttatatgccatggctaacgtgtcccaagtctattccaaaccaattcatacgtatattgaaagggaattggagtcttctgccaaaacaaaggcttccactccgtaactcatgcttcgccatcactccgagcaactctctattccttggggagaaatgagcatcaaagaaaaggacttcatccttggaggagagagaaatgagcccaaagcataaggaccggatctcgtctttggtataatcttaactcatttacttttgaccaaaggggaagaaattactttaagggctctaatgattccgtttctggcgattcatgc

SEQ ID NO: 49709 - DNA, 390 bp, Zea mays
atcttgtaaagggagaacacattttatgattaacttatgatcatcctgtgaaagataggattagtaacgcatgccaggcatgaaagcatgttgtagcccatcctccacacgagagcatcatgacgatcgacaggccgcttgtgctactccacatggatgtattcggcccgattgctgacataaacatcggcgggagtaagtattgtgttgtagtagtggaggattattctcgcttcacttgggtattctttttgcatgaaaaatatcaagcccaagagaccttagacggattcttgagacgggctcagaatgagttcggcttagggatcaagaaaattacaaacgatgactggacggagattaagaactctcttatcgaaggctttattg

SEQ ID NO: 49710 - DNA, 357 bp, Zea mays
cataatgacaaatagagaagttactgcgaggatctgaaaatgggctgccgagctcaatgagttctatattgattatgttcatagatccgcaattcagacttatgcccttagcagactttattgttgattggatgccaagggctcaagaagaagaacctacacaagacgctgaagcttggacagtcttctgtcatgggtcttgggaaaccatcggctcaagagcggccgctgttatagtagcttcttccaaagacagaacatgttatgcagcatggctagattttagctgcacacataacattgctgaataccaatcccttatcttggggcttccgaagctaaaagcaatggtaatat

SEQ ID NO: 49711 - DNA, 376 bp, Zea mays
agctttcctgctcacaccttctgttctgtatcaaccttcgtattattctggtctactgtgatgccgacttgtgtccgaagatacctgttcacacattatactccagaaatactgttaaatcctgtttttgaggaccttcggaagccgaaggcccccaacaatgtgctagtcggtgatgattatgaaacatgagataggtcaaacaacctccttcttgagtgtgatttaggaatcatcggtctaggtgttagatactttcatccaagttgggataacaattgtgggtacatggggtaggtaggttaaacagagtttttctttgcttttgggataaatgtattacgcatcctatgatgtaggttaggttattgttcac

SEQ ID NO: 49712 - DNA, 372 bp, Zea mays
taaatgaaaaagagcactaactcaagttcttttcttgcggagtgttgcttcacttaaatgagattttaacttgaagcaacaccaaatgatatgagcacagaatagtgcaagagaacttatagtaagggaaagccaactaatcacaagccaaagcacaatgaacaccggtgatttgttttaccgaggttcggtcctcgaaggcctactccccgttgaggagttcacttaaggacgggtctttttcaacccttttcctctcttccgatcacacaaggatcgacgagctcttcttcttctcaaggatcactctcgatcccacaaggaccaccacaatctttggtgtctcttgctaacttttacaagcctccaaca

SEQ ID NO: 49713 - DNA, 362 bp, Zea mays
agcttgtgaaggttcttcatcttcacatgtgctaagcggcgatgccacagccagcccatgctagtcttagctattaagcatgcatctagaccggcctcttcttttgcaaaatcaactaaataaagtttgccgtctaatacacccttaaaagctagtgaaccatcacttcttctaaagacagacacatctacatttgtaaatagacagttataccccatgttgcataattgactaacagatagcaaattatatcccaaggactcaactaaaaacacattagaaattgagtgctcatttgagattgcaattttacctaatccttttaccttgccttgattcccatcaccgaatataattgaatc

SEQ ID NO: 49714 - DNA, 224 bp, Zea mays
tatgggttgctcgaccttaccatcagacaagaacacgtgcgtcgagggatgtctgcatctttctcttggcggcttacaacctacaacatttttcacatgacaagatatccatagcccgcttgatgatgatgctacgggagacatcatagttatctcttgaaccggccatatgggaccgatctggtgaatccaaactcagtttccccaccggagtcgtgaaaagt

SEQ ID NO: 49715 - DNA, 346 bp, Zea mays
agcttctaaagggagaacacattttatgattaacaaatgttcattttgagaaagacaggatttgtagcgcatgccacgcggggaagcaagttggagtccattatccacacaagaacatcatgacaaccgacaggccgcttgagctactccacatggatctattcggcccaattgcttacataagcatcggcgggagtaagtattgtcttgtaatagtggatgattattctcgcttcacttgggtattctttttgcaggaaaaatctcaaacccaagagaccttaaagggattcttgagacgggctcaaaatgagttcggcttaaggatcaagaaaatagaagcgat

SEQ ID NO: 49716 - DNA, 387 bp, Zea mays
  unsure (1)..(387): unsure at all n locations
tgatattactaaggcttctaactcggtttcttggccttttctcatcgagggtatgaagtgtcttggctttggacaagtttggaggggcatcatttgtgggcttctatcctcatctagcactcaggtgcttctgaatggcattccgggaggacctattgaccataggagaggactccgacaagggaatcctctctcccccatgctttttattctagtaatggatgttcttggcctgctgttttctagagctaaacacgcaggtctgctcatggatctttctcccagaacccatctacatctggtatctatgtatgcaaacgatgtggcacttttcttgcatccatctgctgcggatattactattactctagatatattacnatcttt

SEQ ID NO: 49717 - DNA, 385 bp, Zea mays
agcttgtgaaggttcttcatccccacatgtgctaagcggcgatgccacagccagcccatgccagtcttagcaattaagcatgcatctagaccggcctcctcttttgcaaaatcaactaaataaagtttgccgtctaatacacccttaaatgctagtgaaccatcacttcttctaaagatagacacatctacatttgtaaaaagacaattatatcccatattgcatagttggctaacagatagcaaattgtagccaagagactcaactaaaaacacattagagatagagtgctcattagaaattgcaattttacctaacccttttaccttgccttgattcccatcaccgaatataattgaatcttgggaatctttattcttgacat

SEQ ID NO: 49718 - DNA, 416 bp, Zea mays
tcaagttttaaattccaaatttcaaatttaagcataagcaaaattattacatgaggcacaatttctacatagtatttatttatttatttactttattttatttaagtaatattctcaacaggaagtacacaccccctgatatattattattgtgggtgtgtagtcaaattaaaggtatattcaaaaattctccctttgttttgataggaacattttttcccaatgtctaatctttattatgatttattttaactatcgttattttattatgatcacttacctttaaaaagggtgaattataaagtttaatcatttatcaagggtactttgctcagactttttctaccaatcccaaattcagaatttgggtgttacaaatcctacctccttaacagaaatctcgtcctcgagatttg

SEQ ID NO: 49719 - DNA, 375 bp, Zea mays
ctcttagacacagactcttaactctcaagctgctctttgtaatccagcacacagaggaggagggaattatgctccagcggcccgaaccactctaaatacttgcgtgtggatgtgctcggagatcgctgatcatgacatgctaatagctaaagcccactgctcatcttacgatggatggtgggcgcattaccccagccggccgaataattccctctccgacatttggcgcgccaagcaggggcctatgcattaggatgttgctagatttattgcgaacgatgatggtccctaccgtggagcaccgcttccagacttcgacggagatactactggacgacaaagaagattctttcatgccacatgtttctaaccgcc

SEQ ID NO: 49720 - DNA, 417 bp, Zea mays
  unsure (1)..(417): unsure at all n locations
tgtgaaggttcttcatccccacatgtgctaagtttttatgccacagtcagcccatgctagtcttagctattaagcatgcatctagaccggcctcttcttttgcaaaatcaactagataaagtttgccgtctaatacacccttaaaagctaatgaaccatcgcttcttctaaagacagacacatctacatttgtaaatagacagttatatcccatatgacataattgactaacagatagcaaattatatcccaaggactcaactaaaaacacattanaaattgagtgctcatttgatattgcaattttacctaatccttttaccttgccttgattcccatcaccgaatataattgaatcttgggaatccttattcttggcgtaggaggtgaacattttcttctcccccgtcatatggg

SEQ ID NO: 49721 - DNA, 397 bp, Zea mays
cgcatgcaagcttgtatagctatcggaacttataattaacctttacattaccccttgtttgtaccaaaacttaggaaataaaaatgtgatgcgtttcctttaccattatctaccctacgatcttaatctcgtggacgagattcttttatggggggaaggatgtaacacccctggtgttactataactaaaacttgagcatgacatcataatcattggcattgcatatgtttgacacacctagagtgcattcactatgtcaaaatttcatacaaattgtattgttctaatgtttttgcaaatagaaccctggttattggacttaaccctaaatagtggttaaaggggtaaaacttaacccaagttaagaaaacctaaagactttacggtaaaagtcat

SEQ ID NO: 49722 - DNA, 270 bp, Zea mays
cccccaactttttaccagaaaaaacagtcttcaaggagggccctattcaaattcaaggaacaaggctggtggtgccccgaactagttgttcacatctagctgtgaaaggtgtaagtgcatcacctttaaggtttgggatactgaaaacaataaatgtctaaggttgtttataatgtacttaaatataaagagctataagaatcaatgactaaataacaacgtgaaataaactaagggtttggagaatccattgttcatgactgttagaat

SEQ ID NO: 49723 - DNA, 389 bp, Zea mays
agcttgccagtacttgcaaaattattcttttattatcacagcaactgcagaccataccagtgacttggcccttcgcatgctggggactggatatgattggacctttcaagaaggctcaaggaggatacactcatgtactggtagcaatcgacaaattcactaaatggatagaattcaaacccattgcctctttgacctcagctaaggccgtggaattcatacaagacataatattcagattcgggataccaaacagcatcataactgacctaggatccaacttcacaagttcagagttcttcgacttctgcgaacaaaaaagcattcagatcaagtatgcttctgtagcacatccaagagccaacgggcaggtcgagcgagccaacggg

SEQ ID NO: 49724 - DNA, 363 bp, Zea mays
  unsure (1)..(363): unsure at all n locations
cttcatccaacaggctaacttgtgttgcacatctcacccatgttagncttagcaatgaaacatgtgtcgagcttagttctatcaaaatctactaagtatagctgaacctctaacacacccttaaatgctattgaatcatcacttcctttatagacagtgacacctatatcagctaaaagacagttgtagcccatttgacataatcgggaaacaaaaagcaacgtcgaatctaatgaatcaacaataaaaacattggaaatggaatggtcaagggaaatagcaatattacccaaacctttgaccaaccctcgattttcatccccgaatgtgatagcctgctggggacctctgtttttctcatat

SEQ ID NO: 49725 - DNA, 346 bp, Zea mays
agggacaactcattttgtgactaacttattgttacttcgagaaagacatgaggtgtatcgcaagtcacgccagaaagcaagtaggtgttttttctcctcacactaatataatgacgactgacccgccactgagatcctacacatggaactatctccgctcgatagcttacataaacatcggtggaaagtatttctttctaattattggggatgattattaccccttctcctgggtgtgctttttgggcgaaaaatctcatatccacgaaacccctcaacggattcctgatatcgactccatacgagtttcgcctaataactacgaaaatagaaacgaccacgggac

SEQ ID NO: 49726 - DNA, 412 bp, Zea mays
ttaattgtgtcaaagttccatgttgtatcatactcatgttcaacctttccatttcttgacatatggtgatgtcaggggtccttactgtaagacaacgacaggaagctttgtgactcaatgcatctgacaccacattggcttttcctggatgataatggatttccaagtcataatctttaattagctcaagccatcttcgttgtctcatattcagctctgactgggtaaagatatatttcagacttttatgatctgtatataaatgacatatattccccaccagataatgacgccatatcttgagggcatgaacaactgcagctagttccaaatcatgagttggatagtgctcctcatgccggcgtacttgtcttgaagcataagctatgactcggccctcttgcattaagac

SEQ ID NO: 49727 - DNA, 404 bp, Zea mays
  unsure (1)..(404): unsure at all n locations
tcacatcatctctgggcactctttttaacttatttagtacatcnggcgacccatttttggatgggtccaccaacgttagctaataaatacttaggcacccaaatggcctttgtgctacttttaggtgaactacttacttttctagcacaagtgtcatttttgggtctcctaagtgaatatgaatgaattaacatggtaggcttatgatactcactcatgggacaatccttgcataagtgtccctttcttcagcaagtgtagcaaatcttatttttaattctgcaagactccttcttgcctcgcttcttgtttgctacatggttagtgagcctctttctttctacagttaagccactatcctttgtgtaaggacatgacttaatctcatgtcccttctcatgaca

SEQ ID NO: 49728 - DNA, 295 bp, Zea mays
ccccctggctacaaaccacacaaaaaccttaattttaagcggtgtgttcaatttccaaagaggaggagtgtggcataaaataccatttgacataatcgccagatacatgggcactaccgagaacatcttattttggtgcaaaatccacccacccacatttttcggactattagcctgaactgaagcaccaggggcaccaatcttaaccaatcttgtaagatggcccaccgtggacctctcctaaaataaacattcagcgggactgacctgaaaacatcaggcactgagcctcctt

SEQ ID NO: 49729 - DNA, 378 bp, Zea mays
agcttgcactcttgtatattgttctttttcctatacttgaacatgtggaccagtggcataccgacttcagttacccgaaaccatgtctgcagtacataatgtgttccacgtgtctcagttgaagaagtgtcttcgggttcccgatcgaaccattgacgtaatggatgctgccctagaaccagacttgacatattctgagtatcctattctagtcttggatcaaaaggacagaattacccaaagaaaaactctcaagttttacaagatacagtggaaccaacatttaaaagatgaggctacatgggaaactcaggactttttggaaaggaactttccaagttttttagcctcatgtaatttgtaaagtgtatacaattg

SEQ ID NO: 49730 - DNA, 356 bp, Zea mays
atcttgccagcacacgtcaaaactatttacattaattatgccagccactggagaccataccagagaatgggtccttcgcacgctctggactgtatatgacaggacctttcactaccgctcatagaagatacactcagggcctgatgggctccagcaaaccccctaagcagggaaagaatgccccacagagtctcttaacgctacggctgccgagcaaaaatgccgaacatactctctttattcagacatatcgaacatgactagttcggacccaagatccaacttgacgatattatatttgggtctacctacgagaatacatggcaataagataatatgagcttgtcacacacatt

SEQ ID NO: 49731 - DNA, 338 bp, Zea mays
acactctagaatacatacgcttggtcctgaatggacaacttggcattcaacatactctatgattgtggcacggatcttggcatctatgttccccactggtatctatgaggtggtagctagtgctcactgattctcaaacatagcctaccttgcaattcaaatacctctggatggggaaagggggggcgatgattgagattcacaataatgcgaaagcggtgaacccagccgggagaccaatgacgcaatatgctcttgagcttcaacacttatggcgagaactatatcactatgcccctctacaaatggtttagccacatgattgacacactgtttat

SEQ ID NO: 49732 - DNA, 375 bp, Zea mays
agcttgtgtcacatgacccaaagtgttgtcatgctcaccctagaccgatttcattgtccctagaacgcccttgatttgtgctttaatttgttgggaagaggtcagattgacgaccaagaccacaccgtgggtgccattgctttatccaacatacattgtaacgtagagagtcaaatttgccgagatcatatgtcaactggtggtccaggttaaaacaagaggtaaggacgtacgagagcaggtactaccaaattaagggaacactggtacggtcgacaatctaaaaggttgccccatgccataccatgccccacatttgacttaggatgttcatcgacaatgcaagaagaaacaacaactgtcggcagatgcata

SEQ ID NO: 49733 - DNA, 410 bp, Zea mays
tgacactactagaaacctcagcttttaaagggagaacacgtgttttgactgactgttgtccgcttttagaaagacagaccttgtgcaacatgccaagcacggaagctcgtgggaagccctcatcacaagcaagaacgtgatgaccacgtcaagaccattggaactcctgcatatggatctattctggcccattgcttatctcaacatcgggggaagaaaggatggtcttgttattgccgatgatttttcccgcttcacttgggttttattgttgcaggataaatctgaaactcaatgaactcttaactgcttcttaaggagagctcaaaatgaatttgagctaaaggtgaaaaagataaggagcgacaatggatctaagttcacgacccttcaagtcgaagagtatcttg

SEQ ID NO: 49734 - DNA, 387 bp, Zea mays
ccgggatcttaaggcaactgaagcattcttcttgcttttagcactctcttttggagaaatgaggcgatatgggtactaaacaaatctaaaactttcacaactcagtttatgtataggtttatgactgatggagggattacaaaagatatatatataaatatttggaagtccaaggtgcccttgcggattaaagtttttttgtggcaattatgtaaccggaaaattcaagcagacgtggtgcttaaaaaaaggttggaagggtagtgatcgttgtgcattatgtcaaaagcaagaaactgtggatcatatattctttcagtgctccttggcatattctgtgtggagttgtttgaagcacgtctttggaatgaacaatatttccagctc

SEQ ID NO: 49735 - DNA, 350 bp, Zea mays
ttcgtattgaatataaaaaatttgtttggcggcaggcgacagcgtgcatcgcgcacgtcatctactattaaaataaaaagactgcagttgtattacttccactgttttttgcaaggaagaaatatattgtttttaatgaccaaacatcgagttgatacagagtctttaaaaactctctcccatcctctgcataacaagatacacagcctaaacaacactgtgccaacaagtacattatagtgacaatcgaccatttttttgcaatttagtcctgtttacgtttttttcacatttatgggtcttttggtttcaattcagaatatggacccttatctcggtgccatcataat

SEQ ID NO: 49736 - DNA, 332 bp, Zea mays
ccaagctcaaaggataaactgatatgttgacatatttcctttcgaaaaagaaagaccttgtgcaccctcgtaagcagggtaacaagtgggaagaacgcatcacaaccagaatgggatgaccactttaagacccctggaactgttgatatggaccctttctgacccgtcgcctatctgaacataggagggaggaaagatcggtcaagtattggtgatgacctttctccgcttacttgggtgttctttttgaagaaaaatcttaaacccaaaggaccctcaacgcttcctaagaagagctaaaatgagtttaactcacgtgaacaaaaaaggac

SEQ ID NO: 49737 - DNA, 382 bp, Zea mays
agcttgaaggaagaggtaggcacatggtatgattttgttaccggcttaagatgacttcgagcttcatcaccagctttgcttcgtccaccctttgtccataccaattttataaatctatttgctatacttcgggcaaggttgggaatgttatccaaatctgctggtgataagctgaaattgggtctattgataacctttccgtgttcgcagctagacttcaagaaggcaacagctgtgccctgagaagctaccagggcacagaagtcaccatgtccagctataacttcgtcaaggtcatcaatttcaccttcgatatgttcgaaggcccctggcaggtcttcagacaaaggattaaatttttcgctgctggctgcaatcgaat

SEQ ID NO: 49738 - DNA, 398 bp, Zea mays
caagcttcttaaggctggactttggttccctttgagcaagtttgtaggtgttttgctgaagacctaccaaatcttccttcatcagatcacccccgaagccataataagaatgggaatttttgtctgggcagtaaggagtcaagggctatagccaagcgtgaagtgcttctgcagtatgcacgaacttctgtatgagacgaatggcatgggtaaagaacagtaccacaacaacttcggttgttatggatttatcgctcaccccaacgcaagccacccagtgccaacatttcaaaaaagatggcccggggcctgtatggaagagtggttttatgtgaagaatgatctagagacgagggaagacataaaagaaatcattatgcgtgccatctggtcccgct

SEQ ID NO: 49739 - DNA, 262 bp, Zea mays
ttttttccaatgctcgctttaccacgaataataccttcatgcctatggatgatggttgttgcgacttagggcacattcacctacagtgcccaatgagattgttattgaggccataattaagggcctttgtccagaacatgaagttgattacttcttatggaacccccctaaaaacccgaaaaatctttttcaaagaatggtaaattgcttccgttctaaccataatttctgccaatataggaagaaactttatacattatat

SEQ ID NO: 49740 - DNA, 417 bp, Zea mays
taagaaaaatagtcataaaatgttactaagaatgtgacttacattacattcacacccttgaaataccaaaaaccctaaaaaggaccctggaaaaccctaaatccaaaccctaggggcctaagtgcaaaatcagtgcacttttggactaaagtgcaaaaactagtaaagtatggggtcttaagtcatatggttcacaattatgaagatttgcaacttgaaccgtgagttttggacttaattgcaaaagagccacatttgaactcttttggctaagtctaaatttcagtgtgatgtgctcatctttgtgaccttgtaactttcaaacaaaagggatcttgccctaagtcaccacatcaattttgtagctctatgaaaggagaacaactttgattaagagtgtaagcatcggagttatga

SEQ ID NO: 49741 - DNA, 346 bp, Zea mays
cgcgctgcagctttgtactgctgcatttgacagtgactggttccttttctgcactatctcttggcacaccggaacgcgactatccgtgacatgtataactcacttaacgttgctccgtgtatgtcgtcttcacaggtatgaaatgggccacctttgctaacggtccaaaccacccaatggaatttagccggcccggtacgaggaggccaactatgaaatccatccgatctcatcccacttcactgagaatcgaatggctgaacaatccggagcctctgagctctgtttggtttgaagtatacagatgggaatatttgcgactctctttatgcatacacaaaactct

SEQ ID NO: 49742 - DNA, 385 bp, Zea mays
agcttcagtttacaatattgaatttatcttacatttttcaattcagcttcagtttacaatcttcaatttacaatcttcagtttacaatcttcaatttacaagctccagtttacaatctttaaaatagtcattatgcacagctccaatttccacgttcatggtgaggtcgtgatgggatcacctgctccctccattcctcgcaggactgctctaggatccatcagagttgtcatctaaaggaaactgaaatgttaccctgtcatcagcatttgtagcctttagatagagacctgcaaaattggatgggatcgactccaatcagctccttgggattggctcgctctttatggcaggagggttcggctctagtcagctccgccaaaac

SEQ ID NO: 49743 - DNA, 423 bp, Zea mays
  unsure (1)..(423): unsure at all n locations
tataaaactcaacttcttcaccatgtgacacggtatctcgaaacgtttgccatgctttcccttttacttgtgtcaagctcttctttagcctctcattttcttctttgagctcttgatatgaatcatcattcgctcctgcacattctacctcaaaggaagatttgcttgttgacaaacaacaagcattagcacatggtaatatagtatcaatttgaatacatgtgcacgaatgaggttgttgggattttaagttctctatcacaacctcatgagcaactgttaatatgatatgattatccataagattttcatgagaacatagaagcatattatatttatcttgaaaagctacattttaacttttagcttttctacttggtccttgagcaacgtattcntatttactaattgagcgatacaatg

SEQ ID NO: 49744 - DNA, 387 bp, Zea mays
agcttctaaagggagaacacgtttattgtctaactcttgtacatttcgaaaaagatagaccttgtgcagcttgtcaagcaggtaaacaggtgggaggagctcatcacagcaagaatgtgatgaccacttcaagacctctggagctgatgcatatggacctcttcggacccgtcgcctatctgagcataggaggaagtaagtatggtctagttattgttgatgacttttcccgcttcacttgggtgttctttttgcaggataagtctgaaacccaagggaccctcaagcgcttcctcaggagagctcaaaatgagtttgagctcaaggtgaagaagataaggagcgacaacgggtccgaattcaagaatcttcaagtagaggagttcc

SEQ ID NO: 49745 - DNA, 421 bp, Zea mays
actatacaaactcaagcttgaagccatggtaagtagcataggctaataatattctaatggactcaagcctagctacgggtgcataggtttcaccaaaatccaaaccttcgacttgtgaataccccttggccacgagtcgagctttgttccttgtcaccacaccatgctcgtcttgtttgttgcggaagacccacttggttcctacaacattttgattggaacgtggaactaaatgccatacctcgttcctagtgaagttgttgagctcctcttgcatcgccaccacccaatccgaatcttggagtgcttcctctaccctgtgtggctcaatagaggaaacaaaagagtaatgctcacaaaaatgtgcaacacgagaccgagtagttacccccttatgaatatcgccgagaatggtgtcgac

SEQ ID NO: 49746 - DNA, 403 bp, Zea mays
tactcctccctgcgaagggcctttcatcatcgtttagattttgaagcccgggacatacaagctggccaacaatcaaggcgaggtctacagcaacgcttggaacatccaacagctacgtcgcttttacccttaaaaatgtttcaagtcgttcatgtatctcacttttctttacatgcacaaataaagtctaaccgtcaaggaaggatcagccttgcctcggcaaagcccgaccctccctcgggggctagaagaggggaaccccctctgcgtaaaaattctcctcgggaaagtcttttactagaacgtctttcgtgcttttcgactgcgtcgataacagaatcctaacgacgagcgagagagaccttgaacggcaaggccgaccgagccgagggactcctacgcc

SEQ ID NO: 49747 - DNA, 366 bp, Zea mays
atggacgtgattttgccttcctcattggaccaatcaaggaggaagtctatgttgagcaacctcccggctttgaagacagcgagtatcctaaccatgtctataggctctctaaggcgctttatgggctcaagcaagccccaaaaacatgggatgaatgcctaagagacttccttattgctaatggcttcaaagacggcaaggccgatcctactttattcactaatactcttgacaatgatttgtctgtatgccaaagttatggtgatgatattatatttgggtgtactaacgaatctacatgtgaagaatttagtaggatcatgacaaacaaattctatatgtctatgatgggggagccgaagtatt

SEQ ID NO: 49748 - DNA, 377 bp, Zea mays
  unsure (1)..(377): unsure at all n locations
agctntatcaaatggacgtgatttgtgccttcctcaatggaccaatcaaggaagaggtctatgttgagcaacctcccggcttcgaagatagtaagtaccctaaccatgtctataaactctctaaggcgctttatgggctcaagcaagccccaagagcatggtatgaatgccttagagatttccttatcgctaacggcttcaaagtcggaaaggccgatcctactttattcactaaaactcttaacaatgatttgtttgtatgccaaatttatgttgatgatatcatatttgggtctactaacgaatctacatgtgaagaatttagtaggatcatgacacaaaagttcgagatgtctatgatgggggagttgaaatat

SEQ ID NO: 49749 - DNA, 206 bp, Zea mays
ctttccatttacggataatctttgatgtacgggcagcagttcacgatattatatttatctgcgccatttaacacttaggcccatttcgcgttattcacacctccgccatagaggtgaactatcaaaaattcattttcacataatctttttccctaagcatgtcgaataatataatctacgtcttaggaatgtgcttcaggagaatg

SEQ ID NO: 49750 - DNA, 403 bp, Zea mays
taccgcagcctgaacactgggttgctttacaaattgctgacgtatcaggattgcacctactacccactgtccactttcagggcttgttccgttagctctcaatccatgtggattgagtgggattggatgggtttaaaacccacacaagtcaaacctcttctcattcttttcccatctcatctaatccatgtgttttgggaataaccgaacaagccctcagctggaaaaaccgtgccctgtccaccccgtgtctaatttttctcctatataacctataaagacaaaattcacacccgagcgagtttaaaaaaaagagtgttgtggaccattgaacttgcccgatttgctgttcctgcctaaagcatcctcccacatcctcttccattgcgcctttgcgaagatt

SEQ ID NO: 49751 - DNA, 369 bp, Zea mays
agcttctcaatgtagaacacgttataggtttgactaacgtgcaattcgaaaaagatagaccttgtgcagcttgtcaagcaagtaaacaagtgggaggagcacatcacagcaagaatgtgatgaccacttcaagacccctggagctgctgcatatggacctcttcggacccgtcgcctatctgagcataggaaggagtaagtatggtctagttattgtagatgatttttcccgcttcacttgggtgttctttttgcaggataagtctgaaacccaagtgaccctcaagcgcttcctcaggagggctcaaaatgagtttgagctcaaagtgaagaagataaggagcgacaacggatccgagttcaagaacc

SEQ ID NO: 49752 - DNA, 333 bp, Zea mays
  unsure (1)..(333): unsure at all n locations
tgtggcgccctctggcgtcctgtcgcagacgatgtatcaagtctctcacctggaagcctcggggccgaacccctcgggcgtgttatcgtcccagagactgctgataccacgccgagtgtagcaaggccacgtcccgagcctctttgagctggtccaatgagacttctcggctggcctgggtgcttcggtcgtcgtacgcctttgtcctccgggaaccatattctaagtctgtgggtaagatagcctcggccccatatactataaagaacggcgagaaacccgtggctcggcttggcgtcggnctcatactccagaccaccgagggtagctctt

SEQ ID NO: 49753 - DNA, 310 bp, Zea mays
caatactcttttacagagtattgataaccttctgccctatattggtctcagacaacaacctaagactctcatcattaatgccgccaaagagtagcgcccctggttgatacccgcaggatttggcgtagactctcaattcttctttttcagcctttgacaattcttgtccaattaagttttgaaaagtgaaatattcttcttctgaagtatcttctgctatttacttctcttttccaggcactgtgggcatgggctctttagcggctgtagcaagttttttgctgccatattcagaaatattttatctata

SEQ ID NO: 49754 - DNA, 335 bp, Zea mays
cgtgttcttttatgtggtccgttctccagacgtgctgagcccccaatggctccaaattaccgatgacactgagggccgccgcctattcaaccttatcatgacccaacactggcggtcaccgataaccctgttcctacagagggtactattatccagcctacatcactgaggccaagctcctgatacatagaattcgatacttctcactgattgaaggccgactctacaaaaaacgggtcactgttaagtgcctcaccgaaaccgaacgcatccatatcctactctaagtccacaatggcacgtgcggttcacacgcacggccaacggccctagct

SEQ ID NO: 49755 - DNA, 362 bp, Zea mays
tcaagcttctggatgcctccagcaatgaccggtataacgttcgctaaaattttcagggcgtgcttggtcctttaaatgtggcggacgcggctggcttctgtaaaggccgctttactctcccaagtgctgctggttctgacaaacgtcctctcccttcccgtcttttcatgaatatttatttatttgctaagtgataatgacgagtaggctctatggtaaataggaaaaaaacaatttattacatggaatctgctaaggctgtctccaacaaggagcggtatatggtcctgtcctctaaatatagaggactgtcaggtcccctacggctccagcaaggcactctataccgtcctctaaaattt

SEQ ID NO: 49756 - DNA, 396 bp, Zea mays
ttcatccttcttcttcacaaacagtgctggacatccccaaggcgaagtgcttgggcgaataaaacccttatccagcaactcttgcaactgcttcttcaactctgccaactcagcgggtggcattctgtagggcctcttggaaattggggccgttcccggttgcaactcgatggcgaattcaatatcccggtccggtggcattcctggcaattcatcaggaaagacatctgcatactcacagaccactgggatcttcttcaggggtaacttcgtcatagagaaagcacatgactgagaagaaccctgactaggcagaattaaagtgaaattctcgcagaagggagaattaactttcaccgtacgactggctacatcaagcacaacttggtgcaaggg

SEQ ID NO: 49757 - DNA, 392 bp, Zea mays
agcttgtgaagattcttcatcccatcatgggttagtcggcggtgccatagccaacccatgttagtcttagcaattaagcaagtgtcgagttcagctctatcaaaatctaccaagtatagctgaccctccaacactcccttaaatgctattgaatcatcacttcttctaaagacagtgacacctatatcagtgaaaagacagttgtaacccattttgcataattgagataccgaaagcaaattgtaatctaatgaatctacaagaaaaacattggaaatagaatggtcaggagatatagcaattttacccaaccctttgaccaaaccttgatttccatccccgaatgtgatggctcgttggggatcttggtttttctcatatgaggagaacat

SEQ ID NO: 49758 - DNA, 414 bp, Zea mays
aacctaactgaaagagattggcctgctataggttactaactttcactactgcgaatggcgtttgatgtacacatgattttatgttaatacttggcttaatgataatgaatatcatgaaccactgcagggaactttacctgggggagaagaagtatctgtgaagaggctttgtaggaattcaggtcaaggccttgaagaattcaagaatgaggtcatacttattgcaaagttgcagcaccgcaatcttgtaagactactagggtgctgcatacagagggaagagaagatcctggtgtatgagtacatgcctaacaaaagtctagatgcattcctctttagtatgtgtccttcactttccgcgcttctcatttctcaatatgaacggacaaatatgctgattggattctgatcact

SEQ ID NO: 49759 - DNA, 381 bp, Zea mays
ctcttgcgtcctcgcaggccgaatgttgaaacgattgatcccggcgaacaatgccaacaggccctcggcgcataccgctctctcattggaacgacagacttatgacaagagcatacagccttcagggtatggccgctcgcgaagaaatgggaaacgccacaagacacctgcccataagccgacagaggcggacttatcatgaagaaccacactgttaaatttggagataaattctgtgagccatatgatgactggttaaaaagtcttgcagattcaacagatgaactagcttggggcttatgtgaacgccgaagacactgcaatgtctgcacccttctgaggccgaataaagaagatgctgaatcgtctatttgatgcaat

SEQ ID NO: 49760 - DNA, 416 bp, Zea mays
  unsure (1)..(416): unsure at all n locations
tttgatttaaactggttattgtgttctaacatgttattaaaatcagaggtcttaagntcaaatcttgttagagacttcatttgttcctgcgcccctttattttcagtttgtgcctttctctttggccccatgtgaatgagagtgttgaagtatataagtagattgactatcttctcctatcttaagttttgggttgaactggttagtgtgtccactttaacacctcgtaatacaatacaaaattaattgtgtggttgtgaaattggtctaaattgaactaaacactcctttgtcttttccactacctaatgtgttcttacatgctcattctaaaaaaacaatggttttattctttccacaaattccatatatatgatttagatagtcattgtattgcacgccattttttcggcact

SEQ ID NO: 49761 - DNA, 385 bp, Zea mays
agcttcttcttcattctgatgattattaagccctttgatcacttaattaaaacgaatgttccaactccgagatgcttgcttcaacccataaatggatttttgaagtttgcatatctttccagcattgatcggatcgacaaaaccctcgggctgtatcatatacacgtcctcatctacgtttccattaaggaaagctgttttgacatccatctgccaaatctcataatcgaaatatgcggcaatagctagaatgatccgaatagatttaagcatcgcaactggcgagaatgtctcgtcatagtcaactccttgaacttgtcgaaaaccctttgcaacaagtcgagccttatagatgtgaacatttccatccatgtctttcttcttc

SEQ ID NO: 49762 - DNA, 408 bp, Zea mays
gacctgactaagttcatgacatgctgataacatttttgggatatatcggccgaagattaccaccgaacttactttaagcttcgttggaaatgctgcctctaaatctgcagaggcaacttaatattggaaataaattggggcgttgactgcactgcaattcgtagtattggcgagaagatcattaaatggatggatgggttggaggcgagtttgatcctgcttctgcttgtgcaatcagaagtttggaattgttcaaagatccttgtgtttgttcattaaccatccttctgtcaatgttcttcgaaaactaacttcacacataggctccctttaatgctttgttagtgaatctgcagttctgggagacatcactacagagttcatccccctaaatgcataatggaagtc

SEQ ID NO: 49763 - DNA, 392 bp, Zea mays
catgcaagcttgtgcagagtatgctgttgtcaaagcttcttaatgtagcaagaactggaagataaaaaacacgagggtataattgaaaatttagaaagcaaaataaaagagcaatcagctactattgaaaagaagaacttcgagcttcaggcaactgaaggcttattggcagaagccgaagctaaaataacagaattgaatacgaagcttctctgccaatctgaacagtttgaacaagaaaagcaagaacttaatgcaaaacttgaagccgaagtccaacaaaattcagatttgaaaaaattattggcaagccttcaagacaaatgtttggaatttagcaacaaatgtattcaacgactgagaaaaatcttccactcagttggagctagcag

SEQ ID NO: 49764 - DNA, 375 bp, Zea mays
acactggaacaaaacaatcagatttagtccaacatagaagcatgctatactttcccggccgtgatgctcagcaatacatgtaaagtgaggagggtcatggagtgaacatactgaaagaattaataaacatgcagtcaaacctccaagtgttgcctaatatcgtcgccaccattatacgaataaatttatacaatatgccttgaataagcaacacctattaaaataataaatacatcagaattgaagccatcaaaaggacaccaaaaacactgattaaatcatctcatcttaccaaacaaggttccatcaggactccatattatgcgattaactgacacagctggatccttaaccagtgatgcctgtcgaatgttg

SEQ ID NO: 49765 - DNA, 386 bp, Zea mays
agcttcgacatctttatttgctttttcttcctgatcccctggcgtccagtcagcgatgaagtctgctagcgcctaggactgaatcgaggatctattcacataatcaatgctggattcgttgagttccgcagcccactttccaattcttccagtatcttctctgttcctcatgatatccttcagaggctgtgatgaaggaacacttatatggaatgcttgaaaataatgctgaagcttcctggaggcgattaagacagcatacaacaccttctccaattctgtataatttttctttgataagcttagaactccggagaccaagtatactggggcttgctttttgatttgtcattcgaatttctcctgcacaagcgccgcacttactg

SEQ ID NO: 49766 - DNA, 303 bp, Zea mays
ctatgttgagcaaacctccgggtttgaaaaagtgagtaccctaaccatgtttataaactctctaaggcgctttattggcctcagccaaccccaagaacatgggatgaatgccttaaagaattccttatagataatggctttcaagtcggaaagggcgatcctacactctttaccaaaacacttgaaaatgatatcgttgtctgccaaatttatgttgatgatattatatttggggctactaacgaatctacatgggaagagtttactacgaacatgacagacatatctcaaatgtcaatgatg

SEQ ID NO: 49767 - DNA, 402 bp, Zea mays
tgactggcgaccgacgcgcttctttcgtgcgttttttgacgtaatcaccaccagtccgccttcggtcacgccaactaccatgtctgtagtcgcggctgactaacccgcggtccccacgcatgatggtttcaccgggccacgcgcgaggcgccttgataccgctgcattggtttgaaaaattaccttctctatcctctgcggcggccccgaggcgacacagtgcgagcggtggttcgccttctctgcacccaggaaccggcgcccaaggagtatgactcgtgggcctgggcccccgtgtcagaaactgggccgttggtttccgcggagacgaagaggcgcggcggtttgctcctcgcgtggtagtttgccttcttcgcacttcgagattgatgcccaacgagt

SEQ ID NO: 49768 - DNA, 270 bp, Zea mays
ccgcctagcgacaaagggcacagacggcctaaaactacggcctgaggccaagaaagatggaggggcgaaacgctgtgcaattaggccgcgaagaaagaagggagaaacgcggaacattactgaatctaaatcggtaacactactacaaaataagcacgtagcccgggagctggcgctagcacggatcagcggcgcgcacccccacagcgcggacagacagggccaagcgataccgagaccggcgctgcaccccacgcgcaagagtaaaca

SEQ ID NO: 49769 - DNA, 375 bp, Zea mays
agctttagctgtttcaaagtttcttgtttgaccattcccaggtttagcttttccatctcttgacataaagtgttgccagaggtcttcaccgtaagacaatgacaggaaaccttacggcttaatgcatctgccacaacattggctttgcctatgtgataatgaatttccagttcatagtccttaataagctcaagccatcgtctctgcctcatattcaattctgactgggtgaagatgtacttcaagcttttatgatctgtatagatatgatagatattttccagcagatagtgacgccaaatttttagggcatgaaccacagcaactagctccagatcatgagttgggtaatgctcctcatgtcggcgtaactgc

SEQ ID NO: 49770 - DNA, 305 bp, Zea mays
gaagacagaaaactcgcggttgttgcccgagatttccaggcaacatactgagccttccgctactattgaacagaagaacttcgagcttgtcgctgctgcaagcttatcggcacatgcccgagctgaaataccacatttgtatacgcaacatttctgtcaatctgaacagtttggacgcacaaaccccagatctttatggggaacttgtagccggagtccatcacaatccccaattcaaaaaatgagaggcttgccttccccaccaatgtttgtaatttaacagctaatgaatttagctactgaga

SEQ ID NO: 49771 - DNA, 275 bp, Zea mays
aatatgtcccactgggggtgatgaagctggttttcggctcatcttccttcttcatccaaatttgatgatagcctgaataacaatctagtacactcatgagctctgacgaagctgctgcatctaccagagaatctatccttggtaatggaaattcatccttctgacaagccttgttgagatcagtaaaatcaatgcacattctccatttaccattggccttcttcaccataacagcgttagctagccattctgggtattttacttatctgatgact

SEQ ID NO: 49772 - DNA, 348 bp, Zea mays
agcttccactgtaaatctacaataattcttatgtctccaagcctgccattggtcttcaattggtccgcaattgactttcaattggtatctttgagactacttttagtatcattcacatgtcttctccaatatttgattagactatatcttatacttcccatgttgctataaatgcatatattattgactcatattttgttacctatgcataagggaagttagtcttttgaaatcatgtcttgcacctccatttatcacatgctttttcctatgtagaagatctctgtcagggggagtatttctttgtctctaaagggggagaaaattcttttctaaaagagacactca

SEQ ID NO: 49773 - DNA, 387 bp, Zea mays
ttctgaaagggaattaggcttacacctatttcctaattgattttggtggttgaattgcccaacacaaataattggactaactagtttgctctagtctataagttatacaggtgccaaaggttcacactaagccaataaaaagaccaagaaaagggttcaaacaaagagagcaagggataaccgaaggcaccctggtctggcgcaccgaactgtcctgtgtgccaccggactgttcggtgcgccaggggactccgagctaaactcctcaccttttggaaaacccagaggcgctcccctataattcaccggactgtccggggcaccaccggacagtgcccggtgctccaaacgagagcgactctgaactccccagctccggaatctgct

SEQ ID NO: 49774 - DNA, 365 bp, Zea mays
  unsure (1)..(365): unsure at all n locations
agctttacttcatgtatctgattctaataatggtgaaacaataagcagcgaggctaattccttggtgactaatgaacttcatgacttcgaatttcggtttcaataactatttggtatggggtactattcgctataaatttgtgcttaattctatcatttgatatgcgttgaacattctcatgtataactagatcaaactcagccatcatttccattaggcctaaaaagttcccattgctaggtacaacttgcaattagtaccacataatgtaagttatgttttacaattgtttcataaggagttcaacaatttttttcattnttaaattnttctatgttttactatagaatttaaaagttccaca

SEQ ID NO: 49775 - DNA, 366 bp, Zea mays
  unsure (1)..(366): unsure at all n locations
agcttatctttgttgtttagncttgctatggacattagtttgtgccaagttaagaatgaaaattatggctcgttttctctgcttgtttatttgatgttccactccgctctacttgtgtatgtcgggtcacctacggctaaaatgacacaaactgcagcatctgcccaatagacacaggctgcagaattctcacctgaaactagcctcatttaaactcaaatggtcaaaatgagaatgattagtacacatgaaaaaacgactaaactcatacacttcagctctttgtgtctctaacctgctttttggactacttgctaactctgcagcagggcaaggatcaggtgtcacacaaaacaagggggctgc

SEQ ID NO: 49776 - DNA, 393 bp, Zea mays
tctaaagggagaacatgtgataggtctaaccaatgttcatttcaaaaaagatagaccttgtgcagcttgtcaagcagggaaacaagtgggaggctctcatcacaccaaaaatgtgatgacaacatcaagacccctggagctgctacatatggacctcttcggacctgtcgcctatctgagcataggaggaagtaagtatggtctagttattgttgatgacttttcccgcttcacttgggtgttctttttgcaggataagtctgaaacccaagggaccctcaagcgcttcctaaggagagctcataatgagtttgagctcaccgtgaagaagataaggagcgacaacgggtccgagttcaagaaccttcaagtgaaggagttccttgaggagga

SEQ ID NO: 49777 - DNA, 390 bp, Zea mays
  unsure (1)..(390): unsure at all n locations
agctntgaggcggcaggaggagtataacaagcaacaacaagagtactgggctgctcaatttgcacgacagcaggagatgatgcaggtaattagatcctcgtgagcctctactataattggagcacatattttctaatatatcctcgtaacatagctttcaatttctttcagcaaatagcactaggacaacgtccagatttttcagcgatgactatgccacctcctccacctatcccgcagtttgtactgactccacaatttagttggcccacacctgcacctcaggttatattacttgactttttcttttgacgttgcataacaagaatttaactactaacacatttttttgaatgttgtaggtccctccaggaaacttgctaactccgg

SEQ ID NO: 49778 - DNA, 413 bp, Zea mays
tcggctatggttaaaaattttggcagcaaaacagtgcaatagcaatgaatgctgtggtaacttcacacctatccgtctgtttatatagtactgtaggtaagaaggtgaatcgtcaggatttttacaccaggcaaacagctgctcacacccgctgcacggtggaccgcagagaccaaatagtaaccctgcagggtgggaccgctacgcgctcggaaactgtatcgtttctcgacaagggtctgatttttgcattcaacaacgccattctgctcacacccgctgcacggtcgacaagaaggtgtttttcggacctttggcttcctgaagcctaagagacttttttcacagatcaagctcgttatgaaaaacgatctagcaccgcgaaggggctactgttgggaccatgcttcgtc

SEQ ID NO: 49779 - DNA, 381 bp, Zea mays
agcttaacttgtgtcggatatttatgaaaaggcttgttgtataaaatcttgaatctattcttcaaggcaccgaaagctctctcaattgttactcggagggaagaatgccttatattgaagagttctcttggattgagtggatgatttcctccaccaaattctcttagatgatatcttgtgctacggtatggaggtagaaatccaggtctaacagctgagagcacctagaagggggggtgaataagtgatcctaataacttgaacttatagccacaaaaacttgttaagtgttagcacaataaatgccaagtggctagataggagtctcaacaaaacacaataccacaagagatcaatcacagaggtgacacagtggtttat

SEQ ID NO: 49780 - DNA, 416 bp, Zea mays
tgacattgtctccctgttggaagccaatgtcatccttaatcccagtgcgtctcccattatagagcatgcttctagcaaatttaaatttctcattttctaagtcatgctcattaattttagcactaagttgagctatgtgatcattttgttgtttaattaaagctacgtgatcatggatagcatcaacattaatgtctctacatctagtacaaatagtaacatgctcaatggtagatgtagagggtttgcaaacatttaattcatcaaccttagcacgtaacatgacatttcatttctaagattggaaacaatatcattgcaaacatttaaatttttggccttagtaatcaatttatcattttctatcttaaggctagcaattgattcatttaacttgtcaatcttagcaatcaaat

SEQ ID NO: 49781 - DNA, 386 bp, Zea mays
agctttgctggaaactttgagctcaacagagccttattacatccgctgtttaaagcccaataatgttctcaagccagcgattttcgagaacagtaatgttctccagcagcttctatgtggggtaagacattgttacaagtattttcactggaagtacatgttttgacagatatagaatggtttaatagaaaaataacgataggcttattctggtaaatcaaaatgattttgaaccatccgcccttcttccctattcaaccatatatggaggctgctagacgtttgttcatttgaaactgatctaaggacatatacaatcatgtggacaaaacaatatagaatatacagcatacatgcacttctgtcctgaaaagagtgcacattta

SEQ ID NO: 49782 - DNA, 411 bp, Zea mays
  unsure (1)..(411): unsure at all n locations
ntactcaacagcatactctgtgcacaagcaaccttcgttagaaaacaccttcgttgttaaagacaataaaaagttgaagaaaagttttttaccttgaaattggaatagaataaactaccgacgatgtgctgtcgtaggtagcggctaatgtctgtctcaagcttcgggaaaccaatactctttgatagagtaccgataaccttcgctccggtttgatctcggacgcagcctaacttttcatcgtgaacaccaccaaagagtagtgcccctggttgatatccacaggatatggcatattcttttaactcttctttctcagccttcgtcaactcttgtccaactaagttttgaaagttgaaaatttcctcttccgaagcgtcttcggctatttccttctccttctcaggctct

SEQ ID NO: 49783 - DNA, 388 bp, Zea mays
agcttgagaagatatttccacctgttcttttcaatccaatgcattatttgattcttcatctcccctatgaggcacgaatgggggggccccgtgtagggacgttggtgctatccaatcgagagatgtctaaagactattcgaaagaaatgtagaaataaatgcaaaatcgaggcttctattgcagaggcatacattctataggaggtctcaaacttcacaacaacttattatggtaacaaactgtcgagcgtgcataatccaccccctcgttacaatgatggcgacaatgaatcgaaccttatcatatttcgaggccaactcagaagcgcaagtggctcgaccaccaggaccctgacacatgaagagtggcgacatatcatgctatacg

SEQ ID NO: 49784 - DNA, 408 bp, Zea mays
tggtattcttttgaaggggttttgtgcatgctatggttgtccccttctcaagctttttcaccatattatcacggttatcttaagaaggttgagcatgacactttcccttcaaaagagtaaagctccttcttagccttccaacttcttccttgagctctttattttcttgtgtgatagaaatatcactaattcctaaaatctctagctcaatggaagattggctttcttgagagcaacatttgttagcacatgataatatagtttctacttgagtacatgtgcatatgtgaggttggtatgatttcaaattagttaacacaacctcatgagccatttctaacatgatatgtgaatccataaatttattatgagagcacacaaacatatcatgtctttcttgcaaagcta

SEQ ID NO: 49785 - DNA, 342 bp, Zea mays
agcttgggcaaaccccctaactgacggtgcaagggaacatggccactatgatcatactgagtaggaaacgtaaacgaaggaggagaaggattgttccacgcacccgtgaccgggcagcggaaattggattgattatacccaataccactgtcccggtgagagattgcagcgccgggcccaaaacatgagcaatcggtgttgtcgaaggtagcaggggaacgcccaatcaccgatctgggggttccgaggatgccggctgcgccgaacccgccggaacggctgttggaaggttgttgggtcacgatctgcgcgatgtcggcgcgaatcgtctggatgttggat

SEQ ID NO: 49786 - DNA, 376 bp, Zea mays
gaccgcattggttgatgcccacctcaagaatggagacccctttactggtatggatttgttcagaactatgctgctgacaaaccgcacggctgatgctgttgccatcaccaagatgatgagtgcctgcactgatattggagcattaccaatcggcaaggaagtgcaccgtccagtgctacagttgcggatggaacaacttcctttggttgcagcacaagttgtaaacatgtatggtaagcgtggagacctcaaagcaccaccagaaggtttttaatcgaacagagtccaagggatccatgacctgcactgcgataatagaagcttatgcggtcaaccaacgccataaggatgcgctgcatctctttacttggatgct

SEQ ID NO: 49787 - DNA, 399 bp, Zea mays
tggtgccaatggaaaaacagaaatccttgaaatcttgattgtcaaactgcttgccgttgtcaactgttagctcggacggtactccgaagcggcaaacaatgttctgccaaaagaatttttgggcagtctttgatgtgattgtggacacagccctcgcttcaatccacttggtgaagtattcgacggctacgaaggcgaacttgaggttcccctgagcggtgggcaagggcccgacgatgtccaggccccagcgctgaaaaggccatgtatgggcgaccagctttgtgtattgcgaggggttgcctgaccgaggagagaacttctggcaggcttcgcaggaccttgcgactcgatttgcggcgcagatcattgcaggccagtaaaacccttgtcggatca

SEQ ID NO: 49788 - DNA, 393 bp, Zea mays
ttaagtcacctgttgctgcaactctcttgtctcatcaatttttacgcacaaccattcctattttcagcctgtcggccacttgcttctatagctgatcacaggaaattttgtagtttttcgatatgcaaagttgtaacaaccaaaatttttatgcagcccatcctttctggccttattttggtagtgtagctcgtgtactcggcagaaaccttccgaaaatggctccactgcttggcttcggagagcccaaatataaacactaagcctaacaatagcgttaggagttagttggtggaaatagatcccaaattttttcagcacatcggtaatcattctatttaaaggaaatatcaaaccagctttgaggaaactcttaaaaatcacctattttat

SEQ ID NO: 49789 - DNA, 366 bp, Zea mays
atcttgagaagatactttcacctgtcttctccaattcaaagcattattcgattcttcatgtgccctatgaggcacaaatgggggggccccttctcgggacgatggtgctatccaatctatatatgcctaaagactattcgaaacaaatgtagaaataaatgccccatcgaggcttctattgtagacgcgtacattctatacgaagtcttagacttcacaaaaacttattatggtatcaaactgtcgaacgtgcataatccacccgctttttacaatgatggccataatgaatcgtaccttatcatatttcgaggccgagtgataatcacaagtggtcttgccaccaagaccctgacacatgaagag

SEQ ID NO: 49790 - DNA, 398 bp, Zea mays
  unsure (1)..(398): unsure at all n locations
ctgactntgatgttgaatactcaaggatgcattacaaggcaactccataaacatacgcttccgtggaggtgaaacttcaccatctctagccattgtatcatatcacggagtatagagagctgcaactaccatattcatacgctgcaactacaattgccatattcatacgctgcaactgcaactaccatattcatatgaatactagcaagtaacaactaccatatttaggttgtacgtgtctgcaactacttgactctangtgaatatccttgcatattctgatattcatatgaatactagcaagtagcactcaccgtgtttgcaactaccatatatattagggccgtctcccagaatatggagctccacaatcaactcaacgggaggccctaatatat

SEQ ID NO: 49791 - DNA, 350 bp, Zea mays
agcttgcttacttggtaagatgaccaaggcgcccttcacgggtttaccggagaggacgttagatttattggaactcatacatactgatgtgtgcggaccaatgagtacgacagctaggggaggattccaatacttcataaccttcactgatgattttagtagatatgggtatgtctacttaatgaaacacaagtctgaatccttagaaaagttcaaagagtttcagaatgaagtagaaaatcagcgtggcaagaaaattaaagcactgcaatcagatcgtggtggtgaatatttgagtcatgagtttagcaatcatctaaagagttgtggaattgtttcacagcttacgc

SEQ ID NO: 49792 - DNA, 393 bp, Zea mays
tcctatttcttttagtgatgataaatactgacctgactggccaccaaaatgactgctcgtgcgtactctttctttgcaaagactgactcccctttctgttcaagacgtgacaagatcgccaacattgcagcattgaaagccagcagagcaagatgaagaagcctgtaaaaagaaatgtactcatgttagatattaaggtgtagctgcggacacaacgctgcagtttatattggaggcaaagaaaagactaaacaacaccactgacaagcaaagaatcagttaagaacaattgaagaagggtagtccccattagttcttttctgttttgtcgggacagggaatattggctcaatcctgactgatggttatttagtaaggctgtgaaattggagt

SEQ ID NO: 49793 - DNA, 364 bp, Zea mays
agcttcttcaccatgttatcactgctatcgtgagaaggttgagcatgacactttcccttcaaaaaagttaagctccttcttagccttccaacttcttccttgagctctttattttttttgtgtgatagaaatatcactaattcctgaaatttctagctcaatgtaagattggcttgcttgataacaacaattgttagcacatggtaatatagtttcaatttcaacacatgtgcatatgtgaggttggtatgatttcaaattagttaacacaacctcatgtgccatttctaacatgatatgtgaatctataaattttattatgagagcacacaagcatatcatgtctttcatgcaaagctagatt

SEQ ID NO: 49794 - DNA, 126 bp, Zea mays
gagccccgtagcaagggtgtaccgaccatcagatgtgatcgatgcatgacccccgagccttgggacattactgtcatcaccaggatggggcctatcagggactttacacgggctccgccctgtgtg

SEQ ID NO: 49795 - DNA, 335 bp, Zea mays
ctttctcttgattcccaaaatccaacatattcttgagaggcttttcttttgacgggtaagacttgcgaaaagacactctgtactcaaggttttcgaacccatgttgttgtaggtgatgaaacaaccgagttttgctggttctgctcaaagatggggccaaagcaagaagaagaacactaaacttgtttgtgggacggcggtttgcctcctaggtatgtaataataagtgctggccttcaacaccctggtatgtaataagtacctctaccatattttatatgaattgtaattatggttattgtatccttttcgctcattctcacctcttgttatgt

SEQ ID NO: 49796 - DNA, 353 bp, Zea mays
ccactatgacccggttgcagtggttacacctcttatggcaatgaacgcaaagtataacttctcgataactgctataacgatataatcaatctgattattgatctcatcccatcgaaccataagaagcccaaagacttataccagtccaaaaagaatcgcgtccggtcttgggatgaactatacgaagattgatgtgtgtaacaataattgctgttgttctggaacgaatatgaaccggccacccattgttagatatgcggtaaatcaagatatgcggaggtactaaaagaggatgggagctacttttgctacaaaagtggcagttaaacagcttcgatatatgcccatcactg

SEQ ID NO: 49797 - DNA, 432 bp, Zea mays
  unsure (1)..(432): unsure at all n locations
caccagtgaagataactcattctcagatgggttattctgcgatgccagagtctacccatantattcttagcaatcatgcaccgtttgagttcagctctattataatcaactatgtatagctgaccctctaatactcccttaaatgctactgaatcattacttcttctaaaggctgtaacacctatatccgcagaaagacaattgtagcccattttgcataattgagaaactgaaagcacggtgtaatctaaagaatccacaagaaaaacatttgaaatagaatgtgtaggggatatagcatatttaccaagtcctttgaccaaaccttgatgtccatccccgaatctgatagctctttgtggatcactganttgttcataagaggagacatttctatctcccagcatgtggttgtgcctcgctataatgatc

SEQ ID NO: 49798 - DNA, 502 bp, Zea mays
  unsure (1)..(502): unsure at all n locations
tctaaagggagaacacgtgataggtttaactaacgtgcatttctaataagatagaccttgtgcagcttgtcaagcaggtaaacaagtgggaggagtgcatcacagcaagaatgtgatgaccacatcaagacccctggagctgctacatatggacctcttcggacccgtcgcctatctaagcataggaggaagtaagtatggtctagttattgttgatgacttttcccgcttcacttgggtgttctttttgcaggataagtctaaaacccaagggaccctcaagcgcttcctaaggagagctcaaaatgagtttgagctcaaggtgaagaagataaggagcgacaacaggtccgagttcaagaaccttcaagtggaggagtaccttgaggaggaagggatcaagcacgagttctccgctctctacacaccatagcanaatggtgtggtagagaggaagaacaggacgctaatcgacatggcgaggatgatgctcggagagttc

SEQ ID NO: 49799 - DNA, 403 bp, Zea mays
  unsure (1)..(403): unsure at all n locations
agcttccacgactattgaaaaggaagaaagtgatgatgataaaaatggaagtgagagtgatgaagaattggctctctttgtgaagaagttcagcangttcatggagaagggtcaacctataagaggccaatcatcaagaaggaatgctttcaatgatagatagtgctttgaatgtggggaacccggtcacattgccatgaattgcccaagcaagaaaaagaagagcaaggatggagatgataagaagaaattctacaacaacaagaaggatgacaaagcctatctagttgaatgggattcggatgctagctcggatgatgatgatgatgatgatgatgatgacacctcatccaagctcaatgcccgaatcaccatcaagganggctcttcacttttctcatct

SEQ ID NO: 49800 - DNA, 440 bp, Zea mays
  unsure (1)..(440): unsure at all n locations
ttagacattgaatctactgaaggacagatatatgagattaattcattgaaggtactcatntttttctagaataggtacacttagttattagtaattagctaattatcatcaggtctcaatcgagatataatgtgatttagtcccttaaaattttcaatctctttatttttctcgaacacacaacatagttgtgtatcatttagttaatagaggaaggttgttagcatataggccctaactgccttataattacaacatgtgccactaaccaactgaggaagacgaagtcccaacaacctataacctattctggcagcagaaatgactgtagttcccttcattctttgcccctgctgtctgctgtacaccagtgatctntcattaagcacatcttgcagcacattttttggttctgggctctagagatgcacgaatggata

SEQ ID NO: 49801 - DNA, 449 bp, Zea mays
  unsure (1)..(449): unsure at all n locations
caagcntggacaggtttccttgagtgttgtatggaaggacgtgttgttgatgtacttgacctatggcaaccaacatacttattgccaaggccgatcacctgtcatacattggaggtacaccgtgatcttgttgatcatttctgtctagctgcacagtagggttggaaagttggtctcatgcatagcttagagcccgactcctagaatcgggtttgccaaaatatagaagcgaacatgatcggggacgacagaggtcagaatgtcatgaaggcggaagatctcgacgaagaatatccgctatcgattcaacagggtaggggtggctcatggataaagtgggcatactgcgattaaccatcatcaaaattgtcgatttcacccatcttcgacaacccttcaatgaagtcgagggctcaaggctggtattgctctagatggtggtgagcact

SEQ ID NO: 49802 - DNA, 381 bp, Zea mays
  unsure (1)..(381): unsure at all n locations
ctctatttactatttaaaatctcttaagtggtagctgatccatctctcaagtggtagctgatccatttatcactntggcctttattttctccccctttggcatcaagcaccaaaacgggattaatcttggccttttaaccccattgcctcaccaaagtcttcaattaagagcaaatggcaataagatttcatgagatgaacttggaattagttaccctctcatcggagtgcagtggaagtctttcatggtccaagtccaccttttccctttcaatcctccttcgagactaaattatcaaactcaagcacatgattagtctcaaagggtcaagttgtaacacatcntcccctaaacatgtgcatcactttgcaacggacttg

SEQ ID NO: 49803 - DNA, 432 bp, Zea mays
ttaagcgactgagctgcacttggccttccaggccgaagtggatattattatgctgccgaagaatgccagagggccttcggcgtcatctgctcttttattgcatcaagagatttagtacaagagcatattgccttccgggtttggcctcttgcgtagaaatgggaaatgcctcaagataccataaatgatgccgaccaaggtgggcttgtgagactgaagcacaccttcaagtttggagattaatttactgatccagatgatgactggctaaagattattgaaatattatatgacgaattgcttgttgcttattcaaaggccgaagatactgcgacgccaacagccttctgaggccgaaaatagaaaaggctgaatcgggtatctgatgcaattgcgtttgataccctgactattgtaccctcgccaatgcat

SEQ ID NO: 49804 - DNA, 513 bp, Zea mays
  unsure (1)..(513): unsure at all n locations
atatctatcctatcgctctcttgcttaaattcacttcctttcttaactcagatctaaatggcttcctttggatcgacatgcgtagaaagaggtaaaagcacgggcatggaaaagggattatatggcgtgctgggctggatgaaagaagcaactacgcctacaatgagaatagcgggactcccactagctgacagagaactcccagccaaaatgaaactggacttccagcaatagcagcaatgtcactagaacctttcatactggagaataactagaagtttatggggaatacaacccttaaggtttggctatgattctaaatcaaccatgcttactaaacaactcaatcatgcactcgtaatgctccattcgaggcgtaataccagaatcttcactcatcgagaacaagtatctntgacctagaataacatatncttcacaaatacaagctagcaaggcatctggataactacaagataagttatgcgtgcacctatcattgatactgctgat

SEQ ID NO: 49805 - DNA, 440 bp, Zea mays
agtcttgcctcgggcagactaataccagaatggttatacacaatgggagtggagagatggcgagagtagcgtgtaccctccgttgcaagaggctggatggtggtgtatctgtgctctcggttggcgtgaacccggtctggtcttaataaacccagcggcgagttgacatatgcaagggttaagtgctacatatgtcgtgtgatggagattctcagctgagtattaatcgattcggatcgccgttacttctcggacatgaagacttggtcactgacttacacgtagcattccagtgaacaagaagtgttgataaaaggatggttagtatacgccaagtgcttgaactatggtagaaagaactctagtgacaggtaatgacttaacttgctaataaaactggattcttaaggatccactataattaagcatttttgcgaaca

SEQ ID NO: 49806 - DNA, 417 bp, Zea mays
  unsure (1)..(417): unsure at all n locations
cgagcaagtctcacgggctcaccaagaagctatctgagggcttttatctaacggaggaggacaggagaggggctggccacngtggttgctctctggcggcactagcgggtcgcggggaggtcgccggagctaatggctggctcgggtaagtcacgcgaggtacggaggaggcaacggggaaggcagccaagcactgtggcgggctttatagccgtggcgcgggcgtggtcacgggcggccgcgggcgcgcggnggttcgcgcacgggcgtgctctgagcgcgcccccggatgtcagctcgcgtcgaacacgtggaagcttgcttctgccatggttcaacggcagattagagcgccatagcgtgcgtatcttggcaaagtcactgtgtatggtcgcttctctgctccaaatcctatct

SEQ ID NO: 49807 - DNA, 478 bp, Zea mays
  unsure (1)..(478): unsure at all n locations
ctagaatcaagaatattgagctcattcttatttctggtcaaagatcgttcatcaagtggcttggtaaagatatcggctaattgatctttattattaatgtaagaaatctcgatatcccccttttgttggcgatccctaagaaaatgataccgaatggctatgtgcttagtgcggctatgctcgacgggattgtcggccattntgattgcactctcattatcacatagcaaagggacttcggttgatttgtaaccgcagtccgccacggtttgcctcatacaaagcaattgcgcgcaacaatgtcctgcggcaatgtactctgcttctgcggtggaaagagcgaaccgaatttgcttctttgtaacccaagacaccaaggatctttccaagaactggcgagcgcctgatgtgctctttctattaattttgcacnccgcgcaatcggcattctaataaccaatcaaatcacatgtggatc

SEQ ID NO: 49808 - DNA, 413 bp, Zea mays
agcttatgaagattcttcatcccaacatggtctattcggcggtgccagagccaacccattttagtcttagcaattaagcatgtgtcgaggtcagctctatcaaaatctactaagtatagctgaccctctaacacacccttaaatgctattgaatcatcacttcttctaaagacagtgacacctacatcagtaaagagacagttgtagcccattttgcataattgagatacggaaagcaaattgtaatctaatgaatctacaagaaaaacattggaaatagaatggtcaggagatatatctattttaccaagacctttgaccaaaccttgatttccatccccgaatgtgatagctcggtggggatcctggtttttctcataagaggagaacatccttttctcccctgtcatatg

SEQ ID NO: 49809 - DNA, 518 bp, Zea mays
  unsure (1)..(518): unsure at all n locations
ctcagcttgcgcgataacacagcgtgttgatgttcagagtttgattgtatgtatgagcaaatcatcatcgtccaacgcacagcagagggctccacagaatgaaacaagagtaggaaaagaaaatcagagtagagagagaaatctaaactagccggagaaccaatgcggcggcggcggnggcacggtggatcggngtggagatcgcgttatatatagagagcgcctcangaggcgccgagggggcattcaagcccaagcaactgtggaacttcgtgctgttgtgtatacataggccctccctgccttgtgggccatgcgcccctttcctttgaagtttagacggcccacgacaataattatggtccggtaccttttgcaccaacccaacccaacccatcgtggcatcgccaaagaacggtggtgaagttgtaacgtataactttgccggtgcccgtgtgttggatggctacaacaatcccacgtaaatatacactaaaagatctcatatttttattaat

SEQ ID NO: 49810 - DNA, 347 bp, Zea mays
  unsure (1)..(347): unsure at all n locations
cttgggatccttcagtgtcttagcagctgcggtcctagtggcaccttcaaaagataaacatgttatgcagtcaaactggatttcagttgcacaaataatattgctgagtacgaagcacttctattgtggcttcggaaactaagggcaatgggaataagaagggccatcctaaagactgattctcaagttattgctggcaacgtggacaaaagtagcaaggcacgagatccaaagcttgaaagatatctggatacaattcgaaggttggaagcttccttcaaaggttcttctgtcaagaatattccaagaggtgaaaatgagcatgtagatntgctagccaaatcagc

SEQ ID NO: 49811 - DNA, 373 bp, Zea mays
  unsure (1)..(373): unsure at all n locations
ntatcanatggacgtgaaaagtgccttcctcaatggacctatctttgtagaggtctatgttgagcaacctcccggctntgaagacagtgagtatcctaaccatgtctataagctctctaaggcgctttatgggctcaaacaagccccaagagcatggtatgaatgccttatagatttccttattactaatggctttaaagtcggcaaggtcgatcctactctgttcactaaaactcttgacaatgattngttcgtatgccaaatttatgttgatgatattatattcgggtctactaacgaatctacatgtgaagaatttagtaggatcatgacacagaaattcgagatgtctatgatgggggaagtgaagtat

SEQ ID NO: 49812 - DNA, 408 bp, Zea mays
  unsure (1)..(408): unsure at all n locations
agcttgccaatacctgtcanagcaactgcttatgccagcacagcagctacagatcataccagtaacttggccttttgcatgctggggactggatatgattggacctttcaagaaagctcaaggaggatatacccatgtattggtggtgattgacaaattcactaaatggatagagttccagcccattgcttctttaacctctgctaaagtcgtggaattcatacaaagcataatattcagattcgggataccaaacagtatcatcactgacttgggatccaacttcaccagttcagaattctttgacttctgcgagcaaaagagcattcagatcaagtacgcatctgtagcacatccaagagccaatgggcaggttgagcgagccaacggaatgatattggaggcact

SEQ ID NO: 49813 - DNA, 479 bp, Zea mays
  unsure (1)..(479): unsure at all n locations
tagccagaagcatcgganatagattcatgacccagatctttgtttcggcgggcggaaaatggcaggcgacgaagctcgaagccatcttaagccggtaagaaacttatgtttgttacttttaccttctcctttgaaatttgtacctttcttactatgttgtttgggtatatacaggatgacgaagctgaagattgacaatgctgaagtttgacaaaactgaagacgaagcctttagctgaagcttaaaattgcttataatgtgccttcctgcaaaaattcttggagaaactcttgtaatatagatatggaataacttatgtaaatttgtacataccttgtaatatattctgtctcccttatccgcatccaatctgctttgttgtggacgaaacttctcttttgagccgaaagcgagaaacaccttcccttcttttcgtacacaacgaagcatagaaaattttccttcaatcttttcttat

SEQ ID NO: 49814 - DNA, 336 bp, Zea mays
gcggcgccacagccaacacatgttagtcttagcaaatatagcaagtggcgagttcagatctattaaaatctaccaggtatagctgaccctctaacactctcttaaatgcttttgaattatcgcttcttctaaagacggtggcaccttttttactgaatcgagagtttgttctccatgtgacataatttgagatacagagaagcgaggtgttgttcccctgaatcaccacagagaaacactcggatatatgagtgggcagtgagatatattaattttaccccaacctttgaccagaccatgatttccatccccgaatgtaattgctctttggggatc

SEQ ID NO: 49815 - DNA, 449 bp, Zea mays
acacttaaaactcagctctacgggcttgtgagaggcaattccattcttattatctatatctatcaatcgtcaatgatctaaatatgcaagactgacccacagttgttataaattattatgtctacaaactcatatcatctagcggaagatatagatattgtaagaaataaagaattatcctgtgcggaaaaatcaacgcctacaacatggaggaaagccaaaagatggtaacattcatgcctttaagtgcaagtatcttaaattatcatttcttatgtgtcttgcgtaggcacatagaaagcacttcacatattcgacaattatgtcaccattctttaaagaaattcctctcatatggtagatcgcatattcatcatttctatactatggccatctacatgctcgaaatcattgctaaaacctcatggcatgctttacactaactatca

SEQ ID NO: 49816 - DNA, 441 bp, Zea mays
  unsure (1)..(441): unsure at all n locations
agcttgaaaagtatctagatacagtccctatgattgaggcttccttcanaggtttctctgtcaaaaatattcctcgtggagaaaatgaacacgctgatctattggccaagtcagcagcccaggggctgcctgtaccttcggaagtattttttgaaacaataaaagcaccttcggtcgaacttcttgaaagagcaatccttaacatatcccctgtttatagtgaagattggagaactgagatcatctctttccttcagggtaattttctttcagacgacgaagcttataacaggagaattgaagcaagagctcgaccatatgttataatagaaggggagttatacaagtgcggngtctgttccccattactcaagtgcttatccagatccgaaggtatagagttaatgaaggacatacatgcaggtctgtgtggatctcaca

SEQ ID NO: 49817 - DNA, 502 bp, Zea mays
  unsure (1)..(502): unsure at all n locations
ttggagcactataactcttgatccatgagcttttggtctttgtatgctatagcaaacttgtaaagatttgtttggtgagcaaatgttattgactaaggttggcatgtattacttgggatcgtgaggatcaaaggggttaatgttgggggtttcagtttggtgctctgtttggagctctattgtgccaaatcctggtaattttggacagaaaacgttaaagaanaatggaagaacatatctaggagaacaaacttatttaagcaacgctaggctggtgctacataaaagcgggagtaaagtgtctccaaaggttctctatcagacttgagagaggactgatttatttgactgttgctaaaagaattagtgagtttggaagatgtttggcgcactgtaacttttgatcccttgcattttggtctcgaactgctgcaacaaactaatagagctatagttggagaatacttttggttaacagagatgggcttgtactatacacaat

SEQ ID NO: 49818 - DNA, 449 bp, Zea mays
  unsure (1)..(449): unsure at all n locations
agctntagggacaaggatttatggaaagaatcttggccttgatagggtttgcgcgactagacaccaacaacaatttttttgacactacaagtgcacaaggagacttgggttggtctagcggtcaagctatgaggttctataaactgcgcatgtgtaaattcaagtgtaaaacacacaagggctagaaacatcaaaacaagcacatgaaatttttttaaggtttcacttgctaagctcaaggttgggggggcggtcttctcatgagcaagatggacaacatttcttttgcgaaaaggtttgaacatttacaataccacctagataacaaggcaagagaaacacataacacaacctagcgagacttactaagtaggcaagagataaggtatttcttatatttcataacatagcaatacatcacattattcaaaatttcttattattggaat

SEQ ID NO: 49819 - DNA, 369 bp, Zea mays
  unsure (1)..(369): unsure at all n locations
tgactctctcaatcaaagactttgcaacccatatttgtctaggtctactcttgtttggtggacctaggaatgtaactntgacctttccatttgcaacctttcttagaacataatgagcattgaaagcaaatggtcttgagtgcttaagcaanggagttggtggtttggctttgcagttgtgggcaaaatgaccttcatttccacactcaaagcanttgataggcctgtgagtctgctntggctngtattgagtggtagctntcttttgcacaaaagcattgtatccaataccactcttgttgtttttcatgacagtgttcataagcagctcattntggaggtattgacccttgttgaacttttgcacac

SEQ ID NO: 49820 - DNA, 446 bp, Zea mays
agcttcttctcgtcatcgatgagcaacgccatcgctagtgcctcctgctcatggtgtttgttcggggtttcaagtaaaaaacatggattcatgtttggtgttggtttatgaaaatgactcacaagtctgattcatggacaaaatattacgaagaaaaaatgtcacgcatgcaaaaaagagaatttaagtataatacattattcaaacaaaagaaattgcatgcaaagctcttctttaaataatattacttctatccaaaaatgtaattcaagaatctcggtgatacttatctactactatgcattgcgcaagggtaataagtgagcttggtgagagatgtagtagatgtgttttctgtcatagatgtagacataaacacacatgtggtgtagcggtaactactcttgacctttgcttaagaggtcatgggttcaaatccccttatg

SEQ ID NO: 49821 - DNA, 307 bp, Zea mays
gcttgatagccagccgagcagcctctagctcctatgcagcaagcttcttctaagcacaaagatctttaatgatcaaatccttggccgataactgctgtccaagtcgctgaacttcatcttgagatacttgtagctcatgacgatgatgatctaggtccaacatagtgaagcggtggctcctttccaaaatagtcaaggaagtgctagcatcacggtataacctgtccagattatcatgagaagccacaagagctcgttgttcctcctacaaacaagaatcaacattcaacacctagtcaacaataag

SEQ ID NO: 49822 - DNA, 419 bp, Zea mays
  unsure (1)..(419): unsure at all n locations
agctnttaaagcaagaaccgagaccttgtcttatctgagcagcaggatcacccttgctggactttggcagcccgccgccgcgcgtagaccgggctaccaggtacaccattgtcaaattgcttgcgcctacgacttccctgacctcctgtaaagctcccaatctcactggattgagttattccgtcgtggttaggtcgggttcctcgccgccgacgaacttcccagcctatgcacgaggaccgaccaactccggccatcttcgacgctagcctgtacctcgacatgaccgccgtaacctccccgacctccctgtacacttcgccggagctatctcgctgtcggtaagccccgccgcccttttctccaccacggatactgttccaataggggaaggacaacgtgttagaattatggttacc

SEQ ID NO: 49823 - DNA, 325 bp, Zea mays
  unsure (1)..(325): unsure at all n locations
tcagagtctntacttgcttcttnctcctgagcccctggcgtccaatcagcgatgaagtctgctagcgcttgngactgaatcgaggatctatggacataatcaatgctgaattcattgagttccgcagcccactttccaatccttccagtagcttctctatttctcataatatccttcaagggctgtgatgaangaacaactatatggtatgctcgaaagtaatgtcgaagcttcctggaggccattaagacagcatataacaccttctcaattctgtataagttttctttgataaactgagaacttcggagacaaagtacacatg

SEQ ID NO: 49824 - DNA, 447 bp, Zea mays
  unsure (1)..(447): unsure at all n locations
agctagctgttgacaattgaagtttctttcttcatctnttcaggttcttcatctgattctactggtcccaagcgaatcaaacaagctggaaacggtaataaccccatctctctttccaggatatcaaacctctatattatatgcaagggcaaggctaccatatcttctatatatgatggcactctgctcaattcccaggatgtaaaaggcgacgaggagcaccaagaagaagaagaggaattcctggtggccctgctatcacttgccgtggtcatatgtgacggcatggtcgatgaacatggcttcacctgtgctgcccctaaagacatggtgtctctggtgagaaagctcaaggacataatactacaggctaacaacaacaacaacaacaacactgttcaatgcctgcggacagtgaagcttacctgccagctggttggttcaatg

SEQ ID NO: 49825 - DNA, 360 bp, Zea mays
  unsure (1)..(360): unsure at all n locations
tcggtgatggttaaaaattntggcagcaaaacagtgcanatattcttaaatgctgtggtaacttcacacctactcgtctgtttatatagtgctgcaggtaagaaggcgaagcggcagggtttttacaccaggcgggcagtaacttgtactcgctgcgcagtggaccgcaaagaccaaacagtgactctgcaaggtgggaccgacacgatctcgggaaatgaatcgtttctcggcaacgagctcagggaaggtgttttttggaccttcggcttcccgaagcttgagaggattttttcacggttcaagctcgttacgaaaaacgatctagcgccgcgaaaggggctactgttggggccatgc

SEQ ID NO: 49826 - DNA, 301 bp, Zea mays
cccgctcttacagataaaaggacatggaccgcaacaacattcctagatcttggaatgcggatgagctacgatgggattatgtaataaaccgatgtacacgcttttatattacctatggcaccccttttcctctccaaagggggagaaaggatcttaatggggccatagtttgcagtttatcctttcctattcagccctaccagagcaaacacctccacaatatgtaaatgtaaaatctgagcatgcaccaaccgagcgcagagtaaaggaaaaaatatggagaagctccaaatcataccta

SEQ ID NO: 49827 - DNA, 503 bp, Zea mays
  unsure (1)..(503): unsure at all n locations
ttaagactaagacttgtcaggttngacccaagttaagctttttcactctctntattggcggntatctcaactaggttagacaagtcctagatgcaatacaaggaatttaaatatgcaatgcaagtgacaacaccatttgacatttcacataaaatttctgagatcaaggatatttagttcattcctcaacatgcaaaagcgggtcttatcgagtggcttagtgaaaatatccgctaattgatcttccgacctcactccttctaaaataatatctcctttagcaacatgatctctaaggaagtgatgacggatatcaatgtgcttggtgcgagagtgttgtacaggattattagcaattttaacagcactctcattatcacacaacanaggtactttntctagaactacgccatagtctagaagagtatgtttcatatataanatctgtgtgcaacaagcacctgcggcaatgtattccgcttcggcagttgacaaggcaacac

SEQ ID NO: 49828 - DNA, 417 bp, Zea mays
agacttactggctactgtgggagctttttctttttctaatatgggcttgacggagggtggagtgggctggccactgcggccgtacctctggccgcaatggcgggcggaaatactctcgccggagctaaagaacggtggctgaccggtgagggtgagtgcagtgccaaaagaggtgcgctcggagaggccttaaaggcgcgggcgggcacggtctacggcgtgggcgcgccgcggacttgaccggacgcctgggcgagcgcgctcgcgggatgtgcgagctctggcgtgccgaccagggacgaacacctgtgcccgtgcgttctgcccaagctctggtgcgtgtggacgctcatccgaacctgctcttcccttggtcaatgcacgatacctcatttccttcctacaagctaccattct

SEQ ID NO: 49829 - DNA, 437 bp, Zea mays
  unsure (1)..(437): unsure at all n locations
ggaagttggcctttctgctatgtcanaggatgacctcgcttatcagttttgcatacaatagtctgaaggtacaaaagttatagacttataagcagattatttctgtgtcttttattcttgtgctgatcattcgtctccctccctttntttgtagggcttaattctgagcaacgctttgagagcacagaaaaatgctgaggatgaaagttgccaaatagcccttggtaaccttcggtcggaggttatcatactgaggaatgaagccgcagagaaggacaaaattatgctttccttggtagacatgataaagattaacaaagccaatcttgctgcacagtttgaagctcatagagctgacattgaagaattaaagaaaaagctcgcagaanagaacgagggatttaaagtcgcttaagcacaacacgagataagtgaat

SEQ ID NO: 49830 - DNA, 380 bp, Zea mays
  unsure (1)..(380): unsure at all n locations
agcttattatcaaaccacaaatcaaataatgcacttatccaatcattagatggttcatcaagcatcacacgcatccatgattacagaaggcactatgcgctttctagatggtgaccctgtctatgtcctagagcttagaggaacctaggtgttttctaagcgttntatacccatgcatatttacctctaaaaatctgaaataaaagaagaaacatgagatcagtggacaagagttgtgtagaaaggcccatgaaaacaggcccaggctcaagtttgaagagcaaacattatccctgaccttccctacgatcttatcaatttgcgctggctgcacaaatcatgactcacaactgactgcgccgtctaccgcccccgttcgc

SEQ ID NO: 49831 - DNA, 514 bp, Zea mays
  unsure (1)..(514): unsure at all n locations
tactcagcttaagtgattaaggttccatgttgaattatccncaggtttatcttctccatttcttggcataatgtgatgtcagaggttttcactataagacaatggcaggaagccttgcaacatagtgcatttgccaccacgttggtcttgcctgggtgatagtgaatttccaattcataatccttaatcagctcaagccatctcctctgcctcatatttagttctgactaggtgaaaatgtacttcaagcttttatgatccatatatatatgacagatattccctagcagataatgacgccatattttcagggcatgaaccacaacagctaattctaaatcatgagttgggtaatgttcctcatgccggcgcaactgtcttgaggcatatgctataactcggccctcttgcatcaagacacagcctanactactgcctgataagtcataatacacatcanaaggcttctcaatgtccggntgagctaataccggagcagtgatcaataacacct

SEQ ID NO: 49832 - DNA, 425 bp, Zea mays
agctcttgaacgtactaagcacatgtctgtttatatggttaccgataaacctagtacctgagtgaagccgggcgcggactttatacctcacatgacctaagactgggtctcccatgctagctatggtgggtacaagtgcggtcactgcacggcggcagccggggtcagtggagcattgtatgccaaggtggtgaggtctggacgcgaacggtgaatcgatggggacggttgacgtgtgtggggtcagagtaccctgacatgtcgtgtgtttaggtttaccttgcaaggataaaaaatcgattcgaatcgtctgcttctcgcagctaatatgactgctcgaccccttgtactacattgagtaagtagtgaaatgacgttacatgagataatttgttgattgtactaaatgtctggtaccatgtatg

SEQ ID NO: 49833 - DNA, 410 bp, Zea mays
  unsure (1)..(410): unsure at all n locations
actcagctggttgtcagaattgaacgaagctccatcttgaaacctgtttctgagaanaaagtattaaagcttcacaagttcatagttaaatggccagagtccgttctaccgctagggttgaacgcgagggggaggaaactgaagcttcggagaccgtccctatctccgaagccatgcaacggtccgggctagtgatttcggaaaagattcctatngatgatgcagaacaagcaatcgctgaagcagaaggagaagaagctgaggaaacagactccgaagatgattatcaccttgccacaccaagcaaacccagccatttggacttcgggaaatctactgtttcgaaggctgatntgtccaagatggtaaagtcaggcctatttactgaaaatcanaagaagctactacgc

SEQ ID NO: 49834 - DNA, 414 bp, Zea mays
agcttcttatagttgctgccaaaaatgatatgtgtattgcgttcctcgatccgacactatcttcttcggcacaccatgaaggcagactatccgtgacatgtataactcacctaacgttgctccggcgtatgtcgtcttcacaggtatgaaatgggccacctttgttaagcggtccacaatcacccaaatggaatcgtagccggcccgggtacgaggtacgccacctataaaatccatcccgatctcatcccacttccattgaggaatctgcaacggctgcaacaatccggcgggtctctgatgctctgctttggttctttgacagctatcacagatggcgacatattctgcgatctctcttttcatgccataccaccaaaacctcctttttaaatcctggtacatcttctcact

SEQ ID NO: 49835 - DNA, 431 bp, Zea mays
  unsure (1)..(431): unsure at all n locations
ngtgtacaaaccaagcaattaagaatgatagaattaagtttttgtatgaaacatgtgaaaaatccatatttctccctttatatcaaaagggtttttacgcatgtgtctagccgagttagttgctttaggaggtccctaatttgactcgatgtaagagcgaacgatagaattaagtttttcagcgcatgtacatttntaaaggtgccactgtacatgtgtttggttggatgtataaaaggagatgaaaggaggcagccacattttatatggtgtttggatgaggagcacgcgagagcgaagtgaacactatagcaattntcggaagcggcgtagtcccaaaaatcgaacggatggtgtcgccccctgcccctgtcgcggactcgcggtccttgaaactatgatggccaccctcgcccctctcgagcagtgat

SEQ ID NO: 49836 - DNA, 439 bp, Zea mays
  unsure (1)..(439): unsure at all n locations
agcttaaacaaggtggagatactgtttcactttatctcaacaagttcaatcatttgtcccagtacgacattgaccaggtcaacactgacctgaagaagagaaattgttttatgagaggcctcaatgaccggctacaacggaagatggccacctgcctcgacctctcctacagcagggctgtcagcacagcgcgggaagttgaagccaagtatgcaggcctaggaaagtcaaagggctatggaggtgacaggtccaaccaggggcctgaaaagcgacaaaggttggtgatccgacctttcaatcaaaaccgttgttcacctcatccaccctcctacccctttaaacaacttgtatttatccgccctgctactggccccacctcaacaactcagacgagtgcccctggtgctcgttntcctgcactcctgagttcatctac

SEQ ID NO: 49837 - DNA, 482 bp, Zea mays
  unsure (1)..(482): unsure at all n locations
nttgagganattntaagtgatcacggggatgtttgtgcgttctctggtgcgagaggagtttcagctatcttggagaaggcgggttgcaatcatgttaaaaccctagctcaggccgaagctgccttctccgtggatgacacaaaggatccctaagccgaagcaagtttattgggcggcaaatttttcactgatanttgggaaaatggcgaccaagaaatggctcatgaaataatgaagaagagcgaaaaagatattcatgactctcgagaagcagtgaaaaaagcggaaaaagatgcagaactcgagagacggataggtatcgtttgacggctnttagcttcgtcgtttggtttcgtggcttcgaactgattggatttttctatcgcagctgaattacctcctncaccggagccgttcgacccnctagccgattcggagaacaagaaagaaatagaaatatcaacatagccgaatctatcatt

SEQ ID NO: 49838 - DNA, 437 bp, Zea mays
  unsure (1)..(437): unsure at all n locations
agcttganaagtatttagacacggtccgaatgattgaggcttcctttgaggggttttctgtcaaaaatattcctcgaggagaaaatgaacatgctgatttgttagccaagtcagcagcacaagggctgcccttaccttcggaagtatttttcgaaacaataaaagcacctttggttgagcttcttgaaagagcagtcctcaacatatctcctgtctatagtgaagactggagaactgagatcatctctttccttcagggtaactttcttttaaatgacgaagcttataataagaggatagaggcaagagctcaaccatatgttataatagaaggggagctatacaagcgtggggtcttgttcccattactcaaatttttatccagagccgaaggtataaaattgatgaaggaaatacacgcangcatgtgtggatct

SEQ ID NO: 49839 - DNA, 443 bp, Zea mays
  unsure (1)..(443): unsure at all n locations
tcttgtagctgctgccaaaaatgagatgtgaactgcgtttctcgatctgacactatcttcctcggcaccccatgaaggcagactatccgtgacatgtataactcggctaacgttgctccggtgtatgtcgtcttcacaggtatgaaatgggccacctttgttaagcggtccacaaccacccagatggaatcgtagccggcccgggtacgaggtaggccaactatgaaatccatcccgatctcatcccacttccactgaggaatccgcaatggctgcaacagtccggcgggcctctgatgctctgctttggttctctgacagctatcacagatggcgacatattctgcgatctcccttttcataccatanccaccaaaacctccttttaaatcctggtacatcttctcactccctgngtgtatggagtaggctgtctcatgagc

SEQ ID NO: 49840 - DNA, 436 bp, Zea mays
agcttatgacattactgaggttttttttcttctatagaaacatacatgcatgccagttttgaattattacttttgactaggctaacttcttcacttgagtaaccggaatctgctttacctgtttgtcttctctgtgattatctcattgtaaaagccatctgggtctaatcagaaattggcagggaattccaacacaattttgtaattattcaaacaggtttgcttgctctttctcttcccttcctgcttgataattcctgaattgtgttaggccttgtgctattttatttttgttcaaatatgcatggctttcatttaataaaattgtcttttgaattactgctctcaagacaagtccaattgagtttgttgtcttatgtgattgctatatgtaacctttagaatttcctatcacaagtcccaatcgatttttatt

SEQ ID NO: 49841 - DNA, 479 bp, Zea mays
  unsure (1)..(479): unsure at all n locations
tcgaagggtgccatcttgatactttcttgatagctattattatatgaaaactccgccaagggcaaacattcatcccatttctgtgagaagtccagaacacatgctcgcaacatatcttcgagtatttgattaaccctctcagtctgtccactcgtttggggatgataggccgaactgtggagcagcttggtacccagggatttatggagttcttcccagaatttggatacaaattgtggtccacgatccgacactatagtcttggaacaccgtgcaaactgagaatgcgggcaatgtacaactctgcataggtaagtatcgggtaatatgtcttgaccggcagaaagtgagcaatctttgtaagtcgatcaacaatcacccagatagagtcatacncttttgcggtcctgggcaatcccacaataaagtccatacttatgtcttcccatttccatgtcggtattggtagtgactgtaat

SEQ ID NO: 49842 - DNA, 343 bp, Zea mays
  unsure (1)..(343): unsure at all n locations
agctntntcagaaggaaaaggagcccgcanaaacgaagaaggcagctaggacaaaaaacaaagaatcattacagtgacggaagtcattgaagggacaccaccacaagcttcagcttcgaaggcaccagctgttgagagcacaacaactaccgatgctgcaccttcggaagctacagctgccgaagctgccacagccgaagatattcacttagaaagcacaattgctaatattgttaagatactgctagacatggccgcagaagaagctgttgcagccaccgaagagactacgaccccagagcctgagaagaagaaagaaatacacgaagacacttcggaagat

SEQ ID NO: 49843 - DNA, 476 bp, Zea mays
  unsure (1)..(476): unsure at all n locations
tccccgctgacactagagttgcaagccacaccctggccaccgctatatatgcctcctgcattgctcatgtatgatggtctgtctgacccgaagcagtttctgatgagctacgaggccaccatatcctattatagtggcaacataccggacatggcaaagtcatttgttatggcgattagaagcatagcccanacctagcaatcgtctcttcagccaaggactgtcgctntgtggcagaagttaaatatgtttcttaccagcttccagggtttccagtcgaagcccatcactgcgcaagccttgttccagtgcacgcaggactcagacgaataccttcagtcatttgttcgaagggttatccaccttatggctcacgcaccagtagtacaagatgatgttgtaatcaaagctatggtcaaggggctcangccaggcccagtagctcaatacttcgtcaggaaagcctcccactctct

SEQ ID NO: 49844 - DNA, 448 bp, Zea mays
agcttacccttgaagcctggaacaagctacagattataccagtccagccgctcagtcaaaaggaccgaccgtgagaatcaaagcactgcccctgagtcaaagtaaacagaaaaagaggacagaagaagttattaccatacagagaggcaaagattcttggaaccagagaccacaaacattagggtcattgaccccaccactcacccgtgccccccgcacgcgtgcccgcctccatgcgcactaccaccgccgccccgccccctttgtagcgcactaccgtcgccgccctcgccccctttgtagcgcacccaccgccatcgtcgccggcaataggcccccattccccttgtcgcacctgctgtcttgtgttacctgctacattactaccactccacaccccccgagcaccctcggttggctataaatcccccccacaccagctctctta

SEQ ID NO: 49845 - DNA, 482 bp, Zea mays
  unsure (1)..(482): unsure at all n locations
agaacacgtgatagggttgactaacgtacaattctgtaaagatagaccttgtgcagcttgtcaagcaggtaaacaagtgggaggagcacatcacagcaagaatgtgatgaccacttcaagacccctggagctgctgcatatggacctcttcggacccgtcgcctatntgagtataggaggaagtaagtatggtctagttattgttgatgactnttcctgcttcacttgggtgttctttttgcaggataagtctgaaacccaagggaccctcaagcgcttcctcaggagagctcanaatgagtttgagctcaaggtgaagaaaataaggagcgacaacgggtccgagttcaagaaccttcaagtggaggagttccttgaggaggaagggatcaagcatgagttctccgctccctacacaccacagcaaaatggtgtggtagagaggaagaacangacgctaatcgacatggcgaggactatgc

SEQ ID NO: 49846 - DNA, 376 bp, Zea mays
agcttggtcatgacgtcatgttctacgcggtctttattattttgccaagcggtggtggagaccatgacaggatgaggggacgcgtccatggaggatagaccgagcgtgtataggggccgaggctgtcacatcgtgcgacaggggtcctggtcgccacatccttctcagaaaaaccagaaaggtcatactcaatggaacaagaattgacggtggtgaaccgacggacagaaaggagattatgggtgatatgaggggctatgacaacgtctttaagatagaacggtccagggagacccgaggcacctactgaggtgaccggcggagtggaatcttttccaacgacgatcgatgtgtggtgggaggaatgacgtgggtg

SEQ ID NO: 49847 - DNA, 426 bp, Zea mays
  unsure (1)..(426): unsure at all n locations
actcagcttaacgaaggcaagtccatctttcccttgatgcattatatactctatttctctctaccactgcctaaacctggattatggatgggaatcgaattgcatggtgagcacgagagagcccgcattaactattactntgattaaaagatatggggcaaataaaaagggtacaagtggaatgttttccaaatgtgtgcgatgaagggtactcaccctcatcacctggtgagtaggatgatcagggactccctggtttatgggagggcctaaggtgttggctcagctggtttatgcgtgagcagaaagatcgtcctctcgtataaggacgcggttgtcatctttcattacctgtactctcaaaaagtacaaccactcgaggctgtgtgggcagccactcgatctaaactcgtacggtccaaccct

SEQ ID NO: 49848 - DNA, 428 bp, Zea mays
agcttccttgagtataagaccttgggtccgccgtttcttaccccttcctcttcttcctttttccccaacccctcgccagacgccgccatggagagaacgaaaccaagctgcgctgccgccgctagtggtcagctgtgtgtggctctatatccctagtgggcgaccgggggagccgcgaagtcttcgtcgttcgtgtgagtcgcattgtcgtgcagaatcgacattgggtgatcggtgattgctcgccattgtgggacatctgcacgtggccgcaatccaccgtggtgtcgtcatcggtgcggtccaaccccgggaaggactcccctgtcaatccccgttatatgatccacgtgtagatattaaattacgcttgaaaccgcgcactgggttgatagtagcaacagctcaccagcgatggccgctactca

SEQ ID NO: 49849 - DNA, 379 bp, Zea mays
  unsure (1)..(379): unsure at all n locations
agctgtgaaggggcgcccattcgaggcaagaatatcttacatgctttgcacgaacgggttacccggttggtcgtccacacaatcgtcggtcaatagaaaccttgacgaatgactttagcagcaagggcccttggtcccgaatgtgatccacatatacccttatggacttcacggaggagttctgtgccttcggcttcaattatgcattntcaacatcggtggcttatccccttcttatagagatgttcgttgactctggtgaagtctctgcttctatgttttagtcttttggcttcactctggtcagaggggtggtagtggccttgaagataaagggtgattggtgcccgctagtcttcggccattatcatatngacta

SEQ ID NO: 49850 - DNA, 445 bp, Zea mays
agcttagctacgggtgcataggtttcaccgttatctattctttctacttgtgaataccctttggccacgagtcgagctttgttccttgtcaccacaccatgctcatcttgcttgttgcggaagacccatttggttcctacaacattttggttaggacatggaactaaatgccatacctcgttccttgtgaaattgttgagctcctcttgcattgccaccacccaatccgaatcttgaagtgcttcctctatcctgtgtggctcaatagaggaaacaaaagagtaatgttcacaaaaatgtgcaacacgagatcgagtggttacccccttatggatgtcgccgaggatggtgtcgacggggtgatctcgttggattgcttgtgggactttgggtgcggcggactatgacttcatcctccttgtcttggtcatttgaatctccccct

SEQ ID NO: 49851 - DNA, 422 bp, Zea mays
  unsure (1)..(422): unsure at all n locations
tggtgaagcggntcagacaaccaacaggcgagtcttagtgctctaaaatgaggaanaaacacggctccgtgccaaaattacatacatgttcaggcctcgacagccataatgaacaaaaacactggcattcaaagtgccattacaaacggaactccggttccacctccgcaggtacgaacaaccccactcgatggtggagggcctgcggagcaacagaagaccgacgaacggcgcgccgtcgcccgctccagcagcagcgacgacgacgacttctgctccggtgggccgaacagcggcagcactgacctcagggcgaatgctgctgccaagaggcccccgcccatgcccaaactcgtgaggcaaggaccggcagaaggccgtaaagttggaggtcggtccgtgggcgcgcctggctatctcgt

SEQ ID NO: 49852 - DNA, 391 bp, Zea mays
agcttgcttcatgccttcttcctcttttctatattaagaaccttactggaacactaccccacttaatatgaatgagggtagatctcttgaatcttgcggatttgaactccttgaagtaccacataacaagggtgttatgggtccttctgctgctgttcctgcttgagcaagctgcggaaggatgactggcacaacgattattctgggagaaccttcttcttatctcctcttcactatcttcttttctcttctcactattcacttttcactgcctctttctatctctttgctcttcccactggaggattctatcaaagagtattactatcatacactggaggaaaccaaagactatgaaccatgtgcaacagtcttcaacccaagaattacc

SEQ ID NO: 49853 - DNA, 457 bp, Zea mays
attccacccttgttgtagcactcgttttccgggtgggtcttcatgttccaattaacaatatgttcttatcataaacaataattaaacaacataattggaacatgatcataataaaacattagtttcccaaaaccatgtagaacaatagcaaatctactcaataattcatttgtttgcaaggtgggggataaacaatgctatggcacagtgattaacaacgaacattattatgtaaaaaggagtgatcaagggcacaacttgccttagactcgtgattcccaggtaccaacttgatcttcaagtgactcgtaacctcgccgctactcgtagcaatacatacaaatagacaagaagtacttataaataacagtacatcaaacatgagaacaaacagcgtaagaatattctacgtaccacaacaaggtcgtacgttcaagaatcactaaatttcggagta

SEQ ID NO: 49854 - DNA, 435 bp, Zea mays
  unsure (1)..(435): unsure at all n locations
agcttcatacttgctcggtatacagtctttgctgcacacaagataaccagttgtatgtctatcaaaggacccgttacaatattccaagttagtgctattcaatttgtctattgcagattggtacatgcctaaagtgttagacaaaccagctgtaatctgtttatgaatttttttttcaaacagactccaagacagatcaccaacttgcatgtcaacagatatccccaaagtcagactgcagagcttacatgaaattgttgcatcatttttcacaagatctcgggcataattaagctcactctccgcttcatcccatagctgccgcttacaatatagttgacctgaacaaaaaccaaggaatgtgagacagaaatgacaggtgaacaaaaacacaattgaagaattatgtatacctagtaatgatgaanaacaatg

SEQ ID NO: 49855 - DNA, 389 bp, Zea mays
  unsure (1)..(389): unsure at all n locations
taccgcanttgaagcatgatcgctntcccttggtcttggccttgcttggctgtccctttcgaccttttagcgtcgtcttgaatctcttgatgatgagagccatctcttcatcattgagcccggccgcctcaacttgcgccaccttgctaggaagcgactccttgctcctcgttgcctttagagcaatgggttgaggctcatggagtggaccgttcaatgcgtcgtcgacgtatcttgcctccttgatcatcatccgcccgctcacgaattttccaagtacttcctcgggcgtcatcatcgtgtacctgggattctcacgaatattgttcacgagatgaggatcaagaatggtaaaggacctgagcattaggcggacgacgtcgtgatcc

SEQ ID NO: 49856 - DNA, 421 bp, Zea mays
  unsure (1)..(421): unsure at all n locations
agcttggacagtgttctgcgacggtttctgttgaaccttcngagcaggtgcggctgctgttttagttgcaccttctaaagtcagaacatgttatgcaataaagcttgattttagctacacgaataatattgctgaatacgaagctttacttttggggcttcggaagttaaaggcaatggggataagaagggcggtccttaaaactgattcccaagttatttctggtcatgttgacaagagttgtagggcaagagacccgaagcttgagaaatatctggatacagttgaaaggcttgaggcttccttcgaagggttttctgtcaagagtattccacgaggagaaaatgagcacgccgatctgctagccaagtcagcggcacaggggctacctctaccttcggaagtattctttgagacaata

SEQ ID NO: 49857 - DNA, 469 bp, Zea mays
tggagtaatgtcggggaccataattaggggtaccctcaagacgcctaattctcagctggtaacccccatcagcataaagctgcaaaggcctgatgggcacgattaagtcagggatcagtccacacgagtgactcgatcacgcttcacccgagcctagcctcggccgagggcagccgacctcgagagacttccgtctcgcccgaggccccctttttatggcggacacatcaccggcttgcccaaggccttggcttcgctcaggagcaaccttgactaaatcaccacaccgactgaccaaattgcaggggcatttaacgcaaaggtggcctgacacctctatcctgacacgcgcccccggcagagccgaggtgaccgccgtcactccaccgctccactggccagtctgacagaaaggacagcgccgctgcgccactccgactgcagtgccactcgacagagtgagtctgac

SEQ ID NO: 49858 - DNA, 467 bp, Zea mays
  unsure (1)..(467): unsure at all n locations
atactctnagtcacctgcggcatgcaagcttcataaggtgccatcttgatactttctttatatctgttattggatgaaaactccgctaggggcaaacattcatcccattttggtgagaagtccaggacacatgcccgcaacatatcttcaagtatttggttcactctctcagtctgcccactggtttgaggatgataggccgaactgtggagtaacttattacccaaggatttgtgaagtgcttcccaaaacttggctacaaattgaggtccacgatccgacactatggtctttggaacaccatgcagactaagaatacgagcaatgtacaattgggcgtagacagctactggggaatttgtcttgactggcagaaagtgagcaacctttgtaagccgatcaattataacccacatagagtcatacccttttatcgtcctgggcagtcccacaataaagtccatact

SEQ ID NO: 49859 - DNA, 378 bp, Zea mays
  unsure (1)..(378): unsure at all n locations
ttatatcatagcatgatgcatatgcgagtaggatacggatgtgttttattcgagcaaccggtgcaaaggtctctccaaaatctaagccttcaacttgagagaatccctttgcaacaattcttgccttgttccttacaatcacgccttgatcatcttgtttgtttctgaacacccactntgttccaatgattcttgcatcttgtggnggcttctctagggtccaaacttggttacgagtgaagttgtttagttcttcatgcatggcgttcacccagtccggatcctgtagcgcctcatctatgcatgtaggttcaacacaagagacaaaggagtgatgttcaataaaataagcatgtttatgtgatcgagtaataaccc

SEQ ID NO: 49860 - DNA, 315 bp, Zea mays
agcttgcatattcatagtcaactcactttattcgttatcaacccatgaaccaccctggattttcttgctcagcttcttcttgacatatcaacggcgagattttgttaacagggttaaatttgtaacaccctgattttatggcgataaaatttcttttctaatatccactaaattcacgcgtttccctctctttcctttgcgatacttctctttctcctaaacaatggcgagacatcttgtgttatattaatattcatacgactaactccataccttatggagtattgttgttgctcccatgctgaccaactaatt

SEQ ID NO: 49861 - DNA, 291 bp, Zea mays
tactcagcttatacatcttcttcttgtcggtgctgaggaacgccttgtcgcagcagtccgccgcttcgtgcagctgagaccgcagatccttgagctcctgcacggcccaagacggcggcaacaaggccgcacggcgtcatgacaggaaggcccaacacgacacgacacgacgcgacagagcgaaactgacgagccgttcaacgtaccctgagcgcgccgtcgaagctctcggcacccggcgcgcctagccgcgacgacgacctgtcgaacggcaccgccgcggtgctcgtg

SEQ ID NO: 49862 - DNA, 392 bp, Zea mays
agcttcagctccatctatgttatggattgcttttgagtcagtccaattgccttcggcccttctggcagcttcctgacttccatgtatagcgatgggtccttgatccgaaggtatcttcatgcaaagataggcaggatgaagaattgcttcgaaagcattgagggtgccacgaccaataattgcattgtaagggtattccacgtcaacaatgtcaaacacaacttgctcagttctagtgttgttgatgaacccgaaggttactgacatggtgatcttgcccaatgctacaatctgtctccctccgaagccacagagaggatgtgtagcatcatgaatcttatcttctggctcttgcatttgtctgaaggccttagcaaatatgatatcagctg

SEQ ID NO: 49863 - DNA, 414 bp, Zea mays
  unsure (1)..(414): unsure at all n locations
tgggctttcatccatatgccagatntccacattntcaatcttgcaaccttttctcaactntaccttctactccacttagctctacttttctcagtgcaagactactcaacctgngaagaaactttggattaacaggtaagatagttgtctttgaaggcaaaactctaacagggtagaaacaaaaattgtgcctccaaggttaagtgcagctcttgtgccctctacaaagaaaatgaaacttgaaattcatcaaaagaagattgactacagaaaaaggcatgtgaaaaggtaaatatgtaaaaccttcatcagagaactcaataaatgcaaaccanaaaactgagtggtgatcaccgcanattctgcaattaacaacctaagagagatagttcattaatagagtagcagtctctt

SEQ ID NO: 49864 - DNA, 435 bp, Zea mays
  unsure (1)..(435): unsure at all n locations
agcttctaaagggagagcacattttgtgactaaccaatgttcattttgagaaagacagggtttgtagcgcatgtcaagcaagaaagcaagttggtattcatcatccacacaagaacattatgacgaccgacaggccgcttgagctactccacatggacctattcggcccgatcgcttacataagcatcggcgggagtaagtattgtcttgtaattgtggatgattattctcgcttcacttgggtgttctntttgcaggaaaaatctcaaacccaagagacattaatgggattcttaagatgggctcaaaacgagtttggcttaaggatcaaaaagattagaagcgacaacggaatggagttcaagaactctcacatagaacgcttccttgaggaggaaggcatcaagcatgagntctcttctccctacacgccac

SEQ ID NO: 49865 - DNA, 463 bp, Zea mays
  unsure (1)..(463): unsure at all n locations
ntaccaaatagacgtgaagagtgccttcctcaatggaccgatcaaggaagaggtctatgttaagcaacctcccggctttgaagatagtgagtaccctaactatgtttataaactctctaaggcgctttatgggcttaagcaagccacaagagcatggtatgaatgcctaagagattttcttatcactaatggcttcaaagtcggaaaagacgatcctactctattcactaaaactcttgacaatgatttgtttgtatgccaaatttatgttgatgatattatatttgggtctactaacgaatctacatgcgaggaatttagtaggatcatgacacagaaattcgagatgtcaatgatggnggagttgaagtacttcttatgatttcaagtgaagcaactccaagagggcaccttcattagccaaacgaagtatattcaagacattctaaacaagtttgggatg

SEQ ID NO: 49866 - DNA, 446 bp, Zea mays
  unsure (1)..(446): unsure at all n locations
agcttctccgccagtctgagcagttcgaacgggaaaaacaagatctcaatgcaaaacttgaagccgaagctcagcaaaattcggatttgagaaaactactgacaaatcttcaagaaaaatgcctggaatttagcaacaagtgcattcaacgactaagaaagattttttactcggttggagctagcagcgaaaaatttaccccatcagctgaagatctaccaaaaaccttcgaacacattgagggggagattgacgagctcgacgaagtcatagctgggcatggtgacttctgtgcctgggtggcttctcgagggactgctgcagccttcatgaaggctggctgtgatcatggngaaaatgttaatagggccaaatttactttgtcaccatcaatcttggatgacatccctgatctcgcncgaagcatctcgaatcgatttgtaaaa

SEQ ID NO: 49867 - DNA, 473 bp, Zea mays
  unsure (1)..(473): unsure at all n locations
agaacacattntaggactaacaaatgttncatttgagaaagacagggtttgtagcgcatgccaggcaggaaagcaagttggtgccaatcatccacacaagaacatcatgacgaccgataggccgcttgagctactccacatggatctattcggcccgattgcttacataagcatcggagggagtaagtattgtcttgtaataatggatgattattctcgcttcacttgngtgttctttntgcaggagaaatctcanacccaagaaaccttatagggattcttgagacgggctcaaaatgagttcggcttaaggatcaagaaaatcagaagcgacaacgggacgaagttcaagaactctcatatcgaaggcttccttgaggaagagggcgtcaagcatgagttctcttctctctacacgccacaacanaatggtgtagtggagaggaagaatcgaactctattggacatggaaa

SEQ ID NO: 49868 - DNA, 432 bp, Zea mays
agcttgccagtacctgtcaaaacaacagcatctgtttctcagcaactacaaaccataccagtaacttggccttttgcatgctggggattggatatgattggacctttcaagaaagctcaaggaggatacacccatgtattggtggcaattgacaagttcactaaatggatagagtttcagcccattgcctctttaacctctgctaaagccgtggaattcatacaaagcataatattcagatttgggataccaaacagtatcatcactgacttgggatccaactttaccagctcagaattctttgacttctgcgagcagagaagcattcagatcaagtatgcatctgtagcccatccgagagccaatgggcaggttgagcgagccaacggaatgatattggaggcactcagaaagagggtctttgataaaaat

SEQ ID NO: 49869 - DNA, 432 bp, Zea mays
  unsure (1)..(432): unsure at all n locations
ttanagggagaacatgtgataggtttaaccaatgttcatttctataaagatagaccttgtgcagcttgtcaagcagggaaacaagtgggaggctctcatcacaccaaaaatgtgatgacaacatcaagacccctggagctgctacatatggacctcttcggacccgtcgcctatctgagcataggaggaagtaagtatgggctagttattggtgatgacttttcccacttcacttgggtgttctttttgcaggataagtctgaaacccaagggaccctcaagcgcttcctaaggagagctcacaatgagtttgagctcaaggtgaagaagataaggagcgacaacgggtccgagttcaagaaccttcaagtggaggagttccttgaggaggaaaggatcaagcacgagttctccgtccctacacaccacagc

SEQ ID NO: 49870 - DNA, 441 bp, Zea mays
agcttgcactaatattacaacacctcctgcatatattattacatctttaattgtaatagcactagctttgttcctaagaagtactggaacttcctgttgtttgtcctcattgtcgtgaccattgaaagctgtcatcgcttcttctcttgaattgtatcttttgtagcaagctcctttgaaaccatttacttgagcatggcaagcttcccaggaagagtagacaccagtttgacggccaacatgtactacgtaccaagccatagctgtaaattttgtaatcatcataggcaatggaaatcatctcagatcaaggtatcaaaatttgccaatcaacataggcaatggaaaccatctcagatcaagcatgaaaatcacatacattacaggcaacaatctgactgatcgtaggcaaaggaaacaatctgactgatcacatatgcc

SEQ ID NO: 49871 - DNA, 425 bp, Zea mays
tggcctttctttctttggtgtgtatgactgccttccttttctttcccatctaaggtaagcttggatctataaagatcctctcgtaccaaggttgaagtagtagaaatggaggcacctgcaccaaacacaaattatcctaatatcatgttgacaaattatggtaacaggacaagccctactacactaatctattcacatgcatagaagctgacaagcccacatggggattggttataaattaaaacatgaaaaattacagatcaccaatcagcaccacaatcaatccattcacgaccgctatctatctgaatcatctacgatcatatagcgcgacctaagtgccttgaacagaatctgatggaacagggtggcaaccaaaaaagccaatggaccaggggcaagcatgcaatgttaacctatagagc

SEQ ID NO: 49872 - DNA, 445 bp, Zea mays
  unsure (1)..(445): unsure at all n locations
agcttaaacatttagactattaaacatgactatgtttgcagtgtcctttctcactatcatctcgtcgccaaaatctgtaaacatcttctagattccctcttcgtctttttacagtgttattctgaagcttataccttcgtctttgcttaattcattccgaaggtggtttttgctgtagcatctttaatactttagagatgtatcaagaagcaatggttaattagtgttttgaggacctttgaaggtcgaaggcccccaacaatagcccctcacagtcttaggtcatttcctcacaacaaactcagactgtgaaatgaacgaaggccttttgccaaaggtccaaaaaataccttccctgagctaatcatcgaaatacctaaaatgcggcgaccatcctgtagtggtgattttacattnttcttcatctcctgccttatttcattca

SEQ ID NO: 49873 - DNA, 502 bp, Zea mays
  unsure (1)..(502): unsure at all n locations
ctcagcttcagccagcaaccttcggaacatgcttcggcttactgatcttctacgctaccatcctaccgacggatgacggtataaggtaaatgcaagtgtaataaagaaaactcaaggtaaaagacaggtacaagtttcataccgagttaagtaatttttgagcttcgtctccagctagctcccgcctgcctttagccaaaanttgagtgataaatctattaccaatgcttcgagcctcaccaggaatattgactaagtctgatggtgataggctaaagttcggctggtttactattctagcatgcgtgcattcggccttcaaaaatgtagcaaccataacacaagaagctaacagagcacanaaatccccgtgcccagttataacttcatcgagcgcatcaacttcattctcaatatgctcgaaggctttgggtatatcttcagctgaaggggcaatntcttcagagctagccccaaccgagttgaatattccttttaatcg

SEQ ID NO: 49874 - DNA, 392 bp, Zea mays
  unsure (1)..(392): unsure at all n locations
agcttataggttntcggagatgactaggggtcttctgatgaagactccaccctaggcatgtcagatcaattcatagctccagtcagaatgatgacaaagcaagccagttccagaggccacaacacagctcacagtcttcagggcagcaacaaagctcctttaggccaccagctccaaggggcagcggcggtaggggcttcggaggaagatatggggaccagcccaggaaaatctattgcttgttctatgatgaagaacagggccacactacaagaacgtgccagattactattcagaagcaaaaagaaattgccgaagcagaagcccggcagaaccagccgaagcaggttttacatactgcttcgtgtactctccctacatacagaatatgt

SEQ ID NO: 49875 - DNA, 397 bp, Zea mays
  unsure (1)..(397): unsure at all n locations
ntattccagtgcacccaagatcacgaagaatatcttcaggtgtatgtccgaagattcttacgcctgagggcacaagcgccaacagtgcccaatgaaattgtcattgaggccatgattaaggggcttcggccgggaccttcagcccaatactttgccagaaagccccctcagactctggagaaattgcttcagaagatggatgaatacatccgtgctgacaatgatgttcgacagagaagggaggaagcttacaggttctccgaaatagccaggggcttcggagggagaattcatcccatacatgtcagatcgaatcattccactcagaatgatgacaagggaagccagcagcagaggtcgcaatattccttctangcttctggcagcagcagagcta

SEQ ID NO: 49876 - DNA, 292 bp, Zea mays
  unsure (1)..(292): unsure at all n locations
actgcttcngcaggagagcttccgaacgtgaagtttgttcggtccacggagtcgctntatccgagcgcaagttacttatcgcagaaggtgatgagtgaggtatccgtatcccggaggcgtaggagtccctcggctcggtcagccttggctgcttacgtgtactccgtcgtttccaggatcccgctttcgaagtagtcaagaagcacgaaagatatcctgctaaaaagagatcctttttcgaggaacaattcgacgcagagggggtctccctccttttagcctccgagggagg

SEQ ID NO: 49877 - DNA, 441 bp, Zea mays
tggatctatatgttttacagaagagatttattttttgctacaacaactttatgtcattccttagaaaaattgatcttctatagaagagatttggatttttttacctaaaaattcagatcaccacagtcggtaacctatcatttagccaaaacaaataggtagtagcagggattggaaaacaaatacataggttttgggtttgaaaaaggcacagatgaaccttcaatgcagaaaaactattacatgtacatagttgtaagccataagattagaggagcttatagttgaatgatacagcaaacaaatgatccatataattagagaccatgaaaattcagatccaggatggatccatcaattttatttgagttcattataatcaaagtattaatcctgcttacaatgaggttacattggaatccactaatcttgatatctact

SEQ ID NO: 49878 - DNA, 368 bp, Zea mays
  unsure (1)..(368): unsure at all n locations
gagttgctgtacgaaacanaaccctgtggtattgaacagtatcacaaccaatttggctgctacagcttcggctcccggtctgggtcaagctgccccgcgccgacctttcgaaagaggtggcctggcgactggatgacggaatggttttacgtgaagaatgacttgaaatcacgagaagatataaagaagatcattatgcgtcccatctagcaatgcttcggcctgcggaggccgaaggtggagatgaatgaagcagtcgaagaatgccagagagccttcggtgttgtttgctcttttattgngacggnggatgtggtccaagaacacattgccttcagagtatggccacttatggaaaaatgggaaat

SEQ ID NO: 49879 - DNA, 438 bp, Zea mays
agcttctaaagggagaacacgtgatatgtcttactcttgttcaattcgaaaaagatagaccttgtgcagcttgtcaagcagggaaacaggtgggaggagcgcatcacagcaagaatgtgatgaccacttctagacccctggagctgctgcatatggacctcttcggacccgtcgcctatctaagcatagggggaaagaagtatggtttaattattgttgatgatttttcccgcttcactcgggtgttctttctgcaggataagtctgaaacccaagggaccctcaaacgctttctcatgagagctcaaaatgagtttgagctccaagtgaaaaagataagacgcgacaacgggtccgagttcaagaaccttcaagtggaggagttcctcttaaaggaagggatcaagcacgagttcttcgcttcctacacaccacagc

SEQ ID NO: 49880 - DNA, 415 bp, Zea mays
  unsure (1)..(415): unsure at all n locations
actaagctgcgcgggtcccctaggcctcaagataccaacgttttttttgcactangagctctcaatcactcaatagaatgcaatctcaagcaaggagtgtgagagattgagttagaggatcacaaatgagctcaatgtatgctaggaatggctaagagaaccctccacatgagctccacttcgtattatagcccatcactcaatactagctgttatgtgcaactagcatagcttctgcacatacgcgaacggtccgcatcctatgggctaacgggccgtcagcccgggtcggacagtctgggacctgtcaacttgaaacgccagagcactgatcaagttgaaatacatgggcgaactgtccgtccaacatgaccggaccgtccgccttgggagtaagtattgtccgggctaaagc

SEQ ID NO: 49881 - DNA, 401 bp, Zea mays
agcttatggacttggaaatgaagtcttttattctcacggtaatcctttattcatttttgtagggcttaatccttagcaacgccctgagggcacaaaagaacgctgaagacgagagctgcactatagctctcagcaaccttcgataagaggttatcaggctgagaaacgaagccatggaaagagacaaaattttactttcattggtggataaagcaaaagaagatgaagcaaaatttaatactcaatccgaagcttataaagccgaagttgaagatcttcgtaaaaaacttgccgaagccaatgaaaatgtgcggtcgcaaaggctagccaagaaattagtaaatggtggaaaagcaagctagagaaaaatattgaggagctttgcgaatccaagaaaagat

SEQ ID NO: 49882 - DNA, 414 bp, Zea mays
tcgacaatcgtacaaccgttgactgaatggctaaagagaagaagattgttgaccctgcattggccgggttttacgaagctatggagaagacaaatacatagaagatcactaatgaaatgttggctgggttatctgaggattctggcgatagtgaaagttttgacttagaaagtggaaactaaggtgccgaagatcggccctggcagccgagtcataccattttcgggaaatcaaccatcaagtagagtcaaattgatgcaatgaaaggaagatacttccgcgatatttctatcgtgagggttggaggagatagcaatgcccctttgcccgaagctgacaaagtggttgtatacaggagcttcatgaaggcagggcttcgggttcccttgagtaaattcttagttgacgttctaa

SEQ ID NO: 49883 - DNA, 441 bp, Zea mays
  unsure (1)..(441): unsure at all n locations
agcttctaatgaagatggtcctttcatcattgtgaggccactagggaggaaaactaagaaggaaaaaggaagagggaggaagcatgatgagtttgacattgatggtgatcctttcatagaagaagttaaaaagatgagagaagcaatacaagaaactgagagggactggaaggactatgatgacaggttctatgaattagagaagagtaagcttgacttggagcgagatcagcacgacaaagagataatgcatactagctaaagcacaatggacaaagaatcaaaagtgtacttcaagttgatgaaacaggagattttggctcgccgttttgggagtaagccatctgcatgatagtggacttgacttacctgttggtgagaccattaattntcatatcacatgttctttgtgcttgttagatacatattattttttgggag

SEQ ID NO: 49884 - DNA, 391 bp, Zea mays
  unsure (1)..(391): unsure at all n locations
ctggtcggtgatgcaacttaatgctttccatcttctgaagttagaacactaacctcatcttcctaggggcaacgtagcacagtacctatgacatcaggcaacacatgggtgagtagaaggggaggggaatggggagcatggagtangcgaccaccaatgtcatacgtcgcatgcccatgtttgcgacggaagtgggactctacacatagatggcaatttgccaaggcttagagggtttgtgtcttcgttaaacaccagtgcatccatactataggaaacaatgatgcctaagaggggtgaattangacttctaanactttctctaaactaggccacaattaaattccaagagcaaaacctatgcnaataaataatatagaatgtacaaact

SEQ ID NO: 49885 - DNA, 390 bp, Zea mays
agcttaaagccatggtaagtagcatatgcatgtaatatgtgaattgactcaagcctagctacgggtgcataggtttcaccgaaatccaaaccttcgacttgcgaataccccttggccacaagtagggctttgttccttgtcaccacaccatgctcatcttgcttgttgtggaacacccacttggttcctacaacattttgattaggacgtggaaccaaatgccatacctcgttcctagtgaagttgttgagctcctcttgcattgccaccacccaatccgaatcttgtagtgcttcctctaccttgtgtggctcaatagaggaaacaaaagagtaatgctcacaaaaatgtgcaacacgagatctagtggttacccccttatggatgtcg

SEQ ID NO: 49886 - DNA, 503 bp, Zea mays
  unsure (1)..(503): unsure at all n locations
tctatagggagagcacattgtatgattaacaaatgttcattttgagaaagacagggattgtagcgcatgccaagcatggaagcaagttggagtccatcatccacacaagaacatcatgactaccgacaggccgcttgagctactccacatggatctattcggcccgattgcttacataagcatcggcgggagtaagtattgtcttggaatagtggatgattattctcgcttcacttgggtattctttttacaggaaaaatctcaaacccaagagaccttaaagggattcttgagacgggctcaaaatgagttcggcctaaggatcaagaaaataagaagcgacaatgggacggagttcaagaactcacaaatcgaaggcttccttgaggaggagggcatcaagcatgagttctcttctccctacactccacaacanaatggtgtagtggagaggaagaatcgaactctattggacatggcangaaccatgcttgatgagtaca

SEQ ID NO: 49887 - DNA, 445 bp, Zea mays
  unsure (1)..(445): unsure at all n locations
agcttgtcaattgtatctcccttgacagtctggctttcttatactcaaatttaaaatataaaatggaatataaactctttagccaattggggataccaccagagtgaatataagcttccctttttcatttgacccaccatgatgctcaacaaatcatattagttctctaattgcatggtcattatcatcaaaaccaacaattagggcttggttgcacttataatgtcttatgtttatgagtgttcaataaagtgttattcaatcccttgagttaccattattacattgattggtgagcacacaatttcttcgtaaaactctatattctatattgntattcgaaatatccttagttttatgtcattgtgtgagacaataatgattntaaagactagcacatgtattgattgatgatcatatttcatggatgattgatatagatata

SEQ ID NO: 49888 - DNA, 391 bp, Zea mays
agcttgtgcgtctcaaggtacctggcctttgtcttttgaggacttagctgacgtagtagactggcttctagatggttcacacccctgcggttggtcccgagtccgcaaactcttgttcttccgtcaacatcatggtggtcggaccaccaccttctcctagggggacttttttaccccctggggatgttgtttcgtcctttcggcgaccagcaccatgcttaccacctctgtagccactgcaatgtataagtacaacggcttccctggctctagagctaccaatattggtagggacacaaggtgatgtttcaactcttgaaaggctcattctgcctctttggtccaagagaatgggccggactttcgcaatagcttgaagaaaggtagcacc

SEQ ID NO: 49889 - DNA, 474 bp, Zea mays
tactcagctctacattagtacctgttctagcctccaaccgacattaatctttctactttataaaccatctacttcctcgatcaagctagcgccaagaacacagagctttctattcctcaagctgatgccacaagttgaaaagaggggaggtgttgtccgatttgttttgaagaaattgttgaaggttttactcatttaagcactcgaaaaggttagcaagtacattatgtcatatagtacaattgaaattattagttctaagcttagattacttgatatttgcggttgatttgtataatttatggggaaattagcaagttcattctctaatttgtgttgtaatatgtatgagtataatagaagttagtagcaactaagatttgagttggctacataagtttgatcattgatggtctatgtgtaataccttttggttcgttgaattaaacatctcatatgttctgtattatgtat

SEQ ID NO: 49890 - DNA, 446 bp, Zea mays
agcttgtgcataggtcccggtccaatggtctactatgtttcagaactcacgacgtgggaggatattcaagatctacgacaacaatttccatatgcgtctgtttgggggcaaacaaccagcttaccagggggaatgtcagtgacacaggcgaggcactggaggaacaaagcaaggagcgggagcattctggaccagatgatgcacccaatgggccgcggcggtcgaccaggcccaggcacaacaacaagatggtgactgggccgatgtggatcaacttcatggaagtattgcgtgagacttatatagatgagagagagattgagggaataacttgtaacagaatattattccacttctgaactgaagaactactctcttgctcccttcctgttctctctgttcttctctgctggtctctctggtcttctctgtaatcccacctgctc

SEQ ID NO: 49891 - DNA, 423 bp, Zea mays
  unsure (1)..(423): unsure at all n locations
tataataagagaatggaggcaagaacaagaccatatgtaattatataatgtgagntatacaaacatggagtctgctctccacttctcaagtgtctatatccagaactgaaggtatagagctgatgaaggaaatacacacaggcttgtgtggatctcatattggatctagacctttgctggggaaagtcttcagaaaggattntattggccgaaggcagcttcggatgcaacggatctggttcaaagtgtgaaaattgtcagaaatgtgcaagagaccagaaacaatcttcgtcgctaacccaattaatacaaccaacttggccattgcaaagatggggcctgaatttattangaccacttccaccagcacaaggcaatttaagatatgttgtggtggctgtggagtacttttctaagtggatt

SEQ ID NO: 49892 - DNA, 446 bp, Zea mays
agcttgggagcaccaagtgggatcaccatgatatgttctggttattcttagatctcttgttgttcctaatcccactcaagtgtaactaatccatggagatcctagatataaacagatgtctcctgatgaagttattggcaagtttgtgaggtttgaacttatgatcaaagactctaaacacattgtcaacttggagcaaggcgccacctccaaacccaaggtgcaactcgttgccttcaaagcaacataagagaagaaggaagagtttacaccaagtagactcccaatcaacgccttcaagctcatcaacgaggagatggctcttatcatcaagagctttcgacaaatcctcaaacaaaggaaagggaaggactactaaccccattccaaaagggtgtgctataggtgtggtaagtccggtcactttattgcaaaatgtccatata

SEQ ID NO: 49893 - DNA, 496 bp, Zea mays
  unsure (1)..(496): unsure at all n locations
tctatagaaaaccacctcgttagcttcaggcagagggacatttctctcccctccagcccgcacaatagaaatgtcacgaaaataccttcccctcatggcatcaatctatccttgtttgattgttgactctctgaagacaacatgacttggcctctatggccgatcttcggcaccctcattntcactntctgcatcanaatattcactgtcactggaacccttagatattccagctaatgtctcatgtgcaatcttttctgcattggtcctctccatagcttcgtaaaactcggacagcgtcgggtcaatagtcttcttttcaccagccatcaaatcaaaacttgttgaaatgccgaagctcanactcgcgacaaaacatgagaatntaaaatagagagcacagtgtaagcaactgaaatagcacaagaaacactntcaatacgagctcatatntatatacatagcgccncacggcttggtgggtccggcatgtagt

SEQ ID NO: 49894 - DNA, 327 bp, Zea mays
agcttgccccgtgctccttgcgtagatctctttctattttctccatgcactcgttgttgtgccactccctgtccatggggtcgcgacaacctcatcgtcgccgcgcgccttaccagaatggggtgtggttatgggagtcccccatttgacgaaaaagcttctgaccatgggaatcgctcgccagaccccttcccctgttactgcctccattaccggggagatatccccatggggtcctccctaccatcccctttgcgcgacagtagaatatatggagtttcggtggagcacctgaattattgtgctcccttgccggcgggcttcatg

SEQ ID NO: 49895 - DNA, 465 bp, Zea mays
  unsure (1)..(465): unsure at all n locations
tttgcctcggcagactaataccagaataagataacatgcaatgtgtagtgtgtagatggcgagagtagcgtgtacccttcgtggcaagaggctggacggtggtgtatctgtgctctcggntggcgtgaacctgatctggtcttaagaaccccggtggcgagttgacatatgcaagggttaagtgcaaaaatcatgttgtatggattatatgcaaacaagggctattaatacttaatctagcattaaaatgttgaaagtaaggatccactcatagtaagctcttctacaaatagaggtccttggggcatcagacatatcttgttatgttgtctggtgcacatgcatagccgtctaaggtctttgagacaaggacaggtgcatgtgggcccaataacttgggaggttctgccaccatttaagaatcanacattactctgtaaatttgccataccttgaatatatttt

SEQ ID NO: 49896 - DNA, 426 bp, Zea mays
agcttgcacacatagctcatttgaatatcttttatcatatctcttttatatgctatgactaatgtgtcttcaagcttatttcaaaccaagtcataggtatattgaaagggaattggagtcttccgcgaagacaaaggcttccactctcgaactcatacttcgccaccactccgagcaactctctcttctttgggggagaaatgagcatcaacgaaaaggacttcatccttgggggagagagtaaaagctcaaacgccaaaggacttcgtctttggtataatcttaactcacttattcatgaccaaacgggaagattgcacttaacggctctaatgattccgtttttggcgatccatgccaaacagggggagaaatgagcccaaagctaaaagaccgctccaccaccaccataatcaaaaacttagt

SEQ ID NO: 49897 - DNA, 357 bp, Zea mays
  unsure (1)..(357): unsure at all n locations
taatgcccctaaganattgtctaattctgtaagggtaatgttctcatggtccacgatagttagggctacattntatatcctgcanactatcctgagcataaaattaggaaaattcatgctagaaaacctcacaatgtttctcatcatgcttttatgtataaaaatgaggtttctagttctatgaataccactcatgtaaaaatgcctaagaagaaaattcctaatgcatcaaatgagcatgaaattccatttaagacttttgatgctacttatgtgctcactaacaagtcatgcaaagtagttaccaaatatgttgtgggcaaacacaagagttcaaagacttgtgtttgggtaccc

SEQ ID NO: 49898 - DNA, 429 bp, Zea mays
  unsure (1)..(429): unsure at all n locations
agctngttgtctctctccggagactttattttttttacaatgagactactgcatgagatagactcgaaaaaggtattattctcaaagatttagattatagagtaccctccccctgaaagagtgcatacacgttgtgaatacttgtaggagacatgcactttgatttgatgtcgagaggggcaaattatctataatccgagctttggcacatataagttaaatgataccaattggatataagcttctgaagcattagtgtcatttacttaaggatgttaaataagctatgtgtcgtgcttaattaaacattttaaaccatgtatgtttgcttaagagtatgaattgaaaacaagcaatgctaccatgtgatgcacctagtatgcatgcattggtaatctcaaataagtacccattgagatactaagcatg

SEQ ID NO: 49899 - DNA, 409 bp, Zea mays
tggtgctgaccaggaattttcgtggcggtgagacaatgcttgtgtatggcatcagcgggttcaaaagccatgacaggactgtagtgaacgggacaccatcgccgatggggtggtggccaacgatgatggggaggggggcgcaatcactggatggacgatgtgcccatgggagggcgaccgacggagacatggggcccatatgtcatacaactggtggcggcgggtagagatatgcagaaccatggtgcatggtctaatattatgtgcttatagagtattacggatatgtgtgctgctggttagatgattatggatatgggtattattgtataaacgtggaagatgaacgatgacacatgacgaatgtataatcacggaaagtgctttaaagtagtagagaataacaact

SEQ ID NO: 49900 - DNA, 67 bp, Zea mays
aaaacgagacacgaacaacaaccatctagcgcacgcaagacacccgaccaaaaacaagcccaacaac

SEQ ID NO: 49901 - DNA, 406 bp, Zea mays
  unsure (1)..(406): unsure at all n locations
tgagccttatcactgttcacgatcgagggccttcggatgtctaatctttattgttcggacgtngaattatacctttcacatcctccctttcaaccaaatcattcttaacataaaaccattgcctcattcacgatcctggccatttcttctgaaacattgggacaatgcatctcgcatcagagcggcacacgaaggaatatcaaccaaaattgttatgatattgctccttccccattgccttcgtaagataagataatttatgtatattacagaagcagtcgacatctggttccaacccctggctcctcattgccccgatgaaaaccccgattttgatcaaggctttgggggtgagttgatgaagatatatctcgaatcttttaagtacttcaaccaacattttatg

SEQ ID NO: 49902 - DNA, 326 bp, Zea mays
agcttggcatacaactggcaatctcatagtttctttaataccttcctcaaatgttccttatgctcttgcttattctgggaatataccagaatatcatcaatgaacaccagtacaaacttgtcgaggtagtccatgaacacactgttcatcaaatacatgaaggaagtaggcgcgttcctcaatccgaatgacataaccatgaactcatatagtccatacttagtgatgaatgcggccttcggtatatctgcaggtcggattctatgccgatggtaacctgacctcagatctatctttgagaacacactagatcctctcaactaatc

SEQ ID NO: 49903 - DNA, 450 bp, Zea mays
  unsure (1)..(450): unsure at all n locations
tctaatgaattatcctagcatcaacacttagaccttttatctcattattgggagagagggacaaggttctgaagctgtatgtgttcaactttcttggcaccatgtcaccatgattntttgtaatcctatttatgtttatcttacattctggaactagttgatgaagtttagataagattgagaatacaacctattgcatccactatataagcttatttctcccggttgctacaagtttctttcatcatccaactgcaacacattcaatttgtgtcagtccaaatacatcgtatggtgtatgtatatctgatcaatattattttccaagtcctaaatctactatcaaacttctcatacgagtgttcttccactagttgatactcttacaccttattcctttgtatgtgtgtattctgaagtcactgatatgnccggcctaggtcgcatatt

SEQ ID NO: 49904 - DNA, 320 bp, Zea mays
caaaccaccgctgctgaacactacatactactaattctaggcattaacatgactaatcctgaataatagctcggggttgctgttctctctaggaatttgtccttgctccgggcgtcctctttaaaggtggagagcctacctctgctggatccataatttgggcccagcagagtccatcatacgtataatggcacacaccgcttgatacaatacgcacatatgtatctagatatatatatatctatatatagttttgtggatacagataactaaacagtcaccttattactaatccacccacttcatcgccacagaaaaat

SEQ ID NO: 49905 - DNA, 364 bp, Zea mays
  unsure (1)..(364): unsure at all n locations
ntctcgactaagtcggcgacagggcctcatgaactgttgttagtacgcgtaagcggcaaggccgaccgagccgagggattcccacgcctctgggatacggatacctcactcgtcccttccgcgagaagcaactctcgctcacacaaacatccctgttaccgacagagtccatatgctcgaaacaagaggaaaaaagacgcagcttcgcaagcacgacgagggtgtgttttctggcctcggcggccgcagaaggcacacgctacaagacgatctgatcctgcaggctcgggtcttcacgctgaagggagccgtagcaccctcggcatcgacgacgtcttcagcatagtccgacccagcctcggac

SEQ ID NO: 49906 - DNA, 402 bp, Zea mays
agcttggaacacactcggcgaaggctgtttataatgctcggcgaactgtaaatcggcaacggcttttttctcgagtactttttatcgggcactcggcaaagactttgccaagtgttacccggtactcggcaaagaaagtcaccgttatggtgtcaggtaacagcgaaggagcctgtgccgagtgcccacgcagtgacactcggcgaaggctcaatctttaccgagtgtccacagtactgacactcggcaaagaagctccccgtggcccctttaccaggtcctttgccgagcgtattaggcggctctcggcaaagactccctctttgtcgagtgtccaccggactaccactcgacaaagagatcaccagcggcccctcttgtcagttctttgccgagtgcact

SEQ ID NO: 49907 - DNA, 504 bp, Zea mays
  unsure (1)..(504): unsure at all n locations
tcgtcttacctgttcacatatttcacttggaaaacattgttcttttatgtntntgaggaccttcggaagccgaaggcccccaacatcatcgttactattcatcgatgatatctataataacttttcaccgacactattcatcgttactattcatcgatcatccgatcatcccaaatttcaactactcatccatcacgctgtccagtccacctaagactagctagacccatattccagtcatacgaactctggtgactgtgattttccttctagtagggaacttcccatctggtcacccatcccaggtttctccaagttgagcacgcttaactntgagattccttcgaacaaggcttccaaactccaattccaataattcttgttctaaattcttatcgaattattctctatccaaccaggtcatcccttaagcatgggtcatgttctagaanactcctaaaatactcttggcccatattctggctataaactctctgtcatact

SEQ ID NO: 49908 - DNA, 434 bp, Zea mays
  unsure (1)..(434): unsure at all n locations
agctngccagttcttgtcaaagcaacaacatttgccagcacagcagctgcagaccatacctgtaacatggccatttgcatgctgggggctggacatgattggaaccttcaagaaagctcagggaggctatactcacgtgttggttgccattgacaagttcaccaaatggatagagtacaagtctattgcttctttaacctcagccaaggcagtggagttcatacaagacataatattcaggttcgagataccaaatagcatcataaccgacctgngatccaacttcaccagctctgaattctttggtttctgcgaacaacagagtatccagatcaagtatgcatcagtagcacacccaagagccaatggttaggtggaaagggccaatggaatgatactagaagcactcacgaagaaagtgttcgacaaaaatg

SEQ ID NO: 49909 - DNA, 339 bp, Zea mays
  unsure (1)..(339): unsure at all n locations
tgggcgcgacgcagtggagctctggccgcgagcagagcgaaccaacagcgggcgcggcagagagagaaaacagagagcanggcgagctggcagcgagcaagcatctgggcgtgcggaggggctcggctgggtgccaaggagagacgagccatggaggagcagctgggtgcagccatggcgacgagctcatggaatatgcgacgcacggacgccatgaaatcacagggaaaaagagatgcggccatggaagctccaagccggcgtggcactggagatccggccggacgccatggagatggggccgagaagggggcgcggtctgagccaacagaggagcga

SEQ ID NO: 49910 - DNA, 415 bp, Zea mays
  unsure (1)..(415): unsure at all n locations
agcttggaatcacttcttggtgattataaaatttatgtttactttttctaagatttccaaaaactcttggatcaccctttttggtggtctaaaggtcaagttatagatgtttgaagtgtggagcctaaatctgtccaaatctggatagcaaggccttactagtgttttttacccttgatgcatattgactcaacctgagatgttcataaatgatttgtagaaaatttcattagctttctagaaagtataagatcacttgttttggatacacgagtctctagatatngaattttgaactaagaagcctgaatctgtccaaatttggacaacaaggccttcctagtgacctttacccttatgcatattgaatcaccctaagatgtttataaacgttgtgttgaaaatttattatctt

SEQ ID NO: 49911 - DNA, 483 bp, Zea mays
  unsure (1)..(483): unsure at all n locations
ctcagcttctaagggagagcacatcttgggactaaccaatgttcatttttagaaagacagggtctgtagcgcatgtcaagcacgaaagcaagttggaacccgccatccacacaagaacatcatgacaacggacaggccactggaactactccacatggatctattcggcccgattgcttacataagcatcggcgggagtaagtactgtctagtaattgtggatgattattctcgcttcacttgggtgttctttntgcaggagaaatcacaaacccaagagactttaaagggattcttgagacaggctcaaaataagttcggatntagaatcaagaagataagaagcgacaacgggataaagttcaagaactcacaaatcgaaggctttcttgaggatgagggcatcaagcatgagttctcttctctctacacgcctcaacacaatggtgtagtggagaggaagaatagaactctactggacat

SEQ ID NO: 49912 - DNA, 432 bp, Zea mays
  unsure (1)..(432): unsure at all n locations
agctnttgtaatgttcatgaattattatatgtttcaaagccttggggcaaagaacagtaccataacaactttggctgctacagcttcgtttctcggtccggggcaagctgtcccgtaccaacctttcggaagagatggcccggcgattggatgacagaatggttttatgtgaagaatgacttatcagcacgagaagacatcaaaggtataattatgcgtcctatttggcaaagcttcggccttcggaggccgaaggttgaaatgaacgaagccgccgaagagtgccaaagagccttcggcgttgtctgctcttttataggaacaagggacttagtacaagaacatatcgcctttagggtgtggccgctggctgagaaatgggaaatgcccaagataccataaaagaggccgacgaacgtgagcttgtgagac

SEQ ID NO: 49913 - DNA, 429 bp, Zea mays
  unsure (1)..(429): unsure at all n locations
tcggccttcggaggccgaaggtngaaatgaatgaagctgcctaagaatgtcataggccttcggcgtcatctgttcttttattggaacgagagacttagtacaagagcatattgccttcagggtatggccgctcgcggagaaatgggaaatgccacaagaaaccataaaagaggccgacgaaggtggacttatcaggttgtagacttttaaatttggagataaattcgttgatccagatgacgactggttaaaaagcattgaaaatttaagtgatgaactgcttgcggcttattcgaaggccgaagacagtgcaatgtcagcagccttcggaggccgaaaaaagaagaggctgaatcgggtatttgatgcaatcgggtttgtctaccctgactattgctatcccattcgaaggcagaagagaaaaacaca

SEQ ID NO: 49914 - DNA, 450 bp, Zea mays
agcttgccagtacttgtcaaagcaacaacatctattatcacagcaactgcagaccataccagtaacttggtcgttcgcatgctggggactggatatgattgaacctttcaagaaagctcaaggaggatacactcatgtactggtagcaatcgacaaattcactaaatggatagagttcaaacccattgcttctttaacctcagctaaggtcgtggaattcatacaagacataatattcagatttagaataccgaacagtatcctgacctatgatccaacttcacaagttcagagttcttcgatttctgcgagcaaaatagcattcagatcaagtatgcttcggtagcacacccaagagccaacgggcaggttgaacgaactaacgggatgatattggaggcactcatgagaaatgtcttccataaaaatgaaaagttctcacgaaaatgg

SEQ ID NO: 49915 - DNA, 411 bp, Zea mays
  unsure (1)..(411): unsure at all n locations
ctcagctntttgcataggctgcagaccttggcttctcacggcccacacgaagatattcagctntatgattgcttcgggggtaagttggtgaagatagacttcgaagattntcagcacctccacgacgaagctgctcaagggaaatcgcagtccagctttcaaaaagcttcggtacactacgacttcattttcttcagggtgtgggcacgttttttccccttcgtcggccctcagtcccctcacaatggataaatcccggaaataccttcctctcatgttgacaagatgattctctctgatagttgatttaccataaactgaatggcttggtcgccagggacgatcttcggagtcctcaccaccactgtccacatcatagctgtcactgtcaccagtatcttcagacaaacc

SEQ ID NO: 49916 - DNA, 433 bp, Zea mays
  unsure (1)..(433): unsure at all n locations
agcttctgtaaactaccacttcgtcagcttcttgttatggacattactttcccctccagccctcacaattgagatatcacgaaagaacctccccctcattgcatcaatatgcccttgtttaatagttgatttcccgaagacaacatggcttggtctccagggctgatcttcggcatcttcattcccactttctacatcgaaactttcactatcgctggagttctcagatatcctagccaacatcttgtttgcaatcttttctgcattggtttttccatggcttcataaaacctggacagtgccaaatcaacaatcttcttctcatcagccattaagttgatggttgttgaaatgctgaagcttgcaattcaaataaactcgacanaacaagagagttaaaaagacgagtgcgatgcaagcaactattatggca

SEQ ID NO: 49917 - DNA, 453 bp, Zea mays
  unsure (1)..(453): unsure at all n locations
ggctggtttcagcccatacggcccagtccatatgggaaagagcccgcgcgcgcccgcgccctggcagctttgcagaaagggcccctgttttcttgaatatcccgacaaagcccaaggcactatttaacacagtcgctgacaattgcaaagacaccctcgcacttctatctanttctcggttgaagtccccgacgacggtgaacgcggccgcgctccggtgagcaactgtaccggccgaagggggccatgaccggcgctcccgagcgacagacaccaaattagacctgccccgagcatttcccctaagtcaattgcatgattggtgacctatatcgttctgcccacgaagacagcgaaagccatggacattagctcgtgttcccagtgattggtgggctcctagttcaattggacggtgtggagagcatcaccagcatacatggacatgagaac

SEQ ID NO: 49918 - DNA, 161 bp, Zea mays
  unsure (1)..(161): unsure at all n locations
agctagcccgctggaaaccgaacgccttctctttctaattatccaagntttccaccttccaactacttacaagagctaagcattctatacaagacacacccaagtgatcaaatcctctcccaaatttcacacaagggtatagtaattagtgagagagattt

SEQ ID NO: 49919 - DNA, 508 bp, Zea mays
  unsure (1)..(508): unsure at all n locations
ttaagttctntgacaattaaatcacttcatctagtttcatcatatatgcattcaagcatgaatgaatatttgagaagttgaactatatatgaagcacggatatgcatggacatgctttctgttccttttaaacaagatatgtaaagagagtatagaaaaaggaagatttatgtacaagtttgaatgaaagggaagtggtttacccttttgtaccttcacatagagacgctctcttcattgtgctttgtctttagtcttggttgcttaagatctatacttaatgacaatatgtggaaatactttgcacaagagagagttctataactagtgatctttctcaagttattgttagcatatatcaaatggatcacaagttgcataactgaatcatgaattctcctttctccttagtgcataccaagggaaatcaaattcaaattacatgacgcactaagaagcatacgtgttaattgaagttgtcaatgatcaaccatatgcgatcaagaaa

SEQ ID NO: 49920 - DNA, 431 bp, Zea mays
agcttcacgcttttcgcctggagacatctgtatgtcacttcaaggtcggaaaggaggtcggaggctttcctcgtcttgactatgatgtcatcgacgtagccctcgaccgtctggcaatgtgttcgccaaacacatggttcatgcaccgctggtacgtcgcacccgcattcctcaagccgaacggcatggtgacatagcagtacatgccgaagggtgtgatgaaagaagtcgcgagctggtcggactctttcatcctgatttggtgataccctgagtagaaatcgaggaaagacagggtttcgcacccagcagtggaatccacgatttggtcgatgcgaggcagagggtagggaaccttcgaacatgctttgtttagaccagtgtagtctacacacatccgccatttccctcctttctttcccacaagcaca

SEQ ID NO: 49921 - DNA, 435 bp, Zea mays
  unsure (1)..(435): unsure at all n locations
ngagatgggatcaaccatggcatgcaccanatcccttgaatataatgtcaaggacttgaggactgccaagaggaatgaacaaaagaagaaaatcaatacctctgccaaaagcctcaaccatgcctccatgcaaggtaacatccaaggtaataatcaagccacacttcacactaagagaagtaagaagtgtagtgaatgctttgaaaagggacactcgattaggtcatgtccctatataaaaaatgacttgattattaacaaggatgataaacattgttttaaatgctcaaagcagggacacttaattaggtattgtccccatttaaaacaaaaaggcattatgttagaaaagaaaatattcactaaccatgtagcaagcaagaaacaaggaaagaagaaatcttcaagacttgaagatcgcctttgctacatatg

SEQ ID NO: 49922 - DNA, 445 bp, Zea mays
  unsure (1)..(445): unsure at all n locations
agcttctaaagggggagcacattntatgactatacaaatgttcatttgagaaagacaggatctgtagcgcatgtcaagcagggaagcaaattggaattcatcacccacacaagaacatcatgacgaccgagaggccgcttgagctacccacatggatctatttggcccgattgcttgcataagcatcagcgggagtaagtattgtcttatgattgtggatgattattctcgcttcacgcttcacttgggtgttctttttgcaggaaaaatctcaaacccaagagaccttaaagagattcttgacacaggctcaaaatgagttcggattgagaatcaagaagattagaagcgataatggaacagagttcaagaactctcaaattgaacgatttcttggggaggagggcatcaagcatgagttctcttctccctacacacctacaca

SEQ ID NO: 49923 - DNA, 501 bp, Zea mays
  unsure (1)..(501): unsure at all n locations
ntaccanatggacgtganaagtgccttcctcaatggaccaatcaaggaagaggtctatgttgagcaacctcccggctttgaagacagtgagtaccctaaccatgtctataagctctctaaggcgctttatgggctcaagcaagccccaagagcatggtatgaatgccttagagatttccttattgctaatggcttcaaagtcggaaaggtcgatcctactttattcactaaaactcttgaacatgacttatttgtatgccaaatttatgttgatgatattatatttgggtctactaatgagtctacatgtgaagaatntagtaggatcatgacacaaaagttcgagatgtctatgatggnggagttgaaatattttctatgatttcaagtgaagcaactccaagagggcaccttcattagccaaacaaagtatactcaagacattctatacaagtttggaatgaaagatgccaacccatcaagacacccatgagaactaat

SEQ ID NO: 49924 - DNA, 442 bp, Zea mays
agcttctccaccatgtcgctgctaaccatattgttgtagctacctccatcaatgatcaaacgacatgaacgctccttaatgacacactttgtttgaaacaacgtatgtcgctgattctgctctgccttctccatttgtgcactaagcacatgctgtacaatgaggctctcataatgctctgcatcatctgcaccaatctgttcttcgggtggttccttagtgcctgcttcatcacccgcaagcaaagcaagtgtagcttcatacaaatcactagcagaggaatacccaccatcgtcttttaccaccaaaacacgctgattatgacaatcacgctgcacgttgtcataacccttgcatcgataacacaaaacatatcttgttctacctgtggaagctactgaagaggcactacctgcgggtttctgggcagatatggttgctg

SEQ ID NO: 49925 - DNA, 424 bp, Zea mays
  unsure (1)..(424): unsure at all n locations
tctccaccatgtcgctgctagccaagntgttgcagctaccttcatctatgatcaaacgacatgaacgctccttaatgacacactttgtttgaaacaacgtatgtcgctgattctgctctgccttctccatttgtgcactaagcacacgctgtacaatgaggctctcataatgctctgcatcatctgcaccaatctgttcttcgggtggttccttagtgcctacatcatcagccgcaagcaaagcaagtgtagcttcatccaaatcactagcagaggaatacccaccatcgtcttttaccaccaaaacacgctgattatgacaatcacgctgcacgtgtccatagcccttgcatcgataacacagaacatctcttgttctacccgcggaggctactgaagaggcactacctgctggtttctgggc

SEQ ID NO: 49926 - DNA, 443 bp, Zea mays
agcttgtgaaggttcttcatccccacatgtgtttagcggcgatgccacagccaacccatgctagtcttagcaattaagcatgcatctagtccggcctcttcttttgcaaaatcaactaagtagagcttgccgtctaatacacccttaaaagctagtgaaccatcacttcttctaaagacagacacatctacatttgtaaatagacagttatatcccatatgacataattgactaacagatagcaaattatatccaagactctctactaaaaatacattagagatagaatgctcattagaaattgcaattttacctaacccttttaccttgccttgattctggaatacccaatttgtaattggttagagataatataaacggagaaacaaattctctgtatctatatgtgagtgtgacctttatgtatcatcacatgtgaacac

SEQ ID NO: 49927 - DNA, 274 bp, Zea mays
  unsure (1)..(274): unsure at all n locations
cgtactntntgccttctaccaagccgaaggtaccattgttattcattattgtttctgtctttccaggatattacaatgtattaataatgttatgtgattggttatcttgcctattatatttcatatacttcttcttttattaacatatatcgcgttgataaaggtatgtccttcatgaccttcgtctgaagatcattatgtcctaagggaaataatgcttcaaggacgaaggacatttaacattacatcttgtgttgccttggtnttaactcat

SEQ ID NO: 49928 - DNA, 430 bp, Zea mays
  unsure (1)..(430): unsure at all n locations
agctntatatggcaggaagtgcatgtcttctctatattgggatcatactggagaaagacagttctttgggcctgaactgattcaagaggcagaagaacaagttcgtataattcgagagaatttgagggtagctcaaaccaggcaaaagagctatgctgataatagaagaagaccactggaatttgaggaaagagattatgtgtacctcaaggtgtcaccacttcgtggaatgaggaaatttaaagtaatgggcaaattgtcccctcgctttattggatcatttacagtttttaggcaagttggagagatggcctatcaactcgagctacctgataatctatcttatgtgcataatgtattccatgtgtctcaacttaaaaaaaagtgtctcagtgtccctgaggaatagttaccaatggaagagctcatg

SEQ ID NO: 49929 - DNA, 509 bp, Zea mays
  unsure (1)..(509): unsure at all n locations
ggtggaaggaagtaggaagcaagaccttgaactgcttcgtcttggcgcgcgcaccagaaccagagtcgctgggcaatggcatggcgctgctgaagctgaacgctgcactgcagcgtgccagcgtgcggcccgggttgccttgaatgacatgagtaaatagaggggtcaggggacgacgttttggtttcctttttaattaatagtatactaggtatatgcatgtgccttgctacgaaatgggagagcaagtggagtgatgtctagactacaaatataattattgtttatttttaaacactaatgtatgtgggtctgttggttagtcccaaatttctggagcaaatgggtgtgggttcaagtacttgctctatattattttttgcgcgagtgctgggcgtggggaaggtgaagccgtgtancaccaggtgcctacgttagggtcttaatagaatagtatagattcctattacgtgagtacatagatcttctaaataanaaatattacgtga

SEQ ID NO: 49930 - DNA, 432 bp, Zea mays
agcttcgactatggatacaacgccatcatctgcaggccgggattggcgaaattaatggccattccgcactattcatacatgatattgaagatgttgggaccacaaggaatcatcaccgtgcgcgctgacttccaaggcgccgcagaatgcttccgagtggccattcaggcagccctcaccaccaaaccaccgacgacttcccccacgcaggcgaactcaaagcctgaggaagacctcgcgatgcccgcgaatgaagctcaagccatgacctctatgcggccaactgaggaaacaaagagaatcaacctcgggttcaccgatgaacgcaagactaccatcatcagctccagcctggatgacaaataggaaggcacgctcgtccagtttctgcaagataaccgagacgtattcgcatggcagcctgcggatatg

SEQ ID NO: 49931 - DNA, 506 bp, Zea mays
  unsure (1)..(506): unsure at all n locations
ngccaattcttatcanaacagcagcatttaccagcacaacttctgcagaccattacagtaacatggccatttgcgtgctgtggactggacatggacctttcaagaaagctcagggaggctacactcatgtgttggtcgccatagacaaattcaccaaatggatagaatacaaacccattgcttctctaacttcagccaaggcagtggaattcatacaaaatataatattcaggtttggaataccaaatagcatcataaccgacctgngatccaatttcactagctctgaattctttgatttctatgaacaacagagcattcagatcaaatatgcgtcagtagcacacccaagagccaacggtcaggtggaaagggctaatggaatgatactggaagcactcangaagaaagtcttcgacaagaatgaanagttcgcaagaaagtggatcagagaaataccttacgtggtttggagcctaagaacccaacccagtcgagctctacat

SEQ ID NO: 49932 - DNA, 437 bp, Zea mays
  unsure (1)..(437): unsure at all n locations
agcttgtgagcagtacaagtacagaagggttatatgctgcttcggtcgatcagccgaagcccatgctcttatgtgaagatatagcagagcagaaggtgttgctgggacctcaattgtctgaagaacaggagaaaaacttaacaaggtttctgttcaacaacgaagatgttttcgcatggtccgccaacgatctctgtggtgtcaacagggatgtcattgaacactcgctcaatgtcgatccatccttcagacccagaaagaataggcttcgaaaaatgtctgatgacaaagccgaaggtgctcggaatgaagtgaaaagacttcttagcgctggagtcatcagagaagtaaaatacccagaatggctagctaacactattatggtgaagaacgccaatggtaaatggagaatgtgcattgattntactgatctcaac

SEQ ID NO: 49933 - DNA, 427 bp, Zea mays
  unsure (1)..(427): unsure at all n locations
tcttaggctngctgcacgtgataggaaagattctaaattcaagtatgagagcacgcctcaggagtttgagtatgctagagctccaattgtggtgtctgacgagattgaatgcgatgagtgtgctctacacatgtcgaacatcacaactttgcagaccaagcatgctaccttgctagatgagcatgacaagttgagatctaggtctagcttgttaggtgtatgtatagtttgacctagcttgcagaatgagatagcagagatacgctaggatagctctaattgagaagggtagctcagtgagtgcccctgcacctacgcagtgtgcactctgtgagaggttgcagttgctcttgagtcctacaggcatgataagacctggattaaggaagagaacacataccttcgatcaatctcgagctaagtgtca

SEQ ID NO: 49934 - DNA, 443 bp, Zea mays
  unsure (1)..(443): unsure at all n locations
agcttctaaagggagaacacgtgataggtctatctaatgttcaattcgaaaaagatagaccttgtgcagcttgtcaagcagggaaaccggtgggaggagcgcatcacagcaagaatgtgatgaccacttcaagacccctggagttgctgcatatggacctcttcggacccgtcgcctatctaagcatagggggaagtaagtatggtctagttattgttgatgacttttcccgcttcacttgggtgttctttttgcaggataagtctgaaacccaagggaccctcaagcgcttccttaggagggctcanaatgagtttgagctcaaagtgaagaagataaggagcgacaacgggtccgagttcaagaaccttcaagtggaggagttccttgaggaggaagggatcaagcatgagttctccgctccctacacaccacagcaaaat

SEQ ID NO: 49935 - DNA, 506 bp, Zea mays
  unsure (1)..(506): unsure at all n locations
gcttctaaagggagaacacattttgggactaacaaatgttcattttgttaaaggcagggnttgtagcgcatgtcaagcacgaaagcaagttggtacccatcatccacacaagaacatcatgacgaccgacaggccgcttgagttactccacatggatctattcggcccgatcgcttacataagcatcggcgggagtaagtattgtcttgtaatagtggatgattattctcgcttcactcgggtattctttttgcaggagaaatctcaaacccaagagaccttataaggattcttgagacaggctcaaaatgagttcggattaaggatcaagaatattagaagcgacaacgggacgaagttcaagaactctcaaatagaaggctttcttgatgatgagggcatcaagcatgagttctcttctctctacacacctcaacataatggtgtagtggagaggaataatataactctacttgacatggcaaggagcatgcttgatgaataca

SEQ ID NO: 49936 - DNA, 440 bp, Zea mays
agcttgtcaaaatcactccacccaaatctgttatttctgttgtgagatatggaatgcttgtagagcctgtgagagtcccacctcagaaacaagtgtggtgtcccaaactaacccatctcaggaacacactttgataggggcaagacccaactcttcagagaggtacgataacttgattgggtggagatctcaatgttgatgatccaaggctacaagtgaatggatcctcacaatcactgcaccactgctccgttgtttatctcacatggaacacgagtgacctccccacgaaggcttatccctacaagcgcaatcaaaaacacaagtaagaacaggaagaacgcaatcaaaacttattgatcacgaggtggtgtctcacaaactgatgaacgacgacactgttcgatgacataatgaatctaagcaaatcctagccctaa

SEQ ID NO: 49937 - DNA, 475 bp, Zea mays
  unsure (1)..(475): unsure at all n locations
tactcagcttcgaagataacaacttcatttcctcatgggcaggggcggtgttgtctcctccagctctcacgatagacatgtcacgaaagtaccttcctctcatgttgtcaagatgactctgtttaatagttgattttctgaagacagtatggcttggtcgccagggccgatcttcagaatattcatctccactctccacatcatanatatcactatcatcagtatcttcggacaaaccttctagaatatttttagtaatcttctctgtgtttgtttttgacatagactcaacaaacccggcgataaaaggatccacagttctcttttcttcaaacaacttcgtctcctcagttaccttcgtttccgcagtcattttcttttcctcactcatcttctccgcagacatggtgaanacacgtncttataccgaagctcgaannagcttgaaatcangcaagagctagtgagcaagagc

SEQ ID NO: 49938 - DNA, 441 bp, Zea mays
  unsure (1)..(441): unsure at all n locations
agctnttcactaagtacttgctcaacacctaacattctgattagacctttaattgtgttgttatccaaaacaccaaaacccacaagggatctttcagaaaggtaaacctcaaatttatcatttattttctcaaatgatagatatgaaattcgaatacaatccagatatgggtacgtatatttttcactttttgttgtagggaacaaataatgtataaaactatttatacaattttttatttgtaataatgtgcttgataacataataaaagattaacatcaaattttatacatatctattttaaaatattaaatttgtcctaataattcagatacccaccttcatccctacttcgaatatggngatggaccttcaatgtaagagatatggtgctatgcattgcctagagcaacaaggatcgccacaagctaacaccaacat

SEQ ID NO: 49939 - DNA, 508 bp, Zea mays
  unsure (1)..(508): unsure at all n locations
tcttcaccatgtggtcatggttatcttgagaaggttgagcaatacacttccctttaagttgtgtcaagctcatccttagcctctcattttcttctttgagcttttgatatgtatcatcatttgtttctgcaagttctagctcaaaagaagatttgcttgtcgacggacaacaagcattagcacatggtaatatagtatcaatatgaacacatgtgcaagagtgaggttgttgggattttaagttttctatcacaacctcatgagcaatttttaatatgatatgatcatccataagattttcatgagaacatagaagcatatcatatttattntgaaaagctagattttcaacttttagctcttctacttggtccttaagcaaggtattcctatntactaattgagcgatacaatgtanagcgttatcttgctcaattgaaatagtttcatacctttggaccacatcaacatgagagcactntagctnctcatgttctttagtcaattc

SEQ ID NO: 49940 - DNA, 300 bp, Zea mays
  unsure (1)..(300): unsure at all n locations
agcttatcatatttcaattgctagttcaacttctttttcttggcttttcatagncagacaatgacgggcctaccaactatttgtgaacaaatctatggggatcttttcctgattcaagccacatgagaaatgcttatgggtcactgaaccaagattgccatttcttgaacgaaatacggaaaaggaaatctcagtcgctagtagattttacatgatccaacttactctactgcagatgaaagctcgtcgttcacgaaatggcaatcttggtccctgcaacctgctttcaagaaagacaac

SEQ ID NO: 49941 - DNA, 404 bp, Zea mays
  unsure (1)..(404): unsure at all n locations
gaagagtattgnggccttggctgctgactcactcgatcattattttgagcagagntgtgaatcgacctaacgcgcctcgggtgaaatcttcctccgaagcccctggtcatttcagagaacctgaatgcttcctctctattatcgcagatggcattgacaactggaatgtattcatgcatcttctggagcagatactccaatgtttgtggtggctatctggcaaagtactgcgctgaaagtcccggccgaagccctttaatcatggcctcaatgacaatctcattgggcactgctggcgcttgtgcctcagacgcagaaaccttcggacgtacgcctggaggtattcttcgcggcctgggacactgaaaaaagactgagcaggactggcttcgctgaacccttgg

SEQ ID NO: 49942 - DNA, 442 bp, Zea mays
  unsure (1)..(442): unsure at all n locations
tgcttaatcccgaaaatgtgttgtcttattttatcaggaaagatgctcgggtttattgtccgtcaccgaggaattgaagccaatccagataagattgaggccatcatgaagatggaagcaccacgatcacaaaagatagtgcaaagactcaccggatgtatggcagctctgagcagatttatatccaggctgggagaaaaaggcttaccattttataagttactcaagaaggtggacaaatttcagtggactttagaagcacaagaagctctggatgcgctgaaaaaattcttgacaacaccaccagtgctgaaaccgccgtgccgagccacgccgactcaaccgactgaagatttgctattatacatctcttgcacgacttacatggtaagcaccgcgttggtagtcgaacgagcataaaaagacatgcatacncagtaca

SEQ ID NO: 49943 - DNA, 510 bp, Zea mays
  unsure (1)..(510): unsure at all n locations
ngtacaaacttataagtatatatgataagagactcatcttctttcgcattatttatgtatttccgactaatgtagttgaatctaggagtagaggacgtagtctttattgagtatttggtctctcttaaatcatcaccataaccttagcacggtccaaagacatcactctggtgatcaacgaacagtaactcacggattatattacgtgtttgttgagttgtaacttaaactcattacagagatttgtagtaccaatgatacgctatatgtcataggttgcgactnttacatgccatagagacaaaaagtaacaatattctgctatatgtatcatatatggatagaaaataacataacaatactgctatatgtctttagatacaggtnttactcgccatggagaaccaaagtagcaatattatgtcatgtcacatacatggacaaaatgtaagagtgttattgtatgtccctggtggacgaaaatgncaacttatagccattgatgctata

SEQ ID NO: 49944 - DNA, 440 bp, Zea mays
  unsure (1)..(440): unsure at all n locations
agcttatatcctacaatnggtatcatttatcttatatgtgccagagctcgaattatagataatttgcccctcttgatatcaaaatcaaagtgcatgtctcctacaagtattcaaaacttgtatgcacagttttagggggagattactctataatctaagactttgagactaatacctttttcgagtctatttcatgtagtagtctcattgtaaggaaaatgaagtccccggagaaagacaataagcttccactgcaaatctacaagaactcttatgtctcacaagcctaccatttgtcttcaaatggtccgccattgattttcaattggtaactttgagactacatttggcatcatttacatgtcttctccaatacttgtgtcgtagaacctcccaagttatcgagcccacatgcacctgtctttgtcccaaggacctca

SEQ ID NO: 49945 - DNA, 433 bp, Zea mays
  unsure (1)..(433): unsure at all n locations
gaactgctccagaggcttccatgtagcttcttctgacgaccgccctatccagtgaatgagtatatgccacacatcgcggcggagataggcgtgcagcacctgctggggtactggaagaagtcgtccttgttccattagtggcaagggcggnggtccttccggtggtgcaccatggaatggattgaggagaccaacatggaaaacatcgtgtagacgagcgccctcaggtagctctaggcagtaggccactgacccaacccgttcgagtacctagaacaggccagcgtaccgaggacccaacttgatgttggggcgatgtaccanggttgccgcctaatagtgaagaaggtgcaaccagacccagtcacccacgccaaactccttgtgcgatggtgattgtcacactggcgtttggcgtatgcctacacttgga

SEQ ID NO: 49946 - DNA, 437 bp, Zea mays
  unsure (1)..(437): unsure at all n locations
agcttggaggcgtctattggttgtcgacttgttgtagactcctacttcttttcttccgtcgccttgaatgcgacgggttgagcttcggatgtagatggatcatcaagctcgttgatcttcctcgagccttcgatcatgcattcaaaacttacaaaatgcccgattacttcctcgggggtcattntagtatatctaggattaccaccaattaattgaacttgagtagggttaaggaaaataagagatcttagaataaccttaaccatttcgtggtcgtcccacttgacgctcccgaggttgcgcacttggttcaccaaagtcttgagccggttgtacatgtgttgtggctcctcccctntgcgaagccggaaccgaccgagctccccctcgatcgtttcccgcttggtgatcttggtgagctcatctccttcgtgtgc

SEQ ID NO: 49947 - DNA, 515 bp, Zea mays
  unsure (1)..(515): unsure at all n locations
tataatngagggaatttatgctcaaaacttttggttattactctccaacccggaggtgcgtctaccagtgaacaacatgccagattntttacgcagtgtaacgaattgcataaatacctacaccatatagtataatttgtatcagtatatatcataaactagatttaatgtgtttagctgcatggctgttggagggatcttatatctatgaaggaaataaaatattaaatacgattttttgtttctatgcgtgtaatttatttcctttcattgcaaattatttttcatcataaattcgtgtgcatgcatctggtaacagatttttacgcagtatatcgaattgcataattatttacacagtgtagcatatttagtctcagtatatatcataaaatggtccttacgtgtctagctgcatgggctgtgcagcgatcctaaatttatagaggaaataaaggatttaaaaatagaaactggcgcacatatctttcctatatttatgcacatgcatttga

SEQ ID NO: 49948 - DNA, 443 bp, Zea mays
agcttgtgtttacaagaaggagagtgggagctctgttgtatttctgatcttgtatgtggatgacatattattgattgggaatgacattcctatgccggagtccgtcaaggcttcactgaaaaagagtttttctatgaaggacttaggggaagcagcatatattttgggcataaggatctatatagataggtcgaagaggcttataggattaagtcaagatacgtacattgacaaggttttgaaacggttcaacatggaacagtccaagaaaggtttcatgcctatgtcacatggtaaacaccttagccagatgcaatgtcctgcgacggctaatgagcgggagcgcatgagtaaggtaccatacgcctcagcgattggatcaatcatgtatgccatgataagtacacgcccagatgtttcatacgctataagtgctacgagta

SEQ ID NO: 49949 - DNA, 448 bp, Zea mays
  unsure (1)..(448): unsure at all n locations
tgtcttcgccttagtataccacccgcagtctaacggagttgtggatctcgccaatggcaaaatcttcatagctgtcaagaagatgctcctcgacgagaaaaagggcaggtgggccgatttgttacctgaagcggtctgggcgctaaacacgactgagtgcagggcgactgggttcacccctttccgccttctatatggatcggaggccatgaccncgcaagaaataaaacatgggtccccacggacagtctcatcagctgtccccgacgtggacgaacccacttcgaaggatctcatcgatggagaccgcgtcttcgccctacaggctctaaatagataccaagcccaaacaaaagcatggcgcgaccacgcagtcatcccgagggaattcagcgaaggggacctcatactcgtccgaacagctcggacagagtccaggggcaagctg

SEQ ID NO: 49950 - DNA, 442 bp, Zea mays
  unsure (1)..(442): unsure at all n locations
agcttataggttttctgagatgactatgggctttgaaggaagaatccaccctaggcatatcaaatcaatgcacagctccactcagaacgatgacaaaggaggccagtttcagaggccatagcacagctcacagtcttcaggacagcagctaagctccttcaggccaccagctccaaggggcagaagtggcatgggcttcggaggtagatatcgggatcagcccagaaaaatctattgcttattctatggtgaagacaagggccacacgataagaacatgtcagattaccattcaaaagcaaaaagagatcgatgaagcagaaacctggcagaatcagccgaagcaggtcctacatactgctntgtgccattctccctacattccagaatatgtgggcaaccaacctgcagcttctgtcgcttcngcaagccattcacaagct

SEQ ID NO: 49951 - DNA, 465 bp, Zea mays
  unsure (1)..(465): unsure at all n locations
tctntcttcctcctcatcctcatttgtgcttccgctattattttcattggccacacaacacatgtgggaatcgaaatgggaagacaaaccttttggagaggtggattcatcgtttggtctccatcgttcattttctccttcttccttgcaagggttagtatcacaaaaactaaaggaagtagaggcatcaaatgaactattatgtttggactcatcaaacttgattntaattctagtccaaatatcatgcgcatcgggaatggattcgtcatagtttgatatgaaggcacgataatcttctttgctaagagaattgtttaagatgtcaaaagctaggtagtttaagcgataacatctttgatcctcctcggaattaatttttccattaaaactagagggaanaatactcttgtcaataattngttctaattgaggatgtatggttctaaaggcatttatcacact

SEQ ID NO: 49952 - DNA, 433 bp, Zea mays
agcttccaaattcttttcaggcatctttgattacaactcaatagcgtcatgaatttttccatgctttacatagccatcgaccatcaaattccacgagatcttatctctgccatccatagaataaaaaatctttctagcctcatcgatcttgcctgcatggatacagccagatatgatagcattacatgagccaacatgctttctttccattttacaaaattctaactgtgcctcatcaatatctaaggagttacagtacatcacaactaatgatgcctcgatgatgtggtcatggataaacccagacttcacagcaaacccatggacacacctgcctcctccaatacttttcaaaccagcacaggcattaacaatcttaacgaggattgcatttgcactatttctcacagctcataaagtgtgaatagtcatt

SEQ ID NO: 49953 - DNA, 461 bp, Zea mays
  unsure (1)..(461): unsure at all n locations
tgccttcgcctcagtgtaccacccacaatccaacggcgttgtggagcgcgccaacgacaagattntcacggtgatcaagaaaatgctcctcgacgacaagaagggtaaatgggctgacctgttacctgaagcagtctgggcactaaacacgaccgagtgtcgggcgaccggattcactccctttcgcctgcaatacggatccgaggccatgaccccgcaggaaatcaaacatgggtcctcgcggacaagcgcttcagcagtacccgacgtcgatgaactaacctccaaagatctcatcgacggagactgtgtcttcgccctgcaagccctcaacaaataccaagcccaaacgaaggtctggcacgaccacacagtcgtcccaagagaattcaacgaaggggacctcgtacttgtccgcacaacccggacagagtcacggggtaagctggagccaaagtggg

SEQ ID NO: 49954 - DNA, 432 bp, Zea mays
agcttcacgggccactggcggagctatttatacactggctcgacttgagggtggctggagtgggctggccacggtggccgaagctctggcggcaatggcgggcggaattaagctcgccggagctaaaggaaagtggtcggccggtgaaaatgagtgcggggcgaagtgaggcgcgcccggggaggctttataggcgcgggcgggcacggtcaagggcaagggcgcgcggcggacttgaccgaacgccggggcgagcgcgtgcgcgggttgggcgagctctggcgtgccgaccagggtcgaacacgtgtgcccgtgcgttctgcccaagttctggcgcgtgtggtcgctcatccgagcctgctctcgccttggtcagtgcacaaaacctcttctcctcctacaactaccgatcttggtggggtcataaatttt

SEQ ID NO: 49955 - DNA, 411 bp, Zea mays
  unsure (1)..(411): unsure at all n locations
tgagggtctcggcgtagatgatgttgaggcagctgcctctgttcttcangaccttggtgagcctgacatcgccgacaacggggtcgacgacgagcgggtatttccccgggctcggcacatggtcggggtggtcggcccggtcgaaagtgatgggcttgtcggaccagtctatgtagactggcgccgccaccttcaccgagcagacctcccggcgctcttgcttgcggtgccgagccgaggtattcgccgcatgccctccatagatcatgaagcagtcgcggacctcggggaacccccctgctgggtgctcttcgttcttgtcgtcgtcgtgggccctgccaccctcggcgggtggcccggccctgtggaaatgacgccgaagcataacgcactcctcgagggtgtgcttga

SEQ ID NO: 49956 - DNA, 440 bp, Zea mays
  unsure (1)..(440): unsure at all n locations
agcttatcaagttagctntccaacgcatccagtcccacgtcatttggaaattcctaggagaagttattatccaaatactgaaggctgcacagaagtcaaacaaccacacggaattcagctctgcagatctcccgaagaggctccttcacattagcacgtgaaaatacttttgtttcgtgtttatacctctctaaggctggttgttactagtataaatacccccctatgtctatgatgtaaggcagcttttgataatctaaaaatagaacccttttgttcagatgtgtgctaacaaatattgagagtgatctctacccctttgctcttgtgaatttcttcgcgggattgcagaagcagcggcttcatccgctcccatgtggtgctgctactcccttcgaggtctcctcgatggattgtangatgtgttggttggttctttg

SEQ ID NO: 49957 - DNA, 332 bp, Zea mays
gataacacgcaatgggagtggagagatggcgagagtagcgtgtaccctccgtggcaagaggatggacggtaagtgtatcagtgctctcgttggcgtgaacctgatttggtcttaagaaacccgatggcgagttgacatatgcaagggttaagtgctacatatgtcatgtgaatggagatcctcagctgagtataatcaattcggatcgccgtaactttgcggacatgaaggctcggtcactgacttacacgtagaaatccagtaaagatgaagggttgttaagaaattggctagtgcacgtcaagtgattgaactatggtagaaagaactct

SEQ ID NO: 49958 - DNA, 448 bp, Zea mays
agcttcgggcctggtcgggctggcccacgtgttttttgcatgtccaaacccggcacggacatgtataaatcgtgccgggccggcccgttcgcccggtgggcctgaacgtaccgggccgaccactggcccgaaccaatacataataacagaattaaatacatgtacatatcagatttacacagaattaataccagattcacacagaattaaccacatgattcacacagaatgattcacacagaattaatcacatgtttcacacagaattaatcacaggattcacacagaattaatcacacaacaaataacagctggttcacaggatcgatatgaataggatctccatgggtttcattctcaccgagaccaatgaagaacctagcatcctcagcctcattaaagtcctcgagtctgcgctcctccttctctgcttccgctgccgcgtaaa

SEQ ID NO: 49959 - DNA, 284 bp, Zea mays
  unsure (1)..(284): unsure at all n locations
tacaaaaattccgattacttcctcgggagtcattagtgtatatctatgattaccacaaattaattgaacttgagtagggttaaggaaaataagtgatctaagaataaccttaaccatcttgtggtcatcccactttntgctcccgaggttgcgcacttggttcaccaaggttntgagccggttgtacatgtcttgtggctctttccctttgcgaagccggaagcgaccgagctccccctcgatcgtctcccgccactacacgacggttcacttacagtgaccta

SEQ ID NO: 49960 - DNA, 433 bp, Zea mays
agcttaccgcatttgaagcatgatcgcttcttcttggtcttagtcttgctcggctgtccattgcgcccctttagcaccgtcttgaagcgcttaatgatgagagccatttcttcatcattaagcccggccgcctcaatttgcgccaccttgcttggtagtgcctccttgctcctcgatgccttgagagcaatgggttgaggctcgtggattggaccattcaacgcgtcatcgacgtaccttgcctccttgatcatcatccgcccgcttacaaattttccaagaatttcttcgggcgacattttggtgtacctgggattctcacgaatattattcaccaaatgaggatcaagaacagtaaaggaccttagcattaggcggacgacgtcgtggtccgtccatcgcgtgctttcatagctccttatcttgttgacaa

SEQ ID NO: 49961 - DNA, 440 bp, Zea mays
  unsure (1)..(440): unsure at all n locations
ttattgaagcgngccaaaagcacgccgaattgcgaaagagcattgagatattatgtccgtgcatcgactgtgataataagatagcttggagagatacaggagtaatccaatcacatctgctaaaaagagggtttacaaacaattacacgatatggtcagaacatggtgagttggatccgtgtgaagtgcctggtaatgacgagagagttgtcggaattttagatcttaaagttgatggtaaagtggataatgtggatgctaatcaagattttgaagaaattgattgcgaagagatgttgcgccatatggaaccagaaatgttgagttctgtgggatcgcagaaagggctatctaaaatggagggactggaaagtgcttcanaagaacctttatatgatgaatcaaagggttgtgacaaagagtttactacactgcgtaca

SEQ ID NO: 49962 - DNA, 438 bp, Zea mays
agcttgtctgttagaaccgaacgaagctcctgtttgttacctgcttcggaggaagaaaattttaaagtttcacaagttcataattaaatggccagagtccgctctaccgccaaggttgagcgcgagggggaggagactgaagcttctgagaccgtccctatctccgaagccatgcaacgatccgggctagtgatttccgaaaaaatgcctattgatgatgcagaacaagcaatcgctgaagcagaaggagaagatgctgaggaaactgactccgaagatgattatcaccttgccacaccaagcaaacccagtcatttggacttcgggaaatctactgtttcgaaggctgatttgtccaagatggtaaagtcaggctattttactgaaaatcaaaagaagctattacgcttttggggagaagagactaccccatagccg

SEQ ID NO: 49963 - DNA, 530 bp, Zea mays
  unsure (1)..(530): unsure at all n locations
aggacctatgatactaagcttcatattggctctttcctgcaatggaatggcaacaaatctatgggagcaatagggttgaacccatatacaatttctaaggggcataaattagttgtagaatgtactgcccttgatatgttttgtccttcctctctggtgaacctaagtaatatcaacatacacgacttangtagcataaaattctcattagtgtttaaatgaaattcataaagtagcgtgtgcacctcttgctatagcttcttagctcggctacgtgtaattggtccatcaaagacttgggttggtgatgatgttggctgtacttgagttgatgtagaatgacttgcgggttgtaacatgttgcttaatggcgtggtcattatcagattggttgcatcctatgccttgtcattgtgtatgtataactattaaatgtgttaatcattgaattctatgatgacagttaattgttcgacagattaattataattgtctataatgtggtgatcatgatttggaatgaatatgcg

SEQ ID NO: 49964 - DNA, 452 bp, Zea mays
ggatcttaagcacctgagctgcagcttaggaaagtctattatgtttttgaatgaacttaaatcacatttatacccctgagataccaaaaaccccatgggaaccctggaaaaccataagtccaaaccctaggggcctatgtgcaaaaattgtgcacatttggactaatgtgtaaaaactataatgttaaagcatataaagtcacatggttcacatttgggaagatttacaagccaaaccctaagttttggattcatttgcaaaaaggaccccaattgagatttcactctaagtctgaatttcatatttgtgagcttaactttggagctttgcatctttcacattctagggtttttgccctaaggcaccacatcaaagttgtagaccaatcataggagaaacaactttgttaagtgtgtgagctcagttgttgaggagaatctagagatagttg

SEQ ID NO: 49965 - DNA, 379 bp, Zea mays
  unsure (1)..(379): unsure at all n locations
tgtgaaggttcttcatccccacatgtgctaagtgttgatgccacagccagcccatgctagtcttagcaattaagcatgcatctagaccggcctcctcttttgcaaaatcaactaaataaagtttgccgtctaatacacccttaaaagctagtgaaccatcacttcttctagagacagacacatctacatatgtaaatagacaattatatcccatattgcataattgactaacagatgacaaattatatccaagagactcaactaanaacacattagagatagagtgctcattagatattgcaattntacctaacccttttaccttgccttgattgccatcaccgaatattattgaatcttgcgaaatcttattcttgac

SEQ ID NO: 49966 - DNA, 424 bp, Zea mays
  unsure (1)..(424): unsure at all n locations
ttgtangagaacgagatagtatgaatccatgtggtgcttgttgtagttaattcaattcttatcaactcaagctattaatcttcaaatgatctacatattcaagattgacccacggctacttcaatttattgtattcaaaactcatatcatctcggggaagatattgatgttgtaggaattgaagaatcatcatgtgcggaaaatcaacgcctacaacatggatgactgtcaaatgatggtaacacttatgcctttaagttcaagtaccttaaattatcatttcttatgtgtcttgtgcagtcacatacaaaatggaagcacttatgacgtttttaaaatttatgtcaccattctttgaataaattactctcataacgtagattgcatattcttcattcctatattatgacaatctacattcttt

SEQ ID NO: 49967 - DNA, 444 bp, Zea mays
  unsure (1)..(444): unsure at all n locations
agcttgaatattcttcatcccaacatgggcttgtctacgatgccagagccagcccatattagtcttagcaattaagcaagtgtctagttcatcattattatcattaaaatcaactaagtatagctgaccatctaagactcccttaaatgctattgaatcatcacttcttctaaagacagtaacaccaacatcagtaaacagacagttgtagcccattttacataattgagaaactaaagcaagttgtattctaaagaatctacaagaaaaacattagaaatggagtggtcaggtgatatagcagttttacccaaacctttgaccaaaccttgatttccatccccgaatgtaatcgttctttggagatcttncattttctcatatgaggagaacatccttttctcccctgccatgtggtntgtgcacccgctatcgattacccaa

SEQ ID NO: 49968 - DNA, 409 bp, Zea mays
  unsure (1)..(409): unsure at all n locations
ctcagcttgtaaattcttgcatntagcaatatcctgacttcggtctatatcagcacctcccctcttcgctagttnttgctaaattcatgaaccaacaagaactgttcaaaaatatacctaaggttctgatgaagatctattttcagaataatatgtcgtttagggtgcaaattgatatggtgtagtatagtggtgtgacctgngtgacccccaaggcattatgtgatacagcatatagggattcaagccttcatggattaaacgaaattgcaccaatcacaatggaatgtgtacaatctactaaaataacatattatcatattgctaaatactccttatgttcataagcacctgccttctgtcattntaaagcacgcagcanaacattcattatgtgtaccagtaacat

SEQ ID NO: 49969 - DNA, 412 bp, Zea mays
agcttaacatccacttggaggctgcttgtttgtacttctctggccatgtcccaagttaggcaatatgtagtagcagagaaagaatgaataccttgctaacatccacttgtgggggtgacgcgggcgatttctacctagatattttgctgaggtgacactttgtactgcacattttcgggtgagacatatgggcgcagaagggcataattgtctataacggcatttgaaccaaacgtgacatgttttggataatatttttttgcgaactccatgttaggaatgcaagttgctagctatgacagttcccgagatccagacttctccgagtatatatctctgaggataaactcgtgagtaacagatgccctccgtttcatttatgcttggcattaccgcctgtgtccatacatac

SEQ ID NO: 49970 - DNA, 453 bp, Zea mays
  unsure (1)..(453): unsure at all n locations
gacacttagaaactcaagcttacacacacctnctctccctgtgtggccatctatatcgtgcgcttgtgctcatagtctctctgttcttctatctggctctatctctgtgtctctggatctgctgtcgctggatcttctctatcaccgacggaattggtgctccggcctaatcggctaaggtatgaactcactaaaccctaacccccctctgttnttgcttctttaaccctaacccccctaatccccctatgtctttgcttctttgcaggtcgaggtcgtggccgtgagggaccaggtgtcggcgatggagcataggtatgatcctacctccattaatcatgatttggtgttgatgggtcaaaccccagacgatgtggacgacgtgcacgatggtttggaggatctctntggttccactgcccctacccctaaccctacctctaaccctaccat

SEQ ID NO: 49971 - DNA, 386 bp, Zea mays
agcttaaagccatggtaagtagcatatgcttgtttatatgaattgactcaagcctagctacgggtgcataggtttcattaaaatccaaaccttcgacttgtgaataaccttttgcaacaagtcatgctttgttccttgtcaccacaccatgctcatcttgcttgttgcggaatacccatttggtagctacaacattatggttaggacgtggaactaaatgtcatacctcgtttcttgtgaagatgttgagctcctcttgcattgccaccacccaatccggatctcttaatgcatcctctattatgtatggctcaatagaggacacaaaagagtaatgttcacaaaaatgtgcaactccagatctaatggctaccctcttgtgaatg

SEQ ID NO: 49972 - DNA, 433 bp, Zea mays
cgaagccatggtaagtagcataggccaataatatacgaatgtactctagcctagctacgggtgcataggtttcaccgaaatccaaaccttcgacttgggagtatcccttggccacaagtcgagctttgttccttgtcaccacaccatgctcatcttgcttgttgcggaagacccacttggttcctacaacattttggttatgacgtggaactaaatgccatacctcgttccttgtgaagttgttgagctcctcttgcatcgccatcacccaatccgaatcttggagtgcttcctctaccctgtgtggctcaatagaggaaacaaaagagtaatgctcacaaaaatgtgcaacacgagatcgagtggttacccccttatgaatgtcgccgagaatggtgtccacggcgtgatctcgttggattgcttggtggac

SEQ ID NO: 49973 - DNA, 345 bp, Zea mays
agcttatccaaaataactcaaataattccttatatcaagcttctcatgtggggacttaatgggaattctgaatttcagaattctgaaattcagaccttgagccaaagatcagggatgttcaccttgatccctaactcgaatcctaatggccccattgacaaaattgtgtctaactaacccctctgtcgtgtgccagaagatggcattgggacgcgagccctatacacgacaaaaccttggatttgcctcgggtttgggcagggagacagaccggatttcctggctccatatctctgcaaccagtaggcaaaatcctatgacccccacacaagattggtagcttgt

SEQ ID NO: 49974 - DNA, 423 bp, Zea mays
  unsure (1)..(423): unsure at all n locations
ctctgcanactattaatggtgattcttgctaaaagccttttcttgaatcctattaaaaccagcatacgcttgagagtcttttctttagtcgggtaagtcttgctgagtacttgcgtacttagggttttacccattgttgctgcaggttacgagtcactttgattgtgattggtgttaagcgccggtgggcacggccttcttataagtctaagtacttcttctatacttcttattaaggattgtcacttaagctagcatatatttcaaacttataaataatttataacagttcanagttattgctttgaaccactnttgtaaccactctgataaatataatggtaaattgctgtaactcgtaactttttgtaaaaaagacattccgctgcaaaatgttggtgtgtgatntgtgtntacttaatc

SEQ ID NO: 49975 - DNA, 431 bp, Zea mays
  unsure (1)..(431): unsure at all n locations
agctntagttgattcagagtcccttgctgtattatccccaggtttaacttttccatttcttgacataaagtgttttcggaggtctttgctataagacagtggcaggaagtcttacgactcaatgcatctgccaccacattggccttgcctgggtgataatggatttccagttcatagtctttaatgagctcaagccatcgtctttgcctcatatttaactctgactgggtgaagatgtacttcaaacttttatgatctgtatatatgtgacagatatttcccagcagatagtgacgccaaatctttagggcatgaaccacagcagctaactccagatcatgagttggatagtgctcctcatgtccgcgcaactgccttgaagcatacccaatcactcggccctcttgcatcagtacacagccgagcccact

SEQ ID NO: 49976 - DNA, 477 bp, Zea mays
  unsure (1)..(477): unsure at all n locations
tcggggagccgaagggtccaaaaacaccttccctgagctctgtgtcgagaaacgattcagtttcccagcgcgtagcggtcccaccttgcagagttactgtttgtctctgcggtccaccacgcagcgagtgcaagcgggtgtccgcctagtgtaaaaatcctggcgcttcgccttcttacctgcagtactatataaacagacgagtaggtgtgaagttaccacagcattcattgctatttgcactgttttgctgccaaaatttttaaccatcgccgaagcttgactctcggaatcgaacaaagctccaacttgaagcctgctntgtcagaagaaaaaaacttcggaagaaaaaagtatttaatttccacaaattcagaattaaatggccagagtgcgttctaccgctagggttgagcgtgaggggggcgaagatgaanggtcggagactgttcccatcttcgaagcgatgcaacaatc

SEQ ID NO: 49977 - DNA, 443 bp, Zea mays
agcttgagacgggaacaaccgtggcatgcactacatcccttgaagaaaatgtcaaggatttgaggattgccatgaggaggaaacaaaaaatgaaattcaacacctcctccaaaagcctcaaccacgcctccacaaaaggtaacatccaaggtaatgatcaagccacacttcacattaagaggtgtagtgaatgctttgaaatggggcacttgattaggtcatgtccctatattaatggcttgattattaacaaggatgatagactttgttttaaatgctctaagaaaggacacttgcttagatcttgtccccatttaaaacaaaaaggcatagggttagaaaagaaagtatttactaaccatgtagcacgcaacaagcaaggaaagaagataacttcaaaacttgaaaaacgcctatgctacacatgccgaagaaagggacat

SEQ ID NO: 49978 - DNA, 508 bp, Zea mays
  unsure (1)..(508): unsure at all n locations
tcccatcgttttgtgctcatcagaagcatgccagctcataagtctggcatcctcaggattagcgaacaaacacctcaatcgatcgacgacggggaggtaccacatcaccaaagcaggaatctttntgagcgcataatagtctacttcttctttttctttgctcgtggattttgaagtcttnttttgggctttctttcgcttcttccctttagacacggatgcaacacactcttcgtcctctcgatagtctttattcgtcttgtacctacttgcaccgcactttgggcagctctccaagtctttataatcatcacctcgataaaggatacagtgatttctacacgcgtggatcttctccacacccatagtgagcggactgattagtttctttgcatagtacgtgttagcaggcacatcgntcttctttggaagcatgtctgcgataatactcaagaacgcatcgaagccagcatcagacacaccatatntatgctttaacatcaacagc

SEQ ID NO: 49979 - DNA, 479 bp, Zea mays
  unsure (1)..(479): unsure at all n locations
gctttaagggagagcacattntatgaattacttatgttcaatttgagaaagacaggatttgtagcgcatgccaagcagggaagcaagttggaacccatcatccacacaagaacatcatgacgaccgacaggccgcttgagctactccacatggatctattcggctcgattgcttacataagcatcggcgggagtaagtattgtcttgtaatagtggatgattattctcgcttcacttgggtgttctttntacaggaaaaatctcaaacccaagataccttaaaaggattcttgagacgggctcaaaatgaagttggcttaaggatcaagaaaataagaagcgacaacgggacggagttcaagaactctcaaatcgaaggcttccttgaggaggagggcatcaagcatgagttctcttcttcctacactccacaacaaaatggtgtagtagagaggaagaatcgaacgctattggacatg

SEQ ID NO: 49980 - DNA, 478 bp, Zea mays
tacgtgaccttagaaactaagcttacaccaagcacccattgaacattctacaacaccataacttcgtatgcacgcaattgtttcattgtgatagagatatgagcacttctttgagttgtgactccaatgtgttgcttcgtgtgctctttcttgtcttatgtgtgtgttgttgctgcaactctagttcttgtgtgtgtttctatatccccttactcttgtgttcatttgagatcatttgtgtaacgtgtgagagactccaaattgtggagattcctcacaacgagatattgttgagataaaaagagaactgtggcattcaagttgatctttggatcacttgaaaggggtagactgtaaccctcatccatatggatgccacaacgtggagtatgcaaatattctacttgaccgaaccatgggataaaaaatatcgtgccacttgtattcctactacacttatcttactgcaacgtggagt

SEQ ID NO: 49981 - DNA, 352 bp, Zea mays
acacatttggacttttatatgttttgagaaagacaaggttcgtagtgcatgtctagcagggaagcaagtaggttcccatcatccacataagaacatcatgacgaccgacatgccacttgagctactccacatggatttattctgcccaatcgcttacataagcatcggcgggagtaagtactgacttgtaattgtggaagattattctcgcttcactgagtattctctctgaggaataatctcaaacccaagagaccttaaagggattcttgagacgggctcacaatgagttcgaattaatgatcaagaagataataagcgagaatgggatggagttcaagaactcacaaat

SEQ ID NO: 49982 - DNA, 428 bp, Zea mays
cgtgagcaatacaagttcagaagagataaagctgcttctgttgatcttccgaagcccatgctcttatgtgaggatatatcagagcagaaggtgctattgtgatctcaactgtccgaggaacacgaaaaaaccttgataaggtttttgttcaacaataaagatgtttttgcttggtcagctaatgatctctgtggagttaacagggatgttattgagcactcgctcaatgttgatccatccttcatacccagaaagcagaggcttcggaagatgtctgatgacaaagccgaaggtgctcggaatgaagtgaaaagactcctcagtgccggagttatcagagaggtaaaatacccagaatggttggctaacactgctatggtgaagaacgcaatggtaaatggagaatgtgtatcgattttactgatctc

SEQ ID NO: 49983 - DNA, 451 bp, Zea mays
  unsure (1)..(451): unsure at all n locations
aagcaacgagctgcacttcacccactgaccaactattttttctgagcaaaggaagcatcacaacaaggcaacgttcatatnctggtttggggttggacacctcttttttggttttggcccatgtatcgtgctgaagcccattatgggtgcgaacttgggatttgcatgccgctaaaccctatgttatcagtatttgtcaccgcattaggcgtggaatttgcttagatttattatgtcatcgaacagtgttgtcgttcatcggtttgtgagacccccacctcgtgatcaatacaatttttattgtggttcttctattcttggttgcgttcttgattgcgcttgcaggtataagccttcgtggcaaggtcactcgtgtgtcacgggtgataaccaatggaggagtggtgtagtgattgcaagaatctcgtcgcttcgagccttggatcatcaa

SEQ ID NO: 49984 - DNA, 490 bp, Zea mays
  unsure (1)..(490): unsure at all n locations
tcgtcatctgaaagaaaattaccctgaaggaaagagatgatctcatttcttcaatcttcactataaacaggggatatgttaaggattgctcttttaagaagctcgaccgaaggtgcttttattgtttcaaaaaatacttccgaaggtataggcagcccgtangctgctaacttagccaatagatcagcgtattcattttcttcacgagaaatattcttgacagagaaaccttcaaaggaagcctcaatccttcggactgtatctagatacttttcaagcttcgggtctcttgctttgtaacttttgtcaatatgaccagaaataacttgtgaatcagttttaaggatggcccttctgattcccattgcctttaatttccgaagacccaaaagcagagcttcatactcggcaatgttatttgtgcaactaacatcaagtttcgccgcataacacagtttaactttggaaagtgaaaccaacacagtagccg

SEQ ID NO: 49985 - DNA, 457 bp, Zea mays
agctttcatccttctttttcacaaatagtgctggacatccccaaggcgaagtgcttgggcgaataaatcccttgtccagcaactcttgcaactgcttcttcaactctgccaactctgcaggtggcattcggtagggcctcttggaaattggggccgttcccggttgcaactcgatggcaaattcaatatcccggtccggtggcattcctggcaattcatcaggaaagacatctgcatactcacagaccactgggatcttcttcaggggtaactccgtcatagagaaagcacatgactgagaagaaccctgactaggcagaatcaaagtgaaattcccgcagaaaggagaattaacttccacggtacgactggctacatcaagcacaacttggtgcaaggtcatccaatttgctcctagaataatgtccaccttttccaatcccaacacaagaagagt

SEQ ID NO: 49986 - DNA, 385 bp, Zea mays
  unsure (1)..(385): unsure at all n locations
ngaaccggnggccctcgtcaccggagtagcccaatcgcgctctctgtagttcaagaacccgccggcgcacgtggaccgggtaagcccctgcaccgttttccaattccttgcacgcatggcctctgtgtcaccccgtgaagctcctcgtgcacctaattgagctataccgccgtggtttggccggagcaggagccgccgacgacccccgccgcctgcgctcgtggccagggtagctccgaccacctccgacaccgacccgcacattggcgtgaccgtcgcgacctcccggacgtcactgaccaccccgccggagctctactgccgccggtaagccccaccgccgtaaactatgccgcgggtactgtttaagccagtcagggagcgc

SEQ ID NO: 49987 - DNA, 470 bp, Zea mays
  unsure (1)..(470): unsure at all n locations
ggatccttaagtcacctgcggcatgcaagcttctaaagggagaacacatnttgcgactaacatatgttcattntgagaaagacaggatttgtagcgcatgtcaggcagggaagcaagttggtgttcatcatccacacaagaacatcatgacgaccgacaggctgcttgagctactccacatggatctattcggcctgatagcttacataagcatcggcgagagtaagtactgtctagttattgtggatgattattctcgcttcacttgggtgttctttttacaggaaaaatctcatacccaagaaaccttaaagggattcttgaggcaggctcaaaatgagttcggcttaaggatcaagaaaataagaagcgacaacgggacggagttcaagaactctcatattgaaggcttccttgaggaggacggaatcaagcatgagttctcttctccctacacaccacaacaaaat

SEQ ID NO: 49988 - DNA, 450 bp, Zea mays
  unsure (1)..(450): unsure at all n locations
tatacaatactcaatcttatccaatgagcgctctagtttggctgctntgcgagaatttttgtcttatgttaagctaaggttggtccttcaagttgctgttattgagcgtgcccgggctgcccttcttggcatatttccagttgttntacctgatgaactatctgtgcttcatgaggaatgcatggatatagctgtgaatgcagctaggatttctaaagcaagaagaatatcacgaaacggtgctggaagcacataagttgatagttttgggtggctggtctgatgaactgtttgaagcattgaccaatactctgcaatctaaagcctctgattatgctgagatttatggagttgaacctcctccatgtgccgntgcatcttcaaggaggaagataggcacgtcacttaagaaaatacctgtacgtgacaatggttgtggaaaggggtcat

SEQ ID NO: 49989 - DNA, 332 bp, Zea mays
gcagacagactcgcgtactacagcctgaaggtacgggaattaaacactcgataaaaaaccccctatttttctttacgcaactcattccttctttcttatatgaattcttttttcatatagggcctgatcctaaacaacgcattaagagcgcaaaagagcgccgaagatgaaagatatgaaattgcgtttaataatttacgctccgatattatgaaactgagaaacgaagctttggaaaaagataaaattctacttacactggtagataaagtgaacaaagaccaagctgttcaaaagcccaggccgaagctcataaacgcgagattaaagat

SEQ ID NO: 49990 - DNA, 318 bp, Zea mays
gtgacgcatggcgaccccggtacagcagccagacttttgttatataaatgctagacggcggccacaaccacactgcatcatgtcgtcgcgcccgtgccatgtcaacgcgcagctagccgcctaaccgcggcatcgcatcgcatcgcgtcgtccgtgtccggcccgtcgcgtagctatgctaccacctagcacgattggtctctggattccggtgccccgccagagccagccgatacgtcaaacactgacgtccgatccgcccgcccgttcctttccgcaacccctgagaaacacgacgcgatcgggcgggcgcgggtc

SEQ ID NO: 49991 - DNA, 461 bp, Zea mays
  unsure (1)..(461): unsure at all n locations
agcttcggctntggtcaatattttggcagcataacagtgcaatagcaatgaatgctgtggtaacttcacacctacccgtttgtttatatagtgcctcatgtgggaaggtgaattgtcaaggtcttccgcaccggacaaacagccacccgcactcactgaacgttgggccacatggtccgagaaggtgaatcgccagagcgcgcgtaactgctgcaagatggggccacctcgcgcgtggattattttaatcgtttctcgccaacgagcccagggaaggtgttttcggatcttcggcatcccgaagcctagaagactntntcacggatcaagctcgttacgaataacgatctagcaccgcgaaggggctactgttgggggtatgcttcgtagccgaagatcctaaaagaaagagaacaccttcggcagaccctctcagaagtagcgccgaagctatcacctat

SEQ ID NO: 49992 - DNA, 475 bp, Zea mays
  unsure (1)..(475): unsure at all n locations
ntgctaatgaaagctaaagggtgtccttcttgcaacatattagcctttcacctgtcttacatgcatcggtcttaatgcaaaaaggtttaatgaaatcaggccaggccaacactggtgcactgcaaacggcctgcttgatggctgcaaaagaaacttcatgttctgaagtccacacaaagagcactccttttttcaacaattcagtcaagggctttgtaataacagcaaaatacttgacaaattttctataataaccaacgagtcccaaaaagcttctcaactccttcacattattagggctaggccagttcaaaactgcttcaatcttagcactatcagtactcactccagcctcactaatgacatgtcccaaataggcaatagatctctgagcaaagtgacatntggcaagtttaatatgccaatgctcctgctgcagcaactcaaaaactgctgccaagtgtttcacatgttc

SEQ ID NO: 49993 - DNA, 474 bp, Zea mays
  unsure (1)..(474): unsure at all n locations
agctntgataatgtcaacggtggatacttggatctcaatgtagtcacagttgataaactattatcagacagctcataagaacctcatgtttacttttaaacatagagttaacccttggattgccctaaaaggaaagcctgatggtatggaactgtaaaccataatttaatctcagttgcaccagcactgtaaagtaagaactcaggagtggcactgatcgaattccaagactaagttcatgtgcgtcgatccaggtccacatgcatcaacacatctcaaaaagtcagaactgatatctggtccatcggttatctgatactgaaatctacttcatgtgagcatttgtgtcaggaatcgagaatttatgtgcaaatttaccttctcaacaacagataaggagttcgggtggtggcagcgccccatttggtatgatctacaggttccactggggtgttccaagctcgcagacttcac

SEQ ID NO: 49994 - DNA, 465 bp, Zea mays
  unsure (1)..(465): unsure at all n locations
tttgcatcctcatgtaggcatcacatagattgggttatttattaggagcatcaaagcatgtgactggatgtccacccctttcaaaacataccttccttatacacattatgagtcagttcaaattgctgatggtgcatctcaacaaatccgtggtataggatctgttgagtgtacaccatctcttagcttgtcatcagttctgcatgttccatcttttccaatcaatctcctttctgtaagttcaatcattgaccaattcaagtgcacagtaatatttgatgagaattcttgtgtctttcangagaagggtactgggagaaagattgggactagagtcaggcataatgggttgtggttcatcggtcatgaggagttagcattgaaagcaactgttgagggggatgacaaggagattctactacatcatcgtccggtaggacatatatctttcgataacttacgtcg

SEQ ID NO: 49995 - DNA, 458 bp, Zea mays
  unsure (1)..(458): unsure at all n locations
agcttgagcagtgactggcttcgtctgaaatctttggaagctggngatgagcatgtccttcagcttttgccatgatgtaattgttcctggccgaagagaagagtaccatgtttgtgtaacattcttgtctgccatgacgaaggatttcgccatgactgcagtattgccaccatatgaagatatggttgcttcgtagctcatcagaaattgcttcggatctgagtgttcgtcatacattgggagctgaggtggtttgtaagatgggggccaaggtgtagcctgcagttctgctgacagaggagaagcatcatcaaaagcaaaatttccatgataganatcctcataccagtcatcctcgttgatgaagccctcttggtgaagctctctatactggngccttcggttctgctcatcttgagtaagatgacgaacttcttcagaggcttcatctatcttgc

SEQ ID NO: 49996 - DNA, 319 bp, Zea mays
cctttatcaagaaggtcttgcacttgtttttgtatttccttagttgcctctggattggctcgatatggcggacagttacgaagtgcaacccctgcaataagaacaatttgatgctcaatccctcgaattggaggtagatcaaacggtgtttcttgtggaaacacattttcaaagtcctgcaaaagatcaaccaccacactatgaagagatgttatgtcgttaggagaaatcataacatctctgttcacaagtacaaagagcacttgatatgggttgtacctcacttctctcaactcacattttgtggctagcataacta

SEQ ID NO: 49997 - DNA, 475 bp, Zea mays
agctttgcctcgggcagaccaatactctaatggccaacacacaatgggagtggagagatggcaagagtagcgtgtaccctccgtggcaagaggctggacggtggtgtatctgtgctctcggttggcgtgaacccggtctagtcttgagaaacccggtggcgagttgatatatgcaagggttaagtgctacatatgtcatgtgattggagatcctcagctgagtattaatcgattcggatcgccgttacttctcggacatgaagacttggtcactgacttacatgtagcaatctagtaaactaaagggatgatgaaaagatggctagtgtaggccaagtgcttgaactatggtagaaagaactctagattcaggtaatgacttaacttgacaataaaattggattttaaggatccactattagtaagcacttttgcaaacagagtctttgattcttgaatagccttaccttgactc

SEQ ID NO: 49998 - DNA, 370 bp, Zea mays
  unsure (1)..(370): unsure at all n locations
ntaccttgaatcctttttaaaccagcatacccttgagagtcttttctttagtcgggtaagtcttgctgagtacttgcatacttagggttttatttccattgttgctgcaggttacgagtcactttgattgtgattgatgttaagcgccggtgggcacgaccttcttataagtctaagtacctctcctatacttcttattgaggactgtcactgagctagcatatattttaaacatataaatgtttatacattcaaaacatagtgtaatcactccgatcatgtacaatgtaaacttgatgtaacttgtagaatttgataataagatttccgctgcaaaaatgttggtgtgtgatttgtgtttacttaatct

SEQ ID NO: 49999 - DNA, 308 bp, Zea mays
atgccacccagtatcagactaccagctattgtcgatacgccactgagattcaggcacaatcgaatagggataggattggttattgggattggttattaagatggggtgctgggcgcctgacggcgcaggccggctgaaacgtcctgagcgcttgcagttgcagaagatgaagttggaggcacgaaagattttgacaccagtaccacacgcttgcatgtgtgcacaacaagcatcgtccatccatttaatcatgcatacctagaaagatccacatgtgacgtacacagacgataaagtcaaactattgg

SEQ ID NO: 50000 - DNA, 351 bp, Zea mays
  unsure (1)..(351): unsure at all n locations
tctanagggagaacacgtgataggagtaactaatgtgcaattcgaaaaagatagaccttgtgcagctggtcaggcaggtaaacaagtgggaggagcacatcacagcaagaatgtgatgaccacatcaagacccttggagctgctcatatggaccttcttcgaccccgtcgctatcttaaccttaggaggaagtaagtttggctaattattggtgaagaacttttcccgcttcacttgggtgttctttttgcaggataagtctgaaacccaagggaccctcaagcgcttcctaaggagagcacaaaatgagtttgagctcaaagtgaagaagataagaagcgacaacggatc

SEQ ID NO: 50001 - DNA, 417 bp, Zea mays
caatccgatcgagccggaccacattcgaacgtctataaaacaggacccggagtgctagggttcagttttttacgctccaccctgattcattagcgatgccgcgtgcgacgacggcggttgccccagagcgtgcgcggcggtggacctccagccggtggccgcaactccatgacctcgacgcgcggtggcggaggttcctcgatccggagtagtggcggcggttcccaggtcagtggcggcggggctccccgatccagagggcgagcgacagcggggcccttgtgcgggcaagcggcggcgtccccgaggtcccgaggaggcggcacttccaaggccggcgagcaagcgacgcccgtcgacgtgcgagtagcgacggcgacgcatgaggcacgatgtttgagcgagcggcgtcacgga

SEQ ID NO: 50002 - DNA, 447 bp, Zea mays
  unsure (1)..(447): unsure at all n locations
tctccagagcgcccaagtatggatgtaaatgttattacattttacgccgattgtactattgtcggcgacgatgaacctgttattgcccagtttgattttggtcctaaagaagccgcctttactaaattaaaggaatcagtaaatcatttaaagccgctcttcgtgcgcggacacattgatgggataccgattgctaaaatgttggtagacggaggggcggctgtaaatctaatgccttattcattgtacagaaaattaggtaaacaagatgactaacttgtcaagaccaacatgaccctcagcgatgttggaactgatagttcgatcaaagccagnggagtcatgtccgttgaattaaccatcgagactaagacccttgttgctgcattcttcgtcgctgatgtagaaggaaattacagtctaatcctatgcagagattggattcat

SEQ ID NO: 50003 - DNA, 370 bp, Zea mays
  unsure (1)..(370): unsure at all n locations
caccacttctcaaatggttatcaagaaccgaaggtatggaattaatgaaagagatacatgcaggtctgtgtggatctcacattggatctaggcccttattggtaaagttttccgacaaggattctattggccgaaggcagcttcngatgcggcagaattagtccaaaagtgcgaaggcttgcaaaaatgtgcaagagatcaaaagcaaccttcatctctcactcagttaatacaacccacttggtcgttgcaaggtggggcctcgattactnaggcccacttcaccactcaagaaatctanatatgttgtggggcggagagtattttccagtggatgaggcaagccttaccacaatacttcgatactctc

SEQ ID NO: 50004 - DNA, 195 bp, Zea mays
cttaagtttcaggatcacgctattcaccccccccctctatgtgctctctattggtatcggagccgttctctttaagaaagggactaatcgcccgaagagatggatcctatgggcaaggggacggtggtcaatgataaggagaaggagtccttcgtcattgatccaaaggatgacaagtctactcactcaggctca

SEQ ID NO: 50005 - DNA, 481 bp, Zea mays
  unsure (1)..(481): unsure at all n locations
agcttgcggaaggtggaacactaacaaacaatttattatctcattatacatntncaaactcatcatcagctccacaaaacaagataggagagcctagcccctagcataagcatttacaagtaaacttctatccacgggaagagtactacgtccttgacataaacatctcacaagcaaaccaacaaagacttcaatgatctatgactttgatatgaaactcaaacgggaagcanacactgatcatggtacacatttgacatacaaaagcaaagataaacaacgaaccccatctttcagatacacaaaattgcttcattacaagcaccatatttttctttcttcttcagctgcttgcagccatcgcctcacatttctacatccagagatacaatggaatcagaatcaagcaagcaacatatgtcaacaatgtaatttccacaccataaaagttagaaggcaggtgattatgaggttcaagaac

SEQ ID NO: 50006 - DNA, 458 bp, Zea mays
  unsure (1)..(458): unsure at all n locations
ggacctatgaatctcagcttaaggcacatggcgcccgatcggcaggcgcccatctccttatttcttatctggaccagccgcaaggtaagggggtacgacggccagccctgagtttcatccgtggtgaagatctttntaccctgaagcgttatccaggcatcagtgagcacgaatcaccactactgcacgaatccaaacgtgagggtcgctggcggtagggttcgctgcaccagggatcttcttcagttcactgtaccatcagaacatcatttagaacacctgacaaagaggtttgcagcgcccagatctccaatttttacgtgagaacttgttaatccacctataacaatgttctagccctataatccagctacaaacttgctatagtaaatatactcaaatactcactggattatatctaaaagagctcccaaagttcatcccaagtcactttcagt

SEQ ID NO: 50007 - DNA, 470 bp, Zea mays
agggagaccacgtgatacgattatctttgtgctattcgagaaagatagaccttgcgcagcatgttaagcaggtaaacaagagggacgagcacatcacagctagaacgtgatgactcacatcatgacccctggagctgctacatatggacctcttcggacccgccgactatctaagcataggaggaagtaagtctgggctagttattgatgatgactattcccgcttgactagggtattctttctacaggataagtctgaaacccaagggaccctcaagcgcttcctaacgagagctcagaatgagtttgagctcaaggtgaagaagataaggagcgacaactggtccgagttcaagaaccttcaagtggaagaagtccttgaggaggaagggatcaagcacgagttgttcgctctctacacaccacaacacaatggtgtggtatagaggaataacacgacactcattgat

SEQ ID NO: 50008 - DNA, 390 bp, Zea mays
tcatactcatcttacatttctgaactaactcgatggcgtcattctttaccgtctttctatttttaccacatctgaacaccttgccgaccagagtcctgtatactacgtgtatcccgcattgccccgcgtggatttcttctagcagatgtttcgcggtggatgaaagaatgcacttcatgataactcctgttgcacccctcctgtatagtgttgccccgatgagagtataatgagctgactgccttgcaacgctgtctgctgcattgttgacatctggttcctcctcattcttgatatacctgatgatcggctctctccggtcatcagggtccagctctggttgacacagaatattgcactctattatccgatccgcgggaatactcaggc

SEQ ID NO: 50009 - DNA, 432 bp, Zea mays
  unsure (1)..(432): unsure at all n locations
taatagaaggggagttatacaagcatggagtctgttctccattactcaaatgtttatctagagctgaaggtatagagctgatgaaagaaatacatgcagggctgtgtggatctcacatcggatctaggcccttgctgggtaaagtttttcgtctaggattttattggccgaaggcagcttccgatgcagcagaattagtccaaaaatgcgaagggtgtcaaaaatgtgcaagagatcagagacaaccttcgtctctaactcaattaatacagcccacttggccattgcaaaggtggggccttgatttgctagacccacttccaccagcacaagggaatttaagatatgttgtggtgacagtagaatatttttctaagtggattgaggcgaagcccttnaccacaataacttcggtcactggtcaaaaagttt

SEQ ID NO: 50010 - DNA, 476 bp, Zea mays
gacctataaaactaagctaattggcaatgggcgcgccgcttccgtgcctttggtgacgtgatcatcgctaatccaccttcggtcacgccaactgccatgactgaccccatggctgactgacccgtggcccccatgcctgatggtttcgctgagccacgcgtgaggcgcctcgataccgctgcattggtttaaaaaatcatcttctctgtcttctacggcggccccgaggaggcgcagtactggcgcgagcgacgattttctctttctgcacccaggaaccgacgcccaaggagtatgacttgtgggcttgggcgcccgtgtcatagaccgggtcgttgttttcggcggagatgaagaggcgcactaccgcgggcggcgatcgctcctcgcgtggcggttcgccttctccgcactcggagaccagcacaccagttgtatgacttgtggaccctggcccccgtgtcatatgctgggtt

SEQ ID NO: 50011 - DNA, 112 bp, Zea mays
  unsure (1)..(112): unsure at all n locations
acctgcagctgcagcttgtgtgagtggagaggatcgatcttcttgtgtttctgtacngaacgctataactcttgtaaggtgtataggtgtataaactctcataccattgaat

SEQ ID NO: 50012 - DNA, 486 bp, Zea mays
  unsure (1)..(486): unsure at all n locations
aagctgggcattggngggtaccgctctaaccatgccatctaagtcttcctttatctttctcttctcgctctcactgagaccaacctgatgggcatatgcactcataatgttcaagactacatccnccataactagcttgactaagataatcctatcttcttgccttttgacgtccaccactccatccttgatggtcttatcaatcacgatacctactccatttgtgtttgccactattcctgagtaccatagtttgaaaccagtgttcttcacctccttcactatttgcccttttcattctgtctcccggacacataaaatactaacacgcctacttctcgctgcatcgactaactctcttattctacatataagggaccctacgttccaactacctacacggatcctagacggcaactagctttcataccactcacaccccgtgagacagatgcgaagacctcgcacattgtcactacaccggcg

SEQ ID NO: 50013 - DNA, 104 bp, Zea mays
acagacccacgcccagaagcaagacgaccaggaaaaagcgaccgccagcaacccaggaagcccaaaagacaccaaccagccaacccccaaggggaagaacgccc

SEQ ID NO: 50014 - DNA, 478 bp, Zea mays
  unsure (1)..(478): unsure at all n locations
taagcacctgcggcatgcaagctttgggcaacctttttcggaatgttattttctggtggcttgcgttggggcgagcgacaaatccataacaaccaaaagtggtatgatattgttctttgtccatggccttcgtctcatatacaagctcatgcatactgcaaaagcatttcgcgcttggctccagcccttggcttcttacatcccagacaaaaattcccattctaataatagcttcggnggttatctgatgaaggtaaatctaatatattttcagcacttcaaccaaaaacctgctcagtgggaaccgaagcccagctttgaagaagcttcggtaaatcacaacttcgttttcctcgggggcaggaacattgttgtctccaccagctcttacaatagacatattccggaagtaccttcctctcatattgtcacgatgactcctgttaattgttgatttccaaagattgatgacttggct

SEQ ID NO: 50015 - DNA, 397 bp, Zea mays
  unsure (1)..(397): unsure at all n locations
tgagcttcagtttaaaagacacattntcctcattctctaggttaaaatgtctcaagacaagaaggttgctgctgagacgaagctagatgaagaggagaagctctttgaggaaaagaaggctgcatatccttacatagctgggtttattgagtcaatggcaaaatcaaatacagagaagattactaaagaaatactggaaggcctgtctgaagatacctgtgacagtgatgattatgatgctaaaagtggtggagaagattctgaggatcggctgtggaggccgagtcatacaatttttgggaaatcaacaattaaatagagtcatcttgacaatatgagaggaaggtactttctggatgtctattgtgagaattggtggagacaacaacgtccctac

SEQ ID NO: 50016 - DNA, 460 bp, Zea mays
agctttataacgatactacttagacctatgtgttatttatattgcaatcaagatatgagggttgacctttaatataagttgtagaaccagggtaatataacaaaagttataattaaaccaagccttgattcaatcccgaagtattccaaacagagccctcaagttggaaaaaaattgaattaaggatgtgaaatccttctaagtctcaaatcagtgtcgatcggtttgacgtctcgcgttaccaaatttgttttaaacaactcgagtttttccaaatataaaagttgttataactattggaggcacatcatatcacaagatggtgtccatctaaccctcctcctctgcctccccggcttatactatttcttcacgcccgtctaactccagagtcacgaccctgttcttactgctgcgtcgatgctcgcacacatgcacagtaaccctttcagcaagcagc

SEQ ID NO: 50017 - DNA, 418 bp, Zea mays
  unsure (1)..(418): unsure at all n locations
ntgaccaggtcgtcccagttggagatctgcgcatgtgggttatgctccagccaggctcgggcggcgtcggagaggaacatggggaggttgctgatgatgagagtgtcatcgatcattccacccagctggcaggccagccggtagtccgcgagccacagttccggtcttgtctcccgcgagtacttggtgatggtatgaactcagaaaacacggcgcgatgctccggggggtacccttgccttctggaggcggagctttcggcccgtcggaccgcggcatcctccagaagattcttgagctctccctggatacgccgcccctcggtggtggatggttccgacatctctcggagtagtattgctgctgcatccaagatctggccgaccccactgtaagccgggggcagacttgccctgga

SEQ ID NO: 50018 - DNA, 454 bp, Zea mays
  unsure (1)..(454): unsure at all n locations
agctttaacctctgcgagaccttntcccgtttttttctaaccataatgaatgcgatatcgaatgtcatacttgatgcatattcactttatctgttcccttgtatgatgtactggttgtttcccaatttgaatggatgaatgtatgtatgcttgcaatcgcatagagaacgatccggtcgaaaagcccgaggaactctcaagagaagcccctgagaagcagtcggttggtggaggcaagtgacctttgacctatctctgtcctattcattatataattcacctcccgcattacacatttatacctaaggattgactagcttttgttgtccatgtccttgtttacctatctgggttggattattattattagttagctttatgctattgctcaactctaatcaatgaacatgatgagaatatctatgatacgctcgtntcccttctcttattatga

SEQ ID NO: 50019 - DNA, 468 bp, Zea mays
ataaaactaagcttgctgaatgatgactctcccttgcccatcactgatctgttgtttgtcttgaccatttattatggcaccctatccttcatggatgggtcgcgtggctacaaccagatcaagatggaccgattagatgccttcaacaccgtgtttaggaaaaccaacggcaatttctactatatcatgatgcccttcagattgtagaacgcacgcgacaccaatcagtatgccatgacatgcatcctcgatggcttgattcaccacctatttggatcggcgagactagggatcataaagaccattatgatgactcgtgcaagtgtgctagtgtttaaaaggcgacgacaacatcaacttgagatggatccgtgcaagtgtgccttcactatccaattaagaattttccttagcttcatcttttgcattgagggagcagaccaagctcaaaaaatcaagccatcctga

SEQ ID NO: 50020 - DNA, 407 bp, Zea mays
  unsure (1)..(407): unsure at all n locations
cttgccgacgttaggaagcccgacgataccggcgcggaggctcatgctaattcgcgccgcgcggtcggacgagaaccgccgggtgcggcaggccctgctccatcgccagtgctggtgcagagccgacgagccgtacggggagggcagggtcgtttcggtctgcgccaccgcgggcgcccgcgtgaagcccgcgaacgcggagccgagcgcgcgcgacaccgtcgtcatgggcagtgccggagagtatttcgtgggcggcgcgggaacaccgttgggcgtacggttgccagagacaatagctgcgggatggatagatgaaatggcacgtgacccgcgcagaacgcacgtgcaagtaggggtgcctattaggtagggatgaanacctgacggaatcattgaatcgctag

SEQ ID NO: 50021 - DNA, 416 bp, Zea mays
gccgatagaagattttaacttcctcaatcacattgagatttgatccacagatcaagatgtcatcaacataaaggcacaacataacagactcacccccaccatatcgatagtatacacacgtgtcagattcatttacaacaaagccagcttgttgtaagagtattatcaaacttttcatgccattgcttaggtgcttgttttaggccatacaatgattttatcaacctgcacaccttgttctcttgaccatccgcaataaacccttctggctgatccatatagatctcctcatccaactctccatttaggagagttgtcttaacatccatctgatgaatgataagaccataataagctggcacggctattaatgtgcgaattgtagtcaatcgagccacttgtgagtatgtgtcaaa

SEQ ID NO: 50022 - DNA, 383 bp, Zea mays
cgccgccaacatccggcgatagggttccccaatcccgacaaaatgcttggtgttggaagagaccaacaagatcacttcaccagttccatggatagaacgctacggaagccgacatctgtaatacgagagagtggtgcgttggtttctaaaatccataatttggggaccaaatggactttcggttacgcctgtttgaaactacagccgatagataacgggtgaaattagcggcagatattccaacgccttatactttatactttatctaacaattatttctttagctccaactaacaatttattacttgtgtgtactcaaacatgaccttcatttgttgctatataatttgttgaaatgggtgctccgccatagtattaacata

SEQ ID NO: 50023 - DNA, 436 bp, Zea mays
  unsure (1)..(436): unsure at all n locations
tgganatgaaactaggtgttcactgcaagcatctatgttttaatctttacacctagtacaaattacgacatgttctacacaagagttggatttatttgctacttctaatttagcatttaaaacattaatttcaccttttaaagaagaaatggtttcattacaagtagaaagttcacaagagagtattccatttcttttaacttctagagcaagtgaattttgtgcactaacaaatttatcatgttcttcatataaaaggtcttcttgtttctctaagattctatccttttcatttaaggcatcaatcaactcattaatcttagctatcttagttctatccaatcccttgaataaactagagtaatcaatttcatcctcactagattcatcatcactagaagaatcataagtattagcattacgagtgattaccttc

SEQ ID NO: 50024 - DNA, 460 bp, Zea mays
  unsure (1)..(460): unsure at all n locations
gacctcatcagatactcgatggcaacatatcaccggcagcttattttattctaattttaaggtaaagttcttacctcaactttntattgggtttgagatgaagtttacttctaatgatggttattttttcagagtctactactaagtaaaaccttgaggatgcaacaagacccggaggacaagaaaaatgaagcaaaattaaagatcacgaagctactctggagaagaaggatttcgtgcttcaaacaatggagggttcgctagcagaagcccaagccgagaatgctagattgaacagtgaactctccacgaaatcaaacagcttcgaacaagagaagaaggatttntatgcaaagcttgaagctgaagttgcaaaaagttcgaacttgcaaaagtcattgaaggaacttcaagatatatgtgtgaacttcggcaaccggtgcgtgcaacgactgaagca

SEQ ID NO: 50025 - DNA, 474 bp, Zea mays
  unsure (1)..(474): unsure at all n locations
cggacctataaaactcagcttaggacatgctggtcactagttntcaagggttttagatgtatccagtcactgctcaggccttgttccagtgcactcaagaccatgaggagtaccttcaggcatatgtccgaaggttcctgcgtctgagagcacaagcgcctacagcgcccaatgaaatcatcattgaggccatgatcaagggtcttcggccaggacctacggcccaatacttcaccaggaaaccccctcagaccctagagaagctgcttcagaaaatggatgagtacatccgggctgataatgacttccggcaaagaagggaggaagcttacatattttctgagatgactatgggcttccgagggagaatccaccccangcatgttagatcaattcacagctccagtcagaatgatgacaaaggaagccagcttcagaggccacagcacacctcacagtcttctggacagtagc

SEQ ID NO: 50026 - DNA, 442 bp, Zea mays
  unsure (1)..(442): unsure at all n locations
ccactccatctcgtttcagccagcagagtcagaactcctttcaggccccctcggtcgcaagcaaccaaccaccagcaaatgcctgttggcactgcggagaccccagtcacttcaagaataactgccccgagttgaaggcaccaggacctacctactccaactcggtgaatggccccaagaatacctcggcacctgcctccaaggcactctcctccaacagtcagcagagcaagacccagtatcagggcagagcacgagttaaccacgtcgatgctcaagaggcccagcaagctccgggagtagtgctcagtgagttccttgtcgaatatactcccgctactggtacttttgattcaggagcatnccattcatttatagccactagttttgtggaaaagcatggcatcccctctacacacctagaaataccattggtcacccg

SEQ ID NO: 50027 - DNA, 484 bp, Zea mays
  unsure (1)..(484): unsure at all n locations
tctccttgtcgtcatcaaccttgacatagaaccactccgtctttatcctgctgcccatttgattcggtagctgattacaggaaactntgtggttttccgataagcaaaattatagcaaccaaagttatcatgcaatccatcttttctagccttcgtctgatagtgcagctcgtgaactcgacaaaagctgtccgcaaacggctccaccgcctggcttcggagggctcagatataaacactaagcctaacgatagcgttaggagtcaactgatgaaagtagataccaaacctcttcaatacctctgcaataatcccatgcagggggaatcttaatccagcctttagaaagctcttgaaaatgactatttcatccttctccggctttggggtagtttcttcccccccgaagcgtagtagcttcttctgactntcactgaaataacccgactttaccatcttggagagatcagccttcgaaacagta

SEQ ID NO: 50028 - DNA, 476 bp, Zea mays
  unsure (1)..(476): unsure at all n locations
aggccgaacctcgggatatatccttgcgtctgtgtgctctgttctgttttgttcctgactctctgacttactcgtctntatatctgcacttcaatacttatctggggtataagctttatttgaagtgcacgacattttgagacaggatcttctattccgctgcaacctactcgaagagtcttctcactccactgcgtactaaatctttgagtagagtaagaatttaagtttttaaagtaataagttttattcgcctattcaccccctctaggcgacatccagatcctgttcccgggtcaaagggaactttcagctgctggcgggtaatccgagcggacgcccgtgccccatttgctaggggtcggctagaggcccggaggcgcgctccanaagtacctgcgggtgatcttgcgaacccagtcctctttgacggtgtccgagggctcgatgcctccctctgatgggattccgttaca

SEQ ID NO: 50029 - DNA, 331 bp, Zea mays
aacacatacatactgatgtgtgcggacaaatgtgtacgacagctaggggaggactcctatacttgaagaccttcactgatgatattactagataagggtatcgctacgtaatgaaacacaaaggctggattcttataaatgttcatagagtttcagaatgaaactgaacatcagcaaggcgagataactaaagcactgccatcagagcgtggtgcggaatatccgagcatgatgttagcatatatcgagagagtcgtggaatagttccacagcttacaccagactgaacgcctcataagaatggcgtgtctgagcgagtaataagacttat

SEQ ID NO: 50030 - DNA, 450 bp, Zea mays
  unsure (1)..(450): unsure at all n locations
nnaacccctgcgagacgctttgccgtcgctctctaaccatattgtttgctatatcnaatgtcatacttgatgcatattcactttatttgtacccttgtatgatgcactgtgcgtatcccaatttgaatggatgaatgtatgtatgcttgcaatcgcatacagaacgatccggtcgaagagcccgatgaactctctagagaagcacctgagcagcagtcgtttggaggaggcaagtgtccttcgacctatctctgtcctattcattctttaattcacctcccgctgtacacattcatacctaaggattgactagctcttgttatacatgcccttgattacctatgtgggctggattattattacctagctctatgctattgctgaactctaatcaatgaacatgatgagattatctatgatacgctgntgtccttttcttattatgatgtt

SEQ ID NO: 50031 - DNA, 482 bp, Zea mays
  unsure (1)..(482): unsure at all n locations
gagcttatgaagattcttcatcccaacatgagtaagtctgtgatgccagagccagcccatattagtcttagcaattaagcaagtgtccaactcagcattgttatcagtgaaaccaactaaatatagctgaccatccaacactcccttaaaagctagtgaatcatcatttcttctaaagacggtaacatcgacatcagtgaataaacaattgtagcccattctgcataattgagaaacagaaagcacagtgtaacctagagattctacaagaaatacattagaaatggaatggtcaggagatatagcaattttactcaatcctttgaccaaaccttaatttccatccctgaatgtgattgctctttggggatcatcatttttctcatatgaggagaacattcntttctcctctgtcatgtggtttgtgcacccattgtcgattatccaacgtgttccaccggatgcataaatctacaacacaa

SEQ ID NO: 50032 - DNA, 436 bp, Zea mays
  unsure (1)..(436): unsure at all n locations
nntgaaacccttcccacctgttgtagttagacgctaganattctgtttgtttgttacagaaaatgcccaggacttactgtctttaaatgttctggatgaatgcatagggatgctatcgtagattcagttgaatgtacgtaacgatatcaaagcagtttggtgtaaataattaacctccaaccaaataactgctgcaaaattaacagtacctaagtttaatttgataatgcagcataaaacacaaaaaccagatctactgtcagataatatccatgacgttagaacagaacagatctgaactaattcaacaaaattaacgtataaaataaaaaccgacaacggatctaaccataagatcgtcatcataataaattgaanatgtagatttacttatagtgttttccacgggtgatggtgaggaactctagtggacgtg

SEQ ID NO: 50033 - DNA, 228 bp, Zea mays
ccaagctcaagttgctgtacgcgtctatgccctttgcttatgtaagatgatgctagtataaacataatgtgttgagcatttaatcaccaaaacaagacatttgcctttcactatctcctcatagtcatcacgaggccttatcatccttgctaagcttatggtcttcttcttataagctctcatgaatagcctagtgaccttaaatccactccaatcatcactttctaa

SEQ ID NO: 50034 - DNA, 376 bp, Zea mays
  unsure (1)..(376): unsure at all n locations
aaagccacgggaagaagcatacgcacagcanatacgaattgatttctgtctatctatgggcgcatagggtgtaccaaaatacaaaccttcgacttatgaatatcccttggccacaagtcgggctctgttccttgtcaccacaccatgctcatcttgcttggtgcggaagacccacttgggtcctacaacattatggatacgacgtggaactaaatgccatacatcattcctcgtgaagatgttgagctcctcttgcatcgccatcacccaatccgaatcttgaagtgcttcctctaccctatgtggctcaatagaggaaacaaaagagtaatgttcacaaanatgagcaacacgagatctagtggtaccctcttat

SEQ ID NO: 50035 - DNA, 348 bp, Zea mays
  unsure (1)..(348): unsure at all n locations
tctatatagaacaattccattgtgtattattgagcatgccgatttgctagccaagtcagcggcacacgggctgcctctgccttcggaagagtactttgaaacaacaaaagcaccttcagtctaacttatagacagggcatggctagcaatatcacatgcacatagagaagactacaggactgagatcatatctttcctccaaagcaactatctntcggatgacgaacgttataataaaataatggacgcctgaacaagaccatatgtgatcatacaaagggagttatataagtatggagtctgtgctctattgctcaagtgtttgtccacaacctaatgttaggaatt

SEQ ID NO: 50036 - DNA, 476 bp, Zea mays
  unsure (1)..(476): unsure at all n locations
agctntagcttcatctatgttatggatcgcttttgaatctgtccaactccctttagcccttctagcagcttcttgactttcatggacaacaatgggcccttgctccgaaggtatcttcatgcataagtacgctggatgaagtatggcttcgaagacattaagcgtccctcgaccaatgattacattgtatgggtaatctatgtcaacaatgtcaaagataacctgctcagaccttgtgttgtggacataaccaaaggtaactgacattgtgattttgccaagtgccacaatttgtcttcctccgaagccacaaagagggtgtgtagcatcatgaatcttatcctctggttcttgcatctgtctgaaagcctttgcaaatatgatgcccgctgcactgcctatgtcaaccagaacattatggatcagaaatcccttaatgacacaagatataaccatagcatcgttgtgaggatagt

SEQ ID NO: 50037 - DNA, 449 bp, Zea mays
  unsure (1)..(449): unsure at all n locations
attgcagcttacttagtgtacctcattgtttatatttggcccaagccatgattctatatttntcatactcttttgccttttctcttcaattntgcttagagagctcaattagggttgttattagggtttcaacattttgcccttttgaaactcatttgtttttgaacatgatgcttttaagtataaacttagtggatcctttattcttaattaaatttgatgctcatgctcaatttggttcacataacatgatggttcttgggttagcacttgagagaaaccctangtgacactggggtgtcacagctgttgagagtgctagtgcccttctggctgctggcttcgggaatggatcggttgtagtggtggtggcggtggaagttgtggccataagcctgtgaatgctaccgaacaacaaaactgcngatattgccccatttctgtatgta

SEQ ID NO: 50038 - DNA, 468 bp, Zea mays
  unsure (1)..(468): unsure at all n locations
agcttgtgaggatatatgatcctattctacttggtggngtctccgcgaacgctgtgaatgagccgccgtggtgattgtgacgggttcgcgcctacctctgtggagcggcaaaggcgatgctagaataactgaggtattgagcaactccttgtttacttggctcatagatcaagtcgtgtcttgatagaggagcaagtgagaacttggaatccacctcaatgtggattaggggtgatcggcaaatcaccgataccaagggaaaaactttggtgcctcattgtccatcttactggattcaatttcatgtagctagtgattattgaattatcattcatttctagctctgatattgttgtattccattagttgcatacttctagcatctagagaatttatatttcttgtcgcatgattaaagttctctagtgctttgattctagtcaaaaatgtgtatccatccccccatag

SEQ ID NO: 50039 - DNA, 475 bp, Zea mays
  unsure (1)..(475): unsure at all n locations
tctcgatcagctaaaggatangggttgtattccatctgttttgtatttaattcgattctcacttgccttgggaagaagtgtgaagttgatcaagcactgatcttgtttgaggcaatgaaaaaggatgcagagccaaattcctctacatataacatcatcattggtatgctttgcatggctggaagggttgaggaggcctatgtgatacgggatgagatggaacgtgttggtttgttccctaacttgttgacagtgaatataatggttgataggctctgcaaagcacagaagtttgaggaggcctatgagatgtttgaaactgcaagtcagagaggttgcaatcctaattctgtgacttattggtctcttattgatggattangaaagacagganatgttgatgatgcttataggttattngaaaacatgctagatacaggccacaatgctaatcctgttgttatacatccttgat

SEQ ID NO: 50040 - DNA, 252 bp, Zea mays
aaacaattcttaattggtgccaccgatgcgtgcactgtaccgacgcctcgaacgcaaaagtctgcaaaaatttgcgcaccttgaggatggaaacacctcctctatcttgggaagatcacgctcaagcaactaagttccctgacgggcagggccacatgtcagcccacgctgaagcctgtgggcaatactctgaatggagggtgccgaccgagaaaactttgcagcttccagactggactcattgcgccaaca

SEQ ID NO: 50041 - DNA, 474 bp, Zea mays
  unsure (1)..(474): unsure at all n locations
tgcagcttgcatgcactntntgcctatttcggaggtcttgtttcatcgttaacctccatccatccatttgccgatacacctacacagcaggtaccctataccctctgcagccgcatacacttcttcttgttctttcatctttcagaggactaatttctcccgtagccgtagatgtagataccatacgatagttggtttaattacttagctacgaggacaaacattcggtttaattataccacacgtacgtactggtataattgattctcatctttatcttcttgatcaatttgcatgcaggaacaaacgaggagccctccaaggatatgcgctccgccgcttatacattaaccaaagacttgcctgcaatcactcgtgtctacctcttcgagttgcgaggatgcctgcgaatgaccaccatcccaacgggctgctccangagtcagaccctggactccagcatgatgatatgga

SEQ ID NO: 50042 - DNA, 467 bp, Zea mays
tgcaagcttggagattggctggaagaattcttttgacttcgagggcatgctagccagcgatggggcctcacgcattatggagtactttctgtctccatacacgtctgctgatcggtgagtggctggtgtcatggcatgcaagaatggtcatgttctcctcactactatatagagactgcatgcgcatgaacaccctggagaatccctggatacacggtcagcaggtaaaatgccagaatcaagttcatgcgcacctgtggaacccccttgttggtctattttatgggcagccttgcaagctttagcaaaattgaagagaagtgatctgggatcctaccagatttcacaggcggatcgaatgtataatatataagcatatatcccccattattagggacatcagcatttgacaccaaatctgatcaagttctagatcacccctcttcatatctgttaaatatatgcga

SEQ ID NO: 50043 - DNA, 451 bp, Zea mays
  unsure (1)..(451): unsure at all n locations
tgcatgacanatacgtgaatgccatanatctgacttntatttttaataacagaattcaccagtttattacacacatcatgcagtgataagcggaacaagcctccgcagtcatatcctctaccaacaaaaataccatgtttagacacaacacatttattatactcaagaacaactttgtatccatctcgacatagcatagaagcgctaacgagattcttcttgatagagggcacatgctgcacgctcttcaatggcaccatctttcccgaagtaaacttcagaatgaccgtaccaacaccaagaacatgagcacgcgactccatttccatcaacaaggcgccaaacctcccgacctggtacgaattgaacatagaggcgtcagcacacacatgaatgtttgcaccactgtccatccaccactcaggtgaattacagactgaaagaacagatg

SEQ ID NO: 50044 - DNA, 311 bp, Zea mays
ctcagcaattaaatctctttctaatatgctcgcaatttaactcaatttgcttagaacataagtgataatctacacgtgacacgaatacatgtatattaactcttacgtctaggcaaataaactgcttatggagatgaaaggtcgcaacgtaatcacaatctagctgaaaatgacattctcatttaagaagaaatgaacattgcaaatctattcttagcttgcaataattatattctcacctaagtaaaagaaacatcaatttcaactataatacgcatttagatgggatgatatcatatgttgacttaact

SEQ ID NO: 50045 - DNA, 340 bp, Zea mays
gataccttatatgttattacacctgatgaggttacgagcacgaaagatctaccaatctgtcactgtttaacgaacaggtgatcctattagatatgggcatctaaacttacatggcacgtatcaactattacataattatcttcagctataaggatgctctggcactcatatgctaatatttccaagattgtgcatgatcatctgcgtcaatcatttcgcctttatgaattgaatcgatcatcaagcgagtgtttctgagattctacaatgctattaaactcatagcaccatgtctttcaaagcttctcgtatacgaatcagaattcatattactaacatc

SEQ ID NO: 50046 - DNA, 461 bp, Zea mays
  unsure (1)..(461): unsure at all n locations
agcttcgacatcttttattggttcttcatctctagccatggcgtccaatcagtaatcaagtctgctaacgcctgagattgtattgaagatctatgtacataatcaatggtgaattcattgagttctgcggcccattatccgacccttcctgttgcttctctattcctcattatgtcctttaaggggtgttgtgaaggcactattatatgatatgcttggaagtaatgccgaagcttcctggaggccatcaatacatcatacaataccttctccaattctatgtaatattttataatgggctgagtacttcggagacgaagtataccggtgcttgcttttctatttcgccatcttgtttctcctggacaagtgcacactaaccacagcatgggaagcaaccacatacagaagtaatgcgcctctaatgaaggtggngttaaagttgttaatctatacatact

SEQ ID NO: 50047 - DNA, 470 bp, Zea mays
  unsure (1)..(470): unsure at all n locations
tggctcgggacgcatcacagagcaacctataatcttgaatttatatgggatgacggccccatctgtgcctttgcgaatgtccatggcctctgtgagccagcgagcgatcttcgcatcaccggggggcagagtgcttagccgagtgccctccgacggagcctcaacggtcatcttaaacagtggtagccgcctagccatgagaggagctagccctaatggaggtaattcgcgatcacactcgccaatgtgaccccacgatcacgaagaaccgacaccgcagcaatggcccagaccgtccttttctccccatcctttgngacgccccatacctagcttttatgggcctccaagggcaccctatgaaggaaggcgggaaggccatcttcggcggtggatggagcctcgttgttctatatatagaactactagccatactagccccttgtggatgagcatatccacaacaagat

SEQ ID NO: 50048 - DNA, 469 bp, Zea mays
  unsure (1)..(469): unsure at all n locations
gatgaacttactgtgctgcactcttctctgctaaaagctatcaactccgggccgacgaagactcttttcaaggcgactctgnctctgttcgcgccaacaccgctgcctccggctctggctcatcgcagagcagccgagggtcctaaaaactgagcaagagaggcctatagtggcaaggccgaccgagccgagggactcctatgcctccgagatacggatacctcactcgtcaccttccgcgaaaggcaactcacgcctcggtaagtggttcggctagccaacacgcaagtaccagtgctcgaaatgaggaagaaacacagctttatactcgaatacccaaatgttcaggccttgacagccacgaagaacatacacatatacttggtgtaactatgggacacagacttatacatcggcaaaaccctcgactgttctcccgacctacgacaaatatctaagtacttgaagc

SEQ ID NO: 50049 - DNA, 455 bp, Zea mays
tatacaatactaagcttctaagggcgaacacgtgatatgtttaactaatgtgcaattcgtttaagtattaccttgtgcagcttgtcaagcatgtaaacacgtaggaggagcacatcacaccaaaaatgtgatgaccacatcaagacctttggagatgcttcacatggacctcttcggacccgtcgcctatctgagtgtacgaggaatcacatatggtcttgcgattgatgatgacttttcccgcttcacttgggtattcttcttgcaggataaatcttaaacccgagggaccctcaagcgcttcctaatgagagctcaaaacgagtttgagctcaaggtgaaaaagataacgagcgaccatgggtccgaattcaataaccttcatgtggaggagtaccttgaggaggaatggatcacacccagttctttgttcctacaaccacaattaatggtgt

SEQ ID NO: 50050 - DNA, 473 bp, Zea mays
agctcgtcaagcatattatggtacccatcgcttgatgtgtccatcatggttagtcaacaaagatctacgagaccaaatgtcctttgtgttagcactaggtaaactcattacctttctagcacaagtcgcaattttgggttgcctagctacatgaaaattaattgacaagctaggagtggaattgttaccaatgggacaatccttgcattgatgtcccttcttacggcatgtgtagcaaacgcgtatttcaagttttgaaggtatcttctttccttgtttgttgcttgctacatggttagaaaaaactttcttttctactactatgcctctttcgtttaaatggggacaacatctaatcaagtgtgccttcttggagcatgtaaaacacagtctatcattctttgtaataatcaagccatcttaatagagggacatgacctaatcaagtgcctctcttaaagcattcactacac

SEQ ID NO: 50051 - DNA, 450 bp, Zea mays
  unsure (1)..(450): unsure at all n locations
tctaaagggagagcacattctaggattaacaaatgttcattttgagaaagacaggatttgtagcgcatgccaagcagggaagcaagttggtgctcatcatccacacaagaacattatgacgaccgacaggccactatagctcctacacatggatctattcggcccgattgcttacataagcatcggcgggagtaagtattgtctagttattgtggatgattattctcgcttcacttgggtattctttttgcaggaaaaatctcatacccaagatactttaaagggattcttgagacgagctcaaaatgagttctgcttaaggatcaagacaattagaagcgacaacgggacggaggtcaagaactctcaaattgaacgcttccttgatgaggagggaatcaagcatgagttctcttctctctacacgccacaacanaatggtgtagtgga

SEQ ID NO: 50052 - DNA, 476 bp, Zea mays
  unsure (1)..(476): unsure at all n locations
ttaagcgactgggcagcaactggaaatcttatcccacggggttttttgcgatgccagagccaacccatattagacttagcaattaagcacgtatcgagtttagctctattgaaatcaactaagtatagctgaccctcgagtactcccttaaatgctattgaatcatcacttcttctaaaggcagtaacacctatatccgtaagaagacaattgtagcccattttgcataattgagaaactgaaagcaagttgtaatctaaagaatctacaagaaaaacattggaaatggaatggtcaggtgaaatatcaattttaccaagtcctatgaccaaaccttgatttccatccacgaatgtgaaagctctttggggatcttgngttttctcatacgaggagaacatatttttctccccagtcatgtggcttgtgcacccgctatcaatgatccaacttgagcgctcagatgcataaaccta

SEQ ID NO: 50053 - DNA, 416 bp, Zea mays
ttgagagatacgaatatgatagatctttcatacactaagcttgtgtataattttattaactgacagtcaaatcttgtgaaacagccttttcccatgaaaaaaagagcctatcaaaacatattctgatgatgctctagatatatatacacaaaacactgatgccaaaccacatatatgaaaaattgacaaacatcatggctagtctctgtagaatagtataaaacactacattaattggtacatgcatattaatcggttattacacgcagttgaagggagacgatctttctgggctgaatgataaagaactgcagtccctacagaatcagctggagacaagcctgcgtggtgtccgcacaaagaaggctcaggtcttaatgagatatctataatcagttgtgtaacaaagtactaaa

SEQ ID NO: 50054 - DNA, 432 bp, Zea mays
  unsure (1)..(432): unsure at all n locations
agcttctaagggagaaccatttaggagttcaattgttctatttgagaaagacaggatttgtagcgcatgccaagccacaaagcaagttggcactcatcattcacacaagaacatcatgacgagtgacaggccactggagctcctacacatggatttattcggcccgattgcttacataagcatcggcgggagtaagtactgtctagttattgtggatgattattctcgcttcacttgggtattctttttgcaggaaaaataccatacccaagagaccttaaagggattcttgagacaggctcaaaatgagttcggcttaaggatcaggaaaattataagcgactacggtaccgagttcaagaactcacaaattgaaggcttccttgaggagganggcatcaancatgagttctcttctccctacacgccaca

SEQ ID NO: 50055 - DNA, 447 bp, Zea mays
  unsure (1)..(447): unsure at all n locations
gacctatgaaactaagctttaagggaacacggatggttgactacgtcaattcttttagatagaccttgtgcaacttgtcaggtaggtaaacaggtgggaggagcgcatcacagcaagaatgtgatgaccacatcaagacccctggagctgctacatatggacctcttcggacccgtcgcctatctaagcataggaggaagtaagtatggtttagttattgttgatgacttttcccgcttcacttgggtgttctttttgcaggataagtctgaaacccaagggaccctcaagcgcttcctcaggagagctcaaaatgagtttgagctcaaggtgaagaagttaaggagcgacaacgggtccgagttcaagaaccttcaagtggaggagttccttgaggaggaanggatcaagcacgagttctccgctcctacacanccacagcaaatg

SEQ ID NO: 50056 - DNA, 470 bp, Zea mays
  unsure (1)..(470): unsure at all n locations
ttagagacacctgaggcatgcaagctngaaaagtatntggacacagtctgaatgttgtaggcctctttcgaagggttttctataaaaagtattccaagaggggaaaatgagcatgcagatttactagccaagtcagcagcacaggggctccctctttcttcggaagttttatttgaaacaataaaagcaccttcggttgaagttatggaaagagcaattctcacaatatcacctgtacatagtgaagataggaggactganattatatctttcctcaaaggtaattgtctttcacacgacatagtttataatataagaatggaagcaaggacaagaccatatgtcatgatagatggggagttatacaaacatggagtgtgctctccacttctgaagtgttatccagaaccgaactatagagctaatgaagganatagatgcacgcttgtgtggatctcatattacgtcta

SEQ ID NO: 50057 - DNA, 419 bp, Zea mays
tcgcggacctgctcggacatggtgggaccattttcgcgccttgctacctgctgatcatgaagtgacatgggaggagttcaagactgctttcatgggacatcacattctcgcagggattctagatcgcaagctgaatgagtttctggcattgactcaaggaacccgcactatgttgtagtatgcccaggccttcaatgacctgtgctagtatctaggttatcacgcagattctgatgagaagaagagagaccgcttccgcaggggtctcaacaccaagctgtgtgaacgtctcaacactgttcgggctaacagcttcaatgaattggtcgacctagccatatcacaggaagactgtattgtagctcactgggcacagaagaaaaggaaagcaccaatgtcatgaccctcagctccacacc

SEQ ID NO: 50058 - DNA, 269 bp, Zea mays
gaagaacctattgaagctccctctgagaatcgagcgtggctcacaaaagccaaccagctcaggaacacacttgacacccttcccaacctcactagcgatccccatacgacagccccgtagtcgtccaaaaagaaagcggactcccatgaacacaatacacccatgagagaggtgacgtaccgctgcgagtgttgtgagagggatgggcatatagcctatttgtgctctaggaagaacacagatgagcggtggggatcaaaaacggaaat

SEQ ID NO: 50059 - DNA, 405 bp, Zea mays
  unsure (1)..(405): unsure at all n locations
tcgggagcagaagcttcgatctttcagatacaatctgttatgttgttnattcctttggatcagcaggctccatctcggtgggcactgaaggcccacctttggcatcagcttgagcttgtgtagcttcggtttctgcttgcccggtttcggcttcggcctgtgattnggctttagtttgagcaattctctttgtaggagcacggctcancgccttcgtagtttctagcacagcatccagcatgttggccattctcctcctcttgggagttatagcaaaagtcttttgcacctttggcagtgttgcctctatcggagggctcagaatttttggcacttgcatcatttttcagcctttgactcttcaccatatcaatcttatcttcgactgccttgactgtatgcgtc

SEQ ID NO: 50060 - DNA, 426 bp, Zea mays
atcagctcaacagcggaagagagttcaccggaggtgggtgccaatgttggggacttgttcttaaatgctatgaattatgaacaagacaacacataagaaaaatgataaatgctaatgtccttcgtcctttgaagcattatctcccttatgatataatgatcttcacacgaaggttatgaaggacataccttcacaaatttgacatatgtaatcagaggacaaaggttatgaaacataatacaacataaataatcacataatattaaattatacatatttattgccaaataattatgaatacataaaaactagattaaatcacatttgtaccttgagcttgattgaatacgaagatacagatgtggtgtacaatcgtgaagcagacgacggtacttgttacctatttataagcatatggcgcaacct

SEQ ID NO: 50061 - DNA, 367 bp, Zea mays
gaacgacatggacgtataacatagagctcctaactgtgtgatgaatgctggtctttcctcgctttcttttgccaaactaatctgatgatacccagagtagcaatccaagaaagacaacacagagcatccggcggttgaatccaccacctggtctatcctatgaagcccaaagggatcctttggacagtgtttgctgagatccgtatagtcgacgcacatgcgctaatccactatattatttttgagtacaagaacatgattagctaacaactcaggatggtacacctccttaatgaatccggctgcgaccaagcgagccagctcacacggatggcttctctttgttggcgtgaagcgcgtaattttg

SEQ ID NO: 50062 - DNA, 469 bp, Zea mays
agcttgccttgttgctataaaagggtatcttatgtgcatggaggagtacaccaagcatactctaagcactcttgatcattcacacttcgtctttgtgcactcgattggcattcttagtgatttgagctccgctgtagtggtgaaccctgtgttattcatttgagctcaagtcttggctgtgtgtgtgcgtattgctgcggatatgtgtgtgttgcttccctcccttactctagtgctttcactttgattcttattgtaagggtgagagactccaagttgtggagattcctcacaaacgggaaagagtatagaaagaagaacaccgtggtattcaagttgatctttggatcacttgagaggggttgagtgcaaccctcgtccgttgggacgctacaacgtggagtaagcaagttgtgtacttggccgaaccacaggatgaatcctcgtgtctcttagcttgtctcactga

SEQ ID NO: 50063 - DNA, 434 bp, Zea mays
agctcgtgaacaatacaaattcacaatggagaacgcagcttctttttattattctaagcccatgctcttatgtgaggatatagcagagcagaaggtgttgttgggctctcagttatccgaagaacaggagaaaaccttgataatgtttgtgttcaacaacaaagatgtttttgcatggtcagccaatgatctctgcggagttaatatggatgttattgagcactcgctcaatgtcgatccatccttcagacccagaaagcaaaggcttcggaaaatatcagatgataatgccgaaggtgctcgcaacgaagtcaaaagactcctcagtgcaggagttatcagagaagtaaagtacccacaatggctagctaacactgttatggtaaaaaaggccaatggcaagtggcgaatgtgtatcgattttcagatcttac

SEQ ID NO: 50064 - DNA, 378 bp, Zea mays
agctttctcgactaagtttgggacattgtcttatggactgacgaaagtacctgtaagctgcaaggtcaaccgagcctatggaactccacgcctctgggatacggatacctcactcatcaccttccgcgagaagcaactctcgcccacacaaacattcctgttaccgacggaaagtccagatgctctaaacaagaggaaaaaagacgcatcttcacaagcgcagcgagggtgtgttgtctggcctctgcggccgcataaggcacacgctacaagacaatttgatcctgcaggctcggatcttcacgctgaagggggccgaagcaccctcggcatcgacgacgtcttcagcaaggtcctacccactctcggacggcgacg

SEQ ID NO: 50065 - DNA, 484 bp, Zea mays
  unsure (1)..(484): unsure at all n locations
tgccgtctagaataccctgtatagctagcgaaccatctcttcttctatagacagacacatctatatttggtaataagcagttatatcccatatcacataactgactaacagatagccagttatatccaagagactccactaaaaacacattggagatagagcgctcattggagattgcagatttacctagcccttttaccttgccttgattcccatcaccgaatattattgaatcttgggaatccttattcttgacgtaggaggtgaacatcttcttctcccccgtcatatggtttgtgcatccgctgtcaataatccagcttgaacccccggatgcataaacctgcaaggcaaatttaggcttgngtcttaagtacccaactcatgttgggtcctacaaggttagcacaaatatccttatggacccatatgcaagttttatcacccttgcaatttgcccctaactttctagcaatcacatttc

SEQ ID NO: 50066 - DNA, 456 bp, Zea mays
agcttatctcaacctgagaggaaagcttattctatgtgtgatgtgttagttcgagctctggtgatgtgttagtttgagctttgctagtgtgttattcatatgcttcttgcagtattatatgtgttgcatcatatggactagtgcttccgttgctatgaattaattggcatctattgtgttcattctgaaatagacagtcatgtggataatgatgcatgtggtttatggtgcttaagattgctttaaattagtatctgagtttaaattggtatcttaatggtgaatagtggtaggtagatattcctgtgagatatccactaaattgaatggtgtttaactctgattatgtgcattgtgtgttatagcatcatggtttgatctttgacacaatgcattccacaaagtgctaaggtgtagaaatgcttcgaattgcctaagtatgtgcaaattggcata

SEQ ID NO: 50067 - DNA, 355 bp, Zea mays
  unsure (1)..(355): unsure at all n locations
gggtgccgatggagaaacaaaaatccttgaaatcttggctttatactgcttgccgntgtcaactgttagctcggacggtactccaaagcggcaaacgatgttttgccagaagaatttttgggcagtctttgatgttattgtagaaacagccctcgcttcgatccatttggtgaagtattcgacggctacgaaggcgaacttgaggttcccctgagcggtgggcaggggcccgacaatgtccaggccccagcgctggagaggccatgtatgggcaatcagctttgtatactgcgaggggctgcctgaccgaggagaaaacttctggcatgcttcgcaggaccttgcgacccgattt

SEQ ID NO: 50068 - DNA, 428 bp, Zea mays
cacacgtggactgctatgttctgtcacatgttctgcgcaccatggacggtgtgacacataaacgcggacagtccgggacaccgccggacagtctatgtgggtcaggccgatgatccggccgcacccaggagcaacgatgaccacgtacattcaaacctcgatgaccagacatagctacatggaagacaaacatgtttaggcatccgggcgtctggtcaaagtcggcctaacacaccaagtcagagaccacggattgcaaagtcctttggcgatgattacattgtatatcttgtggatgacacaccaagtaccattgaagaggtatattcctctcctaatgctgacttttggaaggaagcaatcatgagtgagatggattctattatgtctaatgaaacttgtgaggtcgttgagcgtccttatgggtg

SEQ ID NO: 50069 - DNA, 486 bp, Zea mays
  unsure (1)..(486): unsure at all n locations
tcagcttaccgcattngaagcatgatcgctntcccttggtcttggtcttgcttggctgnccctttcgaccttttagcgccgtcttgaatctcttgatgatgagagccatctcttcatcattgagcccggccgcctcaacttgcgccaccttgctaggtagcgactccttgctccttgttgcctttagagcaatgggttgaggctcgtggagtggaccgttcaacgcgtcatcgacgtatcttgcctccttgatcatcattcgcccgctcacgaattttccaagtacttcctcgggcgtcatcatcgtgtacctgcgattttcacgaatattgctcacgagatgaggatcaagaacggtaaaggacctgagcattangcggacgacgtcgtgatccgtccaacgcgtgcttccgtagctncttattttgttgataagggtcttgagccggttggtaagttgaagtggctcctcatcccttatcatgg

SEQ ID NO: 50070 - DNA, 460 bp, Zea mays
  unsure (1)..(460): unsure at all n locations
tgcggcatgcaagcttcagcttcatctatattatgaatagccttcgaatccttccaacttctttcggctctactggcagcttcttgactcccaaatatagcaatgggcccttgttccgaaggtatcttcatgcagaggtatgctgggtggagtattgcttcaaaggcattgagcgtccctcgtccaatgattgcgttgtatgggtactccatatcaacaatatcaaagacaacttgctctgtccttgtattgttaacgtatccaaaggtgaccggcattgttatcttaccaagtgccacaatttgtcttcctccgaagccacaaagagggtgtgttgcatcatgtatcttgtcatctggctcttgcatttgcctgagagccttcgcaaagatgatatccgctgcactgcctatgtctactaagacattgtggaccaaaanatctcttgataacacaagat

SEQ ID NO: 50071 - DNA, 481 bp, Zea mays
  unsure (1)..(481): unsure at all n locations
tatgtcgatgatgtggtaatcaanacacaaacccatagaacttcatcgaagatttacagcaagatttcaacagcttaaggcgctaccactggaaattgaatccaaagaaatgtgtgttcggggtaccagccagaaagctacttggcttcatcgtcagccatcgaggaatcaaggccaacccagaaaaaattgaagccataatgaggatggaaccaccacgatcacagaaaaaagtatagaggctcactgggtgcatggcagcgttaagtcgtttcatctcaaggctcggtgaaggagggatgtcgttctgtaagctactcatgaaggtagacaaatttcaatggactgctgaagctcaagaagccctggaagcactaaagaaatttctgaccacaccaccggtactcaagccgncgtgccgggctatagccagccagccaactgaagaacctgtgtatatatctnctacacgactcacgtg

SEQ ID NO: 50072 - DNA, 432 bp, Zea mays
  unsure (1)..(432): unsure at all n locations
tgcatttacttgtactatataagggggctcttaaacatcagtttactgcagttatcatttttattttaatttgcaaatccggtctttaaagccgtcagtttgcaattacttgattagttcgtcctgaagggttctaggtagaacctgcattatgtgctggcccttccagctccactgtcttcatcagtcatagatatggaactggatgaatgtactagaaaaccatgatgcagtttggtcttcaagttatgtacttctgttattgctagggaagtcttctaattagtatgaattggtaaatcaagttttggattaagtctgtggacaaatgccggcctatatntttatttggctcgattcattgggggttcatgtgtctctatgttatgttcgatcagcttnttgataatctgtactggtttttggtgtatg

SEQ ID NO: 50073 - DNA, 380 bp, Zea mays
  unsure (1)..(380): unsure at all n locations
cagggccaaggtggtctccaagatagaccttcgctctggctaccatcagatcaagatactagcaagtgatattccgaagacggcattctcaaccaaatatggactatatgattccttggtgatgtcattcgggctgacaaatgcaccagcatatttcatgtatctgatgaattctgattttatccggaattggacaagttcgtgcgggcttcatccatgatattctggtgtactcaaacaacgaagaagaacatgtnaggcatttgcatgcagtgcttcaaccgtctgcaaagcaccaccttttgtcataatatccaagcgtgatttttggcttaaggaaataacattcttgggtcacactatccctatgctagaatacc

SEQ ID NO: 50074 - DNA, 232 bp, Zea mays
  unsure (1)..(232): unsure at all n locations
cgcagctgcagctncaagaacacaccaaacagtttctttttaataggccagccatagcgatctgagcaacaggatggacccaaatttcgctcagcagggaccaacgaaaaccccggggagtgacccgcagaatgcagcaacaatcaggtcactgaggacagacaatcacagaagcatcatcatacagggaataacgagagaacacacctctaggcacataactcatacatgt

SEQ ID NO: 50075 - DNA, 474 bp, Zea mays
  unsure (1)..(474): unsure at all n locations
ccttacanactcaatcttacaccacctcgtgacttagttcttggcgcacattatatctctctttatattatcctccgacagatcacacttggcatgcgaggagccctaagcacctgactcgtgaaccacaagatttcgctgtgagacttgaccgtaggatcatgaatgcacttctgctcttggtgacagcatttaatcatcgggtgaggctgatcccactccatatataacttggcgctccgactagtgcgagagaccctgcttatcgcgcattaaagcgctttggcctcatttgacatgcactcgagtgagtagtatccttgcatatacaaggttattgaggcccgccaatctttattcataatgacggtgacgatgaggtggcctactgcgtcgatggttacttgtaatccctgtgagttgcagacagacgtggggccaatgacctggtataacacatctgaaggcaaggtc

SEQ ID NO: 50076 - DNA, 440 bp, Zea mays
agctgcaactttatccacagtacacccggaatttactttccttcgagatgctactggacttcactaccaacaaccaaagactaagctaaataaaatttggcagcatttcctttgtgattatcagcatcgcagaagcaaaagagatatatctatacaaaatgaatcatactagtatgatataattctcatcaaggacaactaaccacgaatgaaccagcttatgactacatcatactctatagtatgaacctacaaagtcaataacccaagaaattatttggttcttaagcaatgtgcgcaacgtgccgctacttaccactccccttgataagcatcaagtacctacattgagtaatgcacgagtgagatgaaacatctcacagagccaaatgtgttgatgagatatctataccacaagatagattaatcaatattttaca

SEQ ID NO: 50077 - DNA, 415 bp, Zea mays
tcccaagcccattcaaccctttgacaatttgccaatttatcttgaattgaggcagcatcaagcttacccccagtcatctttatcaatccagttggagcagcatcaggtgtttcaagtctatagtcaaaaactggtatgcgaaagaaacaaagctcattcttggcatatccactcatggctgcagttggtttctccattttgagcaaaggacatttggccgcaatatgtatattcttcttattgcatacataacaatctaaatctgctttgcatgcttcaactagatgcccattgcacttacatcgatagcagtgtggtggtcttggtttcttggccttgaaattttgattctcccgtttctaagtcgcatcaggcagaccttcaacagcatgggttccacccactatctcatgtt

SEQ ID NO: 50078 - DNA, 448 bp, Zea mays
  unsure (1)..(448): unsure at all n locations
catgcacgcttctatacactacatgtgatatcagttgtctttactactgctggctattgggctcccgtgtacttgctgtctattgagctcccgacaacttggttgagctcgctgatttcctggctcatttggacaatcttcttagttttttggttaatattgctagccgacctttgtgcttattgtcgtcaagattgtggcgagcaacgtatgaaatctataacaaggaaaacccaggataaaacatcacatcttatagctacttcaacagcctatgtataatacattgaatcggtaaaaaagacaaagcctgttgaagccgcatcaaacatctcgcgccgataggaaccaaccatgacaggaacgattctgcgctcgcagcattcagcgccgctatcaacagtagcgctagcatcagacaatactcacacttccactatntgtgcta

SEQ ID NO: 50079 - DNA, 399 bp, Zea mays
ggcaatcggagtatcgtctcgatattcttttgtccttctctctacatgaatcctcaataactgttgttatagagatgatatatagttgtttgagcaagattacaaggttttgttgaatttcaaaatatttcacacacaatagagagaagagggataacacacaggggagaggaactcaccgagagggagaaagagggagagcacatagggagctcggtcgccggagaacattatgagctcgccggtggcaaggtggaaagcaccgagcaccagagagagcacatagcgcgccagacagagaggaggaagtgttcctaccttgggctcgggcatggaaaggtattttaaaaacgtgttattggcgcaccggacagtctacagtgcttgtccggtgcacac

SEQ ID NO: 50080 - DNA, 395 bp, Zea mays
  unsure (1)..(395): unsure at all n locations
tctagagaatgcgggtagagctgacttaaagcatatgaattacatcgtttggcttatgccccgtttcaatctcgcgggataaactntagcttcctactaaactttagctatatgaattgaagtgctaaaatttagctttaattaccaccattagctcctctgtttagattacaaatgactaacagtagctaaaaaaaagctgctaaagtttatctcgcgagattggaacagggccttattgtcgtgatcagaagaattgctacttgaagcatgatgaagaaccctctagctaacaccatttattaactcttgcttgcagccatatttttatgtaaagaaagatttattaaacgttttatagtgcaacgcatttgagttgataatatagatctacc

SEQ ID NO: 50081 - DNA, 487 bp, Zea mays
  unsure (1)..(487): unsure at all n locations
acctgaggcatgcaagctcgccaatacttatcaaaacagcttcttttatctttcagcaattgcaaatcatacccgcaacatggccatttgcatgctggggactggacatgattggacccttcaagaaagctcaaggaggatacactcatgtactagtttctattgacaaattcactaaatggatagagtacaaacccattgcttctctgactttagctaaggcagtggaattcatacaagacataatattcaggttcggaatatcgaatagcaacataactaacctgagatccaatntcactagttcagagttctttgatttctacgaacaaagaagcatccagatcaaatatgcatcagtagcacacccaagagccaacgggcaggtagaaagagctaatggaatgatattggaagcactcataaagaaagtcttctacaagaatgagaagttcgcatgagaatggatcagagactngtcgtatgt

SEQ ID NO: 50082 - DNA, 413 bp, Zea mays
  unsure (1)..(413): unsure at all n locations
tacacatgtttaaatctctaagttctccttttatttattttattattataataaaaatacatctacattagttcatattcaatcctaaacattagagtgtgcagacattaagtggaaccattttatttaaatagagaataattctatgaacattgtgccatttgaatcactaaatttggagttcatatgtaaaagctatgaaataaacaagtttgggaattcataatatgaaattagggctaattctgtgaatatttaaaagtccagggctaaatctacaagattacaggggcctgcgcgcgataaccagggacggcgggttgatntctagtaaaccgagggtctctttaagaaaactacagcgtgaaggggtatcgggtgaatctaaccggcagatctnaaaccaacgaatg

SEQ ID NO: 50083 - DNA, 492 bp, Zea mays
  unsure (1)..(492): unsure at all n locations
ttaagcacctgcggcatgcaagcttgtgaagggtcttcatccccatatgtgtctatcggtgatgccacaggcagcccatgcaagtcttagctattaagcatgcatctagaccggcctcttcttttgcaaaatcaactaagtaaagcttgccgcctaatacacccttaaaagctagtgaaccatcacttcttctaaagacagacacatctatgtttgtgaataaacagttataccccatattgcataattgactaacagatagcaaattataaccaagagactctactataacacatttgaaatagagtgctcattagaaattgcaattttacctagcccttttaccttgccttgattcccatcaccgaatataattgaatcttgcgaatacttactcttgacgtaggaggtgaacatctctcttctccccgtcatatagtgtgtgcatgcgctgtctataatccancttgaacccccggatgcataaacctg

SEQ ID NO: 50084 - DNA, 464 bp, Zea mays
  unsure (1)..(464): unsure at all n locations
taaccttgnaatgaagataagctaccttcgttctttatgtgtgtgttccttaataggctgttcggtatggggattgagctaatccatcatcttctcactcctcacttttatgtttggtttgcggaatggaatgagtcaatccatcatcacctctttacttatagttagttagtactaatatgaggaatggtgtcatcccaccaaactttaagaatggacacatgatgtaccaccatatnttggataaagtgattccttaaactaaacaccctctaagtctctttgaaatccttaaaggtaattacttaaaatgtttccaacatgctntcataagtgcataatctgtcctgagcatcacacttttattataacacattgcacttcacattttctatgacatagatatgctctcattaacccactatagtcacttgcatttaacgccagaactggattcttctcat

SEQ ID NO: 50085 - DNA, 330 bp, Zea mays
atatgcatgcttaatggctacgactcgcatgggctggctgaggcatacccacttatcacatgtggggatgaagaacctccacaagcttctaaagggagaacacgtgatacgtctgaccaatgctcatttcgtaaaagattgaccttgtgcagtttgtcacgcacggaaacaggtgggaagctctcatcacaccaaatatgtgatgacaacatcaagacccctggagctgttacatatggacctattccgacccgccgcctatctgagcatacgaggacgtaagaatggtctacttatccttgatgactttttgcgcttcacttgggtgtt

SEQ ID NO: 50086 - DNA, 450 bp, Zea mays
  unsure (1)..(450): unsure at all n locations
ntatantatggacgtgaagagtgccttcctcaatggaactttcaatgaggaggtctatgttgagcaacctcccggctatgaagatagtgagtatcctaaccatgtctataggctctctaaggcgctctatgggctcaagcaagccccaagagcatggtatgaatgcctaagagatttccttattgctaatggcttcaaagtccgaaaggccgatcctactttatttactaaaactcttgcaaatgatttgtttgtatgccaaatttatgttgatgatattatatttgggtctactaacgaatctacatgtgaggaatttattatgatcatgacgcaaatattcgagatgtctatgatggnggagttgaagtatttcttatgatttcaagtgaagcaacttcaagagggcacttcattatctcaatcaagtatactcaagacatttctaac

SEQ ID NO: 50087 - DNA, 459 bp, Zea mays
  unsure (1)..(459): unsure at all n locations
agcttctcacctctgaactaactcggctgtgttttcttcgctggnggccaatagaatcctgacctgaagaccttcccgactagtgtcttggatgctgcgtgtattccacactgcccggcatggacctcatccagaagtcgcttcccagtagatgagagaatgcacttcatgaggacgcctgatgcaccccttctgtataatgtcttcccaatgagtgtgtagtgagccgactgtctggcgatacgctcggctgcatttttgtcatccggctcctcttcattctttatgtacctgatgattggccttctccagtcatcaaagtctgactctggttgattcacgatattacactcttctgcttgatctattgagatgctcggctgtagtatttcttgcacaaagactccaggtgggacctgagttcgactggaccctagtttggacaatacatcaattgcc

SEQ ID NO: 50088 - DNA, 465 bp, Zea mays
  unsure (1)..(465): unsure at all n locations
ctaggcaaatcctcaagcaacggaaggggaaggactacatttctctttccaagaaggtttgctacaagtgtggtaagcccggtcacttcattgcaaaatgtcctatgtctagtgacagtgacaggggcgacgactagaagggaagaagaaaggagaagaagaaatactacaagaagaagggcggcgatgcccatgtttgtctggagtgggactccgacgaaagctcaagcgactcctccgacgacgaggacgccgccaacatcgccgtcaccaagggccttctctttctcaacgtcggccacaagtgtctcatggtcaaggacggcaaatagaatgtaaaatcaaggtcctccactaaatatgaaacatctagtgatgaggatgatgagcaaaatgatgaggataacttgcgcattctttttgtaaccttaacatggaacanaaggaaaaaataaatgaactaat

SEQ ID NO: 50089 - DNA, 322 bp, Zea mays
gccaccctctaggtatgtaactccatggatacctctatgccttcccatgtgcaagagggtctttcgaataacccttctaggtgctcttactgcctgcctatcgactttatagctaaaatgccgagcgcctcattctatactattcgtgatggcggccacacgataaatgtaggtggtgtgaacatgccacactatcaaccgctttgagtacatctttagagcgtgctcgcacctatatgcaagatgtatgcgaacctaactcagacaattgaatataaactagagtaaccactacaatccttgtgctaacatacctgaacac

SEQ ID NO: 50090 - DNA, 434 bp, Zea mays
  unsure (1)..(434): unsure at all n locations
ttagcgtttgggtccaaaccttggcttctcacagtccattttaaaatccncattcttataatagcttcgggagtgagttgatgaaggtagatttggaatgttttcagtacctcaacaacaaaattgctcaaggggaatcgaagcccatccttgaggaggcttcggaaaatcacaacttcatcttcttcaggggtgggagaagtcttttccccggcatcagctctcacaatagatatgtctcggaagtatcgccccctcatattatcaatgtgactctgcttgatggttgttttcccaaaaactgagtgacttggtcgccacggtcgatcttcggcctcttccccatcactttacacatcatagctgtcgctgtcatcagtatcttccgacaaaccttcgagaatctccttcggattttctctgtataatctctg

SEQ ID NO: 50091 - DNA, 390 bp, Zea mays
  unsure (1)..(390): unsure at all n locations
agcttgtcaagagtcaagttaagctttgtaatataacgcgtcaaacaaaattgccgaaactatgggcaccaaagaggaagacaaacagtcacaaccaatcaccggcgccaaaacatgcagcgcagctatatgccttcatggcctcatggtcctgctggatatggcggaaaaactgctggcggtcgttgcaattgcagccacattcaactcaggctccaggccgctgcaacccaagccgccagcagcctgcccctcctctccgactccaaaccaatccaatggccctccgccccccgctgtatcacctcacgcgctctatgccctggtctgccaccagcatgacgcgatgctccgcactgcgtcngatacatggacgatattgctggggag

SEQ ID NO: 50092 - DNA, 221 bp, Zea mays
aaaaccgtgacggagcacagaaacatggggcacacggaaggaaaacaaccacggaaacggcacacgcggccggcaccagaacaggcgggaaccaggacacaacgggagcggacaaacaaccaccagaaggacccagacgcaccaagcacacagcaccaccgggcaaaagcaaaaggaagccaaaacacgacacggccccaaagccgacgagacgggaccaa

SEQ ID NO: 50093 - DNA, 342 bp, Zea mays
  unsure (1)..(342): unsure at all n locations
ccccctcgctgaactcccttcggatgaatgcgcggtcgcgccatgccttggtctgggcttgatatttgtttagggcctgtagggcgaagacccggtctccgtcaatgagatcctttgaaagtggctcatccacgtctgggacggctgacggaactgtacgcggggacccatgctttatttcttgcggggtcattgcctccgatccgtatagaaggcggaaaggagtgaacccggtcgctctgcactcggttgtgtntagcgcccagactgcctctggaataaatcggtcacctgcctttttttcatcaggagcatcttttacagctgtaatatttcccattg

SEQ ID NO: 50094 - DNA, 447 bp, Zea mays
  unsure (1)..(447): unsure at all n locations
tacaaactcaagcttttaaagggagagcacattntaggactaaccaatggtcattttgataaagataggatctgtagcgcatgccaagcatgaaagcaagttggtgcccatcatccgcataagaacataatgacgaccgacaggccactggagctcctacacatggatctatttggcccgatcgcttacataagcatcggcgggagtaagtactgtctagttattgcggatgattattctcgcttcacttgggtattcttnttgtaggaaaaatctcaaacccaagagaccttaaagggattcttgagacgggctcaaaatgagttcggcttaaggatcaagataataagaagcgacaacgggacggagttcaagaactctcaaatcgaaggcttccttgaggaggagggcatcaagcatgagttctcttctcctacacccacaaca

SEQ ID NO: 50095 - DNA, 386 bp, Zea mays
  unsure (1)..(386): unsure at all n locations
agcttgaaaagttgatgttgcctcgacttcttcttttgttgcagatgttgatcctacggaatagatcttgtcatgagaatcgccgaatggatgtttctcacaatgaatgataatgaggcgaagaacaattttgaagaagacaatgatcgatggagaccatacgatgaatccacctnttcacaaggttcgtctttcaaatccacttctcatatgtgctttattgctaatgggagtgacagtgaaatctaaagttatgactacgaggagcacgacagtgatagagaagatgaggacgatctttaacaattcttcgctcagcttagcaagaaacatcacatgagcttgctcaatctcatgaaaagagcggaagaacaaaaagagatgct

SEQ ID NO: 50096 - DNA, 435 bp, Zea mays
tgagataacatatgtgtcatgttcttataagtgtctctctctagttaattgtgatgtagtattgcgctgcgtaaatatccaaaatgtttgtattggctaagtaaagtaagcgtcgtcatctttccagtggtagtaactacgtatgcccgacgacttgtagataagtaaagctaacaggtggatgtctgcggtgtcttccaatataatgtttagttcgccaccgcgtctatgtatatcttgtgctactttgtgctactatcattatattcatccatatgcatcttgcatctcatttaggaccgagagaggatgatcgtgcaagtgatgtggtgccacccacacaatgcagtcggtggacgacccaacgaagaatggacttaaccagtagatgctcggccagcgagtgcgcctccagtcaacactacctaagtgtta

SEQ ID NO: 50097 - DNA, 407 bp, Zea mays
  unsure (1)..(407): unsure at all n locations
atcaattgttattatgagaccaagtgattacctcgctctacagttttttcatttttagaacaagcacttggcctatattagccgtcttttatcatccttacagctgaattgagttctacaaggagggcagtgaccacagtattcatgccgagatagtacggcgactcgactttattattccccacgtggggattctctacctcacgacatattgagcactcatcccttactatttcaacctgcacccgagtatctcaagaccagatcgggttcatgccatccgagagcacagatactctcattgccaacctcttgccacggaaggtacacnctacacttgccatctttccagtcccatacgtgggggtctttctggattggtccgacnangcaaacttaccctgacg

SEQ ID NO: 50098 - DNA, 384 bp, Zea mays
  unsure (1)..(384): unsure at all n locations
tcacatttctgaactaactcggctgcatcgntcttcgccgttggccaatatgtatcctgacctgaaaaccttcccgactagtgttctggatgctgcatgtactccacgctgtcctgcatggacttcctccagaagttgcttcccggtggatgggagaacgcacttcatgaggacacctgacgcgcccctcctgtataatacctccccaatgagtgtatagtgagctgattgtctggcaatgcgttctgccgagttcttgtcatctggttcttcttcattctttatatacttaataatcagctgtctccaatcgttagagtctgactcgggttgatctatgatgttgcactcttctatttgatccgtcgagatactcggctggag

SEQ ID NO: 50099 - DNA, 464 bp, Zea mays
ttaggcatatttatcaacagaattaaactgtatgattgtatattatgttgtatacaatttcataagctttccagattgttaaagagcgcattcatatgaattatgaaagtccagttatgtttgctttactgtggctgtttttgtttgcctcacaaaaatgagcgggtttgttcactggtgggtttcatatagtaaatagccaaattgactgttccaacaatggatacatttgtagagggataaaagttcttactgccagcagaatttcataattcttggttgagtagtctggtagatattgaattttgaagttaactatgctgctgtctgagacagattcatacatttatcttatcagatgtgttaaaacttatagatggcagaatttaattatccattaaatatcgaagttatgaatatctcgtgtgacactcatagagtattgtttatatcaccactgtata

SEQ ID NO: 50100 - DNA, 249 bp, Zea mays
tgggagacccatccccaggctattgtatgccaccacccagcaagcgaccacaagcagcacaaactactctgctggcaaacaacaaaaaaagagggcgctagacaccttcaagctaggaccatcacatccttaaagacagacacactacatcggaaagacagatatccaatacataatgacgcagagagaaataaccagaactcacaaaacacataacaagaggccataaaatgaatccgccaacttcac

SEQ ID NO: 50101 - DNA, 252 bp, Zea mays
cgtgtggtacgcaaaccaacattaattcatgtttacgatagttataaagacagttacttggatcaactgtccttgtttctaagaacagacgcccacaaatactatcggagaaaaggcccctatgattattttggcacgtgccaggagtcagccattgacattccctgtggttcaacacacacaacatgacaatccaggggcaacacttcggaagtatataccggtatcacttcgaaatatcctgtggctgga

SEQ ID NO: 50102 - DNA, 356 bp, Zea mays
  unsure (1)..(356): unsure at all n locations
gaccaaaaactcagcttcgacagaaaagcacaagctaacgcaaaaccttatactattgtcgagaaatgntcaaatttgcaaaaatcattgacagagcgttaaaacatatgtctggagaacagtattcgatgtgtacaacggatgaagcacatcttccattcggctggagccggctgtgaaaaattaatccttcgactgaagaccttgccacgggccttttaacatataggaggtgaagttgatgcccttgatgaatatataagcggacatggcgatttctgtgcccttgtagcttctctgggcacagcttgccgacttcctgtaatttgtttgtacacatggaaagatcgtcaata

SEQ ID NO: 50103 - DNA, 448 bp, Zea mays
  unsure (1)..(448): unsure at all n locations
gatcactatttttgtgggtctgaagcttacgttatgaatgtttcacatatgaagactgaatctgttcaggtctggacagcaaagtcttttagtgatgtttatccttatntaaatattaaattaccttgagatgtttataaatgatatgtatacaatcttattacctttccagaaagtctaggatcaattcggttggatgtctgaatacttacttgtgaagttttgaagctgcaagtctgaatctgtccaaatctggacagagctactgtgtttgcacaattcgaccttgctaagtgttgaatcgtgttgtgatgacaataccaaagttgtataacactttttaagctttccaaaaaagcctagatcgctatttatggattaatatttgaagagatatgagtaaaacaagtaactcgtgtgctgctgcctaaaaattgcatgtgcgcat

SEQ ID NO: 50104 - DNA, 423 bp, Zea mays
  unsure (1)..(423): unsure at all n locations
tagaccttatgccactctctttgatgggagcatattagtcttatatggcacacacattccaactcacatatgtcatgagtcgaggcttgaacacataaatagaaaagggtggcctagctacaatctattangtatagtggacatggatatgcggttcacttttgtaagtgctaggctgcctgtgtcttgccatgacatggcagtgctcatgagttgtatgggagaagcaaactatccacacccaccagcaggtatggtggcatgcatattattctggcgccattgcatacatagtattcatgcattacgatctagtaaatcatcttctgagttatttgtttgagacatggaggattatcttgcggatgtggtactcaattcgtgaaagtacttgtgtggcgaactgcccaattattccactta

SEQ ID NO: 50105 - DNA, 474 bp, Zea mays
  unsure (1)..(474): unsure at all n locations
ttaagcgaccgcggcatgcagctatgaagatcttcatcccacatgggttattctgcgatgccagagccaacccatgttagtcttagcaattaagcatgtgtcgagttcagctctatcaaaatctactaagtatagctgaccctctaacacacccttaaaatcatcacttcttctaaagacagcgacacctatatcattaaagagacagntgtagcccattttgcataattgagatacagaaagcaaatttaatctaaagaatctacaagaaaaacgttggaaatagaatggtcatgagatatagcaattttacccaagcctttgaccaaaccttggtttccatccccgaatgtgatagctcgttggggatcttggtttttctcatatgatgagaacatccctttctcccctgtcatgtggcntgtgcacccgctgtcgagtatccaacttgagctcccggatgcataaacctac

SEQ ID NO: 50106 - DNA, 470 bp, Zea mays
  unsure (1)..(470): unsure at all n locations
tctatagggagaacacgcgatagggttaactaatgtgctatttaaaaagatagaccgngtgcagcttgtcaagcaaggaaacaagtgggaggctctcatcacaccacatatgtgatgactacatcaagacccttggagatgcttcatatggacctcttccgacccgtcgcctatctaagtataggaggaagtaagtatggtcttgttatagctgatgattattcccgcttcacttgggtattctttttgcaggataaatatgaaacccaagggaccctcaagcgcttcctcatgagagctcagaatgagtttgagctcaaagtgaagaagataatgagcgactactggtcctatttcaagaaccttcatatggaggagtatcttgaggatgaaaggatcatgcacgagttttccgctcctacaccccaaacataatggtgggtacagacgaaaacagacactcattacat

SEQ ID NO: 50107 - DNA, 276 bp, Zea mays
atatgcaatgcttcccttatctacagaataagcggggtctcaccttaatgtgttccaagcggcacactaaagcaaacatattgtcccatacgacatcttttaaagaacacacctatatgagtataactgggagacatagactttgaaggtcgcgtgaggaatagatactcatgaaaggccataaagttagactcatacgctccaaccggagggaatgttgttggcgacctagtaacggtaaagagcttatgaagaacttattctcacatacatatc

SEQ ID NO: 50108 - DNA, 490 bp, Zea mays
  unsure (1)..(490): unsure at all n locations
aactcaagcttcttagggagaacacattntacgactaacacatgttcattttgataaagataggatttgtagcgcatgccaagcaaggaagcaagttggagttcatcatccacacaagaacattatgacgaccgacaggtcgcttgagctactccacatggacctattcggcccgatcgcttacataagcatcgacgggagtaagtaatgtcttgtaattgtggatgattattctcacttcacttgggtattctttttgcaggaaaaatctcaaacccaagagaccctgaagagattcttgagacgagctcaaaatgagtttggattgagaatcaaacagattagaagcgaccatggtacggagttcaagaattcatatattgaacgaattcctgaggaggaaggcatctagcatgagttctcttctcnctacacacctcacacaaatagtgtngcgaagagacataatagaactctattggacatggtg

SEQ ID NO: 50109 - DNA, 426 bp, Zea mays
agcggatcacaaaccaatgacggggagatattatgttcacctcctacctcaagaataaggattcccaagattcaattatattctgtgatgggaatcaaggcaaggtaaaagggttaggtaaaattgcgatttctaatgagcattctatctctaatgtatttttagtagagagtcttggatataattcgctatctgttagtcaattatgtcacatggggcataactgtctatttacaaatgtagatgtgtctgtctctataagaagagatggttcactagctcttaagggtgtattagacggcaaactttatttagttgattttgcaaaagaagaggccggtctagatgcatgcttaatagctaacactagcatgggctggctgtggcatcgccgcttagcacatgtgtggatgaagaaccctcaca

SEQ ID NO: 50110 - DNA, 415 bp, Zea mays
  unsure (1)..(415): unsure at all n locations
tgtgaaggttcttcatccncacatgtgctaagcggtgatgtctcattcagcccatgctagtcttagctattaagcatgcatctagaccggcctcttcttttgcaaaatcaactaaataaagtttgccgtctaatacacccttaaaagctagtgaaccatcacttcttctaaagacagacacatctacatttgtaaatagacagttataccccatgtgacataattgactaacagatagcaaattatatccaagactctctactaaaaatacattagagatagaatgctcattagaaatcgcaattttacctaacccttntaccttgccttgattcccatcaccgaatataattgaatcttgggaatccttattcttgacgtaggaggtgaacatcttcttctcccccgcatatgg

SEQ ID NO: 50111 - DNA, 363 bp, Zea mays
  unsure (1)..(363): unsure at all n locations
tgttcaccngctcggaaagacgatgagagctcaagcttgatgtagtaagactatcaagctgacgagccggctctgatgactgctttgatcaaggcggagatgctcctgatttacacttggaagatgaatagccttgaccgacacgcccaagagtcctcgagacactcggctagactcacccgtctagaccattctctgagaccttataagggggtgaccactatatctcgcgttgcacatacttgagagcattactctcttgcttactctattgagccacagcagatataggatgcactatcttattgataatgcgtggtggcgatgcaagatgagctaacatcttcactacgtatgaggcat

SEQ ID NO: 50112 - DNA, 397 bp, Zea mays
  unsure (1)..(397): unsure at all n locations
agcttgaggaaagccttactgttatttcttatgatgaacctgctgatagccncatgtacaacaggataaaggtatagaagttcactttgaagttggaaaatgaaatattttattgccatgcgcaattctttcttctcctttgcagagcttaattcttaataatgccttgagggcataaaatagcgcagaagatgaaggttgtacaatggctcttaacaaccttcactctgaggtgattgaactaagaaatgaaggcatggagaaagacaatattttgatttcattggtgaataaaataaaagaagacgaagctaagtacaatgctcatgccgaagctcaaaagccgatattgaagatcttcggagacaactggcccaagcttatgaaaactgtgtgc

SEQ ID NO: 50113 - DNA, 471 bp, Zea mays
tcgaattctccgagatgaccagaggcttctgaaggaggattcacccaaggcacgtcagatcaatccactctactcagaatgacaacagaggaggtcagcaccataagccacaatattcctcccaggcttcggggcagcaacaaagctatcctcagcctccagctccaaggggcagaggcgccatgggcttccgcggaaggtttgggaatgagcccacaaaaatttattgcctattcagcggtgaggacaagggccatactacaaggatgtgccatgtcaccatcctgaaacagaaggagatagcagaagctgcagcccaacaaaaccagccaaagcaagatatgcatactgcttcggattattcaccgtacataccaaagtaatggaggaaccatcctgcatgtctgttgcttccgaagccacctcagcatcttgagacagactcacctcaccactatgcgaccgatatcc

SEQ ID NO: 50114 - DNA, 419 bp, Zea mays
atgggtactatgcgccgctcgactctgtttctctgttcgccaacagactggtcaagcgcgccatctgctggttgaccctgacaccgtctgccggcggattggacaggacgcattaaatgctgagagggcgcgtcgcccgtcaaagtggtggcaagctgtgcgtacttctcgcaataaatgcaaagactgcacagacatatgggccttacgtcaggctcgacctgttggcttacgtgacaggccacaagccatgcgcccgcagcggagttccgcctgagcggggagcgtaaggcaaggactggacacgtgtcggcaccggacacttgcttgagctaaggttctctccgtcttggacactgccatggcccagacctcactacgggggaacccgcatgtctcctcgggagctccgggctcgt

SEQ ID NO: 50115 - DNA, 499 bp, Zea mays
  unsure (1)..(499): unsure at all n locations
ggatccttaagcactgcagcatgcaacttaaatgaaaggttacccctatacctctatcttgactcaaataacatacacaaatgtgtatacaaagtttcttccacgtacttaccttttcacattatattgtctggagtaaactacaagatcggctctgtaatgtgatcaaccgaacaagagacatattttcatctttgctgatctgcgctngacaaataaagcagctaacatactttttaatgccaataataggaatgtcattgaatctagcaaatgattcttatgttgactgcaattacgcgtaatgcttacatcaagaaaattgaagattcttcccttcctgcttgaccaaaagcttttcattgaactgttcaatgaaatctaccttcttgttaccatggagaacgtggctgaaagactttaacggtgtaccaatcctcactggaaagaattcttacaggaaccgatctatttatttctggataaactcatatcatta

SEQ ID NO: 50116 - DNA, 389 bp, Zea mays
tatgaagattcttcatcccaacatgggctattcggcggtgttagttcctacccatgttagccttagcaagtaagcatgtgtcgagttcagctctatcaaaatctaccaagtatagctgaccctctaacacacccttaaatgctattgaatcatcactctctttatagacagtgacacctacatcagtaaagagacaggtgtagcccattctgcataattgagatacagagagcaaattgtaatctaatgaatcaacaagaaaaacattggaaatggagtggtcaggggatatagcaattttaccaaaacctttgaccaaaccttgattttcatccccaaatgtgatagctcgctgggaatcttggtgtttctcgtacgaggagaacatc

SEQ ID NO: 50117 - DNA, 377 bp, Zea mays
  unsure (1)..(377): unsure at all n locations
ctctntgatgtcgggagatatgtcaaaacaggctatcgatgttggcccaatattcggctagagtggatgatatatacccgtatgtgaatctcacaagagagctaggctctccatatagcctatatctaggagagagatctatgtatgtaatcgatgtaaactaacactgtccactatttggaaatagctgcaaggcccctaacaattttctgaaggctggcataactttgcagtttattgtgattagcntaacatttaaatgatgcaattgacatgacattattaaaatcatttataaacagtccgtatagtacctgagtagcgttcaaatatcttacattaaaataacacaattcatatatggttgtatcataaat

SEQ ID NO: 50118 - DNA, 449 bp, Zea mays
tcataacgcaggctccattatattttgttccgagggccttaatgtatcaaagaaaaattatacagagttggagaagataccgtatgctgtcttgatggcctccacgaagcttcggcactatttccaagcttacaacataattgtgccttcatcacaacctctgaaggatattatgaggaacatagaagctaccggaaggattggataatgggctgcagagctcaatgaatttcgtattgaatatgttcatagatcttcgattcagtcgcaggcactggcaaactttattgctgattgtacaccacgggctcaagaggaggatacaaataagataacgaatcctggatagccgtttgtgatggaccttggggaaccttcggagcaggagcggctgctgtgttggatcaccttccaagtcaaacctgtatgcggcaaacttgtatttattg

SEQ ID NO: 50119 - DNA, 451 bp, Zea mays
  unsure (1)..(451): unsure at all n locations
tcttgcatcaggcttcagaccttggcttctcgcggcccacacgaatatatttagccttataattgcctcgggagtaagttgatgaagatagacttcgaagattttcaacacctccacgacgaagctgctcaaggggaatcgcaatccagctttcaaaaagcttcgatacaccacaacttcattttcttcagggtgtggacaagtctttttcccttcgtccgccctcacaatggacagatcccggaaataccttcccctcatattggcaagatggttttctttgatagctgattngccgaaaaccgcatgacttggtcgccaggggcgatcttcggagtcttcaccgccactatctacatcaaaactgtcactgtcaccagtatcttcagacaagccttccagaatttccttggtggatttttccgtgtttgtctcgacatcgctataagaa

SEQ ID NO: 50120 - DNA, 137 bp, Zea mays
tcttttcttcccactctcctctctccttgggaaggccctgtgcatccccttatatagatacaacgggatggtccagctgtacatatggggtgtatctatgagctaacccggccggcatcaaattgctctgacctctt

SEQ ID NO: 50121 - DNA, 453 bp, Zea mays
atcaatcattaattttgtggagatgaaagtgcattcatcccttatgtgagttttggtgatatggataacaacacatttaaaggtctaacaagtttgctaagtgttgaacaggaaattcattatgatgaacatacttgaatagtgtataatgatcagtgaacaaggttcaacacaaggtcaaataaccagtgagacaatgcaaatggatataatatggtctctatattggtttgaatatatggacaagtcctgagaaatcactatgcataaatatgatcataatagatgttgaagtgactaagaggattggtcaagccaaagtgaataagatatgaggaatcgtgaattggcttgaccatattactattagtccatatatgaatatatgagaatcaaactggagcttgtatgatcttatcagttatatctagatgacattcaagcatcgttcac

SEQ ID NO: 50122 - DNA, 381 bp, Zea mays
tatctcgctcgtacggttcgacacatgcgtggagcacatgttgtttctattattcaagaacttgatcagatagcagtagcagcagctgctgctgctctaaaggccctcacgtctgaacatactttaccaaaaggagctgaggctatggatccattgcgccttgggtaaccatctatatcatccagcttttgatcagcacatgcagtatttcccattctcggaacatcttgtaagaaaatacactccttgtctacttgtcgtgcgctattctcacctattagtccctcattttacataaatagaacctttgttcttccatttattactttctctctaaggagatgcctcccattcatgatcttagcatcatgctggatgctg

SEQ ID NO: 50123 - DNA, 416 bp, Zea mays
ttatatatataaatacacttctctatcctgggggaatgttgaatctgccaccggacctaagcactgagctgcactgccttaacgacggatagcttttgagacaccttctagactcacatccatccgaaaaacaattaccattcaaaagggtgaaacaacaaaaatatagctaaacaatcaccaataaaattgaaagtgatgtgcgccaaaatgaatttaccaaaccaacaccttatttgccctaacttcaaacaaatcatgagctttgagtaatgcaagatgaaacatgcttctcccggcatgtgatttgacttcactgccacacacacttgaccacagagagtaacctcaaacaagttagcttgctttagacccaaagaatagtctacaggtatatacctggtacccacactctt

SEQ ID NO: 50124 - DNA, 442 bp, Zea mays
  unsure (1)..(442): unsure at all n locations
agctttgccnatcctaagctcttggtgttttgactacaaatcccgctccaagaagttttgctacaagtggggtaagcccggtcactttatcgctaaatgtccattatcaagtgacagtgacagggataacgacaagaagggaaagaggagagaatagaagaggtaccacaagaagaagggcggcgatgcccatgtttgccaggagtgggactcggacgagagctccaccgactcctcctccgacgaggacgccgccaacatcgacgtcaccaagggactcctcttccccaacgtcggccacaagtgcctcatggcaaaggacggcaaaaggaagaaggtaaaatcaagatcctccactanatatgaaacctctagtgatgaggatgatgctagcaatgaggaggataacttgcgcatctcttttgcaaccttaacatggaac

SEQ ID NO: 50125 - DNA, 437 bp, Zea mays
  unsure (1)..(437): unsure at all n locations
ctataatcctctttgacagaccaagtggcttgcctatccataatgctcacaatcctttttctttntaccgcctccaaccccttcatcaagcctgtcgtaatctggatattcaaaatttagggcatccattatctgattcgacctttgttttggctgggtgccaaaggcagcagtcattaattgatcttctttctttgtataatttccaaggattctgttgcacatgacttctatcatttccaacctttcagaacatggttttttgaattgcttttcaattttgaaacaaaaggggagtcgaacaagttcatatttttctgtccttccttcttcttcagcatcccccaaccactagaggtcagaaaagttttgttcgctagatattcctgcaccaagtccctagtgctaattngagcagctaccactctgaactcaac

SEQ ID NO: 50126 - DNA, 446 bp, Zea mays
  unsure (1)..(446): unsure at all n locations
tctagagggagaacacgtgataggttngactaacgtgctattcgaaaaagatagaccttgtgcagcttgtcaggcaggtaaacaagtgggaggagcgcatcacagcatgaatgtgatgaccacatcaagatccctggagctgctacatatggacctcttcggacccgtcacctatctaagcataggaggaagtaagtatgggctagttattgttgatgacttttcccgcttcacttgggtattctttttgcaggataagtctgaaacccgagggaccctcaagcgcttcctaaggagagctcataatgagtttgagctcanagtgaagaagataagaagctgacaacgggccgaattcaagaaccttcaagtggaggagtgtcttgaggaggaanggatcaagcacgagttctccgctccctacacaccacaacacaatggtgtgg

SEQ ID NO: 50127 - DNA, 454 bp, Zea mays
ctaaccttagctgggttcatgatattgagggtgcctcatctgctcaagatttcagtgtgtttcaccctcttggatctcatctcaaaagtggtactaaaatcagaggtgggagacactgacatttggaggctctctggtgatgggcattattcataaaaatccacctaggaaagcctgtttcttagtatggtaattctcagtccttataagaggattttgaaaacttgggtgtctaggaaatatcgttttttaatgagggtagtggtacgtgaaacgtgttggacggctgatcaattggcacagagggggctttctcaccctttctgctgccctctttgtgaccaagttgaagataatattaaccacttgatgttgacatgcctcttcacacaagaattctatgttttccttccgaggcctgtcagcttaaacattattactcaccaatccgatg

SEQ ID NO: 50128 - DNA, 412 bp, Zea mays
  unsure (1)..(412): unsure at all n locations
tgtacaggccttcttctntttctccatagcaggaaccttactggaacactaccccacttaaaagaatgagggtagaactctcgaatcttgtggatttgaactccttgaagtacctcataacaagggtgttactgggccttcttctaccgttgctgcttgagcaggctgcggagagatgagtgacaccaagttgatgttgggagaaccttcttcttatcttctctttgctttttttcttttctcttctcactgctcctttctttctctttgttcttcccactagaggattctatcaaagggtattaccatcatacagaggaggaaaccgaagactatgaaccatgtacaatagtcttcaacccaagaatcaccaagcattgtgattttaggggcgagggagtggaaaatggag

SEQ ID NO: 50129 - DNA, 361 bp, Zea mays
tggtcattctcccgatcggacagcggatagctggccaccagtgccgcccggtgctcgatattcttcctgacccgagctgtgaaggcattctgatccatgagaattgcagacgtccacacatccagacagcccttgaagaaacccagttcttcaccgacctggaaaccaatctttaaaccaacctggcctccctctttctttccagatgccaaaccatcattatagccatttctgtacccctcctggtaatgtgtctcatctaagagtacaagtggttcaagaaaatcagcatcaatcttagcttgctgatccataatatgaacaagagcctagtttagctctccaacagatagttctcaag

SEQ ID NO: 50130 - DNA, 445 bp, Zea mays
tgtccacacgtcgaggcgaatctgcggtggcacgcagcttctctgatcaattacaccgacgcggcgacaccaactgtgaaatcggtggttgccgaggcttctaggaattacgccgcagcaccaggatgcctcacgggtgcccgagtacccgtcgttctcctatttgacggcggcgacccgttctcctattctacagcggcggtgttttggcggccgaggcaagcagcgaaggaaaggagagaagaaggggtctgccctgccttttatggccgcaaacgggtggactcggagatgggagtgccgcctgccacgtccgagctacatgcggaggttacggcgattccgccatgcgcgcgaggccacgctcctattggtaagtgggcccgggtggccagcggaagtccgcgagatccggtcagtgcgggtcgtggtgcgactggccgag

SEQ ID NO: 50131 - DNA, 462 bp, Zea mays
  unsure (1)..(462): unsure at all n locations
agcttgtgattactgttagataccaacaaatatgactcttataacagaactcacccctatntaagagttgtagtgcaaagtgaccctctttacaccaactttgttanttttgtccaaggcatactctttttattctggacctcaaattcatagaacagactatagtgaccaatggtaacccactgtaatttttacagaatttttggaaaaagttaaaccactgttgtagttcaaacccacactagaattcataaatagaaaatgaaaaaggggaaataatagtggaaattagtgtcaccctagcccaaccagcaaaaccatttcttttaaattgctcactgaaatataagggaagtacaaatccactatgcttatccctaacaaaactccaaacctaagttgataagcatacaccaccaagagccaagtaagaccaagaatgtgacgtgaacctccaagtaa

SEQ ID NO: 50132 - DNA, 447 bp, Zea mays
acggacctataaatctaagcttacggcttcactgcggagcgattcaggggctggggcgatgctatagttcaacagaaagggggtggccacgatggccgagcctgtgcagggatggcgggcggcggtgctcgcttctcacggcgaactccggtgatccttggcttgggcggggctcggggtgtgcggtttcaacggctgaggcctttggacacatttataggcgagggcacggcacgggtgcgcggggcgaggcgaccacgcgcggggcgcgcgctgccgcggtcagtccgcgctcggccggtcaggcaagcgatcgaacacatggccatttgcttctgcccgagttcaagcgcccatatgttgaagatcttcgcgaatttggccatgatcgctgcacaagatcttctcccccgacagagctttgtcgtttgtgtgccgaagtcgagc

SEQ ID NO: 50133 - DNA, 437 bp, Zea mays
  unsure (1)..(437): unsure at all n locations
agaatgtatcaaatgattctctataagaaataaantaagccatgagtgatatcacttgaaggagtcctcaaacgattactcctcctaaatgagctgtctactttagaaagaggttttctctccctttagagatgaagaaatactcctcttgacagagatcctctacttaagaaaaagcgtgaaaaaatagaggtgcctgacaagatttgaaaagactaacttcccttatgcatatgtaacagaatatgagttagctacttatgcatttntagcaacatggaagcatatgatatgaaatatattctaatcaaatattggagaagacatgtaaatgatactgaatgtagtctcaaaagataccaattcgaagtcaatggtgagcttgagagacatgagagttcttggagatctcgcagtgtaagatagttgtgtttctc

SEQ ID NO: 50134 - DNA, 400 bp, Zea mays
gaagcagcttctccagagttagtgatggcttcctgcctaagtactgagtagtggaacctgtcctgagaccctataacatggcctcaatgggcacttcttctacccactgtggtcgcttgggccctcaacagcagaatccttccgacatacgctgggaggaacatcttacggacctcagtgcacgggaacatagttcgaactgtgactggcttcgtctgacagccatggtatccgctcaacagcatatacttgagcgtttgccacgacataattggacctggccgaaaggaagaataccatgtctgtgccacgttctgcactgtcctgacgacagatctatccatgacagcggcattgcctacgtagatgatatcgttgctcataactataaaaaatgttt

SEQ ID NO: 50135 - DNA, 428 bp, Zea mays
  unsure (1)..(428): unsure at all n locations
ntggccccacctgcagcctcgcatcctcccctgaggtgggcccattggccactatcagtaccctgaaactagggtactccttactactgtataaagacgcagtacccacgcgactatttttagtcgcgtggtaaaggagctgtatgtgggaccagaccatgactcgccccagcctcgggttactactctatgccagcaacagcacctgaccccatcagatgggcgggtccggtgccgccacgtgtctagagaaagtgacattctctgaggtatcaccagtgagtccggacccccatgggaaggtgtcggacccactgtatatatggtctgggcctccaagtttggtccacgatctacatgtgtgcgaaccggacccctggaatgggatccggaccaccccgtatggagtccagtctgtccacagtggg

SEQ ID NO: 50136 - DNA, 406 bp, Zea mays
gacatgtgcggctcacatgaagctgccggacggtgcacaccacggggacggtgagggatgcgtttctaactttcgatccgtcgccgcatggcgacgaggtaccctggcctttaactcacgcatccgaaccattcccgcgcttcgtgtgggctccccgaacccgtcgcgggccaagcaagaaaaccccgtggtttatggtttacggggttggctttgcccaactgccctttgtgccgacacatgtggaggaacaggcgcacgcgcacccgccgctcggtggtgcgacgggtggaaccaccccagctcgtggcgtcgggccgcggttccaggacttgttccacgctccactccactggccctgatgacgcggtgcaccgagccaccgaccccaacgacgatcatgaac

SEQ ID NO: 50137 - DNA, 469 bp, Zea mays
  unsure (1)..(469): unsure at all n locations
ggccaattcttatcaaagcagcaacatttatcagtatagtttctgcagaccatacccgtaacatggtcatttgcgtgctatggactagacatgattggaccctctcagaaagctcacggaggatatactcacgtgttgcgtgccattgacaaattcaccaaatggatggaatacacacccattgcttttataacttcagccaaagcagtggaatctatacatgatataatattcaggtttgggataccgaatagcatcataactgacctgngatccaatttcactagctctgaattctttgatttctacgaacaacgaagcatccagatcaaatatgcattagtagcacatccaacggccaacagtcaggtagaaagggctaacggaatgatacttgaagcactcacgaagaaagtctttgacaagaatgaaaagtcacgggaaaatgatcacagagttgccctatgta

SEQ ID NO: 50138 - DNA, 338 bp, Zea mays
caccgcggctgcagctttgctgaatgatttgaaatcatatgttgtttcgtaagaatcttttactttcctatgggaatgtgtttttatagagggtgtttgttcttcttgtttgttgcgtgatattcactgatcgatctaatattgagaatcaaatgctattccgggagaacctctatttcaattgcaagcaggcggcttctcctttgctatttgttgtcccaacatacttaataagtttattctggaattatggcataatgatggatgctattaaatactacctttcacttttcttgtaccacgtttgacaatagtgtatgcttgctcacttacttata

SEQ ID NO: 50139 - DNA, 396 bp, Zea mays
tctaagcgcgaaaggcgcataagtaatgatatctacatttagcttctgcacttactatgtggcttcgaactaatagtttacctactgcggctaaactgtcgccgctgccggagccgtacaatcccctggctgatccaaacatgaaggaagcactagatgcaataagcattgctaactctattatcgatgaagatgtcgacaagttattgaacgaagccacagaaacaattcttagggaagagtagactctattgtaattatacttttgtgacaccccagtgtcacttagggtttcttccgtaagctaaccccaaactattatcacatgctaactcaatgaagggataaacatcaaaagagaacacagatgtataatgagtcttctcaaactctcct

SEQ ID NO: 50140 - DNA, 465 bp, Zea mays
  unsure (1)..(465): unsure at all n locations
gcttctatagggagagcacactntatgactatcaaatgttcattnngagaaagacaggagttgtatcgcatgccaagcaggaaagcaagttgggtccctacattcacacaagaacatcatgactagtgacaggccactggagctcctacacatggacctattcggcccgatcgcttacataaacatcggcgggagtaagtactgtctagatattgcggatgattattctcgcttcacttgggtattctttttacaggaaaaatctcatacccaagagaccttaaagggattcttgagacgggctcacaatgagttcggcttaaggatcaagaaaataagaagcgacaacgggacggagttcaagaactctcaaatcgaacgcttccttgaggaggagggcatcaagcatgagttctcttcttcctacactccacaacaaaatggtgtagtggagagaaaaaatcg

SEQ ID NO: 50141 - DNA, 469 bp, Zea mays
  unsure (1)..(469): unsure at all n locations
tagatcgagaaaaggttcagaattatctgaataattattgttctctgggcatcgcagctaagtaaaaataggaaaaagtatataaatatataagcactcaataacaaagcatttgagattgtcatgatcaacagaacacacctggcttttcaggcacccactgaatatttcttttacgacactaccttcttcagtagaagaagattcttcagaggaagaggattcttcagagaacctgtgagcaatggagtcctcatccaatttatcaagcaaacagcggaggaactcctgcgcatcttgttgtactccactcctaanatttgatgaaattgctgccaatcacacatgaagaaatatattcagctcatactatcaccatcccattgaagtacagttgaaacgtggttcatgtagtccaacaaatctcaaatttccacgagaactaacaactacatgggagaacacttat

SEQ ID NO: 50142 - DNA, 452 bp, Zea mays
agctttattcggagttacacgattatggttgtccgtgtctaaacctttgatttgcatcttcaagattgtttctggtgatgatgaccctccgaagagagataatatcggagaaagacggagaaaacatgagcttcgcgtcctatcaagagtatgggctaactcaacagatgatcatgagctgccagatggtgacgcttctgaagaggacgaccaccatgagttgccagaacgtggtgatgaatctgaagaccacatccatcgggatgtctatagaaagaggactgaatagctattaaccaagaatgctctgtactcgccgttagtttcactgatatgccacaccatgtaacacataaagccgcttctggagaatgctatgctgctgcttataccttttcccatatgacagaactccgggcgttgaacatctggaggaagaaacagaaagcgat

SEQ ID NO: 50143 - DNA, 464 bp, Zea mays
cgcacacatagctcatttaatacctctgatcatatctcttttatattctatgactaaagcggtttcaagtctatttcacaccaagtcataggtatattgaaagggaattggagtcttcggcgaagacaaaggcttccactccgtaactcatccttcgccatcgctccaacaaaaggaccttgtctttgggggagaaagtaaaagcccatagcaagaggaccggacttcgtctttggtataatcttaactcatttacttatgaccaaaggggaagatagtacttcggacggctctaatgattccgtttttggcgattcatgccaaagggggagaaagtatgagcccaaagcaaaaggaccgcaccaccaccacattcaaagacttactgctttccaaaagtatatatcaattggtatcctattgtgttcaaacggggagaacagagtatttcacaaatggatatc

SEQ ID NO: 50144 - DNA, 244 bp, Zea mays
attgcttattctgtggggaggacaaaggccatactacatagatgtgccatgtcactatccagaaatagaaggaaatagcagaaactgcagctcaacagaaccagccgaagcaggtcatgcatactgcttcatatcactcaccctacataccagaggatgtgggtaaccatcctgcagcgtctgttgcttcggctacgcacacacaggcatcatggtcacagcccccacctccgccaccactaca

SEQ ID NO: 50145 - DNA, 429 bp, Zea mays
ttgatcatcaatggtgcatgtagtgcaagccgtctattatatatgtagagacgttctgcccgaactagtataaatcttgcgcccaccgtgcacaccgtccggagccaagaacacgcacaataaatttacttgtcgaagtgagtttctaaacaccaacacatggatgcctgcaaagctcattgatgcttcaagagtgatggttgacgctgcaatggaggactcaactatctcgtagtcgtccacatcatatgatccttcaatctcattctcaaaaattgcgttttgaaaatgatacaagcaaacatggtcatactatgtacttggtagaaaaggaacgaccttacctatctaatatatggaagtgagatttgaggaccccaaatgttctctctacatccttccatgcacccttctaacatatagcaaaca

SEQ ID NO: 50146 - DNA, 352 bp, Zea mays
agcaagtgtccgagttcagctctatctaaatctaccaagtataactgaccctctaacactgccttaaatgctattgaatcatcacttcttctaaagaccatgacacctacatcagtgaatagacagttgtatcccctttgaataatcgggatacggaaagcatattgttatctagagaatctacaagaaaaacattggaaatagtatggtcaggtgatattgcaactttacccaatcctttgaccagacttgattccatacacgatgtgaagctcgttcggatcttgatttctcatataggagaacatctttctcccggcatgtggtgtggcatcgtgctagtatcaactga

SEQ ID NO: 50147 - DNA, 475 bp, Zea mays
  unsure (1)..(475): unsure at all n locations
tcttcttcattctgatgaanaccaagccctttgatcactttatcaaaacgaatgttccaactccgagatgcttgcttcaacccataaatggatctatgaagtttgcatatctttccagcattgatcggatcgacaaaacccttgggttgtatcatatacacgtcctcatctaggtttccattaaggaaagctgttttgacatccatctgccaaatctcataatcgaaatatgcggcaatagctagaatgatccgaatagatttaagcatcgctactggcgagaatgtctcgtcatagtcaactccttgaacttgtcgaacaccctttgcaacaagtcgagccttatagatgtgaacatttccatccatgtctttcttcttcttatagatccatatgcattctataagtctaacaccatcaggcgggtcaaccaagttccaaacttgattatctccatggaatctatctcggatct

SEQ ID NO: 50148 - DNA, 462 bp, Zea mays
agcttgtatggtggacaaatgtcctttgactatttcgccgcctgttttctttattcagcatgtctacttattatagccattctaacaaccctttaatctggataaaaatgtcaaccgaactgctaacaaaccaatttgtggacaatatgtcgctaactaactctaataaactctctagcaaactcaattctattaaggacgtctcctttggtaggtgatgaccgtcataacatccgcctcgttctttgaaaacagctcgttctcaagctaaactttagggtaagaatggcgaaaactgtcgaccagtttccaagtagcgtcggactcgctcagcctcgcccagtgcaccaaaacatgcaaaatgtgccaccgcgtacctacgccttgaggacattataggagtatggcaatagtccaccctgctccatggtggagatatcatctggtcgcgtgccatggaat

SEQ ID NO: 50149 - DNA, 419 bp, Zea mays
  unsure (1)..(419): unsure at all n locations
tcacgagagagggaacgggtcccaggtctcttgataagtctagtgttgcagagtggagttcgatgtttgagtgagttcgtctccgtcgtccttgccgcctccgcctcctccgggaaggccctgngcatcccattttatagatacaaggggatggtccagctgtacatatggnggtgtagctatgtgctaacgtggccggcggagaagtgcttgagccctgtagaaacgtagctggcggtgcggccctgggtcctgctgacgtttctttgccttcgtagagagcttgagaacaatcgacgtcatggacgcatgcagggaatcatcattacctgttgccggagtaatctagatgtgacaccggtcttgttccttcgtagcccgaggcggctagctagaggtagggtaatgaatgtatccct

SEQ ID NO: 50150 - DNA, 147 bp, Zea mays
tataggacacgcgattactttctgtccgggcatgaagaatcaaggatgtgcattctccaaggtgacctctccagggaatatgacaacaatagcgtcatgctggtaagtttttgatagacgcgtatcagcacattgtctctttggagc

SEQ ID NO: 50151 - DNA, 308 bp, Zea mays
  unsure (1)..(308): unsure at all n locations
ttgggttatgttttacccctttaatccccctttatggctaagngccctattgagggtcttatttgccaaacactatgacaatacaacttatttgaaatttttacctagtgaatgcactctttgtgtgtcaaacatatgcaatgccaatgtttatgatgccatgctcacagtttagttatagtaacacccagggtgttacaccggccccacaagtcatacagctggtgcgctggtctcctactgcggagaaggcgaaccgtcacgcgaggagcgaatcaccgcacctcttcgtctccaccgaaagctgc

SEQ ID NO: 50152 - DNA, 448 bp, Zea mays
  unsure (1)..(448): unsure at all n locations
ctcaagcctgacgcacgagcgagtacaagtcaacgtgaacagtacgggttgtctgttcatctatttataggcacatggcgtagcctgtgtgaaattacattcatgccctttatgntcactattgacttaagaacaatctgttcgggactggatagcctcttcctccttaagtcgggtcctttttctgctactaagccgaagctcccttgtgcgcagcttcggcgctggttcagccttcgttctgaccctgctctccatattgtgtacagcttcatcctgagtccgaaggttcctctacatatattatgcttgcgaaacattgttaatcatgttnttaaggaccttcggaagacgaatgccctcaacanggggatatcaaaatagcttatgtatacaccaagaaccaattagccgatatctttaccaagccactagatgagaaaacctt

SEQ ID NO: 50153 - DNA, 334 bp, Zea mays
  unsure (1)..(334): unsure at all n locations
cacgaccgggtcaatataacgtgttctgtgggttataactatcaattntatgctcttcggcgcacgctcatctggagtggccgaagcagtagttttggcacaagctctagttttcctctttttttccccgcctcgcagcgggtagcagtagtcggggtgaacaaaaccaatggcatcaaaaactctgttcaatctcttttttccccgacccccgaaagatgtggataangcaatatcctctgctcttgaatatgacccaagcaggtcatcacttgtagcttgatacatattaaccagacgtcaattgggtcatcaaatatatctccatatctga

SEQ ID NO: 50154 - DNA, 360 bp, Zea mays
  unsure (1)..(360): unsure at all n locations
agctntcgtaatctatgacgaagacatatattttattgttgtgttacacaacattacaagaatatgtaactatagttctttattacttcggcacacataaagcataatgggatataagataaaacgtcttcagaagtatgatattctgcagtatatgcgcttctattcttgtacaccgatggtgactgtactaactttggactcctacctgcaatctcgctgctgttgggggtgctggcgcccctatgactaatggcttatggtatatgtatgtggaaatagtggtggaaattgaatcttcggccatcaatcttgctaatgacttgcccaaacaacaacaactgcacgttgattcccacc

SEQ ID NO: 50155 - DNA, 493 bp, Zea mays
tagcatgttagcttcatatgggacaaatgttcacttgatctaataaaaaatgaaagaaaatgagatttgagagtcgttctacatataaaaaacagtaattcgaacaagtaacggatgaaaagctaaccgaagcattgtgatgaccagtcaccagcgcaataaatcccatggcagtggcttgatgttctggaagagataataaagtctaccaaaaggaatgaaacatgtcaatcaacaaggatcatagagtgcaacatggcattcaagctgaactgtagcttaaatgtgtttatttggcacgaagatatgcattaaaacatgaacatccaaataagtactatttctgcgagattcagactcacccgatgtatagtgaaaagagactgcaccatgtccgatgacttagtgcctatcgctatgctgatctgcataaccaaattctgcgatcaaaattcacacagccatgacacctcgaatgatatttacagatgat

SEQ ID NO: 50156 - DNA, 286 bp, Zea mays
  unsure (1)..(286): unsure at all n locations
tgaatttactgttatatccagctagtccaacgaaacttcagacttgatgtacagtggttgggcggtttcactccaatatatccttgactctgctgggatccaccgcaatccccttggcagataatacatgtcccagaaattggatttctttcagccagaatgcgcacttactgaatttagcatataactgtngatctcttaagcgcgttaacacgatccgtaaatgccaagcatgctcctcttcattcttggcatagtacaacagatgatattcgtaaccactacg

SEQ ID NO: 50157 - DNA, 375 bp, Zea mays
ctaatcggagtcactatgcgcaccaactcttgtctaacacacatgtatatgccatatttggaaaacagtatccaaatatatttcgtctatgcatcatatacttaatgcctattgaaaacatgttgtttggacgtaccgtgacacatcctatgatgaccatattacgtaatgatcactattatcttcctataatgaccatattacataataatcactactatctttctacggcacactataattttcatgagcgcgctagcgcgctattggcttatttgataaagcaacataaagtttaaaaacattaccgcatgccccataatcagaaacaggacaccggaacgtctttgactaacaggaactgcattttgttat

SEQ ID NO: 50158 - DNA, 333 bp, Zea mays
agaacataaatcacgaggtctgaaagggataaatacatcttatacgaattacattgtatctacttagcatattgagtcattgaatacaataatacctttgccttggcaaagggttgaattccacaagatgcgattgcaataacttgaatgcgtgaacagtaacggaatactgttcactatttataggcacaggacgcaacctgtgaggaattacaagtatgccccttataaaagcttacaacattgacttatacctttatggactaaaaggtcattctatctataagtcggtatgcaataccgaagcttcagaagaggatcttccgcatttta

SEQ ID NO: 50159 - DNA, 437 bp, Zea mays
  unsure (1)..(437): unsure at all n locations
ttacggacctataaaactcagcttgtgaggttcttcatccncacatgtgctaaacggcgatgtcacagccagcccatgctagtcttagcaattaagcatgcatctagaccgacctcctcttttgcaaagtcaactaaataaagtttgccgtctagtacacccttaaaagctaatgaaccatcacttcttctaaagacagacacatctacatttgtgaataaacagttatatcccatattacagagttgactcacagacaacaagttatatccaagcgactcaactaagaacacattagaaatagagtgctcggatgaaatagcaatttttcctaaccctttcaccttgccttggttcccatcaccgaatattattgaatcttgggggatccttgtcttgacgtaggaagagaacatnctcttttccccatcatatgg

SEQ ID NO: 50160 - DNA, 454 bp, Zea mays
  unsure (1)..(454): unsure at all n locations
cgggatcctctgagtcacctgaagcttgcagcttcaaagggagaacacgtgatatgtctaactaatgtgcatttcgaaaaagatagaccttgtgcagctctgtcagcaggctaacaggtgggaagctctcatcacaccaaaaatgtgatgaccacatcaagacctttggagatgcnttacatggacctcttcggacccgtcgcctatctaagtataggaggaagcaagtatggtcttgttatagtcgatgatttttcccgcttcacttgggtattctttatgcaggataagtctgaaacccataggacactcaagagcttcctaatgagagctcataatgagtttgagctcaaggcgaagaatataacgagcgacaacgggtcctagttcaagaccttctagtggggagttccttgggaggagggatcatcacgagtttccgctcctaccacac

SEQ ID NO: 50161 - DNA, 346 bp, Zea mays
  unsure (1)..(346): unsure at all n locations
ttgttggttanagaccacatacaatctatgattatgagcctttttatgtactcttcaaagcagatgattcaacaaagcaaatatgccgatcaagcctacatatcaaatgacacatctcagacctagcgacatcagcattgtactccacaatttaacactaccatcaggattaaactatagcagagactgggcaaaggcagttctgccatgctttagtttgcatgcatttctatgatgattaagaagaccagtgccgccagatgatttagcaaacaatacacacttgtcaactttgcacttagccttgcaccttacgctcacaccatcaacaaccttatgtatctta

SEQ ID NO: 50162 - DNA, 470 bp, Zea mays
  unsure (1)..(470): unsure at all n locations
cagcttctaaagggacactacacgactgttcatctacaacgacctacagttgggtgctaaaacggcctttaacgacctacaggtggtcgctaaaaacctttaacgacccataaggatggtcgctgtaagtgccgtcgctaaaggctttaacgaccgacatctttttatcgaccgaccgtccgttgctaatattgtatatttagcgaccaatggtgggttgttgtactatagatttagcaaccaacccgtaagtgtcatactatacatttagcaaccaacagaaagtcaccctttntacagtgtttattaataataatatacatttaattaagcaccataaatcacagagttttatacaccaatcataaagacatacacacgtaataagtataccagtcatagatccatcacataaacacaaaagcaccacaattattatattcacaaagcatcacaattataatatcatt

SEQ ID NO: 50163 - DNA, 450 bp, Zea mays
  unsure (1)..(450): unsure at all n locations
tatatagtctctaacaacactcacggcgttattgatgaatcatatgatgttgaatacgatgaaacaaatgggtctcaagatgagagtgataatctctatgatgttgggggaactcatttgataaatgcactgaaaataatggccattggtgaaataaaacccaacgaagatgatgatgaaaatagcgtggttgtcatttcttcatcctcaactctaaatgaggaagatcacccaagcccacaacataatgaaaccatggatactcatgatcaaagtacttcaagactttcggttcctcctaatgcttcaactagcaattatcaaacgggatcaagaattcatcattccattgtgaaggatcacccggctgatcaaattgtgggtgatattagtaanggtgttcaaactcgctctcgcatagctttcgtttgtgaacatttctcttttgta

SEQ ID NO: 50164 - DNA, 344 bp, Zea mays
  unsure (1)..(344): unsure at all n locations
ctttgtttcttgctcccaagcaaattcctttatgaccctacaacttgttgcttattcaaacattcgtcttctattgagcgacaggggttagcacatggtgatatattatccaaatgtgcacttgtgcaagaatgaggctcacatgactntaagtttgtaattaccacctcatgagcaacgtcaagcatgatatgtctattcaagagattatcatgattacaagacaataaatcatattttttagtttgagcaagtttatcatgacttaacaattctacttggttctcaagcactggcattttcattttatagtgagcaacacaagatagagcatcatcagtatt

SEQ ID NO: 50165 - DNA, 381 bp, Zea mays
  unsure (1)..(381): unsure at all n locations
tcggaatatcacgacctcattttcctcgggagtcatacaattcttctctccttcgtcagccctcacaacagacaagtcccgaaaatatctccctctcatattgataagatgattttccttaatactggacttaccaaaaactgcatggcttggccgccagggtcgatcttcggaatcttcaccaccactatccacatcataactttcactgtcgccagtatcttcagataaatcctccaaaatctccctggtaatcttctccgtattagtctttgacattgattcaagaaagcccaagtgcatctcctcagaaaggcttagcttcgaagcaccagcaatcttcttgttctcaggcatcttcgcanatgctgaaaaacacac

SEQ ID NO: 50166 - DNA, 363 bp, Zea mays
gcttaacaaatcttagtgcacaagagctttataatgagtgaatgggagcagttggccagagagcgtatcaaatgagtttgcggtatggccgtatttatatgccaagtgcgttgaaaattgaaagaccccgcttgtcagtgaaagttgctattctagcaaaggaaaggtgttttttcggaccttcggcgtaaagccttcgtccatgtcgcaatctaaatttattattttaaacaaattaatattgcgaggggctactgttggggaccttcggcatccgaaggtcctcaaaaacaggatttaacagtatttctggagtattatgtgtgaacaggtatcttcggattcaagtcagcatcacagtag

SEQ ID NO: 50167 - DNA, 388 bp, Zea mays
  unsure (1)..(388): unsure at all n locations
gtcggacgtcctcctgananctcactgctgatgggtctgtttgctcccttctggctgctggcctcgtgaatatgcatgttgtagtggtggcagacgtggaggctatggccaagatgcatgtggttggctagccgaagcaacagaagctgcaggatggttagccacatactctggtatgtagggtgagtgatatgaagaagtgtgcttgacctgcttcggctggttctgctgagctgcggcttctgctatttccttttgtttctgaatggtgacatggcacatccttgtagtatggcccttgtcctcaccacagaataagccaataaattgcctatgttgatccccaaacctttctccgaagcccctggcgcctctgcctcttggagct

SEQ ID NO: 50168 - DNA, 418 bp, Zea mays
  unsure (1)..(418): unsure at all n locations
agcnttgagaaggctcactaaatatatatatttgtggcaaacaagtcagtaacagatagcaatgatgaataagtgttccaagtattcgtcctcgttgctggcctagaaaatctattagaacaattataccaatgcacaagaaaggaggtaacaaggatttaggtacaacaaagaaacaagttgggagcaaaacgatcacaaaggtgcatagatcaatggtgttcatagactagtttaagcaaataagtcacgcatctaaagcacaagggacacaatggatgtgaccacttctgtattttcttttatatnnttccttttgtttgggcggctcttttcttgcactttccttttatngttcttttttcccacagaagtgtcgcanaaacaagaaacaacacacgagtattcaaaacaattc

SEQ ID NO: 50169 - DNA, 279 bp, Zea mays
  unsure (1)..(279): unsure at all n locations
ttttgagacagacacgatntgtatcgcatgccatgcacggaagcaagttggtgctcatcatccacacaagaacatcatgatgactgacaggccactggagctcctacacatggatctattcggcccgatagcttacataagcatcggcgggagtaagtaccgtctagttattgtggatgattattctcgcttcacttgggtaattcttttgcaggaaaaatctcacacccacaagaccttanagggatacttgagacgagctcataacgagttcggttt

SEQ ID NO: 50170 - DNA, 456 bp, Zea mays
  unsure (1)..(456): unsure at all n locations
tggacgtgaanagtgcctttctcaatggaccattcaagtgttatangtctacgttgagcaacctcccggctttgaagatagtgagtaccctaaccatgtttataaactctctaaggcgctttatgggctcaggccagccccaagaccatggtatgaatgccttagagatttccttatcactaatgaattcaaagtcggaaaggccgatcctacactctntaccaaaacacttgaaaatgatttgtttgtatgccaaatttatgttgatgatattatatttgggtctactaacgaatctacatgtgaagagtttagtaggatcatgacaaagaaattcgagatgtcaatgatgggggagttgaagtacttcttgngaattcaagtaaagcaacttcaagaagggcaccttctaagccaaacgaagtatactcaagatattctaagcaagtttgggat

SEQ ID NO: 50171 - DNA, 360 bp, Zea mays
  unsure (1)..(360): unsure at all n locations
cacttgcattgcatgtttaaactacttgtatttttctatggcttgtctcacctagntgagataaccgcccacaaagcgagtgaaatagctttactcgggtcaaacttgacaagtcttagttttaagcttttaacacttagattcttatcttttatgcaattggtggttcttgaaatatgcacgaggtactgcacttaaggggagtattcaacatttcaaatacttcttgaaacccctattgcaagccaaaatgcgaattcaccatttgcctattttctgtaaaattatctgcctatggcaaaaattctgaaaagtattgagggtgccaatcctatcccaacagtgtattttgtgcgatat

SEQ ID NO: 50172 - DNA, 442 bp, Zea mays
  unsure (1)..(442): unsure at all n locations
tctaagggagaacacgtgatatggttgactaacgtgcattttttatttatatataccttgtgcagcttgtcaagcatgtgaacaagcgggaggagcgcatcacagcaagaatgtgatgaccacttctagacccctggagctgctgcatatggaccttttcggacctgtcgcctatctgagcataggagggagtaagtatggtctacttattgttgatgacatttcccgcttcacttgggtgttctttttgcaggataagtctgaaacccaagggaccctcaagcgcttcctcaagagagctcanaatgagtttgagctcaaggtgaagaagataatgagcgacaacggatccgagttcaagaaccttcaagtggaggagtttcttgaggaggaatggatcaagcacgagttctccgctccctacacaccacaacaaaatgct

SEQ ID NO: 50173 - DNA, 340 bp, Zea mays
tgacgtgattgtttctggccgaagagaggagtaccaggtttgtgcaacatttttgacagccatgactaaagacttctccatgactgcagtattgccaccatacgaagatatggttgcttcgtagctcatcaaaaactgcttcgggtctgagtgtccgttgtacatgggaagctggggtggcttgtaaaacaggggccaaggtgtagcctgcagttctgctgacagaggagaagcatcatcaaaagcaaaatttccatgatggaaatcctcataccagtcatcctcgttgaagaagccatcttgatgaagctctttgtgctgaagcctttggttctgctca

SEQ ID NO: 50174 - DNA, 445 bp, Zea mays
tgaagtacgggtgacaactgatgtatcttgatatcacgctaccctgaattctatctatccaaactatttaatcggagtcgagatccgatataaatatttagaaatatcatggatacgaatatactgaaccgatattctattcggacaaataagtgacagataccaatattatttggttggaatcatacggagattggatacttgtcggataatgtgcatgaattgatcataggttactataattcagttcgcacataaagaatgcactcatcaactggaaacgggagccgagcttggcaaatattgctgacacattctgttgcgaccacagaaccttggctagttcatctgatgtgccatgtgcatcgctgactgcaagtcctcttgggactgggttctcaatatgcatctgcttggttgcgcatgagagacacaaatgcacacc

SEQ ID NO: 50175 - DNA, 366 bp, Zea mays
  unsure (1)..(366): unsure at all n locations
tctaaagggagaacacattntatgattaacaaaggtgcatttttgttattacaggattngnagcgcatgccacgcgggaaagcaagttggaacccatcatccacacaagaacatcatgacgaccgacagaccgcttgagctactccacatggatctattctgcccgattgcttacataagcatcggcgggagtaagtattgtcctgtaataagggatgattattctcgcttcacttgggtattctttttacaggagaaatctcanacccaagagaccttaaacggattcttgagacgggctcaaaatgaggtcaactctaggatccacaaaattagaagcgacaacgggacggagttcaagaattc

SEQ ID NO: 50176 - DNA, 323 bp, Zea mays
ttcctattggttgactaaccatgcaaggaagaacaactcagaggttgaagtcaagcaaacattgaagaaatgctcttgtaatgatgggttaaagaaagttgaacccaagtacaaatccttgaagcccaacaatggggaaaagggacttgggtacaactaatacaaggtgaaccctagcatagagcacaaggggtggagatccctcaagttcataaaaggaactaccctatattattgaagggaaatgacttaatcatttctataatcaattggaggtgacgtcaacacaaccactggactactagtttgatagaatctatatc

SEQ ID NO: 50177 - DNA, 359 bp, Zea mays
tcggactcctccctaaagtcacgtgggtggtggttgtgtttgtgcccttctggctgctggcttcgggaataagaaagttgcagtggtggtggcggtggaagctgaggccaagaagcctatgaatggcttgccgaagcaacagaggctgcaggttgattgcccacgtattctggtatgtaaggagagtggcatgaagcagtgtgtaagacctgcttcggctgattctgccgagcttctgctttggcaatctccttttgcttcagaatagtaatttggcacgttcttgtagtgtggcccttgtcctcaccacagaatagacaataaatttttctaggctgatccccatatcttcctccaaa

SEQ ID NO: 50178 - DNA, 309 bp, Zea mays
  unsure (1)..(309): unsure at all n locations
cacaggcccaacaagcctgtagaccttgatggtgttgtattatggctccacaccactttggttaactgatctggccactntccccttggatgactgaagatagacttcattattcctgtcattataataccattggctctttcaacgagttcatatgactccggatgtctgactgatgcaaaatggatcttcctaccaatttgatcacagaaattcctaaaagctttggagtcaaactgtgttccttatccacagtgatagccttggtaccccgaaacgacaacaatattctgcagaataactttgacg

SEQ ID NO: 50179 - DNA, 414 bp, Zea mays
  unsure (1)..(414): unsure at all n locations
tatgaacccgtgaatcaaagactaggcaaactagttagttcttatggttgtgagggtcatcaagcaccaaaatataagaaatggtttaagtccatttccatttcataatgtcctattaatagtctcggcctgtccattggcctgagcataatacaaagatgaattgagcaatntaattctatataattcagcaaactcatgtaccttctttgacaaaaaaagaagcccctggtctgtagtcaaagtctggggaataccgaatctatgaataatatgtttagttacaaactcaattatcctccagtgtgtcatgttcttcagagcaacgacttcagtccatttggtaaagtagttagtggcaacttacacgaaccgatgccctttngatgatgaatgatgaatctctcctataaa

SEQ ID NO: 50180 - DNA, 291 bp, Zea mays
acagcaggcgtactaagatctctacttgcaggcactcaacctcaaaccaaagatacaacccagggcacggctccttcgtctccgcgacgatacgggcaaccgcgcggtgaccgacagcccggcacatcgccaccgcacctctgggccccccgccttctttctcttcctcagcgcgccgtgcgccctcttcttgtcaaggcgtccgacttggcccttatcccccgatacgcatcgaaggtgaccgccgcgaggctctatctatcgcacctacaaatgtgtcaacgccagcac

SEQ ID NO: 50181 - DNA, 370 bp, Zea mays
actcagcttctcagacatgacaagctgagggtgttatctttattgggttaagtgtggggtgggaatagtggaggggaccaatgtggcacttgtttttgatgctcatggcatcaaaacaagacaacacagttagaatatgaaccttcgtcacatgtagtcttgtcaagtacaaatgaggcaaattctcaaggaaaggaacaaaaaattaatgacaggtatgaaatgagataactattttatgctacattatatctttcttcttaaaaagtacaacaacttggttttgacaaaactcaaactcaagtagcaacaactagcctcaagcattataggatgtactatttagaaggaacttggaataaactcccaa

SEQ ID NO: 50182 - DNA, 413 bp, Zea mays
  unsure (1)..(413): unsure at all n locations
tcgggctgactaggtcgctgtgccgcatggagcctttgtttatattcttacaagctgnggcagaatttcgggtggtagccgagcagttcagcacaagaaatctattccaagaatatctggcctataaggtgtccccaacgttgagtgaatggaacatgctgaagctgaccgggacaaatgagaagaatgaacttgtgcgactaccttataagttcaaatttgagaaacagttcaaagggccatgtcaagaatggttagaaatgatagaaactatgtgcaacgaatctttgggaaattacactaaaaagaagatcaactgatgactgcagccttcggcactctaccgaagtgaaggttgaattgngtgatggatgccctgaaatttgaatattctgactatgagcgattgaaca

SEQ ID NO: 50183 - DNA, 409 bp, Zea mays
  unsure (1)..(409): unsure at all n locations
agcttctagcagtgtgcgcatttggatgcgcatcgtgactgcatttattttgtgtgacgggatccgcgattcgctgaanatgtaaataatgcgcatgtttggttggcgcaatcacgggcgccggctcgtggtggcctcgccggctagggatgctctctccccacatcttcacgcggtatctaaacgttttggtaaccaatcaccggtttacatgcgatcaacgcacaacatgaacttgggtggggcgatcaggacaaccaaacacacctaatgtgatgcggtcctgcaaaatgtgcatctgcacgagttgctgggaataactaactttaggatgcaagaaatctagcttgtaccttatctttttagggatcctatattatatatgagcatctctaatagtttaaaaaaa

SEQ ID NO: 50184 - DNA, 385 bp, Zea mays
  unsure (1)..(385): unsure at all n locations
tcctcaacaattcaacacacagtggagtagggtattactctccggtggcccggaccactctaaatcctcgcgtgttcatgtgtttgatgatcgcttagcaagacaggcaaaacgcttaagccccctcctcatcttatgatttatggcgagtgcactctgccacccggccagagaattccctctccaaaatttggcgcgccacgtanggggctaggcttgaagtttttgcttgttttctcactcagcatgatggtgcaaatcgttgagcaccgcgccaagacttctgtggatttcgtggtggaggaagaagctgcttcttccacgccatatgttcccgaccaccctgtgtcggcactgctggtgtgcacgctgcacggcagcatac

SEQ ID NO: 50185 - DNA, 429 bp, Zea mays
  unsure (1)..(429): unsure at all n locations
tccatgtcttcattgttgtagcagctctctatattaccatatacacagaaggcaagcaaatcagtgagtgccatgctntgcaagactccagaggaagttgtagcagagagacataaaaatagaacttctcagaccactcttgagcattgcacaaagaaaggaacagaagcaaagcaaattgttgacgaccatgtagctgattntctatatgagaacaagattccattgaatgtcgtcaattcaagaagctggcagattatgatggagtccattggtcagtatggtcctggatatcgtggcccatcatactatgaggcaagggtaccttggcttgaaagggcagtgaagagaacatcaacattgagagctaagcacgaagaggcttggagggaatatggtgctaattatgtagatgggtgactgacatac

SEQ ID NO: 50186 - DNA, 375 bp, Zea mays
atgaagattcttcatcccaacatgggatagtcggcggtgccagagccaacccatgtgagtcttagctattaagcaagtgtcgagttcagctctatcaaaaattaccaagtatagctgaccctctaacactcccttaaatgctattgaatcatcacttcttctaaagacagtgacacctacatcagtgaaaagacagttgtaacccattttgcataattgagatacagaaagcaaattgtaatctaatgaatctacaagaaaaacattggaaatagaatggtcaggtgatatagcaattttacccaatcctttgaccgaaccttgatttccatccccgaatgtgatagctcgtcgaggatcttggttttctcatat

SEQ ID NO: 50187 - DNA, 375 bp, Zea mays
  unsure (1)..(375): unsure at all n locations
ntctgaaagctgggctacgatttccctttagtatcttcgtcgtggaggtgttgaaaatcttcgaagtctatcttcatcaacttactcccgaggcaattataaggctaaatatcttcgtgtgggcccgagaagccaaggtctgaagcctgatgcaagaagcttctgtaatatacacgaattattatatgaaacaaagccttggggcaaagaacagtaccataataactttggctgctacagtttcgtctctcggtccggggcaagctgtcccgtaccaacctttcggaagagatggcccggngattggatgacagaatggttttatgtgaaaaatgacctatcagcacgagaagatatcaaaggtataattatgcg

SEQ ID NO: 50188 - DNA, 451 bp, Zea mays
gcttgagtcagttcttctacagagaattattcgttactcaagaaccgacaagggtatgaaacacattcatgagaaaatagaagccgacaaagtcgattgcttcagaaaagatgaccaaggaataatgtggttcaatgatcgcatagttgtgcctaaagatgctgaagtccgccaacaaattttagatgaagctcatcttagtcgatattccattcatcccggaagtactaagatgtatcaagacttaaagcaacactattggtggacaaaaatgaagattgagatcgcacactatgtggcataatgtgacacctgcagacgtgtcaaagcaatacatatgaagactgctgcaccattacaatccttgcccatcccaacttggaaatgggaggatattagtatggacttcattgtgggattgctccaaacatccaaaggttttgactctatc

SEQ ID NO: 50189 - DNA, 361 bp, Zea mays
  unsure (1)..(361): unsure at all n locations
gcttcggcatggcccattctttcatagttggaaatactntgaaagccaaaaattcctgcactaagttcctagtgccaatgtgctctgcgataatcctaaattcagccagtgcagtttgggttggaccctctagtgtcatattacattggggtctggtctctccgaagatcagctctagcgggctctggaccaacttctccttgtcatcgtcaactttgacgtaaaaccattccgatttccagcttgccggccacttgcttcggtagctgatcacaggaaattttgtagtcttccggtaggcaaaaatgtaacagccgaagttttcatgtaatccatcttttctggcctttggttggaatgc

SEQ ID NO: 50190 - DNA, 349 bp, Zea mays
  unsure (1)..(349): unsure at all n locations
gaccggcccctatatattttgtatctgaggttctcagtttatcaaagaaaaattacacagagttggagaaggtactgtatgctgtcttcatggactgctacacgcaccagacattgtgatagaaccacacttgtcctatcaagagtaccctatcaaggtattaaatcagaaggagaggtcaacttcggcaagatcagtcaggatgtataaggttcaatggagtcaccattcaccagaagaagctacatgggagactgaggattntctacgctctcgctttcccgactttctgcccaaaggagtcggtacgtaacctcaaaaccccaccaccacctgccctttgattcaa

SEQ ID NO: 50191 - DNA, 335 bp, Zea mays
  unsure (1)..(335): unsure at all n locations
tagntatggttatgttgtctttttttgaagtgcctaagggtgtactttataaaatagactactatcgctctaggttcttctggcaaggagatcatcataaaaaaaagtatagacttgcatgttgggatattctttgtcaacctaaagaccaaggaggtctaggtattcagaacataaaggttcaaaataagtgtttgcttggtaaatggttatttaaattgattaatgaggacggtctatggcagaatntacttangaacaaatacctcaaatcttgtaccttgtcaaaggtaggtagaaaacctggtgactctcattnttggtctgggctactg

SEQ ID NO: 50192 - DNA, 374 bp, Zea mays
  unsure (1)..(374): unsure at all n locations
agcttcaatnctatgtctcttagctctggtgtctccttcatgtgacattccaagaatactccacatgtcacgggcatcttctcttccttgaatttccggtattcttccggacaaatactttcttttattatgctcaccgcttgagcattgcggagaacctcttgcatcattttcgaagtcatctcttctgcttgggcgggcttgtacatacctatattgacaatctcccaaagactaggatgcacaccgattaaatgtgacttcatcttatcggcccactcgtcatagttcaacacgctctgaggtggtaactttccaagcggggcggaagagaattcggggattaaatctctagaaaatcaaattgaacttta

SEQ ID NO: 50193 - DNA, 298 bp, Zea mays
cgctcgtacgccatgcagcgtcgcgcccatgataggcgccgcgcacaggagcgcgcatatcgccaggagcgcgatctgggagggcgcgcatatcgccatgagcgcgatctgggagatccgcaggagcatatggaaagtagtggctatgaaggaaaatacgagaatggaaagaaggaaggaaaggaggaattgattagtgattgattagtgttactattgttaagcttgcctaacataaaggagcgattggcttcaggacagcaggccgatggctatatatgcggcacagggagacagg

SEQ ID NO: 50194 - DNA, 405 bp, Zea mays
  unsure (1)..(405): unsure at all n locations
tgtgaagattcttcatcccaacatgtgctagtcggcgatgttctattcttcccatgttagncttagcaattaagcatgtgtcgaggtcagctctatcaaaatctactaagtatagctgaccctctaacacacccttaaatgctattgaatcatcacttcttctaaagacagtgacacctacatcagtaaagagaacagtgtagccactttgcataattgagatacagaaagcaagttgttatctaaagaatctacaagaaaaacattggaaatagaatggtcaggagatatatgctatttaccaagacctttgaccaacccttgattttcatccccgaatgtgatagctcgttggggatcttggntnttctcgtacgaggagaacatcttcttctcccctgtcat

SEQ ID NO: 50195 - DNA, 341 bp, Zea mays
  unsure (1)..(341): unsure at all n locations
tgtctaagatactacaaaacaaggtaggaaagaacaagatgntctatctttttctgtgtaggaaaataagagcttattaaatacatatcaatcgcataagtgtttaaaatgttagttgtaagtaggacgaagcaaatgaagtccaagatttcatcttttgcagataagattaaaatgagttacaaagatggcctcagatcctgccctatagtctggatagattaaaatgagtctcttataatgatgaaaataaatggtgttacacactactaaaggagattcaagatctaacaactaacttcaattacgatagcatcgaagttgagtatgaagataaccca

SEQ ID NO: 50196 - DNA, 289 bp, Zea mays
cctcacatgtctacagatcacaatgtgttccatgtatctcagctgctgaaatgtgttcgtctacccacatgaacgctaccggaaccagacattgagactaaaccagacttgtcctatgcagaaaccctctcacaagtttagatgaagctgaatgtatctattgccattcagccaggatgactaggatgatggagactcattcacctataggggcaagaagacagtgaatccacactatgggaccgacttctgcccaagagcgacgtacccaaacacccccccctgtctt

SEQ ID NO: 50197 - DNA, 436 bp, Zea mays
  unsure (1)..(436): unsure at all n locations
ntgaatagtctggcatcgaactgagttcattatatcattgatagccttcggcacaccgaagcgacaaacgatgttttatcagaagaactcttgtactatggccgaagttattgttgccaaaggcttcgcttcaatccatttggaaaagtattccactgccaccacaacatatttcaagttgccctgtgccggtgggagtggtcctaatagatccaaaccccatctctgcagtggccaagttggttgtattagttgagtcaaagacgaaggttgcttctcatctctggcgcatctttgacacatttcacatttctgtaccaattcttatgcatccgaagctgctttcggtcagtagaaaccttgtctgaaaactttccctagcagaggtctagacccaatgtgggctccgcatattcctgcatgtatctcattcatt

SEQ ID NO: 50198 - DNA, 442 bp, Zea mays
  unsure (1)..(442): unsure at all n locations
agctttaagtaatatttagaaacctcgggtattactnggtatgctttggaccatgtttggtacttagaacccacaactctagactgatgccgctgcagccttgatggccaccacgaagcttcggcactattttcaagcttacaacataattgctccttcttcacaacctctgaaggatattatgaggaaccgagaagctactggaaggattggaaaatgggctgcagacctcaatgaatcttgtattgaatatgttcatagatcttcgattcagtcccaggcgttagcagacttcattgctgactggacgcaaggggctcatgaggaagaaacaaataaagacgccgaagcatggatagtgctttgcgatgggtcttggggaaccttcagagcgggagccgctgctgtgttggttcaccttccaaagtaaaacttggtatgc

SEQ ID NO: 50199 - DNA, 470 bp, Zea mays
  unsure (1)..(470): unsure at all n locations
ntacgctgtgcattcanggcatgtaaccaggccacttgatggaatgcacgacatgttcacaggttggttggtcataagggagctcttgagtttgatccagacatttatggtgtcagtgaggaaggtgatcctaccttttcagcgaagggggatgaagatgttgatattgacgactcacaccaagcagtcttgcggcaagtacggtatctgagatcagaagttctctcgctagaagggaaggtggctaagatgcacccagaattgttagggtcactgtccactgagttgtctgaggttntgcacacgattangaagtttaatttggaaggcaatgtctaccaacagcagatattgatggtaggcaatgaagaagtcangggatggnggtcaggggatgtatctcaccaattagaccagcatgatcgaccattctgcaaggatgatgagatgcttgatgatgatgatactga

SEQ ID NO: 50200 - DNA, 339 bp, Zea mays
gggagaacacgtgatatgtttgtctaacgtacaattcgaaaaagatagaccttgtgcagcttgtcaagcaggtaaacaagtgggaggagcgcatcacagcaagaatgtgatgaccacttcaagacccctagagctgctgcatatggacctcttctgacccgtcgcctatctgagcatatgaggaagtaagtatggtctagttattggtgatgaccttttccgcttcacttgggtattctttttacaggataagtctgaaacccaagggaccctcaagcacttcctcaggagagctcaaaatgacgttgagctcaaggtgaagaagataaggagcgacaa

SEQ ID NO: 50201 - DNA, 154 bp, Zea mays
agatagaccctgtgcagcctgtctagcatgttaacaaatgggaggagcgcatcacaacaagaatgtgatgaccacatcaagacccctggagctgctgcatatggacctcttctgacccgtcgcctatctgagtatatgaggaagtaagtatggg

SEQ ID NO: 50202 - DNA, 256 bp, Zea mays
gaacgtgatgacatcgtccggccaccgagacgctttattccagcgcaagttacttatcgcagaaagggaccagtgaggtatccgtatcccggaggcgtaagagtccctcgggtcggtcaagcttggctgcttacgtgtacctcgtccgttccaggatcccgctttccaagtagtcaagaagcacggaagaaatcctgctaaaaagaggtcctttgtccaggaaaaaattccacgcagaggggggtctccccccttt

SEQ ID NO: 50203 - DNA, 325 bp, Zea mays
tcgaagcccatgctcttatgtgatgacatagcatagcagacggtgctgttgggctctcaattattcgaagaacacgagaaaaccttgattaaggttttgttccacaacaaaagatgtatttgcatggtcagccaatgatctttgcggggttaacacggatgttattgaacactcgctcaatgttgacccatccttcaaacccacaaagcagaagcttctgaaaatgtctgatgacaaggccgaatgtgctcgtaatgaaatcaaaagactcctctatgcacgagttatcagagaagtaaagtacccacaatggctagctaatact

SEQ ID NO: 50204 - DNA, 125 bp, Zea mays
atgggtttataccaccccgagtctgcccactaacagggaaacacgctcccgcgcgctcgtgaagtacatattgcgcaaaggaccttgtgcattcatataaccgagaaagaaccctgcgcactatt

SEQ ID NO: 50205 - DNA, 364 bp, Zea mays
  unsure (1)..(364): unsure at all n locations
tatccgacagaaggaatacaacctggcgagtctacgtcctgctacaatcgtacctgttgtaagtaaacccgacgacatccaagctcttcgatcttacgtagaagaacaacgagaacagatgcaacaaatcttacgggtgtacaagaggattatatgaggctagcacgtgcatttgataaatctactattactaattntccatcacactatgccacactaaagaagacctacaggacccatcggctacaaatgggcatgcctaatcccagcccctttatgggataccgatgaactcctataacagccaaccacatcgtcgaccaactatatgggaacaacccatgcccctgcacacngtcggact

SEQ ID NO: 50206 - DNA, 402 bp, Zea mays
  unsure (1)..(402): unsure at all n locations
gcttcgtggcgtgtagcagggcaatagctcacggaggggtaacttgccatctacacgggtaccatgatgtgtagtctcatgccgtatgaacttcactatagactccaaaaaccctaatttcctcgagatccatgaaggaaagttatattcaagacattagataataaacttttattatctttgcattttcatgagcattcatgattatatatggctatatctagaggacgaggaggaaatagaagttgaagaagcaaggattacaccaccacctgaagaacctcaggcaggaaactacttttactntgatatctatggagcagagcctgattcacctatcacacaagacaaagcccagtgcatttgccaccttcttgctattntaaaatctttctcacttac

SEQ ID NO: 50207 - DNA, 416 bp, Zea mays
  unsure (1)..(416): unsure at all n locations
agctggtgaagattgttcatcccaacatgatcaagtcagtgatgccagagcccgcctatattagtcttagcaattaggcaagtgtctagttcaacattattatcagtgaaatcaactaaatatagctgaccatctaacactcctttaaaagctagtgaatcatcatttgttctaaagacagtaacatcaacatcagtaaataaacagttgtaacccattttgcataattgagacacagaaagcaagttgtaacctagagattctacaagaaatacattagagatggaatggtcaggtgatatagcaattntacccaatcctttgacgcaaaccttgatttcatccccgaatgtgatntctttntggggatcatcattnttctcatatgaggagaacattcttttcttccatatcat

SEQ ID NO: 50208 - DNA, 426 bp, Zea mays
ctattcctgatgctgaattccagcgaatggtctatatactaacatccatttcgagaagactgattgcatagtttacctgaatgaacttcagcacatggagaaactttggtagttaagctattaaaatgaacggcttaatgagtctatataagttcatgtatatatattgtaaaatgatggaaaaacaaaaaaaaaatgtgtcctcttggctatctagggatatatcatctatgcaattcttacctagcctttcagacactgtctcactaactatcttcacaatgttgatcaccaaatgaacttgtgtatgcagcagaacaaagtgccggatacacttgcccagaagtggacatgaccggtcagtacaccctcaagagtgatgtctacagctttggaagtgtcatgcttgaactattgacaggacgt

SEQ ID NO: 50209 - DNA, 285 bp, Zea mays
cctggtgtggcgcaacaaaggaagccgacagccaccatagtgaccgccgctcggccacgttgccagccagtgggcacggcaggcagagccccgattcaacccaaaggatcttttaactctcccatcgatctttttgctcaccgagtagacgccatccttagccttgcgcgaatcatagcgctgagcgcggatcatggcgcacaacataccggcgacgagaaagatcttcttcagttgtctgttcactctgaatggcttcgttgctttgcttgacagaccaaattt

SEQ ID NO: 50210 - DNA, 389 bp, Zea mays
  unsure (1)..(389): unsure at all n locations
actcgaaggcagaagatactgcgttatctgcggccttcggaggccgaaagaagaaaagactcaaccgagtttttaattctattgggttcatgtaccctgactaccgctacccgctatgggggcgaaagagaaaagatgcaacttccgggaaagatgctgcttcagctgctccaagcgagcctgcgctgaagagaaaaaaggtgaaggttcttaaccgaccgcgcttcattgaaccgaccataatgcctgagtttgtcgatgagacctcttcggctgctgaagccaaagagcctacatctgcgcaaaaaattgacgagctgactacgacgccgaagattgaaaacattgaagagccgagagctgaagggacaaagacantcagaaattta

SEQ ID NO: 50211 - DNA, 393 bp, Zea mays
  unsure (1)..(393): unsure at all n locations
tcttgaaagatggactacgatttcccttaagcagntntgttgtggatatactgaagatatttgaaatctaccttcaccaacttacccccgaagcaatcataatgatgagcatctttgtgtgggccgtgagaagccaaggtttggaacctaatgcgaaaagtttctgcaacatacatgagttattgtacgagacaaaaccctatggtaaagaacagtatcacaacaattttggctgctacagcttcggctcccggtctgggtcaagctgccccgtgccaacctttctaaagaagtggcccggcgactggatgacggaatggttttacgtgaagaatgacttgaaatcacgagaagatattaaaagtatcattatgcgtcccatctggcaacgct

SEQ ID NO: 50212 - DNA, 477 bp, Zea mays
  unsure (1)..(477): unsure at all n locations
gacctgcngcattgcagcttcggcattactatgcagcatacaatattgttgtttcttcttttcagccgttgaaggatattatgagaaatagagaagctaccgcgcggattggaaaatgggctgcagagctcaatgaatattgcattgattatgtgcatagatcttcgatccagtctcaagcgttggcagattttatcgtcgattggacgccacgggctcaagatgaataaacaaatatagatgccgaagtatggacagtgttttgcgatgggtcttgtggaaccttctgagcatgagcacccgctgtgttggtctcaccatccaaagttaaaacttgttatgcggcaagactcgattntagttgtacaaacaatagtactgagtacgaagtcctgcttttggccttcggaattaaagcaatgggatcacaacggcatccttaaactgatcctaatcgtttcggtatatagacagagt

SEQ ID NO: 50213 - DNA, 444 bp, Zea mays
tctctccgggtcgatcctttctcatctgctctctacccctctctctattcttgtccgggtggaggtcggcgtcctcaacgccctctctctatctttcacatttggcgctcgagcgtcttggtcttccagcgggcgcggcggttctggaaccagacaacgacctgacgcggctgcagggcgaggtcgcacgcgatgaggtcgtcgcgcgcccgccggccactgccatggccagcttgtcctcgtcctcgtccatctcggcctcgtcgtcgggctccatcttccgcgccggcagggcctcttccaccgcgaacgtcagcttcttccctgcaataggcgtatgcagttagctagtaccgacgctcgaattccgcaggaaacccgtctttctgcagctttgtggcagcaagctaactgctaaccaaatgcaaaaatggaatggcatcg

SEQ ID NO: 50214 - DNA, 255 bp, Zea mays
ctaagaaactgtgacgcgcttagtttgtgagcatgcttcgaagaactctttcactaatagcagctgaacaagtaatggatcataatgtaaatttaaaaggaaatctcaactcaggaaattctctggtactacaggtacaaatgagcaattggctaaaactcctaagaatacatgccgaggctacactccattccactctaaataaacctaaaggccaatccatcctaaccgagctagctagatgcatcaacactt

SEQ ID NO: 50215 - DNA, 396 bp, Zea mays
tatgcaacatcgcttgagatggtgtggacatatccaacgattacctgtatatgcaccagtgcatatcggaataattaggcgtccccaaaatgtgaagagaggtagaggccgaccaacttttacgtggacagaggctgtgaagagagacctgaatgagtggaatattgataaagagctcgccgcacataagaaggggtggaagtgtgcaattcacgtgccagaaccctgattgagagtttcgcttttcctccttaatcgtgtgaccttttcttgtgtgcattttagatcttgctgggccttgtgggtggtatctcttttatgtgtttccccgcttcggtgctttcggctctcccttgcctttgttttccttttctggtctttggggggtgagctctg

SEQ ID NO: 50216 - DNA, 302 bp, Zea mays
atgaagctcatgaaatggttcatgaagaattaccaccccttccataatacttctaccaggaataaacagtgtttgaagtggaccaattggtttaatatccacataacagaacctattttgtagtatcttaataaaaacttttaaactcacatttagtaaacatgtaggtctatattattgaataattgttgcatccttacatttacggagcaagataattgtgccaaaatttatactatatagagggaactctcttgtatggtactcaaggaaaagggacatcagatcatcttttataatcg

SEQ ID NO: 50217 - DNA, 485 bp, Zea mays
  unsure (1)..(485): unsure at all n locations
taactggtagaccggtggctttgaccttcagacgctcatgaccaatcggtacacttattgaggatcccttggaccggtgggttaggacccacacacgctttcgttgcgccactttgatcttattggttgatgttgagcgcgttgtcttcattggggttagtgactaaccctcttaacaggagcgttgatacgcacttggtgaagatgctgtcgactctgatcttgactaattaagaggggttgtaggatgccaatcagacatatgcaagagagaagggtatagatagaaaaggtaagcatagatgggttaaagagagaaaagggagggcacccaactacctaactatatgtcactcagctaataaactgatgtcattgcggaccaagggccacaacacatcaacactcatttcatagaagcanatcagtcattacagaaagacaaacgtcatgagcacacaataacaaacatcttggttctacac

SEQ ID NO: 50218 - DNA, 349 bp, Zea mays
acccatggtagtcttagccattaagccagtgtcgagttcagctctattcagatcaactaagtatagctgaccctctaacactcccttaaaagctactgaatcatcacttcttctaaagacagtaacacatatatcctgtaaaagacagctgtaacccatcttgcataattgagaaacagaaagcaagttgaatctaatgaatctactagaaaaacattggaaatagaatggtcaggtgatatagcaattctacccaattctttgaccaaaccttgatttccaatcccgaatgtgatggctcgttggcgatcatgtgttttctcatacgaggagaacatccttttctccc

SEQ ID NO: 50219 - DNA, 407 bp, Zea mays
ttggagcttgcactatgcatggattataccactatatatggagattattttaattttttataaagaaagtgttagtttcaataaaaatataggtaaaaatgtgagcactataatgaccaccgagccattgggaccaaggatggttttgttgttcatgtatgacattggcgtagtctaccatacatatatttgatcactgtttttccaacatatggcataagtcacaaaaatgcaacaaaagtacttatcatggtatggatcagtatattgtatattagtgaaacttgagagtcaatgaaaagcacccaaagttattgattcacaaaagcacatcacaagtgactatgcacctacagtgtcaattattgacgtagttaagggtacttgcacattatggtcactagact

SEQ ID NO: 50220 - DNA, 246 bp, Zea mays
tctgaataccagaccttgagccaaagacccagcgcgatcaccttgatccctagctcgaatcctaatgaccccattgacataaacgtgtttaactagcccctctgtcacataccagaaaacggcattgggacgcgagccctatacacgactaaaccctggatttgcctcgggtttgaggagagagacttaccggatttccgggctccatatctctgaaaccactacgtaaaattctatgacccccca

SEQ ID NO: 50221 - DNA, 360 bp, Zea mays
tcagctccatctatgttatggatggcttttgagtcagtccaattgccttcggcccttctggcagcttcctgacttccatgaatggcgatgggtccttgatccgaaagtatcttcttgcaaagataggcaggatgaagaattgcttctaaagcattgagggtgccacgaccaataattgcattgtaagggtattccatgtcaacaatgtcaaacacacaccgctcagttctagtgttgttgatgaacccgaaggtcactgacatggtgatcttacccagtgctacaatctgtctttctccgaagccacagagaggatgtgtagcatcatgaatcttatcttctggctcttgcatttgtctg

SEQ ID NO: 50222 - DNA, 472 bp, Zea mays
  unsure (1)..(472): unsure at all n locations
gacctataaaactcagctgatctgcttatgtaaacaatagagattgtgttcagttgcatcatgtactatatttctttatgcagggtgaaataattgtacgtaccattcttgagccaaaggcgaaaaacacattcccttcttttcacacttcataaagaaaatccctttttatccgaaggtctcgaaatgtggtaaaaatgcttatcaccgaaaccaaagcattgtccctttctatgtgctgttgatgacgatgattgtagcacattntccttttatttctcctgcttctaatccacgatntctcaaaaaatctcaaaattagcttcgtagataggtcacatcgacagatgagggaaacattccccatcttttctctctatggatgatgcacaatgatgcatgatggtatgatgccaaattatgcgatgatatgatgcanaagatacttgggataaaatatgatataaacata

SEQ ID NO: 50223 - DNA, 359 bp, Zea mays
gctgcacacccgggcactttgcttaaaataatagcgaaatccttaagatctcaaagaaacgtcaaatttcgggagcgatcgtccacggttaaggacatatacactcttccgagcctggtctgacaatattaccttcagccaaacccgcccaacacttgaacatattgaatgcacgactatgagttgacaagtattgggggcatgcaagtcagcccctggatctctcgagccaactgcgatttctacagcggcgactcaaggaaacgggaaagccacaggccttgcccacaagtgaaggacccggccacccaacatcgaataataagaccaattggaaaggcgcaacatgctggacaact

SEQ ID NO: 50224 - DNA, 425 bp, Zea mays
  unsure (1)..(425): unsure at all n locations
nntaaaagatccaactccccatcaattcctccactatctgtttcatatggnccggctcccattgctacaacctatggcggtacattcggatgcagccggtcgtacaacacgtgcacctcttcatgcagagtgttacaatacgcttgcaaattttccagggacgtgcttagttccactacccgggctagagcatttgcctcacaatcccaggcgaaagagcatgaatttacggcccagtcaatagccgtatctcgttccatgatttcttgctgcaagcgactaacctccgctgacagctgagcaatgcggcggctatcgcgcgcacgctccctatttccatggcgtagttcagacatgagtncgtccaccctggcctgtagatcccctattggatcattgcttncactactggctccttcatgtct

SEQ ID NO: 50225 - DNA, 418 bp, Zea mays
  unsure (1)..(418): unsure at all n locations
agcttgtctaacttgcaatntcacgatggtctccttgcttaagatgatcttccaatagattactggtgaactagttatatttattagtttagaatgtctgtcgtctgttagctcattctttaaatataaaaaagaacgaagggattataaattaaaccttcttgcagattttgttatatttggctcagatatcattgttatactttctctgttatgtcgttcttacttctcgattagtcaaacttctaaactctgactaaatatgtataagaatatattaatatttagagctattgttgtgaacctttagaggacatttaaataaatcattttatctattatttagatcaaaagcattttgtaaactatctaaaaaatatattataaactatagcctcaccgtgagcattcagttgct

SEQ ID NO: 50226 - DNA, 468 bp, Zea mays
  unsure (1)..(468): unsure at all n locations
tctgctctctgcgcacgtacagganatttatatgatctgttgtgggangaagaagaagagggcgccttgctgcangggcgtcgagcgccatgggagaaggaactgcatatgggcgcgcctatgagaaggacagggagcgccggctgatgcttctgcttgcctgcagggagcgcacggctgctctccattcctgtatggcgagcgacagcatgggagagaggctgaccgtcgaggttgctgtcccccgcgcacgctatagcttgctcgaggaaggggaggagacgccatggacaaggagggagctccctgcgcgctggctgttgtgcgtgggagggaaaaagggtgctggcggctgannaaatttgaggggtgggagtgcaaaatagccaagtgcaaggagagagagctcctatttatatgcatgtgctacggttangggttcaaatgggcccaatgggctgggttggg

SEQ ID NO: 50227 - DNA, 391 bp, Zea mays
  unsure (1)..(391): unsure at all n locations
tgaagacgtggatggcgacgataaatcggtctcgtagtattctatcttcttcatcttcttcttcttgtcgcctttttgatgcgtcttattgaaggaagaggattccttcttatgtttgtggctggactctcttgaggtgttctccccgagcttgcgggcttgtcgccggtcacgatctccctcttaccgtgatctcccgacatcacttcgagttgttagactcttaatgaagtatatgctctgataccaattgaaagtcgcctagagggggagtgaataggcggaatatgaaatntataaacttaagcacacactacaagccggngttagtgttagcacttaaataaagtcccggagagaggggaaacaaatcaaatgagaacaattaaca

SEQ ID NO: 50228 - DNA, 356 bp, Zea mays
caaacaccgcagctgcatcttcgcgaggtaaaatttggactatactgtcaaatcatgaatgctgggtaacttccaactacttgtcagattatatagcgctgcatgtaagaaagcgacactgcggaattgttacaccaagcgcgcaatatcttgtacccgctgctcaatgggccgcaaggatctaacagtaaccctgtaaggtgggatcgacacgcgctctgaaatcggatctgttctccgcaacgagcttagggaaggcgtgttttggaccttctgcttcctaagctgaagaggcttttttcacggtcaagctcgtacgaaaactatctatccccgccaaagggctctgttgggtt

SEQ ID NO: 50229 - DNA, 364 bp, Zea mays
  unsure (1)..(364): unsure at all n locations
aagactgaatctgtccaaatatggacagcagggccttcatagtgtcttttaccctttatacatattaaatcaacctatgatgttcataaatgatttgtagaataatttcagatctttctataaagtctatgatcacttgctttggatgcctaagtctctatttatgaattttngaagttgcaagtctgaatctgttcaattctggacagagctgttattttagcactatntaaccttgctaattttctaatcagattgagataacaataccaaagctgtagagcatttctctataatttcaaaaaatatttgatcactatttttggatgaatatcctgtgagttatgactaaaacaagtaactg

SEQ ID NO: 50230 - DNA, 248 bp, Zea mays
attgtatgctgtcttgatggcctccaggaagcttccgcactacttccaagcttacaacataattgttcctttcatcacaacctctgaaggatattatgaggaatcgagaagctactggaatgattggaaaatgggctgcataactcaatgagatttgtattgaatatgttcatagatcttcgattcagtcgcaggcgctggcagactttattgtgattggacgcccgggctcacgaggaggaaaccaa

SEQ ID NO: 50231 - DNA, 363 bp, Zea mays
tgtgtcttggaatgcctttcaagcgctccctctgctgcgttatttattataaatattccacaaactatagataagaaacatgtgaggggtatatataaatatagtaatggttaagtcaaatgggggttgccacaccaaaaaaatcgaagaaaagaaaacttccactcactgttatgcatcacaacacaacttacgctagtgtttcatattcctccgacccccattatatatacaaggcactgagctcaaaactgcccataaaatgtgaaaggaaaatgccaaaaatacaagtggtttacccatcattgatttggaacaccacaatttctcctctccaatttagacactggcatgtgaactgat

SEQ ID NO: 50232 - DNA, 164 bp, Zea mays
  unsure (1)..(164): unsure at all n locations
acaaatatacaccgagatgtcttcgtctaattcggatggcttgcgcacgcgatagtggcacgtataaggaatagagtgttatcaccctgttttccaagcctttgngaacaaatctagcctaactatcacgaacagcgaacaattcctttcttacatgaagctgg

SEQ ID NO: 50233 - DNA, 461 bp, Zea mays
  unsure (1)..(461): unsure at all n locations
tatgaagattcttcatcccaacatgggctagttttgtgtgtcagagccaacccatgttagtcttagcaattaagcatgtgtcgagttcagctctatcaaaatctactaagtatagctgaccctctaacactcccttaaatgctattgaatcatcacttcttctaaagacagtgacacctacatcagtgaataaacagttgtagcccatttgacataattgagatacggaaagcaaattgtaatctaaagaatctacaagaaaaacattggaaatagaatggtcaggagatatagcaattttacccaaacgttngaccaaaccttgattttcatccccgaatgtgatncgctcttgnggatcttgcgttttctcatatgaggagaaacatcctttctcccagtcatgtggttnggcacccgctgcgagtatccaactgagcctccgatgcataactacaaac

SEQ ID NO: 50234 - DNA, 263 bp, Zea mays
tgaaattgcatacagagatttcgattataaattatccagcaaactgagaaattcaaatctacctccatcaacttactccgcgaagcaatcattgagcgaagggcaatgcatgcgtgggccccaaggagcctatgcttggaacctaaagcaaaaagcgtgtgaacatacaagactattgtatgagacaaacccctggggaaagagcagcatcacaacaattccggctgctacagcttacgcgcacggtactggccaagctaccc

SEQ ID NO: 50235 - DNA, 381 bp, Zea mays
  unsure (1)..(381): unsure at all n locations
tcccgtttctgttctgtccggcgcagagcagagtttaagtatctgttacatgcagagacatttgggcagaacgaacaatgtatgaatccagaaacaagggttatattgtatcatgctgtgtacgaaaaaaacccctcagtgtaaaactgtggaacgattctttcttctcttcacatgcacggaaatttgggtccttattggcgtacaaacaaacaaggcaaagagcangagccacgcaagggaatttggtcctgctgctccaaccggcgagacggcgtcaggtggccggaacaatgcagccaaatgatcataggaatctacagtatcttcggaggtggtacgaggctccctacatctccgagctcctcatcttctcgctca

SEQ ID NO: 50236 - DNA, 449 bp, Zea mays
  unsure (1)..(449): unsure at all n locations
agcttatggagaagatatattctcattattgtatanagcgaaactgttacaagagattaaaaacaacaaaaacacttaaggctcccataattgttccttattaaaaagaaaataatactgaatgcgaaaaactgatgtcgaggtaggatatttgtcagtaaatgtgcttcgactctggcacagtgctattgactgtgccagcttcggactcttctctgaagtcccgttgaaggtgagtgtgctgactcccttctggctgctggccttgttgcgttggtggtggaggtggaggctcgtgccaagatgcttggggttggcttgccgaagcaacagaagctgcanggtgattgcctacatattctggatgtaaggcgaatggtacgaaacantatgcatgacttgcttcngctgactctgttgtgctgcagcttctgctatcttcttttgct

SEQ ID NO: 50237 - DNA, 230 bp, Zea mays
tgctctacgatctctcggttaatcccggcatctcagttgaaagtcacctaaaaggggggtgaatatggcgaatcttgaaatttataaacttaagcacaactacaagctgggttagcgttagaaatataaacgagtccgagagagaatgcgcataacaaatcgtgagcacattaagagtgagacacgatgatttattttaccgaggttcggttcttgaaacctacttcccg

SEQ ID NO: 50238 - DNA, 301 bp, Zea mays
  unsure (1)..(301): unsure at all n locations
agcttgctcatataagcgaggtgcgattgtattctgaatatattgagtgccacaaggcggacaatcattacccttctgctgccttctaacagttattctggaaacagatatctggtgctgtcagaacgctatcccaggatagaaccgacatcttgcagaaagttgtacgaatatctggtacccctgaacaagctatcacagctgagaatntgctgcagggatttatccttaaccagaacgactacttcatctacgggttgtgcggttctgttttaattttcagcaatataactcttggacc

SEQ ID NO: 50239 - DNA, 89 bp, Zea mays
gagcttgataggctgaggtttcttttttaaatgatggaagtggaaccctatactcatgagggggggggatataccccaccctccaactt

SEQ ID NO: 50240 - DNA, 157 bp, Zea mays
cactagacaacacagactttttctgtcatgtctccgggagcaacgatgcgcgtcaaagaacttctctcccatgccgcacgcacagggaagaacacatatagagccctaccgtccggtccgtctggccagaaactcaaacgctaactcatgtcgcgga

SEQ ID NO: 50241 - DNA, 466 bp, Zea mays
  unsure (1)..(466): unsure at all n locations
tccttgacctcgtatggcccaatgtagcgaggagctaacttgtccttgatcccgaatctctggacacccttggtgggtgataccttaagatagacatgatctcccacctcaaactgtagaggcttccgcctcttatcatgatagctcctttgcctggcctgagcagcttctaagttcttggtaatgaccctgacctttgcctctgcctcgagtaccaagtctggcccaaaaatttccctttctcctgcttgagaccagtttagtggggtcctacaccttctcccatataatgcctcacaaggagccatcgtcacactggactgatagcttgtattgtaagaaaattctgccaaagacagacacttatcccaatccttcccgtagtgtagtgcacatgctcgcaacatgttctccaaaatatgagtcacactttcngtctggccatctgtttgtgggtgatatgctg

SEQ ID NO: 50242 - DNA, 450 bp, Zea mays
cgcagctcagctgaaacttcaaaaccggatacgattcccttgtacaaatttgcccgaaaaccgcccggcggctaacacgactgagtacccttgcaaccaattcgcggacaccacgtcggcggtggactcgacgtacctgctcttctcggcctacctcgactacgccaagcagcctcgggatcgacatgctctgcgcgggctccgtccgcgccaagaacaccatgaacatcatgctcaccaacgtgctcgacgccggcgccggcgcgctcttatactacctatgcggcttcgccttcgcgtacgggacctcgttcaacggcttcatcggcaagcacattctcggcctcaagcggctatccaggtcgggttcgagacgaactcttcctcttacagtgggctatcgccatcgccgccgtcaggatcacgtccggatcatacgcgagcgcacgc

SEQ ID NO: 50243 - DNA, 472 bp, Zea mays
  unsure (1)..(472): unsure at all n locations
tatcctcaatctactaaacatcatctctcttgctgctactttatctttantatcagacgcctatatgataggaaatgcaaaataatagcttaaatcttaattcagtttaagagaactaaacggtagaagaaactggagccgaagttgattggattctaagctccgccacacaggatttaaataaaaatgtagcatgccgatatacaaatatacgatttatagaatcactaggttcttgcccatgcgttgccacggaagtaaaaaattatttcgaaacatatatacaaaataacaaacatcacttgggtggtaaggtggaacctcggcgttaacctcatctatacatcacggngagactcgccggcggtcgacgacgccatcgctagttaaggctggcattcggctattaagataatccgttcggctattccgtttttgaaatttcggttatgaaaatgaaaccgaaatttta

SEQ ID NO: 50244 - DNA, 413 bp, Zea mays
  unsure (1)..(413): unsure at all n locations
agctttcctgcttacaccttcggcgcttcatcaacctttgtattattctggtctactgtgatgcctgacttgagtccgaagatacctgttcacacattatactccagatgcactattaaacctgtttttgaggaccttcggatgccgaaggtccccaacagcctcattatgtaccttaatgttcaagacacccagaccccttctcattttggtctagtaataagattccatgcaaataggggtggtgtctttgcattgatgtctgctccccctccaaaggcagngtcttctatacttgtcaatctctttaataatagctgaaggcaattttagcgtgcacatctaaaagggtggcagtgcggagaagactatgttgaccatttccaacttcctggcttatgagaggaatatta

SEQ ID NO: 50245 - DNA, 433 bp, Zea mays
  unsure (1)..(433): unsure at all n locations
tgccaaagccaatgagaactttgcggttgctaaagctagtttataaattagngaatggtcgaaaactaagctagagaataatgttgaggagcttcgtgaatccaaagaaaggtgcttcgaggaatccttggattgcgtgaaaaattgaaaaccagctttgccaaagtaggtgcttattcttccaaagagaacttcattctaagtgaccccgaaggcgttattgattggataaacggggaagccgaagcttttgaagagattctaagtgatcgtggggatatttgtgcttttactggcactctaggtattgcggcaattcatgagaaggctggttgcgaccatgttaaagatgtggcccaggctgaagccgtcttcttcacagacgacaccaaagaaccttcttgcgaagctaatttggtgggcggaaaattta

SEQ ID NO: 50246 - DNA, 271 bp, Zea mays
cttgatgaacactgaaataaaactctgttatagattcttggttaacaacaaagatgttcttgcttgcacagccaatgatccttgtggtgttaatagagatgttattgagcactcactcaatgtggacccgtccttcacaccaagaaagcataggcttatgaaaatgtccgatgataatgctgaaggtgcacgatatgaaatgaagagacttctaagtgccggcgtcatcagagaagttacttacccattagtggctgaccaacactggcat

SEQ ID NO: 50247 - DNA, 469 bp, Zea mays
  unsure (1)..(469): unsure at all n locations
ctgatgatgtgtgaaatgtgtttcaattgtgcaaagctctgattgtgtagtaatgtgtgcatatttgtgtcatgagcataacagtttgatttatgacactatacaccacacagatgctacaatatagaaatgcttcacacttagcctaaatatgtgcaatttggcatttgaggccaaagttgatatttctatgaaagcgcatatttatggggagcattctatatctaaggattcaaaattgtgctttaattcttatgtaagctttaattgtgttgccatcaatcaacaaaagggggatactgaaaggttccttgtgggttntggtgttttggatgacaacacaatttaaggtctaacttaagtgttaagtgttgaataaggttccatgaagaacatacaaagttcagctcaaggtgatcaagtatgatggtccacatangctgagctgactatggattatggacatcat

SEQ ID NO: 50248 - DNA, 389 bp, Zea mays
ttggtgctcatcatccacacaagaacatcatgacgaccgacaggccactggagctcctacacatggacctattcggcccgattgcttacataagcatcggcgggagtaagtactgtctagttattgtggatgattattctcgcttcacttgggtgttctttttacaggaaaaatctcatacccaagaaaccttaaagggattcttgagacgggctcaaaacgagttcggcttaaggatcaagaaaattagaagcgacaacgggacggagttcaaaaactctcacaatgaaggctttcttgacgaggagggaatcaagcatgaattctattctccctacaccctcaacaaaatggtgtagtggagaggaagaatagaactctattggaca

SEQ ID NO: 50249 - DNA, 479 bp, Zea mays
  unsure (1)..(479): unsure at all n locations
acatataatactcaagcttccaccgatatcgtcgcagactggtgaagaccagctgcatttcttctatgaagttntctaagttttctatcttgatcaccacgtcatccacataagcttctacacgcttgccccagtgatcggctaagcatgtctgaatggctctctaataagtcactccagcgtttctgaggccaaacggcatggaggtatatcagatagctccaaacggtgtgatgaatgcagttttttcttcgtcttcttttgccaggatgatctgatggtacccggagtagaaatccaagaaggacaatacaaaacacccggcggtcgagtctaccatctggtctattctaagaagtccgaacggatccttctgacagtggttgttgagatccgtatagtcgatgcatatgcgccaatccacttttattcttttgagtacaagaacaggaattgcttaccactcatgatgcaatact

SEQ ID NO: 50250 - DNA, 408 bp, Zea mays
  unsure (1)..(408): unsure at all n locations
cacctgagctgcaagcttgagacccttgggatgcggacgtttttgatatgtacggatccatccaagacgaacggtggtctatacagattattggtctgcaggcctatcaatcgatccggtcataaccgatcgcattggaaccggtgtatgtcgatatagactgagcgttggatgatactggcgataccgatataaagcaattgatactatccaccacttacgttatacaatatgacatgttataaatggtccatacatgtgtcatatcagccatcatctacatgtttatcaatagattacagtcttaatattaatataataacacacaatgaattgtgtactttgtagctctaacaactatgtaanttttatttatgttttatgacatatataaatcatagtcacata

SEQ ID NO: 50251 - DNA, 295 bp, Zea mays
taaagaatgtctaatattgtaaagggcaatgttcccattgttcatgataacgagggttacattttatatcctgctaattatcctgagcacaaaattatgaaaattcatgctaggaaatctcattctatttcttaccatgcttttatgtataagaaagatgcatcttactctggacataccactcatattattttgcctataagggatacatttgctgcgtcaaatgagcataacatttcatttaatacttttgatgcgtcatattgtataactaacaaatcaggcaaagtagttg

SEQ ID NO: 50252 - DNA, 305 bp, Zea mays
  unsure (1)..(305): unsure at all n locations
ttaacttccgaagacctagaagcaaggcttcgtactcggcaatgttatttgtgcacactaaaatcaagttctgccgcataacaagatttgactttggaaggtgagatcaacacagcagccgctcccgctccgaaagttccccaagacccatcgcaaaacatggtccatgcttcggcgtctttatttgtttcttcctcctgagcccctggcgtccagtcagcaatgaagtctgctaacgcctgggactgaatcgaagatctatgaacatatttcatacanaattcattgagctcttgagcccattt

SEQ ID NO: 50253 - DNA, 163 bp, Zea mays
acttataaactcagcttcactcattatgtatggttgctttgacgactctctatgtctttcggcctctttgcaacttgctgaccttcatggatagcaatgggtacctgattctaaagcatgctcatgcctaaaaacgcacgatggatgattgtttcttaagcat

SEQ ID NO: 50254 - DNA, 406 bp, Zea mays
  unsure (1)..(406): unsure at all n locations
accctaagncacctgaggcatgcagcttgaccgttgctttgggcacgaggtaatagtattttgaacctacattttttgctattcgttgtggttatcctgattactccttcccagcccaagttaatgggaacaagagaaaaggtgctctgtaatcatcttcaactgctccaaagcaaaagagagtaaagattttggcgaaccaaccaaaatcttattatgaagagagagcaccggtgctgcttgtgcttggtacttatgttgaagaagttgttacccaaactttgccggttgctgagccgaagatacgctctcccgtactgacgaaagtaatgattaattggctctatgataatttagatatatttttatncggatgcttctacaataatttctgttttgatatacg

SEQ ID NO: 50255 - DNA, 328 bp, Zea mays
  unsure (1)..(328): unsure at all n locations
gcatacctggtggatgctcgtcgctgttgaaggtcgacctgtgcacctggcctatgcggaggcggtggcctacggtcgcccacccacccgtcgacacgagagagagagagagagcgcacggcacgggggtggcggcggtcgcccactcgacgccacggcccgagagagagagagagagagagcactcgggatgaatgtgagcgaagaaaagggcgcacgcactgctggccttctggngttgaggttgtgtatacagattatgctatttctagaggtgtactcattaatacataaacgttctttctaatatgactagtttggaaactct

SEQ ID NO: 50256 - DNA, 434 bp, Zea mays
taatcccaaggtctattaagacttgggtgaactatatactatattgagtacaatctgcatcaaacttgagcaatgaattaacaaggtcacaaataaattcttcataggtcatatgaacaattcctatgctagaacacactatctcacgcttaactaccttacaagatgctctctggggtaagaattatatactacagcagttaaggagatcgctttgcaaattgtatgtgttaccgcccaaccaaacaacaacacttcagaaacgcttaccattgtcttggaatataaccaacccacagaatagataaaatatcgaagcaagcaatcaattgtgcacaacgtagtcattctaacgtctcaacttgatatgcactatacagcggatcagaataacatccctgcatattttaacacacacacacacacatacttat

SEQ ID NO: 50257 - DNA, 462 bp, Zea mays
  unsure (1)..(462): unsure at all n locations
agcttctaagggagagcacattttaggatttttatattttctttataatatcgacagtggtagctgatccatttatcactgcggcctttattttctccccctttggcatcaagcaccaaaacgggattaatcttggccttttttaaccccattgcctcaccaaagtcttcaattaagagcaaatggcaataagatttcatgagatgaacttggaataagttaccctctcatcggagtgcagtggaagtctttcatgggccaagtccaccttttccctttcaatcctnctccgagactaaatcatcaactcaagcacatggttagtctcaaagggtcaagttgtaacacatctccccctaaacatgtgcatcactttgcaacggacttgtgaggccagggagtgtttgacaacttgagcaccataataacncaaaatgcaaaaggaacatgacacncataata

SEQ ID NO: 50258 - DNA, 487 bp, Zea mays
tattgcgcccacataatgcaaggtccaagggaatgacgatttatactattgaacaaagagttctgaaactaggtgcgaaaggagaacagaagaagactcgcaagtgccaaaaatgtggcattgctgatggacacaacagtcgaacctgcttgtctatagaggaaaatagggtaaaattggctagccttgctgatagaaaaagaggacgaccgcctgtgtctagaaacaaaaattcaacaatggccccgcagtggaatgagacatccacatcaaataaacataaacataccgattgtgaagaacatggttcggatgacaataatttggcatgattgtaaaacatttatacataaataatggatgatattgaaatgttatgatcatgatactattcgatgaatatgaatatttacgttaaaagctcactgtattgattatatctattaatgcgacataattatttcttatgagctatgctactgatggg

SEQ ID NO: 50259 - DNA, 375 bp, Zea mays
  unsure (1)..(375): unsure at all n locations
ttctaaagggagagcacattttgtgactattcaatgnntcatttgagaaagacagggtttgtagcgcatgtcaagcaggaaagcaagttggtgttcatcatccacataagaacatcatgacgaccgacaggccgctggagctactccacatggacctatttggcccgatagcttacataagcatcgacgagagtaagtattgtcttgtaattgtggatgattattctcgcttcactttggtgttctctttgcaggaaaaatcacaaacccaagagaccttaaagggattcttgaaacaggctcaaaatgagttcggattgagaatcataaagattagaagcgacaacgggacggagttcaagaactcacanatag

SEQ ID NO: 50260 - DNA, 212 bp, Zea mays
tcgaccatgatctatatacctaattgaccccagggtatttttctaaatgctatgtcttaaactcatatcatctcgaggaagatattatatgttgtgcgaagtgaagagatatcatgtgccaaaatcaaaggctaccacatggaggaaagcccaaggatggggacacctatattttaagtgccacgattttagaacatcatttcttatgtgtc

SEQ ID NO: 50261 - DNA, 434 bp, Zea mays
taaatgtcaattgactctagcctagctacgggtgcataggtttcaccaaaatcctaaccttcgacttgtgaatatcccttggccacaagtcgggctctgttccttgtcaccacaccatgctcatcttgcttgttgcggaaaacccacttggttcctacaacattttggttaggacgtggaactaaatgccatacctcattccttgtgaaattgttgagctcctcttgcatcgccaccacccaatccgaatcttgaagtgcttcctctaccttgtgtggctcaatagaggaaacacaagagtaatgttcacaataatgagcaatacgagatcgagtagttacccccttttgaatatcgccgaggatggtgctcatggggtgatctctctggaatgctggtgactcctgatgtggggctttgcacttgtcatcttc

SEQ ID NO: 50262 - DNA, 260 bp, Zea mays
acctcatgatatgaactaaattaccctttcaagcatcatgcataacatcaattgtgaaaaagatgaaagtagcatgattatttaattaagtttatgtggcgagtttaattcatatcatgatgagtgattaatggagaagactctaaaccaatttaaccagaatgaatacatcacatagtattgggtcgatcttctttgaatgtggaatggcacactccatttgggaaacacattctcatgttgtgagactacataacact

SEQ ID NO: 50263 - DNA, 366 bp, Zea mays
  unsure (1)..(366): unsure at all n locations
ggcattgcatgtgtaaattccttgtattgcatatagggcttgtctatacctattgagataactgccaacaaagcgagtgaaaaagcttaactcgggtcaaacttgacaagtcttagttttaagcttttagcacttaaattcttactttttatgcaattattagttcttgaaatatgcatgaggtactgcacttatggggagtattcaaaactcaaatcactcatgaaaacccctagtgcaagccaaaatgcaaatttcaccatttgcctattntctctaaaaaatatctagcctatggcaaaatatttngaanaatatatgagggtgccaatacctgtcccaacaagtggtattttgtgtgattat

SEQ ID NO: 50264 - DNA, 463 bp, Zea mays
  unsure (1)..(463): unsure at all n locations
agcttagaaaaatctggtatgaatctgcgataatacccagctagtccaagaaaactccggacttggtgaacagttgttgtgggtttccactccaaaatatctttgaccttgctaggatctaccgcaattcctttagctgataatacgtgccccaaaaattgaatttcttccagccagaacgcgcacttgctgaacttggcatatagctggtgttcccttaggcgcgtcaatacaatccgtaaatgctgagtatggtcttcttcattcttggaatatatcaagatatcatcaatgaagactaccacgaatttgtccaattcaggcatgaatatcgagttcattagataagtgaaatgggcaggagcatttgtgagcccgaaagacatcaccaagtattcaaacaatccataccgcgtagtgaatgcggtcttcggtatatcctcnggtcgaataccgatctgat

SEQ ID NO: 50265 - DNA, 475 bp, Zea mays
  unsure (1)..(475): unsure at all n locations
ttctcgaatcctcctgaagntagatatctcaaaggcatttgattcagntgcttggcctttcctcctcgaagttctgcaacatttgggttttggtcagatattgagggacattattagtggtttgctatggacctcttcatcccaggtgctacttaacggactgcctggacagactattattcaccgatgtggtcttagacaaggcgaatccttgtccccttttctgtttatcttggtcatggatattttggtattcttatttaaccgagctgaacaggttgggctgctgcagccccttgccctacggattttgcagcaccggatttcgttatacgctgatgatgtggtgatatttcttcgtccgactgctttggatatcactattactttggatattcttcacctctttggagaagcttcggcttatgtactaatgtccagaagagcatcgtatatcctattagatgtgacgatc

SEQ ID NO: 50266 - DNA, 351 bp, Zea mays
  unsure (1)..(351): unsure at all n locations
cttggcttgtctgtgatgacatatgatcagcttgcagatagccttgcctacaacaacatgaaggtttctatactttgggttgtcattttgtaatctttgttatggtaaactatttttgtggtaattcttatcagcgntatttgttcaatcttcgtttgccagggcttaattctaagcaaggctctaaaggcccaaaaggatgcagaggatgagagctgtcgaatagcactccgatcggaggttggttataaccctgagaaacgaagctctcacaaaagacgagattttgctatcattggttgagaaactgaaagccagcaaagtcaaactatctgtttagctgaacccatg

SEQ ID NO: 50267 - DNA, 433 bp, Zea mays
  unsure (1)..(433): unsure at all n locations
tcttgtagctgctgccaaaatgagatgtgaactgcgtttctcgatctgacactatcttcttcggcacaccatgaaggcagactatccgtgacatgtataactcagctaatgttgctccggtgtatgttgtcttcacaggtatgaaatgggccacctttgttaagcggtccacaaccacccagatggaatcatatccggcccgggtacgaggtaggccaactataaaattcatcccgatctcatcccacttccactgaggaatccgcaatggctgcaacaacccggcaggcctctgatgctctgctttggttctctgacagctatcacaaatggcgacatattctgcgatctctcttttcatgccataccaccaaaacctccttttaaatcctggtacatcttctnctccctgngtgatggagtagctgctcat

SEQ ID NO: 50268 - DNA, 415 bp, Zea mays
  unsure (1)..(415): unsure at all n locations
agcttaataatagcaagagaaatggttgtattatttaactaaggttagaaaaatttagagaagttattatctacctactgacctagttaaaaatattaaacacctctgtccactccatttaagttagttttaccctttcttctataatatgcttaaagataaggaaaatagaaaatgtaacttaattaatgaaccagagagtacttctatttttgttaggttacttgttcaatagagttcactggaaaaatatatcataccccggattagtacaaattaagtaaggtatcttttattntaataaaacaaggataacttagaaaaacctaccaaaaatgaccccaaggtaaaaacacccacacccttgggataactatggatttatcagaaagaacttaggaaaaataagaaatct

SEQ ID NO: 50269 - DNA, 395 bp, Zea mays
tgctgaattcatgagaggtcatcccccggggttcgctcactcttcttaccccatggatgtggaagattggttgtgtaccatggagcgggagttgcacaccgctcactgtgacgatagggagaaagttctgtatggtccctgtctgttgagaggagcacccagtcttggtgggagtcctatctcgccacccatgccaaccctgacaccatcacctgggaggaattcagagacaatttccgccagtaccatgtccccgcaggcctgatgtcagtgaacaaggaggagttcctggcgctcaagcaaggtcctatgtccgtcagtgagtaccgagacaagtttttgcagctgtcccgctatgctcctaaagttgtcaacaccgacgccaagcggtagta

SEQ ID NO: 50270 - DNA, 442 bp, Zea mays
  unsure (1)..(442): unsure at all n locations
agcttctaagggagagcacattttgggactaaccaatgttcattntgagaaggacagggtgtgtagcgcatgtcaagcagganagcaagttggtacccaccatccacacaagaacatcatgacgaccgacaggccgcttgagctactccacatggatttattcggcccgatcgcttatataagcatcggcgggagtaagtactatcttgtaattgtggatgattattctcgcttcacttgggtattgtttttgcaggaaaaatctcaaacccaagagactttaaaggggttcttgagacgggctcaaaatgagttcgaattaaggatcaagaagataagaagcgataatgggatggagttcaagaactcacaaatagaaggttttcttgaggacgaggggatcaagcatgagttctcttcttcctacacacctcaacaaaat

SEQ ID NO: 50271 - DNA, 325 bp, Zea mays
  unsure (1)..(325): unsure at all n locations
tcccttttatagtttcaatgtagttangagccgnnggagacaatcttggaaggcaatatctgccttctgtcgagtggtgcaccggacagtccggtgcaccaccggacaaccactgttcatgtccggtgcatgatctccttcccaatcatgcgcattcgactggtgctcctccgggcccgttggtgcaccggacacttgttggtgcacaccgaacagatcggngcaccaactgacccgtggaacagtccacgtggcgcccgcagattgcgcgggcgaccattgacgctggcgaaccgttggctcaccggacattctgtggcaccac

SEQ ID NO: 50272 - DNA, 357 bp, Zea mays
cctggcagctgcacgattaaataatttatttatttattctgctcgtgagtatatatgcacttgagttcaaaataataataaaactaccacagatatatacgagctcaagtgtaggagtacacgtacgtagtaatgttttttcttttgggagacacacaatgtcacatggcgtacgagaagattagatgcctcccataataattacgcaccactttaatttcggccattgaattgccaatcggtcggacagttgagacagctggaaaaaatggtgagacgatggttcaataatttttttttaaaaaaaaaatcgttgttgtatgcagcaagtactgccccggtggttcaacaaataat

SEQ ID NO: 50273 - DNA, 391 bp, Zea mays
  unsure (1)..(391): unsure at all n locations
tcgccggcgaccacaccgtcgcgagagcccgccacctcgccgtggaccggccaacccaagcccccaccggccaaattgatcccaccaccataaccccctacccctgcccgtgctatgccaccttctcgaccaccccgaaccggatcaccggcggagaaccgccgtcgagctccggcgacgggttctccctcccgggcggacccgcgtccctcttccacctaacgttgtttacccttcccctcactggcacgtgggcccgcgcncagggcgccgttcccgcgtcgcacccgcgctgggccaaaatactcccggcccgactaaccaagaacccattatctttgtccattgccctgttcttttcctatgttcatatatatgttgagattttatg

SEQ ID NO: 50274 - DNA, 460 bp, Zea mays
  unsure (1)..(460): unsure at all n locations
gcttcgggaaacgatgctctttgataaagtgttgactatttttgccccgacgcgatcagggatgcaccctataatttcttcgtcaatgccacccaaaagcacggacccaggctgatagccacctgcagtaacgaattctttcaatttagaaatatcttatttggagaattgctggccacccaagtgttgtaggcccaaatcttcaccctccaaagaagctccttctatttccttcacttttaagggtgcagccttgccagcagtaacttcatccatttccctctcgggaaccacatcagctataattctataaattcctgacaatgttgttccgagaaggcctccactgtttttagctntattttctgtttcaccagcttcgacatcagtaggagcagcagtttttctgtcgcaacaggaggggggtcttgtgcatgaccctcatcataagcatcataca

SEQ ID NO: 50275 - DNA, 390 bp, Zea mays
  unsure (1)..(390): unsure at all n locations
gcttataacaagagaatagaggctatagctctaccatatgntataatagaaggggagctgtacaagcgtggagtctgttctccactactcaaatgtttatccagagccgaaggtatagaattgatgaaggaaatacacgcaggcctgtgtggatctcacattggatctaggcctttgctgggaaaagttnttcgtcaaggattttattggccaaaggcagctttcaatgcagcggaattagtccaaaagtgcgaaggctgtcagaaatgcgcaagagatcaaaaacaaccttcctctctaacccagttaatacaacccacttggccattgcaaaggtggngccttgatttgttaggcccgctaccaccagcacaaggaaatttaaaatat

SEQ ID NO: 50276 - DNA, 422 bp, Zea mays
  unsure (1)..(422): unsure at all n locations
taatgcccctcctaaaagattgtccaattntgtttatggctaagctcccatgcctcaagataacgagggttatattatgtatccagctggttatcctgaggataagattaggagaattcatgctaagaaaactcattctcaccatgcatttatttataagaatgaggcttctagctctaggcattccacacatgttaaaatgcctaataagaaatctcctattgcatcaaatgatcataacatttcattcaagacctttgatgcttcatatgtgcttactagcaaatcaggcaaagtagttgccaaatatgttgggggcaaacacaaagcgttaaagacttgttgttgggtacccaacgtgcttgtttctaatgtaaaaggacccacagccgtttgggtacctaagaacaaggcctaaattt

SEQ ID NO: 50277 - DNA, 418 bp, Zea mays
gcttgagtcaatcattttgcatatgattattgttgctcaaaaggataatctgggtatgaagcacatacgagagaagataaaggctggagtagccaagtgtttcagggaagacgatcaaggtgtgatatggtttaaaaaccgcatagtagtgccaaagaacgaagaactccgccagcaaattcttgatgaagcacatcttagtcgttattctattcatcccggaagcactaagatgtagcaagatttaaagcaacattactggtggacaaaaatgaagattgaaattgcacgctatgtggcgaagtgtgacacttgcagacgtgtcaaggccatacacatgaaaactgctggtccattacaatccttgccaatcccaacatggaaatgggaagacatcagtatggactttattgtggga

SEQ ID NO: 50278 - DNA, 341 bp, Zea mays
  unsure (1)..(341): unsure at all n locations
ctgcaacatacacgagttattgtacgagacgaattcctgtggaaatgagcaataccacaacaactttgggtgctacagcttcggcgcccgctccgggtcaagctaccctgtgccaacctttctgaagaggtggcccggagcctggatgtctgaatggttntatgtgaaaaatgatctaacagcgcaaaataatgtccaaagtatcattatgtacccaatttggcaacgcttcggacttctaaggccgaaggttgaaatggatgaggcagccgaagaatgccaaagagccttcggcgcagtctgctccttcattgtgacaagggacttggtccatgagcaca

SEQ ID NO: 50279 - DNA, 356 bp, Zea mays
  unsure (1)..(356): unsure at all n locations
tgcaagcttcgggaatccaacactctctgatagggtacctataattntcgcaccagcacggtcgcggatgcatcccacgatttcttcgtcgaccccgccaaagagcactgaccccagctggtaaccacaagagattacaaattctttcaactctgatttgtcctcttcaaagagttgttggccacctatgtgttgtaagtcaaaattgctccctctgaagaggtttcatcaatcttctttcctttgtatgaaattgtcgcgaccacctccttctccataaccacatctgatataagtctatcgatttcagacagaatgggtgtaaggttttcatcttcggctggagcaacggcttc

SEQ ID NO: 50280 - DNA, 417 bp, Zea mays
tctgaatatatccgccattaccatcaataaagctaataattctatttcctgacacattattgatcaacgtgtcgactatgggcatgggacattcatctttatgagttgctctattcaaattgcgaaaattaatgcatactctgagcttacctgattctttcttctccaccgacatatatatggagactcactctacgtatctgccaggtctaatgaaattaacttctagcagtcgatgaatttcgtcctttatttgtgggagtgggtctagacaaaatgttctagctctctgcttgaaaggactgaaaccgggcttaataggtagccgatgctctactatctcttggctaatcctgacatctcagtgtattccaagcaagaaatcagatattctttcatagaccgagcatttatatc

SEQ ID NO: 50281 - DNA, 454 bp, Zea mays
ctctaagcacctgccgcatgcagcttggtgacttctgcgaaccaacttctactcttttctttgggcaatcaaatccttttcttttgcacagaacagattgtaatggtagttaactgtagttactgcattggattccaagtgaatctgattgctgatttacttgatacactccaccagaggtatcatgcatggtgacatgcataagaaaatatggagacttttttggcagagatcatgtaacattaggtgctctatatgtctatagtcatgctatgtacttgctccttgagtttaagtaacataaatcatggcacgtctgccatactgtgagttcatggtatttaaactcaaagtctcatactgagcacaatatcttggacagtaactcagcaactgattaaccctcttggacgagtactcagcaactgtcatgggaaattggcgctttgtgtaa

SEQ ID NO: 50282 - DNA, 341 bp, Zea mays
  unsure (1)..(341): unsure at all n locations
ctgctgcacacaattactgctaggagggcgaggaagcccattctatagcagncgaatctttcatcggaatcgagccctccccgctggcctgctcgtccgtgcatctctgcggacgcaaagaaccacggtacgacgagcggttaaaatacccctatcgctttctcgaccctccttgcttggtgcagcgcctcactatgtttgttatggagccatacggtgacggtaatttcttgctagaaaattaactttgccgcaagcagtctcgtggcgtggggtgcgctatggcagccctagttctaggtgagacctcatctctgatgttcgctatgacctcccgtttc

SEQ ID NO: 50283 - DNA, 323 bp, Zea mays
  unsure (1)..(323): unsure at all n locations
agcttcttgtcaaaggatgtttgtttctaactagttgtgcgcactggataatttagctcatgccgttatggttgtcttcccattgctagcagactattaatgtctattatgttttcttatcatgatatctatttatactttgttgcttccccgtttatgccattttcaaaggagatgctgtcgaaattttatatacgaatgttagatgtgtagtttagtatcattctggggtgtttgtggatcccggggtgttacagttggtatcaaagcatangctttagattcttggcaattngaagataaatttgacacacttgcacata

SEQ ID NO: 50284 - DNA, 341 bp, Zea mays
  unsure (1)..(341): unsure at all n locations
agagaagaaagcatgctattctgccgccgcgacctaaaaaaaaaacagtgcctgcagttcttggaggggggagaaacagaatagaaagaanaatacccatcaagttctacttctacagcagcagggctgcattgattcctggagcttattctccgagtccagaccaccgcaactcttgcaatcaggcgaatattcgttggcatagtggtagcatgcacagatccaacatgagcgtgctaaatactcgcattcaaccatttctagtaattcataacttgacanacagcagcagcagcngaagaagaagaagaagaacaataaacaaggagtcaccttgaaag

SEQ ID NO: 50285 - DNA, 406 bp, Zea mays
gcttctagatatgtcgaggtgacatatgatgagggtgaattggtagttacgaaggtcgcagctaaacaacttcatcggttgcccatcattccttggctttcaagggtgttcctcaacaaggaaatagctctgcatatgacgtggccaaagaatggtgtacgtctcgtcactgatccagacacaatggtccatccgtcggacggtgatgcatggaaggcacttgatgagtttgatcccgaatttgcaaacgaccctaggagtgtacggcttggtctatcgacggatggattcacaccgttcaatagtagtgcaagcccttactcgtgttggcctgtcttcattgtgccatataatcttcctcctgagttggtcaataaagaagatttcatgttccttgcactagtca

SEQ ID NO: 50286 - DNA, 351 bp, Zea mays
  unsure (1)..(351): unsure at all n locations
gacacattntcaccattttctattataatatgtntcaagacagaaaagcgggtgttgagactaagctgagcgaacaagagaagctccttgaggagaagactgtcggatttattgaatcaatagcaaagacaaatacaaaaaagatcactaaggaaattctagaaggcttatctgaagatactgatgacagcgacaattatgatgcggaaagtggaggcgaagactctgaagatcggccctggcgaccaagtcatgcagtcttcgggaaatcgactatcaaacagagtcatcttgataatatgagaggaaggtattttcgagatatgtctattgtgagggctgacacagaca

SEQ ID NO: 50287 - DNA, 363 bp, Zea mays
  unsure (1)..(363): unsure at all n locations
agcttaagacataacatatctcctatggcctctatgggctatcgacagttaaatcgagtaatggccatgatggcgtccagtgggccccatagacgttatctcccacggcctgcatgcatatagtttaaataacaatttcgtggggggccactggacatttgtcacggtcattactcggtttaaatgcagacgacaaagtgtatctctgacgactaatgttggagataaccttatttccgaccttttacaatcgacggagccatgctgtcgaacataggtcggaaataagtaatgttcgacggtatatggcttatatgcgacggcttangccatcgaaaatatccatgtttactattctatctg

SEQ ID NO: 50288 - DNA, 374 bp, Zea mays
  unsure (1)..(374): unsure at all n locations
tatcaagnctactttatatggatctggagttatattcatatctgttctgaggcagccgtaatcatttgtttcttaccgagacattttctgccttttctgcccatggtgctgcgtcaccctattttggcccaatgggtcgtatatcaagttaagtccattatggacgcatcctatggttgcagcacgaccccaatacccttgtggtcgtcctcccatgtttataaacccnctatccgccaccaagaacaagcgggtttgtttagatcaagattagctctcgctacttgcttgcaagcgcgcgcgctagttcacaccgtcgtcttcttgtcttctgaaccccaccatattggagtttgagttttaaacctacattt

SEQ ID NO: 50289 - DNA, 425 bp, Zea mays
gtctcttgcctagagctcttgtctatatgaccagagataacttgagaatcaggtttaagaatggcccttctgattcccatcgcctttaatttccgaagacccaagagcagagcttcatactcagcgatgttatttgtgcaactaaagtcaagtcttgccgcataacaagtattaactttggaaggtgaaaccaacacagcagccgctcctgctccgaaaggtccccaagacccatcgcagaacactggccatgcttcggcatctttatttgtttacttctcctgagcccctggcgtccagtcagcaatgaagtctgctacgcctatgactgaatcgaagatctatgaacataatcaatacaaaattcattgagctctgcagcccattttccaatccttcgagtagcttctcgatttctcataata

SEQ ID NO: 50290 - DNA, 141 bp, Zea mays
ccggagtgggcgcgtctgtcatctgcgcgcgcaaagcgcgcattaaatgcgcggcagagagccgttggcgcggagatagccgttgctccggagtcgcaccggatagtccggtgcacaccggacagtccgggtgaatatatc

SEQ ID NO: 50291 - DNA, 485 bp, Zea mays
  unsure (1)..(485): unsure at all n locations
ctgcagcttgacattgtctccctcttggaagccaatgccatccttaatcccagggcgtcttccattatagagcatgcttctagcaaatttaaatttctcattttctaagtcatgctcattaattttagcactaagttgagctatgtgatcattntgttggttaattaaagctaggtgatcatgaatagcatcaacattaatgtctctacatctagtacaaatagtaacatgatcaacactagatgtagagggtttgcaggcatttaattcatcaatcttagcatgtaaaatagcattctcatctctaagattggaaatagaaacatctgcaacatttaagtctctagccttagcagataatttttcattcttacatttaaggctagagagagatgcattcactttgtcatcttagcaatacactaacattatcttttaagataacaattgatcatacaaacattactttcaacttagcataatta

SEQ ID NO: 50292 - DNA, 357 bp, Zea mays
  unsure (1)..(357): unsure at all n locations
tgagtcgaggcattgtctaaccggagatgcagaatcgcctctttcggacttcggncaccagccaccgcgcgtgaaccgagctatctggtgagccattttccaattccttgcgcctatgtcttccctgacctctggtgaagctcactgaccagttcaattgaactgtaccgccctggataggccggagccctcgccgtcgacgagctcgcccgcctgcccgcgtggaccgacccactccgaccatcgccggagacgatccgcacatcggcgtgatcgtcaagacctcccctacaccctcaaccacttcactagagcaatctcgccgctggtaagcccctccgcccttttcttcgccgc

SEQ ID NO: 50293 - DNA, 412 bp, Zea mays
  unsure (1)..(412): unsure at all n locations
taagcacaatcattcggcntgtctttcattctatatgaacatctcatatcaattatgttggccatcacaagctttcgtataagagtagaaaggataaattgggacaacctaaaggttcataatggctgtggtctggtactgtcgcacggtgttcatgaactttttaatctacatatacattaaagtgatcttcagtaagtataaaaagaaaggaaggtcagcacaagaacatgtatggtttaaagtgccccatacttgtgacataaaggagaacaatgagttgggggtagcatgaggggagtacatgttgttgtgccctattttcttgaatttggcaccaaatagtcctacaataattngacaacaaaatattcagacatcggtgatgaaacacttaatagtatcctataat

SEQ ID NO: 50294 - DNA, 372 bp, Zea mays
  unsure (1)..(372): unsure at all n locations
tattcggacctataaaactcagcttgtatcgaagaaataccttgaggaaagaataatttagtcctcaatttactatacacagggaatgcagcatgtcttccatagtcaacgaaggctttatgctaaaaaacttccaagtaaggagccctgggcgcgaatggttaaaaactgctgctattttctcctcttggaatattcttgacataaaaacctttgaaaaaagcctccacccttcgaactgtatccagatatttttcaagcttccgatctcttgccttgctacttttgtctacatggccagaaatgacttgagagtcagttntaaagatttgccttcttattcccgttgcctttaacttctgaagccccaac

SEQ ID NO: 50295 - DNA, 310 bp, Zea mays
aactcctaaagggagaacacgagatatgtttatctaatgttactcctcgaacaggatatacacttgtgccgcgtgtcaagcacgtaaacaggtgggaagctctcatcacgccaagaatgtgatgacaacatcaacacccctggagttactctatatggacctcttcggacccgccgcctatcttagcatatgaggaagtaagcatgggcccgtcatagtagatgaatttacccgctccacttgggtattctttttgcaagataaaactaaaacccaagggaccctcatgcgcttcctaaggagagctcaa

SEQ ID NO: 50296 - DNA, 344 bp, Zea mays
ctcagctttctgctcacaccttcgcgctgtatcaaccttcgtattattctggtctgctgtgatgccgacttgagtccgaaggtacctgttcacacattatactccagaaatactgttaaatcctgtttttgaggaccttctgaagccgaaggcccccaacagatgtcttttgtagatggcccgtatcatgtgcactgcacgtaagtctgtgatcccctttctgccttctcgtctggtggagcgtccactacgtcgcacggtgccaggttagtccagtcacttggagaaactgcatcgtcgcctgcacgaggagcacgagcacccacgctaggagcaggagcagc

SEQ ID NO: 50297 - DNA, 470 bp, Zea mays
ggatcctaagcactgggctgcagcttccaactaacctagaagattaaaattgtaataaggttttgtgttcacaataaatggaggtttgttagttggaagagttccaagtaggagactatggctaattctacaagagaagctaagtacattgcagcttctgaatctgtgaaagaaggtgtttggataaggaattgtttcattgagcttggtgtgtttcctaatgcatctagcccattgagcctctactgtgacaacaatggggctattgcgcaagctaaggagccaaggatccaaggatccaccagaaaagcacacatgtactacagatgttccacctcatacgggaattcgtaggtggggtgagatcaagatatgcacaatacatatgggtttgaatgttgctgatcctttgaccaaatgtaacaccccgtccaatctcggaccagcgatacttactcctggcagctcgc

SEQ ID NO: 50298 - DNA, 436 bp, Zea mays
  unsure (1)..(436): unsure at all n locations
gacctataaaactcagctgagcagagataccgactttggtatgcacacttgaaataatatattcaccacgngtcttcaatccgatgcaacatctacttgttcacctaccatactaagctaaggtaggaggtcctgtgcaatataaatggatgtatcacatcgaaaggacactaaaaaagctacgtgcaatggttggtaataagagacgagttgaagggtgcatcgctgaagaattcaaatacaaagagatagcatcgttcacgggcctgtactttgcagaggaacacaatgtcaatgcccatacgttgcggtatcatgtcgacgagccccctattagtgatattgagaatattcaatggaggggcaaaactgtaggacccagcacaacatactgtttcaccaacgacgaatggaagactgctntactttacatgta

SEQ ID NO: 50299 - DNA, 325 bp, Zea mays
agcttcctaccttctttggtggatatcattatctgcccggacgtactcatctatattctgaagcagcttctcctgcgtctgagggggctttctggcaaagtattgagccgtgggtcctggccgaagacccttgatcatggcctcaatgacgaattcattgggcactgtgggcgcctgtgctcttatacgcaagaaccttcggacatacgcctggaggtattcttcgtggtcttgcgtgcactggaacaaggctcgtgcagtaactggctctgtctgaaaccctcggaaactggtgatcagcatgtccttcagcttctgccatgat

SEQ ID NO: 50300 - DNA, 334 bp, Zea mays
tcacgggctcaccaggggccatgaagcaatggcgggatgacgtctaccgactactcggtatggcacattctacctcgactaggtcaaggacacggtcatctctgcaccaatactaggcatcggcgtctgtgcgctcgccctcagtaaggggcgctcagaccaacgacctccgagcagagctcaaatgcagacgcgcgggagaggatgcctagatctatttataaagggcgcgcgagcgccgcccaaacatcgagggccgcaacctcgatcaagacttcgctgcggcagcaccgcagacaccaatgggcacccggtcccaagtgggtgtccccct

SEQ ID NO: 50301 - DNA, 56 bp, Zea mays
ccaaaacaagatcatgaccctacacctttaaaacaccaaccggggacatgccacac

SEQ ID NO: 50302 - DNA, 243 bp, Zea mays
ctgcagctactttgaattatgtttatatgtttcgcttcccatttttcatctccgtgttctgtatgtctgcaagacgggtgagactttcctggtgatgtatggaaagatacccaacttgtctagtagctcagtggcacctacagggttgactgatgtccgatggacaatgacaactgtaagtgggcctaattacttgggaggttccatcacagcacaagtgcgggcactgctcgacggcattcc

SEQ ID NO: 50303 - DNA, 352 bp, Zea mays
gtagcttcatctatattatggatagccttcgaatacgttcaactcccctcagccctcctggcagcttcttgactcccgtgaacagcaatgggcccttgttccgaaggtatcttcatgcatatgtatgctggatgaagtattgcttcgaaggcattaagcgttcctcgactaatgattacattgtatggatactccatgtgaacaatgtcaaagatgacctgttctgttcttgtgttgtgaacatagccgaaggtaactaacattgttatcttgccaagttctacaatctgtcttcctccaaagccacaaagagggtgtgtgcatcatgtattttatcttctggctcttgcat

SEQ ID NO: 50304 - DNA, 423 bp, Zea mays
tgaccctaaattgctaagtataccacaagaatctttagtaccaagaagaaaactctacctaatttaagtgaatcattcaccatcaagtttaattgctaaagcacttatcatatcatgcatatatcttgctcattgcattcattggactgcaatctagctgacggagagtacatgctcatcctcgagcaaggaaatgtccaagaggaagaccaagagccggctcccgagactgccactgaggatctccccgcagccccatcatttgaaggcaagccctggtttttatgcataacccgatttatatatgctactttactacgcttaatgcttgtaggattgtaatgtgcacttaagtgtaagagttgcttgaaacctttagttgcatgaacttacgattcctttttgagatgaatactagtatgc

SEQ ID NO: 50305 - DNA, 421 bp, Zea mays
tcggcagtgctgccaccttgatcatcggctgttctattatcttttgtgctacctttactatatacaggctctctggctgggacagcaatagtttcaatacgccagggggaacagtctctatggccaccggggtgattccaccctttcacttaacttgaggacatcgccagcgataagcccctatgcgcaccaatcaggaccttaagcgatgatgatctcggaacactaatatatgccgacgcagacgacttccttttcctcacttgattttgggaagggtacctccaatgaagttatacgaagacacacactttacacactgtatgcaatctctctatgtcacgagcgccgaaagccaccgtcataacattcctctcttgccttagatacactccaaagataccatcacttggtgcttcta

SEQ ID NO: 50306 - DNA, 423 bp, Zea mays
  unsure (1)..(423): unsure at all n locations
tatcagcagtataagcatataagagagaaagctgttttantaaatcaaccgaagcctatgcctttgtgtgaatacctagcacaacaaaaagcattgatgggatctcagttatcagacgaacaggaaaaaactctgttaagattcttgcttaacaacaaagatgtttttgcttggataaccaatgattcatgtggggtctatagagatgttattgagcactcgctcaatgtggacccgtctttcataccaagataaaagaggcttctgataatgttagatgataaatccgatagtgcacaaaatgaaatatagacctcttaatgtcgacgttaatagggaagtaacatatccagagtggctggctcacactggtcatggagaaaaaagccaatgggaacaggagaatgtgcactgatttcacat

SEQ ID NO: 50307 - DNA, 423 bp, Zea mays
tggacagtattctgcgatggttcttggggaaccttcgtggcaggagtagccgctgtgttggtcgcaccctccaaagttaaaacttgctacgcagcaagacttgatttcagctgcacaaataacattgctgagtacgaagctttgcttttgggtcttcggaagttaaaggcaatgggaattataacggcgcttctaaaaactgattcccaggttatttctggtcatattgacaagagttgtaaagcaagagacccgaagcttgagaaatatttatacacggtccgaaagattgaagcttcctttgaaaggttttctgtcaaaaatattcctcgaagagaaaatgaacatgctgatttgctagccaagtcagcagcacaggagctgcccttaccttcggaaagtatttttgaaacaataaaagca

SEQ ID NO: 50308 - DNA, 277 bp, Zea mays
taccctgtcccataccacggtatgtggatagttgcaaagtcttcaccacaacaggcctacattgaaataatccttaatcaacctggacggaacatcacctgttgctagcccaaggctcgatttaggtacttccatccttaagacttatttgtgtacctaaggatgaatagaatttcaagggaatcttgcagcaatatcccaccatgaaaatagtcttgtaggtagagtcattcttcctcaggataacccctgaactaggcattattgcaaaggacaa

SEQ ID NO: 50309 - DNA, 351 bp, Zea mays
attttcacggcgatcaagaaaatgtcctccatgacaacgaagggtaaatgggccgacctgctacctgaagcagtatgggcactgaacacgactgagtgtcgggcgaccggattcactcttctttcgcctcctatacggatcagaggccatgaccccgcaggaaatcaaacatgggtccccgcggacaagcgcttcatcagtacccgacgtcgacgagctaacctccaaagaactcatcgacagagaccacgtcttcgccctgtaggccctcaacaaataccaagcccaaacgaaggcctggcgcgatcacgcagtcgttccaagagaattaacgaaggggacctcgtactt

SEQ ID NO: 50310 - DNA, 328 bp, Zea mays
tctacgtatatatgtcggcttaattacaatatctcactctttcgatctatggaacaagagatatcttgctcttgcaggcaggaatgccataagactggcgtccacgctgaagtgagcggtaccggagctgagggccaactggagcggtggaaccactatccaagtgaccactgtccgcacactcatcccgcgggaggaccgatctgaccacgagccctaatcaacatgtctaatgcatggtccaaatccttgtttaagaagaaagctaagacgaatgagaccgtaaacctatgattgacactaccgacaagtgagaaaatcacaccga

SEQ ID NO: 50311 - DNA, 221 bp, Zea mays
ctcacatgatcgcaacctgacgtgctaaatattttgctaataccctcgcacctgagaaggcgcatccgtacgcacgatcactcaagaaatcctcaaaagctttagccctgcggaagaaccatgcaattgggccttcgggatcgaccaagaccaacggagtcttcactcgaatatgccccaacagcggctaaacaaactaacatcatatatacacattctac

SEQ ID NO: 50312 - DNA, 407 bp, Zea mays
tgtggaaagacaccgaacctaaagtgcatgtcttaattgaagggccacgtggaacggagggaaaacaggaggaggcgcccggcgacgggcggcaaggctgttcagccttgccttcgggctgaaaacgaagggttctccatggcgcacgggccgaaaattgaggctggggcacgaccccgaaaataagctaagtccaagcatgcggaaagacaccgaacctaaagtgcatgtctcgagtgaagggcaccgcggaacggacggaaaacgggaggaggcgtgctgccacaggccgcaaggctgtttggccttgcgtttgggctgaaaacaaagtgctcgccatggtgcgcgggccgaaaactgaggctcgggcaccaaccccaaaaaaactaattccaagcatgtggaaa

SEQ ID NO: 50313 - DNA, 430 bp, Zea mays
ggaactataaaactcaagcttctaaggagagcacattcaggatttactttgttcattttgagaaagacaggatttgtatcgcatgccacgcaaggaagcaagttggagtccatcatccacacaagaacatcataacgaccgacagggccgcttgagctactccacatggatctattctgcccgattgcttacataagtattggcgggagtaagcattgtcttgttattgtggatgattattctcgcttcacttgggtattctttttacaggaaaaatctcaaacccaagagaccttaaagggattcttgagacgagctcaaaatgagttcggcttaatgatcaagaaaataataagcgacaacgggacggagttcaagaactctcacattgatgcttccttgaagaggagggcatcaacatgagtctcct

SEQ ID NO: 50314 - DNA, 413 bp, Zea mays
  unsure (1)..(413): unsure at all n locations
tcgatactatctttggagcttcgttcttctactctacagcttcagctntagtctggtcaatctgcacgaaggtattataagctaaattcaaaaattcaaaggaaaaggtaaggataaggtatgattttgttaccagcttgaggtgactccgagcttcatcactagctttgctccgaccaccctttgtccatactaactttataaatctatttgcaatactccgagccagattgggaacattatctaggtctgctggtgacaggctgaagttgggtctattaacaatcttgccgtgtccacagccaaacttcaaaaaagcaacaactgtgccccgagaagctgccagagcacaaaagtcgctatgcccagctataacttcgtcaagatcattaatttcaccttcaatgtgctcg

SEQ ID NO: 50315 - DNA, 390 bp, Zea mays
tctcttgaacaagtgccgcacttactgctgagttctaagctgccacatataacatagaggagcccctagcgttggtggagttagtgtcgttaggtctatcaaatactgcttcagctcgtcaaaggctttctgatgaactggtccacattgaaaaacttcagctgacttcaccatttcaaaaaatgggagatctctctctgctgatctagatatgaataggctcagagatgcaagtcttcccgtcagttcctgatcccccttctttgtgcttggcggttccattctaagaacaactttgatattatttggattagcctcaatcccttttgttgaaactaggcaaccaaagaaatttcccttctttactacgaaaacacacttttctggatt

SEQ ID NO: 50316 - DNA, 344 bp, Zea mays
tatgaaggagcttcatacacccgtgtgctcatttgtgatgccagagccaacccatagtagccttaaccaatcagcacgcatttgaatacgcgttctctttgaaagaccaactaaactacagcttgccgtcgatacacccttagagctaccgaaccatcagtccttctaatgacagatacatcaacatttggtgacaagcaatcgtagcccatgtggcacaatggacttacagaaaggacggctgatcctaatgactctactagaaatacatttgaaatataccgctcacttgtgataggaatatttccaaacctccgaccttgccttgaatgccatctccgaat

SEQ ID NO: 50317 - DNA, 425 bp, Zea mays
tggcctcacgcgagatggaacaacatctcccatcctaggctagcctcgagcgatacaaaactgtgtctcccacctagagttggcctcgggcaagacagaactgcgtctctcgtccgaggatggcctcgggcgagacgaaactacgtatcccacctagagctatcctcggaagagaaggaactgcatctcccatccgaggttggcctcgggcgagacagaattgtgtctcctgcctagagctggccttgagcgagatggaacttcatctcccgtccgacgttggcctaaggcgagatggaactgtgtctccccgccataactggccttgtgcgagatagaactgtgtctcctgcctacagctggcctcaggtgagatggaactgtgtctcccacctagagttggcctcagatgagacggaactgcg

SEQ ID NO: 50318 - DNA, 337 bp, Zea mays
tatctcgaaacgcctcacgtatttcctcccttactatattgatggcagccgtggggagaccaccgagtctttgatccaacataggtgagtcttgcctggatggtgggaccctgtctacctccccattgggatgggttttgcagcgcgttaatgaatgccctatgaggctcataagactggccattctcttctgggcttctatggacccgtatagggctaccctacgggctggacataacatactattgtgctggtgtgacatattgtgggatggggagtctacctgggacagataccgaggaggatatgcatcctccttaaaaactctgtgccggac

SEQ ID NO: 50319 - DNA, 313 bp, Zea mays
ctatacagggagaacacgtgataggccttttcttgttcatctagacaaagatagaccttgtgcagcttgtcaagcaagtcaacaagtgggatgagcacatcacagcaagaatgctgatgaccacgtccagacctctggagctgatacatatggacctcatctgacccgcggcctatctgagcatacagaggaagccagcatggtctagctactgctgatgacttttcccgcttcacttgggtgctctttttgcaagataagtctgaaacccaagggaccctcaagcgctttctcaaaagagctcaaaatgaaa

SEQ ID NO: 50320 - DNA, 271 bp, Zea mays
ttgccgccgcggtgggaatgtcgagctaactcaagcggagacccttcccctacccaaaaaggcgtgggacacggcacactctgatgctaagcactctcacgataacagtacgcttttcaatggccagtaatctttcactaccccataccggcgcctggatcgtatgacaaccaatgcaagggactactggcttatacacgtctcgagcacagggcatgcgtaccacaatattcagccatttggcatggaaggaggcgcagagcatacacac

SEQ ID NO: 50321 - DNA, 403 bp, Zea mays
cttaattcgtcggcgggtgggacgacatattctttcttaatgctaccactttttagtaattcatcaaatatcttatcacatttgccgacattaaatgtaaacctaatctcctcctgttggttcttttgaactgactgccaggacgagcaagccgaagatttggcctgttcgggccaaactatttcggcagtgtaaacttcctttggttcactcgtcgaactactatgattgtgctctactatatggacactatgatgaatcgttttgactagttctttgcttccgctttcacaaaccaaaactctctgatgtaattgtgctagcgtaaagaactggatgccgtctaatttctcttttaaataatagcgcaatccatcaaaggctattcccgctagttgcttat

SEQ ID NO: 50322 - DNA, 406 bp, Zea mays
tgacaacgatgaaatggcgctcatcatctatagctttcgccaaatcctcaagcaaaggagagagaaggactacaaatcccgctccaagaaagtgtgctacaagtgtggtaagcccggtcactttattgcaaaatgtccattatcaagtgacagtgacagggataacgacaagaagggcaagaggagagaaaagaagaggtaccacaagaagaggggcggcgatgcccatgtatgccgtgagtgggactccgatgagagcttcaccgactcctcctccgacgaggacgccgccaacatccccgtcagcaaaaggcttctctttcccaacgtcggccacaagtgcctcatggcaaaagacggccaaaggaagaacgaaaatctaatactccactaatataaacctcta

SEQ ID NO: 50323 - DNA, 357 bp, Zea mays
agctcttcatacccacacgcgctatattgctatgacccatccatcccatgctactactagctatttagcatgcatctaaaacggcttacttttttgacaaatcaaataaatacaatttgctcgctaatacaccctcaaaaactcatgaaccatcaacttttctaaaaacagacacatctatatttgtctacagaccagtttattccatatcgctttacttgactaacaaataggaaattataccctagatactctacttacaacacattatagatagagtgctcatttaaaattgccatcttacctaaccactttaccctgccttgatttccatcaccgaatatgattgaatcttga

SEQ ID NO: 50324 - DNA, 411 bp, Zea mays
ttctcaacctttcttggtgctcaatgaatatatcttaatgtgtataatcggctcaagccatgattttaaatatttcatacccttttccctattttcttgaatattgctcatagggctcacttatggttttcattatggttgcaacattattacctttttgaaggacccatctgttttgatcatgatacttttaagtatatgcttggtggattcttcattcttaagtcaatttgatgctcatgcttaatttggttcacataaaatgatggttcttggtttggcattttgagagaaaccctatgtgacactggggtgtcacacccaagtcgggtccctgttggagaagacgacacccattatcgtgtgtccgaaccggaggtctgtcgccaacgccgcaacaatgacagtcgc

SEQ ID NO: 50325 - DNA, 348 bp, Zea mays
tttggatttcagaaaatttttatttagaatcaatcagcctcacatgcaaacgggtctatcaagggctaccgaaaaattcgccatcgatctacaactcactccttcaagaggatgcttctttaggaacatgatctctgtgaagtgagacggaatcaatgcgcttgggcgagaggctgacacgatattacaattttaacaaactctcattggacacaacaaggacctttctagaacacccatatctcaaaagacgcccaatataaaattggtgcacaagccccgcgcaatgattccgctcccgcgtgaaaagaacactatatcttcttgatgccatgatctacgatccct

SEQ ID NO: 50326 - DNA, 162 bp, Zea mays
gatggaagcagtaagactgctggactccgtctcttttcacacccaaactcggagtactacttcactagccgagcatgcctccgtgcaggtagacctggacaagaatggcagcatcgaccacaccgagaccctcactgccatgaggaacagcgctcaactgga

SEQ ID NO: 50327 - DNA, 437 bp, Zea mays
  unsure (1)..(437): unsure at all n locations
acaccaaaaactagctcntcacgcgcacccctcacaccggcggtggtgttcacccacccaccaacaccggaccagcgggcgccggccacctcaaagcgcaccggtaggtcctcactaccgacctcgccacgaaaacgagaatgggaccgtcccagaacacgagtaccgccctcgcggcgtatgacgagccgtgagacccccggtgcggctggccaccgtctgccggacagaggacaaaatgctgcaccctggctgggcagcaacagataaccttccccggcatggctggagggcacctcctccacagagctggaggatggtttccacccccagaagccggatgaagaagcgggacgccagcccacgcgaaggcaggccccggctcgcctcgccctcctccccagcaaggatgatgaagatcctcgaaactgacggcc

SEQ ID NO: 50328 - DNA, 424 bp, Zea mays
tctataaggagaacatattttatgactaacaaatgtttattttgagaaagacaggatgtgtagcgcatgccaagcagggaagcaagttggtgttcatcatccacacaagaacatcatgacgactaacaggccactggaactactccacatggacctattcggcccgatagcttacataagcatcggtgggagtaagtactgtttagttattatggatgattactctcgcttcacttgggtattctttttgcaggataaatctcaaacccaaaagaacttgaaagggttcttgagacgggctcaaaatgagttcggcttgaggatcaagaaaataagaagtgacaatggagcggaagtcaaccatcttcctaacgaatccgaagagccttcacaagcacaagatcaaccatcttccttcatgcaa

SEQ ID NO: 50329 - DNA, 428 bp, Zea mays
aggaactatagaaactcagcttgtccgaaagcttcaagaacttatggagagctaactaccgcaccggcatagggcatgtcggacatccacaacggattctatgtgtattgtgatgcatcacatttgcgactcggatgtgttctaacgcacaaaggcgcagtgatagcttatgcatcaaggcaactatagaagcatgagaaggactacccaacacatgatttggagttatgctgccttactcgcccctctaaaaatgtggaggcactatatgattgggaataactgccacgtctctaccgatcataagagtttggagtatatatttccatacgaaaggacctcaacttaacgcaacgaagatggcttgagttgttcaaggactaccaattggaccttcattaccattctagtaaaggaaatgttgtggc

SEQ ID NO: 50330 - DNA, 392 bp, Zea mays
  unsure (1)..(392): unsure at all n locations
caaccnaaggcccaaactagaccagtcctattctttaatctccccggcactcaaaagcgtatacactatgcactagtcgggtcctgagaaacgcacgcgggactgcacctaggaggaggctacaaaacccaatgcgctcacgaaacctctagtgcaaaaccgaaatgcaaacgccaccatttgacaacgctatctaaaaacgagctagcccacggcaaaatactttggagaacacgacagaatatgtgagggtgccaatacccgccccaaccaagagacttttgcgagctcataagccgggaattggcctgcgccaaaacttcatagaagaattcaagagtccctctgtctgggctcaacggacagtcccggatgcacccgacactgaacta

SEQ ID NO: 50331 - DNA, 437 bp, Zea mays
  unsure (1)..(437): unsure at all n locations
ctatanaatacccagcttcttgtgcttctgaattcactggaatttgtttatttcccgagcaacttatagaacggtgagcctttttgtcccagcctagatatgaacctgctcacagctgccatacatccgatcagcctttgcactctcttctgtaatcacggtgcttccatcctcatgatatcccccatcctttcaggatctgcctcaattccccggggacagacaatatacccgagcaactctcctgctggtactccgaagacacatatctcgggattaagcttccaatcggtatcgccatatactgttgaacaccaactgtcaatctttaatgaaatcctctgaattctccggtctgagcaccacatcatccacataagcttgcacatgcttgccccaacggtcagttcaacatgtctgaatagctctctgataac

SEQ ID NO: 50332 - DNA, 444 bp, Zea mays
  unsure (1)..(444): unsure at all n locations
tctaaaggcggaacacattttcgtgactatatctttgttcactcttgagaaagtacaggatgttgtcagcgcatcgtcacggcactttaatgcacagatggctagtgtcctctctcctacgcgaaaaacgactcttcgactatccgtacagagacacctggtagctcgtcttcactatggattntatatcggccacgatgagcttaccataagcattgcgggcgcaacacagatctggactgcaactggcggacgattatcctctgcctaacttgggtattgctcttacaggaaaaatctccaaccccagagacactcaagggattcttggaccaactcaaaatgagctccgttacggagcaagacaactagagtcgaatcgggaccgaggttaagaactcttaaattgaatgccttcttgaagaggagggcattaaacattac

SEQ ID NO: 50333 - DNA, 414 bp, Zea mays
tctgcgcgtcgatccgatctccgtccgacatgcgctgcgcccttccacgggatcattcctgggaagcgcgtccagcccctcgggccactcgatctcccaatctgctttgggacaccctccaacttccgaagggaaaccctgacgttcgaagtggtcgggttccgaagaacctaccacgccgtgctatggaggccatgctacccgaaattcatggccgtccccaactacacctacctgaagctcaagatgccgggccccaacggggtcatcaccgtcggtcccacgtacaaacacgcgttctaatgcgacgtggagtgcgtggagtacgccgaggccctcgccgagtccgaggccctcatcgtcgacctggagaacctctccaacgaggtcccatacctgaagcgccatgccggc

SEQ ID NO: 50334 - DNA, 414 bp, Zea mays
tctaaagggagagaacattctaggattaacaaatgttcattttgagaaagacaagatttgtagcgcatgccaagcagggaagcaagttggtgcccatcatccacacaagaacatcatgacgactgacagaccactagagctcctacacatggatctattcggcctggtagcttatataagcatcggcgggagtaagtactgtctagttattgtggatgattattctcgcttcacttgggtgttctttttgcaggaaaaatctcatacccaaaagaccttaaaaggattcttgagacgggctcaaaacgagttcggcttaaggatcaagaaaattagaagcgacaataggacggagttcaagaactcacaaatagaaggcttccttgaggaggagggcatcaagcatgagttctc

SEQ ID NO: 50335 - DNA, 419 bp, Zea mays
  unsure (1)..(419): unsure at all n locations
tcgcacctctgaactaactcggctacatcactcttcgttgttggccaataaaatcctgacctgaagaccttcccgactagtgttctggatgctgcatgtattccacattgcccagcatggacctcctccagaagtcgcttcccagtagatgggggaatgcacttcatgaggacgcctgatgcaccccttctgtacagtgtctccccaatgagtgtgtattgagccgactgtctggcaatgcgctcggctgaattcttgtcatctggatcctcttcattctttatatacctgatgattggccttcttcactcatcacagtttgactcgggttgatctataatattacactcttctgcttgatccattgagatgctcggctgtagcattncttgcacaaagacttccagtgggacctgaat

SEQ ID NO: 50336 - DNA, 417 bp, Zea mays
gtttcttgtcgtcatcaaccttgacatagaattattctgatttccagcctgctgcccacttgcttcggtagctaattacacggaacttcgtagctttccgataagcaaaattatagcacccaaaattgtcatgtaatccatcctttctagcctttgtctgatagtgtagttcatgaacccggcagaagctgtccgcaaatggttccactgcttggcttctgagtgcccagatataaacaataagcctaacgatagcgttaggggtcagctgatgaaaatagataccgaacctcttcagcacctctccaatgatcccatgtagggggaatcttatcccaccctttaaaaagctcttgaacataacaacttcatctttctccggttttggtgtagtatcttcttccccgaagcgcagaa

SEQ ID NO: 50337 - DNA, 375 bp, Zea mays
tctgcttcgccgctgatccattcaaaagggttctttgatcgcctcttataaagatggactcgctggagtatgcgccaaccctggtgaagctagtctctatttttctcacacactctatggatttttcataacatcctctctttcgaagagcgcaggtctacaattgtcttctcccaataattcttccagtaatcactggcgtctcggtcagcttcagcaatagcacatttcaattttgcttcagccagctattttcgaagatatttaatttctcaattctgaactacaccttgggttttgaaagtaacttcatcttcttttatgttgttcaccaatgaatttaggaatttatcgttttcaagaccttcgatcctt

SEQ ID NO: 50338 - DNA, 415 bp, Zea mays
  unsure (1)..(415): unsure at all n locations
ttaactctcgcgagaccttttctcatttctttcttttatggtaagctcatcatcgtatgtgatattctatgcatatttacttcatttgttctcttgtatggtgtactgtttgttccctaatttgaatggatggatgtatgtatgcttgcaatcgcatatagaaccatccggttgaagagcccgaggaactcccatgaaaagcccctgagcagcagtcggttggtggaggcaagtgtcccttgacctatctctgtcctattcattctttaattcacctcccgctttacacatttatgcataaggattgactagctttgctatccatgtccttgtttacctatttgggttggattattattgcctagctttatgctatntcttaactctaatcaatgaacatgatgagattatctat

SEQ ID NO: 50339 - DNA, 405 bp, Zea mays
aactatagaaacccaagctttgaccttcgccatgctgacgaataagtcattttgtcctacggctgcatcgcagccaccggacattcaccaagaaacattatgcgaagctaggagccccacaaggaaggctaccagaccaacacctcaagaggaggagctggaccaccaatatagaaaacttcaagccatccatcaacaggctcagccaaagacagcaaagacgcttcgccttgccacacctcagaacaagatcgatgaagccgctgaggaaatgcgtcatctcacccaagatgatcaagaaccaaggcctcaacacaaaaggcttcttccagaccatccctactaccaagatgaatggcatgatgatttccatcatggcacatttgcctatcatgatactcatcc

SEQ ID NO: 50340 - DNA, 411 bp, Zea mays
  unsure (1)..(411): unsure at all n locations
cactctagcatacgtaatctcgtcggtggaagtgatgatccaaagatattctttctatctaacgtctacaaccctgactcaactgctgttattccacttactatattcaattgtggagagctcattgaacacaaacatattggctctatgtcaatcgaaattggtcatgcttatgaactgattggaacatttgcaacactcttgatccatttaaactataaggagtaaaccttttggggggcatttaagcgaaatagggaacttttctttacgcactgaatgccctcctgatgcaataatggccatacacattaaaagagggctgccaaatcatagttgacactggatataaactttgacgaggaaagtcatgaacgaccacacaacacatgtcttanacaaatctcttaa

SEQ ID NO: 50341 - DNA, 407 bp, Zea mays
tctccaccatgtcgctgatagccaagttttttctttttcccccatcaatgaccaaacgacatgaacgcttcttaatgacacactctggttgaaacaacgtatgtcgctgattctgctctgccttcttcatttgcgcactaagcacacgctgtacaatgaggctctcatagtgctctgcatcatctggaccaatcaattcctccggtggttccttaatgcctgcatcatcagccgcacgcaaagcaagtgtagcttcatccaaatcactaccagacgaatacccaccatcgtcttttaccaccaaaacacactgattaggacaatcacgctgcacgtgtccatagcccttgcatctgatacacaaaacatctcttgtctacctgtggaagctactgaagaggcactac

SEQ ID NO: 50342 - DNA, 408 bp, Zea mays
tgtaataatataaccatgatctatatgactcttttattgtagaaaaaaagaaaataaggaatgtttttcataaatactataaaagagggctctggagatctcacaatatcgattttaccatatcacgttgtaattgtatgatcatgtaaaatattattttacgctgtagattgcattactcatagaatggattttaaaatgagagatatgatgagtaaaagttaatacggataactttataggaatgttttatgcgtgaagtcgctatattggtcctttgacactaatgagactatagaacgacggaaacgagaccgctcgataggagcggagcaattttttccgctcttctatcccatatcttgtcttttcctatttcactagtgactaatgtgccgcctacacctt

SEQ ID NO: 50343 - DNA, 412 bp, Zea mays
tctaagggagaacacgtgatatgtttaactatacgtgcaattcgaaaaagatagaccttgtgcagcttgtcaagcaggtaaacaagtgggaggagcgcatcacaccaagaatgtgatgaccacttcaagacccctggagctgctgcatatggacctcttcggacctgtcgcctatctgagcatacgagggagtaagtatggtctagttattgttgatgacttttcccgcttcacttgggtgttctttttgcaggataagtctgaaacccaaggaaccctcaagcgcttcctcatgagagctcaaaatgagtttgagctcaatgtgaagaagataacgagcgacaacgggtccgagttcaaacaccttcaagtataggagttccttgaggaggaagggatcatacacgagttc

SEQ ID NO: 50344 - DNA, 416 bp, Zea mays
tgacggcgttcttggcgctcaagcatagctgtttgacactcctggtcttctccatgggcatcagttgacatctagactgacgagcgaggagatgaagttggttcacgtgaggaaggagatgagtcccagaacttacagaataaaggtcgcatctattttcctggtcttgatatattctctaatgatatgtgtcaatatgtccaatggtctggctgcttcccatcttctcaagttccttgtgaaaattacagcatctggctgcaactgagtttaatctctaaaatgtctactcaaatatcttactgcagtttttgcaaagctgaacttagcagttctttggttttgaattggactacgtaatggacaaatcatgaagtttatgaattctcagttattatggtgtgatgtgcttgact

SEQ ID NO: 50345 - DNA, 421 bp, Zea mays
tgaagccatggctagtagcatatgccaataatattcgaattgactcaagcctagctacgggtgcataggtttcaccgaaatccaaaccttcgacttgggagtatcccttagccacaagtcgagctttgttccttgtcaccacaccatgctcgtcttgcttgttgtggaagacccacttggttcctacaacattttgattaggacgtggaaccaaatgccatacctcattcctagtgaagttgttgagctcctcttgtatcgccaccacccaatccgaatcttgaagtgcttcctctaccctgtgtggctcaatagaggaaacaaaagagtaatgctcacaaaaatgtgcaacccgagatctagtggttacccccttatgaatgtcgccgacgatggtgtcgacagggtgatctccttgaat

SEQ ID NO: 50346 - DNA, 422 bp, Zea mays
tatcaagtctactctcatatggatccggaattatattcatatctgctctgaggccgccgtaatcattgttttcttaccgagacatttcctgccttttctgcccatggtgctgcgtcaccctattttggcccaatgggtcgtgtatcaagttaggtccattagggacgcatcctatggttgcagcacgaccccaatacccttgtggtcgtcctcccatgtttataaaccccctagccgccaccaagaacagcgggttttgtttagatcaagtttagctctcgctacttgcttgcaagcgcgcgtgctagttcagccgcccgtcttcttgtcttcggaaccccaccatattgtagttcgatctttaaacctacatttagatctgcgaattcagtacttggtctacttgttcctgctagctcttc

SEQ ID NO: 50347 - DNA, 422 bp, Zea mays
tgccgtctaatacacccttaaaagctagggattcatcacttcttctaaagacagacacacccacattaataaatagacagttataccccatgtcgcacaattgactaacagatagtaaattgtgaccaagaaactctactaaaaacacattggaaataaaatgctcattggaaattgcaattatacctaacccttttaccttgccctgattcccatcaccgaatatgattgaatcttgggaatttttattcttgacgtacgaggtgaacattttcttctcccccgtcatatggtctgtgcatacgctgacgataatccagcttgaacccccggatgcataaacctgcaaagcaaatctaagcttgggtcttaggtacccaactcatgttgggtcctacaacggtatcacatatatccttagg

SEQ ID NO: 50348 - DNA, 422 bp, Zea mays
tggcgctgatggagaagcagaagtccctgatgttctgtctatcaaactgtgtgccattatcgactgtgagctcggacgggactccgaaccagcaaataatgtttgccagaaaaacttctgggcagtcttcgacgttattgtggatactgtcctcgcctcgatccacttggtaaaatattcgacggcgatgaaggtgaacttgaggttcccttgagccgtaagtagtggcccgacgatattgagcccccagcgttgaagtggccatgtgtgggcaatcaacttggtgaactgtgaacggttgcccaagcgaggagaaaatttctggcaggcttcgcacgacctcgtgactcgatttgcggcgcatattatagtgggccagtaaaatccttgacggatcaccttggcggcgagggccctgtgcc

SEQ ID NO: 50349 - DNA, 423 bp, Zea mays
tcaagtgatttgaagttccatgttgaatcattcctatgttctacttatccatttcttggcataacataatgtcagaagtcctaatggtaagacaatgatagaaagccttacgacttaacgcatctgccactacattaactttgcttgggtgatagtgaatctccaattcataatccttaattagtttgagccatctcctctgcctcatattcaattctgactgggtaaaaatgtactttaagctcttatgatctgtataaatgtgacacatatttcccagcagataatgacgccatatccttagggcatgaaccacatcagctaacttcaggtcatgagctggattatgttcctcatgtccgcgcaactgccttgaatcataatctatcactcgaccctcttgcattataacacagcctatac

SEQ ID NO: 50350 - DNA, 414 bp, Zea mays
  unsure (1)..(414): unsure at all n locations
actacagngaactattaaactctgctangacacttaattatggcgacggaatctttgctgatactcccggtcataaacatatgacaccattgactttcttgaaatctttggccactcgtcttattcaaaaaataatgagctataatttactttgctgcatttcgctttatcacttaaggtagtctgtggttgacttaaaattttacatttttgaataaatattttgaataagagtggtgaaaggcttcaaaaaaaagtcaacagtgtcatatttatgaaccgatgtactagtttgcagctttcatcactaaacattgaccaacaaaataacacattttgtgcataaagttgccgggagctcattatgtttgctctgcatcttattaagcttcctgatctacacaaacttatgat

SEQ ID NO: 50351 - DNA, 420 bp, Zea mays
tgaccaagaaataccagagtctggtatgcatatcttagaaaatattcccaccaggttgtttcaatccgatgcaacatctacttgttcacctaccatacgaaacttaagtaggaggccctgtgcaatatacatggatgtatcacatctaaaggacactatagaagctacgtgcaatggttggtaataacagaccagttgaagggcgcatcgctgaataattcaaatacaaagagatagcatctttcacgggcctgtactttgcagaggaacacaatgtcaatgcccatacgttgcggtatcatgtccacgaaccccctattaccgatattgaaatttttcaatggaggggcaaaactgtaggacccatcacaacatacttgtttaccaacgacgaatggaagaactgtttactctacatgt

SEQ ID NO: 50352 - DNA, 423 bp, Zea mays
tgcactatgggagcgccctttgcccctctctcttctgacgtgcctctccatccctcctcccccggagatcaacgagtggcaccagcaggcctatggggtgccatttatgtcaccggacgacgaagaataacacgaagcctatgctgatgatcgcgagcactttgccccgcctccctaccatggggatccaggtcaatcatactctcaccctccgcctccctacccggggctgggaccccaatctgctgaccctacgccatacgggtctgggtaccattaccaccctccatctcctgccgatcatcggacaacttcggcatctgtgtctcctgccgctgatgacccaccctgggactccacattagatgaagacctgatgaggaccctcttccctgactacacttcataccccccaccataccc

SEQ ID NO: 50353 - DNA, 314 bp, Zea mays
caagtgcccctcatgcgactgctcactctgggaacacttaatatcgttatcaataaacaccaccacacacttgtagagggtatccatgaacaccactgttcatctatctcatgaattaagctagcccatttctaaaacacgaatgacgcgaccgtgaactcctactgcccatacttaattatgaatgccatcttcagcatatgcgacggcccgatcttgagctaatcgcgtcatgacctcacatctatcattcataacacactggcccctctcaactaattgaataaatcttcaattcacggcacgggggcact

SEQ ID NO: 50354 - DNA, 417 bp, Zea mays
tttcaggcgactatcgagttttctgtcacaacaaaccgcatagatgatgtcgatcaccacgagtaacaagaaccagctctcgcttgtcctattcaaggctaatgagaaggcgggtgcacactagctacttttagtgtgctaataagataactaatcatgtgattaacaactctaaattttgtctctacgcaaaggttctcactcaggatttctccaaccgatcaaataggcaagaaacctcatatggacaaaatagaggggtataaatagccccaagccaaagcaactagttattggcttcacaaatgcattggacttgtatcatgcacaccaactcaatggatcgaacacatcctgtgcatctccaacggctagtatcataaactatatggtaatgtactgatatctggcgtttat

SEQ ID NO: 50355 - DNA, 419 bp, Zea mays
tggtcattttattgctaactgtcctgataatgaaagtgaccaggaaaaggggaacaaaagggagaagaagaagcactacaagaaagccaagggcgaggcgcatctatgcaaggagtgggattcggattgctcctcctccgactccgacaatgagggactcgccgccaccgccttcaacaaattgggtctcttttccaacgagcgtcacacgtgtttcatggctaaggagaagaaagtaagtactcgaaactctacttatgcttcttctagtgataatgattctagtgaccatgatgaaatagactattctagtgtatttaaaggtctagatagaattacaattggcaaaattaatgaattaattgatgcattgaatgagaacgataaactcttatagaaacaagaggatttattgtatg

SEQ ID NO: 50356 - DNA, 234 bp, Zea mays
gaccttactttgggaacaacgtgtcttgtcaacttccaacctggaaggtctccctgaagaacacagcacggtgcctcactatggtcaaagcggctccaactgtatctaccataataccatttaacatgctaacgctattcgcattcatctccctaaacgagtagtcaaagccattgataaacacgccagggtttccttcggaaaagtctacactcaagacactgccactggaag

SEQ ID NO: 50357 - DNA, 417 bp, Zea mays
tgtgaaaattctttatcccaacatgggctatttttttagccacagccaaccccaattagtcgtagcaattaaccccgtatccggttctggtttgctaaaatcaactaagtagagctgaccctctaatactcccttatatgctattgaactatcacttcttctagagacagcaacacccacatctgttaatagacagttgttgcccactttgcataattgagaaactgaagaccaattgtaatctaaagaatctccacgaaaaacattggaaatagaatggccaggtgatatagcaattttaccaaatcctttgaccaaaccttgatctcatccccgaatgtgatacctctttggggatcataattattctcatacgatgagaacttttatggtcttccctgtcatgtgggttgcgca

SEQ ID NO: 50358 - DNA, 402 bp, Zea mays
gctaaagggagaacacgtgatctgcctaacctatgttatcttctaacaaaatagaccttgcgcgacctagtcagcaggcaaacaagagtgaagctctcttctttccacaaatgtgatgaccacatcaagacgctcggagatgcctcacatggacctcttcggacccgcgcctatctaagatatgaggaaggaagtatgggctcgctataaccggaaaccattcccgttcaatcgagtatactttatgtaagatcaaaccgacacccaagggacccctcagtgcttcctaaagagagctcacaactagttcgagctcaaagtgaagaaaatactgagcgataatgggcccgagctcaacaacctccacgtggacgagtcccttgatgaagaggggatcaagca

SEQ ID NO: 50359 - DNA, 418 bp, Zea mays
  unsure (1)..(418): unsure at all n locations
tctantgggagaacatgtgataggtctaacctatgttcatttcgaaaaagataaaccctgtgcagcttgtcaagcagggaaacaggtgggaggagcgcatcacagcaagaatgtgatgaccacttcaagacccctggagctgctgcatatggatctcttcggacccgtcacctatctaagcatatggggaaataagtatggtcctaccattgttgatgacttttcccgcttcacttgggtggtctttttgcaggataagtctgaaacccaagggaccctcaagcgcttccttaagagggctcaaaatgagtttgagctcaaagtgaaaaagataagaagcgacatcgggtccgagttcaaaaaccttcaagtggaagagttccttgtagaagataggatcaaacaccagttcttcgct

SEQ ID NO: 50360 - DNA, 410 bp, Zea mays
  unsure (1)..(410): unsure at all n locations
cttatacacacaaccaagcgggganttgtgcatctccgacacaggactaaaaactaacttgcaatctgtagagagcaactttttttcgaactgcgaccaaccgtacatggcatttgcggttgggacacgcatgatgccccttaagaagctcaggaggctatactcacatgttggggccatcgataaattccccatggatgagtaacacccatgctatctaacttatccaaggtacggaactatcaagacatatattccggttggagaccaatacatcataactgacctagaccaactcactggctctgaatctctattttgcaacaaggagcatcaatcagatgctcacagccacccagagctcatggcagcggaagggtaatgtatatactgcaacactacgaaaaagt

SEQ ID NO: 50361 - DNA, 419 bp, Zea mays
ttaatgcacaaattctaccccctttacatcaaacatcaaaaccatattcaagcaagaacataggatgacctcaagggacagcatagtgaaatgcaacacactaacattactcccccttacacattaaacatatgccacacacgcatttgagaaaaattaaggtgcaaatacgcaaaaaaggtcaatacctccttttgtacctttaccattggtatggagtactttccatctaagtaagcggagttgcttttgtcatcaatttaagattctcatcttgaaagctttatctctagggagcttcttcaaacttgtgcctgatcctttatcctgaccttttcttgttgctaagacaccaaacttaaaacaagttatagtattgtggcacaagatgaagcttctattctattgattaccaaacg

SEQ ID NO: 50362 - DNA, 414 bp, Zea mays
ttgagcttaattatctccaatattttcttaactacaatgctcacactcttaagcaaagttgttctcctataattgggctacaattttgatgcggtgacctatggcaaaaacctaaaaaattgaaagttacaagggcttaaagctgaatcaatcacactggaattcagacttaaccaaaaagggtcaagtgtcgctcttttgcacttaagtccaaatctcaagttttggattgccaatccaccttcttctgaaccatatgacttaggataccctattaaccttggttttgcactttatcccaaatgtgcatcaattatgcacataaacccctacggtttagatttaaggttttccacggtttcaattacggtttctggtaccttacgggtataaaagtgattcaagtttattctt

SEQ ID NO: 50363 - DNA, 289 bp, Zea mays
gcttccatagggagaacacgtgatatgtctcaccattgttcatttccaacaagatagaccttgtgcagcttgtcaatcctggaaacacgtgtgatgagcgcttccccattagaatgtgatgaccacttcttgacccctggagctgctgcatatggacctcttccgacccgtcgcctatcttagcatagggggaagtaagtatggtctacttattgtagatgatttttcccggctcaattgggcgttctttttttcggataattctgaaaccctagggacccccatacac

SEQ ID NO: 50364 - DNA, 415 bp, Zea mays
cggactcccctgtcgactccgacgacccgccgttttgtccatccttgtgtcggaggtgcgcgcttatatacacgcgcggggggcgcgcttcttgcctgttacggaagggggaaaggaagcgatcggtcaagagacccccagtgctgcgagtgaatccgcgagatctccgtacggggatggtccggtcagtgagcttttttatacggggcgacccacacgtgccatgggacccaggtattaactcctcccctcctggcgctgcccaggacaggatctcgtctcctttttcggacccaacgatcttctctcttcaatgagcacctccgatgtgcttggattggatatcttgcacactccgcgatccttattttgtgtgccctctgatctgatcgacgagattcggctggcgagattg

SEQ ID NO: 50365 - DNA, 334 bp, Zea mays
tgaaactttctacaagttcgtggaatagaacctgtctatgtctattatggagtcctcggaggcgcttgaaccatctttcctatcagccaccgatagttcatcaagagtcacaatcttatatgtgcaaacacatgaaaatcaatgttttaccaacctttactgtcatccggtgctagcaaggagatcccaacaaagacaaatgtcatgcctaacacacacataattatcctgagccgtatcaaatacctgacaccagaaaaacagaatcatcaggttataattacgaaatgcatgagtcacttcattatccgattataatacaccacgaacttac

SEQ ID NO: 50366 - DNA, 419 bp, Zea mays
ttgcaggagaaagagatgatatgaagctttttattgcttgagaaagtcaattcaatccttgttaactcaagctatcaatcctcaatgatctatatccatgattgaccccaaggtatttttcaaattactatgccttaaacccatatcatcctcaggaaagtattgatgtcgtacgaataaagaaatatcctgtgcaaaaacaacaagggctacaacgtggagaaaaccaaaggatggtaacatttatgctcttaagtgcaaatatcctaaattatcatttcttataagtcctgtcgtagcacatacaaaaacaactccaatgcttttaaattatgtccacattccttgaaaaaattcctctcatatggtagattacatattcatcatttctattctatggcaatctacatgctctaatt

SEQ ID NO: 50367 - DNA, 419 bp, Zea mays
ctacatgtggtctatgaacatcaaacaatcttatattttatagtgtaaataaagagacaggtaaaaaagctttattggttgaaacgagcttcatgagggtaaaataatactccgtccgtcccaaaacagtattcgttttaacactttatttatgtctatattcaaatggatgataatctagacacttatataaaacacatacatcaagtagtgtatgaatcctataatagcttaaaacaaattctaatacattaagcagtgtatgaatctcataataacctaaaacgaattctaatttgggatagaggagtatctacaatacacgtgatcttggaaacatgacttacaagagaccaatgctccacagattttatgggcattctggtccactgttacccattcgtttgcctgatccatac

SEQ ID NO: 50368 - DNA, 312 bp, Zea mays
ccgtcatatggacctgagaggagccttcctctctgtgtcactggacgccgaggtggattggagagcgactataacggctttcgggaccatgagtctccggagaaagtttatacactctctaaggcgctgatatgtccgctgaaagccccaccagcttgcgatgaatgccgaataaatctccttattagtaaaggcaataaagtcggaaaggccgatcactactttatttactgaaacattttgacaccacaagtgtgtatgccacacttatgtcgttgacatgatataagcgtctaccatccagctttcatg

SEQ ID NO: 50369 - DNA, 406 bp, Zea mays
gtgctaaaatacctttcatctaaattcttgatgataaatcagctgactgtttgcgggcgctaacataagcaatttctatatctccactttgttggtgatctctcacgaagtcataccggatgggtaacaccccctggagctacaagaacctaaactcgcgcatggcatcatacccaccgacaattcattatgtatgttacacctagagtgcatccactaggctaaaatctcaaaacatcgttgtgatgtgatgacatgacttgaactttaaccctacgatatggtacttacctacagactacgtgtgcgaaataataacggagtatgatctcaaaagttcgtggagatgttcaagagagactacaattgcaaagcgacatgcactttaaacccacaacacctaaac

SEQ ID NO: 50370 - DNA, 408 bp, Zea mays
  unsure (1)..(408): unsure at all n locations
ttnatcatttgcgatctatcatctatgcttcttttgcattgtgttcgattattgatcacggcaccttttaactgtgtatttacatcaatggctgattcttttcaagtctatcaactgtgctcacccaacttcgtgttatttgttcataccacgctgagggaacttgaaacaaaagtctaagcaaatatggtattcataacgtaccactgcaatgttcacttctttgatttatcacacaactcactgtcatgcatattatctcaaaacattatgttgttggaaccgcctgaattttgtacagtttacctactatatggaacattgggattcctacattctacattgccaaatagttcatctactctatgatcaaatttattattaatactggcttctatctcggctgta

SEQ ID NO: 50371 - DNA, 364 bp, Zea mays
atctgcattccatattgcctcagatccgactaaagcgccttcgggccctcagccgaatggagaccacgaaatcaaaaagatggctgaagatattatggatgaagtcgtcaaccggctcctgaacgaagccccataagtcgttttgagaaaagattgaatacttctgtaaaaacatctgagttgtaatatagtgtaacattttgtgaccccaaatgtaatatacctacttaattctttaccatgcatgaaactttacacgtaccgctttttgagctttgactaaaaaacacctttcctctttttcatgccttgtgaagaacaatttttttttgtacaacaattatcaaagttctgatgaataata

SEQ ID NO: 50372 - DNA, 353 bp, Zea mays
gcagtgggagttcttcatgacttggtcgatgacgagctgcgagtcaccgcgggcgttcaggcgccggacccctagctcgatggcgatccgcaacccgttgaccaaagcctcgtactcagccacattgttggacgccgggaagtggaggcgtagcacatatcgtaggtgtttcccgaggggcgagatgaagagtatgcctgcgccggcttctgtcttcatcaacgacccgtcgaaaaacatgatccagagctccggttggatcggaaccgtctgcagctgggtgttgacccattcggtcacgaagtccgccaagacctgggacttaatggctgttccgggagcgaacgagatcg

SEQ ID NO: 50373 - DNA, 419 bp, Zea mays
ctaccaaatggacgtgaagagagccttcctctctggaccaatcaacgaagaggtctatgttgagcaatcctctggctctgaagacagtgagtatcctaaccatgttctataggctctctaatgcgctttatgggctcaacgcaagccctaagagcatggtattaatgccttaaagatcttcttatcactaacggattcaaagtcagaaaagctgatactactctattcactaaaactcttgacaatgatttgtttgtatgccaaacttatgttgatgacattatctttgggtctactaacgaatctacatgtatagaatttattataatcatgacacacaaattcgagatgtctatgatcggggagttgaactacttcttaagattccaagagaaccaactcctagatggcaccttcat

SEQ ID NO: 50374 - DNA, 423 bp, Zea mays
atactgcgccaataagaatcagctcgctattgagcctgtcgcatctctctctcccaagcattgtgaaaatgcgtcttcagcaatgctgcaccgatactacgttggtatgattaatgatgcgcagaatgggccaatataatagaccctttagaccccctcagctctaatgacagccgagatactctcgttacaaagtacttcccagcatatatgacccctcctgctttttagactgcggagcctttttcaactaccaatggaacatactgcccatgtactgacgccgactcatattttactgacttaaggtcaggaacatccttctagagcctttctttggcgacctccatttgtgtcaggactattgtaataactttatcaccttattcatgctcaatatcttatgacctgagctgtgcatgc

SEQ ID NO: 50375 - DNA, 370 bp, Zea mays
taccctatagtcaggactataagttggctaccgtttcgtaccttatgcagttgaccatttctagcatttgcgcaatgaggactctatggaaaagccttatagtgagaccctgtccattcacctcggaagtgaatacgggtctagctaacccgggctagaatggaatcgcgactcatgggtaaagatgcgccacctctactgagtgtaaaactgatatattagccgtgctcacggttatgagcagcctgcactgctcatatgaaaattgaacttgaagatggaaataaatcgagatcctatgatctgccaacggtctgctcaagtggtttcacttagatgttttgacatactcttatcctttggtaatggg

SEQ ID NO: 50376 - DNA, 314 bp, Zea mays
tcattttgagaaagacagggtttgtagcgcatgtcaagcagggaagcaagttggtacccaccatccacacaagaacatcatgacgaccgacaggccgcttgagctactccacatggatttattcggcctgatcgcttacataagcatcgacgggagtaagtattgtcctgtaattatggatgattattctcgcttcacttgggtattctttttacaggaaaaatctcaaacccaaaagaccttaaagggattcttgagacgggctcacaatgagtttggattacgaatcaacaagattagaagcgaccatggga

SEQ ID NO: 50377 - DNA, 386 bp, Zea mays
tctaaagggagaacacgtgatatgtctaaccaatgttactttcgaaaaagatagaccttgtgcagcatgtcaagcaggtaaacaagtgggaggagcacatcacagcaagaatgtgatgaccacatcaagccccctggagctgctacatttggacctcttcggacccgtcgcttatctaagcatatggggaagtaagtatggcttagttattgtggatgacttttcccgcttcacttgggtattctttttgcaggataagtctaagacccaaggaaccctcaagcgcttcctaaggagagctcaaaacgagtttgagctcaaggcgaagaatataaggagcgacaactgttccgaattcaagaacctttaagtgtaggagttctttg

SEQ ID NO: 50378 - DNA, 440 bp, Zea mays
tatataatactccagctcgaccatgacgagatggcgctcgccattattagctctcgtccaatcctccaactaaggagggggaaagactactagtcccgctccaagaaggcttgctacaatatgaggacagtcctcgccattctattgctaaatgttctatatctagcgacatcgaccgaagcgaccaccaaaatgtgtgacgaaaggagaagaacaattactacgcgaacaacggcggtgatgcccatgtttgtcgggaatgggattccgaccagagctcaagcgactcctccgaccactatgactccgccaacatctccgccaccaaggaattctctttcccaacgtcggccacaaatgcctcatggcaaatgacggcaaaagaatgttacaacttactcctccactaaatatgaagtcttctagcgatgataatgcta

SEQ ID NO: 50379 - DNA, 409 bp, Zea mays
  unsure (1)..(409): unsure at all n locations
ctcttgtnctctcgaagataccacaaggtcactgattgtactcaatccgtcattatcatgtattaacgcctttacccacatatcaacaaggctaagctaacgatgcatgcacgcttatccaaaacaaccctattccaacttataagggatagggaaaactcccatcccctatactaacccggatggcttactcacataccgacctagctacccctctattatcctaaggctttacgaactacgcctatccttatacgcctgacgatctatccaacacttgcttctaacaacaattacttctgaaaacgagggcatttacattctattgattcctctgtgcggtgacaaacttccattccatctgtggcggaaccgcccatatattccaacctaagtgcctaacacccac

SEQ ID NO: 50380 - DNA, 398 bp, Zea mays
tgccctaaaagtctatgagtcttagggctattaatttatgtctaaaaatacacaagtctatgcttaagacttcttaaatgctacataattcatggttggggctaaaaatcttggaactatttttattaaatacaaaggaatttagaagtctagtaaaagtagctccatatttttatcatttttctagaatttcttatggatcttcaaacttaggcataaaaagaacagaagaaattatccacagtactggaccgaaaccagcacaggccgacccattaccaggcgaaacgtgcctgcgcgagcactctcgctggcgattttgcgcaaagatcctacgggatctgaaacactagttaataacccacacactgtttcatgtcttgctgacattgcgcaaa

SEQ ID NO: 50381 - DNA, 307 bp, Zea mays
tcagtcttagcgttagtctcggtcttagttattcttacttagacagggtagtttgctatatcccgtgcatcccatgtttgtcctgaagaaccatgtttggtttggatccttgcaatgactgccaccagagtggggggattccctgcattttggcctacccattatgttcatggagctaactatatagttcggaaaccctttattccactctcctctttatctcacaaactttgtggcctgggttggacaacagtgaagatgctcatcttgttcatcgctgttgaagaatctatcctctttccttatg

SEQ ID NO: 50382 - DNA, 416 bp, Zea mays
  unsure (1)..(416): unsure at all n locations
tagctagctatgagcctatgcgtgtgagcactcatgttactgcacacgctctatgttgcctcaaatgtgagtggctggaccgccgagggcttcatgcatggctaagggagctggaccgaggaccggatgaggaggaagcctgttcccgccggatggcactccggtaattaatctcgcgccgcggcgtttcattgggacaagacttgtgggacggggctcaacgccgatgcctggttagttttaagaaacgtaccggcccatcctgcattcctgtgccggccgtgatctaatgagagaaagagagtgagaaatttcactgcttntgttaccagtacgtccgcggcgtaactataactgctgcttcagcttgcaattgcgatgcaactttcttcaaactagtactagtacatgggtgg

SEQ ID NO: 50383 - DNA, 368 bp, Zea mays
aacaagtgggaggagcgcatcacggccagaacgtgatgaccactttcagaaccctggagctgctggacatggaccttttccgacctgtcgcctatttgagcatacgagggagtaagtatggtttaattattggtgatgattcttcccgcttcacttgggtgttctttttgcaggataagtctgaaacccaagggactctcaaacgctttcttatgagagctcataatgagtttgagctctaagtgaagaaaataaggagcgacaacggatccgaattcaaaaacttcaagtggaggagttccttgaagaggaacggatcaagcacgagttcttcgctccctacacaccacagcaaaatggtgtggtag

SEQ ID NO: 50384 - DNA, 479 bp, Zea mays
  unsure (1)..(479): unsure at all n locations
taagcttntgaatatccgagttataccagcttatgggagaggcgcctccttctatgtcccagcangagcagcatcagaagagtcctcagccagcatatcgagcatagcacttatctctgcatcactgggatccaaaggcacctcaaagtggacctgccgttcatcatcaggaatttccccgagcgaggcaactaacgcgctaacttcttcagcagagggtcgcactctaaggcccaaactgccatcagcgacaggtggattcgacacaaaaagagtgaacgccttgggaggaggtaggctccaggctgagtatgccactgnggcaccaacatttgataccttgcctctaagaatcatctcaagtcggttcaccaagtctacagagggaatccttctgttggtaacccgagtctagtcagctangcctctgtacagataaagccggtaagccctgtccttcaacggctgaatgttcttga

SEQ ID NO: 50385 - DNA, 228 bp, Zea mays
atcgcaggtgcattcaatgcgaggatcgcctgacgccttatcctgacacacatgcctcagtcggcaaggtcgaagtgaccgcaatcactttggccttccactgaccgacctgacaggaaaacagcgccgcccgccccggtccgactgctgtgccacccaccagggtgatgctgacaacagccaagttcagcctcacgcacaacaggaagctctgcctcgtccgacccc

SEQ ID NO: 50386 - DNA, 445 bp, Zea mays
  unsure (1)..(445): unsure at all n locations
tatgctgtctaaacctactcgcangcatcgcttatgccagtctctgtgttttctgcaaagatgcgccctgcaggaatggaagccactttatttgcaactttgatgtccatttctaatgctggaagtgttactggtggtctggttggtgctggtctaactcggatatttggggtcactagggatacctttgggaacctacctctgttgattggcggctgcaatcttagctcattgctgcccttacctcttttaagtctccttccagaaggatcaggtgacaccgataacggagaaacaaaaaataactgatttactgagggttttatctccattgttctggtactcaagtattgcataccacagtgcccatcttcaactcagatatggcccatctagttgaaattcanaacgccagtatagaaatacggaaatcacactggattta

SEQ ID NO: 50387 - DNA, 279 bp, Zea mays
tcttataatttatattatccggatccaagattaacttagaccaacaaggcagtttccaaatctgtatataatctggacagaatcccagacttgacttgggaaaatcattacttccaagcttctatacctatgggcatgaaatggttaccccagtaaaaagaaagaaggttgcttccacttttatataccacacctctacagaaaacatgggttaattcattgaactagctgcataacccaaactggtcataccgtcccaaaccaccagcaatagattta

SEQ ID NO: 50388 - DNA, 466 bp, Zea mays
  unsure (1)..(466): unsure at all n locations
tatgtgagtcatgaaatgttgcatcatgctgagcctaaattattcttttgtttgatgcacatgtttgaattggtttgaatttgaaatttggtttgagtttgatttgaaaaccataaagaaattaaaatagaaaagacattagaaatttcaaaaaaagaaaaggaaagcagctcgaacctcctccctccttggcctttcggcccatctagcccaattaacctcccgcatccgctgacaagcgggccccacctatcggcgccacgccccgctcgccctctccctctcttcttagtgggaccgccccatcagcatcgtgccctgctcgcccacgcgttccctcgctgactcgcggcccctattgtcagacccatcccctcccctgcaactgtcgcgcccgcgcccatggcgtgcgcccatgcggtcaaagcatgcccacatncncacgacctgcccatgtcacccgagt

SEQ ID NO: 50389 - DNA, 56 bp, Zea mays
gcggcctctctaaggcaatcaacctctgggttccatgccgcgcttggaccgtgacg

SEQ ID NO: 50390 - DNA, 458 bp, Zea mays
  unsure (1)..(458): unsure at all n locations
actcagcttgggcaagnccacttgaactaatcttctgagaaacccgtcctctcttttatatgacaccagagggtccaactcaaaaagcaatgtatgaattcaaaataattgcagagcatatcattacaagggacctggtccacgagtttttggctttcaagggttttcctagtgtaaaagagtgggaaatgccgaagttgaacggggagaaaaaagaaggtgagctcgtgcgcttaccttactacttcaagtttaagaaatactttaaaacaccttgccgagagtggctggatacaattgaagtgatgtgcaatgaaatacttggcaattattctaaaaaagaagatcagttgatgaccgcagccttctgcacccgtccgaagcgaagactaaaccgagtgctggacgccctgtgtttctaataccctgattacganaatctgaacaaaggtgccgga

SEQ ID NO: 50391 - DNA, 408 bp, Zea mays
  unsure (1)..(408): unsure at all n locations
actacctgatgcgtcacaatacacatcaaaaggtttttcaacgtccggttgagctaataccagagcaggggttaatagcaccttcagttgctcgaaggccttattgcattntgaggaccagtcaaactttgtatcatttntcaataaacccgtaataggtttaacaatcttggagaaatccagaatgaacctgcggtaatacccagccagtccaaggaaactctgtacttgatgtattgtagtacgcggtttccattctagaatatccttgactttgatggaatcgaccgcaatcccttttgcagataatatatgtccaagaaactggatttcctccaaccaaaacatgcatttgctgaacttagcatacaactggtggctcgctaagcgcgttagcatgatccttaa

SEQ ID NO: 50392 - DNA, 448 bp, Zea mays
tcgcacctttgaactaactcggctgcgtgatgcttctcttgtggtcaatagaatcctgacctgaagaccttcccgactagtgtcttggacgccgcgtgtattacacattgcccggcgtggacctcatgcacaattcggttgccatgacatgagagaatgcgtttcatgaagacgcctgatgcacccgttctgtataatgtctccccaatgagcgtgtattgagtcgactgtctggcaatacgctcgactgcatttatgtcatctagttcctcttcattctttatatacctgatgattggccttctccagtcatcagagtctgactctggttgattcacgatattacactcttctgcttgatccattgagatgctcggctgtagtatttcttgcacaagactccaggtgggacctgagttcgactggatcctagcttggacaatacatc

SEQ ID NO: 50393 - DNA, 445 bp, Zea mays
  unsure (1)..(445): unsure at all n locations
tatgactggtgctagaggtacacctttgtttatagctcctgaagtacattctcgaaccttccgagttgtttctacaaaatcagatgtttatagttatggaatgatgttactagagatggttggaggcaggaaaaatgttaaatcatttgctcaagtttcaagtgaaaagtattttccacattggatttatgaccactttggtcaaaacgatggattactggcatgtgaaggcacacctgaaaaagaagaaatcgccaaaaagatggttctggttggtatgtggtgcatccaaatattaccattgcatcgccctactataacaaaggttntggaaatgtttgatagaggcttagatgaattggacatgccaccgaggcaaaacttcagtcaaacattgtaagatatcgacacttgagatacatatttttacaacagtctagtacta

SEQ ID NO: 50394 - DNA, 370 bp, Zea mays
  unsure (1)..(370): unsure at all n locations
aaccttactggaacactaccccacttaaaataaatgagggtagaactctcgaattntggggatttgaactccttgaagtacctcataacacgggtgttacggagccttcttctgctgttgatgcttgagcaagcagcagagagatgactggcacggcgttgattctgggagaaccttcttcttagcttctcttcactatcttcttttcactgaccctctctttctctttgctcttcccactggaggattctatcgatgagtattaccatcatacagaggaggaagccaaagactatgaaccatgtacaacagtcttcaacccaagaatcaccaagcattgtgatcttacgggcgagggagtggaaaatgg

SEQ ID NO: 50395 - DNA, 414 bp, Zea mays
  unsure (1)..(414): unsure at all n locations
atattcacaaaagaaagaagcacaaccttataaaagaaagaagcctttcagtagtgaaaaatgtagaacacgtttccagagtaagctaatataacgagacataccttgttgtgagcagcagagccaccatactgaatagctaatgtatcacccatccgttcatagaaatccatcagatcatcaaccagaggatcatgcaattcaattntatgtgcttcagcaagtcccagtgcatgaagttgacgccctanagcagctaaaccatatgaaaattgtgcaacatttgtgcgatccaagcagtctatacaatttgtcctgaggacacccttctgtaataaaagaggtaccaacttagctgcacattcagtttgatctctgctacttctgtcatcacgtgaaattggcaacagtttt

SEQ ID NO: 50396 - DNA, 432 bp, Zea mays
tgtgtaatctccacttgaactaatcttcggagaaaccctacctcgttgcaatatgacaccagaaggtccaacccaacaagcgctgaatgaattcagaattattgcagagcatatcagtacaagagacctggttcaggagtttttggctttcaaagtttttcctagtttaaaagaatgggaaatgccgaagctaaaggaggagaagaaagaaggtgaacttgtgcgtttaccttactatttcaagtttaagaaatactttaaaacaccttgccaagagtggctagatacaattgaggtaatgtgcaatgaaatactcggcaattattccaaaaaagaagatcagttgatgaccgcggccttcggcacccgtccgaagcgaagactaaatcgagtgctggacgctctgggtttcgaataccctgactatgaaaa

SEQ ID NO: 50397 - DNA, 475 bp, Zea mays
acacataaaactaagcttatgaatacttcttgcttcatatggagcactccttctggaatgtattgctcccgaaatgccaacttaaattcgtccccagtgacttgatggtccgcaggctgaatggccacataatttccccaccaggtgctggcagggcctcttaactgctaagccgcaaacaagggcttctaggtctccgtgcatcgaatgagtccaaacttctgctcaatgacccatatccattcgttagcttcgagaggatcttcagctctgacaaatagtgggggacgggtttccgagaaatccaagtacgaagtctcgcacggtccctgtggataaactcttccgccttgttgctgaagttgttgtcccgccatttcacgaacgaagcgggtgttgtcagccgtcgcggtgaccaaagcagcgatagcctcagccaacgtgggtggaaccggaggtggatttgggtatcatc

SEQ ID NO: 50398 - DNA, 170 bp, Zea mays
  unsure (1)..(170): unsure at all n locations
aagaaccttttctacaagttatcactgatatgttnctattagcttaagtattttaattttgaatttgtttctacagagcttgttactgagcaaagctttaaaaatgcaccaagataatgaggatagaaaaacgaagctattgtccaaagtttagaggataaaatcaagga

SEQ ID NO: 50399 - DNA, 424 bp, Zea mays
  unsure (1)..(424): unsure at all n locations
tgttgtatcatacccggtttttttttcatttcttncatagtgtggttcaggggtccttactgtaagacaatgacaggaagctttgcgactcagtgcatctgccaccacattggcttttcctaggtgatagtggatttccaagtcataatctttaattagctcaagccatcttctctgcctcatgttcagttctgactgggtaaagatatatttcagacttttatgatccgtatataaatgacaagtatttcccagcagataatgaagccatattttgagggcatgaacaactgcagctagttccaaatcatgagttggatagtgctcctcatgccggcgtagttgtcttgaagcataagctatgactcggcccttctgcactatgacacatccgagtccactggctgatgcgtcacaatacaca

SEQ ID NO: 50400 - DNA, 361 bp, Zea mays
taaactaagaacctcagatacgaaatatattggggcctgcctcttaacatggccttcaagcttctcctggacaagtgctgcacttaccgctaagtgcgaagctgccacatataataacaaaggagcccctagcgttggtggagttaatgttgttagatctatcaaatattgcttcaactcttcgaaggctttctgctagattggtccccattgaaagacttcggctgacttcagcacttcgaagaatggtaagtttctctttgctgatctggatatgaatctgttgagagatgccagccttcccgtcaatctttgagcccccttttttgtacttggtggttccattccaagtatagcttcg

SEQ ID NO: 50401 - DNA, 459 bp, Zea mays
  unsure (1)..(459): unsure at all n locations
cttagcaacttcaacactctnttttggaattgtgcttgaagacttaattgtctccaagacgtctagtacatttaccattcttttcctttttggggtcactgatggccccttatggttttttgctgtttcaatatttactgcaggactcaaaacttctaatgttttttccttagacggctttttcgcttcttccattatatctgtggatggtgcttcggccatctctgcagtttctggcagcaaggttggctgttcagcttcggtggccgaagaagcttctccggtgaactcacgcaccgaagctggttcaatataacgtggccggtgtgtgaggactattatcctctctctctttgattctggctcgctaggagcagttgcagctatctcttctgcagagggtgtgttctttcttttctgccctcgagtgggataacgatatgcatggtaaaagaaccc

SEQ ID NO: 50402 - DNA, 217 bp, Zea mays
  unsure (1)..(217): unsure at all n locations
ttattactatatacaaaatattctgactcttttaangttactgaacaatgacagcactttaataaagaatgatacgccctgttttagactacaaaacaacagcattctttgcaaagaaaaaggccgacagggtatgccacaagaaattatgatacagaagtatgcatattcataatttgtccagatattctactaatgcctatatattgtgatttgg

SEQ ID NO: 50403 - DNA, 403 bp, Zea mays
  unsure (1)..(403): unsure at all n locations
tattgaanatactcaagagagacgntaatatctcaagggtgtattaatgaggagttctttagatagaaagttaaaacaattcatcatccatagacacgaagtaaaatccttaacattagtgcacattacttgaaaagaggaacatgcactatttaaccatttgatcaatcataggaattttacttcttcatattgaatttattaatcattatttaaaaacaagtcaatatgagaacatttatagcaaaggtatgaaatagattctaatggataagtgcattaatgagattgaatgcacatcttagtcagtttaagtttactaaagaatctatttcttcacaaaggtataattagagtgaacaatcattgatgggaactatattaaagagatgagttccgatac

SEQ ID NO: 50404 - DNA, 417 bp, Zea mays
gagaacacattctaggactaacaaatgttcattttgagaaagacagtgtttgtagcgcatgccaagcacgaaagcaagttggctctcatcatccacataagaacataatgacgactgacaggccactagagctcctgcacatggatctattcggcccgatcacttacataagcatcggcgggagtaagtactgtctagttattgtggatgattattctcgcttcacttgggtattctttttacaggaaaaatctcaaacccaagagaccttaaagggattcttgagaagggctcaaaatgagttccgcttaaggatcaagaaaataagaagcgataacgggacggagttcaagaattctcaaattgaaggtttccttgaggaggagggcatcaagcatgagttctcttctccctaca

SEQ ID NO: 50405 - DNA, 289 bp, Zea mays
caactgaccgttccctgagaatcaaatgcctagaaggctatagtattttacgctttccacctgttgactatgatgtcattcacttacgtcttgaccgtgctagcaatgagattgctgaacacatggttcatgcaccgctggtacgtcccgcaccttttctgattccgaacgacatggtgacatagcaatgcatacctaagggtgtgatgaacgaagtctagagctggcacgactttcaatcctgattctggataccctgagtatgcgtcaaagactgacagagtttcgc

SEQ ID NO: 50406 - DNA, 445 bp, Zea mays
atggattatccgctgtagtgtatggttgtgttatgatggacatgatagatgaaagtcgtgaaagtcgattcacagctttaacggagatagagaaagaaaaattgatggtagcaagagcttacaatataaaggtctgggagaaatcatttcatatcagagaattactatggaaaacgattttgcccatagggtctacggataataagttcggcaaatggtcaccgaattgagaacgcccgttcaaggtggtacgcatcgtgcatgggaacgcatattttgttgaggacacgcaaggaaggaaattacccaatgcccttaacggaaagtatttgaaaaagtactatcctagcgtgtggcaaggggcgtgttaagatcttaagctagtagcatatcttatttaacataaaactaagtctggatataatataagaataattgtgccatc

SEQ ID NO: 50407 - DNA, 244 bp, Zea mays
  unsure (1)..(244): unsure at all n locations
tgacattatcttcctgtggaagccatgttttcttttggtcaggcgcctnccactatagagcatgcttctagcaaatttaattnttttttattttncaagtcatgctcattaattttggcactaagttgagctatgtgaacattttgttggttaattaaagctaggtgatcatgaatagcatccacattgatgtctctacatctaatgcaaataataacatgctcaacggtagatgtaaagggtt

SEQ ID NO: 50408 - DNA, 457 bp, Zea mays
ttctgcgatggttcttggggaacacttggtgtcttatcagctgctgtcctagtggcacattcaaaagtcaaaacatgttatgcagccaaattggatttcagttgcacaaataatattgctgagtacgaagcacttctgttggggcttccgaagttaacggcaatgggaataagaagggccaacctaaagactgactctcaagttatttctggccatgtggacaagagtatcaaggcaagagatccgaagctcgaaagatatctggatacagttcgaacgttggaggcttctttcgaaggtatttctgtcaagaatattccaagaggtgaaaataagcatgcagatttgctagtcaaatcggcggctcatgggctccctttaccttcggaagtattttttgaaacaataaaagcaccttctgttgaactcatggagagagcagtacttactatttctc

SEQ ID NO: 50409 - DNA, 465 bp, Zea mays
  unsure (1)..(465): unsure at all n locations
ntatccctcaaccttgaagaatacttgggctccccgacctcttctgtggagggcattactgaccaagacgtcagccagcttccgagccaagggcttggcctcgaccatatctgtaagctctgcgtcgctccaggcgtcacaatagcctttgctcagggctgggtccgatgcaccggacctcggctatagggaagaaactgctcctagaatttttattaaaaatcaccgggccttctatagtagtggtccggtggtgcaccaaacttcactgtaacggctacttcgggcgtgtaatggctacttcaacagtcgggtgacacgtggaggtccggactggtctagtgtcaatctgagatggaagcacccaatcaagatcctagagaacatgctcctgttcccagtccgatggtggaccgaacggtccggtgcgtagagcagaaatcctatagcttcctcaacgactat

SEQ ID NO: 50410 - DNA, 221 bp, Zea mays
tacacataacgtgattattaaatatatataaataaataaaatacgcagaaattaacccaaaattgtggcatcttgaattgtcatgatataatcgcataaaaactctatcatatcttctttttttactggcatatcctctcgggaaagacactaattaaagagtccttgccacactcattaacagagttggagtaggatgacatcatttcttttttggcaca

SEQ ID NO: 50411 - DNA, 472 bp, Zea mays
  unsure (1)..(472): unsure at all n locations
tataaaactaagcttggacatatagtctattgatgaatgacaagcggnatttattgtctcttcccaataagaatccgatatattatattccgctaacatagacctagccatatcaatgagagttctattctttctttcaacaataccgttttgttccggggtatatttggaagagaattcatgtttaatacccttgtcatcacaatattcatcaattctcgcttttttgaattccgacccattatcacttctaacctttttgatgtggaaatcaaattgattttgagccaatatagcaaatgacttgaatgtttcaaatacattagattcgtctcgaagaaaataaacccaagtaaatcttgaatagtcatccacaatcacaagacaataagaattaccaccaatacttacaaaagatgtgggcccaaataaatccatgtgaagtaattccaaaggtcgatgagtggacatt

SEQ ID NO: 50412 - DNA, 339 bp, Zea mays
  unsure (1)..(339): unsure at all n locations
ttttttacaaaacccacaaacataacacgaaggatcctttccttattatgtggtagtcatgactcttcaacccagaaaacttgcccatcttcaaattcataaaccttctaaagcccgcggcgtaaccatctgggaactntaagtttttcaaccatttcatcaattgtttcttccttttaagtttaatactgaaaggagcacgtggcttcttctggttctctcctatctccatagttggtcttctacttaaggccaagtcttttctagccttaaggttgcctttntgtcggcgtttcgaccccgggggtccctggaccgacagtaaattgtcgtccatgt

SEQ ID NO: 50413 - DNA, 470 bp, Zea mays
  unsure (1)..(470): unsure at all n locations
cggtgccaatggagaagcagaaatccctgaagtcttggctgtctaattgcttgccgttgtcaactgtgagctcggacgggactccgaaccggcaaacaatgttttgccagaagaatttctgggcagtcttcgatgttatcgtggatactgccctcgcctcgatccatttggtaaaatactcgacggcgacgaaggtgaacttgaggttcccttgggccgtgggtaggggcccgacaatgtccaggccccagcgctgaaggggccacgtgtgggcaattagctttgtgaattgtgaagggcttcccgagcgtggagaaaacttctggcaggcttcgcaagactttgtgacccgatttgcggcgcagatcatggtgggccagtagaatccttgacagatcacctttgcggctagggccttatgccctgcatgagagccgcaagtcccgctgtggacttcgcgtangatttgg

SEQ ID NO: 50414 - DNA, 390 bp, Zea mays
  unsure (1)..(390): unsure at all n locations
gctgcacttaaggaaacctttggacttctatgtcattgaaaaacaggttgtagcctgtcagcaggaatcaattggtgttnatcatccccaccagaacattatgacactgacggcccatccagctcctacacatggacctattccgcccgatagcttacataagcatcagcgggagtaagtactgtctagttatcgtggatgactattctcgcttcacttgggtgttatttttgcaggaaaaatctcatacccaagagaccttaaagggattcttgagacgggctcaaaacgagttcggcttaaggatcaagaaaattagaagcgacaacggaacagagttcaagaactctcaaatagaaggcttccttgaggaagaaggcatcaagcatg

SEQ ID NO: 50415 - DNA, 441 bp, Zea mays
  unsure (1)..(441): unsure at all n locations
ttacttagtttgatttgcaaaagaagaggccggtctagattctttcttaatggctaagacttgcatgggctggctgtggcatcgccgcttatcacatgtggggatgaagaaccttcacaagcttctaaagggagaacacgtgatagggctaaccaatgttcatttcgaaaaagatagaccttgtgcagcttgtcaagcagggaaacaagtgggaggctctcatcacaccaaaaatgtgatgacaacatcaagacccctggagctgctacatatggacctcttcggacccgtcgcctatctgagcataggaggaagtaagtatggtctagctattggtgatgactnttcccgcttcacttgggtattctttttgcaggataagtctgaaacccaagggaccctcaagcgcttcctaaggagagctcanaatgagtntgagct

SEQ ID NO: 50416 - DNA, 193 bp, Zea mays
gtaactttcaaaaaaatagaccttggcacttgtcagtagtaaacagtgggaagctcttatcatgccaaaaatgtgatgacaacatcaagacacctggagttacttcatatggacctcttcggactcgtcgcctatccaagcataggaggaagtaagtatggttttgttattgagagcacctagaggggggggg

SEQ ID NO: 50417 - DNA, 463 bp, Zea mays
tagaaacttgcttacacaagcatgcccacagagaattgattttatactatcaagccaatcaattatcaaatcataaacaagaatacatttagtctgatgactggtctgaagcacgaaataaataaaaacaggacagaaactcccgctgcagatccactattttctgtgccttcctatttgtggatggtttgaactttgaactgaactagctgtaattaggcatggacatctgtggtcaggattcaccaaagcacaccaaccgcttgtttccctctcgatcggcacagcctgacacttgtcactgctagctagctgcaggcagcatcatctcctataaatcacggctagagcgcttgattgtccatcaaacaaaagcgtcgttctctctttctggtccaagtgatcttgccaagttacgagcagcaagcagagatcagatcattcatcggcaatgtcgaacatc

SEQ ID NO: 50418 - DNA, 236 bp, Zea mays
  unsure (1)..(236): unsure at all n locations
cagctgcagctttaaaggagaaacatctatgacatattatttgncgnagcgcatgccaagcaggaatcagttggcactcatcatccgcataataacataatgacgaccgacacgccactggagctcctgcccatggatctatatcgcccaattgcttacataagcattggcgggagtaagtactgtctaaataattgggaatgataatctcgcttaacttgggtgttctttttaca

SEQ ID NO: 50419 - DNA, 464 bp, Zea mays
  unsure (1)..(464): unsure at all n locations
ctgccanatagggngcataagtatacctccaatatcttctttatctgtcagatcattcttcacataaaaccactctgtcatccaatcgccgggccatctctttcgaaaggatggcacggggcagcttgacccggaccgataaacgaaactgtagcagccaacattattgcgatactgtttcttaccccaaagatttgtttcgtatgataattcgagtatattgcagaagctttttgcatcaggcttcagaccttggcttctcacgggccacacgaagatattcagccttataattgcctcggcggtaagttgatggagatagatttcgaatattttcagcacctctacaacgaagctgctcaagggaaatcgtaatacagctttcataaagcttcggtacactacgacttcattctctttagggtgtgggcacgatattttcccttcgtcggacctcacaatgg

SEQ ID NO: 50420 - DNA, 353 bp, Zea mays
  unsure (1)..(353): unsure at all n locations
gtggtaatgctgcacgattattatgtttgtttttcgtgggatatagaagtcatcccctgaattgcataagtgcgagtatgctataccggcttaagccatcaatgactttagccgataactccgttagtagggcatagtggtcaccctgggttaagtaagcgtgagcatgttgcaccgccttaagtccgtgccgacttaagtcgattgctccgtttgtagggcatagtggtcaccctgngttaagtaagcgtgagcatgttgcaccgccttaagtcgttgccgacttaagtcgattgctccgtttgtagggcatagtggtcacctgngttaagtaagcgtgagcattgttgcac

SEQ ID NO: 50421 - DNA, 466 bp, Zea mays
  unsure (1)..(466): unsure at all n locations
tgctntcagcctccccganataaccaagtttcctcatcattttcatgtcatccttcgntatagtagacttcccaaactcaatgtgactaggctctgttgggttcaagatgttgtcatcttcttcactttcgcctccagctacaatctgttcagcttcggtattggaggcaccttcggcagcaacttcttttgatacaacaagacccgattgcctcatcacttctgatattggtgccgtttcggccacttcagcctcgtgcccctcacgagacactctagcagtggatcatactttggccatttctgtgtttacgcttttttaagacaaagctgatctcaattgacgaagcgtttgctcgaaaaagcaatacagaaagctttggctatggttaaaaattttaacagcacaacagtgcaatggcaatgaatgttgtggtaactcctcaccaacccgtttgtttatata

SEQ ID NO: 50422 - DNA, 373 bp, Zea mays
cccgactagcgttctggaggctgcatgtattccacattgccctgcatggacttcctccagaagttgtttcccagtggatgggagaatacacttcatgagaacccctgatgcaccccttctgtataatatctccccaatgagtgtgtagtgagctgactgtctggcaatgcgctctgctgagttcttgtcgtctggctcttcttcgttctttatgtacttaatgatcggcctcctccagtcatcagagtctgactcgggttgatctacgatgttgcactcttctgtttggtctattgagatactcggccgtgtaatttcttgtacgaaaactccgggtgggacctgagttcgaccggatccgagcttggatagt

SEQ ID NO: 50423 - DNA, 299 bp, Zea mays
cctcccgactttgaagatagtgaatagcctatccatgtctattaactctcaaacgtggtttatgggctctagtaagcttcaacaacatggtatgaatgcctgcgagactttcttatcactaatggcttccaagtcggaaatgtcgatcctactctcttcacttaaactattgcaaaagactatgttatatgctgaatttatgttgatgatattatatctgggtctactaacaagtcatcttgtgaagagtttagtaggatcatgattcaaatattcgagatgtcaatgatgctgagttg

SEQ ID NO: 50424 - DNA, 115 bp, Zea mays
cgggctggtggacctcgtcaatgacatttccgccaagtcacgtatatattacaaatccgatccgattacccaggcactcaaaataaatgcctcgcatgcagaggctaatgcaatg

SEQ ID NO: 50425 - DNA, 456 bp, Zea mays
tgaccccaatatgaagaagtgctcgtgattttcttccttctaatgccgaagtctttgcgtggagtccctcggacatgcctggcataccgaggggtgtcatcgagcactcgctggatatccgagctggagcctgacccgtaaagcagcctctgcgccgattcgacgaagaaaagcgcaaagccatatgcgaggagatccacaaactgatggccgcagggttcataaaagaggactcaagccacggatctacaacgacctcaacaagttcggcaagcgatggatgaaggaactcccctcggtagtctggagtctgaggacaacgccgagccgagccacgggcttcacaccgctctttctagtctatggggtcgaggccatcttgcccacagacttataatacggttccctgaggacgagggcgtacgacaatcaaagcaatcgaaccaaccgagaaga

SEQ ID NO: 50426 - DNA, 144 bp, Zea mays
tttgctgcttaattaaagcccggtgatcatttatagcatcaacattaacatttctacatctagtacaaatagtaacatgatccacagtagatgtagagggtttgcacacatttaatctctctatcttagtatgtaatatggcat

SEQ ID NO: 50427 - DNA, 454 bp, Zea mays
  unsure (1)..(454): unsure at all n locations
actaagctgagccaggcattgcctcaccggagaagtagaatcgccctcaccggacttctgtcacccgccaccacgcgtgaaccgagctatctggtgagccattttccagttcctcgcgtctatgtcttccctgacctctgttgaagctcactgaccagttcaattgaactgtaccgccctggataggccggagcccttgctgctgacgagctcgcccgcctgcgcgcgtggaccgaccgactccgaccatcaccggagacgatccgcacatcggcgtgaccatcaagacctcctctacaccctcgaccacttcaccggagcaaactcgccaccggtaagcccctccgccctttcctccgccgcgggtactggttcattatgggaaggaccgcggatttgatttagcagaaccctatggggttntctgcgtagtcagagactcatatngaatagt

SEQ ID NO: 50428 - DNA, 266 bp, Zea mays
aaaaccctgttaaaaaaaaacaccactgccatcttcatcatctgtccaactagcagtgatgtaaggccgattccatatcttgatgaatgcgatgccccaagaagaaaaagaaggcacacgtgagtatgaaaattcccacaccacgggatgcttccgcacaagactgcaaggttcccagtcaaaagcaaaacagtgatccgctggccacaccacgagacgcttccagataaagctgccagttccagtccaaggaaaaaacgtgggcc

SEQ ID NO: 50429 - DNA, 430 bp, Zea mays
  unsure (1)..(430): unsure at all n locations
gcttaccacatttgaagcatgagcgcttccactttgtcttggtcttgctttgctgccccttgcgaccctntagcgccgtcttgaatctcttgatgatgagggccatctcttcatcattaagtccggccgcctcaatttgtgccaccttgctaggtagcgcctccttgcttcttgttgccttgagagcaaggggttgaggctcgttgattggaccattcaatgtgtcgtccacgtacctcgcctccttgatcatcattcgccgctaacgaattttccaaggacttcttcgggcgacattttggtgtacctgcgattctcacgaatattattcaccaaatgaggatcaagaacggtaaaggaccttatcatcaatcggacgacgtcgtggtccgtccatcgcgtgcttncgtagctccttattttgttgata

SEQ ID NO: 50430 - DNA, 159 bp, Zea mays
ttcagaaatttgaattcttttgataccaagtccactactccaaccttcccatgatcgtaagatgttgaaggtcttgataatcgctcacgttttgaacaacgactggagttaacaaagacccatggggagaactgttttatcgttttttgcacgtaatgg

SEQ ID NO: 50431 - DNA, 466 bp, Zea mays
  unsure (1)..(466): unsure at all n locations
cttgcattggtntggagggccgcagataaagtttccaattctatttttttcctattgtcatatcgngcaaattggttcagagcaatgcttcatataaaatttcagcacagagatgttcaattcaaatgacaaacttaatgaacttatgtgttttgggtgtaatgaatctgggaatgtacaacaccattaaataccccttctcctgagaggtctcgaggggttaattgaaaaaaattagaggaccgtctctttgcgaaaagtctgtctcttactcgttctttcaagcataatagactcactctgtacactgtacaaccctagttaatattcatcttttgagctaccttagagttaatgcattcatgttttagagacactctcgtctaagcattgtacatgccctaagctccatttaatcatttttgctctatgatacgaaagntctcaatgatagctgttgctttta

SEQ ID NO: 50432 - DNA, 177 bp, Zea mays
  unsure (1)..(177): unsure at all n locations
ctgcagcttgatcttgaacaactcgctgctcttttcttctcgccaaagaatccgaccgaagacctcccgatagtgttttggatgctgcatgtactccacactgccccgcatggacttnctccagaattgctttccggtggacgggaaaacgcactttatgaggacgcctgacgcccc

SEQ ID NO: 50433 - DNA, 473 bp, Zea mays
actaagcttcacgtgttcgacgcgagctgacatccggaggcgcgctctgagctctctcgtgcgcgaaccctcgcgcgcccgcggtcgcccgtgaccacgcccgcgccgcggctataaagcccgccccagtgcttggctgccttccccgttgcatcctccgtacctcgcctgacttgccgagccagccattagctccggcgacctccccgcgacccgccagtgccgcccaagaacaaccaccatggccagcccctctcccgtcctcctccgttcgatccaagccctcagttagcttcctggcgaagccgtgagacttgctcgagcttgacccggggccccgcgtcaccggaatagcccaatcgtgctcaccggagttcaagagcccgccggcgcacgtggaccgggtaagcccctgcaccgttttccaattccttgcgcgcatggcctctaggtcatcccgtgaagctcctcgt

SEQ ID NO: 50434 - DNA, 338 bp, Zea mays
taagctaagcctggaagagcatagcagtatatcaattgctcttcttactcggggcataagttcaccaaagtccaaacttcacttgtaaaaccttggcccaagtgggcttattcttgtaccacaccatgctatcttgcttgttgcggaatacccacttggacctacaacatttggtaggacgggaactaaatgccatacctcattctcgtgaagtgtgagttgctttgctagcaacacccaatacgaatcttagtgcatctcaccttgatggctaataaggaccaaaagagtatgttacagaatgtgcactcgagatctagggtaccccttataatgca

SEQ ID NO: 50435 - DNA, 216 bp, Zea mays
cgtaaatattgaaacagcaaaaaacccaaaagggccatcagtgaccccaaaaaggaaaagaatggtatatgtactagacgtcttggagacaattaagtcttcaagcacaattccaaaagagagtgttgaaattgctgaagcttctactgaagcttcggctcaacaagctatagctgaagctgggccttcagagccctgcaaggagcaaccttttga

SEQ ID NO: 50436 - DNA, 464 bp, Zea mays
tataactccaatggtacttattattaccttcggatgtcttatttgctcacaaatgctggaggcagcttcagcagaatgacagccaaggttcttcactctcaaataggcaagaatgtgctaacttatgttgatgacatcatagtaaaaagcatgaaacaataaaatcacattgtcgatttgcaagatacatgcgccaattttagacaaactggtctcaaattaaatccagaaagtctgtttttggagtaaagaacggcaagttccttggctgtctggtatcaacaaagggtatcaaagctaacccaagtaagatcgaagctatccttcagatggagccaccaaattcaaagaaaggggttcaacgatcggcaagaaggctggcatcgctgaatagatctatataaagatcatgagagaggaatctaccattctttgaaatactaatgtcagccgaagttttcaat

SEQ ID NO: 50437 - DNA, 468 bp, Zea mays
  unsure (1)..(468): unsure at all n locations
tctaaagggagaacacattntaggactaaccaatgttcattttgataaagacaggatttgtagcgcatgctatgcaggaaagcaagttggcactcatcatccgcataagaacataatgactactgacaggccactaaagctcctacacatggatctattcggcccgattgcttacataagcatcggcgggagtaagtactgtctagttattgtggatgattattctcgcttcacttgggtattctttttgcaggaaaaatctcaaacccaagagaccttatagggattcttgagacgggctcaaaatgagttcggcttaaggatcaagaaaataagaagcgacaacgggacggagttcaagaactctcanatcgaaggctttcttgaggaggagggcatcaagcatgagttctcttcttcctacnactcacaacanaatggtgtagtggagaggaagaatcgaactct

SEQ ID NO: 50438 - DNA, 127 bp, Zea mays
catggtcactaattgtccagtcctggcaaactactctttgggaacacacctggcaaaaaaatggatgtctcactggattgtgaaatgttgtccagtccaggctgcaagcacactgactcacaccggc

SEQ ID NO: 50439 - DNA, 453 bp, Zea mays
  unsure (1)..(453): unsure at all n locations
actcagcttagaactagagtcgctagagagggggaatttgtttcttgaaatataactctaacctggcttgaccctcattagcggtagaacagatgaacaataatcggagataaaactaagtcctttgcttgcacagagtattgctttccaagagtgcggaattaacaaaaagcaacacaactaaaatatctatgaagaataaagtaagagggcttagataagaagaggaataacacaagttatttcttgcaagacattgcttctatatatgagaatatgacttgaagcaacacacagtaatatcaacaaagaatagtgcaatagaacttagagagggagaagacaaacaaatcacaagcaataaacacaagtgacatgggtgatttgttntaccgaggttcggttcaccaagaacctaatccgcgttgaggagtccactaaggacgggtcttt

SEQ ID NO: 50440 - DNA, 82 bp, Zea mays
aaaccttgataaggtttttgttcaacaacaaagatgtttttgcatggtcagccaatgatctttgcggagttaacagggatgt

SEQ ID NO: 50441 - DNA, 432 bp, Zea mays
tgtacttcgcctcaacatggcctgattgatgattggcgctctcgtttagcgcgaatgctgatgcacccaccgtcaatccaccttaggtcacgccaattgccatatctgtcctcgcggctgactgacctactgcccccacgcctggtggtttcgtcaggccacgcgcggggcgcctcattactgtcgcatcagtttaaaatattaccttctgtcttctacagcggacccaaggaggcgcacttcatgcgcgcgcgcaacggttcgctctttccacacccgaagtctggcgcacaaactgtatgacttgtggacccgggcccccatgtcatagactgggtttgtcttctgctgtggccccaaagaggcgcactacaggcgcgtgcggcgagtcactctacacgcgcgtgcggcagttcattccttctgcacccg

SEQ ID NO: 50442 - DNA, 224 bp, Zea mays
acattaaacccttactttgttttacgagaagttacttagaaaggtgcttcaacttgcaagtaaaaaaatgtactgttgcacattgatatcatgactttccatgttcttttgcaaatctaagggctaacaaggtcgtgcagttgttgtataaactagatataaacaagttaggaatgaaatcaatgttgttttttgttcataatgtcagctgaataatacatatt

SEQ ID NO: 50443 - DNA, 464 bp, Zea mays
  unsure (1)..(464): unsure at all n locations
actcagcttttatatagtttctctttctgccagcctgcacagattgtttttgcaaaactattgttcttgccacaccacctatccgtgatggtagcatatgcaaggtacacttgatatggaactgcaccgggattcttttttaaacaattggttgatggagcattatatacttgtttcctgcaggaggttctttactgtgcaaagaaagctggtgtgacacacatattgaaagctggaggagctcangtactaagatattttgagattgtccttcattatatagttcagtactcttaatgatgtttactttcaggcaatctcagcaatggcatggggaactgcatcttgcccaaaggtatttgaagtataaaaacatatcgatatcatgtctaaaatcagtagtgatcttttgtgtctatatactggcctctatctaacgtgttgcttcattgcttgggtgttaa

SEQ ID NO: 50444 - DNA, 404 bp, Zea mays
cggatgacaatacaagaaatcttcttctccgctgtcgttgaatatcaatgcccccattggatatttcagtttctgggcatagtattgagcttctcgtttttcttcttcagataacctttttcccgatgcatgtcgtacaatataatcgagaacttcagaagatgcttcgggagtaggagtggcagtttttttaggcagaatttgttttgtagcttctttttccgcctccttttctccgatttccaaggatttttccttggcgggctctgaaggtccagcttcggtctcggcctggctctttgcagctttggctttggttagttttgtctcagtctgcatttttaaagcttcagcagttttccctggagtagagcttgaaagttttatcgtctctagcacatcca

SEQ ID NO: 50445 - DNA, 385 bp, Zea mays
  unsure (1)..(385): unsure at all n locations
cactatnaatctcagcttacttacgatccacctaaatggaaattgctttcttttcttctagatngaatctggaggctgaagcgcccaacacaaataattggactaactagactgctctactctataagtcttacaggcgccaacagttcacaataagccatttatacgacccagatagggttcttaccatgagagcaaatgacaacccacacgcaccctggtctgacggaccatactgtccgttgtaccactgacagcgttcagtgcaccaatgcactcgatgctgaactcggcaccttccggaaaatgggaggccgctccgctataattcaccggactgttcggtgaaacaccggacaatattccatgtcacatcagactgttt

SEQ ID NO: 50446 - DNA, 137 bp, Zea mays
  unsure (1)..(137): unsure at all n locations
tgggtttgaacgaagcaatgaaaaatgcccacgaagtcctagaggatatatagaatcactctgaaagaaattgnctatgatattatctatataaaattccagttttttttttatgaaaccctccaataatatgggtt

SEQ ID NO: 50447 - DNA, 439 bp, Zea mays
tctgtcatcaatctcggctaccaactcgtaagtctgtcctcaaatttaaaggacttagcttctggaatcagataggggagaagtgaatctgagaaaagggaatggatccctaaaatttgtgatacaaaatccatggaggatatctatgctgaagatggtgggctgaaagtccattacaatgattccctagttactcaacaaacttgttcggctagaaagaagaaggattactagaaatacatgtctcaagagatctgatctagcttgttcaattgagagaaaatattgacaccaaaacaggatgatgatcaaagggtcttggatgtgttatgagaaagcttggggacttgtccatggcagatgttaccaagtttggtggagtgggaaaatcctcgatagggaggaacagttatattcatcccacatatttggcacacac

SEQ ID NO: 50448 - DNA, 402 bp, Zea mays
tgcaagcttatgtaacaccttaggtgttacttagagttttaactcatggctacacaagtcaagcccatcatcacatttggtttaactagagcaaagtacaccaaacttggaactcaagatcctaagtaagtgcaacccatcttagatgtcatgccttaacttatcatgcacatataatggggagaattgcccaaaccctaattcaaaccactttggacaagtggagcactagaagtaagtatgatcaaaaggctatgaaaaccacatgatcatgacttgggccaattataaaagttgtagtacagttaataccctacaaatgatagtaagaaagtgaccccaaaacgatttcagaaaaaccccaaaaggttcaccaaagagttgagcataaaaggaaaatca

SEQ ID NO: 50449 - DNA, 462 bp, Zea mays
  unsure (1)..(462): unsure at all n locations
tatcacttgcgcctgtagccgtgcgacgtggctggaccgtcggtgtcgccgtggtacttcggtgacctcatttatgccacaccgtagctctttactgcgtagtagtaaccatggcacgcctaggcttgccatttcagaaccattgcaccagaggacgccacgactgagccgccagtgaccttccttctctccggctgccagcgcgccattccaaaattgggagccaccgcccttggacactataaattggtgccctagcctgctccgctaagtaattgtgcacacagtgaaccagccctcaccaccaatcatcccccacatctctccaatttgggatttcccccaattctgttctctacgccgccgtgaatgagctcattgtggccagccttctgcaggttcgttcacgttctcctcgctctcgttactgcaccctggtgtgctcaggatgctcatngacat

SEQ ID NO: 50450 - DNA, 348 bp, Zea mays
gcttgaagcctggtaagtagcatagaccaataatatactaattgactcaagcctagctacgggtgcataggtttcaccgaaatccaaaccttcgacttgggaatattccttggccacaagtcgtgctttgttccttgtcaccacaccatgctcgtcttgcttgttgcggaacacccatttggttcctacaacattttgattaggacgtggaactaaatgccatacctcattcctagtgaagttgttgagctcctcttgcatcgccaccacccaatccgaatcttgtagtgcttcctctaccctgtgtggctcaatagaggaaataaaagagtaatgctcacaaaaatg

SEQ ID NO: 50451 - DNA, 440 bp, Zea mays
acaaataacattgctgagtacgaagcattgattctatgtcttcggaagttaaaagcaatgggaatcagaagggctatactcaaaactgattcccaggttgtttcgggtcatattgacaagagttgcaaggctaaagatccgaagcttgaaaaatatctggatatggttcgaagagtcgaagcttccttcgaagggttttctgtgaaaaatatccctcgaggacaaaatgagcatgctgatttgttggctaagtcagcagcacaggggctgcctttaccttcggatgtgttcttcgaaacaataaaagcaccttcggtggaacttcttgaaagagcagttcttagtatatctcctgtttttagcgaagattggagaaccgagatcatctcttaccttcagggtaaattcctttcagatgacgaagcttataacaagagaat

SEQ ID NO: 50452 - DNA, 471 bp, Zea mays
  unsure (1)..(471): unsure at all n locations
tntaaagggagagcagcatttaggactaacaaacgttcattttgataaatacatggtttgtagcgcatgccaagcaagaaagcaaagtggcgtccaccatccacacaaaaacataatgacgaccgacaagccactcgagctactccacatggacctattcggcccgatcccttacataagcatcggcaggagtaagtattgtctagctattgtggatgattattctcgcttcacttgggtgttctttttgtatgaaaaatcccagacccaagataccttataaggattcttgagacgggctcaaaatgagttcgaattaagaataaaaaagataagaagcgacaatgggacatagttcaagaattctcaaattgaaggatttctcgaggaggagggcatcaagcatgaagtctcttctccctacactccccaacaaaatggtgtagcggagaggaagaataataccctact

SEQ ID NO: 50453 - DNA, 478 bp, Zea mays
  unsure (1)..(478): unsure at all n locations
gacactataaaactaagctgacattgtcgcctgttgaaaccatgccatccttaattccattgctttnccatatagagcatgcttctagcaaatttgtattnatcattatctcactcatgctcattaaatatagcactaagttgagcaatgtgatcattttgctgcttaatcaaggctaggtgatcatggatagcacctacattaatgtctctacatctaggacaaatatgaacatgctcaatggtagatgtacaggagttgcaaacatttaattcatcaatcttagcatgtaacatgacattctcatttctaagattggaaataatatcattgcaaacatttaagtttttagccttagtaatcaatttatcattgtctatcttaaggctagcaattgattcatttaacttgtccatcttaacgatcaaattagcattatcatttgtaagtctgacaagagaatcatcacaaacatgta

SEQ ID NO: 50454 - DNA, 115 bp, Zea mays
  unsure (1)..(115): unsure at all n locations
atgaatctttggttttgtgtgaagttcttgaagtgttaatatcttgccgtccctggcaagttggaaatgactagttgtanacctaanaagaataaaatgctcattggttttgttg

SEQ ID NO: 50455 - DNA, 349 bp, Zea mays
  unsure (1)..(349): unsure at all n locations
tggtggtaactgcttggcaagagcgtttcaagaacgatatccatctangaccagtcttcaacaacagatagtactactatcatacaaaagagtcatcaggactagtgagaatacaacaggtctgaaagggaaatgtgcccttgggccatttctgtaatgttttggtgattaagtgtccaacacatagtgagtgagatattgtgtgccaaacaagcgaaaagtgcaaatcatgtaacgaggtacgtttctagacttagtacattgttttgagtactaacatattttgtttaagtgctagaaacagagaanaggaaaagatgaacatgattcaagtgacttggctgtgtat

SEQ ID NO: 50456 - DNA, 360 bp, Zea mays
  unsure (1)..(360): unsure at all n locations
gcttctaaagggagaacacacttttggactattctatgttcattctgagaaagacaggatttgtagcacactgccaagcaggaaagcaagttcggcgccatcatccacataagaacataatgaccactgacaggccgctcgagctactncacatggatttattcagcccgatcgcttacataagcatcggcgggagtaagtactgtctagttattgtggatgattattctcgcttcacatgggtgttctttttgcaagaaaaatcacaaacccaagagaccttaaaaggattcttaacacgagctcaaaatgagttcggattaagaatcaaaaagataagaagcgataatgggacggagt

SEQ ID NO: 50457 - DNA, 402 bp, Zea mays
ctcgaaggaagaacattttggcctcagcggagtccttgggactaccatgtccaagggctgagaaaccgcatggggggaaagggcgatcacttgtggtggggatttcccaagcaccgacattgcccgatcatggaccaagtctgctgatataccatcagtgatctccacggtcgagggcacctccgttatctcatagcttccaactctctaagcactctgattggcttctccttcatccctaggctcttcatcagaccttgggccttggcggccaaggacagatcgtctaccctcatgctcatcgaccttctgagagaccctattgccatcacggtcccatggtggcgaacgcgaacagaagcccctactttgctatgcagaaccatcattattagctgggac

SEQ ID NO: 50458 - DNA, 436 bp, Zea mays
  unsure (1)..(436): unsure at all n locations
agcttcaatccttcggaccgtgtttaaatatttcttatgtcttgggtctcttgcttcacaactcttgtcaatatgaccagaaataacctgggaatcagttttaagaaccgcccttctaattcccattgcctttaatttctgaagacccaaaagcaaagcttcgtactcagcaatgttatttgtgcggctgaaatcaagtcttgttgcgtaacaagttntaactttggagggtgcaaccaacacagcggctgctcctgccccgaaggttccccaggaaccatcgcagaatactgtccaaacttcagcatctttactcgcttcttcttcctgagcccctggcgtccaggcagcaatgaagtctgctaacgctcgggactgaattgaagatctatgcacataatcaatgcaaaactcattgagttccgtagcccatttt

SEQ ID NO: 50459 - DNA, 441 bp, Zea mays
  unsure (1)..(441): unsure at all n locations
actcagctttnctcaatggcgccctcctaccctctctcgtatattattatttctgactcggnctctccttgtgtggccacatatgcagcgcaacatacgcatctctgccacgcatagttgttggacatgtcgtcttttagtgggccaacattctgctccatacaacatatccggccggattgttgtcctgtaaaattttccttttagtttgtgtggcacccgggggtcgcataagacacccgccgcttgccgccacttcaaccatccagctttaattctatgactgacatcctcatcgatgtccccatccttctgaagcattgatcctaagtaacggaaagtgtctttcttgggtaccacttgcccatcaagactaacatcgccatcttcataccccgtggcactgaaatcacacttcatatatntccgtttagacctact

SEQ ID NO: 50460 - DNA, 459 bp, Zea mays
actcagcttataaatggcgtaagagcgccttctcaatggactttcttgaagagtctatgttgagcaacctcccgctttgaagaagtgagtaccctaaccatgttataaactctctaaggtgctttatgggctcaagcaagccccaagagcatggtatgaatgccttagagatttccttatagataatggcttcaaagtcggaaaggctgatcctactttattcactaaaactcttgaaatgacttgtttgtatgccaaatttatgttgatgatattatatttgggtctactaacgagtctacatgtgaagaatttagtaggatcatgacacacaaattcgagatgtctatgatgggggagttgaagtatttcttatgatttcaagtgaagcaactccaagagggcaccttcctaagccaaacaaagtatactcaagacattctaagcaagattgggatg

SEQ ID NO: 50461 - DNA, 324 bp, Zea mays
ttgtgaccacttggtcggagcccaagtgtttatcaagatagagcttggctctggctaccatccgatcacaatacgagcaagtgatattccgaagacgacattctgaaccagatatgggtcataagaactcttggcgatgtcattcaggctgacaaatgcgccagcacatttcatgtatctgaggaattctgttttcatgccagaattggacaacgacgtggaggttttcatcgatgatatcctggtgtactcaaagaacgaagaagaacatgccgggcattagcatgtagtgcttcaactgctgcgagagcaccacctttatgc

SEQ ID NO: 50462 - DNA, 276 bp, Zea mays
accaagtcataggtatattgaaagggaattggagtcttcggcgaagacaaaggcttccactccgtaactcatacttcgccaccactccgagcaactctctcttctttgggggagaaatgagcatcaaggaaaaggacttcctccttgggggagagagtaaaagctcaaacgcaaaaggacttcgtctttggtataatcttaactcacttatttatgaaccaaagggaagattgtaccttcagggcctctaattgattcctttttggcgattcatgc

SEQ ID NO: 50463 - DNA, 462 bp, Zea mays
  unsure (1)..(462): unsure at all n locations
ntatcaaatggacgtganaagtgccttcctcaacggaccattcaatgaagaggtctatgttgagcaacctcccggctntgaagacagtgagtaccctaaccatgtctataggctctctaaggcgctttatgggctcaagcaagccccaagagcatggtatgaatgccttagagattttcttattgcaaatggattcaaagtcggtaaagccggtcctacactctctactaaaactcttaaaaatgacttgtttgtgtgccaaatttatgttgatgatattatatttgggtctactaacgagtctacatgtgaagagtttagtaggatcatgacacagaaattcgagatgtcaataatgggggagttgaagtattttctaggattccaagtcaagcaactccaagagggcaccttcattagccaaaccaagtatactcaagatatnctaagcaaagttgggat

SEQ ID NO: 50464 - DNA, 429 bp, Zea mays
agctttgcctttgcttgatggcaaatcctttcttcttaacggaatggaatccttccttttggaaaggaaaaaaaaaacaataaattgccgtacatgtgctatgatttcgggaaggatccgggcgtggccatcgccgaggaggagcaagtgtcctcgaattcctggacctttttcgggggccgggggggcaagaggtggtggtggatggcgagttggcggctgagtggcgagtggcgacgcaacaaaaagggaaaaaagtagtatattatttgagagaggagggattgcagtcaggattagagaaggacagcgtgcagcatttagttaggtgtgtgttagcagcgccgcctgaccaaaggcctgttgacgtcagagacaacaaacaattcgtgctgatgatgttcgttgatctgttgagatcgactcccc

SEQ ID NO: 50465 - DNA, 452 bp, Zea mays
tctaaagggagagcacattctatgattaacaaatgttcattttgttaaagacaggatttgtagcgcatgccaagcagggaagcaagttggtgctcatcatccacacaaaaacatcatgacgaccgacagaacactggagctcctacacatggatctattcggcccgattgcttacataagcatcggcgggagtaagtactgtctagttattgtggatgattattctcgcttcacttgggtgttctttttgcaggaaaaatctcatacccaagagactttaaaaggattcttgagacgggctcaaaatgagttcggcttaaggatcaagaaaataagaagcgacaacggtacggagtttaagaactcacaaattgaaggcttccttgaggaggagggcatcaagcatgagttctcctctccctacacgccacaacaaaatggtgtagtggaga

SEQ ID NO: 50466 - DNA, 428 bp, Zea mays
actcagcttggagactacaagcgtgacgccaagccatctatgagctttatgctcctagagaaatgaatccacaaagaacttgttctttcaccaaagctcgagagatacatcaaagaatgagagtttaaatcacgtttatgatctaaaaacttatctcacatcgaagactcgttccatcgatcaaatggaggaagacttggggtaggagatcggagttgaatcgctctgaatcgaaggagagcagtcaccaataggtctggggtcgagtctcttagggtttagagagagagaggcttatatagctatccccgaattagaactggcggttacagggtggctgcgcacatcctagttgaactgatatgaatccctgttgaaacggcattcaatagagagctctctgcaaaatcccgcgtgaagctggattc

SEQ ID NO: 50467 - DNA, 335 bp, Zea mays
cccacatgtgctaagtttgttattcctcagccagaccatgctagtctcagcgattaagcatgcatctagaccggcctcctcttttgcaaaatcaactaaataaagattgtggtctaatacacccttaaaagctagggaaccatcacttctttgtaagacagacacatgtatattggtaaataaacaattatatcccatattgcataattgactaaccgatagcaaattatatccaagagactcaactaaaaacacattagagatagagtgctcatttgaaattgcaatcttgcctaagcctttcaccttgccttggctcccatcaccgaatatga

SEQ ID NO: 50468 - DNA, 470 bp, Zea mays
  unsure (1)..(470): unsure at all n locations
tgggaaggttcttcatccncacatgtgctaagcggcgatgccacagtcagtttatgctaggcttagctatgaagcatgcatctagaccggcctcttcttttgcaaaatcaactaaataaagattgccgtctaatacacccttaaaagctattgaaccatcacttcttctaaagacagacacgtctacatttgtaaatagacagntatatcccatatgacataattgactaacagatagcaaattatatccaagactctccactaaaaacacattagagatagaatgctcattagaaattgcaattttacctaacccttttaccttgccttgattcccatcaccgaatataattgaatcttgggaatccttattcttgacgtaggaggtgaacatcttcttctcccccgtcatatggtttgtgcatccgctgtcgataatccagcttgaacccccggatgcataaacctgc

SEQ ID NO: 50469 - DNA, 282 bp, Zea mays
aaaatacggaacaaaaagcaaaaagcgggacatggaagagaaataccccataaatccctctaattttctgtccacccaatcaggctttactagacggggcctcactgcctgagcaaggtgtgcctaatctaacaaagaaaatgattgaatctattgtgacttgtgagcaccttttgcttttatacgagatcttaagtgacacactttttaatacatatttctttgacatttttaacaattcattcgttttgcatcacacgtcaattaatgcattccgctcaa

SEQ ID NO: 50470 - DNA, 450 bp, Zea mays
  unsure (1)..(450): unsure at all n locations
tggtcagttnttccacaatatattattactaacaggctctctatgcatgatgcaagataaggttcttacaggatttggcaagtaggttcctgtgcctccacggtatctgggtgcatcttcaccgtagtgctgaaaaacaccagttctttctgtagccggttgtacaggcatcacaggaaatactcgttgaccgcccaccatttgtgtccagttaacatttggtgcagctggtcttccaggcccatcccatggaacatggccctgtaaatacatcggtggcactggaacagggtatagaacaggacccatgggacgaggattctgacagagtcgcccatactgtaaattgtgccaatggctgacaaaatcactatgcaagatatcatgcttgtgttcaccagatggctcagtcatagtactggacgatactgttgagatagcactggaatc

SEQ ID NO: 50471 - DNA, 471 bp, Zea mays
  unsure (1)..(471): unsure at all n locations
actcagcttcggtcttagctttgaacttttgcaatatgagccgtatctatctttaatcagtcttaaagatcgccctcctgatccccatcgcctttaatttccgaagacccacgaacaaagcttcgtactcagcaatattatttgtgcagctgaaatccagtcttgctgcgtagcaagttctaaccttggacggagaaaccaaaacagcagctgctcctgctccgaagggtccccaagagccatcacaaaacactatccatgcttcggcatctttattcacttcttcgacctgagcccctggcgtccagtcggccataaaatctagcaatgcttgagattggatcgaggatctgtgcacataatcaatgtgaaattcagtaagctccgcagcccattctccaattcggccagtagcctctntatttctcatgatatctctcaacggctgcgaagaatgaacaataatattat

SEQ ID NO: 50472 - DNA, 418 bp, Zea mays
actaagctgaacccggtattccatcatataagacaatcgtgcctggattgtatagaggcgagagtggccgtccctcctggaaaggaccgcctaaatgggcggtgtgctcttatgtggcgcggacctattcatgcagtggaggatccgtgggaatggtagacatatgcaagagttacgagaaacatatgtcgcgtggttagagatcctcagctgcgtaaatcgattcggatcaccgttatatccccggatagtggagactagatctctgccctacaacctatgtcagaatgtaaacaatatgaataaaaatgatgttgtattgatgagatagtgaaattagactagatgcaaccagagtctcttaatatttaatctggcgttaaaatattgaaagtaaggactcactatacaaagctat

SEQ ID NO: 50473 - DNA, 454 bp, Zea mays
  unsure (1)..(454): unsure at all n locations
catactaagcttcggagacgaactcttcataaagaccggcaccttctacttttttggtcacgnatacagccaaacccgtgatcatggataccaccgaagagaagcgcccccggccgatatgcacaaaagatagcatactctcttaattcctctctttcagatacaggcagatcctggccaactaagtttctgaagtcaaaagtttcatctgccgatggatcttcggagattcctcctttatctggtttggaagtcgtggactctttggtggctgcagcagtttcttcagcggtcatgtttagcatcattttatctatatcagaggctatgctctccaaattaataccttcggagatagcatcttcggctgtggcctcttctgcggcaggatccgaaggtacatcctcagtagctgtcatgatataatagccggcatcttgagagttggagctct

SEQ ID NO: 50474 - DNA, 353 bp, Zea mays
caagatgtgcagcgcatgccaagcatgaaagcaagctggcacccatgatacgtataagaacataatgacgaccgacagaccactggagctcctacacatggatctattccgcccgatcgctgacataagcatcggcgggagtaagtactgggtacgtatagaggatgattactctggcttcacttgcgtattcttgttacaggagaaatctcaaaccccaaaaaccctaggaagattcttaagacgggctcaaaatgagcacggcttaaggatcaggaacacaacaagcgacaacgggacggagtgaagaattcctaactgaagcttcctgaggacgatggatcaccatgatt

SEQ ID NO: 50475 - DNA, 234 bp, Zea mays
cgtacgtggcgtacgatgacctacgcccgccgctcgaatactcccggaagagcggatggctgcctgcctgccatgcgcctcggcaccgaagaaagcgcgggacaaggcgaagcggagggccgagggcgatgagagcatgacagcacctggccagtagtctctgtacccgtggataaagtctcccgcgcgggattatgtcaagggaatgggtatataactataaaacgctggcga

SEQ ID NO: 50476 - DNA, 392 bp, Zea mays
  unsure (1)..(392): unsure at all n locations
agcgtatcaaatgagtgtgcggtatggccgcatttatacgccaagtgcgttgaaaattgaaagaccccgcttgtcagtggatgttgctattctatcaaagggaaggtgttttttcggaccttcggcgtaaagccttcgtccatgtcgcaatctaaatttattattttaaacaaattaatattgcgaggggctactgttggggaccttcggcatccgaaggtcctcaaaaacaggatttaacagtatttctggagtataatgtgtgaacaggtatcttcggattcaagtcggcatcacagtagaccagagtaatacgaaggttgatacagcgccgaaggtgtgagcangaaagcttcagcgcggcagcaaaaagtgaaaccgacttanagatg

SEQ ID NO: 50477 - DNA, 480 bp, Zea mays
gacctataaaactcagcttgagtatccactactttagcgccatgagaagataatttattgtagatgcccctacgctatccccgtatttcaaagcgcgctccattactttccgttcccttaggaaaaccaccatattttgatggtgaggattactgtatgtggagtgataaaatgaggcatcatctaacctcactccacgaaagcatatgggacatcgttgaatttagagcgcaggtagcaaaggtgggggacaaagactacgactcggatgaggccgcccaaattatgcactttaactcccaagccacgtctatactcctcgcctcctagtgtcgagaggagtataacaaggtgcaagggttaaagaacgctaaagaaatatgggacgtcctcaaaatggcgcacgaaggggatgaggtgaccaagatcaccaagcgcgaaacgatcgagggagaacttggtcgattcgcctcaacaaag

SEQ ID NO: 50478 - DNA, 461 bp, Zea mays
  unsure (1)..(461): unsure at all n locations
tgctgaattctacatgagaaagttctatggtgactacttctctgttcgtcttggtgagntagttggggctatgaagaacctgtttctattntatgcaagctctataccttcagcttccaacaatgatatgaatgcaaaccaacatgtcatcctaacagaacctttagctaaaaagaagaatgctgaacttgatgctttcttgtatgatgatgttaggcctggtacaaatcatttaaatgaattggacaactacatggcagaacctcttttaaagcaagatccatttgatattttagctttctggaagaacaacagagataagtaccctattttctcacaaattgctcgtgatgtgatgtctatacaagtgtcaactgttgcttcaaagtctgcctttagtgctgctggccgggtggtgatccatatcgcaatcgccttgaccctgagatggtacaagcact

SEQ ID NO: 50479 - DNA, 238 bp, Zea mays
cagctgcagctgtgaacgtacaattcaaaggtattttatcttcagcagaccagccgacagctatgctcttatgtgaggacatagcagagcagaagtgctgttaggctctcagttatccgaagagcaggagaaaaccttgataaggtttttgttcaataacaaggatgtttttgcatggtcagccaatgatctctgcggagttaatagagatgttatcgagcactcactcaatgtcgat

SEQ ID NO: 50480 - DNA, 456 bp, Zea mays
  unsure (1)..(456): unsure at all n locations
atctcaagctataatgaatgatgtgctaggtccttacctacgctgttgtgttctattattctttgaggacattctcatgtactatacatctttgtctaatcaccactgacatgtcaagcggggttggaaacattgcacatacatcatctctttgagaagcagtccaagtggtcttttggggccacatctcttgtttacttatgccatgtgatttgagaagaaggggtatcactggacactagcatggtacaagccgtcacttcatagctaatccctcgatccccatggggactctgtgggtttctgagattggcatgatactatagacagttcattaaaattttgagacgattgtagcaccgttgaccgcattactggagaaagagggttcaagtgatgggcacaactgatacnacactttgggatctcaaacatgccctcgccgttctactatta

SEQ ID NO: 50481 - DNA, 447 bp, Zea mays
agcttgcatgacacaaacgtgaatgccttatttctgactcatcagaaaaatgaacagaattcaccagtttattacacacatcatgcagtgataagcggaacaagccttcgcagtcatattctttaccaacaaaaataccatgtttcgacacaacacatttattagactcaagaacaactttgtatccatctcgacatagcatagaagcgctaacgagattcttcttgatagagggcacatgctgcacgctcttcaatggcaccgtctttcccgaagtaaactttagaatgaccgtaccaacaccaagaacatgagcacgcgacccatttcccattaacaaggcgccagacctcccgacctgataggaagtgaacatagaggcatcagcacacacatgagatgttgcaccactgtccatccaccacttatgtgaattacagactgaaa

SEQ ID NO: 50482 - DNA, 438 bp, Zea mays
  unsure (1)..(438): unsure at all n locations
tctaaagagagaacacgcgataagntaactaacgtgcatttcttaaaagatagaccctgtgcagcatgtcaagcaggtaaacaggtgggaggagcacatcacagcaagaatgtgatgaccacatcaaggcccctggaactgctacatatggatctctttggacccgtcacctatctaagcataggaggaagtaagtatggtctagttattgttgatgacttttcccgcttcacttgggtgttctttttgcaggataagtctgaaactcaagggaccctcaagcgcttcctcaggagagctcaaaatgagtttgagctcaaggtgaagaagataagaagcgacaacgggtccgagttcaagaaccttcaagtggaggagtttcttgaggaggaagggatcaagcacgaagtctccgctccctacacaccacaacaaaat

SEQ ID NO: 50483 - DNA, 409 bp, Zea mays
actaagctttgaatgcagcaagatcataagataaaaacttctatttttattgagaattaaagagcaagataaaagaccaatcagctgttattgaaaagaaagacttcgagcttcggacaactgaaggcttattggcagaagctgaagctaaaatagcagaattaaatacaaagcttctctgccaatcagaacacttcgaacaagataagcaagagcttaacgcacaatttgaggccgaggtccagaaaaattcagatttgaaaaaaatcattgacaagccttcaagacaaatgcttggaatttagtaaatgatgtgttcaacagctgaagcacgtctttgattcggttggagcaagcagcgaacaatttgatccttcgtctgaagaccttgcaggggccttcgaacata

SEQ ID NO: 50484 - DNA, 252 bp, Zea mays
agacttttaacttcctcaatcacattgagatttgatccaaagatcaagatgtcttcaacataaaggcatagcaaaacagactcacccccaccataccgataatacacacacgtgtcagattcatttacaacaaaaccagctgctgtaagaggattatcaaacttttgatgccattgcttaggtgcttgttttaggccataccacgattttatcaacctacacacttgttctcttgaccatccgaatgaaccc

SEQ ID NO: 50485 - DNA, 451 bp, Zea mays
gtggagaagattgttagcgctagcagaatattggtataacactagctaccattcctccttacaactcactccattcgaagtgttatatggtcatcaacctcgtcaagtgggtattggtttgtgggatactagtgaagtgcctgagttacaagagtggctacaagacagaaaactcatggtgcaaccgcttcaacaacagttactgcgtgctcaacaacgccagaagcatcaagctgactgacatcgcactgaacactcgtttgatgttggtgatctagtatacctgaaactacaaccttacatccagtcatgtttggttaaaggagccaaccacaagcttgcttttaaatattttggcccatatccagtgctggctaaaaatggctcggttgcgtatcatctgcagctaccagagaactctgctcttcaccttgtgtttcacgtctctatg

SEQ ID NO: 50486 - DNA, 185 bp, Zea mays
tagcttacatcttacttgggttagcttcaatccccttcgctgaaactagacagccaaggaacttaccctttttcactccaaaaacacatttttttggatttaatttcacgccagcttgcctgaaattggcaaatgtttcttgcagatcagtaatgtgaatttcttgctttgtactttttactatg

SEQ ID NO: 50487 - DNA, 471 bp, Zea mays
  unsure (1)..(471): unsure at all n locations
ngctgaagaggagaagctntntgaggaaaagaaagctgtgaatccatacattgctggttntgtcgagtcaatggctaaaacaaatacagaaaagattactaaggagatattggagggcatgtctgaggatactggtaatagtgacagctatgatgtagaaagtggtggcgaagattctgaggatcgaccctggagaccaagccataccatttttggaaaaccttccattaagcaaagtcacctcgaaaacatgaggggaagatactttcgagatatgtctattgtgagggctggcggagacaacaacgtcccggcccctgtggaaaacgaagttgtgatttttcgaagcttcttcaaagctgggctttcggttccgctgagtaagtttgtagttgaagtgttgaagatctatcaagttnttttccaccagctgacccccgaagctatattgaggatgggaatctttgtctg

SEQ ID NO: 50488 - DNA, 432 bp, Zea mays
accagctgctaaaggctttcatccacggcctgtgaagatatattcttttgtttgtgtgggctaacataagcgatctcgatatcccccttttgttggtgatctctcaaaaagcgataccggacgtctatgtgcttagtgcgggtgtgttcaacgggattatctgccatgcggattgcactctcattatcacatacgagaggctttgctaaacttgtatccatagtccgtgagggtttgcctcatccagaataattgtgcacaacaatgttctgcagcaatatactcggcttcgacagtggaaagagctactgaattttgtttcttcgaagcccaagacaccaaagatcttcgcagaaactgacaagttcctgatgtactcttcctatcaattctacatacggcataatcggcatcagaatacccaattaaatc

SEQ ID NO: 50489 - DNA, 254 bp, Zea mays
  unsure (1)..(254): unsure at all n locations
agctgcagtttaaggaaaactttagatttctattttttntgagaaagacacgattgtagcgcatgccacgcacggaaacaagttggagtccatcatccacacaagaacatcatgacgaccgacaggccgcttgagctactccacatggatctatttcgcccgattgcttacataagcatcggcgggagtaagtattgtcttgtaatagtggatgattattctcgcttcacttgggtattncttttacaggaaaa

SEQ ID NO: 50490 - DNA, 422 bp, Zea mays
  unsure (1)..(422): unsure at all n locations
tattgcaacgggcatacatgtcacccagcgagcaacctgcgtatgttattctgtccagcttatacttgacacataaaccgtgaatctgctccccgtactccaaactgttaataacaactgagcaggccctaaagacactcccaaaatggaactcattggggtggtgcatgccctcagcaatcatctccctgaaaatgtgaagtgcgtacatttcacgaccttgctgtgcaagcccggcgataattgacccccatgaaaataaatctttgtccctaatcctctcaaagagcgcaaatccatccccaactgaaccgctcttggagtacatggtgacgagtgcgttctgcacgatcagatgacctccgntatccgattttatggactgcgcatgcacctgactccctatgcccaagttcccaagc

SEQ ID NO: 50491 - DNA, 228 bp, Zea mays
agcttcatcactgcttttgagaggatctgcttttgtgtttctttcttcaggatcttggctatgaagcatgcccccaacatggtgataacaaacaaatactctatgagtatctacacaaaataccctacaactttggtattcaatggacaattaaattctgccatctataagttctaaaacatctgacaagataactgactaaatctgtttcagatagtagcatagtta

SEQ ID NO: 50492 - DNA, 444 bp, Zea mays
gcaaatgttggtgcgctgttgtcttatgttgggtgagtaaaaacgggtggcatgagagcgtgccaaataactcgggatgagctcttatttatacgcccagagcgttgaaaactaaagggtcccgcttgtcaaaaactgattgctattctagcaaagagaaagtgttttttcggaccttcggcttaaggccttcgtccatatcgcaatatgaatttatcagtacaacaaattaatattgcgaacggctactgttgggggccttcggctttcgaaggtcctcaaaaacatgatttgacaatgttttccaagtgaaatgtgtgaacaggtatcttcataatcggattacgagtatataagagtatggtcaagatgaagcttgagtgagacggaaggcgattgtgacgaacgaaaagatcatcacgaagctatgcgcagataagcttc

SEQ ID NO: 50493 - DNA, 229 bp, Zea mays
ggatctaatcacgcgctgcgcgaggggatgcgaacaagccgacgatctcaccggcgggaggagagtcggtgaattcgaagcgtgggcttgggggtagaattgaattgaattattaaatggcgcctgactcggtgaggaagcggcagccacactcgctcgccagttgccccgggcggcgagagcgcagggtaagaactgagaacacgtgagcagccacgccggcgtgtcg

SEQ ID NO: 50494 - DNA, 445 bp, Zea mays
  unsure (1)..(445): unsure at all n locations
ngaagccatggtaagtagcataagccaataatatgcgaattgactctatcctagctacgggtgcataggtttcaccaaaatccaaaccttcgacttgtgaataccccttggccacgagtcgagctttgttccttgtcaccacaccatgctcgtcttgcttgttgcggaagacccacttggttcctacaacattttggttaggacgtggaactaaatgccatacctcattcctagtgaaattgttgagctcctcttgcatcgccatcacccaatctgaatcttgtagtgcttcctctaccctgtgtggctcaatagaggaaacaaaagagtaatgctcacaaaaatgtgcaacacgagatcgagtggttacccccttatgaatgtcgccgaggatggtgtcgacggngtgatctcgttggattgcttggtggactcttgggtgtgg

SEQ ID NO: 50495 - DNA, 201 bp, Zea mays
  unsure (1)..(201): unsure at all n locations
ttggtggcagctatgttgttagatctatcaaatattgcttcagctcttccaaggctttctgctggattggtccccatcggaagacttcggctgacttcagcacttcgaagaacggtaagtttctctctgctgatctggatatgaatctgttgaaagatgnccgccctnctgttcatntttgcacccccttttttgtcattg

SEQ ID NO: 50496 - DNA, 441 bp, Zea mays
  unsure (1)..(441): unsure at all n locations
tatgtccgacggctgtccgacaagccgtcggacatatatttatgtccgacggcttcctaggtgggcgccggaactaatggattttaaccgacccctgcgctcgcgcgggtttcatttctctctttctctcccgctcgcatgcgtagccgccgccgncgcctatcccacgccgccgtctaccagcacagcccaagcctcttccgaggacctccagccccgtcccgacgcccagcccgcacccgatcctctgtccacgtcgaccggtaactccaccgccgtccaagcgacaccggagccgcctcgacgccgcccgcggtcgccggagcctctggccncgttcccgacgccaccggcgcccgccccgaccccgccggcgttcgctaatctgtcgacaaagtaatgaattttataatgttcactataattttggatatgcacata

SEQ ID NO: 50497 - DNA, 353 bp, Zea mays
gtctctttccttgctttgggtagaggctaacgcctctggcaatgggcggactgtttggctgagttagccggaccgtctgtatgagcaccggatcgtccgccataggtgccggatcgtccgcgatgctcggatcaggttgtcgtgctcagctccttaattgagtctgcccccagcgccttcggacttgttagtcttgtccagagccttccgagcaatctatttttgtgatatatttgacgtacgaggattgtcaatgatgatgtttttgcctttgtctttatcagccatttcaggccaaaccaagaaccttttccatgtgagttttattgtattaacaggaaatggttgtgtgt

SEQ ID NO: 50498 - DNA, 461 bp, Zea mays
  unsure (1)..(461): unsure at all n locations
tgtggatgacccgatcatctaagcatatagtttctgtttgatatatggtcacccaagttntgttgatgaagcaccagaagaccaatcaaggaagtaatccatggataagtttgtatgaagaaggtttgcgtgttggcatctatgcttcttcaataagctagctgccaagcgaaagatagaagcctgaagatgatctttgagtagccagaatcagcgtttgcaatcagcaaccggatgctcctgaaaggctagatgttgttgaagttccatctcctcgaagagtctgcaaagtgaagatatgtagctgaagtaaagcaagacccataacccgtctaagccgaatctcgaggacgagatttattttaagtggggtagatttgtagcatcccaaaaattcaaatcttganatgttctcaaactcgctctanattcanaatgaatntcaaatttcatttcaaaat

SEQ ID NO: 50499 - DNA, 263 bp, Zea mays
  unsure (1)..(263): unsure at all n locations
catcccaacatgtgctattcggcgatgccagagccaacccatattagtcttagcaattaagcaagtgtcgagttcagctctattgaaatcaactaagtatagctgaccctccaacactcccttaaatgctactgaatcatcacttcttctaaagacagtaacacctacatcagtaaataaacagttatagctganagggaattaggcttacacctagttcctatataattttggtggttgaattgcccaacacaaatctttgg

SEQ ID NO: 50500 - DNA, 410 bp, Zea mays
  unsure (1)..(410): unsure at all n locations
actcagctctaccagttcggccatggatgaatcatttgtctaattctattatgtgccgnggatttagtgctttcaaggggagaggggctggtgtgttcaatcgatttggaggtcacgaaccaacgtgggggcagcgtgcacgttctcacgtgaatttttcaagggcggaggcggcctcttcttctgcagcagtgtcgtcgtcgactgaggctcttgctcatgtcgtggccttgattaaccaagcgttttcgaagcagccaccttttgtttccggtgtgtctcaccctgcagttatacaacatgttttcgactcangggataagttggtggaggatgagagggaggaaactttgctgctatggaagaatactgaataagaggatgtgcgtggtcatggtgcatcacatggt

SEQ ID NO: 50501 - DNA, 409 bp, Zea mays
tgcgagagacacccaagggtgtggggggccttgctatgtcttattgacccaattgatgaacgagaaggctcactccgtctaagtgaccgtctgagagacaaaaatggttggaatagacatagcctttgtggcctcctcaacggggactaggttctttggaaccgaaccttggttaaacaaatcatcgtgtccacttgctcgatttccatttgattagttttgcctattttctctctctaaccggttcttgctaagtattgatttgagtttgctctcatacgtcattcgcattctttgagcaactcctaacaagagaaacaatcttttgaacctgaatttatttcgaacgctaaccccggcctttagtgtgtggtaagattataaattcacggttcgctattaccccccc

SEQ ID NO: 50502 - DNA, 283 bp, Zea mays
  unsure (1)..(283): unsure at all n locations
tgttgggtagaccttgggaatatgatactgttgcacgtcaccatggtaggagtaatacatacacttttaggcataaagataaaaacattactttgctacctttgactcttactgaaattgtacaagctgataaagatagagctgcaagtacccataaggaaccaactaatgagacagaaattcagcaaccaattaaattgaaagctcctgtcatgcttgctactaaatntgatnctcttgaaactcatgctactgatgaattgttgctatgccttggttgcaa

SEQ ID NO: 50503 - DNA, 468 bp, Zea mays
  unsure (1)..(468): unsure at all n locations
tatctctgcgccgcatgagctcgtggaananaatcctgccgtctcccagcttcttcttctccacgcgtccctctcccttggccggcgccctgcccagtcccagtgtcgccgtgccctctgcttttatttctctctctcttctccatggtccagccgccggacgccatccgagccttctcctcgtgggacttgccgcatcgtcgccctacccggtacggcgttcttcccctgcaaccacgccaaccgcgcgccctccctgctcctccatcctcagcgcctggccgtctgtctcacccgcgccgtcgcgttggttcctccgctggctcggccgaccgcgtgcatctcccatgggcgagggctcgaggtccctccatggctgcacgttcctccagcctgcaagctgtcaagctcgccgtggagcccctgcgctcgccggcgctcctctctggctcgccctactccctgcgt

SEQ ID NO: 50504 - DNA, 259 bp, Zea mays
  unsure (1)..(259): unsure at all n locations
agctgcagctcggacgtaaaattgacactaactttttatgcagtaagcgggtaacttacaccactctctgttattatgcccagtaaaagcgaaggccgaagtttacactagcgacaccgtccactccttacggggaccgaaagaccaaagtacttgcaggtgggccctaccccaggagatgatncgtcctgacacgactcaggaagtgtttgaacctcgcgtccaaattaaaaatctttnccganacatgctacaaaac

SEQ ID NO: 50505 - DNA, 466 bp, Zea mays
  unsure (1)..(466): unsure at all n locations
tcgncttgactagatacttgtgtacccataacctgattctgatgatacctgttcacatatttcacttggaaaacattgtcaaatcatgtttttgaggaccttcggaagccgaaagcccccaacactggaaaacgtagagagcggagtggatggctaagtgatgaatgatgtctctctcgatcgtcttgaaggggtgccccctatgccttatatccttgaccatggggcattacatgtggatatgataacaacgtgagccggaataatagtgaactaactgagtctgtctccctataattcagccgactcatcctcgcccagtttcgacgtacggngctcctgtgccggaaggtcgggtcactgctgtgattactgctcggatgttgttgggccatctgggcttgcaccgactcggccttgtgctgatttgctcaccggtcatttctccaggcccacgatggggatg

SEQ ID NO: 50506 - DNA, 443 bp, Zea mays
  unsure (1)..(443): unsure at all n locations
aagcctgaaccttaaatacctgctaacaagtcgctaacaaaatgcatgcttcgttttataaatacgaatagngtagcagacatatgcactcgcggcgaaaacgcatataaattcaatctatataacatatactatcaaacatatgcacttgtcatcgactccgatcgccatgtactcatgtcgttcatctatggcattgcaaacagagcgtaatgcacaagctggtctatagcaagcccaagaccatcatcaaactgacggtgatcgccagctaccacgcatttgacaaagagacggtcgaagctatcttcagcgaccaggcaaaggaacgcctctaccacaaggtcgagccacgcatccctcacaaccacgggaagaacacagcaacaatatatggcgacttcctccaaccacacgaaatagtagtcgccattgctgactga

SEQ ID NO: 50507 - DNA, 466 bp, Zea mays
  unsure (1)..(466): unsure at all n locations
tctatgctagtgattaccaagagataccaaatgaagcacactatctatgctactaattgaaagatcatcactgtcatagctccatgatatttaaagataagcatctatgatcaccaactgttatagagcatgagcaatctttaaatacgcaattactcacaactttagataccaattacttgacttgtggaggtactgaagtcctgattgttccatttcttgctcatcttcccttttccaccttgagactatataggatcactcaaaaaacagttagtctcaaaagacacaagttatgtgtgctccccctaaagttgtgcatcaagtatttgaatgacttgcactttgcacattctagcttcctcataactagaggggatcacaacatatcttggtcaaggcatactctatcaatttcatcacanagagataccaattgaatagttgacttaatacaacaatgcat

SEQ ID NO: 50508 - DNA, 416 bp, Zea mays
ctaagctgtagatactcggggacgagaacactagaagggttcttttattcttcgcgacttccttgagacacagaggcctcaccacccatcatgacatttccagatcctcacccacgcttggatccaaaccgtgagggcgtctcctcacgaatctcaggggaaatgtcatctgagtcagattcaatgaccgatagattacgacgacgaaccatccttgagatcaaacaagatacatatggtgagagtgatattgatgttcaaggaatttaaagaacatatttgaggagagtccagtgtgatattgtgcatgcatttcaaccattcatatgaacggtctaactacaatgaacaatatcaaccgattcatcttcaaagctatgttcaggacaatgagaactgattaagtgtgagtcaca

SEQ ID NO: 50509 - DNA, 132 bp, Zea mays
ggaccaaaatgcacagaaacttttattcacatcatgaagacaactcaaccaagtaactcatcaagtcgtgcttgctttggctgtggtgataccagccatctttttaataattgtcctaagaaggatgtggag

SEQ ID NO: 50510 - DNA, 470 bp, Zea mays
  unsure (1)..(470): unsure at all n locations
actcagctcttgggtgaacaggtgagtgcgtacactctaaatatttctttctttgtattatagncgaaagcgagtctggaagaaatatacttggacccgcacactgtgccgtctacatgaggtagaacaatgagatccagatgcaagattgcaagagtgggagatctcctttaaccgtgatattcttcagatagaaaaattttcatgtttcccttatagccggtctttaacaaatcataccagcattgtgcataggtcccacacaacactttgacaaccaatgaaacattgactactcaacgacacaagcgcacaaagtgtaattgcttcacactgctagttcctgcgtcctgcgtgatcagtccttagttgcaagcgtgcaaatgagcagtgtgcacttacacacttgcacctaaggctatctccagcatgttacctatctcactccttatttcagactctaactctat

SEQ ID NO: 50511 - DNA, 195 bp, Zea mays
tgaaaactagaaaaatttcaggattaactccatttgggtcctggctcctacatgagagacatggcccaatttttaagtttacacaaacataccacccacattctaccggcacaaacacaccagaacaaacacaagttggactagcggtcaaactaagaagaaccctaggccacataaatacatgtctaaaggacc

SEQ ID NO: 50512 - DNA, 455 bp, Zea mays
tgtgagattaataatgtgtattacatgaggtcacccctgttcttttttatgtcacaataaaacaagctgaactatatttatgtacttgtaagtaacacttatgggaaatattaatctattttcaaataaagataatgtatgttatagtttatgttatactttgaatccattatcccttatgtagtattgtgtccttttaagatgtgttccaatgtttgtacatgtttggtgtgatgttcatttgtactttccaaatgtattgaatgcatgctcgctttatttagacaatgagtaagccgaggttcctaagtgtgttgttggagacctccctgagcaacaacctggtgaaggcaagtatcctctgacccattatgtcctacatactttatgattcactgtcccgcattactttgtgaaacctaaggattgactaaactgtattcacttatccttgg

SEQ ID NO: 50513 - DNA, 458 bp, Zea mays
  unsure (1)..(458): unsure at all n locations
tcaactccatctatattatggattgccttggaatctgttctcttccttctgcccttctggcagcttgctgactcccatgaatagcaataggcccttggtccgaaggtatcttcatgcagagataagctgggtgaagaattgcttcaaaagcatttacggtaccacgaccaatgatggcgttgtaagggtattccatgtcaacaatatcaaacacaatttgctcattccttgtgttattaacaaatccgaaggttaccggcatggtaatcttcccgagtgccacaatctgccgccctccgaagccacaaagagggtgcgtagcatcatgaatcttgtcttcaagctcttgcatctgtctgaaggctttggcaaatataatgtcagctgcactgcctgtgtcaactatgacattgtgaaccagaaacccttngatcacacaagaaatgaccataacatca

SEQ ID NO: 50514 - DNA, 410 bp, Zea mays
agctcccaatctaattctgttattctggcttcagcatacactaataagccttcgactgtccgaagctcgaagtctttcttttcaatgacagctgattgctcttttatcttgatttctcagttcccaattataacttcgtgccttttatcttctaagtcctgctgcatttttaaggccttgctcaaaagcatactctgtggacaaatgaccttcgttagaaaaaatttgtgttattacaaatagtaagggttagacacaagatgcttaccttattattggaatataacaaacaaccaacaatgtgttgtcgtcggtagcggctaatatctgcttctagctctgagaaaccgatactctttgatagagtaccgatgaccttcgcgcgagtctgatctcgtatgcagcctaac

SEQ ID NO: 50515 - DNA, 307 bp, Zea mays
  unsure (1)..(307): unsure at all n locations
tgactaatgtgttttccagtttatttcaaaccaagtcatangtatattgaaagggaattggagtcttcggcgaagacaaaggcttccactccgtaactcatacttcgccaccactccgagcaactctctcttcttcaggggagaaatgagcatcaacgaaaaggacttcatccttgggggagagagtaaaagctcaaacgcaaaaggacttcgtntttggtataatcttaacncattatttatgaccaaggggaagatgcacaccgaggctctatgattcctttttggcgattcatgccaaaagggg

SEQ ID NO: 50516 - DNA, 459 bp, Zea mays
  unsure (1)..(459): unsure at all n locations
ggacattgtctccctggtggaagccaatatcattctttatgtctgtgcgtctcccactatagagcatgcttctagcatatataaaatcttcattttctaagtcatgctcattaatttcggcactaaggtgaggtatgtgagcattttgttgtttaattaaagctaggtgatcatgaatagcatcaacattaatatctctacatctagtgcatatagtaacatgctcaacggtagatgtagagggtttgctagtatttaattcaacaatcttagcatgtaaaatagcattctcatctctaagattagaaatagagatattgcaaacatttaaatctttagccttagcaattaattcttcattcttaattttaaagctagagagagatgcattcaatnttgcgatcttagccatcaaactaacattatcatttctaagactaacaattgaatcatcacaac

SEQ ID NO: 50517 - DNA, 313 bp, Zea mays
  unsure (1)..(313): unsure at all n locations
ctgcagctgtgaagttctatcccactgtgctttaagcgagcccagccgcccatgctagttctacaataagctgcatctaaccgcctcctttttgcaaaatacaataaatagagtttgccgtctaatacacccttaaaagctaatgaaccatcacttcttctaaagacagacacatctacattggtgaataaacagttatatcccatattacataattgacttacggataacaaattatatccaagtgactctaccaagaatacattagaaatagagtgctcatttgagattgcaatncttgcctaagctttaa

SEQ ID NO: 50518 - DNA, 439 bp, Zea mays
  unsure (1)..(439): unsure at all n locations
tctaaagggagaacacgcgatagggttgactaacgtgcatttttaanaagatagaccttgtgcagcttgtcaagcatgtaaacaagtgggaggagcgcatcacagcaagaatgtgatgaccacttcaagacccctggagctgctgcatatggacctcttcggacccgtcgcctatctgagcatatgagggagtaagtatggtttagttattgttgatgacttttcccgcttcacttgggtgttctttttgcaggataagtctaaaacccaagggaccctcaagcgcttcctcaggagagctcaaaatgagtttgagctcaaagtgaagaagataaagagcgacaacgggtccgaattcaagaaccttcaagtggaggaatntcttgaggaggaagggatcaagcacgagttcttcgcttcctacacaccacagcaaaat

SEQ ID NO: 50519 - DNA, 352 bp, Zea mays
cggcgactgccagttcgacctatagaagcagtcctacgtgttccatgcgccgctgcgtatgggaagctccggcgcaaccgccgctcgtacgccgtccacagcggctgcaccgcattgtccatcgtcgaacagggggacctcattgtcgtcctcaatgccgacgactctcggattgttctgggcaccgcaaccaacgacggcgtcatcatgacagtcaactcatcattcacctgaagcccaacctgacacgtaagtcgctactgaccggccatgaattcttgtgcgctgggatgacgaccattgttgctggtgtgtgtgtcctccgacaagatgtatgtacaagagtagcaca

SEQ ID NO: 50520 - DNA, 387 bp, Zea mays
ttttcatatatatatagagaacgctgtgaattgagatacgttctatccaaacatataagacacgctccacgacgatgacttatgactcgaaatagaggaatagctttagtatatatgcactttatgtcacatccactggctacacatctgtagagcatccgcgtgattacttactatacaaagtaagatccggcatgagtagcgaaaaactattcaagtgaaatatggctgattcagtcagtgaaacctgccaactagaaggcaattttacccacggagcttgcacctgaaggatttgagaaaacggtacgaaacaaagtccccaggcgtacgtgagggacggagattcggagagacgtggattgggcgcgagcatcaaatttaatc

SEQ ID NO: 50521 - DNA, 207 bp, Zea mays
tgagctgcgctttcgcgtgatgaggggacatttttaaagagaagggttatacgaaccgaattttcacttccacctgcggttcgagcgccctcgtaatcttaagcgcctgagcgcaagaagtttagtaagatccctctacgctaccctcgcggtcctaaacatacacctttactttgcgtcccgtaggcaaaccaccaactttttatg

SEQ ID NO: 50522 - DNA, 433 bp, Zea mays
  unsure (1)..(433): unsure at all n locations
tcatgggtttaccagaggtgacgcacacaccatgatttggactgggcacgaacagaaacgtgggtcgacgaagagggtgtcaaggcggcgttctacagagcatgtgcgtgttcctgtgaaaggcatcggccgaacttcaattggtcggtactgagagcaatangaggctacaaacgagctagaatacggagcaattgggaagttactaacccaaagagcattgaccacgatggagttcctcacggcggagttaagaacagggagaaaggggatttgtggactgtgtgagttttccggagaaattgaatctagtgcttagtcgctgaggtgcacgatgtggtgaagaagcggagtccgggctcaatttatatgtcgtcgaccggaatcggaggatgagcgcggattccagatcgcgctggcgagcttatcgtgc

SEQ ID NO: 50523 - DNA, 465 bp, Zea mays
actcagcttactcctcctgggaagggtcgttcatcatcgccaaaattttgaatcccatgacatacaagctggccaacgatcaaggcgaggtctacaacaacgctcgggacatcgaacagctacgtcgcttttacccttaaagtgtttcaagtcgttcatgcatctcgctttctttacatgtataaataaagtctaaccatcaaggaaggatcagccttgcgtcggcaaagccataccctccctcgggggctagaaggggggaaccccctctgcgtcaaaattttcctcggaaaagttttctaccaaaacgactttcgtgcttttcgactatatcgataacggaatcctaaaaacgacgagaggaaccttatacggcgaggccgaccgagccgagggactcctacgcctccaggatatggatacctcactcatcaccttccgcgaaaagtaactcgcgctcggata

SEQ ID NO: 50524 - DNA, 457 bp, Zea mays
tcttcaccatgagatcacgggtatcttgagaaggttgggctatgcatttcccttttagttgggtcaagcgcatctttagcctctcattttcttccttgagcttttgatatgaatcatcgtttgttcctgcaaattctagctcaaaggaagatttgcttgtcgacggacaacaagcattagcacatggtaatatagtatcaatttgaatgcatgtgcatgagtgagggtgttgggattttaaattttctatcacaacctcatgagcaatgtttaatatgatatgatcatctctaagattttcatgagagcataggagcatatcatatttttcttgaaaagctagattatcagattttagctcttctacttggtccttaagcgaggtattcttatttactaattgagctatacaatgtagagcgctatactgctcaattgaaatagtttcatacctttg

SEQ ID NO: 50525 - DNA, 134 bp, Zea mays
  unsure (1)..(134): unsure at all n locations
gcgacaacgacaatggcggtcgacaacccgaccaccggcggcggaatcgacgacatcttccccgcgtggtggaagaacaacattcgagctcgccccgtcctctcccncgccaacggaggaggaggcggggcaac

SEQ ID NO: 50526 - DNA, 413 bp, Zea mays
  unsure (1)..(413): unsure at all n locations
tgtggaggttcttcatccccacatgtgctatgctgcgatgccacagccagcccatgcaagtcttagccattaagcatgcatctagaccggcctcttcttttgcaaaatcaactaagtaaagcttgccgtctagaatacccttaaaagctagtgaaccatcacatcttctaaagacagacacatctatatttgtaaacaaacagntatatcccatattgcataattgactaacagatagcaaattatatccaagagactctactaaaaacacattagagatagagtgctcatttgagattgcaattttacctaacccttntaccttgccttaattcccatcaccgaatattattgaatcttgggaatgcttattcttgacgtangaagtgaacatcttcttctcccccgtcata

SEQ ID NO: 50527 - DNA, 299 bp, Zea mays
  unsure (1)..(299): unsure at all n locations
atgggcatatncggtttcaaacatagtagatttttcaaaatccaagtggctgggttttgatgggatcaaaatgctcataatctcttcttcatcagcattttttccctcaacatcagcttgttcagttttggcagcaggtgcaccttcttcaatggctccctctatcacaactaaccncgattgtctcatgacttcggaaatcggagctgcctcggtagcctcagtctcttctccttcacgggtcaccctctgatggatncttttagtttttatgaagctgatgttttttaacattttaa

SEQ ID NO: 50528 - DNA, 455 bp, Zea mays
gtgaccccacgagaccttcccccgtttccttccaaccatggtaaatgcaatatcgtatgtcatattctatgcacgtttgatctacttgttctcttgtatggcatactgttggtttcctaatttgaacggatggatgtatgtatgtttgcaatcgcatagagaacgattcggtcgatgagtccgaagaactcgcagaagaagtccgtgagcagcagtcggttggtggaggcaagtgtcccttgacctatctctgtcctatacattctttaattcacctcccgcattacacatttatacctaaggattgactagcttttgttatccatgtccttgtttacctatttgggttggattattattgtttagtcttatgctattgctcaactctgatcaatgaacatgatgagaattatcaatgatacgctcgtttcccttcttttattatgatgttatac

SEQ ID NO: 50529 - DNA, 70 bp, Zea mays
aatgatgaatgattctctgaaccttttcttcggtctctttcaccatatcaggcctgaagaagtacctttc

SEQ ID NO: 50530 - DNA, 445 bp, Zea mays
tctaaagggagaacacattctatgattaacaaatgttcattttgagaaagacagggcttgtagcgcatgccaggcaggaaagcaagctggaacccatcatccacacaagaacatcatgacgaccgacaggccactggagctcctacacatggatctattcggcccgattgcttacataagcatcggcgggagtaagtattgacttgtaatagcggatgattatactcgcttcacttgggtattctttttacaggaaaaatctcaaacccaagagaccttaaagggattcttgagatgggctcaaaatgagttcggattaatgatcaagatgataagaagcgacaacgggacggagcttaagaactctcacattgaaagctctcttgatgaggagggaatcaagcatgagttctcttcttcctacacacctcaacaaaatggtgta

SEQ ID NO: 50531 - DNA, 434 bp, Zea mays
taatactagattcagcaactcacaggcagttgggatttctatacatttcttcttatcctatgaggaaagataatcattgtgaaaaatcacaaaaatagcagacatcttgatcactttgctttggagcgttataatttacaatagaaaccagccatacctgtgaggcaataacgaaatgcatatatgtagaaatcctggaaattggatggccttgtaacctggatttataaatagatgaaagtggtcagcaacgttacacttcaacaaaaaaatatcaacaattaatggtagctcattgtgcattacagtcacaaggtggcaatatatcatgatatatctgttagatggaagttcttcactccgtaaattaaatctctgatatgcatggctcacttgaacataagataatgtttggggagacagaatcacctctt

SEQ ID NO: 50532 - DNA, 251 bp, Zea mays
caaataactcatattagtcctctatcagcttctcagtggggacttaatgggtatttagaatttcagaattctgaaattcagaccttgagccaaagatcacggatgttcaccttgatccctaactcgaatcctaatggtcccattgacaaaattgtgtctaactaacccctctgtcgtgtgccataagatggcattgggacgcgagccctagacacgacaaaaccttggatttgccttcggtttgggcagga

SEQ ID NO: 50533 - DNA, 460 bp, Zea mays
  unsure (1)..(460): unsure at all n locations
tcaacccgtcattcttcagcttcatcattctgtacatattataacagaatgagaaaggtgcacatttcaaggagaaggttaaagtaacaagtataagtttctcaccggcttaaggtggctccgagctttgtcaccagccatttttcgctcgccgtttacccaaatatgggtcataaatctgtttcctatgcttcaggctaggcttgggatgtcaaccaaatctgtcggtgacaagctgaagtttggcctatatacaatcttcccatgcgtgcagncggccttcaggaaagcggtagccatgcctcgagaagctagcagggcgtagaaatcagcatgcccagcaataacttcgtcaagtgcatcaacctcgccttcaatgtattccaaggtgctaggtaggatctcagctgaaggtgtaaacttatcagagctggcccaattgagtgaaacacatccttca

SEQ ID NO: 50534 - DNA, 444 bp, Zea mays
  unsure (1)..(444): unsure at all n locations
agcttctaaagggagagcacantttgtgactatcaaatgttcattttgagaaagatagggtttgtagcgcatgtcaagcagggaagcaagttggtatccatcatccacacaagaacatcatgacgaccgacaggccgcttgagctactccacatggatctattcggcccgattgcttatataagcatcagcgggagtaagtattgtcttgtaactgtggatgattattctcgcttcacttgggtattctttttgcaggataaatctcaaacccaagagaccttaaagggattcttgagacgggctcaaaatgagtttggcttaaggatcaaaaagattagaagcgacaacgggacggagttcaagaactcacaaatagaaggctctcttgaggaggagggcatcaagcatgagttctcttcttcctacacaccacaacaaaatg

SEQ ID NO: 50535 - DNA, 451 bp, Zea mays
ctctcaacatttcttggtgcccatcaaatttacttcaatttttataatcggctcaattcataattttaaactgttcataccctttctcttattttcttcaattttgctcatagggctcacttagggtctttaattagtgttgcacattcttatcttttaaaagtctcaattgttttgatcatgacacttttaagtatatacttggtgacttctttattacttaagttattttgatgctcatgcttactttggttcacataaaataatgattcttggtttggcatttgagagaaaccctatgtgacactggggtgtcacacgataactatgtgctcctaagtaatagtgaaccggctgaacttatctccctattatcctgccgacttatcctcgtttagttccaacgtctgagggtgctgcacgggagaatcggatcaatgctgtggatatc

SEQ ID NO: 50536 - DNA, 459 bp, Zea mays
  unsure (1)..(459): unsure at all n locations
tgtgaaaggtcttcatccgcacatgtgctaagcggtgatttctcagccagcccatgctagtcttagctattaagcatgcatctagaccggcctcttcttttgcaaaatcaactaaataaagtgtgccgtctaatacacccttaaaagctagtgaaccatcacttcttctaaagacaggcacatctacatttgtaaatagacagttatatcccatattgcataattgactaaccgatagcaaattatatcctagagactctactaaaaacacattagagatagagtgctcattagaaattgcaattttacctaacccttttaccttgccttgattcccatcaccgaatatgattgaatcttgngaatccttattcttgacgtaggaggtgaacatcttcttctcccccgtcatatgggttgtgcatccgctgtcaataatccagcttgaaccctcggatg

SEQ ID NO: 50537 - DNA, 397 bp, Zea mays
cattttgagaaagacaggatttgtagcgcatgccacgccaggaagcaagttggagctcatcattcacacaagaacatcatgacgaccgacaggccactggagctcctacacatggatctattcggcccgattgcttacataagcatcggcgggagtaagtactgtctagttattgtggatgattattctcgcttcacttgggtattctttttacaggaaaaatctcaaacccaagaaaccttatagggattcttgagacgggctcacaatgagttcggcttaaggatcaagaaaataagaagcgacaacgggacggagttcaagaactctcaaattgaaggctttcttgaggaggagggcatcaagcatgagttctcttctcctacactccacaaca

SEQ ID NO: 50538 - DNA, 443 bp, Zea mays
  unsure (1)..(443): unsure at all n locations
cgagagagggaacgggccctangcctcctgnggagtctattgttgcacagtggagctcaatgtttgagtgagtctgtctacaccgttcttgctgcccgtgctctcctcccgcccttttcccccttaggaaggccctaaacatccccttttatagatacaaggacatggtccagctgtacaatgggggtgtagctatgtgctaacatggccgatggagaagtgcttgagccctgtagaagcgtagctggcggtgcggcatggatcctgctgacgtttccttacttccgtaaggagctgagaaccatcgacgtcacggacgcacgcggtgaaccatcattacctgttattggagtagtttgatgtgactccggtcttgttccttcttagcatggngtggctagctagcggtagggtaatgatgtatcttctgtagcgtaatcggt

SEQ ID NO: 50539 - DNA, 393 bp, Zea mays
  unsure (1)..(393): unsure at all n locations
gaactatccagctccagttttttgtattgctagcataagggttatcaataacaattggagtggctcttcctgtcagccaaacgtcagaacaaggataatttgagcaaagcgatcctaggatacttgagtgcgtcaaacgaactcggtgatgaaaaatgtagagcttccatttgtcatctttggaaacaatgcaactgcaacagacaatttttcttctgagaacatgctcgggcaaggtggctntgggaaggtttacaaggtcagtaataaaaaatgcacacatcttctaaataaattgtagaaccgtgagaattatggcattgcttgttcagtacaacaatggcgaaacaaaacaacgcacggtatgctgggacacaacatagaagtcgcaat

SEQ ID NO: 50540 - DNA, 450 bp, Zea mays
  unsure (1)..(450): unsure at all n locations
tactactgaaaggacaccgtgctgccaaaccccttaaattttaccaagctntccaagaagggcatgagcaaaattcatggtaagaaaattaatgctcatactatttgctctaacaatgtacctatgtgcttcaacaaagaaagatcaaagagaagcgatagaaggtgctatggatgcaacgagaagggtcatgaaatngattcatgcccccacatgaagaaccaagatcttgcacgatcaagaaagatgaccatcaaaaagaatgaaaacaaaaggcaaatgcattgcaaggataagcatcgcatttgctacaattgccgtgagaaaggtcatctattcaagatatgtccaaagggtaaaactcctaagcctaacttgtcaatacatccaaatatgcttatgagacccacaattgactcttgtgctataaaggtgatgagttcaccacat

SEQ ID NO: 50541 - DNA, 436 bp, Zea mays
  unsure (1)..(436): unsure at all n locations
caagcttttgtcatcatcagaaagcatatccatagcactccaaaaaattggntccgatgcttgccttcttatcatcctcattcaagtccatcttagccatctatcacccaatggaagatagtcaaaatcaactgaaccaactcgatttcttcctccagaccacataattttctggttctctaaattgaataataatctacaaaaaagcatacctgcatagcaagaaattcgcattcccttntgctaaagctaaaaagtattacaggatcatattggcgctgaattatcatcttcaccatcttgaatatgtcactttcctcactaaatgtacctgccatggtaaatntctgccgcttcccattttccttcttcttggcactgtcgctagcagggacaanggcgttcaatgctttctgaaactgtcctctctgaactt

SEQ ID NO: 50542 - DNA, 447 bp, Zea mays
  unsure (1)..(447): unsure at all n locations
actaagcttctcacaattcctttctttccggcctgcggcatattctcttcggcggcagaggcagcttcttctgtggccatgtctagcagtattttgtcgatgtgttcgattgtgctttccaggttcaaaccttcaattgaggcagcttcggcagccgcgacctccgaaggtgtgatttcaatatttgttctttcctcagccgctggtgtcttctgagctgaagctcttggtggtgtcttgtcaatgacctctgtcacagtgatgattctttgtctctttgctatagtcgttntcttcgttttttcaggctccttttccttctgaaaaaactatgtcagttgaggccccaatggacttagcttcgcaggcagggattcagtcattaccttcaaaatttcctccacgtcaggggcagagggtgatgcggnggttcttcttcatcggata

SEQ ID NO: 50543 - DNA, 409 bp, Zea mays
  unsure (1)..(409): unsure at all n locations
agcttgcccatacttggtaaagctacaacactctgttttatattatatgcagaccataccagtatcttggcccttcgcgtgctgaggactggatatgattagacctttcaagaaagctcatggaggatacactcatgtactggtagcaatcgacaaattcactaaatggatagagttcaaacccattggttctttaacctcacctaaggccgtggaattcatacaagacataatattcagattcgggataccaaacagcatcataactgacttaggatccaacttcacaaagttagaattcttcgacttctgcgagcaaaaaaacattcaggtcaagtatgcatctgtagcacattcaagagccaacgggcaggntgagcgagccaacggaatgatattggaggcactc

SEQ ID NO: 50544 - DNA, 397 bp, Zea mays
  unsure (1)..(397): unsure at all n locations
ctactgttgggactatgctatgtcgccgaacgacttgtatgaagaatcagctatcgctgaagctgtccgcatgagatgaccgatggatcctcttcatgaagcttccgaattacaaaccgacttaaaagtagagtgaccatttagttcataaatgtttgggtcactgatgtaatcccttataacgggcataagtgtaatttcccacaggctgtgtcctgtgcctataaatagtgaacaatattcctttactgttcatgcattcctgtatctgcnatcccatcattctacaatcaatctgtgccaaggcacacgtataactgcattcatgattaaatatactgaataaatataatatggtgcatttatgaatcatatacctctcgtactctatttttat

SEQ ID NO: 50545 - DNA, 477 bp, Zea mays
  unsure (1)..(477): unsure at all n locations
tctaacgggagaacacattntatgattaacaaatgttcattttgagaaagacagagtttgtagcgcatgccaggcgggaaagcaagttggagcccatcatccacacaagaacatcatgacgaccgacaggccgcttgagctactccacatggatcttttcggcccgattgcttacataagcatcggcgggagtaagtattgtcttgtaatagtggatgattattctcgcttcacttgggtattctttntacaggaaaaatctcaaacccaagagaccttaaagggattcttgagacgggctcaaaatgagttcggcttaaggatcaagaaaataagaagcgacaacgggacggagttcaagaactctcaaattgaaggtttccttgaggaggagggcatcaagcatgagttctcctctccctacacgccacaacaaaatggtgtagtggagaggaagaatcgaactctattggacat

SEQ ID NO: 50546 - DNA, 289 bp, Zea mays
  unsure (1)..(289): unsure at all n locations
acttgttcttaatactttcctcaatcctgaatttaaatcaactctacccccgtccacgtggctgctcctgaaccgccggggaagagactgcgctgacgatttggaatgggaaacccaggaactggtagacattagtgagaatagtcctgagcacaaatctccacaaaatcatgtgatgtagcagagggtcctcataaggagcaaccaacncaacatgcgctgctgagaaaagtccccctcaaatggagcagccaactcagcgtaaacgtctaaggcattagccttccac

SEQ ID NO: 50547 - DNA, 476 bp, Zea mays
  unsure (1)..(476): unsure at all n locations
gacacataaaactcaagctggcttgncacantccatcacaagaaggggattttatctagatgtgtccggattactagctcagatcctatagctgacagatttcattgacactgtctccattcaatgcaacgatgttgtcaataaatacaaaccgcagcaggaagtgacaagcgaagacgaacgtgatgacgtcaaaatggaaccctatccaacaccttcaccccaggatcttgaggagcattatgattactagggcatgaacaacaatagcgaccaatctatagggataaactacaatatctagtagcggtccttcgttaagtgtgagacacaatattgtctttaagtacatctaggttatgacttctgtcatatgtgaacttgtttcttatgtcgtacctcgccgagctatataatctaatcgtgctgaacaccgatggcaactntactgtacttcttgcatggactttataatg

SEQ ID NO: 50548 - DNA, 89 bp, Zea mays
cccttcagcggaaccgtctgcaccgataatgaatcgcaccaacccctgtggcgaccggccgcaactaatctaagtatgaaagttatatt

SEQ ID NO: 50549 - DNA, 436 bp, Zea mays
  unsure (1)..(436): unsure at all n locations
agcttgagtncaatcatttgcanaggattatttatgctcaaaaggataatgaaggcatgaaacacattcgtgaaaagataagggctggaaaagccaaatgtttcaaagaagataatcaaggtgttgtatggtttaataatcgcatagtagtgccaaagaacgaagaactccgccagcaaattcttgatgaagcacatcttagtcgttattctattcatcccggaagtactaagatgcaccaagacttaaagcaacattactggtggacaaagatgaagatcgaaattgcacgctatgtggctaggtgtgacacttgcagacgtgtcaaggccatacatttgaaagttgctggtccattgcagtcattaccaataccaacatggaaatgggaagacatcggtatggactttatcgtgggattacccaggactacaaa

SEQ ID NO: 50550 - DNA, 425 bp, Zea mays
taagatgtcgggccccaacagggtcactacggtcggttctatgtaccgacacgcgtacgaatgtgacgtggagtgcatggagtacgccgaggccctcgccgaatccgaggccctcatcgccgacctggagagcctttccaaggaggcgccagatgcgaagcgccacgccggcaacttcgagccagcaaaggcggttaagttcgtccctctcgaccccagcaacgacacctccaagcaagtccgaatcggctccgagctcgaccccaaataggaagcaatgctcgtcgactttctccgtgcgaacaccaagggttttgcgtggagtccctcggacatgcttggcataccgagggatgtcgccgagcactcgctggatatccgagctggagcccgacctgtgaagcagcctctacgccgattcgacg

SEQ ID NO: 50551 - DNA, 440 bp, Zea mays
  unsure (1)..(440): unsure at all n locations
ggacttaaacactgcagcatcagcttaaaggtatctttcctatataatattacgaatgcttcaagcaaggtaccgaactagttgtttcaattggtatgtgaccaataataattcctttcaagtgacattctctcaattggtaataatctattctatggaaagtaatgtcaatatgaaggtaaattcctttggcttacatttgaaattgattcataatgttaattcaatcctccatgtgcattaacttaaaaggaatttaatttatgcctttacgcctcataaatgatgatttgtttgccattcatatatagatatcatcattcattaaatacttccttggactactaatacctcttttcaaagtgttgtatcgactagttctaanaggaaaacagataacagacaacgaagtcttcacaaatgatgaaaattaaaatact

SEQ ID NO: 50552 - DNA, 474 bp, Zea mays
  unsure (1)..(474): unsure at all n locations
tgacaatgaggagatggcgctcatcatcattagcttccatcatatcctcaaacaaaggaaggactacaagccccgttccaaaagagtgtgctacaaatgtggtaagcctggtcattttatcgataaatgtcctatgtctagtgatagtgacaggggcgacgacaagaagggaaataagaaggagaagaagaggtactacaagaagaagggcggcgatgcccacgtgtgtcgggaatgggactccgatgagagctccaccgattcctcctccgatgaggatgccgccaacattgtcgtcaacaagggacttctctttcccaacgtcggccacaaatgcttcatggcaaaggacggcaagaaaaaaaaggtacaagctataaccaccccccangtatactacatcttgtgatgagagtagttttagtgatgatgaagataacttgcttagcatttttgccaaccttaacatgaaac

SEQ ID NO: 50553 - DNA, 393 bp, Zea mays
agcttacttcctacggcctgctctaggaagttatttaacttcctagagtacatgtacaaactctagtaagttatgtaactttctacggctttactctaggaagttaaatttttttatcttaaacccctactcaatcttatcctcttctcactctcctctctcactcctgtgtcttccaccaggacgaagccgccgccggcgcgcccgctcccgcccgccgcgcccggcgccgtctccttcctctcctcgctagggatgaaaacgggacgggaaattcccgtaccgtcccgtttcgaatactgtttttcccgatcgttttcgaattgttcgggaaccgattagaaacggtacgaaaacgatttagctagtttttcgaccggtttcgtatttttc

SEQ ID NO: 50554 - DNA, 437 bp, Zea mays
  unsure (1)..(437): unsure at all n locations
tctaaaggggaacacattntangattaaccaatgttcattttgagaaagacaggatntgtagcgcatgccaagccgagaagcaagttggcactcatcatccacacaaggacattatgacaagtgacaggtcactggagctccttcacatggatctattcggcccgatcgcttacataagcatcggcgggagtaagtactgtctagttattgtggatgattattctcgcttcacttgggtgttctttttgcaggacaaatctcatacccaagagaccttatagggattcttgagacgggctcaaaatgagttcggcttaaggatcaagaaaattagaagcggcaatgggacggagttcaagaactctcagattgaaggcttccttgaggaggagggcatcaagcatgagttctcttctcctacaccccacacaaaatg

SEQ ID NO: 50555 - DNA, 438 bp, Zea mays
  unsure (1)..(438): unsure at all n locations
agcttntaaagggagaacacgtgataggtttgacttacgtgaaattcgaaaaggatagaccttgtgcagcttgtcaagcaggtaaacaagtgggaggagcgcatcacagcaagaatgtgataaccacttcaagacccctggagttgctgcatatggatctcttcggacctgtcgcctatctgagcataggaggaagtaagtatggtctagttattgttgatgacttttcccgcttcacttgggtgttctttttgcaggataagtctgaaacccaaaggaccctcaagcgctttctcaggagagctcaaaatgagtttgagctcaaggtgaagaaaataaggagcgacaacgggtccgagttcaagaaccttcaagtggaggagttccttgaagaggacgggatcaagcacgagttctccgctccctacacaccacagc

SEQ ID NO: 50556 - DNA, 432 bp, Zea mays
  unsure (1)..(432): unsure at all n locations
tgcaagcttcagaaaaccaacactcttcgacagagggctgttatcttcgctctagatcgatctcggatgcatcataagctttcttctgtgattccgccgaagagcaacgctcctggctggtagccacaggatatagcatactcctgcaactcctctttgtcagtcttagataattcttgaccaacttatatttttgaacattgaagcctttctttatcgaagtatcttcggcgatttccttctctttctcaagcactatggccagggttnctttggcggctgcagcagcttttttcgtggccatatccaagagcattctatcaatatcagataatgtgctcttcagattggtttcttcaacagtagcagctatcgcagtagcaactttggtaggaacaacttcgacagaagaagcagcaacttcggcagctg

SEQ ID NO: 50557 - DNA, 302 bp, Zea mays
tattgcgcacgctatagcccttaacgagatatcacaattctcaaccaggtatttcgctcgcaccaacaatgtgtttgcgcactcagtgcgacctcatgtctaaaatgaaacaccccaagcacccttcaaattttgcgaatccgggtaaagcacttggaaaaggggagcgtacgtcacattgaagcatcagaacttgaacacgctaatgctatatatgtatagcaataatgacagcacacacgacgcgctcgagcaagtctttctcatagctacgcccattttctcatctcataatttctata

SEQ ID NO: 50558 - DNA, 428 bp, Zea mays
gacgttatcaaaaagcacatgcattatacttcaatacattggtccgacgattgccttctcatcattctcatatagagtcatcatagccatttatcatccaatggaagatagtcaaaatcaaccgaaccaactccacttcttacttcagaacacataattttctggtactataaattgaattataatcgtacaaaaagcatacctgccaaaaagaaaatcgcactcccttatgctaaagcttaaaacgaacactggatcatattggcgctgaaatatgatctccaccatctagaagatgtcactctcctcactaaaagccccggccaaggaaattactgacgactctcatattccttcatattggcactgtcgctaacaaggacaacggcgttcaatgcctcctgataactgtcgtgtatgaacttgcc

SEQ ID NO: 50559 - DNA, 390 bp, Zea mays
tacggaccttaaatactaagcttctcagggatatcactttctatgctcggcactggtgtcttattctattcagcggaagtggcagttgtctgtggcatgctagcaggatttgcgatgcgccgaacgtctttacacgctcaaccttctattgatgcagcatatggatgctcgcgacctccgaaggtgtgattaccatatttggtcgttactcaggcgctggtgtattctgtgatgaagctctcgttggtgtgttgtccatgacctctgacacagcgatgattctttgcatctttgctgtagtcgtgatactcgctcattcaggctccttcttcttgtgcaagaactttgtcagctgaggccgcactggacttaacttctctcgcatggatt

SEQ ID NO: 50560 - DNA, 385 bp, Zea mays
tgacattcgaagagcagttaaatagaggaacttgactaaaggaaaaaggcaacgtaccaacacaccttattggtacccctaaaggatccctacccaaaaatctcgggacgagattcctttaaggaggagggctgtaacacctcacgcgataccaaggccatagtttcatttatgccctgatgacttgagatcatatgtggttaagtggaggagaagaagaacctaaaaccttggaagcatgggttagttaagaggggttaatggcaaacgcttcacccacatatttggaacaatggtcatgttgagccaaggagattaaaccctaaagacacctaagggcactagacttccaagcaaggggtcagtgaataaattaatcaaagta

SEQ ID NO: 50561 - DNA, 458 bp, Zea mays
actaagcttctgcaaagaggaagcgaccttttacgcttcgctgtgttctaatataatgtaaggtgtttattcgccttcggctcataatactaatttcgtccacaacaaagcgcctcaagcaaaagggtaagaatatattacaaggtatgtacaaagttccttgaaggtagtctagttgtgtctacaagaattgttacacaaatatcctgagttctttttacagtacacttctactgatcttcattaagtttcagcttcgacgacataatttaggcatcattttcaccttcgtcatcctacataaattaagagtttatgagtaaaaatccagagcacaggaaaaaggtaactccgaagtatcaattcttactggctcaagatgacttcgtgcttcgtctccagctttctcccgcccgccttttgttcatatcattattataaatctattggagatgctt

SEQ ID NO: 50562 - DNA, 350 bp, Zea mays
atgtacagtggttgggggttgccactccaaaacatccttgactttgctgcgatccaccgccatccccttggcagaaaatacatgtcccagaaatcggatttcttccaactagaatgcgcacttactgaacatagcatataaattggtttgctcttaagcgcgtcaacaccatccgtaagtgctgggcatgctcctcttcattcttggaatatatcaagatatcgtctatgaagaccaccacaaacttatctagttcgggcatgaataccgagttacaaaataggtgaagtgggcaagaccattcggtatgccgaaagacataaccaagtattcaaataaaccataccgcg

SEQ ID NO: 50563 - DNA, 356 bp, Zea mays
  unsure (1)..(356): unsure at all n locations
ggtccttaagcctctttgaaatccttaagggtgaatgcttaagatgtttctaacatattttcataagtgcataaactgtcatgagcatcacacttatactatgacacaatgcacttcacattatgtatgatatagatatgctctcattaacctaattatgtgcaattggcatttaaggccaaaatatgtgttcctctaaaggcacatatttagggagcaacctatattatatagaactgtntaagcttaattgacatatccttttaatcaggtctctttcctttggtacacttgcatattttctatctctattgtgccaaggctaagaactaattgtttcatgagcatctcatgta

SEQ ID NO: 50564 - DNA, 432 bp, Zea mays
  unsure (1)..(432): unsure at all n locations
tgcagcttaagtcaataatataagntgttaccatattattatattgctaaggattcctaactgttttgatacttctgagtatcttgatttgctgttttcttcacgtgatccatgattaattgatggagaatttcttgacaagtttgacattgttatacttagcattgcatctcttaaaatgaagtcgcatattcttctctggaaataggtctactttntaatatgtcacttcagtaactctacagaaagttttcatgctcatcatgctttttttcagttgtttattaatgaaaactgccgaacgagcagcaaacacattgtgttttatactatagactgcgaggattcatgtgaagtatttattgatttatagaagcatagttatgttaaggtatgttgcatacttaaacgtgattaacattgatttttaat

SEQ ID NO: 50565 - DNA, 480 bp, Zea mays
  unsure (1)..(480): unsure at all n locations
tcttcaccacgtgtccgtggatatcttgaggaggttgagttatgcgtcttctccttagttgctttgctttcttgttcctttcttatgatcctgcagcttgatgctcattcaaaaatatgctttcttttgagcaacaggggttagcacatggtgatatattatctaaatgtgcacatgtgcaagaatgaggttcacatgaatttaagtttgaaattacaacctcatgagcaacattaagcatgatatggtcatcaactaattcattatgagaataagatagcatatcatatttttcacttagagcaagtttttctaaatttaccatttctacttgactcttaagcatagaattctcagtttttaagtgagcaacatcatataatacatcatgattatttctttgctcagataanatagattcatactcgtggaccagattatcatgagagcactttagctcctcatgttcttttgtcatct

SEQ ID NO: 50566 - DNA, 352 bp, Zea mays
gatcctaaatcacctccgcatcaactttaaaggaaacatatttatgattatcaaggcctttctgacaagacagatttgtgcgcatgcaagcaaggaacaagcggcactcatcaccaataataacaaatggcatccgacgggcactggagcttctgcacatggtctattccgcccgattgctatataaccacaactggagtaagacctgcctagctatcgtggaagactattcctcctatacctcgggtattctctttacaggaaaaatcccaaacccaagagaccttaaggggagtcttgagacgcgctcaaaatcagttctgctaaacgatctagaaaactaaagccacac

SEQ ID NO: 50567 - DNA, 463 bp, Zea mays
tgacattattatctcatatgattgaccaccttctgtgtatttatctgatcgaaaaacctactgtctcgagattctctaacttggtgattgaacctttgtggagtcgaacttacataccgaatgtgcatgtacacttcataagtcattttgcacatgctttattatcttgtatatacatgaatcatgtactcatgtgtgtgagatgtgtcaagtcattatttctgatgaaacatcaaatgaaatacaagggacgagagttaatcctattgaattgccttaacagcattgaatgttataaaaccatacatgttatcacaaactctaggctaactctgcgtgagtaggtcattattaggtttgtttgaacattacaatagtctcttctgttaacctttgaaatatctatatcttggtcttcctattgagaccgaatctgatatcgcattctattatggacatttag

SEQ ID NO: 50568 - DNA, 349 bp, Zea mays
ccggcctataaggagaagggcaccaaacatcatgtacgacttgcttacgctgattctgccgagctctgtgcttcgaaatatccttttgctttagaaaagtaaaccggcacactcttgtaaagcgggcccttagtcctcatcacaaaacaaacactatatttttctgggttgatccccatatcttactccgaagcccctgccgcctctgccccttggagctggtggcctgtacgagcttttctgctggtccgaaaactatgaagtgggctgtggcctctgaaactggcttccattgtcatcattctggctaaagcagtggatgatcaacatgacagggtggattttcctc

SEQ ID NO: 50569 - DNA, 435 bp, Zea mays
  unsure (1)..(435): unsure at all n locations
agcttctaaagggagaacacattttatgactaacaaatgttcattntgagaaagacgggatttgtagcgcatgccaagcaggaaagcaagttggtgcccatcatccacacaagaacatcatgacgaccgacaggccgcttgagctactccacatggatctattcggcccgattgcttacataagcatcggcgggagtaagtattgtcttgtaatagtggatgattattctcgcttcactcgggtgttctttttgcaggaaaaatctcaaacccaagaaaccttaaagagattcttgagacgagctcaaaacgagttcgacttaaggatcaagaaaattagaagcgacaacgggacggagttcaagaactcacaaattgaaggcttccttgaggagggcatcaagcatgagttctcttcttcctacacgccacaac

SEQ ID NO: 50570 - DNA, 356 bp, Zea mays
tgtgcgtctcgaggtacctggccttcgcctcatggatgtatctcctgacgtagtagactggcttctggatagtccgaacccctacggttggtcccgagtcctcaagctacatggtggttggaccaccaccttctcctaggggaactttctgactcccctggggatgttctaccgtcctttcgacgaccagcaccatgctcacctcctttgtagccgctgcaatgtacaagtacagcggctcccctggctccggagctactagtatcggtagggacacaaggtgctgcttcaactcttggaaggctcgctctgcctcctcggtccaagagaatgggccggacttccgtaagagcttg

SEQ ID NO: 50571 - DNA, 352 bp, Zea mays
cgccgctgcaacttttaaccaagtttttttatttatctacatacatcgcctccgtccactcaagctacgacttgaccatacctcgcttacgaagagacctgctcccacatttcacttggaaaacatcgtcgactcatggttttgaggaccttccggaagcgaaggcccccaacacacaccatagcatgactatatgcttctggtgataaaacaaacaccctgatatttatcggaatcatggaatcgtgggaagtcccttctttgaaaacatatcccgatggaaaaacttaatcttacccagtggtgccaaaatctgaaccccactacaatgaacaattaaaatccacttgaa

SEQ ID NO: 50572 - DNA, 302 bp, Zea mays
cgtgcatgttgtccgtacttcctatttggtctacaacacagtatacgtattctatacagatatatacacattttctgtcaattttaactaacaatgattaaaaaaaacacatatatattttggcataatactcgtaccaatatttggtgtcaaaataacggctttttataataattaattcttgagcaagtaacaaaatatgtgtagaagaaattaagaatcaaactattaaaaatatatattatgtaatttttactaattactatatagctcacctaacgctatcatctcagtgagagaaa

SEQ ID NO: 50573 - DNA, 426 bp, Zea mays
gcttatgttgatgatgtggcgattaaacttataactcagaaaacttcattgaagatatgcagctggtcttcaacagctagaggcgataccggtggaagctcaatccaaaaaaatgtggctttggagtaccatcaaggaagttactccgattcatcgtcagccaccgaggaattgaagccaacccacaaaaaatcgaagccatcatgagaatggaaacgccgcgatcacagaagaaagtgcaaaggtttactggatgcatggcagccttgagcagattcatatcaaggctaggcgaaaaaggcttaccgctctacaaattgctcaagaaggtggatgaaaatcgcctaaaaggggggtgaatacggcgaaactgatattattaaaataatcacaactaccagccgcgtttagcgtagaaatataatc

SEQ ID NO: 50574 - DNA, 432 bp, Zea mays
ttcttcggtggcatgacgaaggacagcgcttgcctaatgttgtcgaaaaggattcaccggaggtgggcgccaatgtctgtgacttgctctcaaatgctatgagttaagaacaaggcaacacagaacatgttaaacgttaaagtccttcgcccttcgaagcattatttcccttgagagataatgatttttggatgaaggttatgaaggacgaaccttcatcaatacaacatataaataatgaagaaggaatcatatgaaatataaaagataacataaacagttatgtattactatcagctcatttctattctattattatggagaaatagaaatgataacaaattacaaatgtaccttccgcttgaagaaagttaagtacagtgtgcgcatagcaatgcaagtaatctgaacagaatgagcatgttattatta

SEQ ID NO: 50575 - DNA, 439 bp, Zea mays
agcttttggtttggcccatacgcacagggaatacggtcccgcgcccgtgccgtgccacttttcacagggtcccctgctgatcgagttaactaattaaaagtcccaagcactattcccctctctcactgacacttgcaccgaggccctcaaacttctgccctttcgcaacatctcagccccgactccaacgccggtgaccaaacgtcgaacatctggtcgcgtgtgcacggctcgccaccggcgtccctctccggtgaatccaagtacacctacgcgacacacgactcatcccactgttcccccttggttaatcaaaccgtggtgacttcaatccctattgaccacggtgacggcggagaaccgagctccggtgaggtcgactggggtttctagcatggtagtgttcaatctaacgctacaacgagcattagtaacatgt

SEQ ID NO: 50576 - DNA, 387 bp, Zea mays
  unsure (1)..(387): unsure at all n locations
actagcttcaaagtcagatataaaatacagttcnagcttaagttatggtcaaattacgacaagcgaacatgggttgtccggtgcacaccggaccgtccggtgcaccatgtccggtgcgccattntggaagctccaacggctatcttcaacggctagttcacgtggcatgtccagtgcaccaccggacagttcggtgcacccgtctggtgcgccgcagaaagctgcagaacttctttccaacggctatatttgagttggggcctatatatacttcatccaaccggcatttggaggtgtgcgagcccaagcaacataccaaggcatattgtagacattccaagtgctcaaacacccaagtgcttaatagaatcactcgatgattagcgt

SEQ ID NO: 50577 - DNA, 417 bp, Zea mays
gacaactgctgactatttctttcatgaatcgccagacgaccaagacactttgttcaacaaagcggctcagctatggtcccacattgaggctgatccaatccttgacagagtggtaccaacatctttactaaaattagttctgttaattcaatgcattatgtcttgttttgtgcatcctaatggtctaacttgtgaatagggaaactctatgctcgtatctgttattgaacttgagcatatctcacagagaacttcagacagtactacgcttttgttactatcagtgagtacgattgtttaaaagcgaaattgtttatttgtatgttctaacatatgtgtgtaactcatctttcaattacagagggtatcacgtcgtcttcgtcatgcagcggctcgttgtggatgccggtctctggc

SEQ ID NO: 50578 - DNA, 461 bp, Zea mays
acatgtgctaagcgacgatgttctatttctagtccatgctagtacatagctattaagcatgcatctagaccgacctcttcttcttgcaaatcaactaaataaagtttgccgtctaatacacccttaaaagctagtgaaccatcacttcttctaaagacagacacatctacatttgtaaatagacagttatatcccatgttgcataattgactcacagatagcagattatatccaagagactcaactaaaaacacattagatatggagtgctcattagaaattgcaattgtacctaaaccttttaccttgccttgattcccatcaccgaatataattgaatcttgggaatctttattcttgacgtacgaggcgaacatcttcttctccaccgtcatatggtttgtgcatccgctgtcgataatacagctcgaacacccggatgcataaacctgcaaggcaaa

SEQ ID NO: 50579 - DNA, 418 bp, Zea mays
  unsure (1)..(418): unsure at all n locations
agctngagagccttaaggcatgccacctgtcttccagtcccttaaacagtacgaacatgccgcagcatcttcctatattctctaatatctaattctccaattaattagaaaatgcctatatgtacacctaagaacaaccaatactaaccgtaccatccttatttacctattattggttcttttatggtagcaaataatcctttcaattctgatgaagaaaactatatataatcatcggtggtgcttataataatcctttcaatcctttaattgtacactgaaacttattgactgattttgaagtccaatgattagctttcaagaattgtttgggaaaaacatttcactaaacttttggggcttcaataacccactggatcgagttatgcggtgttgtgcgctactaacaaaaaagcaa

SEQ ID NO: 50580 - DNA, 319 bp, Zea mays
ctccgataccaaatgaaagctgtctatagggggggtgaataagcaacttaaaactttttcaacaagaactagaatcaaactgggtgatactgaattgatctccaaattcacccacttaactttggaaacgagatgttctaaatgatccacagggttcaaagtaataaatctgagaagggcacttctctaaattcacacaccaaaaagatatacacaatctttcaccgaatggtgagagaacgaataacttgacctaacacaatgagccagaacacaagacacacaggacttatcccgtggtacaggcacaccaccaaag

SEQ ID NO: 50581 - DNA, 376 bp, Zea mays
  unsure (1)..(376): unsure at all n locations
tgaagtgctaccaccctataattcccctttttggtacattagtgcaccaaagagaaactcagtgaaaagaccaagtaaatcacattggcatgatttgggccaattataaaagttgccatacacttaataacctacaaaaaatagtaagggggttttttcaaacagattatgccnaatccccaaacaagccactcaagtgggagcttcaaataaccatcaggatttcagagttcggaaatttagccctctcacaaagatcaaatgcgttcaccattttctaaaactcaaaatcacttggcctaattgacaaaatggcaccaaaggacccctaaaacaccctgggtgaaaatgaaaacagacccattccggttgacac

SEQ ID NO: 50582 - DNA, 452 bp, Zea mays
  unsure (1)..(452): unsure at all n locations
ttccttacataacaaaacataaaagactgctactcttatctgctcaagctnttccttacataacaaaacataaaagactgctactcttatacacaacgattcataaaaaaccacctcttcgaaacttttcttttacataacgaatcataacaaaccatttatccgaaacttttctctgtgccgaagcaaccatttatgaacacaaatgctatgaatgaatgcttatgcatgcaaatgccatgatgtaatgtgcaaatgaatgtccgaagcgtatgtccgaagccacactcatccatcattttcttaggagcaaacacacgtcagctctgcattcccttaggaacgactatggagcatctttgccttttacttaagcagtatcagcgttgacttttcgctgtaagctctgcatccctctagggacgtctttggagcttcttcgtcttttactt

SEQ ID NO: 50583 - DNA, 421 bp, Zea mays
acaccctctctatatcgcatggaatggaccaatatatttatatttcattcagtaacatccagacaatataatttgaattacaccttgtttcaataccatggttgatttggtattgaaaccaattcaattccattacctccaatattgacatccaaatggagcatattagtatactatgtgcatgcccgtgcattgctacggagtcaacatttgccccgccttgctattgattcaacatgtaattataagatacatgagacgcagaagaactatctgtcattctatactctacgtagtgtctcttaaaagttaagtacgtttacataccttaacaatatgctagagaatataagatattctattcgctagttcaatagaatatttgtcgtataatgattgagtaataaatagcaacgcagat

SEQ ID NO: 50584 - DNA, 419 bp, Zea mays
agcttgcgtcctgcatccctttcgatctccataagaagccgcacatttgtcataccgatgaaacggatcgggtcatcgtgcagtgcagttggacgttctgttcactggatctgcaagggaaacacgtcatcccttcttttttctacttctttattattggtattgtactatcgtatcagtacattgtacataaaccatataaacaagtacgctcattgtgtttgcgatgtggcctaacattgtcagcccttttttttattttcctgctgtcttgttaactgaaaaaagagcaaacattcgggacccaaaaccactaccgtccaggttttccaagtttgtttatgtggtcggtcatgggtgtggtgtctacctgacatcacatcgctcccttataatgtgaaaagctttaattgcagcta

SEQ ID NO: 50585 - DNA, 469 bp, Zea mays
  unsure (1)..(469): unsure at all n locations
ntgggcacacacttgaagttcagctcagcttatcacccacttacagatggtcaaacagagagaacaaatcagattctagaggatatgttgagggcttgtgctttgcaagataagataggttgggagaagagattaccatatgcagaattctcttacaacaacaactatcaagccagtctgaagatgtcaccatttgaagcgctctatgggaggaattatagaactccattgcattgggaccaacctggtgaaagacaggtgttcagtccagatattttgctcgaagccgaagagaacatcagaatggtccgagagaatttaaaggcagcgcagtccagacagcaaagctatgctgacacgagaagaagggaactcagtttcgaagtgggagactatgtctacttgaaggtgtcacccatcggaggaaccaanaggtttggagtcaaaggcaagctagcacatcgttata

SEQ ID NO: 50586 - DNA, 446 bp, Zea mays
  unsure (1)..(446): unsure at all n locations
cctgcagcatgcagcttctaaaggagaacacgtaatttgtcttaccaatggtactttcgaaaaagatagaccttgtgcagcttgtctagcacgtgaacaggtgagaaactctcattctgccaaaaatgtgatgacaacatcaagacctctggagttactttatatggacctcttcggaccccgcgcctatctaagcatanggggaaagaagtatggcccttgtataattgatgaattttccggcttcacttgggtattctttttgcaggataaatctgaaacccaagggaccctcaagcgctttctaatgagagcttaaaacgagtttgagctcaaggtgaagaaaataagaaacgacaatgggtcccgagtcaaaaaccttctagtggatgagtatctcgaggaggaaggaatcaacacgagttctncgctccctacacaccaca

SEQ ID NO: 50587 - DNA, 479 bp, Zea mays
  unsure (1)..(479): unsure at all n locations
tcntttcagcttctccgaagtagcccaacttcattattattgtcatatcagcttcagacacagtagatgtttcaaaatccaagtggctgggttttgacgggaccagaatgttataatcctcttcttcttcatcagcgttttcctcctcaacatcttgttcagcttctgcagcaggtgcaccttcttcaatggctccctccgtcacaactaggcccgaatgtctcatgacttctgagatcggagctatctcagtggcttcagtctcctccccttcacgggtcaccctcgtagtcgagcgtactctggccatctgatgatgaattttttgcagtttttacgaagttgatgtctttacagtcttttgacgaagctaatttaagatgatgcgttgcttgataatgtagtgaaaaagcttcggctatggttaaattattcaacagcgcaacagtgcaatggctatgaatgatgtggtaacttct

SEQ ID NO: 50588 - DNA, 302 bp, Zea mays
tacgaaccacactagacactgttactctatacacaacgatcataataacacctatacaaacttgtcttagcaaacgaatccataaaagcattatccgagcttttctctggccgaagaacctttacgaacactatgctagaatgaatgctatgcatgcaatgcctgatgaatgtgcaatgaatgtcgaacgttgtccaagccgctatccacatttctacgacaacaccgaagcttgcttcctttgtcgacttgggcattatgcttacttgcagatcacgtgattttctgtatcttgatcccta

SEQ ID NO: 50589 - DNA, 439 bp, Zea mays
agctttcgccaaattctcaagcaaaggatgtttgttgattacaagccccgctccaagaaggtttgctacaagtgtggtaagcccgatcaatttattgcaaaatgtcctatttctagtgacaggggcgatgacaagaaggggagaagaaaggagaagaagaggtactacaagaagaagggcggcgatgcccatgtttgtcgggagtgggactccgacgaaagctctagcgactcctccgacgacgaggacgccgccaacatcgccgtcaccaagggacttctcttccccaacgtcggccataagtgcctcatggcaaaggacggcaaaaagaagaagttaaatctaagtcttccactagatatgagtcttctagtgatgaaaatgctagtgatgagcaagataacttacgcactctttttgccaacctaaacatgcaaca

SEQ ID NO: 50590 - DNA, 491 bp, Zea mays
  unsure (1)..(491): unsure at all n locations
tcgagcagccgtaaattgcaaccttccanacaacatggtgtttataangacaaaaattatagtacctcacaaagcatttcaatagtctcagcatcatgtgcattcatacacttttggttccacatcttaaaagaattttgtagccattcatagcttatgtagtcaggaagaatcatctgaaatcaaacgattaagatgaaacaatgctgggaaacatacaaagaaaataattgacatgttaaatatttgtaagacgaccaatgacgcactgacgcacatctatggagaactcagaagtcctagtgaacatctagtccagcttaagataccacataatgatcaataaaatgtgtaggtattcttacatgacttgtctttntgtatagttggattaaataaacatatcatgataagtatcatagagtgtacatgacataattntgcaaacaaagacttttgtgatatcctggcccctgggatggtgatgttct

SEQ ID NO: 50591 - DNA, 343 bp, Zea mays
agctcgactttagttgcacatataatattgctgagtacgaagcacttctgttggggtcttggaagctaagggcaatgggaataataagggccatcctgaaaactgattctcaagtcatttctggccatgtagacaaaagtagcaaggcaagagatccgaagcttgaaaaatatctggatacagttcgaaggttggaggcttctttctaaggtttttctgtgaagaatattccaagaagtgaaaatgagcatgcagatctgctagccaagtcagcggcttaagggcttcctctaccttctgaagtattttttgaaacactaaaggcaaccttcgttgaactcat

SEQ ID NO: 50592 - DNA, 330 bp, Zea mays
ctattgagaaagctagatcaacactggtgaacatgctccttcaaggcaggtgaatctggttgtgatctacctactatctcatctcctagagaatataatcatgaacaagtctaaaaattaaatgctaagatgattatagttcatgagtaccccgttagaaaggttgagcacacatggtttaatattgtcatgaagtatatgaatctgttgtatgaatttattggtagaaagaccataagagttgaatgtataagggttatgagtctgaaaaagaatcaatggctaacgtccttaaaggtgtggattcatttcgtgaccactgatttatga

SEQ ID NO: 50593 - DNA, 349 bp, Zea mays
  unsure (1)..(349): unsure at all n locations
agcttctaaagggagaacacgtgatangtctatctaatgtaactttcgaaaaagatagaccttgtgcagctagtcaagcatgtaaacgggtgggaagctctcatcatgccaaaaatgtgatgacaacatcaagacccctggagttacttcacatggacctcttcagacccgtcgcctatctaaacataggaggaagtaagtatggtttggttataattgatgaattttcccgcttcacttggtgattttctttggaggattattctgatacccaaaggacgctcatgcgctttctcttgagacggccaccaaactttttgttttcttctataataaaaaaaaataaaaa

SEQ ID NO: 50594 - DNA, 466 bp, Zea mays
tactcagctgagtaattctttgcaaggatattgatgctcaaaatagtataggaatgaaacatattcatgagaaaatatatgccagccaagtgaattgtttcataaaggatgatcaaggcatagtatggtttaataatcacatagttgtgcctaaaaatgatgaagtccgccagcaaatatttgatgaagctcatcttagtcgatattccattcatcccgggagcactaagatgtatcaagatttaaatcaacattattggtggacaaaaatgaagattgaaattgcacgctatgtggcgaaatgtgacacctgtagacatgtcaaagccatacatatgaagactgctggccactacaatctttgcccatcccaacctggatatgggaagacgttagcatggacttcattgtgggatacctacgacggctcaaggtttgatatatctgcgttatagtgatcacttac

SEQ ID NO: 50595 - DNA, 394 bp, Zea mays
  unsure (1)..(394): unsure at all n locations
tcttgatagccgtatgccgcacttgntgcacagggtggcagacccgtcggaccccgtgcgccacagcggcgtcttcgtgctgccgcagttgctgcacactctctgaactcgctgcctgttcgttggcgggggccgcggccgcacctgcaggctctccaactgccggcgggctcctgtactgccgccgccgctgctgctgctagggttgctattacccgccgcgtgaggtgtagggatgcctggcgtcgtgcccagcgagcacggccgcttaatgctgccgcgcatgacgacgggccttctgtcccgtttcctcgtgggcacaacaagacgccagagctgcggcggcgaactcgtctcggccgtcaaactgcatggcctgttattgcccgacgac

SEQ ID NO: 50596 - DNA, 488 bp, Zea mays
  unsure (1)..(488): unsure at all n locations
agggaaatgaagaacagcttcagtatgagtgacctatgtctgctaagttactacttgggtattcaggtggaacaaaagaatggtgtgactacattatgtcagagttcttatgctctgaaaatacttgagcaggcagggatgaaaggctgtaatgcttgctgtgttccaatggagaataggctgaaattaagcaagaaagatgattcgccacctgttgacaagacaaagtataggagcattattgggagcctgaggtacctagtgaatacaaggccagatattgcctttgatgttgggattgtcagcaggttcatggaagatccgagagcaaagcactgggcagcagtcaaacaaattctgagatacttggcagggacagtgaactatgggtgtgtgtataagcagctgggcacaactgaaaccaagcttctgggttacagcgacagtgacttagcangtgatgtcgatgacacgaaaagcacaagtgg

SEQ ID NO: 50597 - DNA, 449 bp, Zea mays
  unsure (1)..(449): unsure at all n locations
ttaagcacctgngctgcagcttgtctatcatttttatggcaattattatcccattaatgagccttacaatgtcggtgatgattataatagtgacactgatgaagattcaaagtatgacgaggaggaagaacttacatcttcttttttctgctagagggaatcaatcacatgaattggcaccggtaacaaacaacccttctctcttcatctattggtttgtattggtttactaaaatgaaatatttacacacagaattcaagaaaagctagaatatatggcctacaaaagactgggatacaaaacattcctgagcatgtttggtgccaccaaaagtctgatttcagagaaatggagatgttgatatttgtaaaggatgtgcaatctgcaatgatcaacgcctaggacgctgccttatatacatggtgtacctggtactaacaaggtaaca

SEQ ID NO: 50598 - DNA, 494 bp, Zea mays
  unsure (1)..(494): unsure at all n locations
tctanagggagagcacatattgtgactaataaatgttcattttgttaaagacagaatctatagcgcatgtcaagctgggaagcaagttggtgttcatcatccacacaagaacatcttgacgactaacaggccgcttgagctactccacatggacctattcggcccgatggcttacataagcatcggcgggagtaagtattgtctagttattgtggatgattattctcgcttcacttgggtgttctttttgcaggataaaactcatacccaagagaccttaaagggattcttgagatgggctcaaaatgagttcggcttaaggatcaaaaagaatagaagcgacaacgggacggagttcaagaactcacaaatagaaggttntcttgaggacgacggcatcaagcatgagttctcttctccctacacgccacaactaaatggtgtagtggagaggaagaatagaactctacttgacatggcgaggaccatgcttg

SEQ ID NO: 50599 - DNA, 403 bp, Zea mays
agcttttataaggatctgcttggcattaatcttattaaaatcataactaaataaccactaagtagctctctgtgtattttggcacagaaccaaatcattacccataaataccagcaaaaataacttgtagtacaaaacccacccataaatgggagttgtagtgcaaagtgacccctttgccccaacttttgttatttttgtccagggcatgatctaatcattctggacaccaaaattattggacagaccccagtgacgaaataggacccacctgtattttatcacaaattttttaaataaaaaaacctggtggggttttttccccctctttgcctgtatacatctatataaaaaatctgtcggggtataatgtcttctctcaccacaacatattttttttttt

SEQ ID NO: 50600 - DNA, 380 bp, Zea mays
taactattctcgatttcattatgatacccgatctttcttaacttagagggctcggcaaacaaaagtatcacttcgtcaaccataaagatcagtatcaatggctagggtgcgtcaactgtatagtccaccgacggggaggaggccaaactgcgaaccgcccaatcttcaagcatgatacaatatgcttgttgtgccacagggctgtgacaaagtgcacctctgcgaaccgacagctgcattgaaaaggaggctatgaaaaaataatattcgcatgcattaacccacccctgaatttgaagttactgtttgaggcgaatgccagagacaactagctactctgaagctgaaaaactaatctatggcggagaactttcaagcga

SEQ ID NO: 50601 - DNA, 347 bp, Zea mays
  unsure (1)..(347): unsure at all n locations
ccattgcctcatggcaaagggagatgcttaggtaaaaatcatcaccgatttaaatgatataaatgatgatgatgatatcgatgatgttgatgatgatggctattcatatgatgatcttgttagaatgttaggtgaggccgatgactacatgcacaaagaanaagaaaaatttaagaccttgaaggaattgtataaaaacctccaagtgtctnttgaggagctcaagacctctcacaatgacctcaaagaaaattgtgagaagcttgcggatgctctaaaatcatctattgtgcatgaagttgaggtggtcactaacgatattggagtcacttgtgacttacttgata

SEQ ID NO: 50602 - DNA, 477 bp, Zea mays
  unsure (1)..(477): unsure at all n locations
ccttgtaacgaggataagctgcctttgttcaggaggtgtatggtccttaagcctccttgaaatccttaagggtgaatgcttgagatatttataacatgctttcaaaagtgcatcaattgtcatgagcatttgagcatcacacctatactatgacacaatgcacttctatagatatgatctcattaacctaagtatgtgcacttggcatttaagaccanaaatttgttttcctctctatgcacatatttagggggagcaatctatattgtatagaattgattgagcttaattgacatatctttttaatcatgtctctttcctttggtacatttgcatatttcttatctttcattgtgtgccaaggctaagactaatatgttttcatgagcatctcatgtattaagtcttagattgaaagggaaatggagtattcggcanagacatcgcttccactcaactccattggtattatccact

SEQ ID NO: 50603 - DNA, 436 bp, Zea mays
gcttcgtaattatactctcatcaaccttcttttttgctcattatcctcaaaggaataatgtttcatggacgaaagacgttaacatttaacactctatgttgccttgttcttaattcatagcatttgagaacaagtccccaacattggcgcccacctccggtgaactcactttcactttttgagctgatggcttcgttcaaagaccaagctggagctgcttcggacccgaagctggtgctcccgatcacaggtggttcgtcctcagagccagctaacaagaaacaaaagaaggaagcacagagaagggtacagcatgttggggtgcaaggacccttcatcaagtcaagatggtctcacattcctattaccttctcccaagaggaccttcagctcaagaattacccacacaacgatgccatggctatctcttgtgtta

SEQ ID NO: 50604 - DNA, 429 bp, Zea mays
  unsure (1)..(429): unsure at all n locations
aatgaatgaagctgtctttaatgccagagagccttccgcgttatctgttcttttattggaacgagagatatggtacaagagcatattgccttcanggtatggccacttgcggagaaatgggaaatgccacaagaaaccataaaagaggccgacgaaggtggacttatcacggtaaagtacacctttaagtttggagataaattctttgagccagatgatgactggttaaaaagtattgaaaatttaagtgatgaattgctcgtggcttattcgaaggccgaagatactgcactgtcagcagccttcggaggccgaaaaaagaaaaggctgaatcgggtgtttgatgcaatcgggttcgtctaccctgactatcgttatcccattcgagggcagagaagaganaacacaacctctgcgaaagaagaaact

SEQ ID NO: 50605 - DNA, 186 bp, Zea mays
ttttgaaaattcatcgtttagacttgaaccagcccaaatgttaggcgatggggcagagatcacaaggctgtccttcaggagactctatttacatctgctgacgtgcatccttattccccattgatctcgtttaagcaaacgggtaacttactcccctgctagtgaattgtgttagtaggggtgtgt

SEQ ID NO: 50606 - DNA, 461 bp, Zea mays
  unsure (1)..(461): unsure at all n locations
ntaagttcactccagacccttggatgagtggatgggacctttccatattctccgacaaggaaaaccctagtttacccactgttttaagattgtttcaccatacgtagcatttacaaaattacatgttactgatatgcttatattttattcattgcattcgatagactgtaatctcactgacggagagtacatcctcgttccggagcaaggagctgctcatgaggtagtccaggagccagcaccagagcctaccatcgaggatctgcctgccccangcttggaaggcaagccccacctttatgcataaccatttatatatatgttattgtactacacttaatgtttgtaggcttgtactgtgcacttaagtgtangagacgtctgaaaccctagttgcatgaactcacgatttctttgtgagatcgatacttatatactaggacgagtcgctgcattactaa

SEQ ID NO: 50607 - DNA, 239 bp, Zea mays
agataaaattctgcttattctggttgataaagtgaaaaaagacgaagctgcttcaaaggcccaagccgaagctcaaaaacgcgagattaaagatcttcagaaacagctggctagagctaaagaggagcgcgcgcttgaggaaacgaaacgagaacttagtgattttatggtcagccaattggaattcaaagttaaggagcttcgcacatcttaaaagaaatgctatgtcaaaactggag

SEQ ID NO: 50608 - DNA, 437 bp, Zea mays
  unsure (1)..(437): unsure at all n locations
tatcacacccttcggcacgtactgtntcgtccgattgtcttaatgactaanaaacatcggatcaaccttgtctcgcctcaccaagaaggtcctctaaagccatgtatgccgcaacattntcacctacgtagacgacattgtcgtcgcaagaaaaaaaacaaagaggatcacctggtcgatctcatagaaacattcgccaacatgcgcgatgcacgactcctgctcaaccctgagaagtgtgtcttctgagttcgccaggggaagatacttggttacctggtaccgcaccaagggatcgaggccaacccaactaagatccaagcgatcatcaacatggcacctccgcagtccaccagggatgttcagcgactgacaggcagaatggccgccctgaacagattcatcttcaaatccgcagagtgtagtctaccttttct

SEQ ID NO: 50609 - DNA, 368 bp, Zea mays
  unsure (1)..(368): unsure at all n locations
cagcttaatgcccctaagaataggctttctatctatgtttatggcaacgctcccttggttcaggatagggagggctatattttatatccctgaaactatcttgagcacaaaattaggagaattcatgctagaaaatctcattctgtttctcatcatgcttatatgtatagtaacgaggcttctagctctaggcatacaactcatattaaaatgcctaanaagaagatggctaattcatcaaatgaacagagcatttcattgaaaacttttgatgcatcttttgtgcttactaacaaatcaagcaaagtagttgccaaatatgttggggacaaacacaagagtcccaagacttgtgtttggtacccaaa

SEQ ID NO: 50610 - DNA, 408 bp, Zea mays
agaactagctttcctcctgccgttttctgctacggagctttctgttctcttgttcaacagctgcccaagtccgggctctgcttggatctcgtcagtgccatggagctctaccctgccgcgcccagtccaagctcctcccctgccggcgtccagcacccggacggatctctgatggcgcgcgtgcccttctcttggcggcgctcactttctgcatatatctgtctctagctcgccgcagtgctattacattgctcccatggcgcgccggacgcttctctatgaccagcatatcagcttctgtctctgcttctcccagtctgccgaggccccgaccgtccgtgctcctatttctaactccagctcgcggcgttcactctgctgagacatggatgacggcctccgcccctt

SEQ ID NO: 50611 - DNA, 398 bp, Zea mays
  unsure (1)..(398): unsure at all n locations
agctttggcttcgtggctggtccattcaatttggccctcggggtcgccttttatgatattttcctcgcttgaatacgcgccaacattggcgaagctagtttttattttcttaacacactctatagaattttcataacacctttccttggatgcacgaagttcttcaacgcttttctctaaatgatttgaccattgttgactgatttctcgtttagcttctgcaactgcgcatttntctttagcctcggctagctggttccgaagatcctcaatttcgcgcttctgggcctcagcttgaactttggaagcagcttcctcttcttttattttattcaccaatgaatgtaatattttatctttctcaagacctttcgtccttagctcaattacttcggaac

SEQ ID NO: 50612 - DNA, 394 bp, Zea mays
ttaccaaatggacgtgaagagtgccttcctcaatggtattatcactgaagaggtctacgttgagcaacctcccggctttgaagatagtgagtaccctaaccatgtctataagctctccaaggcgctttatgggctcaagcaagccccaagagcatggtatgaatgccttagagatttccttattgctaatggcttcaaagtccgcaaggccgatcctactttgttcactaaaactcttgagaatgatttgtttgtatgccaacattatgttgatgatatcatatttgggtctactaacaaatctacttgtgaagaaattagtacgatcatgacacaaaaattcgagatgtcgatgatgggggagttgaaatattttctatgatttcaagtcaag

SEQ ID NO: 50613 - DNA, 311 bp, Zea mays
cctattaccaccctgactgagggggtccatattaaacgaacacacgtgttagattataaaaatctacatgttcaaaaggaggcgacacttggcaatttcaaacatggcttacgttgctctgctcctgctgctatcaaaacatgctctcgctccgatacttgcttcaaacatatctcacctttaaattaaccttcacatattttatttacgccgaagccaatagatgaagaggttgtcacgtcccaagtattctcaaggctgtgcttagatttccttccataaaacggactctgcagctttgtaaaggctta

SEQ ID NO: 50614 - DNA, 363 bp, Zea mays
  unsure (1)..(363): unsure at all n locations
ggcagaagagcttccgaacgtgaagatttgttcgggccacggagtcgctntatccgaacgcgagttacttatcgcagaacgtgatgagtgaggtatccgtatcccggaggcgtatgagtccctcggctcggtcagccttggctgcttacgtgtactccgtcgtttacaggatccgcttttcgaagtagtcaaaaagcacgagagaaattctgctaanaagagatcttttcttctagggaaaaattcgacgcacagggggtctcccgccttttagcccccgagggagggtcgggctttgccgaggcgaggccgacccttccttgatgactaaactattgcgtgggtgcgaggtatatgaacaac

SEQ ID NO: 50615 - DNA, 407 bp, Zea mays
agcttgaggctggcctctgtgccatgacgaatgacgatcttgcggatagccttgcatacaatagtctgaaggtacaaaaaattgtgaattttgaaatttatgaattttgaattagtcttttgttcttatgttaatccattcattcttttgtatagggcttaatacttagcaacgccttaagggctcaaaagaatgctgaagatgacagctgcactattgctctcaacaaccttcgaacagaggttatcaagatgagaaatgaaggcttggaaaaagaaaaaattctactctcattggtggacaaagtaaaggtggatgaagctaacttcaaggctcaatctgaaatccaaaggaatgagattgaaaaccttcaaaaacaactggctgaagccaaattaaaatgcgtt

SEQ ID NO: 50616 - DNA, 415 bp, Zea mays
  unsure (1)..(415): unsure at all n locations
tcacccaatcgataatgactaananacacttagttatttctttaatgagtaaatattgctcagtcataacgacaattactaaatatcaataagtaattaccggttggaagaagttatgttattcatcacccgaatcatcccccatgcctaattaagccccccggacctgcccctatgtcaccctaaccagccctcgtgcctaattatctccctgctaaaccagccccacttaattaaagtcctcatgcgtcgccactgactcatccacaattcttcaccatcacgtcttgcctcatctgccacatcagccacatctcatcttcacctcatcacctcaaattgcaaaccttgaatggttgtagtaaccctaaaaagggtgaatacttgttcttgcacgatgaagtaaatattaatg

SEQ ID NO: 50617 - DNA, 400 bp, Zea mays
  unsure (1)..(400): unsure at all n locations
ctcagctgaacctggagtgcaacgccataatatacaatttctctgttttctcgggccatangttcccgattccaaccttcgacttgagagttcctttggcccaaacgagactgttccttgtaccacaccatgctcatcttgcttgttgcggacacccattggttccacaacatttggttggacgggaactaatgcctacctcattcctagtgaagtgtgagctctcttgcattgccaccacccaatcaaatcttgaaggcttctctaccctatgggctatagagaacaaacataatgtacaaaatggcaacacaactagggtacccctataatgtgcgagagggtcacggtgaccttgatgctggggactctgggggggcttgtctatctctgctgacat

SEQ ID NO: 50618 - DNA, 445 bp, Zea mays
  unsure (1)..(445): unsure at all n locations
atacaaactcaagctnnaaagggagagcacatctngcgactaacccaacgaacattattgttaaagacagggacnggagcgcacgtcaagcaggggagcaatgaggtacccaccatccacacangaacatcatgacaacgaacatgccactagaactactccacatggatctatacggcccgataacctacataagcatcggggggaagaagtactgtcttgtaaatgcggatgataattctcgcaccacttgggtatatcttttgcaggaaaaatcataaacccaagaaactttgaagggatgctcgagacatgctcaaaacgagttccgaagacgaatcaagaagataagaagcgaccatgggacggagttcaagaactcttaaatcgaaggctccagtgaggaacgagggcatcaagcatgagctctcttctacctacacac

SEQ ID NO: 50619 - DNA, 412 bp, Zea mays
  unsure (1)..(412): unsure at all n locations
taccaccgatatcaccgaagactgctgtttactttctgttaatcttacatgaaattatctgagttctatgtcttgggtaccacatcatccacataagcttccacacgcttgccctagtggtcggctaaacatgcctgaatagctctctgataaatccctccagcgttcttgagccgaacgaccaggaagtatagcaaaaggcttctaaacgggtgatgaaagaagnnnnncctcnncttctttgccaaacaaactgatgatacctacagagctatccaagaaagacaacatcaacatccgatgttgaatccaccacctggtctatctgggagcccgaacggatcctttggacaggtttgtgagatcgtatacacacgccatgcccaatccttttatttttttgacacaaaac

SEQ ID NO: 50620 - DNA, 438 bp, Zea mays
  unsure (1)..(438): unsure at all n locations
tgccagcctcgcacctctgaactaactcggctgcattattctnttgctggtggccaatagaatcctgacctaaagacctttccgactagtgttctggagtctgcatgtattccacattgcccagcatggacctcctccagaaagtgcttcccagtagatgggagaatgcactttatgaagacgcctgatgcaccccttctgtacaatgtctccccaatgagtgtgtantgagccaactgtctggcaatgcgctcggctgaattcttgtcatctggntcttcttcattctttatatacttgatgattggccttctccagtcatcagagtctgactcgggttgatctataatgttgcactcttctgtttgatctattgagatactcggttgtagtatttcttgcacaaagactccgggtgggacctgagttcgactggat

SEQ ID NO: 50621 - DNA, 471 bp, Zea mays
  unsure (1)..(471): unsure at all n locations
gacatgtattctcatttgaatntaattatcaatgagctcaattccattgacattaataagctaggtgatgcgaatattgtgaggaagattatctccctactaccacaacaaagatataggagcatcatcactattcttcacaacatggaggacttgagtacaataaccccgaccataatgattaggaaaaatcgcggcctttgggatgtcgcgaaaaatgtgtcaaggagaggagccaacttcctcaagaccatatgcttttgcatgtgatgaaaggaagggtaaaaagaaggttctcactccaagttcctcaagtgaagaagaggaggaagaagaaagggatgacgatgaagataatcaaccatcaacatcatcctccaaggatgaagaaacaatccgacgtgttggaaaggtaatgtggatgatccgcaagattaatctaatgggtgtgcgacaacaggtagaggatct

SEQ ID NO: 50622 - DNA, 440 bp, Zea mays
  unsure (1)..(440): unsure at all n locations
agctttgntgtaatgactatcttcttcctcgttattgctcttgagacaaagacattgtctaagtccaataacgatgaatgtcgaagttgtagccaaaggacaacgacttcggcttaaggcgacaacgaaggtcaaacatgatgctgagccaaagaggaaaatactaactaatccctgatgttttatgtcacgattatggctatatgttaaggtcataaatgtatttttactcgggttgcgtcccgtatctataaataggtaaacaataccttcatattgttcacgctcgattgtaatttctctcgcgtcatcaccttcaatcaagtcgaaggtatcaatgtaatataaattttgttaatattcatgtacataaacactatgaaataaatatatgatgggataaataaatgaataacatctattgtttcatggactcatat

SEQ ID NO: 50623 - DNA, 376 bp, Zea mays
ccctttaccaagaattgactccattattgtttcataagctactctagagctcatgagcctactagattgttaatctgggtaacatcaattttggatgagaaagaagatgagttgaagaccagcttcataacctccagtggcacttattgttacctttggatgcttgagggactcaagaatgctgacagtgcttcatcagaatgacatccacagtactaagcacacaaattggaagaaatgtgctaatatacgtggatgatattattgtcaaaagcacgaagcaagaggatcacatctcatatttacaagaaacctttcttaacttcaaagtgctggcctgaagctcaacctcgagaaatgtatatatgggataaag

SEQ ID NO: 50624 - DNA, 435 bp, Zea mays
actaagctgtctaagttggaacgtttgagccacgctttttattttttatttactatagtagaagtataatatttacagtttatggctcgcgccagttgttcgctgccaggctgtctgctgcggataaggactggtgtcttgtcgaggcggtaaagttaccgcgccccgtgtaacgggacagttggtttgtttacacgtctccttcttttcgccttccgaagaccaaatcccacctctactctcgctacgctaaagctatgcgagcggtcaaagcgggagcagtctctctaggaggagaggagaggaggtgacacacatgcagcgagtggcccggtggcggcctgtcggggcggtaatatttggagttgtttaatgaagcagcccgtcacgtatgattcgcgcgctttattatgcttatttttattatttgtatga

SEQ ID NO: 50625 - DNA, 432 bp, Zea mays
  unsure (1)..(432): unsure at all n locations
tagcatgacccgtggaccccgcgtaactgtttatcttaatcgtgctcaccggagttcaagaactcgtcggcgcacgtggaccgggtaagcctctgcaccgttttccaattcggtgcgcgcatggcctctacatcaccctcggaagcttcccgtgcccttaattaaactataccgccgtggcttggccggagcaagagccgccgacgacccccgccgcctgtgttccaggccagggaagntnnaaccacctccaacnctgacccgcacaccgacgggaccgtcgcgacctcccggacggcactgaccaccccgccggaactctactgccgccggtaaaccccaccgtcgtaatctatgccgcgggtactgtctaaacccggcagggagcgccggttatatttgggttaagatcagtgggcttcgctcaatgac

SEQ ID NO: 50626 - DNA, 293 bp, Zea mays
  unsure (1)..(293): unsure at all n locations
actaatttttatacatccccgggnttgtgtctgcacgacaaaacccaaacgcgaaaccggaccttatgacacgtacggccgagacagggcatacattatgcccgcaaacaaagcgaacgaaaccccggaccgggtcaggaattaaaaaccgcctcgagaaaagcggccacaacaggagacaccgccaactgctagaaaaggctttacctgctattccacagggggcagcaaaaagcctctgtcaagagaccagggcgcgccaggcagcgacagagataacaaatgacccataa

SEQ ID NO: 50627 - DNA, 360 bp, Zea mays
  unsure (1)..(360): unsure at all n locations
aaattaaattttcatattttaagtcatgctcattaatcttagcactcaaaatgagcctatgtgaccatttttgttgtttaattaaagctatggcatcatgaataacatcaacattaatatcttctacatcttagtgcaaataanaacatgcccaatggtagatgtagagggtctgcaaacatttaattcatcaatcttagcatgtaaaataacattctcattcttaagattgaaaatagaagtattgcaaacatttaaatctttagccttatcaattaccttttcattctcaattttaaggctagagagtgatgcattcaacttgtcaatcttagtaatcaaactagctttatcatttct

SEQ ID NO: 50628 - DNA, 436 bp, Zea mays
agcttccatggtgatctcatcccagcctttgtacaccttgcaactaatccgagcagcacgtcgcctctattcgcacagggagtttggcttggcgaacgttcgatcctctgcgccaccagcattcactgcgttgatggggaggcgaccgcgacggcgcctccatccgttgcgccgacgttcgatccgctgtcgtccataacgtcgccatccctggccggcgcgagcaggacatcctcgaccatcgtccccagcgtgtcatccccgtccctggtttctgctgatttgtgcttccaagtataacgtcgtgtgtgctgatcagctgatttatgcttgtctgttgaaaagtagcgacttcaattcctatcaagttgcccaacgtggtgtacacatgaataccaaatttgcttcttggttctttgtgcacagcaaccattta

SEQ ID NO: 50629 - DNA, 318 bp, Zea mays
  unsure (1)..(318): unsure at all n locations
actcagctttgacttggctataaagggccctcccactcgngcttcttcttgtctttggactccgaccgagctgttcggacgagtactacgtccccctcgctgaactccctctggatgactgcgtggtcgcgccatgctttggactgggcttggtatttgtttagggcctgtagggcgaagaccctgtctccgtaatgagatcttttgaagttggctcgtcctacgttgagactgctgacggaactgtacgcggggacccatgctttatttcttgcggcgtcattggcttcgatccgtatagaatgcggaaaggagtga

SEQ ID NO: 50630 - DNA, 426 bp, Zea mays
  unsure (1)..(426): unsure at all n locations
agcttctccgccatgagcggtccatcgngctttacctctaacttgcccttcacacttgcaatctggttgtcatagtcaagtcatgtctcttgatcttctctatctagccatgtggcaccatgtcatggctcatgtgcaatgagctcctttatcttaactaattgagcactatcaacatgaccaagacacctcttcaccatggcttcaagtgttgttcacactagtgtacctttggattaagcacatggtatctcaacataaacacatattagtccaggttgtcactcagttacgaaaattaaaccacggtctttcactatcaataaaatcgaagtgggcagttggctatgcaacaacaaggcctctattcccaagtaaagtggtgtgcataggcagatgctanagatgaaaccccacaaaagaatg

SEQ ID NO: 50631 - DNA, 392 bp, Zea mays
acatgtgctaagcggtgattttctatcagcccatgctagtcttagctattaagcatgcatctagaccggcttcttcttatgcaaaatcaactaaataaaggttgccgactaatacacccttaatagctagtgaaccatcacttcttctaaagacagacacatctacatttgtaaatagacagtcatatcccatattgcataattgactaaccgatagcaaattatatccaagagactctactaaaaacacattagagatagagtgctcattagaaattgcaattttacctaacccttttaccttgcctggattcccatcaccgaatataattgaatcttgggagtccttattcttgacgtaggacgtgaacatcctcttctccccgtcatat

SEQ ID NO: 50632 - DNA, 416 bp, Zea mays
agcttgaaggctcaaccgagaattcatgtttttctctgatttcccaccggtgcccatgaatgtattaactaagctttcgctcacattctttcctatgcgcatgaagtcaaaattatgtcccaacattaaatctttccaatatggtagcacgaaccaaatagatctccttttgaaaatgaccaatggttcccctttcttgcgtctcttgcttgctggtttcttcccacatgggtccttgccataaattggattaagatgtttaatgcactccaatatttcctctccagatagtggagtaggagctgccctaaactcagtacaaccaaatgtgtcaacatcaaatctaaatgggtggttctcattccaaaatctgtgatgggccataagcaaggcttgctaccattccaagtctaagt

SEQ ID NO: 50633 - DNA, 190 bp, Zea mays
  unsure (1)..(190): unsure at all n locations
agacaggatttgtagcgcatgtcaagcanggaagacagctggtgttcatcattcacacaagaacatcatgatgaccgattggccactcgagcctctacacatggacctatttggcccgatagcttacataagcatcggtgggagtaagtactggctagataatggggatgattattttcgcttcacttgg

SEQ ID NO: 50634 - DNA, 387 bp, Zea mays
tgcatcaaaaccttgatcttttaccctttggcgtagcagagatggccgaagtagcagcttttcttttctttcccttctttcgcgagggatagcaattgtctgggtatacgaaaccaattacattgaagactctgtttaatcttttctttgcctcgccttcgaaggctaaggtcatggcatcatcttcggctcttgtgtaggccccaagcaactcgttgctagttgcctcaacacagttcagccagtcatcattcggctcatcaaactgatctctgtatctgaaggtatatttctgataaaccaagccgccttgactggagccggcagcagtcttcttcggcatctcccagtcattcacaagaggccacactttataagcaatgtgct

SEQ ID NO: 50635 - DNA, 485 bp, Zea mays
actcagcttgacttggcctaacatggcctgattgatgaatggcgcgccgtttcagtttgtctgctgacgcacccaccctcaatcaccttaggtcacgccaactgccatatctgtcctcgcggctgactgacttgcggcccccgcgcctggtggtttcatcgggccacacgcggggcgccttgttgctgccgcatcagtttaaaatattaccttctgtcttctgcagcggccccaaggaggcgcactacaggcgcgtgcgcgacggttcgctctttccgcacccgaagtccggcgcacaaactgtatgacttgtggacccgggcccccgtgtcatagactgggtttatcttctgcagcggccccaaggaggcacactacaggcgtgtgcggcggttccttccttctgcacccgaagtgcggctcacaaaccgtatgacttgtggacccgggcccacgtgtcagggactgggtatgtcttgtccttg

SEQ ID NO: 50636 - DNA, 444 bp, Zea mays
ctgcagcatgcagcttgagaaggtctctatccctacatgtgctaatctggtatgtccacaccagcccatgctaggcttagctattaagcatgcatctaaaccggcctcttcttttggaaaatcaactaaataaaggttgccgtctaatacacccttaaaagctagtgaaccatcacttcttctaaagacagacacacttatatttgtaaaaagacaattatatcccatattgcataattgacttacagataataaattatatctcaaagactcaactaaaaacacattagaaattgagtgctcattaaaaattgcaattttacctaacccttttaccttgccttgattcccatcaccgaatatgattgaatcttgggaatccttattcttgacgtaggaggtgaacatcttcttctctcccgtcatatggtttgtgcattcgct

SEQ ID NO: 50637 - DNA, 359 bp, Zea mays
atgtcatactcgatgcatattcactctaactgttcccttgtatgatgtactgtttgtttcccaatttgaatgaatgaatgtatgtatgctcgcattcgcatatagaacgatccggtctaagagcccgaggaactcgcatgagaagcccctgatcatcagacggttggtggaggcaagtgtcccttgacctatctctgtcctattcattctttaattcacctcccgctttacacctctatacctaaggattgactattttatgttatacatgtacttgtatacctatttggcgtgcactattattatatagccttatgctattgctcaactctaattaatgaacatgatgagattatcta

SEQ ID NO: 50638 - DNA, 400 bp, Zea mays
cctccctggccggtgtactgcctccggctcgccgctgcgcgcgcccatctaccttcgcgccgcgcatctgggtgtctggtcgccccctgtgccgcgccggggtctccctccctgcgcacagccaccaccggccgagctcgccccggccccttcgctcctcccatggcgagctcgccggggatgcccctgtcccagttcgctgcgccctgctcggtcccgggcttatctgctgctcggccgcgtccctcccttgttcctccagccgagctgctctcccagcgctctttcttccctgcaacctggaccttcccagctcggcctctaactgctgcgcgcgctctgcctccatggccgcgcccgctgtcgcgcccgggcatgctcctctacgcgcgctggagct

SEQ ID NO: 50639 - DNA, 467 bp, Zea mays
  unsure (1)..(467): unsure at all n locations
ctatatatcgccattttgttgtgtgatgtgagttgattggcacctgatgtttggcacctgtcgtttttgtattatcaataacattttcataggcatgcaaaggtctcctgaaccaaagccccatcattatcttggtgtttatttccacattagttggctgggcagtgaaacaagtcaccaatgtcatccaggtattggtgcttgaatttttctgcagcttattgcagtatatacattggcatgcgttgagcctgaatcatgtcattacaagagtatatctaaatagcttgttttagatctgtatatggtgttagaactgttgctgtgttgcatattcgacatggttgttgtcaccatgcaattngatagtgtatccggtatgaagttcaaaattttgatatccatgtatttcctttttctcggtatagatgaaaacggctgcggatgcatgtgttgtgtacgacctg

SEQ ID NO: 50640 - DNA, 464 bp, Zea mays
  unsure (1)..(464): unsure at all n locations
ggatcttaagtcacctgagctgcagcttgccatacctgtcaaaacaacaacatctactctcacagcaactgcagaccataccagtaacttggcctttcgcatgctggggactggatatgattggacctttcaagaaagctcacggaggatacactcatgtattggtagcaatcgacaaattcactaaatggatagagttcaagcccattgcctctttgacctcagctaatgccgtggaattcatacaagacataatattcagattcgggataccaaacaacatcataactgacctaggatccaacttcacaagttcagagttcttcaacttctgcgagcaaaaaagcattcagatcaagtatgcttctgtagcacacccgagagccaacggacaagttgagcgagccaacgggatgatactggaggcactcangaaaaaggtctttgataagaatgaaaagttc

SEQ ID NO: 50641 - DNA, 326 bp, Zea mays
cacctttgatatcttctttatctgtcggatcatttttcacataaaaccattctgttgtccagtcgccgggccatctcttccgaaaagttggcacggggcagcttgacccggaccgggaaacgaaactgtagcagccgaaattattatggtattggtccttaccccaaggctttgtttcatatgataattcatgaatattgcagaagctttttgcgtcaggcttcagaccttggcttcttacgggccaaatgaagatattcagccttatgattgcctccggggttagttggtgccgataaacttcgaagatatttagcacctccacg

SEQ ID NO: 50642 - DNA, 268 bp, Zea mays
  unsure (1)..(268): unsure at all n locations
tatctgcaggatccaagtccttcagagtggccagtttcttaaggagggaactccttttcttgtgaacgcagatgttaacaaagatgataagcttgcttgagtactcccgaaaacgccatatantatgaccagatccagataatatttaccacacagcagattaattcctcatggcttggatctgaagcagctgcagtactccgtaaagcaatgtcaagcagagactggcgtattaaatgggcaaagaaagccgatacaaaacccaaga

SEQ ID NO: 50643 - DNA, 392 bp, Zea mays
tgtgagcttgatccgagttgttctcagaggcctgtttcttttcgacggaacctggttcctgtactacgcggacgcaagatatgatgatgctctagctgcagtgctgcttgtcacgacatataagatgaccctatccttaagaatataccgcgcgtgctaataccacaatggattgtatctgatgatatgaaaactgcggtatgcatcgtaccacaagactgtcttgtttatggacgaagaagctggaacatatgcagagatgccattgctaattggtactccgacatggccaatggaatgtggtttagtcactgcacggacacacacattactggtctgagacatagccgatgtggtccagctgatatgtcttctggataatatgaagcttc

SEQ ID NO: 50644 - DNA, 416 bp, Zea mays
  unsure (1)..(416): unsure at all n locations
agctttggcttcgctatgtatggattgtctttgagtctcgccagtntccttcggcctttctggcatcgtcactgaacttcataaatagcaataagcccttcgatccgaaagtatcttcatgcaaagatatgttggatgaagaattgcttcaaaagcattgagagtaccacgaccaatgattgtgttgtaagggtactccatgccaacaatatcaaacacatcttgatcagtccttgtgttgctgataaatccgaaggccactggcattgtgatcttgccaagtgctacaatctgcctttctccgaagccacaaaggggacgtgtggcgacatggatcttatcttctggctcttgcatttcgttgaaggccttaccaaatataatatccgttgcactgcctgtgcaaccaaaacatt

SEQ ID NO: 50645 - DNA, 437 bp, Zea mays
  unsure (1)..(437): unsure at all n locations
tcggcatctttacttgcttcttcctcctgagccccttgttttcagtcagtgatgaagtctgctaacgcctgtgactggatcgaagatctatgcacataatcaatgctaaatttgttgagttcggcagcccacttaccaatccttccagtagcttctctgttcctcataatatccttcagaggctgcgatgaaggaataattatatggtatgcttgaaagtagtgtcgaagctttctggaggccattaagacaacatatagcaccttctccaattctgtatagttnttctttgataaactaagaacttcggagacaaagtacactggggcttgctttttagtttgtccttcaagcttctcctggacgagcgccacactcactgcagagtgcgaagctgccacatacagcagcagaggagcccctggtgctggtggagt

SEQ ID NO: 50646 - DNA, 414 bp, Zea mays
  unsure (1)..(414): unsure at all n locations
gatcttaagtcactgagctgctacttatgaagctggcttcgtttcaattcactcttgctgngtgaagtactgaatacaattgaaatataccttaccaacttactcctgaagatttgattaaaggggggggtttttatttgggctatgaggagcccaaggctagagctagatgctaagtgcttcttgtataatcatgaattatcttaccagactaacgcaactgngaaagagcagtaccataacaacttctggtgttacaacttcgtgccctgctctgatacaagatatacgatgccaacattttggaagaagtggccgggctcttggatgaaacaatggttctacgtgaagaatgatctgagtgagagggaagatgtgtggggcattattcagcatcccatatggtcacgcatc

SEQ ID NO: 50647 - DNA, 285 bp, Zea mays
gcagcaaaaggctccactgcttggcttcggagggcccaaatataaacgctaagcctaacgatagcgttaggagttaactgatgaacgtagatgccatacctcttcaatatctccgcaacaatctcgtgaacagggaatcttagcccagcctttaaaaagcttttgaagatgacaacctcgtccttctctggcttcggggtggtctcttctcccccgaagcgaagtagcttcttctgatcttcactgaaaaaacctgctttcaccatcttggcgagatcaaccttt

SEQ ID NO: 50648 - DNA, 420 bp, Zea mays
  unsure (1)..(420): unsure at all n locations
agcttttatgatctgtaaaatatgatagatatttctcatcagatagtgacgccaaattttcatggcatgaaccacagcagctagctccagatcatgagttgggtaatgctcctcatgtcggcgcaactgccttgaagcatatgcaattactcgaccctcttgcattaatacacagccgagtccactgcctaatgcatcacagtatacatcaaaaggcttattgatgtccggttgagccaataccggagcagcggncaataatgtcttcaattgctcaaaggcttcattacacttagaagaccaattgaatttagtgtcattcttcaataaacttgtgattggcttcacaagcttagaaaaatctggtatgaatctacgataatatctagctagtccaagaaaactccagacttggtgaat

SEQ ID NO: 50649 - DNA, 267 bp, Zea mays
acatattatatcctgttggttattctgagcataagattaagagaattcatgctatgaaacctcataatgtgttacatcatgcttttatgtataaaaattatgcttctagctctaagcgatccacccatgttaaatgcctataaagaaaactcctactgcatctaatgagcctaatgtttatttaaacttgaacatttatggctactaacaatacgcaaatagttgcaaatatgttgggggcaaacacaaaggcttcaagacttgtgt

SEQ ID NO: 50650 - DNA, 420 bp, Zea mays
  unsure (1)..(420): unsure at all n locations
agcttggccnctacctggcgagacatatgtttgataggaaatctccccagccgggtggcggattgcacccaccctaaatcctaaagagaggaggggcctaagcgttttgcttgctacgagactggtggatcaacacacgagagctcgcgagggtttatagtggttcgggccgccggagcgtaataccttactctactgcgagatgtattgcttgagggcttgtaaaagctatcgagtctaaaattgcgngtgtgtaacgtcgcatgcctccccttttatatctgaaggggggcatgcacatagggactgggccccgacatgtgggcccaggtacataaagaatatagtgcttggatcctctgatatctgttgccggacaatcttctctgcccgagatctgcgttatctacgcgtaccgag

SEQ ID NO: 50651 - DNA, 433 bp, Zea mays
  unsure (1)..(433): unsure at all n locations
atgaagattcttcattccaacatgggctattcggcggtgccagagccaacccaagttagtcttagcaaccaagcaagtgtcgagttcagctctatcaaaatctaccaagtatagctgaccctctaacactcccttaaatgctattgaatcatcacttcttctaaagacagggacacctacatcagtaaatagacagttgtagcccatttgacataattgggatacngaaagcaagntgtaatctaatgaatcaacgagaaaaacatttgaaatggaatggtcataagatatagcaattttaccaagacctttgaccaaaccttgatttccatccncgaatgtgatagctctttggggatcttggtttttctcatatgaggagaacatccttttctcccctgtcatgtggtttgtgcacccgctgtcgagtatc

SEQ ID NO: 50652 - DNA, 478 bp, Zea mays
  unsure (1)..(478): unsure at all n locations
tnctcttcttgatgaactagagaccactcatattngctctgttcatatatctttcttggtgggattggaataatcaagttcgtttgttttgtgaaatagcataattgtggcactagctagtatttcgtgatcgatatgtctttcttgttagtattaatgattatcaccatatagatgattgggagcggcggtgactccgacgaaacacctagttgaagattaaggtgatctagaggtgattntttggtaagtcctcaagggtacaatggtccccacttgaatagatttacatagatgtcaataagtcgataatgaaaggttgcattatcacggcaaaccgtagaagtacatatgaggggtcaatatataaacaccaataatgacaacacatcacaagggaaaataatcacatacaaaatatataagaacaacaaagctacaagctccaacataaccttctataaaaacatgtcgctga

SEQ ID NO: 50653 - DNA, 426 bp, Zea mays
catgcaagcttatgaagattcttcatcccaacatgggctagtcgctatttcacaacccacccatgttagctttagcaattaagcaagtatcgagctcagctctattaaaatcaattaagtatagctgaccctctaaactcccttaatgctaccgaacatatttttctaagacagaacacctatttcgaaaaagacattgtagcccattttgcataattgggaaactgaaagcaagctgtaatctaaagaatctacaagaaaaacattggaaatggaatggtcagtgatatagctaatttaccaagtcctttgaccaaaccttgatttccattcacaaatgtgatagctctttggggatcatgacttttctcggaagaggagaacatccttttctcactaatcatgtggtttgtgcacccgctattg

SEQ ID NO: 50654 - DNA, 443 bp, Zea mays
  unsure (1)..(443): unsure at all n locations
ctcaagcttctaanaggagaacacgtgatatgtctgacacaccgacaattttattaagttttaccctgcgcagcatgtcaagcaggtaaacaggtgggaggagcacatcacagcatgaatgtgatgaccacatcaaggtccctgtagctgctacatatggacctctttggacctgtcgcctatctaagcataaggggaagtaagtatggcttagttatcgtggatgacttttcccgcttcacttgagtattctctttacacgatatgtctgaaacccacggaaccctcaaccactttctaatgagagctcataacgagtttgagctcacggtgaagaatataacgagcgacaaaggatctgagctcaagaaccttcaagtggaggagcttcttgaggaggaacggatcaagcatgagtatttcgctcgctacacaccacagca

SEQ ID NO: 50655 - DNA, 427 bp, Zea mays
  unsure (1)..(427): unsure at all n locations
agcttggtataatacctactttggaagaaaatccttataaagaattatagtccctatatatatatatgggtgttattctctattttatcatttcatgtgaacccctcatctaaacaagaacatgactaacgaaggacaccactaaatcatgcattatgctgaggtttccatttttgtgtgcatttttgtgataatataaaaaccatataaaacatattaaagttggaatttaagatctaaaagagaattctagaattcagagaagagaaggaaatacatattatatggataaaaataagtaaataaaaataatatattattacagcacaagagtgtcgaattttatggacttaaaggtgaaacttatattcaaattcaaattntgattcaaaaaattaagaataaaaggaaagaaaaaggaaataaa

SEQ ID NO: 50656 - DNA, 482 bp, Zea mays
tatgttgatgatgtggtaattaaaacagaacactcagaattacttattgatgatctatagctggtcttcaacagcctgaggcagtaccggtggaagctcaatccacaaaaatgtgtctttgtagtgccagcagggaagttgctcatattcattgtcagccaccgaggaatcgaagctaacccggagaaaatcgaggctatcatgaggatggaagcaccacgatcataaaagaaagtgcaaaggcttactggatgcatggcagctttaagcaggctcatatcaaggttaggagaaaaatgcctaccattctacaaattgctcaagaaggtggacaagatccagtggacctcagaagctcatgaagctcttgatgcactgaagacgttcttgaccacaccgccagtgctaaagccgtcactgccagccatgccaaaccaagcagcggaagattctgtgctatacatcttctgcacgactcatgt

SEQ ID NO: 50657 - DNA, 381 bp, Zea mays
  unsure (1)..(381): unsure at all n locations
agctngngaaggggtctcattcccacatgtgccaagcggcgatgccacaaccagcccatgctagtcttagcaattaagcatgcatctagaccggcctcctcttttgcaaaatcaactaaatagagtttgtcgtctaatacacccttaaaagctagtgaaccatcacttcttctaaagacagacacatctacatttgtgaatagacaattatatcccatattgcataattgactaacagataacaaatatattcaagcgactcaactaaaacacattagaaatagagtgctcggatgaaatagcaattttccctaacccttttaccttgccttgattcccatcaccgaatattattgaatcttgggagtccttgttcttgac

SEQ ID NO: 50658 - DNA, 369 bp, Zea mays
attttatagcatataaattcttaggaggtaaatctgaagttcctgatgtgaatgtagatactattatggaatcacatgatgctactttctttgaacacatatttcctatgaaagacattcatagccattctagatactcatctaagataactcctgaacataatacacatgttgagagttttgaatagtcacatgagaatgtcctaaaggaagatggcaatgatgctcttaaaaggagcaagagacacagggttgaaaatactttggtgatgatttcattatgtaccttgtggacgacacctctactaccactacaatagcatttgcatcttcagatgtatatggaaagaagcacgttaaaatgagatg

SEQ ID NO: 50659 - DNA, 517 bp, Zea mays
  unsure (1)..(517): unsure at all n locations
tttattttaattctgtgacatctaacaatnncagcgggacnatgaatgcatcgtctcagaccggaatcttaaacgactgcagcatgcaagctaaataaaaaggagataaatgtggtgatttgctcgccttgtacaccgacgaagatataaaataaggaacacatggacatgattntctgcctccctcttgatagagaactaaataaagaaagtaggcttagcgcccggacgttcggacgtatgcgtcgtgtcaagacgctcgcgtccactgttcacaggccacatgacgaacttccatggatgcacgcacctctgcatgtggcacaaaacgacgtatgacatacaagtacttccctagatgcatgcgcctctgcctccactcacccacctaaaagctttttgtgggtttgggtggattggatgacaacccaatcaaaggattgacaggtgtgttaagtgatggatacgtgcttagtgtaaaacttagaaacgttaacacaagtgttcaagagtgaag

SEQ ID NO: 50660 - DNA, 347 bp, Zea mays
  unsure (1)..(347): unsure at all n locations
ttctagggaaataaaatttatattggagattatgtatatttttaacatattcattttgggagtagaaacttccaatttatgattatctttaaggaaaggcgttttgatttaaaacctttggggaactttccatgtcttcacaaaattaaactttagggtgttacaaatcctaccccccttaaaaagaatctcgtcctcgagatttgtaagaaaagggatacaataagtttggtctagaattttagtttctcatttgggttntggaaatcaaagttttgttcaagtttttacataacggttagtagacgaattggaacacatggatattgtatgtctagccatctatt

SEQ ID NO: 50661 - DNA, 435 bp, Zea mays
tttcttggcatcctgccacattatggactggggagtacttgtatcactgtcgccctgggatggcacgggggcagcatcatctgctggggggtgcgagtttggagatgcgccgtgggaggaagactgattaccttgaaatcccactcaagtatagtatcaaaggatggcgcttggagtggtttattgttgagaaccacggaaattctctccccccacggtcagggagacagtcggatgttcgtactccaagttggaccgagtcccccacggaccaagaggtggctgaagcaagggctttgctggctgaagttggactgctgaaggagaggggtctgactgcagaagctgtggttgctgattatgtcttcaagaacattcaaccatttgaggacagggcatatccggcctatctgtaccgaggtctaactgactcaa

SEQ ID NO: 50662 - DNA, 416 bp, Zea mays
agcttgtgaaggatctttattctcttatgtgtctagcggcgatgccacagccagcccatgctagtcttagctattaagcatgcatctagaccggcctcttcttttgcaaaatctactaaataaagtttgccgtctaatacacccttaaaagctagtgcaccatcacttcttctaaagacaaacacatctacatttgtaaatagacagttataccccatatgacataattgactaacagatagcaaattatatccaagactctctactaaaaatacattaaagaaagaatgttcaatagaaattgcaatgttacctaacccttttaccttgccttgattcccatcaccgaatatgattgaatcttggaatccttattcttgacgtaggaggtgaacatcttcttctcccccgcatat

SEQ ID NO: 50663 - DNA, 467 bp, Zea mays
  unsure (1)..(467): unsure at all n locations
tgtatagtgactactcgccaacatctcttatgatgaagtttcccgcaaaagatcttgcctggctagctccagtaatattcatagatgacaggcagccattgtccattgttgagcaactcttgataaagtgggggtcagctctgcttcagccaataggtacaggcagactactgcaaattcaaggagccataagacaacccacagctatgaagtcatttcacatatggcatatgtatcgtgagtaaattaatccaggttggtaaataccgatgaagatattctatgctgagaacaattgatggattaacaacgaggcggagaaacaagagacaattgcatatttaggattccaaacattgcgtttcgcattcaaaacattngctctacaaaaagagatacaaatatggcgttgcctggaactntttctannacaatcgtacaccaccatctcaaataacaaagaacat

SEQ ID NO: 50664 - DNA, 370 bp, Zea mays
  unsure (1)..(370): unsure at all n locations
gaccggacttaagcacgggctgcagctgttcggccgcctgtttgctagtcacggccggagccgcgccagtattgtggcgcgccaaactcctctgttggcccgtcgtcgatctccagcgcacttcaaggttcgtcgactcgtctcgatgacagtccctacgtgacatcttcgacgtgggtttacgcccacaaaaagaattccaacaagatatanagaaacaagcctttgatcaatgtctcaatggtcggcgaaaggccagaacaagaaacatcacccgttatatggagttctacttaatatgaaaagatttcacgaaatatggatagaagagaaagtgaagcttcctgctatacttcgcagctggtcgatc

SEQ ID NO: 50665 - DNA, 350 bp, Zea mays
aggacattaacatgtaacacttcatgttgtcttgttcttaacgcaaagcacttgagaacaagtccccaacagtcgctaaattcttgttatgcaacgtccaaagaacaagtcaagtattataacctgacgtgcacgtgtgggccaacaaaattgtggagtcggtacaaactgctgtataggtggaggaggtggcatactcatcgctgaaaaatctggacgttgccctagtgctatttgctgaaagatatagaaagctatggtaccaggatatattacacaacatgtgctccaattatagtatacgctcacgaggatctaaatacctgcaacatctactgctgtcggcaaat

SEQ ID NO: 50666 - DNA, 427 bp, Zea mays
cagcttgtaagtgcagcacgacatcttatgtttgttctaatacctcatcttcatctgacaactctgaatggttcaccacgaaatgacctgcactccatctaagataccctcatttgaacaggcttgttcctgcatgcatcaaacactaacagtccagtggcttctgaccattcaactaataatctctcaacttcatcataatatatccttcgttccatctgcatcatagtacacacgcgaaaaaaaatgaaattaagtgcttcttctgcacgatttggcaaaaatcataccacaagcttgggcagtgggcacattgactgccatgaatctgggaccaagcctgagaactctaccattgaatgccacaattagttccttctcttaaaccgctgagcgcgcgatagggcgctttactattctactacta

SEQ ID NO: 50667 - DNA, 363 bp, Zea mays
ggcaccaatgttggtcactcattttgtatcactggatacgtaccaaaaacaaggccacacatgttaataaattactctctcccagaggtgaattaaaaggagaacatcaatgaatgcgataagagaacaatgacaatacgatgtaaattgagaaaagcaagacatgacactcgcctggatatgcacacaatgtattctatcatgtcccttgcaaataaatgaatggttacaaagatacactcagctttacagacaactactcgaaggtagcttagaggctaaacaatacagaccttccgcactcgatcaggcacttaagccgacactgtcctctactaagagggagggcaacttgatgaatgc

SEQ ID NO: 50668 - DNA, 350 bp, Zea mays
accaggaaaaggggaacaaaagagagaagaagaagctctacaagaaggccaagggcgaagcacatatcggaaaggagtgggattcggactgcccctcctccgactccgacaatgaaggactcgccgccaccgccttcaacaagtcatttctcttccccaacgagcgtcatacttgccttatggcaagggagaagaaaggaagtactcgagataccacttatgcttcttctagtgatgatgaatctagtgatgaagatgaaattgattattcatgcttgtttaaaggtctagatagaaccaaggtagacaaaattaatgaattaattgatgcctcgaatgataagaacata

SEQ ID NO: 50669 - DNA, 435 bp, Zea mays
  unsure (1)..(435): unsure at all n locations
taaccttgtaacgaggataagctacctttgttccaaaggtggatggtccttaagcctctttgaaatccttaagggaaaatgcttaaaatatttgtaacatgctttctgtagtgcataaactgtcatgagcatcacacttatcctatgacacaatgcacttcacattctatatgatttagatatgttctcattaacctaattatgtgcaattggcattttaggccaaactatgtgttctctccatgcacatatttagggggagcaatctatgttgtatagaactatgatcatgcttaattgacatatctcttgatcatatctctttcattntggtacaaatgcatatatcctattattcccgtaccatgactacgactaatatgtttccaagtatattactatgctaagtcgtagattgaaagggaaatggagtct

SEQ ID NO: 50670 - DNA, 388 bp, Zea mays
  unsure (1)..(388): unsure at all n locations
taatgaatgcgatatcgaatgtctacttgatgcataattaccttatttgtccccttgtgtggtggactgtttgtttcctaattcgaatggatgtatgtatgtatgcttgcaatcccatagagaacgatccgatcgaataacccgaggaactcgcatgagaaacctcttaacancaatccgttgggggaggcaagnggcccttgacctatctcttgcatattcattatttaattcaccttccgctttacacatttatgcctacagaattgaactagcttttggtattccatcgttctttgtttacctcatttgggttggattattattgnttagctttatgccattgctcaaacttaatcatgacatgatgagatattatgatacctgt

SEQ ID NO: 50671 - DNA, 488 bp, Zea mays
  unsure (1)..(488): unsure at all n locations
tactcagcttatcagtctggctctagtggacttagctngagagggaattatttcttcattacctttaaaatatcttccacgtcagtagcaggaggcgatgaacgaatttcttcttctgtatcagttgtttttggcttcacagccgaagcttttcttttcttcagaacaaccaccttcggctcagggctgcattgtttctttntcaaagctttctcatcttcttctatcattctagcagcttgcctcttcatgacactgacaactctttttctctttggcccttcggcacccttgcataaccgttcattgtcaaggtattcaaattttagggcatccattactcggttcagccttcgtttcggtcgagtgccgaacgccacggacatcaattgatcttctttcttagtatagttgcccaaaatttcgttgcacatagcttcaatcatgtccaatcactcttggcaggctctntaaatgttcttgaattg

SEQ ID NO: 50672 - DNA, 391 bp, Zea mays
gatcaacacagataggcacagtggtttatcccgtggttcggccaagtccaacacttgcctactccacgttgtggcgtgccaacggacgagggttgcactcaacccctctcaagcggttcaaagacccacttgaataccatggtggtttctttgtttactatatcccgcttgcgaggaatctccacaacttggagcctctcgcccttacaatttgatgttcacaaagaagcacggaagtaaggatgggatgagcaacacactcttgagacaaaatcagagcacaatacgcacacaagtcacagctcgagctcacaacacaacccgaagagttctctactcacatggagctctagttgctatcacaaagaatcaaatgcgccgaattggagtc

SEQ ID NO: 50673 - DNA, 392 bp, Zea mays
tatgtggaaaaggtattgagtcgcttctggtttagtgactgtgatcctgctccaacaccttatgaccccagtgtgatattaagaaagaatcggagaatagcaagggatcaattgacatactcccagatcattggctcgctcatgtaccttgcaagtgcaacaaggccagacatctcttatgctgtgagtaagctaagtcggtttgtgtcgaaaccaggagatgatcactggtgtgctcttgagagagtgttgcggtatttgaaaggtactatgacatacgatattcattataccggatacccaaaagtgctggaaggctattgtgatgccaactggatttctgatgctgatgagctttatggcacaagcggatatgtgtttctgtttggagg

SEQ ID NO: 50674 - DNA, 483 bp, Zea mays
  unsure (1)..(483): unsure at all n locations
actaagcttaaaaggtgacatcttcagactggcctgatagctattattatattataattcagcataaggcaaactcttatcccaactttctccatgctgaaaggcacaagctctcaacatatctttcaatacttgattagtcctttcagtccgtccatcagtctgagggtgataagctgtactaaaattcaacttcgtactcatattctcatgaaagcttctccacaatcttgaggtaaactgtgaacctcgattagacacgatcttctntggtactccatgtaaacacacaatccgagccatatataactctgctagctgagaacctctataagtagtcttgacgggaataaagtgagccactctagtcaatctatccacaatcacccatatagcatcatatcctttctgggtgcgaggcaatccagtgatgaaatacataccaatctctttccatattcactcgggtaccttcaatggatg

SEQ ID NO: 50675 - DNA, 430 bp, Zea mays
agcttgtgcttcccatcacttggagatctatcttctaacccagcaacaaggaacaaaagaaagaggcccaaagaaaggtgcaacatgtaggcgtctaaggaccctacattaagtacaagtggtctcatatccctattaccttttctcaagatgatcttcgtctcaaggattatccacatagagatgccattgttatctcttgtgtcaccaaaagcttcgtattacacaatgtcttgatcgacatagacagtgcattagatatcatatttgccaaagccttcaagcgaatgtaagagcctaaagataagattcaagaatcagctttcccctctgcggcttcaaaggacatcaagtgatggcattaggaaagctagctatgaacatgctcatcaccttacgttatgtcaacaacaccagaacagaagaagtc

SEQ ID NO: 50676 - DNA, 424 bp, Zea mays
actcagcttgacagtgtctccgaggtcctaggacccttcgtgttgagcggctgctgtcctagtcacgccttcaaaagtcagaacatgttatgcatcaaggcttgaattcagttgtacaaatagtattgccgaatacgaagctcttcttttagggcttcaaaagttaaaagcaatgggaataagaagggcaatccttaaaactgattctcaagtaatttctggtcatatcgacaaaagtagcaaggccagagacccgaagcttgaaaaatatttggacacagttcaaaggctcgaagcttctttcgaaggaatttctgttaagaataatgacttccgacaaagaaggaaggaagcttatagaatttctaagatgactacgggcttctgaggaagaattcaccctatacatgttagatcaatccac

SEQ ID NO: 50677 - DNA, 428 bp, Zea mays
ctcccaccgagactgagctgcttctctcaacagacggtgaccatacagaactttctccctgtcatcgcactgagcggtatgcaacttccgctccacagtgcgcagctagtcttcagcatccatggggtcaaaagagtgagcgaacgctgggggatgacctcgaatgaattcagcacgcttgtccctgggcatctgaggcatctggggttgaggtgggacctgatgttgctgttgctgaatggcggccagagtctgaccgatggctaggactgcctgagtctacatcaggaacatctactcgatagacatctggggcgggggcggcaatagctgatgctggggtgcctcatcctactgagctggtcgctcctgctgagcacaccctactatgtgcctggtttctgacatctgcagaatgcaaccacaca

SEQ ID NO: 50678 - DNA, 379 bp, Zea mays
  unsure (1)..(379): unsure at all n locations
agcttggagatcttaacaaccgctccttctgttatcatctcatctgatnctctcagatcatgcatcttacaactaccatgctcggcttaaattttcttttcaactcgaaatctgaaagtggcgttaccgaagaagggtacctcttggaggtggaggccggcaagacctaacttctaccccctaataacgccgccctgatctcagagtactacctgaagatcgccgggcacaggttcacggtggtcgccgtcgacgcgaactacgtgaagccgtacgccacggacgtgatcgctatcgcgccgggcgagacagtggacgcgctgctggtcgcggacgctgcgtccgggcggaacttctacgtggtcgcgctggccaaacc

SEQ ID NO: 50679 - DNA, 467 bp, Zea mays
  unsure (1)..(467): unsure at all n locations
tctctctttatccttaataattacgcgccctttaatatattttcttgaagccaaattagaatgaagttactctattattttattcatttgcagtagcttcctacctcagaaagtttagctgttcaagcccaagacaaatgaagttgcaaccctgcagtgcaacagcagactcagtctcacctgtcatcgccccaggagcagttcctgagcagagttacctcaatgatcggcgcagtgctcccgactacaggggctggcatgacgagaatgtcaagggaacctcgttcgaaggaaaagttgaggcgcagcagaagactagcagggttgagcgctgattcggctcatattcgacctggtagacccaagaaaaacgtcttgaaggctctgaagatntcagatggctctgatctcctatctcaaaaagcccttgatgcttataccaagctgttccttgaaccgcttaatca

SEQ ID NO: 50680 - DNA, 436 bp, Zea mays
agcttgaaggccaaattaagaggcatgttcttatatatttgatccgaagatcttagtttatcaaagaaaaattatacagaattggagaaagtactgtatgctgttttgatggccttcagaaagcttcgacattattttcaagcttacaacataattgttccttcttcacaacctctaaaggatattatgagataccggaagctactggaaggattggaaaatgggctgcaaagctcaatgaattctggattgattatgtctatagatcttcgattcagtcccaagcgttggcagacttcattgctgactggacgccaggggctcatgaggaagaaacgaataaagatgccgaaacatggacagtgttttgcgatgggtcttgaggaaccttcagagcaggagcggctgctgtgttgatctcacctttcaaagttaa

SEQ ID NO: 50681 - DNA, 463 bp, Zea mays
  unsure (1)..(463): unsure at all n locations
tacggaactatgatactaagcttggaagccaatcacaagtttgtgaagaatgacactatattcaattggtcttctaagggtaatgaagcctttgagcaactgaagacactattgaccactgctccggtattggctcaaccggacatcactaagccttttgatgtatattgtgatgcatctggcagtgggctcggctgtgtactgatgcaagagggccgagtgattgcgtatgattcaaggcagttgcgccgacatgaggagcattatccaactcatgatctggagctagctgctgtggttcatgccctaaagatttggcgtcactatctgctgggaaatatctgtcgcatatatacagatcataaaagtttgaagtacatcttcacccagtcagagctaaatatgaggcanagatgatggcttgagctcattaaagactatgaactgggagatcattatcacc

SEQ ID NO: 50682 - DNA, 384 bp, Zea mays
ctggagagcatatttgaggtggtcgcctccaagtgcagagaagaaaatccctgctcctgctccctgcactatagcgagccatcaaaatacattcgccatacttctgccgtttctagattgtctggtacttgctggtctgtccactctgaaacgaaaacaactagtgcttgaatattgatggcagcgcaaagtcggaactcgatatcatgggatcccaactcgcaagcccacttggctattcggccaatggcttccttgttgtgaaaaatgtcccctattgtaaaaccagtaactactatgactttgtggccgtcacagtaatgacgcaactctgcgggcaattaggagtactgcatataataccttctgaacctgaagatactt

SEQ ID NO: 50683 - DNA, 389 bp, Zea mays
cgactctctcaatcaaggactttgcaacccaaatttatctaggtctactcttgcttggtggacctaagaatgtaactttgacctttccatttgcaacttttattagaacataatgagcattgaaagcaaatggtcttgagtgcttacgcaaaggagttggtggtttggctttgagttgtgggcaaagtgaccttcttttccacactcaaagcatttgataggcttatgagtctgctttggcttgtattgagtagtagctttcttttgcacaacagcattgtatccaataccactcttgttgtttttcatgacagtgttcatgagcaattcattttggaggtattggcctttgtgaacttctgcacacttgtcgacctatttaagtcttt

SEQ ID NO: 50684 - DNA, 441 bp, Zea mays
  unsure (1)..(441): unsure at all n locations
actcagcttctaagggagaacacgtgataggttngactaacgtgcatttctaanaagatagaccttgtgcagcttgtcaagcaggtaaacaagtgggaggagcacatcacagcaagaatgtgatgactacttcaagacccctggagctgctgcatatggacctcttcggacccgtcgcctatctgagcataggagggagtaagtatggtctagttattgttgatgacttttcccgcttcacttgggtgttctttntgcaggataagtctgaaacccaagggaccctcaagcgcttcctcaggagagctcanaatgagtttgagctcaaggtgaagaagataaggagcgacaacgggtccgagttcaagaaccttcaagtggaggagttccttgaggaggaagggataaagcacgagttctccgcttcctacacaccacaac

SEQ ID NO: 50685 - DNA, 316 bp, Zea mays
caaagattgtcatttggaagtttatgaatttgaattattcttttggtcttatattaacccattcattcttttcatataggggttaatacttaacaacgccttaagggcgcaaaagaatgctgaagacgagagttgcactattgctctcaacaaccttcgaacggaggttatcaagctaaggaacgaagctttggaaaagacaaattctattacattggggataagtaaagaaatgagctacttcaaacccatctgaacccaaaaatgaatgaaaccttcgacactgccgaactaagagaatgctatccaaactaac

SEQ ID NO: 50686 - DNA, 473 bp, Zea mays
  unsure (1)..(473): unsure at all n locations
gctttgattccatcaattgggcatatctggtagaggttntgagagctctatgtttttcccagaaatggagaaattggatcgcaacaatattaagatcttcctcttcaaaaatcatcatcaacggtcaacaaacaaatgcaattaagcacatgtgtggcgtccgtcagggtgatccgctatcgccgttcttgtttattctcgcaatggaccctctgcagaggatgattgagatggcggcagatgctgggctcctggggcgggttctgccaaataaggctaaacgacgatgttctctttatgcagatgatgcaggggtgtttgttagagcagataaagaggatctgaacgttttgaaaaagattctggaagtttttgaagggtgttcanggatgaagaataattnntgataaaactgaaatttcccgatttgatattcccanactctttggccagatctgatggatgtgtacccg

SEQ ID NO: 50687 - DNA, 281 bp, Zea mays
  unsure (1)..(281): unsure at all n locations
gccttcctgcattaatacgcagccgagaccactgcctgatgcgtcacaatacacatcaaagggcttaataatatcccggtgagccaataccggagcagtggtaacaatatcttcaagagctcaaaggcttcattacattttgaagaccaattgaatctagtatcattcttcaatatacttgtgattggcttcacaagcttgganaaatctggtataaatccgcgggtataaccagccaggccaaggaaacttcggacttgatgaacaggggtcggcggttt

SEQ ID NO: 50688 - DNA, 258 bp, Zea mays
aatgagtggatgcaactcactgttaggattgtgtgtttggtcctgaacaaatggcttgtgatttggtcttaatattaaacctgatggaaggtctatttctttggaccagatgcaaggtcaaaattcatcatgattttgtcacatgtcatgacatggtccagggatggatcatgttgtatgaaattgatgagaaccattgttatgctagcaaagccacatagtatatgagaaagttcatggtgccagtccatgcataga

SEQ ID NO: 50689 - DNA, 351 bp, Zea mays
  unsure (1)..(351): unsure at all n locations
gactacgcagcagcacaacaaaaccaagcggctagagaggagatctggccaaacacaataaccaccagaagatcaacacagataggcacacggggtgatcccgtggttcggccaagaccaacacttgcctactccatgttgtggcgtcccaacngacgaggggtgcactcaacccctctcaagcgggccaaagacccacttgaataccacgatgttttgctttgattcactatatcccgggtgcgaggaatctccacaacttggagcctctcgcccttacaatntgattaacacacagaatcacggaaggaaggatggtatgagcgacacacaccagacacaaaatcagag

SEQ ID NO: 50690 - DNA, 352 bp, Zea mays
  unsure (1)..(352): unsure at all n locations
aagacatcagtttcttctatatcttcatctcgaaatagctcgatagaagactttaacttcctcaatcacattgagattcgatccaaagatcaaaatgtcatcaacataaaggcacagcataacagactcacccccaccataccgatagtatacacacgtgtcagattcatntacaacacagccagctgctgtaagagcattatcaaaattctcatgccaatgcttaagngctcgttttaggccatacaatgattttatcaacctgcacaccttgttctcttgaccatacgcaataaacccttctggctgatccatatagatctcctcattcaactctccatttaggaaagct

SEQ ID NO: 50691 - DNA, 286 bp, Zea mays
acatatgcaacgccaatgctatgacgccatgcccaacgtttagttatagtaacaccaggggtgttacacacacaagtcgcaacaagagctcacaacacgactcaatgagttcacaactcaactagagctctaattgctatcccaaggaatcaaaagcgcggaatcgatgtcttagtgcttaagaatgctttgagaatgcttggtttcctcctccatgtgcctaggggtcccttgtatagccccaaggcagctaggagcccgtgagtgcattccaggaaggcatttc

SEQ ID NO: 50692 - DNA, 349 bp, Zea mays
ccaccaaagcctaaacactatcaggtcaaggaaagagcggggggaacctgcccttcaagacaagttgactcaacgggaaattagggggaaccggcgcaaaacgtaacacgtgatgcaaaacttaacacgggatgtcaaaagcctcgttcgcctccctgtgcctaggcacagtacgagggtacttatagggactcgaggggccgcttggccctgtcaaagacatttaaaccctcaagtacctgggttatcaccggaatattcccacgaggggaggttacaaacagtcattacgggaaactttattacagacacgggcctaatcgcacattcccacgtggggcccaactct

SEQ ID NO: 50693 - DNA, 380 bp, Zea mays
agaaagacaagatttgtagcgcatgccaggcacggaaacaagttggagtccatcacccacacaagaacatcatgacgaccgataggccgcttgagctactccacatggatctattcggcccgattgcttacataagcatcggcgggagtaagtattgtcttggtattgtggatgattattctcgcttcacttgggtattctttttacaagaaaaatctcaaacccaagaaaccttaaagggattcttgagacgagctcaaaatgagttcggcttaaggatcaagaaaataagaagcgacaacgggacggagttcaagaactctcaaattgaaggcttccttgaggaggagggcatcaagcatgagttctcctctccctac

SEQ ID NO: 50694 - DNA, 287 bp, Zea mays
atagcactgaatgctgtggtaacttcacacctactcatgtgtttatatagtactgcacgatagaaggcgaagcgccaggatttttacaccaggcggaaacccgcttgcactcgctgtgctgtggaccgcatagaccaaacagtaactctgcaacgcgagaccgctacgctctgggaaattgaatctgttctcgactacgagctcacggaatgtgttttttggaccttcggctccccgaagcctaagagactattttcacggatcaagctcgttacgaacaacgatct

SEQ ID NO: 50695 - DNA, 406 bp, Zea mays
  unsure (1)..(406): unsure at all n locations
attctcatatattcatatatggtctaatagtaatatggtcaagccaattcacgattcctcatatcttattcactttggcttgaccaatcctcttaatcacttcaacctctattatgatcatatttatgcatagtgatttctcaggacttgtccatatattcaaaccaatatagagaccatattatatccatttgcattgtctcactggttatttcaccttgtgttgaaccttgttcactgatcattatacactattcaagtatgttcatcatactgaatttcctgttcaacacttagcaaacttgttagacctttaaatgtgttgttatccanatcaccaaaactcacaaaagggatgaatgcactttcactctagcgacgttgtatttgatgaaactaatggctc

SEQ ID NO: 50696 - DNA, 314 bp, Zea mays
  unsure (1)..(314): unsure at all n locations
acaccgcccgacacaggcttaacattataactaaaaacccaaagtctggtacgtgggagaggtacatcttttccgacgttgaacccatcatggccatgatggatcccccatcaagatatatttttgaaaacatctctttccacttgaagcatcaatctttgtttaaaacaaaacattggtttttctaaagaaggactaagcatcanaaaatcttttaataaaacaggaaatcaaggaatgcgcaaacagtccaaggaaggaaatgcagcaattggtttagtacacaactcctatcacctaatgcatcatataag

SEQ ID NO: 50697 - DNA, 355 bp, Zea mays
  unsure (1)..(355): unsure at all n locations
gacacactgaaccaactcttccataaacaccttattcatgaggggcatgaacaaggcaggagcattagttagtccaaaaggcaccactgtgaactcatactgaccataacaggttctaaaagctgtcttcgggatgtcttcttgacaaactctgagctgatgataacctgacctgagatcaatcttggagaagaacttggctcccttcagctgatcaaacagatcatcaatccggggtagagggtacttgttcttgatggtgactgcattcaggtctcggtagtccacacaaagtctcatacttccatccttctttntcacgaagagcactggggctccccagggtgaagccgca

SEQ ID NO: 50698 - DNA, 321 bp, Zea mays
  unsure (1)..(321): unsure at all n locations
ctatcattacattcactaaatttactttatattaaatcaattctccactatatccctcctagagaagagaaatagtttacaatatatatatacacacacacttttatatttactcttctttattcattttagagagaataactntgaaaataaaatctttattgaaagttattttaggcatttgtccctacaatatttcaataagggtgtaagattttacgcgtcgggggccatagatacaccatactcgaacctatctctatgaggctacccgcagactgtcttgnggcccaacatccagcataggaaaactagtatgat

SEQ ID NO: 50699 - DNA, 280 bp, Zea mays
cccccacttggaagacccggcgccgaacccttcgggcgtggaagcgccgcacagactgcggaaaccgcgcctgagtgtagaaaggccacgtcccgagccatctccagctgggccaaggaatcttcacggctggtctgagagccttggacggcggacgcctttggcctcggagaaccgtaatctaagtccgagggcaggacagcctcggtcccacagaccagaaagaacggcgacaatcccgaggcccgactcggagttgagctcaaactccagaccaccg

SEQ ID NO: 50700 - DNA, 388 bp, Zea mays
aagaattaaagaaagacagagctaaaaagcacctgcgccctcagaatagtgagcagtcgctgtctgcaattcagtatcccacagtaagcataatctatgtgcatgctttttttttctttatttctaaaaccaacaaattatatacatttaccagaatctgtagaggtgaaaagaaccctaaacaaattatatacatttctaaaaccaacaaattagtgaaaagaacataaagttcttctcctgtctgttgtctgctggttgctgaacatgaactatctaaacatgaactatcacagattacaaatgcccatcgctgctgactgctgtctgctgaacatgaactatctaaaatgaattactgaatatgaacaatctaaacatgaactat

SEQ ID NO: 50701 - DNA, 357 bp, Zea mays
  unsure (1)..(357): unsure at all n locations
actaatccctcccctaaaagtctgcctcagaggggtaagccccgggcatttcattgctaaatggcccttatcaaatgatagtgacaggggcgacgacaagaaagggagaagaaaggagaaaaagaaatactacaagaagaagggcggcgatgcccatgtttgtcgggagtgggactccgacgaaagctcaagcgactcctccgacgacgaggacgctgccaacatcgccgtcaccaagggacttctcttccccaacgtcggccacaagtgcctcatggcaaaggacggcaaaagaaagaggtaaaatcaagacctccactanatatgaaacctctagtgatgaacatgctagtgatg

SEQ ID NO: 50702 - DNA, 385 bp, Zea mays
ctgaatgttaaattccctttgaaagcatttctcctagagtactcctatatattttcgcaaactaaacttagctgagctgattagatttttcctttctttaaaaaaaaaacctgacgcggatgctgactatccagcggatccattggtccaatcttgtcgttcgtacctaagtgtacgacgtatgacggtcatgcaattaaactattggtgagcgctgtttggagccgcactgcaagttgctgcacatcaacacatgccttgctgggagtggccggtgcggtcggcaccaaatcagtgtcatctagctacccaccatctcaattggtccgccccaaaagaaataacaaaaatcataacatgtggtcgctctgcgaggcgaggcgag

SEQ ID NO: 50703 - DNA, 239 bp, Zea mays
cccggggaggctttataggcgcgggcgggcaccaccgatggcgtgggcgcccggcggacttgaccggacgccggggcgagcgcgcgcgtgggttgggcgagctctggcgtgccgaccagggtcgaacacgtgtgcccgtgcgttctgcccaagctctggcacgtgtggtcgctcatccgagcctgctcttgccttggccagtgcacgaaacctcttctcctccctacaagctaccattc

SEQ ID NO: 50704 - DNA, 381 bp, Zea mays
tgcttgttctacagtaggcgcaacatgtgtatacacaaaccaaaattggcaacaattaagaagaagacccagtaacaaaccttctccatataggctttagcttggctactgctaacttatatccacccttggcccagctaagggtgaaagaccgtctagccacattaaacgcgtcctcgaatggtttcttcatatcatctactgataaggcaaagtttggtcttctaaatgtcttaatttgtgagcacccggctttcttgagaaccaaagttgcgtctcgagacccaatcatagcacaatagttactcgggtggccaatacttcgtcaaaggcatccgattctattcaatccagtctagagcttcagccacatctctagta

SEQ ID NO: 50705 - DNA, 256 bp, Zea mays
ccaaagggcctaggatctggtggggcttcatgtggaagctcccagccttccctgtttgcgggtgcaccggactgttcggtggagcatcggacagtgaacagtaacgaatctgattgatagtttccttctctggaagagctagccgttggtgcaccgaacaggttactattcattggcctatgcaccggacagagtaactattcactatcctgtgcaccggacaggtaatattcactggcctatgcaccagccaaca

SEQ ID NO: 50706 - DNA, 331 bp, Zea mays
  unsure (1)..(331): unsure at all n locations
ccataaactcaagaccactgacagggcactcgagttactccacatggacctattcggccccgatcgcttacataagcatcggcgggagtaagtactggctaggtattgtggatgattattctcgcttcacttgggtgttctttntgcaggaaaaatcacaaacccaagagaccttanagggattcttgagacaagctcaaaatgagttcggcttaaggataaaaaagattagaagcgacaacgggacggagttcaagaactcacaaatagaaggctntcttgaggatgagggcatcaagcatgagttctcttctccctacacaccacaaca

SEQ ID NO: 50707 - DNA, 257 bp, Zea mays
aaaccctcaacttcataccccaaaaaaatgaccttcatacgctgggcataaacattgatggaggaggcgccctgagtcatcgagtggaactcgcggcttaagaagatggcgcgtggagccttgttggcctcgatgaagcgcttgatggcgacccacagctcacgcgcagtctggttgggagccgcggcgaggcccatgacgtcgggcccagccgagccgagaagccagctgcggacgcaggcatcggcgatgcccca

SEQ ID NO: 50708 - DNA, 327 bp, Zea mays
cctaactgacaccagtaataccaaccttgagaagttgtacaaacttagcttaaatgacaaggatccgaagacatgcaatccgctaaaaccctaattatggacttacaaaccataagcagttccactctcacgcgaaactaccttattacttgtcatgacccatgaatctatttggggttggtgaactgttcatgcaagccatgctttgctcctactctgccaagagcatagtagggctctgattgggtgttggctcaaggctagagctgctgcaagcagaagccccgccatactcgattcagcttgctctatgatcttaaacatgac

SEQ ID NO: 50709 - DNA, 438 bp, Zea mays
  unsure (1)..(438): unsure at all n locations
atgcaagcttctaaagggagaacacgtgataggttttactaacgtgcaattcgaanaagatagaccttgtgcagctggtcaagcaggtaaacaagtgggaggagcacatcacagcaagaatgtgatgaccacttcaagacctctggagctgctgcatatggacctcttcggacccgtcgcctatctgagcataggaggaagtaagtatggtctagttattattgatgacttttcccgcttcacttgggtgttctttntgcaggataagtctgaaacccaagggaccctcaagcacttcctcaggagagctcaaaatgagtttgagctcaaggtgaagaagataaggagcgacaacgggtccgaattcaagaatcttcaagtggaggagtttcttgaggaggaggggatcaagcacgagttctncgctccctacacacc

SEQ ID NO: 50710 - DNA, 277 bp, Zea mays
  unsure (1)..(277): unsure at all n locations
tacattgagcccaacatgctgccactactgaattatatccaactcgtgtcctagaccacaatggttcttctaggtacaaatccaattctatccgaacgtatgtggttgtcacagttggttgtttcgacacataatcatcgaaagtatcaatctgatcttcatctactgtcatagaaggagcactagatgtcctagtttgagcaccatctgttgtggcacttacctccatgctatcttgatattccaagactaagttgtcgattntggctntctttta

SEQ ID NO: 50711 - DNA, 343 bp, Zea mays
  unsure (1)..(343): unsure at all n locations
gctatattttatattctgctggttatcccgaacataagatatggataattcattctangaagtctcactctggctcttatcatgcttttatgtataagagtgaggcatctatttctaagcaatccactcatgttaaattgcctaaaaagaaaactcctactgcatcaaatgagcctattatttcatttaagacttttgatgcttcatatgttttaactaacaaatcaagcaaagtagttgccagatatgttggggccaaacacaatggctcaaaggcttgtgtttgggtacacaacgtgcttgtttctaatgtgaaaggacccaagatcgtttggatacctaa

SEQ ID NO: 50712 - DNA, 300 bp, Zea mays
gaccgggtccgccaacccctgatacaaatatgccgggtaagccctgtctttcagtggctgaatgttcttgaaaacaaaatcagtgaccacagcttcggcagtcagacctctctctttcagtaatccgacttcagtaagcagcacgcctgcctcggccacttcttgatctgtgggagactcagtccaactcagagtgcgaacgtctggctgtcttcccgaccgggaggggagagaatttccataattatcaactataaaccactccagacgccaccctttaatgctatctttgaggggaat

SEQ ID NO: 50713 - DNA, 438 bp, Zea mays
  unsure (1)..(438): unsure at all n locations
gcttcaaacggtgacatcttcaaactggccttgattctattattataggagaactctgcatacgacaaactcttatcccatcttccaccatgtttaagagcacaagctcttaacatatcctctagcacttggttggtcctctcagtctgcccatcagtctgtggatggtaagctgaactaaaattcaatcttgtatccaaagactcgtgcaacttcttccaataccgggaggtaaactgtgatcctcgatctgacacaatcttctttggcacaccgtgcaagcagacaatccgtgccatgtacaactctgccaacttgggtcctgaatacgtggtctttactggaataaagtgggccactttagttagcctgtccacaatcacccatatcgaatcatacctagcagatgtgcggngtaatccaacaatgaagtccatg

SEQ ID NO: 50714 - DNA, 260 bp, Zea mays
  unsure (1)..(260): unsure at all n locations
agtctatcatggggattaactttttctccgcgataaaatcttgaactgggaaataagggggtaagtatgtgggttttcaaatggccgggaggcaacgtcgtggccagaatgagcacgttcctncaccgtcaaccggctccactctggaggagctcatggctcagcagaatgagatcttgagacagctggctcagcgtcagccaccacctcaacactatggtggtggagaccattcaacgcaccctgccgcggctacatac

SEQ ID NO: 50715 - DNA, 291 bp, Zea mays
  unsure (1)..(291): unsure at all n locations
aaccgcttgcggacagcttttgccgagttcatgaactgcactatcagacaaaggctaaaaaggatggattacatgacaactttggttgctataattttgcttatcggaaaactacaaagtatcctgtgatcagctaccgaagcaaatgggcagcagggtggaaatcggaatggttctatgttaaggttgatgatgataaagaaaagcttgtgcaaagcccactggaactgaccttcggagaaacccgcccncagtgccacatgctaccagagggtccaactcanaaagcaa

SEQ ID NO: 50716 - DNA, 314 bp, Zea mays
ctctaatacccccttaaaagctactgaatcatcacttcttctaaagacagtaacacctatatccataaaaaaacagttgtagcccattttacttaattgagaaatagaaagcaagttgtaatctaaagaatctacaagaaaaacattggaaatagagtggtcaggtgatatagcaattttaccaagtcctttgacccaaacctgatttccatccccgaatgtgatagctctttggggatcttcgtttttctcgtaagaggagaacatccttttctcccctgtcatgtggttggtgcatccgctatctgtcggcg

SEQ ID NO: 50717 - DNA, 186 bp, Zea mays
ttttacgtaaccgaaggagaaaaataaggaagtggcgttgactcggtttgtggcgtgatcaaacggaatatggtggcggcgcgctagggtttgaatggtggaagaacacaatgcaaccagcaacaaatgacgtgaaagcacacaaattcaacaatgcagattattgaaagaaagtgcgaggctcaa

SEQ ID NO: 50718 - DNA, 393 bp, Zea mays
  unsure (1)..(393): unsure at all n locations
gcatgcaagcttgcagcaagaaaggagccatattgttttctaccattttattaaggcggatctagtgtactgagagacttctgaattttctaacacttggctttatttccagtatgctcgtattattcagaaactgggtttccagctaaattcaaggtagctattttcatactcgtgtacagatctgagctttgaacaatttgtacatcagtcactaagttgctgttctatgccaggactttgagattcacaatattggaggctcttgtgatgtaaagattccaattaagcttgagggccttgcctattctcatggagccttctcaaggtatgtccaatgattgcttatantggcatcacaattttttttacctgtttttattgctcccttct

SEQ ID NO: 50719 - DNA, 380 bp, Zea mays
  unsure (1)..(380): unsure at all n locations
gcctggtcattttattgctaactgtcccttctatgatagngatcaggatcaagggaacaagagggagaagaagaagaactatataaaggcgaagggcgaggcacatcttggcaaggagtggaattcggattgctcctcgtccgacttcgacaatgaaagactcgccgccaccggcttcaacaagtcattccttttttccaacgaacgtcacacatgccttatggcaanggagaagaaggtatgtactcgaaactctacttatgattcttcaagtgaggacgaatctagtgacgaggatgaaatagattattcatgtttatttaagggcctagatagaaccaaggtagataaaaataatgatttgatgatgccttgaatga

SEQ ID NO: 50720 - DNA, 261 bp, Zea mays
gcataaggatctatatacataggacgaagaggcttatacgattaagtcaagagacgtacattgaaaagggtgtgaaacggttcaacatggaacacgccaagaaaggggtcttacctatgtcacatggtatacaccctaaccagatgcaacgacccgcgacggctaatgagcgggagcgcatgagtaaggtaccatacgcctcagcaattggatcaaacatgtatgccatgacaagtacacgcccagatggttcatacgcta

SEQ ID NO: 50721 - DNA, 195 bp, Zea mays
gggtgaactttctgcaggaaaaatcacaaacccaagagaccttaaagggattcttgagacgggctcaaaatgagctcggctcaaggatacaaaagattaaaagcgacaatgggacggagttcaagaactctcaaatagaaggctctcttgaggacgagggcatcaaacatgagttctcttctccctacacaccac

SEQ ID NO: 50722 - DNA, 408 bp, Zea mays
agcttgtgacgctgacacccgggccccacttgtcatcttcctcgaccacgcccgcatgcttgaacagactcgcgagaactgcgcgctgttacaaccgatcgcgccagccggctttcctgggtcacctgctacctcgcgatcggactcactactggcaatgagatccgcggaaaccgcgcgcgcggttggcctgggatcgatccggccgactcaacctcgtctctgggctataaaaggggacccttggatccttctcgcccaacaaactaagaaccgagccctagtgtcatcaccgtggggaaggaagctgacgaccgccgctgttgtcccacgttctcgtctcggtgccgacctggggagctacaggtgggcaaggatgtatgtcagcgcccagagaactcgtaccat

SEQ ID NO: 50723 - DNA, 374 bp, Zea mays
ctgcaactggaatgatttacaatgttaatttttttgatggaagaggtagggtctctgctatgcatccaagtaagctcattttctgctaatccttggtggcactggaatttgctcggcatgttgatacttggctgctagaagaaaaggaacgactggtaaattcaatctgtcttaaatataatctgatggtcactaatgcgtgggagactctgatgctaggcacgtactgaattgtgtctttgattgctaaaagattacctatttctttgctgaagtgatcatttgaaaaatattggaagctctaatccagatttgtaaaacattaacaactattgtagaacctaatcacttatatgacgcatgacaataatgaa

SEQ ID NO: 50724 - DNA, 407 bp, Zea mays
  unsure (1)..(407): unsure at all n locations
agcttgcttatatcacattaactaatcatatttgattgagagtgttagaatagaatgtgcttgtatatcaagttacggccatatcaaatctggggtccacatgattgttctataggccctgtttgccacagcttgtgcttgttggaaaagcagcttatctaagaagctggtgaanagcagcttctgattattgtctgtttttagttcattctaagaaacagttgaactgataagctactgcagaagtgtcatgtttggtacagcttcttcctaaatctgtgaagatgtgaaataagctggaccaaacagggccataatagagaaagaccttanacaactataattaanagatacaataggatcaggttntgatctgtcccagagatagcagagttagaataggagtc

SEQ ID NO: 50725 - DNA, 393 bp, Zea mays
  unsure (1)..(393): unsure at all n locations
ctatacaggcatataatactatgtcgtttaaaaaaatatttcatgctataatgaatacaggtcaaccggggaaccagtgctatgcaacactatagtgcaatacgaccaatggttattgatgtggatatcatgaacactgatattcaagttgttctgggtgatgaggggttgcaagctgattgcgacagtattgcagatggtctctctacattgtataaggaaattgcaggtatttatgagctgcactctttgcaattnttggttctaaactatactttgatgagttctcaatttggcactctgatatatcatacttgtcttcagatactgtgaggaaagaggcagctacaataacggctgtctttccttctccgaatgaagtcatggcaattc

SEQ ID NO: 50726 - DNA, 329 bp, Zea mays
ccagcagcgtgcaaaaatcataacctctcaaactatcacgcctatggttatgaaattttaacacaagcaagatcagaaaagcatctacaactttcttataacgaccatgaacagattgcaacattaaattgaacaaacaatacagtttctgaaatctgtacagaatttggacagattcagtcactgaatttgaaaaatcataactcctaaacgatcagacttatgcctgtcaaattttaacaccagcaagacaataaagttatctaccacttttctatagcacatatctacagaaaatacaatttagttcatcaaacatacagcacaac

SEQ ID NO: 50727 - DNA, 205 bp, Zea mays
ccggggatacccacacaccagcgatagtaattacaaagatccaaatccaacaaagttcatcatgacaaacataaaggcacaggataagcaaactaccctgtctaactaagaagaagactgatgctaagactatagcttctatggatatatttcaatattaattacaagatctgacgctgacaatctatggttctaaatttatctt

SEQ ID NO: 50728 - DNA, 345 bp, Zea mays
  unsure (1)..(345): unsure at all n locations
gccaccgaacaaaggagatatgggaaggcccaggccgcgaagaaggaaggagtgctaactaccgactcgcgggtatcttcggatgggacagtactcccgtggcaagcccgccaagaacagagttcccgcggaggaagaaccccgaaggagacaaggcggagaagctcagcttcagatattacagacatatggctacccgcgaaaggtaactgactggaggggtccatggcagggatcactgcancagacgagctcgcagacttcctcttgggcgccatcttgcttctcgctggcgaaacagagtacgaggcgagtggcagagaagattcagacgcagaaatgcaa

SEQ ID NO: 50729 - DNA, 423 bp, Zea mays
  unsure (1)..(423): unsure at all n locations
ataaataggcgaaaannaaaaaaaagcagggagattttttaatccctcaccgcgaagaacaccttacggaaagagggccgcctgaggggatccaccaatcacacgtgccacaaattcaaaagcaaactaaaaaaacacatactttttaactttttaagcagtcatagaagctagattttgaaaagcaaaggctcaaacaaagtcctatgtgatccaccattaattgtctttgttccacaacttaacgaagacaataaaacttgtgagactattactataattgggcaactttggtcttctttttttcctgataatgcgagttgaccagctttggacctttttctttcttgggcattaatttggtctgtttcggtcttaatctcactatttaggtcctgtttgcgatagctccagctccagaaa

SEQ ID NO: 50730 - DNA, 140 bp, Zea mays
aagcgcttcaagaggacgcccgaagcaccccttctgataatgtcttccaacgagagcggatgagccgactactggcatacgctcggctgcattatgcacccggacctcttcaactttatgaccagtgaaggcctctccag

SEQ ID NO: 50731 - DNA, 433 bp, Zea mays
  unsure (1)..(433): unsure at all n locations
catgcaagcttctacaccacgaggtcgtatattcttgttgaagtcgagcaaggcatcttctccttaaatgactttgtatcttgcttccaagcacattccttnttgaccctacaacttgttgctcattcaaacattcgctttcttttgagcgacaggggttagcacattgcgatatattatccaaatgtgcacttgggcaagaatgaggttcacatgaatttaagtttgtaattacaacctcatgagcaacatcaagcatgatatggtcatcaactagtttactatgagaatacgacaacatatcatacttttcacctagagcacagttttctaaacttatcatttgtacttgactcctaagcatagaattttcagttttaagtngagcaacattagataaaacatcatcattatttctttgctcaagtaaact

SEQ ID NO: 50732 - DNA, 264 bp, Zea mays
aaaaaagagacaaggagtattaccatacagagaggcaagatcttggaccgagaccacaacataggcattgaccccaccactaaccgtgcccctcacacgtggcccgcctctgccactacaccacccagccccctttgagcgcgctacgcacccacctccttaagcgcactacgcacccaacccctttgacgcacccacgcatcgtgagcacagccccttcccttgccactgtgctcggtacctgctcatatacactcacacccc

SEQ ID NO: 50733 - DNA, 341 bp, Zea mays
gcgcgcgcagacaccgatggctttagggatctaacctacgcggagacaaaggtcttgtgtacttagatgctactgcatcgtttcggaaccacaacaacttatacacgttagagttatacattgtcggacataagttatttctgactgctgaaataaacgtatttctgacggtagctgtatgacataatctatgcccgacggtcgtcaggggccatcgctatttaaatccgctgacggccggaatggcgcacagtgggcccgatgcctgcatgcgggccgtcggacataaatttgtattatgtccgacgacccactgatagttgtcgacctataacacttat

SEQ ID NO: 50734 - DNA, 388 bp, Zea mays
tgagaaagacagacctcgcgtagcatgtcaagcacggaacacgtgggaagcactcatcacagcaagaatgtgacgataacatcaagaccactggaacttcttcacatggatctcttcgatcccatggcctatctcagcatccggggaagtaagtatggtcttgttatagttgatgatttttcccgcttcacttgggttttctttttgcaggacaaatccaaaacccaagggaccgtaaagcgcttcttaaggagagctcaaaatgagtttgagcttaaggtgaagaagataagaagcgacaatgggtccgagttcaaaaatctacaagttgaagagtttcttgaggagcaaggcatcaagcacgagttctccgctccctacgcaccac

SEQ ID NO: 50735 - DNA, 278 bp, Zea mays
cgaatcacccacttcttccaaagacagcgacaccaatatcaatgaatagataggtgtagcccattttgcataattgagatacagaaagcaaattggaatctaatgaatctacaagaaaaacattggaaatagaatggtcaggtgatatagcaattttacccaatcctttgaccaaaccgtgatttccatccccgaatgtgaatagctcgtggggatcttggcttttctcgtaggaggagaacatcttcttctccccagtcatgtggtttgcgcacccg

SEQ ID NO: 50736 - DNA, 342 bp, Zea mays
ctcatgctatgaacaacattattacgcgaggctatacatcaatacctttgctaaggtgcatgtaacttcattggctagtagctgctaaacgcctctaatgctttggagaaagtctgctgttgccttactaatagctaccgaggtcatttgaggtgcgctttccatggggtactaatacgacctcaaatttttaatagtgggatccttccatctagaccttagtaaccaagttcccggatcaatgggatcgggaaacaggaacgtagtacacggtacgctactaaaactatgttttaacactacgggaacgagattgtcccacgttcctggaacggaataaca

SEQ ID NO: 50737 - DNA, 369 bp, Zea mays
ctcacagctgacgagaagacgccccccgacgaaaaaaaaggcgagaggaccgatttaccaccggaggcaggctgggcgctaaacacaaccgagtgcagggcgacacgggacactcctttccgccttcgatacggagcggaggcaaggaccccgcaagaattaaagcatgggtccccgcgtacagtgccgtcagccatccccgacgtggacgagccaacttcaaaagatctcattgacggagaccgggacttcgccctacaggccctaaacaaataccaagcccagaccaaagcctggcgcgaccacgcagtcatcccgagagagttcagcgagggggaacctcgactcgtccgaacagctcggacggag

SEQ ID NO: 50738 - DNA, 265 bp, Zea mays
  unsure (1)..(265): unsure at all n locations
tcatcctccttatccttttcttcatgtgctcccccttggtctatgccttcatcttgaggtacctgttcctcatcatgagttgagggatgcaccagtgttgaggaagatggttgatcttgatcttnttgttcctgcggtcacacatcacctatcgccattgttcgcattgcgaccgttggaacctcatcctcatctacatcatcaagatcaacttgatctcttggagagccattagtctcatcaaatacaacgtcgctagagactt

SEQ ID NO: 50739 - DNA, 224 bp, Zea mays
cgacgaaggcgaacttaaggttcccctgagcggggggcaggggcccgacaatgtccacgccccagcgctggagaggccatgtatgggcgatcagctttgtataatgcgaggggctgcctgaccgaggagaaaacttctggcaggcttcgcaggaccttgagacccgatttgcggcgcagatcattgcgggccagaaaaaccctggcggatcaccttggcagcta

SEQ ID NO: 50740 - DNA, 252 bp, Zea mays
gcccatcgcgttcttaacttctgctaaggccgtggaattcatacaagacataatattcagggttcgggataccaaacagcatcatcactgacttaggagccaacttcaccagttcagaattctttgacttctgcgagcaaaagagcattcagatcaagtacgcatctggagcacatccaagagccaacgggcatgttgagcgagccaacggaatgatattggaggcactcatgaaaaaggtcttcgataaga

SEQ ID NO: 50741 - DNA, 320 bp, Zea mays
tacacaggagacctaaaaggctgaaaaatacccaatgatttagccctgaataagggtgtatggaaaacaactatccacgtgcctgaacctacttgtggcttctgttaggtttcaactctagcataccagttgaaaaaaattaagacaaaaggaagagaagaaaatttagtagtcttggcccggggcatgagagaatactagatctgcccctgattgacactgtttggatcttctgttacttaatgatgttctatcttctgaaacattgtttcaggtgatgtagagctcacaaacatgcaactgaagccagaagctctcaa

SEQ ID NO: 50742 - DNA, 304 bp, Zea mays
caccgaccgcgccgagcgacgcgataggctcggaggtctcttctcaaacttccagcatttcgacagagcttttgtgtttcaaggcctgtctgatctttgatcattccagactgaagagaactacgtgcaacacagatgcaaagggatcactgcctattttggaagacggtgagatcactaagcctgttgggggccttcggcttccgaaggtcctcaaaaacatgatttaacagtgtttctagagtataatgtgtgaacaggtatcttcggactcgtatcagagagggagaagctcaaaagatac

SEQ ID NO: 50743 - DNA, 290 bp, Zea mays
  unsure (1)..(290): unsure at all n locations
gactctacaccctcaaagctcttcccaccttgagagaatgggaaatgccgaagctacagggggaaaagaaagaaggtgaactcgtacgtttaccttactatttcaagtttaaaaagtactttaaagcaccttgccaagagtggctagatacgattgaagcaatgtgtaatgaaatacttggcaattattccaaaaaagaagatcaattgatgaccgcagccttcggcactcgtccgaaacgaaggctaaatcgagtgttggacgccttgngtttcgaatacccagactac

SEQ ID NO: 50744 - DNA, 271 bp, Zea mays
attcattcagcccgattgcttacttaagcatcggcgggagtaagtattgtcttggaattgtggatgattattctcgcttcacttgggtattctttttacaggaaaaatctcaaacccaagagaccttaaagggattcttgagacgagctcaaaatgagttcggcttaaggatcaagaagattagaagcgacaacgggacggagttcaagaactctcaaatcgaaggcttccttgaggaggagggcatcaagcatgagttctcttctcccta

SEQ ID NO: 50745 - DNA, 338 bp, Zea mays
acagctggagggggccggaaagctttgcagaaccgcccatgaaggattgaagcacgagacccacagattcttcacacaagcgggaggaacatctaccgaaggaaacgacaagaaggaactcatggtggtcaaatttgcccgggagagggttaatcgaacgattaaacttgcgaaaaatccaatcttcaaaatgaaggccgacagaaaaatccaacaaaagactccccattactccaaagcacacggagagacggagcgcaagagaggagagacaaaagcaggcgattagaccgcggcggcggcgacatcatcgcaggaagcagaggtgagggcgcgga

SEQ ID NO: 50746 - DNA, 389 bp, Zea mays
tttttttttttcccccaccaccatgaccgtgtctcttattacctccccaccttctttattcctcttcttatctataactctcttaccacttttctatacttatccaaattcttgactaatttccacatattctaccgtgcagccactggtcagtccagaatttggtatcaacaccatttccaacctttgtttccaccgccacatgaaagagagcttgggccttatagggaacccgaatgggcggcccttcccaaggtcgagaagaatctgttttttgcagccaaagccatcagatgcgtaagggcccatcccatttttcaaggttgagaatccccagaccaccatactggaacagcctttgaaccttctcccgagacacaaggcaattg

SEQ ID NO: 50747 - DNA, 296 bp, Zea mays
gctactttcatattggaccctcttcggacccgtcgcctatctaagcataggaggaagtaagtatggtcttgttatagttgatgatttttcccgcttcacttcgggtattcttttgcaggataaatctgaaacccaagggaccctcaagcgcttcctaaggagagcccaaaacgagtttgagctcaaagtgaagaagataaggagcgacaatgggtccgagttcaagaaccttcaagtagaggagtaccttgaggaggaaggaatcaagcacgagttctccgctccctacacaccac

SEQ ID NO: 50748 - DNA, 285 bp, Zea mays
  unsure (1)..(285): unsure at all n locations
acaaaattcccgataacttcctcggcggtcattttagtatatctaagattaccacgaattaattgaacttgagtagggttaaggaaaataagtgatcttagaataaccttaaccacctcgtgatcatcccattttacgctcccgaggttgcgcgctnggttcaccaaagtcttgagccgaatggacatgtgttgtggctcctcccctttgcgaagccggaaccgaccgagctccccctcaattgtttcccgctgggtgatcttggtgagctcatcaccttcatgc

SEQ ID NO: 50749 - DNA, 134 bp, Zea mays
  unsure (1)..(134): unsure at all n locations
caacctcctccatcaattataatacgacaagatcgttccaaaactacacatttagtttggaacacaatgtgtcgctagttntgttcagctttaataatttgggcactcaagacacgtcttacaacgaggctctc

SEQ ID NO: 50750 - DNA, 282 bp, Zea mays
aatgaaacacacacttcttctcaagacagtgacacctacatcagtgaatagacacgcgtagcccattttgcataattgagatatagaaagcaagttgtaatctaaagaatcaacaagaaaaacattggaaatggaatggtcaggagatagtagcaatttacccaaacctttgaccaacccttgatttccatccccgaatgtgatcgctctttgaggatcttggtttttctcatatgacgagaacatccttttctcccctggcatgtggtttgtgcacccgct

SEQ ID NO: 50751 - DNA, 230 bp, Zea mays
gacccaaaatactggccctccacccgtcttcgtagctgccgctcttgagtcttggtatgtaactaaagcttaccgtgtccccaatttgtatgttactacactgtgtcatcaggaaagtcactagttccgcggttgtgcgtggactgagctctagagctgtgttcaggttaaattatgaatttccagtggatcgccaggggtggaattaagcatagaccgacttacggcat

SEQ ID NO: 50752 - DNA, 196 bp, Zea mays
aagccaagtgggttcacccttgacttccgtacgagcgtacctcaccttgctcctctctctgtatcaacaacccacctgctgtaccacttgcatgtgttttattttctgcagatcctcttggagttcaaggaagaaaaattttaggacaaggaaaatatggatgccgcgaggtgatttttactggccgttttcccac

SEQ ID NO: 50753 - DNA, 313 bp, Zea mays
  unsure (1)..(313): unsure at all n locations
aattcctataagtctcatacccgatagagatcactccttaactttgagttcgaatcctagtaagagcgaatttcaagttgagattaaaaaagatcactcgttagttctctggtcgtgtgcacacgagatggactaacttatggggacggatcctcgtgtaggggctaggagggctcaaagcacgagtaaagatctgacatatagggggcggacccttatattgcacgagggaccagctttcgtgacctttatcggtcggggctccgattgagctntttcttcatttaataccgtggggacggtctttccccta

SEQ ID NO: 50754 - DNA, 417 bp, Zea mays
gaacccaatatcggaggggagttttttttttcttctctctaccctggggggggtgtttctagttgtgtgcctcggacacgcactcaccgcctgtcgatataatgtctcttgtacaatcagtaggacgtatgctgtcgtatcttaagctgcatggggggcgcctcagctaattgaaaatttctatacaagatgtggtcgatactcttaataatagaataatctaaaaaacctttgatgtgatcagatttgtgtcgacacgagttatagtagcctttgagcgaaatggttaggattgagatttatattaacatgttttaaagttttattaggtaggaccttacagtgcgttgaacaactgcaagtctgtaccttcaatgtaccttcaacatttgaattccttcttataagtccagtcca

SEQ ID NO: 50755 - DNA, 375 bp, Zea mays
  unsure (1)..(375): unsure at all n locations
agcttctaaagggagaacacattntaggtttaacaattgttcattttgagaaagacaggatttgtagcgcatgccaagcagggaagcaagttggcactcatcatccgcataagaacattatgacgaccgacaggccactggagctcctacacatggatctattcggcccgatcgcttacataagcatcggcgggagtaagtactgtctagttattgtggatgattattctcgcttcacttgggtattctttttacaggaaaaatctcaaacccaagagaccttaaagggattcttgagacgagctcaaaatgagtttgacttaaggatcaagaaaataagaagcgacaacgggacggagttcaagaattctcaaa

SEQ ID NO: 50756 - DNA, 256 bp, Zea mays
  unsure (1)..(256): unsure at all n locations
aggaccttaaaactcgctagttactataggaaataatctatgttaccctatctagtgctcagatgacgacattntaactcgaccgcaggggtaagacaaccccgaatatgtattaagaagaactcacacggntcagaaaacccctgaaccccctgccccacccatacacagcggcattgaagcccatgtgagagcgaccggggcccaagctctaaaactgtgctttggtgtgggaaccaagcagggaattttttaa

SEQ ID NO: 50757 - DNA, 423 bp, Zea mays
  unsure (1)..(423): unsure at all n locations
agctngaggaaggaganaccgcagcaagggtctaactctactagaaagaagttcctaaggcaataagtgaagcaatcaacatgaaacaagaaaaggtaaagattcaattagccatgttgtttgcactgatcatctctctatgtcatccaagagcaaaaagggaagaggaaaaaggaggtgcttcaagtgcaaggaattagaccacttcattgcgtcttgtccatacaaagacaaggatgaaggaatgaggagatgttttggatgcaacgataaggaccatatgatcacttcatgtccgctcatgaagaatcaaagacgtgcacccttcaagatgaccctcactaagaaaaaagacaaatagcaagtgtcatgtcaggttgagcgacgcttctgctacatgtgtggtgagcatggtcatctatc

SEQ ID NO: 50758 - DNA, 411 bp, Zea mays
  unsure (1)..(411): unsure at all n locations
agctngcgaacgagttgttggcgatcacggaaaatgctgatcgctggaaggtgatgtacagggtgtggatgggcatgctctgctactccgccagcatgtgcaggggatacctgcacgccaagagcctgngtgaaggcggagagttcctttccttcgtctggcttgtgctctcgctcaagggggccaagactttggccgacaagcttcagatgccacccgagacgacgaagccgcacactctcgatcggtgacctgattattcggctgcctgtacgtgtggtgtggttcgttcattgtattcttacctgccttctgtgtgctaatcaggtgtgctgcgacctgcgagaagctgttttttttcttctcttttgtcgtgcgccagcggagaattttcgtggcttaataagctga

SEQ ID NO: 50759 - DNA, 410 bp, Zea mays
agcttatgaaaattcttcatcccaacatgggctattcggcggtgccagagccaacccatgttagtcttagcaattaagcatgtgccaagttcagctctatcaaaatctactaagtatagctgaccctctaacacacccttaaatgctattgaatcatcacttcttctaaagacagtgacacctatatcagtaaagagacagttgtagcccatttgacataattgagaaaaggaaagcaaattgtaatctaatgaatctacaagaaaaacattggaaatagaatggtcatgtgatatagcaattttacccaatcctttgaccaaaccttgatttccatccccgaatgtgatagctcgttggggatctgggtttttctcgtaggaggagaacatccttttctcccctgtcat

SEQ ID NO: 50760 - DNA, 331 bp, Zea mays
tagtgacctataatactcagctggccacatagctctttgaataccttagatcatatctcttttatatgctatgactaatgtgttttcaagtttatttcacaccaagtcataggtatagtgaaagggaattggagtcttcggcgaagaacaaggcttccactccgtaactcatacttcgccaccactccgagcaactctctcttctttgggggagaaatgagcatcaaggaaaaggacttcatccttgggggagagagtaaaagctcaaacgcacaaggacttcgtctttggtataatattaattcattatttatgaccaaggggaagatgc

SEQ ID NO: 50761 - DNA, 371 bp, Zea mays
  unsure (1)..(371): unsure at all n locations
ttaatttctatagactagagagatatatacttcatgtgattgtaacatttggactctatatggccaaacactactcacattgttgaatatccttcacttaatcatatatggagcttatgaggctgtcatatctggatataatatgggtcagatatatgggtccagcttggaccgtatggcccaactaatgcatgacgtgttttatggntaggcgagaccatcgtttctacactctgagctggcacggtaccacccaaacgttttctaagtcttctcggttcgagtccatttgacccgaagcacgatagacctagtccgaggccgcccgacccggcccaagccctgtcgacactcatcgtcttcactgtcac

SEQ ID NO: 50762 - DNA, 147 bp, Zea mays
  unsure (1)..(147): unsure at all n locations
cccccccctccgtcaatacacccaaacacccnnccccccccagcgcccttgtaactcgccaggcccaaaaccaactggccataaacgaatcgagagggaacctattatgccagagagacattaccagaccgcaggagcacacacccc

SEQ ID NO: 50763 - DNA, 444 bp, Zea mays
  unsure (1)..(444): unsure at all n locations
ttaagtcacctgcggcatgcaagcttaagagactctnttcacggatcaagctcttttctaanaacganctaacaccgcgaaaggggctactgttgggtctatgcttcgtcgccgaaggtcttcaaggaagaagcggctttcggctgaagctgcttgtgagaacaagtgccgaagctttctcttcatgaagcttcggtattacaaaccgacttaaagatagaatgacctcttagtccataaaggtctgagtcaatgttgtaaacttttatgaggggcataattgtaattcctcacaagctgtgtcctgtgcctataaatagtgaacaatattcctttactgttcacggattctgataattgcaatcgcatctttcgggaaccaacctttgccaaggcagaggtattattggattcaatgatttaatgtatcaagtaaatataata

SEQ ID NO: 50764 - DNA, 436 bp, Zea mays
  unsure (1)..(436): unsure at all n locations
agcttgcacttacgaccaaaccgcactcgtattcttatcacattcaatggctcaacaatagtggtaaggtcaaggtaaccaagctggtacgaattaattttgctattggttcatatcgcgatgttgttgactgtgatgttgtgcctatggatgcttgtaatattctgctaggtagaccatggcaatttgattcagattgtatgcatcatggtagatcaaatcaatattctctcatacaccatgataagaaaattattttgcttcccatgtcccctgaggctattgtgcgtgatgatgttgctaaagctatcaaagctaatactgagaacaacaagaatattaaagctgctggtaataacaaagatgggaataaaatgaaaggacattgcttgcttgcaacananactgatgttaatgaaatatttgcttccactac

SEQ ID NO: 50765 - DNA, 440 bp, Zea mays
agctaccctttaaccgcgaaacgcgatacttcttttattggtgagactttcaagtggacataggctccttccaggatatataagggccttcgctgcgtgtctgcataactcttctgacgagcttgtgccttcttcattgttggggcgaatgcaaagacgccacccttcgctcgaggccttcgctgcagtcgctggtccgacagagacaaagcgggcaaggacacccttcgcaagactcggcacgttgactaaggcctgcggcgacgtgctaccacggcgcgttctcgttcagtcccaaggcccacctgcgatctggcccattgtaacgggccccgcgtggacgactctgtattactggcctgacttgaaaggagcacttgtaatactgtctgcaccctgcttatgggaatatttgggataaatagtgctgaggccatgct

SEQ ID NO: 50766 - DNA, 57 bp, Zea mays
gaagcctagggactagcttactccaactcggtggatggccccaagaatacctcagca

SEQ ID NO: 50767 - DNA, 465 bp, Zea mays
  unsure (1)..(465): unsure at all n locations
agcttggagaagaatatgtggagattccagttcaggtgttgttggtccccccctagctctaccccttctgcttcatcttcatctgctatttgtgagctctcagcctacttagacagtgacaatgtcacttcttatgaggatgattttgatatacttctctggtggcgtgaccacaagctaacatatccagttttatccataatggctagggatattatgtctgttcctgtatttactgtctcttcggagtcttgtttcagtttgacagggaggataattgaggagcgacgacgacgcttattgcctgagaatgtggagatgctgacttgcttaaaagattgggaattatgagaaaagagagaacaacatgttgttgacaatccagagcttgaagactcattccagaacttattccttgatgaagatgaacctgttactgcttagngacttttggtattactactt

SEQ ID NO: 50768 - DNA, 297 bp, Zea mays
  unsure (1)..(297): unsure at all n locations
attcatactagacacaccaaatagatcaaatcctctcccaattccacacaaggctntagtgattagtgagagagatttgttgtgttcttttgagctcttgcgcttggattgcttctttctctcattctttcttgcgatcaactcaattgtaaccaaggcaagagacaccaattgtgtggtggtccttgcggngaagtttggttcccgtttgattgagaagagaagctcactcggtctgagggaccgtttgagagagggaaagggttgaaagagacccggtctttgtgaccacctcaa

SEQ ID NO: 50769 - DNA, 438 bp, Zea mays
  unsure (1)..(438): unsure at all n locations
agctnggtccacattcatgtcagtcaatgtttctcctgcccaagcttgtggtatgatttttgccaaatcgtgcacaagacagacttagtttcatttttttcacgtatgtaattctatgatgccgatggaatgaaggatatataatgatgaagttgagagattatcagttgaatggttacaagccactggactgttagtgtttgatgcatgcacgaacaagcctactcaaatgaggggaacttatatggagtgcatgtcatttcgtggtgaacccttcagagttgtctgatgaagatgaggaattaggagcaatataagatggtggctgcacttccaagcttgctcaagataaactacgcattacttctttgntcaagggcatcaaacatagtcattagactacatacatngatatatcactgctgcgacatcaaatcc

SEQ ID NO: 50770 - DNA, 334 bp, Zea mays
tattgcattcatgaactgattctctgctagcggaaaacaccacacctttacccgcattgcaacctaaacaaataaaagggcgtggatatataagccatattactgagactgaaaaataacatggcattcaaagtacagacacaagggattgtacctgcgcaggataactcgttatgaccttgctatcttgtgaacatgcctttgattcacgacagaattttccatttcctgaagattcgtaaataacctaccatctttggtcatcataaatgaagaggaagagaggtagtccttccttaatgttatctacatatgaaaaatgtgtttttggtaa

SEQ ID NO: 50771 - DNA, 438 bp, Zea mays
  unsure (1)..(438): unsure at all n locations
agcttcngctactctattcctttttcggtcttccacacctttattcagattttcgtagtcagggtattcaaaacccaatgcgtccagcactcgattcagtcttcgcttcggacgggtaccgaaggccacagtcatcaactgatcctctcttttggagtaattaccgactatttcattgcacattatttcaattgtgtctagccactcttggcaaggtgttttaaaatatttcttaaacttgtaatagtaagggaaccgcacaagttcctcttctttcttctccccctctagcttcggcatttcccattcttttaaagtaggaaaaaccctgaaagccaagaactcttgaaccaggtctcttgtgctgatatgctctgaaataatattaaactcacccaacgctntttgggttggaccttctggtgtcatgctgcactg

SEQ ID NO: 50772 - DNA, 201 bp, Zea mays
  unsure (1)..(201): unsure at all n locations
taggacctanaactcgctgcccggccggatgtcgagccacactggcctgccaacgtccacagcggagcggagaggagcctgctccggcacatgcacatcagccattccgcgcaccgcccagggcattctccacctgatgagtacaaagcacgcgctttcctcggcgatggctccaacaaggacatgatcgaaagatggtgc

SEQ ID NO: 50773 - DNA, 463 bp, Zea mays
  unsure (1)..(463): unsure at all n locations
agcttacttcgtgccttagcacattntcagtttgatgaagcatttgcagaagattggcttcatattcgattcttgtgtcgttaatacaatatgatgtatgatgtatgatgtatgtgatgcaaaatgatgtgatgatatgatgcaaaatgatgataatgccgaagacacatacccacgcacccacactggaatacacaaaactctggatccccttaggaacgtcttttgagtctaagctctgcatccccttaggaacgtcttttgagcttcttcaccttctatttcggtggtataagttctgcatccccttaggaacgacttttgaacttcttcgccttctatttcggcggtataagttctgcatccccttaagaatgactntggaacttcttcgccttgtatttcggcgatatttggctctacattcccttttggaacgactattgagcagaanacttacact

SEQ ID NO: 50774 - DNA, 377 bp, Zea mays
cgaagtacttgggcgaataaaacccttgtctagcaattcttgcaattgcttcttcaattctgccaactcagtgggtggcatccggtaaggcctcttggaatgaggtgtcgttcccggttgcaactcaatggcgaattcgatgtcccggtctggtagcattcctggcaattcaacaggaaaaacatctgcgtactcatagaccactggaatgtccttcacaggtgactccatcatagcataagcacatgattgagtagaatattggctaggtagatacaacaccaggtcttcggaggtaggggaacgaatctccagatctctggaagctacatccatcactactcgatgatgagtcatccagtcggcttccagaatga

SEQ ID NO: 50775 - DNA, 419 bp, Zea mays
  unsure (1)..(419): unsure at all n locations
agctngctntaagcacaacctatcaccctcatacatatggtcagagcgagagagntaatcagtgtttggagatgtacctcatatgtgctgtacactccaaccctcagaaatggaagtcttggctatcattagccaaattatggcacctcttcccactcataattgggttgttcacctttccaggccctttatggctatgaagtatctgttcttggagttcctttactcacagggcaggaggatgagggagctgtccagtttgtgcagcacagagttgagcatcatgagacgttgaaggccactttggctagagctcaccagaggtataagcattttgcagataagaagagggttcccaacgagtttcaggtaggggaacaggtgttgctcaagctccagccttatgctcaacattccgt

SEQ ID NO: 50776 - DNA, 403 bp, Zea mays
  unsure (1)..(403): unsure at all n locations
agctntattacagtgcacccaggaccacgaataatatcttcatgcgtatgtccgaaggtttctgcgtctgagggcacaggcgccaacagtgcccaatgaaattgtcattgaggccatgattaagggacttcggccgggacctttagcgcaatactttgccaggaagccacctcaaactttggagaagctgctccagaagatggacgagtatattcgagctgacaatgacttccgccaaagaagggaggaagcattcaggttctctgaaatgactaggggcttcggaggaagatttcatccgagacacgtcaggtcaattcacaactctactcaaagtgatgatagagggagccaacaacaaaggccacaatattcctcgcaagcttcggggcagcagcaaagc

SEQ ID NO: 50777 - DNA, 455 bp, Zea mays
agagcactgagctgcagcttggaaggttcttcatggcgacatgtgctaagtgtgtatttccagccagcccatgctagtattagcgattaagcatgcatctagaccgaccttctcttttgcaaaatcaactaagtaaaggttgccgactaatacacccttaaaagctagggaaccatcactctttgtaaagacagacacatctacatttgagaatagacaattatgtccaatattgcataagtgactaacagataacatattatatccaagagactcaactaaaaacacattagatatagagtgctcggatgaaatagcgaatgtacctaacccttttaccttgccttgattcccatcaccgaatattattgaatcttgagaatccttggttctgacgcaggaggtgaacatcttcttcgtccccgacatatggttcgtgcatccgctgtcgatta

SEQ ID NO: 50778 - DNA, 214 bp, Zea mays
  unsure (1)..(214): unsure at all n locations
taaagacagggtttgtagtgcatgcccaagcagaaagcaagttggttacccacctttcacacaagaacttcatgacacctagaggcgtttaanctactccacatggatttattccgcccgatcacttacatgaacatcggcgggagtaagtattgtcttgtaatagtggatgattattctcgcttcacttgggtgttctttttggcagaaaaaa

SEQ ID NO: 50779 - DNA, 386 bp, Zea mays
agctttccaaaaagtacaagatcatcgaaatcttagttcggagctaaaagttacggccaaaatacgacaagcggacatgggctgtccggtgcacaccggaccgtccggtgcgccatgtccggtgcgccatcttcggaagctcaaacggctacttttaacggctagtacacgtggcatgtccggtgcaccaccggacagtccggtgcacctgtccggtgcgccgcacaaagctgcagaactgctttccaacggctatatttgagttggggcctatatatacttcacccaaccggccatttggaggtgtgggagcccaagcaacataccaaggcatattgtagacatttccaagtgctcaaacacccaagtgcttaatagaatcactc

SEQ ID NO: 50780 - DNA, 107 bp, Zea mays
tgttgcatcttcagagctttgctcagtagcatgctctgaacagaaacaacttatgttaagtaatattttcattgttaacggcaataaaaaccacgaaaaaagttgtt

SEQ ID NO: 50781 - DNA, 469 bp, Zea mays
  unsure (1)..(469): unsure at all n locations
agctcgngaaggttcttcatccccacatgtgtctttcggcgatgccacagccagcctatgctagtcttagcaattaagcatgcatctagaccggcctcttcttttgcaaaatcaactaagtaaagcttgccgtctaatacacccttaaaagctagtgaaccatcacatcttctaaagacagacacatctacatttgtaaacaaacagttatatcccatattgcataattgactaacagatagcaaattatatccaagactctccactagaaacacattagatatagaatgctcattggagattgcacatttacctagcccttttaccttgccttgattcccatcaccgaatataattgaatcttgcgaatctttgttnttgacgtaggaggtgaacatcttcttctcccccgtcatatggtttgtgcatccgctgtcaataatccagtttgaacccccggatgcataaa

SEQ ID NO: 50782 - DNA, 466 bp, Zea mays
  unsure (1)..(466): unsure at all n locations
agctttggcttcccggtcccaagcaatggattgtgagttgacagcccaatcgattgccagatcccgttcagcaagctcgtcttgaagatgtcggatgtcagctctcaactcatttatacgctgaccatcctcttcccacaccctatgtctgtgacgtaactccgttcgaagctgctccacctgngcttctaggtctccaatggggtcattactgccgccgctgctctcctcatgccttggagccagctgatgccgaggcacgccaatcggtcaagtggacttacgtgcggttttcctcgtgcgcagcgacatatctccataagtgtcacacccggttttagaaggtaatcccgatgcgaaccatgtatgtgccacgatcagcaattcacgtacacaacagttacataacatggacatcatcacacagtgctcacatagtatttataatggaaataatacgtcgata

SEQ ID NO: 50783 - DNA, 261 bp, Zea mays
  unsure (1)..(261): unsure at all n locations
cttcgctgcttctgttgtcagcgctgttgtctatggcggngtttcttcaatagcctcaatgacagtaataatcccttccttttttggttcaacggcttctcggcaacgaaggctccctcttnttctgtaaaagcttcatcagttctggtcccagcagacttagcttattaggtagagattcggtcattacctttaaaatttcttctgcgttagtggcagaaggtgtttagggattttattnctctaaancagtttttggct

SEQ ID NO: 50784 - DNA, 433 bp, Zea mays
agcgacgaatccttttcttctcaaaaggacgacgacgaccactatgataaacagaagacgggtaattcaaacttctcttttgattattctcatattcctcacagtaccaatgctcatttactctccattccacttggtaaacctcctcattttgatggagaggactacggattttggagtcacaaaatgcgcagtcacttgttctctctccatcctagtatatgggagatagtagagagtggaatgaaatttgatagctcggatagtcctttgtttatcaatgaacagattcataataatgcacaagctactactgtgttgttagcctcattgtgcagggacgagtaccataaggtgagcggcttggacaatgccaagcatatatgggacaccctcaagatctcacatgaggggaacgacgtcaccatgctca

SEQ ID NO: 50785 - DNA, 179 bp, Zea mays
catgctagtgttagcagataagcatgcatctagacttgcctcctgttttgcaaaatcaactaaatagagtgtggcgtctaatacacccttaaaagctaatgaaccatcacttattctaaagacagacacatctacatctgtggatagacgactgtatcccctgttacatacttgactta

SEQ ID NO: 50786 - DNA, 377 bp, Zea mays
  unsure (1)..(377): unsure at all n locations
cagcttnctggaagacatgaagacagcatacatttccttctncaactctgtataatatttctttgataaactaagaacctcggaaacaaaatatatcggggcctgcctcttgtcttgaccatcgatcttttcctggacaagtgctgcacttaccgctgagtgcgaagctgccacatataataataaaggagcccctggcattggtggagtcaatgttgttacgtctatcaaatactgtttcagttcttcgaaagccttctgctggattggtccccattgaaagacttcggctgacttcagcacttcgaagaatggtaagtttctctctgctgatctacatatgaatctattgagagatgccaatctccctgtcaatc

SEQ ID NO: 50787 - DNA, 267 bp, Zea mays
  unsure (1)..(267): unsure at all n locations
taggaccttgataccagcttggtccccttggctataccataaacgactttcttatgcacaacctccgtaactaccacataacaacaaacatacaaccacagtattncaacaatatnattatatggtccaaatggtggtggatgggtgaatatagtttcgagtagattttgtgttgttggagtggagatgcttacccgaaaggtatattggaagtgaaccaacactataatgtagcccgcacaccggataatgcatgggttagggttt

SEQ ID NO: 50788 - DNA, 468 bp, Zea mays
gcagcttacatgtctcgtatgattcagaatcaaacgatagttaaagcccatcagaatggagcttcttcatgcgattctcacttatatgacccaaacgacagtgccacatgtaggtaggacttaaatcattaggccgaggccttttagcactaatattacagataggtgcatcatcaagatttaaaatgaataacccattcataatggatgcaaaagccacaaacatgccattcttagagatcacacaaccattgttttcactcgcaaatgaataaccatccttcatcaaacatgaaggagacataatgtttcgactcatactaggaactagataacaattatttaactccaaaataaatcctgatgggaggtggagttgcatcgtcccgacggtcaacgcagcaactctggcattattgcctacccggaaatcaacttctcctcttttcacgcttctacttcttatca

SEQ ID NO: 50789 - DNA, 387 bp, Zea mays
  unsure (1)..(387): unsure at all n locations
gcaactaaactttagacaagagaataaaacaggccatacgnaagtttgaatccgagaagagaacaatgagaatataaaccaggatcgagttgccatgctccttcgcaattcagatagaagtagttcaattgttcgaagcaatcactaccggaatcatgtgctttgccgagtgcctgaaacactcggcaaaccctaaaaaatactcggtaaagtctttaccgagtgtggtactcggcaaagagggctcggtgaacagtctatcggcaaagacttctttgccgagtactttttatcggacactcggcaaagactttgccgagtgccagtcggtactcggcaaagaaaagcggctgtcacggcgccggggtgaaggcgcatttgccgagt

SEQ ID NO: 50790 - DNA, 443 bp, Zea mays
agcttctaaagggagaccacgtgataggtttaactaatgtgaaattcgaaaaagatagaccttgtgcagcatgtcaagcaggtaaacaggtgggaggagcacatcacagcaagaatgtgatgaccacatcaaggcccttggagctgctacatatggacctcttcggacccgtcgcctatctaagcatagggggaagtaagtatggtttagttattgtggatgacttttcccgcttcacttgggtattctttttgcaggataagtctgagacccaaggaaccctcaagcgcttcctaaggagagctcaaaacgagtttgagctcaaggtgaagaagataaggagcgacaacgggtccgagttcaagaaccttcaagtggaggaatttcttgaggaggaagggatcaagcatgagttctccgctccctacacaccacaacaaaat

SEQ ID NO: 50791 - DNA, 409 bp, Zea mays
  unsure (1)..(409): unsure at all n locations
agctctccatgttgggcttgaacattccaatccgagttatcatctgaccgcggtgaccgtcacaagttggtgttcttctgcagtccgaatccagcatgttcaaatccttttccctttcggacttctccctggttcctaagcaaaacaagagtgcacgggtctccatggtctaaataagatggacatgaactcaagagtttaatcacctgatggttgagttgacgagcacgagcgcgagtaatgggacctgaaattggtacttgtattggcatacatgtatcagtagtgtggatgtcttcatcacacgtcacccattccgaanacgtgtgtcggggtgcatacaaagcccgagtcttcgccaccggaaccatttcttcgcttttcgcaacgaacatgcncaactcactac

SEQ ID NO: 50792 - DNA, 242 bp, Zea mays
  unsure (1)..(242): unsure at all n locations
aggacctataaatactcgcttnctgttggctgaacttccatccggcccgctctgtttttgtgaccgtcacaagtggtcgcatgtcaatcctttcctttcgtctttccctgatccaaacaaacagaggcacggtctcctggtctaaatatgatggacatgaactcaagagtgtaatcacctgatggttgagttgacgagcacgaacgcgagtaatgggacccagaaatggtacttgtattggt

SEQ ID NO: 50793 - DNA, 428 bp, Zea mays
agcttcgggaaaccgatactctgtgatagagtaccgttaacctttgcgcaggtctgatcccgcacgcaccccaacctttcgtcatcaatgccaccgaagagaagcgctcccggccggtacccgcaagatatagcatattctttcagctcttctttttcagcttttgtcagctcttgaccaactaagttttgaaagttaaaagcttcatctttcgaagtatcttcgatcatttcttccttctcgggctttgcggtcgtagtctctttggtggctgcggcagcctcttctgcggcagcttcttccgcggtcatgtttagtaatattttgtctatatcagcaaccatgctttctaaattaatatcttcggccctggcctcttctgcggcagcctccgaaggtgcagcttcagtagctgtcgtgctttcaat

SEQ ID NO: 50794 - DNA, 182 bp, Zea mays
  unsure (1)..(182): unsure at all n locations
aacatggattcctgcgccacgccccactgcaagtactgtcgtcatgcgtccacctacancagtgcgagcgggtgtcccctggtgtaaaactcctggcacttcaccttcttacctgcggcactatataaaccgaccagtaggtgtgaagttaccacagcatttactgctatttgncacgtttt

SEQ ID NO: 50795 - DNA, 437 bp, Zea mays
  unsure (1)..(437): unsure at all n locations
agcttaaccatggcaagtctacattacttaatagtctttcaaacattggtaccgagaaggatgaactaaacaatcaatagcgcactagcagaatttttggacagcaatacagcagtcacttgtttcagtcataactcacaagatatttaaccaaaaatagtaaactaggactttctagaaagcttgaaaagtgctgtacaactttggtattgncatcatagcatgattaaacacttagcaaggtcaaaaggtgttaacacaacagcgctgtcctgatttggacagattcagacttgtgactttaaaaattcataactgaagattcagacatccaaacaaagtgatcttagactttctggaaaggtaataaaattgtgtacataccatttataaacatctcaacgtgattcaatatttaactaacgataaaatacact

SEQ ID NO: 50796 - DNA, 238 bp, Zea mays
  unsure (1)..(238): unsure at all n locations
cagagcccttgcagcatctgaaggtccttgttcagcatccttttncaacaaggttccgcatgccatatttntgcgggaactcaggacccagcttcagcttcaacccgagttacgacaacttcaacagtttcctttgtatttttctcacccatgctaagtacttctgtagaggcaagagttaatacctctgttgattccatgacagcatccagtacactagccattctcctccttttgg

SEQ ID NO: 50797 - DNA, 425 bp, Zea mays
ttaagtcacctgcggcatgcaagctggccaaagagatacatatgcttcatcattacatcagatttccataattgtattatccagctatttgagctgctgatgacagtgcacttgttttgatcatacattgtgggcgaggattgaggaatgatactacaatttagttactgctatccacatgataatttgttgtttgctgttgcagatagttggggatcgaagaggggcagtttttggtggcttggtcgatgccccactgcaacctatcgtaaaaaggaagtatcaggtttgatatgcatgctgttgctgatttcaggatgcctatttcacactacgctgaatgtatttcatctaatgtttcacggaactaatgactgctttgtgttcaccaacgtagatggttgtcctgttatatgccatccaac

SEQ ID NO: 50798 - DNA, 478 bp, Zea mays
  unsure (1)..(478): unsure at all n locations
ttaagtcacctgcggcatgcaagcttcggcagaaagaagaagtagncttttattgttttctatgcgaagaaaagctctggcaaaaagaggaagcggccgtttaagcttcgttgtgtacgaaaagaagggaaggtgttttttcgccttcggctcaaaatactgatttcgtccacatcaaagcgactcaatcgaagggtaagaatatattacaaggtatgtacaaagttccttgagaacagttcaattgtatttacaaaacttgttacaaaagtatcctgagttttttcctatagtacatttctactgatcttcattaagcttcagcttcggcgacagtttcggcgacataacttaggcatcatcttcaccttcgtcatcctacataaatcaaggaatcgtgagtaaaaatcaagtgcaaagaanaagggtagtacgaagtattatttcttactggttcaagatgacttcgtgcttcatc

SEQ ID NO: 50799 - DNA, 469 bp, Zea mays
  unsure (1)..(469): unsure at all n locations
agcttcttcagctcttccagacttgcatagtgtatcagttaggacattgtacgcttgctcatcaggtgtcaagccattctgttccatcatttcaaataacctgaaagcattatcaaattcatgttttttgcactggccttgaatcagagtagtataagtgataacaccaggagttatcccatcctcttgcattttagttattaaagccattgccttatgaagctttntatcctgaattaacccatatatcaaagaaccataagtccaggcatttggatggcagccttcatgttccatcaatttgaagacctctagtgcagcaccaaccatcccaaccttgcaatacccatcaattatagaagtgtaagtgacaacactaggagctaaaccatntgcaaacatctcattcagcgtctctttagcctactttaatctacacttcttgatgacgacattaatcaacactcca

SEQ ID NO: 50800 - DNA, 204 bp, Zea mays
  unsure (1)..(204): unsure at all n locations
tggatcangatgctggtcctttgctcctgtgctgaggattgttcggccagtttgttgaactgaccccatgggtgtgacccgactgatgctgaacccaagggtgtgacctatatgacgctgaacacatgggtgtgaccaagctgaagctgaccccaatgggtgtgtcgaccgcattgttgatgaaaatgaacaagaggaggatga

SEQ ID NO: 50801 - DNA, 441 bp, Zea mays
  unsure (1)..(441): unsure at all n locations
agcttgnggaggttcttcatccccacatgcgctaatcggcgatgccacagccagcccatgcaagtcttagccattaagcatgcatctagacccgcctcttcttttgcaaaatcaactaagtaaagcttgccgtctagaatacccttaaaagctagtgaaccatcacatcttctaaagacagacacatctacatttgtaaacaaacagttatatcccatattgcataattgactaacagatagcaaattatatccaagagactctactaaaaacacattagagatagagtgctcatttgagattgcaattttacctaacccttttaccttgccttgattcccatcaccgaatattattgagtcttgggaatccttattcttgacgtaggaggtgaacatcttctcttttcccgtcatatggtttgtgcatccgctgtctata

SEQ ID NO: 50802 - DNA, 355 bp, Zea mays
  unsure (1)..(355): unsure at all n locations
agcttcggatcatccgccaagcttcttcttattgctcctcggcttcgtcatcctgtacataacanagtgttataacgtaaattcaaagtttcaagtaaaaggtaagcataaggtatgagtttattaccggtttaaggtgacttcgagcttcgtcaccagccaagcttcgtccaccctttgcccaaatttgagttacgaatctgttcccaatgcttcgggccaggccgaggatgtcattcaagtccgctggtgataagctgaagttcggcctatttacaatgcccaactatgacttcatcaagagcatcaacctcgccttcaatatgatcaaagatgcctggcaggttttcagctg

SEQ ID NO: 50803 - DNA, 269 bp, Zea mays
ctgaacttggctgttgtcagccttttctctggtgggtggcacagcagtcggagcgaggcgagcggcgctgtttccgtcggtcgtcatgaaaggcgaatgactgcgttcacttcaccttgccgactgaggcacgtgtgtcaggataaggtgtcaggcgatcctcacattgaatgcgcctgcgatatggtcggttggtgaggcgatttggcccaagttgcttcacaacgaagcttgcctgagactgggcttcagcgagtcaagggtgtgcc

SEQ ID NO: 50804 - DNA, 310 bp, Zea mays
ccacagccagcccatgctagtcttagcaattaagcatgcatctagaccggcctcctcttttgcaaaatcaactaaataaaggttggcgtctaatacacccttaaaagctaatgaaccatcacttcttctaaagatagacacatctatatttgtaaatagacaattatatcccatattacataattgactaacagatagtaaattatatccaagagactcaactaaaaacacattagagatagagtgctcatttgatattgcaatcttgcctaaacctttcacctttgcttggttcccatcaccgaatatg

SEQ ID NO: 50805 - DNA, 358 bp, Zea mays
agcttgtggaggttcttcatccgcacatgtgctaagcggcgatgccacagccagcccatgcaagtcttagcaattaagcatgcatctacaccggcctcttcttttgcaaaatcaaccaaataaagtttgtcgtctagtacacccttaaaagctagtgaaccatcacatcttctatagacagacacacctacatttgtgaatagacaattatatcccatattgcataattgactaacagataacaaattatatccaagagactcaactaaaaacacattagatatagagtgttcagatgaaatagcaattctacctaacccttttaccttgccttggttcccatcaccgaatattattg

SEQ ID NO: 50806 - DNA, 240 bp, Zea mays
  unsure (1)..(240): unsure at all n locations
tattaggacctataaatactagctnttattggtgtggtgtcctacactgtcagttgattttacgganaagttgggaaggcctgcaggaggaatgaattatttctcatgaaagtaaatntcgggatggtttnccaaggcgcggaggaagatataattatcatatnaatagtcaggagtaatggagctggtacagttgggtttctatcaaacttacagaggactaaactggctctaacaagg

SEQ ID NO: 50807 - DNA, 414 bp, Zea mays
  unsure (1)..(414): unsure at all n locations
agctntttcaaagctgggcttcggttccccttaagcaaatntgtggttgaagttttaaagatataccagattttccttcaccaaatcactcccgaagcaatcataagaatgggaatctttgtctgggccgtgaggagtcaaggtttggaaccaagtgcaaaaagtttctgcagtatgcatgaacttttatatgagacgaagccctgnggtaaggagcagtatcataacaattttggttgctacagctttgttgctcgttcaggctcaagctgcccagtgccaacctttcggaagaggtggcctggagactggatgaaagaatggttctatgtgaaaaatgatttanaggcgagagaagatattaaagagatcatcatgcgccccatctggtcccgctttggccttcggaaaccg

SEQ ID NO: 50808 - DNA, 464 bp, Zea mays
  unsure (1)..(464): unsure at all n locations
agcttgntggccgtggagacgggtcgtatcattgcttactagcgagacctggctttgtcgggcgggccggtgtcgcgacgacgacgaggcggtggtggaggcgccgggaaggggtggggtcggacaacgtcgcgtcagaaaggaggcggcgattgaaacggggcatcgaggcaaactggtttaggtggcgtcagaaagattagtgttgaactgatagatgtgaggactacgttggagaggatatggcgaggaggctcatgacaacgttgttttaggccatgtcccaatcctctaaagctaattgctaactggttttagctaggttgaggtagctaacaactaatgattatttgaagggtatagctaanatttagttggtcaattttttgattcattctaaacttctcagctaattatagtcgctagctctttttttagaggtttcgaatatgactatatcatat

SEQ ID NO: 50809 - DNA, 472 bp, Zea mays
  unsure (1)..(472): unsure at all n locations
agcttcatgatctttgattgtcttttctaggccctcgattataatctcattctttntatcctcaagatcttgctgcatcctcagtgctttgcttagtagcatactctgtacaaaataaccttcatcagaaatctttgcttcatcacaaaagactaaaaagctgaggaaaaagctttaccttaaaattggaatagaataagctgccaatgataagctgtcgccggtaactgctaatgtcagcttcaagctttagaaaaccaacactcttcgacagagtgctgataatcttcgccccagtgctgtctcgaatgcatcctaaggcttcttcattgattccaccaaagagcatggatcctggttggtagccacaggatatagcatactcctggcagctcttcttcttagccttggaaaattcttgaccaactagattctgaacgctgaagcttttttcttccgaagtatcttcgac

SEQ ID NO: 50810 - DNA, 187 bp, Zea mays
tgaaacagtttatattcagagcttttctaagcgtgcgaacaacgtttgagaaaaaaaaaatgtgggagacaagtgattttgatgaggagaaaaactggggctttcttatagcgatgtcgaagacaaacacggaaaaaattaccaaggaaattctggaaggcttgtctgaagatactggtgaacgtga

SEQ ID NO: 50811 - DNA, 444 bp, Zea mays
agcttctaaagggagagcacgtgataggtttgactaacgtacaattcgaaaaagatagaccttgtgcagcttgtcaagcaggtaaacaggtgggaggagcgcatcacagcaagaatgtgatgaccacttcaagacccctggagctgctgcatatggacctctttggacccatcgcctatctgagcatagggggaagtaagtatggtctagttattgtcgatgacttttcccgcttcacttgggtgttctttttgcaggataagtttgaaacccaagggaccctcaagcgcttcctcaggagagctcaaaatgagtttgagctcaaggtgaagaagataaggagcgacaacgggtccgagttcaagaaccttcaagtggaggagttccttgaggaggaagggatcaagcacgagttcttcgctccctacacaccacaacaaaatg

SEQ ID NO: 50812 - DNA, 246 bp, Zea mays
  unsure (1)..(246): unsure at all n locations
gcttanagcctggtaagtagcataggcaagtaatatacgaattgtctcatgcctagctacgggtgcataggtttcaccaaaatccaaaccttcgacttgtgaataacccttggccacaagtcgtgccttgttccttgtcaccacaccatgctcatcttgcttgttgcggaagacccacttggttcctacaacattttgattaggacgtggaacaaatgcccatactcattcctcgtgaaattgttg

SEQ ID NO: 50813 - DNA, 430 bp, Zea mays
agcttaccaccaaaaccagtaagcctcctcgtactaacataagagattacacatccatacttcccaaggctacagccactaagagatctagatttcaaaacattacattagaacgagactttggatgaatcacattagcttgcaaaatacgataaccagtaaatggagaacattacatttgaaccagactttggatgaatcacatcccacatggctttcaaagataactctgtttcggccagatcagttgctccaacaaatatggtgacagccgaacaatcaagtgcctagaaaaggtcagttcagattcacttcactgaaagtgtagataaagatcggaagtcaaatgacaacagcaaaacacataccgatatcatctttgatgcatcggaccacgcttgaagtaccctacaaagttggggatgtgact

SEQ ID NO: 50814 - DNA, 190 bp, Zea mays
  unsure (1)..(190): unsure at all n locations
acgacatagggcaatttccttatccactttcctgcgaattttcatttctgtcaagacctttttctgaatggcctccatnatttacccttgggtcggtncaactggcccttggctcttggatgtgctacagatgcatacttgatctgaatgctcttttgcttgcagaagtcgaagaactctgaacttgtga

SEQ ID NO: 50815 - DNA, 472 bp, Zea mays
  unsure (1)..(472): unsure at all n locations
agcttcccatcatagtactccggccagccattcttcaacagcctnctctctgctaggtcgattgctcttcttgcaatctgcggccgtccagttttgatgcaggctgcagtcagcagccacagaagcactgcagaaagacgaagaaaaatatgaaaacaatgtgtcaaaacagctcgtattgcatggactaagatcagtgaatagatgcaacatgtcatgttatgaatttatactagaaaggtaagaaattaggaacatcgttgaacagataagaaccaaaagtattctgccttctgtggtacagattagggcaattccatatgcatatgannattgggcaaagggaaggtatcggatgtttaataaaacagaggacatgctcttctcatcactcanaaagaatcatntaaaatcagaatgtaaaacattctggaaatatgaatgtgtggatacacaacatccagtatatact

SEQ ID NO: 50816 - DNA, 450 bp, Zea mays
agcttgcaagctcgccctccaccaactccatcttggtgaataaggggacgtcgttcccctcatgagagatcttgagggtgtcccagatctgcttggcattgtccaagccgctcaccttatggtactcgaccctgcacaaagaggctaacaacacagtagtagcttgtgcatctatatgaatctgtgcattaataaatataggactatccgagctatcaaatttcattccattctcaacaatctcccatatgcttggatggagagagaacaagtgactacgcattttgtgactccgaaatccatagtcctccccatcaaagtgtggaggtttgccaagaggaatggaaagcacatgtgcatttgaactctgcggaatacgagagtaatcgaaagaaaagttcgaattaaccgtctttcgtttctcatagtcgtagtcgtccagtggactca

SEQ ID NO: 50817 - DNA, 427 bp, Zea mays
  unsure (1)..(427): unsure at all n locations
atcttggtaagggagagcacatgntatgattatcttatgttcatatcgagaaagacgggatttgctgcgcatgccaagcacggaagcaagttggtgttcatcatccacacaagaacatcatgacgactgacaggtcactggagctcctacacatggacctattccacccgatagcttacataagcatggaggggagtaaggactatctagttattgttgatgattattctcacttcacttgggtgttctttttgtaggaaaaatctcatacccaagaaaccttaaagggattcttgagacgggctcaaaatgagttctgcttatggatcaagaaaagtacaagcgacaacgggacggagttcacatactcacagatcgaacgcttccttgaggaggaaggcatcaagcatgagttctcttctcccta

SEQ ID NO: 50818 - DNA, 152 bp, Zea mays
gtgacatgcaaagctttttgttggcaattggcacaaactgcatacatgaagctgggtaactcaacctaccgtgttatatatgcccagtgggaaggtaaatcgtcaagtcttccgcaccggacaaaaagtaacccgcacccactaaaccgtgg

SEQ ID NO: 50819 - DNA, 420 bp, Zea mays
  unsure (1)..(420): unsure at all n locations
agctngcttatctaaatgttcttgtggaattattatactagctaagngaataactatagagctaatggtagatgacttgatctactctaggagacaatcattatcatagtcgaagtcatcatcgccaggaacagagctagaaaattttttaagaggggctgaattaaactgatacagtatatgagacccttctactatattgtgtacgttntaaattttagcaggggcttcagtggggctccatggactctgtaacggtagggggggctaaagcattgcccgtccaccactatctccgtccttgatcattgcctaatagggcatcactcttagcggtggcatcaacatccatgacaacataaccaactgttcaccagtcttatgtagctcggggagaggctctctattctttgcatctat

SEQ ID NO: 50820 - DNA, 320 bp, Zea mays
  unsure (1)..(320): unsure at all n locations
ccttttaccttgatttccaacgctagcatatccttgagagtattttacctttgatgggtaagacttgtgaaagtacactccgtactcagggttttcaaacccatattgttgtaggtgatgaaactgctgagttctgttgtttctgttccaaggtggttccaaaaaaggaggaagagaactaagacctacctagggagggtgttttgcctcctgatgatgtaataatcaactttttctatattttactaatgaatgtgaattatgttattgtaatcccttccgcttacttccgagatatgtaatgtncgtgtgatgggtta

SEQ ID NO: 50821 - DNA, 449 bp, Zea mays
agcttgccaagccctcggacccggccatactttatcggaggcccgagatcgacctcaccggacttcggtcttccgccgccgcgcgtggaccgagctatccagtgagtctccgtccaatcccttgcgctcatatcttctctggcatcccatgaacctctctgacccgtccaattgaactatctcgccgtgagcaggccggactcctcgccgccgacgagcatccccgcctgcgcacgtggatcgaccaactccgaccatctccgacggcgacccgcacaccgttgtgatccccgagacttccccttcatcctcgaccacttcaccggagcaatctcgccgccggtaagcccctccgccctttcttccgccgcggttactgtttgaggtagaagaaagacctcgggttacgatttgagaacccgaggggtatctgtaacgcactggctcat

SEQ ID NO: 50822 - DNA, 374 bp, Zea mays
  unsure (1)..(374): unsure at all n locations
agctttgngcaattatcaccttgggaatgtatgtagtaaaccctagacccctcttgaacccctatcttctaaaaccttggttgaagggggggggggagattaancaaatgtgcaaatcatgacctaacctttggctaaagttaagtaacatattaatctacaaatatatagaggaaacattgcaaaaagatcccttaagaaaccccaaatccattccttatatatagagagagctaaagctctctaattctctctaagtcaaatattaaccctaatctaaagatcagacgtgttcacttattaaatggcaccaaaaccacttggtctgaataccaaaaatgtgccacaccacctaaggtacacccctgaaaaat

SEQ ID NO: 50823 - DNA, 475 bp, Zea mays
  unsure (1)..(475): unsure at all n locations
agctnggacaaccaatcatttattatccgagaatttattttggttttattaatcaatttaaacctttctataggaagagagtggctcttcactcccatcggattaacaaaaagtgagtctcatgttttcttatttgtttgactcatgttggtgtgatattttgctaaacagattttgcatatcatagcgacgtttgtcattntgtatctatacatttatgctaatttttaactctcgtggcaacgcatgggtacgtacctagtaaatatctgtaatgttagaatcttagtatttccatcacttgccattcctcaaatataaatatattgcatctattatatggctcttctgacaaaagaagtttgaaaatagagaggaaggataaggacgcanagaanagaagtaaaacgaggagaaaggtatactctagcttatgacctactgcctatntgtgaaattgtgcgaattacctaat

SEQ ID NO: 50824 - DNA, 395 bp, Zea mays
  unsure (1)..(395): unsure at all n locations
tttctacctgtccattagccctagggtgcgctaccgaagtgtacttgagttggatgcacttttgttcttagaagtcgaagaattatgcacttgtgacgtttgaacctaagtctatgatgatgatgtttgatatcccacacctacagattatctcctagatgaactctaccaccttggctgaggtcaaagtggctactagattgtactctatccactttgtaaacttgtcgatagccaccaacacatgtgtatttcctccttgacgcttntgaatgtccgaatcatatcctgcctctaccatgcgaagatccgggtgactggaatagtttgtacgtgttgtgatggtagatgcttgttataggccaacaactaacatgcttcacatctctcgacta

SEQ ID NO: 50825 - DNA, 444 bp, Zea mays
  unsure (1)..(444): unsure at all n locations
agctngagctaatacctgtagagaaagccctctgtgtgtttaatgacttaatctcgatgacgtcataatcagccccttctgtgagctccaaatccaaatggccggagtcggatttgaagtcctcatcgtcttacgcacgaacgagcgtctagcgctgctgaaagggaattatgcttacacctagtacctaattaattgtggtggttgaatgacccaacacaaacatttggactaactagtttgcccaagtgtatagaatatacaggtgtaaaaggttcacactcagccaataaaaagaccaagttttggattcaacaaaggagcatatgggcaaccgaacgcacccctggtctggcgcaccggactgtncggtgtgccaccggacagtgaacagcacctgttcggtgcaccagggacttatactcacactcgcaccttcggaat

SEQ ID NO: 50826 - DNA, 170 bp, Zea mays
atacaacaactagcacatttaccatcctcctcctcttaggagttatggcagaactcttgtgtgccttcaacgctgttgcttctattgaaggacttaaaaaccctggcatctttgttacttcttcagtttttgatctttcaaccttatctttgtaaaccttcgtttcaact

SEQ ID NO: 50827 - DNA, 388 bp, Zea mays
agcttgaagccatggtaagtagcataggctaataatatacgaattgactcaagcctagctacgggtgcataggtttcaccaaaatccaaaccttcgacttgtgaataccccttggccacgagtcgagctttgttccttgtcaccacaccatgctcgtcttgcttgttgcggaagacccacttggttcttacaacattttggttaggacgtggaactaaatgccatacctcgttcctcgtgaagttgttgagctcctcttgcattgccatcacccaatctgaatcttgaagtgcttcctctaccctgtgtggctcaatagaggaaacaaaagagtaatgctcacaaaaatgtgcaacacgagatcgagtggttacccctttatgaatgt

SEQ ID NO: 50828 - DNA, 230 bp, Zea mays
  unsure (1)..(230): unsure at all n locations
ngcattgcatgtntaaatttnttgtattgcatctagggcttgtctaacctagttgagataaccgccaacaaagcgagtgaaaaagcttaactcggatcaaacttgacaagtcttagttttaagcttttagcacttgaattcttactttttatgcaattgttggttcttgaaatatgcatgaggtactgcacttaggggaagtattcaaaactcaaatcactcatgaaaac

SEQ ID NO: 50829 - DNA, 443 bp, Zea mays
  unsure (1)..(443): unsure at all n locations
agctcgaagccatggtaagtagcataggctattaatatgcgaatngactcaagcctacctacgggtgcatatgtgtcaccgaaatccaaaccttcgacttgggagtatcccttggccacaagtcgagctttgttccttgtcagcacaccatgctcgtcttgcttggtgcggaagacccacttggttcctacaacattttgattaggacgtggaactaaatgccatacctcattcctagagaagttgttgagctcctcttgcatcgccatcacccaatccgaatcttgaagtgcttcctctaccctgtgtggctcaatagaggaaacaaaagagtaatgctcacaaaaatgtgcaacacgagatcgagtggtacccncttatgaatgcaccgaggatggtgtctaccgagtgatctccttcgatagcatggtggactctctggt

SEQ ID NO: 50830 - DNA, 403 bp, Zea mays
gcttaccttgaattccttaaatccagcatacccttgagaggcttttttttattcgggtaagtcttgctgagtaatagctaccccggttttattccctgtgttttcagttgtaattttgtctctggtgtggatggtgctaagtgccggtgggctcggccttcttatataagtatattccatctttagcttccctattgaggattgtcacttaagctaacatgtattttaaaacttataaatgttttatacattcaaattgtaatctttttgaatcacatttttttgtaatcacctccgagatatatattgtaatcttgttataacttgtaaatgttgtacattgtaatcactttgttaataaagaattatattccgtggcagtgtttgtatgtgagttgtgttt

SEQ ID NO: 50831 - DNA, 459 bp, Zea mays
  unsure (1)..(459): unsure at all n locations
agcttncacacgcttgccccagtgatcggctaatcttgtctaaatagctctctgataagtcgctccagcgtttttgaggccaaacggcatggaggtatagcagaaggctccgaacggagtgatgaatgctgttttttccttgtcttcttttgccagactaatctgatgatacccagagtagcaatctaggaaagacaacacagaacatctggtggttgaatctaccacctgatctatcctangaagcccgaagggatccttcggacagtgtttgttgagatccgtatagtcgacgcacatgcgccaatccactttattcttttttagtacaagaacaggattaactaaccactcaggatgtaacacttctctaatgaatcctgccgcgaccaagcgagccgactcgacacggatggcttctctcttgtcgggcgtgaagcgngcgtaattttgtcggat

SEQ ID NO: 50832 - DNA, 469 bp, Zea mays
agcctcggctccatatatattgcgaatcgttcttgagtctgactagattccttcggctttgctagcggcttcctgactcccatgaatagcaacgggcctttgttccgaaggtatcttcatgcatagatatgctggatgaagtattgcttcgaaagcattaagtgtaccacacaccaatgattgcattgtacgggtattccatatcaacaatgtcgaacacaacatgttcatgtcttgtattgtggacgaagccgaaggtcactggcattgcgattttgccgagtgctgcaatttgccttcctccgaagccacaaagagtgtgtgtagcatcatgaatcttgtcctctgtctcttgcatatgcctgaaggccttatcaaatatgatatccgctgcactacctgtatcaaccaaaacattgtggaccataaatctctctgtgacacaagatatgaccatagcatcattatg

SEQ ID NO: 50833 - DNA, 186 bp, Zea mays
atagattactttggcataaacctgcctgttgaaataacttaactcagctatagcttgccacatggcgttcggcatctaactactaaacacgacatggataatcctctcctttaatatatggaagacatggctctgtaacccacctagtggtaccgttttcaaatctacagctcttttcaagcccca

SEQ ID NO: 50834 - DNA, 465 bp, Zea mays
  unsure (1)..(465): unsure at all n locations
agcttctgcaacatacacgagtgattgtacttatataatccctgnggaaaggagcaataccacaacaactttgggtgctacagcttcggtgcgcgctccgggtcaagctaccctgtgccaacctttcggaagaggtggcccggagcctgtatgtctgaatggttctatgtgaaaaatgatctatcagcgcataataatgtcgaaagtatcattatgtaccctaattggcaacgcttcaggctcttaagaccgaaggttgaaatggatgacgcatccgaagaatgccaaagagccttcggcgcagtctgctccttcattgggtcaagggacttgggccacgagcacattgtcttcagggtatggccacttgcagaatagtgggaaatgccgaaagagaccatcacagagtccgacgaatgcggactagtcagattaaaatacacattcaaatatgcagatatatta

SEQ ID NO: 50835 - DNA, 174 bp, Zea mays
tggctcctcttgagcatcatcatcatcatcttgagcttgatcctcatcttgagttggtggagatgcttgcattgaggaagacggttgatcttgcgcttgtggaggctcttcggattccttatgacacacatgcccaatggacatgttccttagcgcgacgcacagaacctcttc

SEQ ID NO: 50836 - DNA, 408 bp, Zea mays
  unsure (1)..(408): unsure at all n locations
agctgggtcaattgcagcatgcatagcattttatttggcattnccgccggcatggatagactttagtggcgtgatccttcgccacaaatttggccaggtgcctgctttggtctttggctctttcgtactactagtaactgcgaaggattcattgagacatttaacttgagaaacgagcttatataactgatgatttatgtatttaactctatagatgttaagctattttctttgctatggctgttctagagttctctgatatttgagttttgttgcttatgaaaatcgtgcaaatggctgagcccctgtgcacgtgagataaattcatctgtcaggctagtaaagtacttagctacaactcatattggctagcggttacagtaggatatgtgctcgcgattcatgttg

SEQ ID NO: 50837 - DNA, 353 bp, Zea mays
  unsure (1)..(353): unsure at all n locations
tgcaagctatctcacctggaggaagcttactcnatgtgtgatgcgctagncntaagctctgctagtggggtattcatatgcttcctacagcgttatatgtgttgcatcatatggactagtgtttctgctgtgatgaattaactggcttctatagcgcaatagatagtcatgcggttaatggtgctttaagattgcctcaaatcggtatcttagtttaaattggtatcttaatggcgaatagcagcacgttgatattcctgtgatatctccacacatttgaatgatgcttaactctgattatgcgcatttgtgtattatagcatgcacgtatgattcttgacacactgcatcct

SEQ ID NO: 50838 - DNA, 465 bp, Zea mays
  unsure (1)..(465): unsure at all n locations
agcttcgtgaaatattcaccgaagctaatattgttttatgttgcctctctaatgaagctacacttcttctcaatttatcttgtgccttagcacgattttctctttttgaaaacattctccgaagatcaatactgtccccttcttgttccacatgcaatatgctgtatgatgcttatgttatgcaaaatgatgtgatgatgttatgttatgcaaaatgatatttgtgccgaaaatacacacatccctgcgataaagcacacaatgtttcttatcagcgctgactttntgctgtaagcctcccttaggagcttcttcgccttttactttcagcggaatcagcgttgactcttcgctgtaagccttccttatgagcttcttcgccttttactttcggcagaatcagcattgacttttcgctgtaagcctnccttaggagcttcttcgccttttactttccgcggaatc

SEQ ID NO: 50839 - DNA, 73 bp, Zea mays
aaattgtaagactttatggtatctctagatttacagtgtttattatgtatatgtacctaatatattaatatat

SEQ ID NO: 50840 - DNA, 410 bp, Zea mays
  unsure (1)..(410): unsure at all n locations
agcttccatgtgttcgacgcgagctggcaaccggggtcgctctcagagcacgcccgtgcgcgaacccccgcgcgcccgcggncgcccgtgacctcgcccgtgccacggctataaagcccaccccagtgcttggcggccttccccgttacctcctccgtacctcgccggacttgcccaagccagccattaactccggcgacctccccgcgacccgccagtgccgcccgagagcaaccaccgcgaccagcccctctcccgtcctcctccgttcgatccaagccctcagttagcttcctggtgaagccgtgagacttgctgaagcttgacccggnggccctcgtcaccggagtagcccaatcgtgctcaccggagttcaagaacccgccggcgcacgtggaccgggtaagccc

SEQ ID NO: 50841 - DNA, 373 bp, Zea mays
cgagtgacactcccatcctcagtagcaaagcctaaccccggtccgccagttcccctcttgaactgcctgaccatcatgcccaactggggctcactgcacgacacccaactcaagatagatcgaaggtatgtgttttcttcctcgattcttgtattgtcgtgtctgtaggactcaagggcagattgcaaacccttacaaagtgcacactgcgcaggtgcaggggcactcactgagctagccttctcaagcaaagctatcctagcgtctctctctgctagctcagactgcaaaccaggacaaacggtacatgcacccaacaggatagtgtcacacccggttttggaaggtaaaccaaatgcgaaccatgtacgtg

SEQ ID NO: 50842 - DNA, 488 bp, Zea mays
  unsure (1)..(488): unsure at all n locations
gtcacctgcggcatgcaagcttcagcccaacagtagaatgtgtgtgcggccgtttgttccaangggcanaggcaccatgggctttcgtggaaagtttggaaaccaggcaacaaaaatatatcgcctattctgtggtgaagacaatggccatactaccagtatgtgccatgtttccatccacacgcacaacgacatagtgcagcgcctggaggcattcaatcctaccatccaggtgttgcctcttggtacggaactctcacactattgtgcacaatatgacgcgatcaccctgcggcttctgttgcttcggaaagccaatctcaagcattctgggagcaacctccaccgccaccgccgattcaaagaggtcagcagccagaagggagtcagcgcactaaccttcagcgggacttcagagaggagtccgaagctcgcacagtcaataacactgtgccagagtcgaagcacatttactgacgaatatccta

SEQ ID NO: 50843 - DNA, 462 bp, Zea mays
gagtcacctgaggcatgcaagcttggatacagctgacaatgtcgtagcctctgatgtattttcctcaaatgctcttcatgctcttgctcattctgggaatatatgaggatatcatcaatgaacaacactacgaacttgtcgagatagtccatgaacacaccgttcatcaagtacatgaagtaagctggcgcattcgtcagaccaaatgacatgacaatgaactcatatagtccatacttagtgataaatgttgtcttcggtatatccgagggtcggatcctgagcacatggtaacctgacctcagatctatctttgagaacacactgactcctctcaactaatcgaatatatcctcaattcttggcagagggtacttattcttgacagtgacttcattcaaagatttgtaatcaatgcacatcctctttattccatccttctccacaaatagcaatgggact

SEQ ID NO: 50844 - DNA, 407 bp, Zea mays
  unsure (1)..(407): unsure at all n locations
agcttaaaggagaggaaggacgttagaaatgatactctcttgtacgctgtngactgagtcggaaaatctgccaggacgcttttgcctcgtcacgctcgctcggcctgggtcgacagcaacccttgtctcttggttggcacatgcgcaaccgcccaaccgaacggcaatggcaggggtgcccggacgggaggcgaccccacctgacatgtctnccgtaatctgggtcccctgacgctgctgctgctgctgcgatggtcgtggtcgacgacgagcacatggattacgcttgcatgttgcgccgaccatatatgacgtgaggaggcgtgccaaccaccgcggtcaggaggtctctggctctctgccaaaatgatgatgactggcgattccgatattgtggcaaggcgtgg

SEQ ID NO: 50845 - DNA, 153 bp, Zea mays
atcgtttgtggatcaggacacttttgtatccgaaaaagacatacccttttattggcaaacgagattacgatgttgactgtcgatttcccaataatggtagattgaaagacatatgttttcccattggtctttcatcttattgagttggcattg

SEQ ID NO: 50846 - DNA, 470 bp, Zea mays
agctcggggaggttcatcatacgcacaggtgttaattttgttatgccacagccagcccatgcaagacttagccattaagcatgcatctagaccggcctcttcttttgcaaaatcaactaagtaaagcttgcccgctacaatacccttaaaagctagtgaaccatcacatcttctaaagacagactcacagacacatctatatttgtaaacaaacagctatatcccatattgcataattgactaacagatagcaaattatatccaagagactctactaaaacacattagagatagagtgctcatttgagattgcaatttacctaacccttttactttgccttgattcccatcaccgaatattattagaatttgtgaatctctattcttgacgtaagaggagaacatcttcgtcttccccgtcatatggtttgcgcatctgctgtcgataatccagcttgatctcccggatg

SEQ ID NO: 50847 - DNA, 254 bp, Zea mays
gatgaactacttggcctttttgatcgacttagaaaatccactgctgggcactttgtaattgacctagtggaacattgaattacactcttagatttgtctggcaaaacttatacctgtggatcggagtgttggagtggactgggatggattgacggggaaattagttcatttcactcttcattccacatgttggaagagactggaaacgataaatggaaataaattatttgtggttgtggaatgtgtaagaatgt

SEQ ID NO: 50848 - DNA, 399 bp, Zea mays
agcttataataagagaatggaagcaaggacaataccttacgtgataatagaaggggaattatataaacatgaaatctgttctccacttctcaagtgtttatcaagagctgaaggtattgaattaatgaaggagatacatgcaggtctatgtggatctcatattgggtctaggcccttgctgggaataatgtttagacaaggattttactggccgaaggcagcttcggatgcagaagagctagttcaaaaatgtgaaaattgtcaaaaatgtgcaagagaccagaaacaaccttcatctctcactcagctaatacagaccacctggccgttgcaaagatggggcctggatttgttagacccacttccaccagcgcaagggcaattgagatatgtcatagt

SEQ ID NO: 50849 - DNA, 464 bp, Zea mays
  unsure (1)..(464): unsure at all n locations
agcttggcctcgacacgtgcggcatgagccttctcgtangccctattcgcgtcctccttttccgtcgccagctggcgatcgaggtcctccttttcagccttcgcggccgtcagcttctccttcagcttgcggctcttgttctccgcagctgaattgtcccgcacaacctcagtgtgctgcgcctggaggcattcaatcctaccctcgagttgtcgcctctcagcagcgaactccgagaccagggcgcccgacgcaacatgctcggcgaaagcagccgcttggcgtagaaagccgtcaaatttgcaatcacgtaagaataacaaattatcaaaatccaagacgacttacatgtttcagctgctgtgctgcatgcttcagctgctgcgcaaccgagcctgccacatctttggtggcggtggccgaagtaatctcgccgctggcaccacaattggaccatgggtcct

SEQ ID NO: 50850 - DNA, 437 bp, Zea mays
  unsure (1)..(437): unsure at all n locations
agcttgcacttacgaccaaaccgcacccgctttcatatcatcattcaaggcttaacaatagtggtaaggtcaaggtaaccaagctggtacgaattaattntgctattggttcatatcgtgatgttgttgactgtgatgttgtgcctatggatgcttgtaatattctgctaggtagaccatggcaatttgattcagattgtatgcatcatggtagatcaaatcaatattctctcatacaccatgataagaaaattattttgcttcccatgtcccatgaggctattgtgcgtgatgatgttgctaaagctaccaaagctaaaactgagaacaacaagaatatttaagctgttggtataacaaagatgggataaaattgataggacattgcttgcttgtgacanacactgatgttaatgaattatttgctttcactactg

SEQ ID NO: 50851 - DNA, 403 bp, Zea mays
  unsure (1)..(403): unsure at all n locations
agcttcggtgaatcacaagagcattctctttatgggcaaggacgntgntgactctgccagccctcacaatagacatatcccgaaagtaccttcctctcatattctcaagatgactctgctcgatggtcgatttttcgaaaattgaatgacttggcctccagggccaatccatcaaatcttcggccccactttccacatcatagctatcactatcactagtatctttagacaagccttccaatgtctacttagtaatcttctctgtatttggtattgccatcgactcgataaatctagcgatataaggattcacaggcttcttttcttcgaaaagcttctcctctttagtcagcttcgtctgaatagcaatcttcttgtcttgagacatcttttcttcagaaat

SEQ ID NO: 50852 - DNA, 156 bp, Zea mays
  unsure (1)..(156): unsure at all n locations
agaacctcgtacctaacaacgctattcaaacactctttaaaacctcggacaacaggacccaaccnccagcgccttaccaccaacctcgaatatttccaacaagtcaatctcaactcgagaggacctgcagcaccggcaaacgaagctcaagccgcg

SEQ ID NO: 50853 - DNA, 368 bp, Zea mays
agcttctaaagggagaacacgtgattggtcttatttatgttactttctaaaaagatagaccttgtgcagcttgtcaagcaggtaaacaagtgggaggagcgcatcacagcaagaatgtgatgaccacatcaagacctttggagatgcttcacatggatctctttggacccgtcgcctatctaagcataggaggataaatctgaaacccaagggaccctcaagcgcttcctaaggagagctcaaaacgagtttgagctcaaggtgaagaagataaggagcgataatgggtccgagttcaagaaccttcaagtggaggagtaccttgaggaggaagggatcaagcacgagttctccgctccctacacacc

SEQ ID NO: 50854 - DNA, 320 bp, Zea mays
  unsure (1)..(320): unsure at all n locations
cgtgcaaagcgcgctggagctaatcttcggagaaacccgatctctctgcaacatgacagcctgaagtgcccacacaacacgcaatgagtggaatttcagaattattggcagagnctctncagtcacaaggcgacctggttgcaagagtttttagctttcaaaatttttccccgtttgaaagaatgggaaatgccgaagctacagggggagaagaaagaaagtgaacttgtacgtttaccctactatttcaagtttaaaaagtactttaaaacaccttgccaagatggctatataacattgaagtaatgtgccatgaaata

SEQ ID NO: 50855 - DNA, 367 bp, Zea mays
  unsure (1)..(367): unsure at all n locations
atccatcacgaccttggtgagcctgacatcgccgacaacggggttaacgacgagcgggtatttccccgggctcggcacatggtcgggatggtcggcccggtccaaagtgatgggcttgtcggaccagtctatgtagactggcgccgccaccttcaccgagcagacctcccggcgctcttgtttgcggcgccgagccgacgtattcgtcgcataccctccataaatcatgaagcagtcgtggacctcggggacaccccctgctgggtgttcttcgttcttgtcgtcgncgtgggccctgccaccctcggcgggtggcccgcgcctgtggaaatggcgccgaagcataacgcactcctcgagggtgtgc

SEQ ID NO: 50856 - DNA, 430 bp, Zea mays
agcttgaaatgaggagatggcgctcgtcatctagagcttccgccaaatcctcaaacaaaggagggggaaagactacaagtcccgctccaagaaggtttgctacaaatgtggtaagcccggtcattttattgctaaatgtcctatatctagtgacagtgaccgaggcgacgacaagaaggggagaagaaaggagaagaagaggtactacaagaagaagggcggcgatgcccatgtttgtcgggaatgggattccgacgagagctcaagcgactcctccgacgacgaggacgccgccaacatcgccgtcaccaagggactcctcttcccaaacgtctgccacaagtgcctcatggcaaaggacggcaaaaagaaggtaaatctaaatcctccactaaatatgaatcctctagtgatgacaatgctagtgatg

SEQ ID NO: 50857 - DNA, 353 bp, Zea mays
agcttcccttacacgccgaggatacggagattttgttgacaagacacaaggggattgccccagcagcaaacatttgtggctccaagcgttatattctttatgtccctgggcccacatgtcggggcccagtacctttgtgcatgccccccttcagctataaaaggggaggcatgcaacgttacatacaggctcaatcttttagatcccaccttagactcacaagctcatacaagctcacaagcaatacatcacacagtggagtagggtattacgctccggtggcccgaaccactctaaaacctcgtgtgttcttgtgttcttcccgttttcctaaccaacaagcaaaacgccta

SEQ ID NO: 50858 - DNA, 369 bp, Zea mays
acaacattttttgcactgtctgactactgattggcaaaaggctactctcggatcatgtcttattttcttttcgctccaattgatttggggtcagatattgctctgctgtcttgacttcgtttctctgaggtttagcttggtagactggtattggagtgacaacagcatatgagacagagagaacctttctgttgtatgcttgtttgatttggaaacatagatgatatttagtggattccttgggcgttgtacatttctttgatctaaccacacttgtttgtgcctgggactggcatcgaaatccacactgcttaatctcgcattatatacaatcccagcccctgaataatagaattgagcacatgtttc

SEQ ID NO: 50859 - DNA, 448 bp, Zea mays
  unsure (1)..(448): unsure at all n locations
agcttccacatgcttgccccagtggcagcttatcttgtctgaatagccctctggtaagattctccagcgttattgaggtcaaacggcatggaggtatatcagaaggctccaaacggggtgatgaatgctgttttttcttcgtcttcttttgccaggctgatctgatgatacccggagtagcaattccagaaagacaacatagaacacccatcatttgagtctaccacctggtctattctagggagtccgaagggatccttcagacaatgtttgttgagatccgtatagtcgacgcacatgcaccaatccactttattctttttgagtacaagaacaggatntgctaaccactcacgatgtaacagttctctaatgaatccggtcgcgaccaagcgagccaactctgcacggatggcttctctctgtccggcgtgaaaccacacaattt

SEQ ID NO: 50860 - DNA, 323 bp, Zea mays
ggactcctctatattgggatcagactggagaaagacagttctttatgcttgaacttattccagaggcagaagaacaagtccgtataatttgggagaacttgagggtagcttataccaggccaaagagctatgcttgatatttaagaaaaccactggagtttgaggaaggtgatcatgtgtacctccaggtgtcaccacttcgtggaatgaggagattcaaaagttaaggcaagctatcccctccctttattggaccattcacaatctttaggcgagttggggagatggcatatcaactccagttacctgatcatctatctgat

SEQ ID NO: 50861 - DNA, 485 bp, Zea mays
ctgcacgcatgcgagctcgaccttataacgaggataagcggccttttgtctctcatgtggacggtccttaagcctctatgaaatccttaagggaaaatgcttaaaatatttgtaacatgctttcagtagtgcataaactgtcatgagcatcacacttattctatgacacaatgcacttcactttctctatgatatatacttgttctcattaacctaattatgtgccattggtattttacgccacaacatgtgttctttctctccatgcacatatttagggggaacaatctatgctgtatagaactatgatcatgcttaattcaatatatcttctgatcatgtctctttatgtctacgactaatgtgctttcaagtgatctctataattaagccgtagatcgaaagggaaatggagtctcttgcgaagtcaacgcttccactcaactctatcagtattatctacccttcgccatcacttcacacta

SEQ ID NO: 50862 - DNA, 261 bp, Zea mays
  unsure (1)..(261): unsure at all n locations
taagagacggcagaagaggcgccatccaatcttttggaactatggctggcgaaacagtccttatagccgcccacttaggctgccattgtatggtgggngacccggacagacttcctttattgggacacatggttctgttgggcgccactttggaaatcaacgaaggaatatctcaccgaactgcattcttgatggtcaccgtcataacttcctttgaagccatgtcaatgagttttacttgtatgttaagagtgttttata

SEQ ID NO: 50863 - DNA, 425 bp, Zea mays
  unsure (1)..(425): unsure at all n locations
agcttggtcattgtattgctaactgtcccgatatgatagtgatcaggatcaagggaacaagagggagaaaaagaagaactataagaaggcaaagggcgaggctcatcttggcaaggagtgggattcagactgctcttcgtccgactccgacaatgaaggactcgccgccaccgccttcaacaagtcatccctcttccncaacgagcgacacacttgcctcatggcaagggagaagaaagtaagcactcataatactagtacttatgcttcttcaagtgaggatgagtctagtgatgatgatgagatagattactcatgcttattcaagggattagatagaaccaaggtagacaaaattaatgaattgattgatgccttgaatgataggaatatactcttagaacagcaagaggatctgctgtatg

SEQ ID NO: 50864 - DNA, 440 bp, Zea mays
  unsure (1)..(440): unsure at all n locations
agcttcggctggtctggttgttccctcatgtcttttgtgtcgtagcccgggtgcatagtcaggttccatgttcttcggctggtatgttgacgctgtcaatggtttggccggagccgggtttgcgagagcagcccccgagccttcacacagagcgagaggacggtcaaggactgactcggatttttcatacgcccctgcgtcgtctttccgcaaggaggagggggggaagcgccatgttgccctcggagggcaccgaacatggtgtcttcagtgagttgctaacgggtgatccgagtggatgttcgtgccccgttcgataagggtcggctagcggcccacacgcgcgctccaaaagtatctgcacgtgattcgccgactcggttacgcttatatggtccagggctnacgcctcctttgagggattcgtacaaatcctctgc

SEQ ID NO: 50865 - DNA, 415 bp, Zea mays
  unsure (1)..(415): unsure at all n locations
agctngaccactacatgtctggagcattctcttgtcttgcatnangcccgagagaagagggagcttcatcatactactgtcaagaacatcagcttcgttaaaactaccaagcattcatcatcagagggctagagtaccttcgacagcactggtgacccgtgaaagagaagaggccgaagtcatcgagacagccnctgatctcccaacacatgaggcaatctgggttaattgtgaaggatgaagctatagacgaaggtgcacctactgtcgaagctcatcaagcggacatcgaagaacacaatgctgatgaagaagatgaacactatagcactctgatcccatcaaacccatgcacttggactttgataaaactactgtaggtgaagctgatgtcacatgatgatgaatctgggta

SEQ ID NO: 50866 - DNA, 405 bp, Zea mays
  unsure (1)..(405): unsure at all n locations
agctggggaaggtgctgcatgcgcacatgtgttatgcggcgacgccacagccagcccatgctagtcttagcaattaagcatgcatctagaccgacctnctcttttgcaaaatcaactaaatagagtttgtcgtctaatacacccttaaaagctagtgaaccatcacttcttctaaagacagacacatctacatttgtgaatagacaattatatcccatattacataattgacttacggataacaaattataaccaagcgactcaactaagaatacattagaaatagagtgctcatttgagatcgcaatcttgcctaagcctttaaccttgccttgattcccgtcaccgaatatgaatgaatcttgggaatctctattcttgacgtatgaggcgaacatcttcttc

SEQ ID NO: 50867 - DNA, 217 bp, Zea mays
taggacctaaaactcgcttaaggaaactggaagtcaacaagttactttctaaagaagacctggcacttggaagcggaaacggggagacttaaagcccaaaggtagaccttagaaccgggatattctatgactctcgacctcctatctactagagaagagttggcttgttagtgagaatttcccgttattggtatttttgcagaaaatgaaacccgga

SEQ ID NO: 50868 - DNA, 443 bp, Zea mays
  unsure (1)..(443): unsure at all n locations
agcttctanagggagaacacgtgatatgtttttcttacgtgcaattcgaaaaagatagaccttgtgcagcttgtcaagcaggcaaacaagtgggaggaacacatcacagcaagaatgtgatgactacttcaagacctctggagctgctgcatatggacctcttcggacccgtcgcctatctgagcataggaggaagtaagtatggtctagttattgttgatgacttttcccgcttcacttaggtgttctttttgcaggataagtctgaaacccaagggaccctcaagcgcttcctaaggagagctcaaaatgagtttgagctcaaggtgaagaagataaggagcgacaacgggtccgaattcaagaatcttcaagtggaggagttccttgaggaggaggggatcaagcacgagttctccgctccctacacacctcagcaaaat

SEQ ID NO: 50869 - DNA, 264 bp, Zea mays
  unsure (1)..(264): unsure at all n locations
tagaaccttatcccctttctttgatgggtgcatagaagtcttatatggcacacacattccaactcatgtatgtnatgagtcgaggcttgaacacataaataagaaaggtggcctagctacatgtattagctatagttgagatggatatgcggttcagatttgtaggtgctggttgcctggttcttgctatgacatggtagtgctcatgagttgtatgggagaagcgaactatccacacccactagccagtatggtggcatgcat

SEQ ID NO: 50870 - DNA, 422 bp, Zea mays
  unsure (1)..(422): unsure at all n locations
tacgcttggtggaggacactngcttatatgtgctgggacagnttgtccctcaccctgactccattctcatcagctagctggcacacttgctgcctgtacttagcgtcatgatcgctcggccacgcctgtgcctcgtccactgctgtttcctgaaggtctatgattatgtcgtgcagcaagcagcagacatggattatccggggcagcttgtgcttgtccggacgccacatctccccttgcaggaacttccatgtgtccttgaacttggccagtgttctcggagcgactgttctcgcacaagagtgcctaatgttgaactcagcactggactctgtgaggtccttctcttggaacgtgtgagcagccagcggagaagggggtagcccgagtcgccgatcaagtattccccgatctctgaccca

SEQ ID NO: 50871 - DNA, 374 bp, Zea mays
  unsure (1)..(374): unsure at all n locations
gacccgggatcctattagtcacctgangcatgcaagcttagagggagccatcttaatgctttcttgataactattattatatgagaactccgctaatggtagacaatcatcccatatctgtgggaattccataacacatgcccgcaacatgtcttcgagtatttggtttaccctctcagtttgaccactggtttgaggatgataagccgaactatggagcaacttagtacccaaagatttgtgaagttcttcccagaatttggatacaaattgaggtccacgatccgacactatagtctttggaatacccgtgcaactgagaatacgagcgatgtacacgttctcatacgtgaggaccaggtaatatgttttga

SEQ ID NO: 50872 - DNA, 126 bp, Zea mays
ggtatgaatgcctaaagacttttatcactaatggcttcaagtcgaaaggccgatctactttatttataaaactttgaccagatttgttgtatgccatattagtgagtatttatatgggttcatcaa

SEQ ID NO: 50873 - DNA, 244 bp, Zea mays
  unsure (1)..(244): unsure at all n locations
gaatatccacagcgtgcccgacacgaatcccggcgaccggcgcanatccggacgcgcggatcaccggcggtgaggggcgatgtatcagagatattccgaatactgtaccatgagaactccaattcaaagcctctgtccgaccaacttgtaggacacataactccaatttctgcatgagaacttgctaatctctcagtaacaaacttgcagtccttcataccagctatattcttgctatggtggt

SEQ ID NO: 50874 - DNA, 378 bp, Zea mays
  unsure (1)..(378): unsure at all n locations
ttaagtcacctgagccgcagctctacgatataggtcggagagagattattttctactctaacganctatgggtttagaggtatcttggtcttgcagtctggattgccataagactggtgtacacgctgaggtgagcggtactggtgctgagtcccgacgggagcggtggaaccaccatccaagtgacgacgttccgcgcgctcagcccgagcatggcgaactcagcacgagccctactcagctcgtctaatgcatggtccacctccgcgtttagcacggcggntacggtgactgtgctgctcaacctacgattgccctcaccgacaggtgagacaatcacgcctcctgtgctgccagatggacgggcggggtaatact

SEQ ID NO: 50875 - DNA, 436 bp, Zea mays
agcttatggtttatgggcgcatatgtcagcagcatgatttccggcgacaaaacatgcatgcacgactgacggcttaaatgcaaatgtgcatgctgatgtcatgcatgcaaagtccggcaaggccgcaaggagtaaagaaagattaagggcctatttgtttacaccatggattatataatctgaattatttttggaggattatataatctgaattatataatctggattatataatctgagtagtcttgtttgtttacccagattatttgagttgttaataggattcttttgtatgaggaagacaagaatgtcctcgatatttgtactaggttgaaactcatatatgagatgaacaatgtaacaaacgtttctgagtattcataacttattacataaataatttgaacaaaaataattcaattgacatttggaaata

SEQ ID NO: 50876 - DNA, 71 bp, Zea mays
  unsure (1)..(71): unsure at all n locations
tgaagacncgccgccaccgccttcaacaagtcatccctcttccccaacgagcgtcacacatgccttatggc

SEQ ID NO: 50877 - DNA, 316 bp, Zea mays
  unsure (1)..(316): unsure at all n locations
agctntatcacccttgcattgtgcccctaatttcctatcaactatcttcctatcctttctacaaatagcaaaggaagcatttaaagcatgataaattgtagagggaccattcataacttttctaggaacatgaacaatattcttcctaggcacatgatgaatatttttcctacgaatagctctaccatgcatataggaagaactggaagcatacatagcataagagtcataggcatgtgaatcaaaagtattacaactcctatgagaccgtcttctatcattgtacataaaagcatggttctttntagtactactt

SEQ ID NO: 50878 - DNA, 184 bp, Zea mays
  unsure (1)..(184): unsure at all n locations
atgccctaaaaatatctatttgtaggcaaactccatgtcagatacaggcttatttattccgctggtatccgaacacaaataggagaatncttttcagaaantncatttggctctnctcatgcttttatgtataagagtgaggcatctagctctaggcaatccactcatgttaaattgcctaaaa

SEQ ID NO: 50879 - DNA, 448 bp, Zea mays
agcttgacaatgaggagatggcgtcttttatttttagcttccgccaaatcctcaaacaaaggagggggaaagactacaagtcccgctccaagaaggtttgctacaaatgtggtaagcccgagcattttattgctaaatgtcctatatcaagtgacagtgaccgaggcgactaccagaaggggagaagaaaggagaaaaagaagtactactagaagaagggcggcgatgcccatgtttgtcgggagtgggattcctacgaaagctcaagcgacttctccgacgacgaggacgccgccaacattgccgtcaccaagggacttctcttccccaacgtcggccacaagtgcctcatggccaacgacgacaaacggaagaagggtaatctaactctccactaatatgagttttagtgatgaaatatagtgtgagaggataatcgccgtctctt

SEQ ID NO: 50880 - DNA, 257 bp, Zea mays
  unsure (1)..(257): unsure at all n locations
taaagcctggtaagtagcataagctaataatatgcgaattgtctcaagcctagctacgggtgcataggtttcaccgaaatccaaaccttcgactgggtagtanccttggtccacaagtncagcctttgttgctgttcaccacaccatgctcatcttgcttgttgcggaagacccatttggttcctacaacattatggttaggacgtggaactaaatgccatacctcattcctagtgaagatgttgagctcctcttgc

SEQ ID NO: 50881 - DNA, 398 bp, Zea mays
agcttcttcttctcactcgtgccatacttttcttgttcctgggcattatcattatcagggcattgagctataaaatgactagtcttaccgcatttgaagcaggagcgctttccctttgttttattcttggaggggtattctttgcgtcctttgagtgcggtcttgaaacgcttgatgataagcgccatatcatcttcattgagtccggcagcctccacttgagctaccttgcttggtagcacctccttactgcttgttgctctgagagcaacacgctacggctcgtagatgggaagtggaccgttcaaggcgtcatccacgtatcgtgcctcctttaccatcatgcgcccgctcacgaattttctgagtatctcctcgagcgtcatcttggtgtacct

SEQ ID NO: 50882 - DNA, 120 bp, Zea mays
aagggggaatgacccgaggagacagctgaaagggaaacccgcttgtgtttgtaccgcccactggtgtctcgtgatggggttagagtcgctggggagagagagatttgaagcgcctgtctt

SEQ ID NO: 50883 - DNA, 452 bp, Zea mays
  unsure (1)..(452): unsure at all n locations
agcttgcgtgggcatattcaagctntatgccatggtgaatggatgacctgctccaactgctgatccgtattccatacatatctcgtcttagcctcggggtaaaaaatagcgtactacatttcatcgacataggtagcttttcgactttcaaaagccaccacgggtgagcctctggctggatgcaggctcaatgccttgttgactcaggcggcaatacctgccgcgcgcagacccgtagctccaaccaaaagcgggctggctgctgaactggcgcatcctcaagggctcagcgacccgatcgagcttcggtcgcccccggcaggtaataaatgagccgtgatccagttgcgtttaattatactattatgcacgctagtggatagcgatggtggttcaattgcaatcaggatggtaccatggaaagccatagcaagaactttcatctccaagct

SEQ ID NO: 50884 - DNA, 384 bp, Zea mays
agcttctcatatttatagtgtgcgactgatgttttcttggcacactgtacatccgacctcgggccattacctattcctatattgattaacgtcgataaacatcttaattaattgaagtcatccataaaacatgaaacgaattgatgtgcatgaaaatgaaacaacattgcagcaataggtaccttgaggtgagacaacttgttctaaagaatcttttaattagattaactacgagtcccaatcgtgtgattactaagcttatcttcgcatccggactatattacaaaattgaggcacaaaaattgcctcatatgataaagacaacctatggagatcatatgtatgcataaactttcgaaatcgatcgataaactcgataacaaa

SEQ ID NO: 50885 - DNA, 366 bp, Zea mays
agcttggcctcaggcgccataaggaactccttctcgcccgacccagggcttggactcgggctcagccccggaagacgacgaacttcgcctcgcccgatgcagggctcggactcgggctcagccccggaagacgacgagctccgcctcgcctgaccccagggctcggactcgggctcagccccggaagacgacgaactccgcctcgcccgacccagggctcggactcgggctcagccccggaagacgacgaactccgcctcgcccgatccagggctcggactcgggctcgggctcggccccggaagacgacgaactccgcctcgcccgaccccagagctcggactcgggctcagacccggaagatga

SEQ ID NO: 50886 - DNA, 189 bp, Zea mays
aacccgaatgtcacttaagtttatagagtcgaatctcctgctgatacagtatgactagcctgatatgcaccagtgttaccgcaacctggttcatgcaccgtggtacgtcgcgcccgcattcctcaaaccgaacggcatggtgacatagcagtacatgccaaaccgcgtgatgaaagaagtccgagctgg

SEQ ID NO: 50887 - DNA, 381 bp, Zea mays
agcttttaatacctaaattcctacttactatgcaattgttggtttttgagatatgcatgaggcactacacttagggagagtattcaaaactcaaatcattcatgaaaacccctagtgcaaagccaaaatgcaaatctcaccatttgcctattttctctaaaaattatctagcctatggcaaaatattttgaaaattatgagaaaatatatgagggagccaatacctgtcccaacaggtgttcttttgtgtgattataagttgggatttggtttggttgaaaactagatagaaaatttgaaaaatttcaaaattccctctgtctgggctcaccggatagtccggtgtgcaccggacactgcactgtgcactgtccgatgcac

SEQ ID NO: 50888 - DNA, 431 bp, Zea mays
  unsure (1)..(431): unsure at all n locations
tgtgaagattcttcattccaacatgtgctagtcggcgatgttagagccagcccatgttagtcttagcaattaagcacgtgtcgagttcagctctatcaaaatctattaagtatagctgaccctctaacactcccttaaatgctactgaatcatcacttcttctaaagacagtaacacctgtatccgtaaaaagacagttgtaacccattntacataattgcgaaactgaaagcaagttgtaatctaaagaatctataagaaaaacatttgaaatggaatggtcaggtgaaatagcaattttacccaatcctttgaccaaaccttgatttccatccccgaatgtgatagctctttggggaatctggtttttctcataggaggagaacatctttctntcccttgtcatgtggtttgtgcacccgctgtcgatg

SEQ ID NO: 50889 - DNA, 339 bp, Zea mays
tgcaagcttggaggcgtctatagggtgtctactttttgtagactcctccttcttctcctccggtgccttgaatgcaacgggttgggcttcggatgagtcgccaagctcgttgattttcctcgagccttctatcatgcactcaaaacttacaaaatgcccgataacttcctcgggggtcattctagtatatctaggattaccacgaattaattgaacttgagtgggattaagaaaaatgagagatcttaaaataacatttaccacttcatgatcgtcccacttcttgctcccgaggttgcgcacttggttcaccaaagtcttgagccggttgtacatgtg

SEQ ID NO: 50890 - DNA, 351 bp, Zea mays
  unsure (1)..(351): unsure at all n locations
agcttaccgcatgtgaagcatgagcgcttcttctttgtcttggncttgcttggctgtcccttgcgacctttaagcgccgtcttgaagcgcttaatgatgagggccatctcctcattatttagcccggccgcctcaacttgcgccaccttgcttggtagcgcctccttgctccttgttgccttgagagcaatgggttgaggctcatggattggaccattcaatgcgtcgtccacgtaccttgcctccttgatcatcattcgcccgcttacaaattttccaagaacttcttcgggcgacatcttggtgtacctatgattttcacgaatattgttcaccacatgaggatcaaga

SEQ ID NO: 50891 - DNA, 444 bp, Zea mays
agcttggcctcattagatttcagtctatctactaaggagagtaatatttttttctttttcaagagcttcctttcttagcttgataacttcttaacacagattcccaagagctatgcgatagctctcatcctctgcatccttctggtccttcaaagctttgcttagaattaagccctagaaaacgaaaagtgagaatgtaacagcagcaagaaaagccataaaagtagacaagtcaaagtataggcaccttcagactattataagcaaaattgtctgcaagttgatctttcgacattgctgtggcagaaccgcccgaattattctagcttaagtgcccaagtcacgccttagaggtcgcgacacacttaaatcagaataaccggttagtccctcagatctagtctgataaagcctctcatccaggatcaaataccactaacccac

SEQ ID NO: 50892 - DNA, 331 bp, Zea mays
  unsure (1)..(331): unsure at all n locations
agcatgccatgcatgattgggaacgcgtntgcttttttgactgtcaatggcaataatgggcgttttaaggttatatgaaataataaaaaaagttgccaactttttcccgtggtataccttctttgcccccctccctcctcacccactttnttttttggtgaaatatagtgtgttcccttcatgaatgtatcaaagagggagaggctctctgcctcggtcctcggcaaagaaggaacacctaagcattactaaaaaattttgttgagtgctacgggcctgacactcggcaaagaaacaagttttgacgagtgccttctaacgcactcggtaa

SEQ ID NO: 50893 - DNA, 433 bp, Zea mays
  unsure (1)..(433): unsure at all n locations
agcttgtgaagattcttcatcccaacatgggctattctgcggtgccagagccaacccatgttagtcttagcaattaagcaagtgtcgagttcagctctatcaaaatctactaaatatagctgaccctctaacacacccttaaatgctattgaatcatcacttcttctaaagacagtgacacctacatcagtaaagagacagctgtagcccattttgcataattgagatacagaaagcaaattgtaatctaatgaatctacaagaaaaaacattggaaatagaatggtcaggagatatagctattntaccaagacctttgaccaaaccttgatttccatccccgaatgtgatagctcgttggggattttggtttttctcgtaggaggagaacatccttttctcccctgtcatgtgggttgtgcacccgctgtcg

SEQ ID NO: 50894 - DNA, 366 bp, Zea mays
  unsure (1)..(366): unsure at all n locations
tatacaccagaccaggtccgtaacgccttctagagcatagtcggatgtgctaaggcactacaacctcatcatacaagctattacatatgtactaacgagggcattacactttacatcggctcaaccttaagagtaaatcccatattcctatagttaaatagcatcattcttagctcctcacccgcaaaaagacttcgcaactccccctcacctgctctcacagcggctggcatggacaacagttactggctgccagccctactcacacgaaggcgaccgtcgggcgcgcactcactctactcttagaaccagccttcgacgctacgcccagcgctcggacangcacaacttatcatccgagcatgc

SEQ ID NO: 50895 - DNA, 341 bp, Zea mays
ttcatcatccacaccagaacattatgacgatcaagaggccgcttgagttactccacatggattctgttcacccgattgcttatataagcctccacaggagtaactattctctttgaattgcggatgactattcttgattcacttcgatgttatttttgcaggaaaaaccacgaacccaagagactttgaagaaattcttcagacggactcaaaactagtctggattgggaatcatgaagaatagaagtgattatgggatataagccaaaaactccctaattgaatgatttcttgaaaggaggtgcataagcttgagttttctactccctactgtcacaccc

SEQ ID NO: 50896 - DNA, 156 bp, Zea mays
accatgacaggattggccaggcacactgggtgatgaacactttccatgaatctggcgtacaacagctatctgaccttctttcacatgaagtactaccgctagacagactgtcttctaagcatcggactcaccagattggcgacaagacggatcttc

SEQ ID NO: 50897 - DNA, 356 bp, Zea mays
  unsure (1)..(356): unsure at all n locations
gtctctggccttgctaactttgtctacatggctagaaatgacttgagaatcagnttgcaggatggccctttttatgcccattgctctcaacttccaaagccccaacagaagtgcttcgtactcaacaatattatttgtgcaactgaagtcaagcttgcttgcataacatgttctaacttttgaaggtgccactaggacagcagccgcttctgcaccgaaggttccctaggatccatcgcagaacaccatccaagctttggcgtcttggtatatttcttcttcctgagcctctggcgtccaatcagcaatgaagtctgctaacgcctcggactgaattgaggatctatgcacatagt

SEQ ID NO: 50898 - DNA, 375 bp, Zea mays
gcatgtgggaaagatatattatccttgtttcattttatgaaactattacatgagaattaaaaagtttcctttattacacaaaaaataaaactgaatggaaaagactactatcaaggtacgatatttgtcaataaatgtgcttcgactctagcacagtgctattgactgtgcgagcttcggactgttctctgaagtccctttgttggtgagcatattgacccccttctggctgctggccttgttgcatcagtggtggaagcggaagctgttgccatgaagcttcaagttgactcgccgaagcaacagaaactgcaagggggttgcctacatattctgggatataaggcgaatgatacgaaccagtgtgcatgatct

SEQ ID NO: 50899 - DNA, 440 bp, Zea mays
  unsure (1)..(440): unsure at all n locations
agcttgtgaatggtctgtctcttttccctctcccatttattattttttagaacaacattttttgcactgtctgactactgattggcaaagggctactctcggatcatgtcttattttcttttcgctccaattgttttggggtcagatattgctctgctgtcttgacttcgtttttctgaggtttagtttggtagactggtattggagtgacaacaacatatgagacagagagaacctttctgttgtatgcttgtttgatttggaaacataaatgatatttagtggattcgttgggcgttgtagatttctttgatctaaccaacttgtttgttgcctgngactggcatcgaaatccacactgcttagtcttgcattatatacaatccagcccctgaataattgaattgaggtacatgtttcttttggacttaaaaaggctg

SEQ ID NO: 50900 - DNA, 65 bp, Zea mays
gtggtctacttaactactctactgatggactaagttctgtgtatgtctgtgtataacactctgca

SEQ ID NO: 50901 - DNA, 399 bp, Zea mays
  unsure (1)..(399): unsure at all n locations
gagcttggaggcagttattggatgtttatttgttgtagactcctccttcttttcgtgcgtcgccttgaaagcaacgggttgagcttcagatgtgtcgccaagctcgttgattattctcgagccttctatcatgcactcaaaacttacaaaatgcccgataactatctcgggggtcattntagtgtatctaggattaccacgaatcaattgaacttgagtgggatttagaagaatgagagatcttanaataacatttaccacttcgtgggcgtcccacttcttgcttccgaaggtgtgcacttggtttaccaaagtcttgagtcggttgtacatgtgatgtggctcctgccctttgtgaagccggaaccgaacgagctgcacctcgatcgatatccgctt

SEQ ID NO: 50902 - DNA, 391 bp, Zea mays
tatgttgagcaacctgccggctttgaagacagtgagtatcctaaccatgtctataagctctctaaggcactttatgggctcaagcaagccccaagagcatggtatgaatgccttagagattttcttattgctaatggcttcaaagtcggaaaggccgatcctacgctctttaccaaaacacttgaaaatgatttgtttgtatgacaaatttatgttgatgatattatatttgggtctactaacgaatctacatgtgaagagtttagtaggatcatgacacagaagttcgagatgtctatgatgggggagttgaagtattttctaggatttcaagtgaagcaactcctagagggcaccttcattagccaaacaaagtatacttcagacattc

SEQ ID NO: 50903 - DNA, 369 bp, Zea mays
atcagatccaggagcttcttttttactcttcagctccagccacaggttcgtcatcctgtacgtattaaagtattataagccaaattcaagtccgaaggaataggtaagcccaaagtatgattctgttaccggcttaagatgactccgagcttcatcaccagctttgcttcgtccacctttagaccatactaatcctatatgtgtattggctatgcttcgggcaaagttgggaatgttatccacacctgccggtgatatggtgaagatgggtctattgataatcttttcgtgttcgcagccagacttcataaaggcaacatctgtgccccgagaagctaccagggcacagaacggaccatgtccaacgat

SEQ ID NO: 50904 - DNA, 336 bp, Zea mays
ccgtcgcagaacactgtcctagcttcggcatccttatttgcttcttcgttctgagcccctggcgttcagtcagcgatgaagtctgctaatgcctgtgactggatcgaggatctatgcgcataatcaatgctcaattcattgaggtctgcagcccactttccaatccttctagtagctgttctattctcataatatccttcaaaggctgtgatgaaggaacaattatatggaatgcttgaaaatagtgccgaagcttcctggaggccatttagacaggatacaacaccttctccaattctgtataggttttctttgataaacttaggacttcggaga

SEQ ID NO: 50905 - DNA, 403 bp, Zea mays
cgaggcatgcaagcttcactaccgggctgctggcatttataatgaacacctccgaacctcacgttgcaccacaccgcgttgaactggccgcccgcggagccgtagaacacgtccggaatctcgtacctgagcctgccgaggcacgccaagcacgcctcgggcgcctgggtgggcgtgcactgcaccaacccgtacaagtcgtgcaccaaagagtggaccgccgtcgagaacccttgggcggaggtgaccaccccggcggcgtatctcgccgtcgagttccacgccagccaggcggacagcgcgcccacgaggtcggccgcgaaccccgcgaaccgtccgggatcagcggagacgttcacctgcaggttggcgccgaactgcaccgacgccgcggcgtcgcccg

SEQ ID NO: 50906 - DNA, 360 bp, Zea mays
  unsure (1)..(360): unsure at all n locations
aaccacccgcatttataacactatataatggagttgttatttntgagcctttaactaaacaaaggagcataatatttaaaataaatatataagtttatagaaatatatacttagcattcatgccgctatattggatgtttcatgtacattaaaatttgaaactcatatttgaatgtggaatttaacatagaaaatataaaacataacagaaaataataaaagagctcctaaccgcgcttgggccgaatcccacagctaggcccaactaccttccactctcggaccaacgtgtttacccgtgccgcgcctgatcactctgacgtgtgggtcccaatgtccggcgcttcttcaatctctcgc

SEQ ID NO: 50907 - DNA, 220 bp, Zea mays
accctataacactcccttaaacgccaatgaatcatcaactgagtgaaagacggcgaaacctacaacagggaaaataaagttgcaccccatgtgacctaattgagatacagaaagccaacggtgagctcaagaaacaacaagacagacgttggaaacggaatgggcaggagatataccaatcttggccaaacgattgaccaaaccttgatgaccatccccg

SEQ ID NO: 50908 - DNA, 298 bp, Zea mays
gcaggacgcttcccatggcccattctttttcttcttatcgcgcatacactggagagggtccgttgctaaactgaacagacatggagcaagggggtcccattatgagggaccacgcacagcgcccactctatggtgttgctctccatggcagaggaatcggaaggaccaagagcccacaattcaaggatccttgctgcgcccattgtagaaaccactgtcctctacactctagggagatccacccatggaactgaggctaacgctccctatatcctcagcctgatggataggaccagcc

SEQ ID NO: 50909 - DNA, 409 bp, Zea mays
agcttatgtgcgtgtatgtgatggactgagcttgagcagctaaagtagcactagatgggaggaggagaggaagcacctgtgagggagggaagaaggatgacgtcattctgcctattctcgcttcgtcgggaaggatctcatctttgcatgctttgctacctacaattgcatacgggcctgagagatataatcaatccccctgtggatctgggcattttggaatgctacgccaacgcaagctaccggtgtaacggacggaacgccgttgtcggccgggccgcgaactgtgcttttatttcaaccgtccggcccattttcaactgagcccacttttcatggtcgcctgcatgtccatgaaaatatgagtttccctggtacgtcccctccttctatgctctttttccggaaa

SEQ ID NO: 50910 - DNA, 310 bp, Zea mays
  unsure (1)..(310): unsure at all n locations
tctaaagggagaacacgtgatatgtttgactaacgttcatttcttaaaagatagaccttgtgcagcttgtcaagcatgtaaacaggtgggaggagcgcatcacagcaagaatgtgatgaccacttcaagacccctggagatgctgcatatggacctcttcggacccgtcgcctatctaagcatatggggaagtaagtatggtctagttattgttgatgacttttcccgcttcacttgggtgttctttntgcaggataagtctgaaacccaagggaccctcaagcgcttcctaaagagagctcaaaatgag

SEQ ID NO: 50911 - DNA, 433 bp, Zea mays
  unsure (1)..(433): unsure at all n locations
catgcaagctcggatgaggggacattatcattatcattctagctatcatccgagncccattcaactaagtaggctttgccatctttcttcttgttatagcatttctttatcttcttgtcactttcatctttgcccttcttcttcttgcttgggcaattcatggcaatgtgaccaagttccccacactcaaaacactttctatcattgaaagcatttcttctagatgtttgacctcttctaggttgacctctcttcatcttcatgaatttattgaatttccttacaaacagagccatgtcaccatcactctcactttcattttcttcatcattactatcttccttttcaattgccgttaaggccttaactttgagagcaaatgattcatttttcaccttctttgccaaacttaaagcattggcttgtgacttct

SEQ ID NO: 50912 - DNA, 434 bp, Zea mays
  unsure (1)..(434): unsure at all n locations
tagccaccctaccaaacactccttgagtttcgcatgacctgtgttttttgaaaaaaaataacatatcactttaattntgtcctaagtcaaacttctctaactttgaccacgtttttttgttgttgaaaaaaacaaattaacatcgaaaagtacaaatgtgttatcaagacatatttattggagaatctagtgaaacaaatatgatgttgaacttttggtgcattttctataaacttggtcaaagttagagtttgactaacaaagctaaagtgacttataatatggaacaaaagagagtgtgttttgggaataaataattattagtcagttgtccgtgctttgctacggntgttacatatcatataaacaggtattgatatatttattcaaatataattattgcttatttctaaacactaagatacgtgttgtct

SEQ ID NO: 50913 - DNA, 415 bp, Zea mays
  unsure (1)..(415): unsure at all n locations
agcttactatacctttaacatcntaagttttcttatatttagattcaaagggcaggtgggggtggggttttgtattacgtaccgactcctttgggttgaaagtcggggaagcgagaacgtanaaaatcctcagtctcccacgtagcctcttctactgaatggtggctccactgaactttatacatccggatcgaccttgctcgagttgatctctccttttggtccaataccttgacggggtgctcttgataagataagtctggttctatctccaattctggttccggtagcactttcgtgggtaagcggacacactttcgtagctgagatacgtggaacacatcatgaactgctgacatatggggtggcaacttcaattgatatgctacaggtccacaagtctctttgatctcat

SEQ ID NO: 50914 - DNA, 370 bp, Zea mays
tgcctcgggctatgggtgatgtcgctgttggtgctaccccctcaggatgggtgtgctcacgaagcacgggtttgctgacaggagtctgggcactaagaacatgagggctgccctacacccaccccttcatggtcttctaacacttggcagaggaatcgaagctaccgataggatcgaatacaagggtccccttgctgcgacgcagtctacaccagcgctctccaccagactcatggggggtaccatggttggagctattgttagcatgcccttttcccttgtccaaagggctaggaccacactgggggccaccctacttgactgtgacccctcgcttggcatgcatagtatctatcgggtacctaagaac

SEQ ID NO: 50915 - DNA, 441 bp, Zea mays
  unsure (1)..(441): unsure at all n locations
agctntaaccccccccccgcgtgaggccttttctcatttctttctaaccataatgaatgcgacatcgaatgtcatacttgatgcatatccactttatttgttcccttgtatgatgtactgtttgcttcccaatttgaatggatgtatgtatgtatgcttgcaatcgcatagagaacgatccggttgaagagcccgaggaactctcaggagaagcccctgagcagcaatcggttggtggaggcaagtgtcccttgacctatctatgtcctattcattatttaattcacctcccgctgtatacatttatgcctaaggattgactagttttgttatccctgtccttgcttacctatttgggttggattattattgtttagctttatgctattgctcaaccataatcaatgaacatgatgagattatctatgatacgctgttttc

SEQ ID NO: 50916 - DNA, 413 bp, Zea mays
tattcaatcaaaccccaaacaagctttttatgtgtgactcaataggaaattctgaatgtcagaattctgaatttcagaccttgagccacagatcaagcgtgttcaccttgatccctaactcaaatcctaatggccccattaacaaaaatgtgcctaactaacccctctgtcgcatgataaaaaatggcattgggacgtgagccctacacatgacaaaaccttggattcgcctcgggtttgagcacggagacagaccggatttccgagctccatatctctgcaaccagtaggcaaaatcctatgacctacacacaagatcggtagcttgtatggaggagaagaagtcttgtgcactgaccaaggcgagagcatgctcggatgagtgaccacacgcgccataacttgcgcagaac

SEQ ID NO: 50917 - DNA, 439 bp, Zea mays
agcttgcaggacgtcgccctcgtacctgagactactgtgcagtcggtccccgacgtgacttcatcgccgctcgtcgaccaaaaggtaccgaccgattctcatcctacgtcatttggattcagcctcaacccgcctagcgacctcgctttggcggacgctctcgtagaggcgagtccaaaccctctggggtttcgcatgcggtcgccttgggaccggttgacagacgtctcgacctacgggccctctgggtccgaggaagacgacgaccccagcatctgttgggatttctctggacttggcaaccccagtgccatgcgggacttcatgacccgatgtgactactgcctcttcgactgttccgatggtagccacagcctcgacgacgaggactgcggcccaagccgcgaatgtttccacgtcgatctaaggggtcccttcg

SEQ ID NO: 50918 - DNA, 454 bp, Zea mays
  unsure (1)..(454): unsure at all n locations
gacattgtcttcctggtggaagccaatgtcatccttaatttcattgcgtctcccattatagagcatgcttctagcaaatttaaatntttcattgtctaagtcatgctcattaatcttagcactaagttgagctatgtgattattttgttgtttaattaaaactaggtgatcatgaatagcatcaacattaatatctctacatctagtacaaatagtaacatgctcaatggtagatgtagagggtttgcaaacgtttaattcatcaatcttagcatgtaacatgacattttcatttctaagattggaaataacatcattgctaacatttaaatctttagccttagcaattaatttttcattctcaattttaaggctagagagtgatgcattcaacttgtcaatcttagtaatcaaactagcattatcatttctaagactaacaattgaattatca

SEQ ID NO: 50919 - DNA, 304 bp, Zea mays
gtgacttgcgacttcgatagatacggaccggtaggtgggcactggggccttcctccctaatatcatatgcgatgtcctaacaccatcttatgatgttggaaaatactttcaccggtggtcttattatctcgaccgacagaagtttcttagctccatcgctagaggcttgcactgcagtgctctgcataatgaaaagttcggagaataaagttgtaatgtgtagatgagaatacgttaactgtttgagataggctaataccgggttggatgtcctcctcgtggcactagctccgtgtttactatg

SEQ ID NO: 50920 - DNA, 444 bp, Zea mays
  unsure (1)..(444): unsure at all n locations
agcttnctcccttctttgtcggaagtcattatcagttcggatttactcatccattttttgaagcaacttctccagagtttagggaggtttcctggcaaagtattgggttgtaggtcctggctgaagacccttgatcatagctgtcacacccggttttagaaggcaaaccgaatgcgaatcatgtacgtgccaggatcagcaattcacgtacacagcagttacataactggacatcatcacacagtgctcaaataatgacataaaagagggtataatagttgattacatcatgatgtccaagacatccacatagtctttaacaattatcaaagtgcggaaaagaaacgtagatacacacggtctacacaggcagccgactgggggggttgccgctaacccacgcctagaactcatcgtactcctggaactcctggaagtcttcct

SEQ ID NO: 50921 - DNA, 388 bp, Zea mays
  unsure (1)..(388): unsure at all n locations
cacggaatnatcttctaacacaatacgcccgatatgaagaaagtgaagaggccattgaaggtgcttatgacaagataataatgaatagctacacagaccgtaagaaatccaaattccatctgaaaagcacgctaaaagagcaagtggaaggacccccatcatggcttaaggcactgcttggatattttgaggtgccatcactagagatcatttcaaggagatttgccttttttgcgttctatgccgggcggagcattgcaactactgctgagactgggcctgcctttcacgcatgcttggattcattcggatagctacccacatgctgctttaagtaccgaatctattaaaattaagatggcgctctcgctgcatcatacatggtcac

SEQ ID NO: 50922 - DNA, 408 bp, Zea mays
  unsure (1)..(408): unsure at all n locations
ctatcctagntgcactntccaaagtcagaacatgctatgcagcaaggcttgacttcacgtgtacaaataatattgctgaatacaaagctttacttttggggcttcgaaagttaaaggcaatgggaataagaaaggcagtccttaaaatagactctcaagttatttctggtcatgttgacaagagttgtaaggcaagagatccgaagcttgagaaatatctggacacagttcgaaggcttgaagcttctttcgaaggattttctgttaagaatattccaagaggggaaaatgagcatgctgatctgctagccaagtcagcggcacaggggcttcctctaccttcggaagtantttttgagataataagagtaccttcggttgaactcctccaaagacagtgctcacaat

SEQ ID NO: 50923 - DNA, 414 bp, Zea mays
agcttctaaagggagaacacgtgatatgcttgactaacgtgaaattcgaaaaggatagaccttgtgcagcttgtcaagcaggtaaacaagtgggaggagcgcatcacagcaagaatgtgatgaccacttcaagacccctggagttgctgcatatggatctcttcggacccgccgcctatctgagcataggaggaagtaagtatggtctagttatagttgatgacttttcccgcttcacttgggtgttctttttgcaggataagtctgaaacccaagggaccctcaagcgctttctcacgagagctcaaaatgagtttgagctcaaagtaaagaagataaggagcgacaatgggtccgagttcaagaaccttcaagtagaggagttccttgaagaggaagggatcaagcacgagt

SEQ ID NO: 50924 - DNA, 408 bp, Zea mays
  unsure (1)..(408): unsure at all n locations
cttcatccccacatgtgctaagcggttatgtttctccagcccatgctagncttagctattaagcatgcatctagaccggcctcttcttttgcaaaatcaactaagtaaagtttgccgtctaatgcacccttaaaagctagggaaccatcacttcttctaaagacagacacatctacatttgtaaaaagacaattatatcccatattgcataattgacttacagataataaattatatcccaaagactcaactaaaaacacattagaaattgagtgctcattagaaattgcaattntacctaacccttttaccttgccttgattcccatcaccgaatacaattgaatcttgggaatccttattcttgacgtaggaggtgaacatcttcttcttccccgtcatatgggtt

SEQ ID NO: 50925 - DNA, 440 bp, Zea mays
  unsure (1)..(440): unsure at all n locations
gcacgcatgcaagcttcatcccgctcgcccgctcaatgattatcctatccgagggccganccgaggcgggttgatttataccagntgccgcgcgatccggcggagcttgtgctgcctcggctggcgcaaggcacgctcggcgcgggcgaacggctgctggtggtctccgaggatgcggagcaactcggccggatcagcgaagcgctgtggacgcgcattcccgaaagcttcctcgcccacggcatggccggcggcgagcatgatgctcgccagcccatcctgcttgcgcacgaacctgtgcctgccaacggcgcgcgctatctggcgctggccgacggggtttggcgcgacatggaaggcgcgacacgtgtcttcctgctcttcccccccgagcggatcgacgatgcgcgcggcacatggcgcatgctcggcaaacgcga

SEQ ID NO: 50926 - DNA, 378 bp, Zea mays
ggcgcaacatgcagcacgagccgcgcgcttttggctgcagatcggccagaaccgcgacgccctcacggcggcaggaatcgtactgcaggatgtcggcaaccccattcgcgcgccggaactcatcaacagccgctggtccaaccggatcgacgtcaccttcaccttcaagcgccagaccactgacaccttcgcgatcctgcccgtcgcgaccgtggtcgggagcatcacaagcaacaccggcgatcagcttgcgctgaataccgacaatccgccccactgacctcccggaggctgacaacatgaccactggacttcccgtctcgcggctgatcaccgcgagtgtgaacctcacgcctgcgggcgcgcagtacgcaaaca

SEQ ID NO: 50927 - DNA, 334 bp, Zea mays
  unsure (1)..(334): unsure at all n locations
cttgggagctcataactatgacctctcatttgttatccnttgatgctagacttcaaatgaatatttggactcgcttttgtgacatattgttctcctgccaatgtctactgactgcggagggaaggcccatatatacacgatgggctctatgaagggagcatgtgtactgatcaaattgttcaatttcaagcttttataacagcccatcaaaacttcgcaattttaccttcaaaatacaatccttttgtgactcagataattgtcaaaagcagctcccgtattgagcccttttgtctggggtcatccagatgtttatttgctgggtgctgatctt

SEQ ID NO: 50928 - DNA, 436 bp, Zea mays
  unsure (1)..(436): unsure at all n locations
cgctcggtcattntattgctaactgtcctgattatgaaagtgaccacgaaaaggggaacaaaatggagaagaagaagcactacatgaaagccaagggcgaggcgcatctatgcaaggagtgggattcggattgctcctcctccgactccgacaatgagggactcgccgccaccgccttcaacaaatcggccctcttccccaacgagcgtcacacgtgtctcatggctaaggagaagaaagtaagtactcgaaactctacttatgcttcttctagcgataatgattctagtgacgatgatgaaatatactattctagtgtatttaaaggtctagatagaatcacaattggcaaaattaatgaattaattgatgcattgaatgagaaggataaactcttatagaaacaagaggatttattgtatgaagagcatgataa

SEQ ID NO: 50929 - DNA, 440 bp, Zea mays
tgtctagtaataatacttagaaaccttggtctgtccaatggttagtgtaaacgaagaaggctagtagtctgtgttggatttatgggcttggcccacattgaaaaattcaattaaattctaagaaaatcacaaaaacccatacatttatggaaagagaatggtggaatcagataatgatctgagtccttatcggatcacgatcagatcggatttcgtggacgtggccctatataaggcgtctgtcaacccctttccaaaaaaatatcatctcaacccgagttaggttttttgtctgagtccttatcggatcacggtcaaatcggatttcgtggacgtggccctatataaagcgtctgtcaacccctttttcaaaaaaaatctcatctcaacccgagttaggtttttgtctctactcacctctgcaccaccatcataatact

SEQ ID NO: 50930 - DNA, 411 bp, Zea mays
agcttgggaagaatcttcattccaacatgtgctagtcggcgatgccagagccagcctatattagtcttagcaattaagcaagtgtcgagttcagctctatcaaagtctactaagtatagctgaccctctaacactcccttaaatgctattgaatcatcacttcttctaaagacagtgacacctatatccgtaaaaagacagttatagcccattctacatagttgagaaactgaaagcaagttgtaatctaaagaatctataagaaaaatattggaaatggaatggtcaggtgatatagctattttacccaatcctttgaccaaaccttgggttccatccccgaatgtgatcgctcgttggggatcttggtttttctcgtaggaagagaacaattttttctcccctgcatgt

SEQ ID NO: 50931 - DNA, 396 bp, Zea mays
aattggcttagtataaataaaccgaaatatgaaatagatcataaggttaacggtgttcactgtgttcactgcacaggctaaatgaaaatatttcacagccaaccaagccaaaattgcactgtatttccaacactatttatagcaacaacagtgatgtctaaagtttaactaccaatgggttgtccacagaagctattgcaaggtttttgcattccccgacttgcttacaagcacgtaggatgacatcaaagcataaaaagtttacaaagggaagatattagacaacactttcagtgacatctcagtatcaatcagaaatataaaggcatgctcatacaactaatttagcaaaaaaaaaaggctacattaaactagagataaggacatagcaatcat

SEQ ID NO: 50932 - DNA, 428 bp, Zea mays
  unsure (1)..(428): unsure at all n locations
agcttcgacattacanncagctcnatttataatngggccttcatcgcaacctttgaaagacataatgaggaatacagaagctactgggaggatcagaaaatgggctaccgagctcaatgaattttttattgactatgtacataggtcctcaattcagtcccaggcattagcggatttcatcgctgattggacgccaagggctcaggaagaagtaacaaaagacgccaaagcctggacagtcttctgtgatggttcttggggaaccttcggcgcaggagccgctgctgtcctagtagcgccctctaaagtcagaacatgctatgcagcaagactggattttagttgtacaaataacattgctgagtacgaagctcttctgttggggcttcagaaattaaaggcaatgggaatcagaagggcgatcctta

SEQ ID NO: 50933 - DNA, 423 bp, Zea mays
  unsure (1)..(423): unsure at all n locations
tcggcatctntattggcttcttcttcctgagcccctggcgtccagtcagcgatgaagtctgctaacgcctgngactgaattgaggatctatgtacatagtcaatactgaattcgttaagctctgtagcccactttccaatccttctagttgcttctatgttcctcataatatccttcagaggctgtgatgaaggaacaattatgtggtatgcttggaaataatgccgaagcttcctagaggccattaagacagcatacaacaccttctccaattttgtatagtttttctttgataaacttaaaacttcggagacaaagtatactggggcttgctttntaatttgttcttcaagcttctcctgtacaagcgccgcactcactgcagagtgcgaagctgccacatacaatagtaatggagcccct

SEQ ID NO: 50934 - DNA, 443 bp, Zea mays
  unsure (1)..(443): unsure at all n locations
gagcggnccatgaaccgacacagagttggtcgttctttcatggcatggcctaacccgattttatcataaaaatatgtatgttatggcggccagatgaatgtagatgtgggttcagatccaacaactatagttcaaactttatttatgtataattttccttatttttatcatttaaaccccacagtccgcatggggagctgcatggggtcgaggatcctcggacgacgcaagacaaaactactactttatattagtgtactgctttatgttagtaaaggtaaagatttcatttcatgggacttgcaacaaaaagtctatagagggttgtaaatgcatgcccttaaagtagtacgtgatcgagtacaaacgttgttgcttcattttagctttgctcctgtacttnccaattgcgcgtggatctggcaatgtgtgcctgagccctg

SEQ ID NO: 50935 - DNA, 436 bp, Zea mays
  unsure (1)..(436): unsure at all n locations
agcttcttctcgtcatcgatgagtgacgacttcgcttatgcctcctgctcatggagtttgttcggcgtttgaagtatgaaacatggattcatgcttggcgttggtttatgaaaatgactcacaagtctgatccatggaaaacaatattacgaagaaaaaatttcacacatgcaaaaaagggaatttaagtataatgcattattcaaacaaaagaaatagcatgcaaagctcttctttaaataatattacctccatccaaaaatataattcaagaatatcggngatacttatctactactacgcattgtgcaatggtagcaagtgagcttggaaagagatgtagtagtagatgtgtttcctgtcatagatgtagacataaacacatataggtgggagcccgtgtgttgccacggaaacatttaatatcatgattact

SEQ ID NO: 50936 - DNA, 348 bp, Zea mays
  unsure (1)..(348): unsure at all n locations
ctgcacccgacgacgccggcgaaaacattaaaaacgtcgacgacgcctaaacatgtccccttttgctgccgacccagcgaccctaggcgccaggtatgaacccggagtgggctgaaagaaagaaaaaaagtccaccctagatatttccgacaagtatatatcacctacantcngatgaaagaagcataacggcatgtttggtcccacaacctaaaacaaaataactaaaggttaagtactggaacggctaaagacccaaacacgttgagctaaaagggactaaaattataaaaaatgaataaccataagtactttcagccctcgcttggcagatctttagcttctaaa

SEQ ID NO: 50937 - DNA, 341 bp, Zea mays
tctgaatcccttgaataccattgattcatcatccatctttgttacaataacctctggtggagtgaataagcattgaagtccaagatcacagaggtgacccactgataataaattgaagctcaaaggtgcaactaagagaacatttgatattgataaatcatttgagattgccaccttgccaagtccttgcacttgttcttttgaactgtctccaaatgtgattttatcttgaccatcaacattctcatctagtgaggtgaacatccgtgggttgcctgtcatatgttgtgtgcatccactattaataacccaatgactcccaccggtcttgtaatcaccta

SEQ ID NO: 50938 - DNA, 440 bp, Zea mays
  unsure (1)..(440): unsure at all n locations
tgcttacaagaatttatttatactgggagtgttgataagatctcaatatccttggnttatctcatggatttcttctagaacatttgtaatcactcgaacttgattttccaaagaacatgagtgtgattgttgtatgccacaacgggatgggtccatccgtccatatgctttatggacagggcaaaaaagccaatggtgctagcatcaactctagctttgatgtgcaccaggcatgtttaaagctttgttgcgcttatcaatgttttgatttcatatctctttctttgatcttttgaaaaacatattacagatgtgtttggtgacagatgtgctttattcttttactaatgttttttcattgcgtacgatgctgacgggagggctactgatgttgcttaacatggtcagttcacctggttcccccttcgccttagctacta

SEQ ID NO: 50939 - DNA, 389 bp, Zea mays
  unsure (1)..(389): unsure at all n locations
gtcttagagagagtttattaaggtttctaactaaatcgctagagggagatttattattccctctcttccttcttatttcttttatgcttttaaggtgggtttgaactataaaatagcttaataaatttccaaaagatctgcaaaaattacagtggcttcttactggtgtataagtctttgtcttgaaatttggggtttaaaaagttagtggttctctctgcataaaattatcaaatattatggcagagggggtgttttgaactacaaccttctttgtacagtgagttattctctaagacttcatttgtgtggcattcagatgctataacatgantttgtacaaatgtttagccactattactcattacgtattgtattatgattgtcta

SEQ ID NO: 50940 - DNA, 460 bp, Zea mays
atccttagagtcacctgccgcatgcaagctttaaagaggaaccatctatgactattaaatgtctcctttgagaaggataggccttgtagtgcttgccaagcatgaaaaaaagttggagcaagccaccccaccaaaaatgttttgactacatcaaccattggagctactacacatggatttatttggtccgattgcttacataaggatcatcgggagtaagtatggtcttataattgtagaagattatacatgcttcacttgggtattcttttcgcaggaaaatatgagacccaagaaactttgaagaaattcttgaaaagagcttgaaataagttcaatttgagaatcaagaagattagaagcgacaatgagacagagttcaagaatacacaagttgcataatatcttgaagaagggatcaagcgtgagttctgggctccctattcactacaacaaaatg

SEQ ID NO: 50941 - DNA, 393 bp, Zea mays
tgctcacgcctgggactgaattgaggatctatgcgcataatcaatgatgaattcattgaattccgcagcccactttccaattcttccagtagcttctctgttcctcatgatatcctttagaggctatgatgaagaaacaattatatggaatgcttgaaaataatgccgaagcctcctggaggcctttaagacagcatacaacaccttctctaattctgtataattgttctttgataagcttagaacttcggagacaaagtatactgaggcttgctttttgatttggccttctaatatctcctgcacaagcgctgcactcactgcagagtgcgaagctgccacatacaatattaacggagcccctggcgcaggtggagttaactgtagtatatc

SEQ ID NO: 50942 - DNA, 414 bp, Zea mays
gcttgtgaagggtcttcatcctcacatgtgctaaacggttatgttcagccagcccatgctagtcttagcaattaagcatgcatctagaccggcctcctcttttgcaaaatcaactaaataaagtttgccgtctagtacacccttaaaagctaatgaaccatcacttcttctaaagacagacacatctacatttgtgaataaacagttatatcccatattacacagttggctcacagacaacaagttatatccaagcgactcaactaagaacacattataaatagagtgctcggatgaaatagcaatttttcctaaccctttcaccttgccttggttcccatcaccgaatatgattgaatcttggggatccttgttcttgacgtaggaagagaacatcttcttctcccccgtcat

SEQ ID NO: 50943 - DNA, 381 bp, Zea mays
  unsure (1)..(381): unsure at all n locations
aaggggggaggattctaacagattccatagagacgcctgctatatctttgcataataattttaatgatatctaggtgccttgagttgctgaaactgcctatcatgtatactaaccaggcactcttagttcacatagcacatttctattctcgattcaaagcaaagaaccttctttttttgtttgcttcagccatcttgactttaccagcttatctactattgtagggttcattgcgatgtatgctactcttgctagtcgagatgtggtaagtatgacacctttacctgtagatgttatgttctgcttactctattatttttttattcttgctcgctcgccggagtattnttttttcaaacatcacggttagaattacgatt

SEQ ID NO: 50944 - DNA, 328 bp, Zea mays
gccttagcgtatgtctcagtcttaggtagtctttgttatacatggtagatcgctatatcctgcgcatctatgtcttgtatgatgaactatgattggctcggatctttgtaatgattgtcaccaagagcgtgggtatcccctgcactttggattacctattatgctaataaagatagatatccttgtgggaaaccttttattccactatcctctttatctgagaagctgtgttggctgtgtcggagatcagtgaacaagctcatctgttcagtgctgctgaagaacactattctctcttcttatgctgccagaattgccagaacagctc

SEQ ID NO: 50945 - DNA, 366 bp, Zea mays
  unsure (1)..(366): unsure at all n locations
gactaacactgtggcgtcactttntgctattggccagtaaaaaccagaactgaagaccttcccaaccaaagtcctggacgctgcgtgtatcccgcattgcccaacatggatctcatctagcagttgtttcccagtggctgaaaaaatgcacttcatgagaactcctggtgcgccccttctgtatagcgcttccccaatgagagtatatgagctgactgccttgcaatgcgctctgctgcatttttggcatccgggtcttcctcattctttatgtatctgatgaacgactccctccagtcatcagaatctgactctggttggcttagaatattgcattcttctacacgatctagtgaaatgctcggg

SEQ ID NO: 50946 - DNA, 432 bp, Zea mays
  unsure (1)..(432): unsure at all n locations
gacttcctccaagagcactcggcaaagatgctgacttatggtcccactggtagaccctttgccgagtgcggactgttagacactcggcaaagaagttacctctttgtcgagtgtcaccctagaacactcgacagagtcatcgtctccgtcaccagtgaaagtcgcctaaaggggggtgaataggcaaatctgaaatttatataagttaagcacaactacaagctggggttagcgttagaaatataatcaagtccgaaagagagggtgaaaacaaatcacaagcaaataagagcgaatgacacggtgatttgtttttaccgaggtttggttcttgcaaacctactccccgttgaggtggtcacaaagaccgggtctctttcaaccctttccctctctcanacggtcacttagaccgagtgagcttccttcctt

SEQ ID NO: 50947 - DNA, 424 bp, Zea mays
  unsure (1)..(424): unsure at all n locations
agcttcttggcaacaacctccgcctccaccttcgttacagcaaggacagcagccagataggagccagtatgctccacaccaaagggacttccgagagcagtccgaagctcgtacagtcaacagcaccgtgccagagtcaaagcacatctattgacaaatatcctaccctaatagcaatcttttctatccagttttgttttctgtaataaaggatattgtttaagtttcatataaatactttcgttgattcccacaaagaaaatatatttttctcaagcttaaattgttaaagtttaaagacttgtgataatcaagaggaccttcggactaccgaaaattattcgaaacagcaaanagtcgttctaaggaacgcacagtaagttgccgaagtcacaaaagagtcgctccaaagggaacgcagtgt

SEQ ID NO: 50948 - DNA, 452 bp, Zea mays
gaccaatcacagatgttcctcatgatcactatcactcttggattatataaaaatatcgccgatgaaaaccgcaacgaatctgtccagattatgaacaccttattctttagatccataaaataggctggtgtattggctacgccaaatgacataacagcgaactcatataaaccatatcgggtcgagaaatccgtcttggaaatatctggtggccaaatcttcatttgatggcaacccgatcggagatcaatcttcgagaatacccttgcacctctcatctgattaaataaatcctcaatgcggtgtaatggatacttgttcttcacagtgacatcattaagggtcctataattcacgcacatcccttgcgatccttctttcttctataccaatagaaccgacgctccacaatgtgaagaatgcaaacaaatgtacccaacctcttgtaactc

SEQ ID NO: 50949 - DNA, 138 bp, Zea mays
ctaaatcaacgaaaaaggaacagctaccagtattagtttcttactggcttaaagtgggttccaacttctacaaccaacaattttcgcccgccgtttaatccaacctggggcataaaactggttcctttggtttcggct

SEQ ID NO: 50950 - DNA, 282 bp, Zea mays
aaatcgtgtaattattgaattccgtcctcacacatggaaccaattgtatgtttgaaatgcaccaacattgcagaatagtaccttgggtgagaccattgggtttttaagaatccttaactagatcaattattataagtgcaaatcttgaattccaaagctcttctttcaatctgttctatattacaaaatttaggccaaaaatcgcatccaaatgagaaagaaactaatggagatcattatatgcctacactactgagatcaatccataaactcaaaaacaaa

SEQ ID NO: 50951 - DNA, 461 bp, Zea mays
  unsure (1)..(461): unsure at all n locations
ttaagncacctgaggcatgcaagcttgatcagactctcttgaactatgctccttcagcgacaggtgaatctggttttggcctccctactatctcatcacctaaagattataatcatgagcaagtcaaaaaattagttgccaaaatgattatagttcatgagtatccattttgaatggttgagcacacatggtttaatattctcatgaagtatatgaatccgttgtatgaatttattggtaggaagaccataagagctgaatgtttgaaggtttatgagtctgaaaaggaatcattagcaaagttacttaagggtgtggatttcatttccttaaccactgatctatggacatctaatcaaacattgtcctatatgtgtttggttgcgcactacattgataaagattggaaaatgcaatatcgtgtgctgaatttttttgagttagaccctccacataaagga

SEQ ID NO: 50952 - DNA, 387 bp, Zea mays
  unsure (1)..(387): unsure at all n locations
ctatcgaggnggccgatgagactaaatgtgatggatgtgttctatacatgtcgaacatcaccacattgcagaccaagtatgccaccatgctagatgagcacgacgagttgaggtctatgtctagcttgttgggtgtgtgtactacctgtcctggcttgtagactaagctagcggagaagaacgcaaggatagcctcacttgagaaggctagctcagtgagtgcacctacacctgcttactgtgcactatgtgggggtttgtaatccgtgcttgagtcttgcatacacgacaagactatgattgaggaggaaaacacatacctttgatcagtcttgagatgggtgtctagcagtgagccctacttaggcgtgatggttagtcagttca

SEQ ID NO: 50953 - DNA, 408 bp, Zea mays
  unsure (1)..(408): unsure at all n locations
tgagctgcagctgatgtttaatacatancctctctatatctttcatctcgaaattgctcgatagaagatttttaacttcctcaatcacattgagattcgatccaaagatcaaaatgtcatcaacataaaagcacagcataacagactcacccccaccataccgatagtatacacacgtgtcagattcatttacaacaaagccagctgctgtaagagtattatcaaatttttcatgccattgcttacgtgcttgttttaggccatacaatgattttatcaacctgcacaccttgttctcttgaccatccgcaataaacccttctggctaatccatatagatctcctcatccaactctccatttaggaaagctgtcttaacatccatctgatgaatgataagaccataag

SEQ ID NO: 50954 - DNA, 395 bp, Zea mays
  unsure (1)..(395): unsure at all n locations
atataaacatggagtctgttctgcactcctcaagtgtttatcaagaggagaaggtatcgaattaatgaaggagatacatgccggtctgtgtggatctcatattgggtctaggcccttgttgggaaaagtatttagacaaggattttactggccgaagacagcttcggatgcagcagagctagttcaaaaatgtgaagattgtcaaaaatgtgcaagagaccagaaacaaccttcatctctcactcaactaatatagcccatatggcccgtgcaaagatggagcctggatttgttangcccacttncaccagcgcaaggtaatttgagatatgttgtggtggatgtagaatatntttctaagtggattgaagcgaagcctttggctacaataactt

SEQ ID NO: 50955 - DNA, 324 bp, Zea mays
agcttaaatgcctccacatgcttttataataaatgcatactctggcgtgagcatcacacttatgacacactgcacttctcagattctatgaaataaaaatgttctcaataacacaaaaatgtgcactctgcatttaaggccaaaatcaggattcctctcaatgcacatatttagggggagcaatctatattatattgaacctgttacgcttacttgacacatccttttaatcatatctacttcctttggcacatttgcataattactaattctcttgtgcccaggctaagaataatatgcttccatgaagatactcgcgtatta

SEQ ID NO: 50956 - DNA, 317 bp, Zea mays
atcaaagcatataagtttctggatgtttatttggtcacccaagtttgttgatgaagcaccagaagaccaatcaaggaaggaatccatgtgggagttcgcaagagaaaggtttgcgtgttggcatcgatgcttcctcaataagcttgctgccaagcgaaacctaaaagcctgaagatgatctttgagtagccagaatcagcgtttgcaatcggcaaccggatgctcctcaaaggccagaattcgttgaagctccatctccccgaagagtctgtaaagtgaagatatgtagctgaagtaaagctatacccataaccctt

SEQ ID NO: 50957 - DNA, 414 bp, Zea mays
  unsure (1)..(414): unsure at all n locations
tatctttatagatttgagctaagcgtcttcttctcagatgtcgttgcttcttattcccacagaatttcttttgtgaccctaaaacttgttgctcaatcaatgattggctttcttttgagcaacaggggttagcacatgatgatatacaattcaaatgcgcacacgtgcgagaatgaggttcacatgaatntaagtttgaaaatacaacctcatgagcaacattaagcatgatatggtcatcaactaattcattatgagaataagatagcatatcatatttttcacttagagcaaagttttctaaatttatcatttctacttgactcttaagcatagaattctcagttttaagttgagcaacatcagataatacatcatgattatttctttgctcacataaaatagaatcatact

SEQ ID NO: 50958 - DNA, 376 bp, Zea mays
  unsure (1)..(376): unsure at all n locations
agctntctcgactaagtcgggacagggccttatggaccggtgaaagtacgcctaagcggcaaggccgaccgaaccgagggattcccacgcctctgggataccgatacctcactcgtcccttaagcgaaaagcaactctcgctcacacaaacatccctgttaccgacagagtccagatgctcgaaacaagaggaaaaaaggcgcaccttctcaagcgtggcgagggtgtgttttttctggcctctgcggccgcagaaagtacacgctacaagatgatctgatcctgcaggctcgggtcttcacgctgaagggagccgtagcaccctcggcatcgacgacgtctccagcaaagcccgacccagcctcgggcggcgacg

SEQ ID NO: 50959 - DNA, 430 bp, Zea mays
  unsure (1)..(430): unsure at all n locations
gcttctcatgcatagcatttacccttttatgtttagataaagcatacataagttgagtgagtgaagaagcaacaaatgaagtgagtgactcgctcatgaagctcaccaatcatctgttgaataaaagctgggcgatcaaagtgggacatctcatgatacctggagtgagtgactcactcatgaagctcactaatcatctgttgaatagggtgatcatgttggacatgtcacagagcctcccttgaagaagtggcctcccccttaacagtagtctcacctcctccaggctcaacacccttaggcttgagtagaccccaagtagtggaagtagacatgttgggtctgtcatcttaggtcgtcgacacaggctcaactgaagcagccagttgagaccgcccgacagcaccncattaaatgttgctgtgctcct

SEQ ID NO: 50960 - DNA, 446 bp, Zea mays
  unsure (1)..(446): unsure at all n locations
acttgattaggagttagcacgaataagccttgtttctatagaggagaacttgcacaacacgataaccacaaagagatcaacacagagatggcacagtggtttatcccgtggtttggccaagtccaacacttgcctactccacgttgtggcgtcccaacggacgagggttgcaatcaacccctctcaagcggtccanagacccacttgaataccacggggttttgctttgcttttctatatcccgcttgcgaggaatctccacaacttggagtctctcgcccttacaaagatgttcacaaagaagcacggagcaagggagggatgagcaacgcacacaagacacgaaatcagagtaccaacacgcacacaagtcacaacaagagctcacaacacaacccgacgagttcacaactcatatagagctctaattggtatcacacagaatc

SEQ ID NO: 50961 - DNA, 446 bp, Zea mays
cttaagtgactctgctgcagcttgacccctatgcagctccctttctatgcgtgggacaaacacgaaggccgcgggattcctgagagcacctagaggggggggtgaatacgtgatcctgtaaaacttaaaaacttaagccacaaaacttggttaaacgttagcacagttaatgccaagtggctatagagaagattttgcacaataccataaccacaaagagttcaacacagaaaagacaccatggtttatcccgtggttcggccaagtacaaaacttgcctacttcacgttgtggcgtcccaacggacgagagttgcactcaactcctctcaagtgatccaatgatcaacttgaataccacagtgttatgtctttcttttcttatcccgtctgcgaggaattctcacaacttggagcctctcgcccttacacttttgatgttacaaa

SEQ ID NO: 50962 - DNA, 365 bp, Zea mays
ggctccacaccactttgaggagcttatcttgccactttcctctaggctggttgaaaaataacttcattattcctggcattataattccatttgctctctctaccaaaccatttgattctggatgccttactgatgcaaaatgaatttttgtaccaatttggtcataaaaatctttgaacgtttcagcatcaaattgagttctattgtcaatagttattgccttcgacacgccaaagcgacaaacaatattttgccaaaagaatttatgtactgtggctgaagttattgtggctaagggctttgcttccatccatttagagaaataatccactgctacgacgacatatttcaaaatcccttatgct

SEQ ID NO: 50963 - DNA, 398 bp, Zea mays
atggggaccaagactgaatctttggagacagcagaacaatttgtcagggggcagggaacctgagttgggacaaacacatgtgaaggatgcagctagcggcattagcaaatttcacgggtgactgcattggatggatgaacatgacatcatctctgtcaaaaataaatacatatgacaagtactaggtaaatacccgtgcgttgcaacggaaaaaatattgcaacattaacatatgtatgaccacatattatgttgtaataaaaattaagttgtctctagaactttgtatagtcctacatcaacagaattacagtcattaaacgaatatagtacacgagctctcgatagggacattttgtacatctccgatgaccacacatttaacaacccacatgtac

SEQ ID NO: 50964 - DNA, 430 bp, Zea mays
  unsure (1)..(430): unsure at all n locations
agcttgctaaaagtcttttcatccagtggcttggtttatatatttgctaatgggtgtgggtgctaacataagaaatttcgatatccccctttgttggtgatctatcagaaagtgatacccgatgtctatgtgcttagtgtggctatgttcaacgggattatctgccatgcggattgcactctcatcatcacataggagagggactttgctcaatttatagccatagtccctaagggtttgcctcatccagagtaattatgcacaacaatgtcctgcaacaatattatcggcttcggcggtggatagagctaccgagttttgtttctttgaagcccaagacaccagggatctctccagaaactggcaagtccctgatgtgctctttctatcacatttacatccagcatagntggcatcggaatacccaatt

SEQ ID NO: 50965 - DNA, 260 bp, Zea mays
  unsure (1)..(260): unsure at all n locations
tccccatctctctgttatttatcggtagntttattccgctttatttgaacaatgatgactacttttgctaaaactccgatgatgatgtaataagtttaatactccttaatgtatgggtntatgctttattatttgctctgtgcctcaccatcgagtgagtacgtggtacttgatcctgtcagtggcctcgtcggactagatccgagggattgacgggttattcccattaatgtgtggtctagcctttaaggcgggactta

SEQ ID NO: 50966 - DNA, 403 bp, Zea mays
agcttcggcacagggacatatctcatgactatagggtgaaccgacttatagatgaaatgacttacagacctgtgatgtttcgtgtcattattgtagtcgattgtaaggggcataatgtgacaccccaggtgtcagtttcgtgttgcgtcgcgagatttatcctgatctcggatgctcagtgagaatttctatttctcgctcgcgtatgtccctgattatctagattattcattcacgtttcaccgaattcggagttactcagtctcataaaaggccaatttttggagcctgctaaaacttttatcctcggcacgaatgcaatctcgatattcaatctcgatttataaatctcgtctaaagctcatattaatcaaacgcttcgacagtgctggtcgagctgtgt

SEQ ID NO: 50967 - DNA, 425 bp, Zea mays
agctttcagagagatttgtgaacaaattggctctaagatccattttgcatcagttcggcattccgagtcaaatggacttatcgaaagactaatggcttataatgacggaatatgaactaatttcaccagcccacggggaagtggctggatgaattaataaaagtggtatggagccacaacacaacaatgtcaaggtcaacaggttttacaccattcaaattgatgtttggtgacgaagcaataaccccagaagaagctaaagcgggatcaataagaacagtggcttcggcagaggacgaaactgattattctgtggcaaaagatgctataaaaaggatcaggcttcaggctgtggagaatatcaataaatatcaagccgaaacaataaaatggcgtgacagaaagggttggttaaaaaatattaa

SEQ ID NO: 50968 - DNA, 394 bp, Zea mays
tgtgcaaagtccacttgaactaatcttcggagaaacctgatctcgttgcaacatgacaccagaaggtccaacccaacaagcgttggatgaattcagaattatttcagagcatatcagtacaagagaccttgttcaggagtttttggttttcagggtttttcctagtttaaaagaatgggaaatgccgaagctagagggggagaaaaaagaaggagaacttttgcggttgtgaaagggaattaggcttacacctagttcctaaataattttggtgggtgaattgcccaacacaaataattggactaactagtttgcccaagtgtatagattacacaggtgtaaaaggttcacactcagccaataaaaagatccagttttggagtcaacaaaggag

SEQ ID NO: 50969 - DNA, 447 bp, Zea mays
  unsure (1)..(447): unsure at all n locations
atgcaagcttctaagggagagcacattttaggacttacaaatattcattttgagaaagacagggtttgtagcgcatgccaagcacgaaagcaagttggtgcccatcatccacacaagaacatcatgacgaccgacaagccgcttgagctactccacatggatctattcggcccaattgcttacataagcattggcgggagtaagtattgtcttgtaatagtggatgattattctcgcttcacttgggtattctttttgcaggaaaaatctcaaacccaagagaccttaaagggattcttgagacgggctcaaaacgagttcggcttaaggatcaagaaaattagaagcgacaatgggacggagttcaagaactctcaaatcgaaggctntcttgaggaggagggcatcaagcatgagttctcttcttcctacacgccacaacaaaat

SEQ ID NO: 50970 - DNA, 355 bp, Zea mays
atgagtccaaccgaaggtgcctttattgtttcaaaaaatacttctgaaggtaaagggagcccctgagccgccgatttggctagcaaatctgcatgctcattttcacctcttcgaatattcttgacagaaaaaccttcgaaagaagcctccaaccttcgcactgtatccaaatatttttcaagcttcggatctcttgccttgctactcttgtctacatggccaaaaataacttaagaatcagttttcaagatggcccttcttattcccattgctcttaacttctgaagcccaacagaagtgcttcgtactcagcaatattatttgtgcaactaaagcaaagcttattgcataacat

SEQ ID NO: 50971 - DNA, 362 bp, Zea mays
tgcaaccgtgaatagattggacatcggttgaatatttatatggtctgaaatggcgatggggtacaatctaacctaattttttattcccacagtgattgagctgtgaaccagacagaagccacccccatcccacggacaatatatacttgcacgtgagtggatttgtcgatcatgaacctacatggctacatatggtgtactctaccgactaccgcgctgcatattgatttcaacaaactgaaatcaaccaaatgcgaacgcgtgcagacttgttctttagcacagtatccggcagtttattcatagtcattcaaaacattattctgtactatccataggcatttaacacactattttgtact

SEQ ID NO: 50972 - DNA, 403 bp, Zea mays
  unsure (1)..(403): unsure at all n locations
tgtcagcctcacaatagacacatctcgaaaatatcttccctcatattgtcgagatgactctgtttaatagttgattnttcgaaaactgcatgacttggtcgccagggtcgatcttcgcagtcttccccgccactttccacgtcataactatggctgtcaccagtgtcttcggataagccttctaaaatttccctagtaatcttttctgtatttgtctttgctattgattcaataaagccaatattcttctcctcagagagcttctcctcctcactcagctntgtttcagcaacggatttcttatcttgagacatctttgagagcacctagagggggggggtgaataggtgatcctgtatacttcanaacttaagccacanaactttgattaagtgttagcaca

SEQ ID NO: 50973 - DNA, 375 bp, Zea mays
agcttgaatagcttgtagaaaaaactctaatttctcttgttataacttgggtaaagaatgatgtaattaaattttacttcatggactttgtccataccttgtaatatattcttacctttccatcaatgtataaagggctttgatgtgaacgaaattagcatttttgagcagaaggcgaaaaacaccttcccttcttttcgtacacagcgaagcataaaactgcttctttttcttttttccaaagccttctctttatagccgaagtaactgtctatgttatgatgatgatgatcctatgtatgtctaaatcaatgtttatgaatgcaaatgtatgatgtaatgtaccgtgcaaatgaatgtgcatacccagacata

SEQ ID NO: 50974 - DNA, 338 bp, Zea mays
tactaagcttctcagggagaacacgtgataggtttgactcacgctcaattcttttttatagaccttgtgcagcttgtcaagcatggtaataagtgggaggagcacatcacagcaagaatgtgatgaccacttcaagacctctggagctgctgcatatggacctcttcggacccgtcgcctatctaagtataggaggaagtaagtatggtctaggtattggtgatgacttttcccgcttcacttgggtgttctttatgcaagataagtctgaaacccaagggaccctcaagcgcttcctcaggagagctcacaatgagtttgagctcaaagtgaaaaag

SEQ ID NO: 50975 - DNA, 373 bp, Zea mays
ttctcattctttcttgcgatcttttccttttgtaccgaagcaagagacaccaattgcgcggtggaccttgcggcgactctgtgtcccgtttgaatgagcaagagaagcctcacttccgtctatagcgaccgctttgagaggagggaaaagggttgaaacgagacaccggtcttttgtgacacaccctcaaaccgtcgagtaggttttgcaagaaccgaacctcgataaaacaaaatccttgcgtctcaactctttatttgcttgcgatttggtttccaccctctctctcggactcgttcatatttctaaccgctacccggctttgagttgtgcttaagttatacatttaagattcgccctattcacccccctc

SEQ ID NO: 50976 - DNA, 163 bp, Zea mays
gccattgaggactttcattatttatttggagagcgaccagtgctggctctcctgccaagcaagatagcgagccggcggcctttatgcacacgacaacgcgaagaccttgcggacgccgcgtgcgcctctccactttgatgtatgacagcctatcgtctacata

SEQ ID NO: 50977 - DNA, 183 bp, Zea mays
accgccgcatcaacttataccgggaaaaacaagagaaatatacttgggccgacccacacgcaccgagaaacaaaagccactcactcgccgcacaacagctaaaagggcccaccagctcactggcgggcaaacattcggaacacgtcaaccggccggacaacagatcacttgggaggaaacaaa

SEQ ID NO: 50978 - DNA, 431 bp, Zea mays
  unsure (1)..(431): unsure at all n locations
ggagagcacattttatgattaacaaatgtttattttgataaagacagggttngtagcgcatgccaagcatggaagcaagttggtacccatcatccacacaagaacatcatgacgactgacaggccactggagctcctacacatggatctattcggcccgatagcttacataagcatcggcgggagtaagtactgtcttgatattgtggatgaatattctcgcttcactagtgtattctttttgcaggaaaaatctcatacccaagagacattaaaaggattcttgagacgagctcacaatgagttcggcttaaggatcaagaaaattagaagcgaccacgggacggagttcaagaactcacaaatagaaggcttccttgaggaagagggcatcaagcatgagttctcttcttcctacacgcgacaacaaaa

SEQ ID NO: 50979 - DNA, 430 bp, Zea mays
agcttctaaagggagaacacgtgataggtttgtttattgtacaattcgaaaaagatagaccttgtgcagcttgtcaagcaggtaaacaggtgggaggagcgcatcacagcaagaatgtgatgaccactttaagacccctggagctgctgcatatggacctctttggacccgtcgcctatttgagtatagggggaagtaagtatggtctagttattgtccatgacttttcccgcttcacttgggtgttctttttgcaggataagtctgaaacccaagggaccctcaagcgcttccttatgagagctcaaaatgagtttgagctcaaggtgaagaagataaggagcgacaacgggtccgagttcaagaatcttcaagtggaggagttccttgaggaggaagggatcaaacacgagttcttcgcttcctacac

SEQ ID NO: 50980 - DNA, 352 bp, Zea mays
tatacgaattgtctcttgcctagctacgggtgcataggtttcaccgaaatccaaaccttcgacttgtgaatatcctttggccacaagtcgggctttgttccttgtcaccacaccatgctcatcttgcttattgcggaagacccacttggttcctacaacattttggttaggacgtggaactaaatgccatacttcattcctcgtgaagttggtgagctcctcttgcatcgccaacacccaatccgaatcttgaagtgcttcctctaccttgtgtggctcaatagaggaaacaaaagagtaatgttcacaaaaatgagcaacacgagatcgagtggctacccccttatgaata

SEQ ID NO: 50981 - DNA, 436 bp, Zea mays
  unsure (1)..(436): unsure at all n locations
catgcaagcttctcctgtacaagctccacacttacttattagtgcgaagatgccacatataatagcaaaggagccccttgaagaattatggggaggctacgctagcgcaaaacaaaattttcaaccccataaaaccaagaactactgcggttataggtcatggaattaccactagacgcgcagagcagcggaagacgtctcgatgtagacgaacgcgtcgagcagtgccgtgcagtcatcgtccttcacgtcctcgcacggttcgtcctagtgctccagatgcagcacctccgaggtatccacacgtacagggaggaagcgccgcgtaccgaactgctaggttcgcgacggcggcttggcgagggcgagaggcgagcggctactcgttttctggtggcgaattaagttaagcctaaccgcgcncccgcccctcatt

SEQ ID NO: 50982 - DNA, 435 bp, Zea mays
tgaagccctgggcaggagcataggctaataatatgctaattgtctcaagcctagctacgggtgcataggtttcactgaaatccaaaccttcgacttaagagtatcccttggccacaagtcgagctttgttccttgtcaccacaccatgctcatcttgcttgttgcggaacacccatttggttcctacaacattttggttaggacgtggaactaaatgccatacctcattccttgtgaagttgttgagctcctcttgcattgccaccacccaatccgaatcttgtagtgcttcctctaccctgtgtggctcaatagaggaaacaaaagagtaatgctcacaaaaatgtgcaacacgagatctagtggttacccccttatgaatgtcgccgagaatggtgtcgaccgggtgatctcgttggatcgcttggtggactc

SEQ ID NO: 50983 - DNA, 397 bp, Zea mays
  unsure (1)..(397): unsure at all n locations
agcttgactcctttcgcctttatacttcggtatgtcacttcaacgccggagaggaggttgggagccttccgtgtcttgactacgatgtcatcgacgtaggcctcgactgtgcgaccgatgtgttcgccgaacacatggatcatgcaccgctggtacgtcgcgcctgcatttctcatgccgaacggcatggtgacgtagcagtacatgccgaacggcgtgatgaaagaagtcgcgagctggtcggactctttcattcggatctggtgataccccgagtaggcatcgaggaaggacagggtttcgcacccagcagtggaatccacgatttggtcgatgcgaggcanagggtanggaaccttcggacatgctttgctgagaccagtgtagtctacacaca

SEQ ID NO: 50984 - DNA, 60 bp, Zea mays
ttctttaaatattgaataatcctcgatcgaatgggaaaactatttttatgcgaaccaagg

SEQ ID NO: 50985 - DNA, 439 bp, Zea mays
  unsure (1)..(439): unsure at all n locations
agcttgtggagcgcgtacgatcactgacattctcaagtttatttcgccaagagattagctggtttgatgaacctgaacactcaaggtgtgttggtttttttttattctcaaaacaatctattttgctgttatcttaagaaacatttctccagctggtgtatttcattttcttttattccagtggatcaattggtgcaagactatcaaccgatgccatgaacgttaagcggcttgttggggacaatttatcactcaatgtgcagactttatcaactgtcatatcaggcttcacaatagcaacagttgcaaactggaagctggcactgatcatcactgtggtggttccctttgtgggtntccaaggctatgctcagatgaagttccttaaaggtctcaacagaaacgcgaaggtaggtacacatgatctgtgtaaaccgta

SEQ ID NO: 50986 - DNA, 434 bp, Zea mays
gatactcacctgagcaggccatgcactcagtcctatgtttgtttatttaagactgccttgcgaatcaaggaggagatttgtaggctgcatgcatgctaaatgagattaaagatcccaaaattcatgaaatgcatacttaatacttattttctatccaatggtcacctttaaatctagatggtagactcctttcttgtgacaaaaatcaacaccatcaataagttgctgatagtatctgcgtgcatctgcttcactgagtctgccatgacgaatctgaaatttggatgtgtcagcgtcattacttgtcgtttcatgtaaagatattgtttcaaccagacctaagtaagatgaagtataatagactatgtgtgtcttcatattaaagtccttggactggtacatacatgtaggagtaacagtgacacgttcgaatg

SEQ ID NO: 50987 - DNA, 421 bp, Zea mays
  unsure (1)..(421): unsure at all n locations
tgcagcatgcaagctcgccctcggcttccccaaagnatcccatatcttttatcataaccatgtcgcctgccgtcacaggaaatctaccaaaatcaatggggctaagtctcattgggctcacgatagcgttgacctcctcaccttcgatctgacttcctccctcagccatgatctgtttagcttcagaagaggaggtacctacgacaataacctcctctggcacaacaagacccgatcacctcatcacttctgatattggagcagaggatcgtactctggccattacagtgatcacgcctttcaagaccaagctgatctcaagagacaaaccctcgtctgaaaatgcgatacagaaagcattggctatggctaaaactattaacagcacaacagtgtgatggcaatgaatgttgtggtaact

SEQ ID NO: 50988 - DNA, 425 bp, Zea mays
  unsure (1)..(425): unsure at all n locations
ggatactgttatacagtatctcaacaagttcttttccttgttccagnatgccattgatcaggtcaacactgatctgaagaagagaaattgttntatgagaggccttaatgaccggctgcagtggaaaatggccacctgcctcgatctctactatagcaaggctatcagcacgacgctagtagttgaagcccaatatgcaggcccaggaaagtcaaagggctatggaggtgacaggcccaaccaggggcctgagaagcgacaaaggttggtgattcgaccttttaatcagaaccgttcttcaccacatccaccctcctatccctttaaacaacctgtctttatccgtcttgccactgcccccacctcaacaaatcagccgagtgcccctggtnactcgtttcttacactcccgagttcatcttatg

SEQ ID NO: 50989 - DNA, 440 bp, Zea mays
  unsure (1)..(440): unsure at all n locations
agcttaattaaaagggttcaatttttccgtttctactttgaaaagttntcctgtagtataaatttaaaagtagcatgtgattttgctgcttgtggaagttcgttatattaataaagagacataataaattaaaactaaaatagatttaaataattaaatgttataataaatgaaataaaaatatttttaacaaaaatattacaaatagaattaaaaaattatttgtttgtaaaaaatattaggaacacaaatgtgaaatcattttttctccctcgacatctacggtcaaaaccggttgaaccggcccttggaggcggttcaatcggggtcagggtcagtcaaccattctgacctatgtctgctagtgaggctgaaagactgacgaccaggcggttgaaccacccctatggggcggttctaccggttctgatatttcaact

SEQ ID NO: 50990 - DNA, 465 bp, Zea mays
ttcatactaagcttacacctctggactaactcggctgcatcgttcttcgctgttggtctatataatccagacctgaaaaccttcccgactagtgttctggatgccgcatgtattccacattgccctgcatggacctcctccagaagttgcttcccagtggacgggagaacgcacttcatgaggatgcctgatgcgccccttctgtacaatacctccccaatgagtgtatagtgagccgactgcctggcaatgcgctctgccgagttcttgtcgtctcgttcttcttcattctttatatacttaataatcaggcttctccaatcatcagagtctgactcgggtggatctatgatgttgcactcttctgtttgatccattgagatacttggctgcagaatttcttgcacgaagactccgggtgggacctgagttcgactggatccgagctaggacagtatatccgct

SEQ ID NO: 50991 - DNA, 273 bp, Zea mays
gaagaatgccagagggccctgcgcgttatttgttatttcatcgcaaccacagacttaatacaagagcatattgtcttcaggggatggccgctcgcggacaaatgggaaatgccgcaagaaaccataaaagaggccgacgaagggggacttatcaagctcaaatactactttaagatcggagattaattcattgagccagatgatgactggttaaatagcattgaaaatttaagtgatgaaactgtttggggcttattctaaggcccaagatac

SEQ ID NO: 50992 - DNA, 440 bp, Zea mays
agcttcacggatgatgaacatagtgcgccgttctgttggtcacactgtacgacaatggactggacaggggcaccatctgcagagtggccctggcgtcgcctgccagtggagtggacagggcgcaataaatgctgagggggaacatcacctgtcagcaaggtggacatgcaacgcggtccttccacaataaatgcagagtccgcatggtctaggggccttacgtcaagctccgcccgctggcttatgtcacgggcaacgagccacgtggctgcaccgagtctccgcctaagcggggagcgcatgcctagggtaaggctcatacacgtgtcagcatcggaccctttgctatgccaagggtctccctgtcccgggaccttcgagcggcccggaccttacttggagggatctacgttgtgtgacaggggttcggcgctctcttg

SEQ ID NO: 50993 - DNA, 349 bp, Zea mays
tcgtcccagttggagatctgccccggaggcatgtgttctctccatgcgcgagcggtgtcggagaggaacacagggaggttgcggatgatgaggttgtcatcgtccgttccacccacttggcaggccaagcgttagtccgcgagccatatttccggtctcgtctcccccgagtacttcgtgatagtagtcggcggtcggaaccgggtcgggaacggcgcccgtcgtatggccaagctgaaagcctgcggaccgagtggttcgggcgagggactccgatccttcccgctgtcgtatcgtcccccacgcctggggtggtagcctaggcacaccctctcgtcgaggtgggctc

SEQ ID NO: 50994 - DNA, 373 bp, Zea mays
gccgccgcacagctccatcaaacaccaacacttggtttgtattcggcgccgacgcggccgctaatgccaccaacaccaactgaatctcgctgatacgcacagcggagaatcgccgcacacgacgacgacgaccaagtatgcgactctaatactgtcttcaaaatcgccggaagaccgactgatgaaactgaacaaagacgcaatacgctgatacccctttgtatctgcacggactaggccccctagcagcactggatgagcaggatatacggcagacaaacctgtgcaataccgaccaagtagcacatcacggtgtacgactgtaggcatgtaaggcaagccagttcggcagggaaaggacgatggctggacc

SEQ ID NO: 50995 - DNA, 399 bp, Zea mays
tctgacttgggggcccgccagggtgtccggtgcactatctttatgttctgtttgctggccggggtgccagtatgggcgcgcctgccttctgttcgcgctgcgcgcgcatttaatgcgccgcaggtagccggtgtcgccgactatccgttgctccggagttgcaccggacagtccggtgcacaccggacagtccggtgaattttagcggactagccgttggcgtttcccgaagctggtgaggttctgaggccgctcctccttggcgcaccggacactgtccggtgtacaccggacagtccggtgaattatatcgcgagtgcctctggatattcccgaaagtggcgagttcgagatggagtcctctggtgcaccggacatgtcctggggtgcaccggacac

SEQ ID NO: 50996 - DNA, 376 bp, Zea mays
aatatggtttaagaagagaatctgtggaccacaaatcgagcacttgcgccaactcattttgagagaagcttatgaatcaacttactctatataccctggtagtacaaagatgtaccacgatcttaaagagaaagattaaaggtaccgattgaaaagaaatggtgctactcatgttgcaatatgtgacgggtgtcagcgagtttaagcagaacaccaaagaccagcaggattgcttcaacctctcaaggtaccagaatagaaaagggaagaaatcggtatggatttcatagttggactaccccgtacttgggatggctatgaatcaatatgggtcatagtaaaccagattactataagtgcacactctatacctatg

SEQ ID NO: 50997 - DNA, 193 bp, Zea mays
  unsure (1)..(193): unsure at all n locations
tgtcggaatngccatcaaggaagccccttcacttttctcatcccctcattgtctcatggcaaagggagattctaaggtgaaaatcatcaccgatttaaatgatataaatgatgatgatgatgatggctattcatatgatcttgttagaatgttaggtgaggcccatgactacatgcacaaagaataagaaaag

SEQ ID NO: 50998 - DNA, 425 bp, Zea mays
  unsure (1)..(425): unsure at all n locations
gaagcttataaaaagngancnnatatgtatttttctctatcnttgagacatggataatcatatttaaagcgaataattctctcataaaacataaataacctgtgcataatgctggagtttattttgttcgcgcatttaataaaatagcaagagggataaaaatataataataagtggagaatatggatttaacccaaaagagcaaattanaaaaattggaggaaatatagaaagagagaaatactatacaaaacaaaataagtttataaataaatacattattcccatactatgttcaaaccaaacatttaatatgaatatgaaattgccacaaactttgaaattaaagtggaattaaaggttgtaattggaagggcagaaaagaaaattaaaattaacataaggagacgaaaaagaagatgccg

SEQ ID NO: 50999 - DNA, 369 bp, Zea mays
agctgtatatcactataacctatgcatacaagatgctagctatatgtaatagcgaactagccaaccacgactaattcttaatgagataccataacacggcggcgatctctagttcagcctacacaactgacaacatgtgagcgatgccataaacatcgagcagaacacaagctatatcatttatgtaccaatccactctgctcctacgcaggataaggatgatagctgttaccatggacgactacaatcacacaagaatacagttttcttggactttctactgcctgcatgtatatatacgaaccatacgcgctctaacacgtggaaagacgatgaatcgagataaccacatggagaaagtctcttgac

SEQ ID NO: 51000 - DNA, 436 bp, Zea mays
  unsure (1)..(436): unsure at all n locations
agcttatgaagattcttcattccaacatgggttattttgcggngccagagccaacccatgttagtcttagcaattaagcaagtgtcgagttcagctctatcaaaatctaccaagtatagctgaccctctaacactcccttaaatgctattgaatcatcacttcttctaaagacagtgacacctacatctgtaaacagacagttgtatcccatttgacataattgggaaacggaaagcaagttgtaatctaatgaatcaacaaaaaaacattggaaatggaatggttaggagatatagctattttacccaaacctttgaccaaaccttggttttcatccccgaatgtgatagctcgttggggatctcggtttttcttcgaagaggagaacatcttcttctcccctgtcatgtggttcgtgcacccgctatcgatgat

SEQ ID NO: 51001 - DNA, 366 bp, Zea mays
attgaaggagagaatgatgtcaccaccactgttgtttatgccacatctacagaaaggatgtgacatttattgtgatgcatgtggccaacgattatgatgtgtgctcatgcaagaaggacatgtgatcgcctatgcgtctcgtcagttgcggaaacatgaattgaactaccccactcatgacttgaaactggcagcgggtgtgcatgcacttaagatttggagacactacatcatgggaactaagtgccaagtatacacggatcataagagtttgaagtacatattcactcagaaggatctcaaccttatgcaacgccgttgggtggagcttattaaggattatgatttggagattcactaccaccc

SEQ ID NO: 51002 - DNA, 430 bp, Zea mays
  unsure (1)..(430): unsure at all n locations
agcttctaaaggggagcacattntatgacatacaagtgtttactttgagaaagacagaatttgtagcgcatgtcaagtacggaagcatgttggagctcatcatcgaaacaagaacatcatgacgaccaagaggccgcttgagctacaccacatggatctattcggcctgaccgcttacataagcatcgaccggagtaagtattgccttgttattgtggatgattattctcgcttgacttcggtattctttttgcaggaaaaatctcaaacccaagagaccttgaagagattcttgagacggactcataatgagttcggattaagaataaaaaagattagaagcgacaatggaacgtagttcaagaactcttaattgatggatttcttgaggaggaaggcatcaagcatgagttctcttctccctacacac

SEQ ID NO: 51003 - DNA, 445 bp, Zea mays
cctccagcgtctttatttgtttcttcttcctgagcccctggcgttcaatcagcaatgaagtctgctaacgcctgggactgaattgaggatctatgtacatagtcaatactgaattcgttaagctccacagcccattttccaatccttccagtagcttctttgttcctcattatgtccttcagaggctgtgacgaaggaacaattatgtgatatgcttggaaataatgccgaagcttcctaaaggccattaacatagcatacaacaccttctccaattctgtataatttttctttgataaacttaaaacttcagagacgaagtacactggagcctgctttttgatttggccatctagcttctcctgtacaagagccgcactaactgcagagtgcgaagctgccacatataagactaatggagccctttggcgaaggtggagttagt

SEQ ID NO: 51004 - DNA, 401 bp, Zea mays
  unsure (1)..(401): unsure at all n locations
agctntgcctcgcccgacctcatggttcggactcaacctcgacgctggacgacggactctgcctcgcccgaccctatggttcggcccccgtctcggcctcggaagatggacttcgcctcgcccgacccccagggctcggactcaaccacgacttagaagacgacgaactccgcctcgcccgaccccagggctcggactaagcctcggctccggaagacgacgcactccgcctcgcccgaccccagggcttggactcagcctcggctccggaagacgatggactccgcctcgcccgaccccagggtttggactcaacctcgacctcggaggaatcgccacctcgccccaactcgggtccggaccggccacgtcgccaggggggccatcattaccctgcccct

SEQ ID NO: 51005 - DNA, 379 bp, Zea mays
  unsure (1)..(379): unsure at all n locations
actcagcttccttgccacagcttcggctctggtccatccttcgttcttcttgtgtttcttcacacacgcgatttgactcaagtccgaagggtccatgtctgaaggtacctgctcatatattacactccagaaacattgtcaaatcacgtttttgaggaccttcggaagccgaaggcccccaacagtagcccctcgcaatattaatttgttaggataataaattcagattgcgatatggacgaaggccctaagctgaaggtccaaaaaacaccttcctcttgctagaatagcaacaatcaatggcaagcaggaccctcccacttgcaatgccctangcgtataaatatgttacgaccccgggctcatttggcatgccttc

SEQ ID NO: 51006 - DNA, 435 bp, Zea mays
agtcttacactaagcacctatccaacacttaatacacttgttagtcctttaattaggttgtcatccaaaccatcaaaacccacaagagagatttcaatatctaagcttccacatttatttgtgtacctcagttgtatgttttacctttctaacttaattgttaggctagtagataggcttggaacataggttatataacttatttttgcgaaaatataacaacacacttaattaaaactgtagtggcacataagatagtttatttacttattatatatgcattgattggacaaaagattaagattttagttaattcaatgaaagttattgtcggtgtttcgagaccggggggtccctgagccgacaagtgaaatgtcgtcgcgtgccccagcccatatgagtcgacgcgaggccgatcgcgaatgggggaaagtg

SEQ ID NO: 51007 - DNA, 405 bp, Zea mays
tctaactaatgttcaatttgttgattatagacctcgcgcaacgtgtctagcacggaaacaagtatgaggctcttatcacaccaaaaatgtgatgacgacatcaagacccttggagatgctgcatatggacctcttcggacccgtcgcctatctgagcatacgaaggagttagtatgggctaaatattgtggatgatttgtccagattgacttgggtgttcttctggcatgataatactgaaacccaccggaccctcaagcgcttactcatgatgtgctaaactgagattgagctcaaagagaaacagataaggatcgacttcgggtccgagttcaagaaccttctagtggaggagctccttgaataggaagggatcaagcacgacttcttcgatccctagacacc

SEQ ID NO: 51008 - DNA, 448 bp, Zea mays
cacctgcaggcctgcaagcttttccacgtactagcactctcattctctctttgttgagaccacattcttccacccatgttgtcgcttgtgcccgcttcttactgcttcgatagatgtcgtatcccatttctatcacgcacgcatgcttggttgaactttttctcatgctgaatcaacgcagctggataacccaattacaacagctccacactgataaaatgaggaaaaatgcccgtaattaattattatattatataccttaggtgtgcttggtgcctctgtgaagaactttcctggtcagctgaaacttcaacctctttatattgccactattaacatagaacactcaagggaactgttagctaaaagggggaacaaatatatgaagatacacttatgttcctcttgtttccatcacatcttattcaacagatgtgtcgggaaaaat

SEQ ID NO: 51009 - DNA, 439 bp, Zea mays
aatttcactgacatttgggagaatggcggttgttggatggctcacgaaataataaagaacagtgaaaaagatactcacgacactagagaagcaacaaaaacagctgaaaaggctgcggagcttgagagacgaataagtattacttaatgatttttacctttgttgtctacttttgcgacttcgaaataatttacgttttctactgtagctgaactatctcctcccccagagcccttctagccactggctgaagtaaaggcaaaagaatcatcagaaattattagcatggccgaaactattatagacgaagtcgttacccgactgctaaccgaagctgcagatataagtttgaaagaagaagaatagttattgggtaaaacatgctagattattaatgtaacatttgctgaactatgcttgtaatatttggtgatcatgg

SEQ ID NO: 51010 - DNA, 418 bp, Zea mays
agcttataacaagagaatggaggccacaactttaccttatgtgataatagaaggggaattgtataaacatggagtctgcgtggatctcacattggatctaggccctttttgggaaaaggttttcgacaaggattttactggccgaaggtagtcttcgatgcagtaaaattagaccaaatatgtgaaggctgatacaaatgtgcaagagaccacaagcaaccttcatctctcactcagttaatatagccctcttggccgttgcaaaggtggggcctcgatttgacaagcccacttccaccagcacaaggaaatctaaaatatgttgtggtggcagtagagtatttttccaagtggattgaggcgaagcctttagccacaataacttcggtcactgttcagaaattcttctggcacaaca

SEQ ID NO: 51011 - DNA, 430 bp, Zea mays
atacccgggaccttggattgtagatctttttgataagatgagaggagctaagatattctaaaaaatagatctaagatcaggctaccaccagctgaagatttgtgctgaagatgtacctaaaatggccttcactacaagatatggactatatgagtttttggttatgtcatttggatttaccgatgcaccgacttactttatgaacctgatgaataaagtattcatggaatactagaacggaaatgggcccttgggccatttctatattgttttggtgattagatgcacaacacaccacatgataactaacaaatgttgagcagaggtatatctagacggatcaagtatgaaggtaagttcaagacgcttagtgcattgtttaatgtgctaaacatacatttctaagtgctatggactcagcttagtgatg

SEQ ID NO: 51012 - DNA, 418 bp, Zea mays
  unsure (1)..(418): unsure at all n locations
tgcacaaattctccccctttgacattcattttctaaaaccatattcaagcaagaacataggatgatgtcaaggggcagtagggtatgaagcagggaaaatgccacacactaacattacccccccttatacattaaacatatgcaacacaagcattggaggaaaattaaggtacaaatacgcaaaaaggtcangacctccttttgtacctttaccatgttatggtgtactttccatctaagtaagcggagttccttttgtcatcaattgaagatttccatcttgaaagttttatctctagggagctccttcacacttgtgcctgatcctttatcctgaccttttcttgttgctaagacaccaaacttagaacaagttatagtattgtggcacaagatgaagcttctattctagttatta

SEQ ID NO: 51013 - DNA, 400 bp, Zea mays
  unsure (1)..(400): unsure at all n locations
tagttatcaaagaanaattatacagaattggagaaagtattgtatgctgttttgatggcctccaggaagcttcggcattattttcaagcttacaacataattgttccttcttcacaacctttgaaggatattatgagaaaccgagaagctactggaaggattggaaaatgggctgcagagctcaatgaattttgtattgattatgtccatagatcttcgagtcagtcccaagcgttggcagacttcattgctgactcgacgccaggggctcaggaggaagaaatgaataaagatgccgaagcatggacagtgttttgcgataggtcttgaggaaccttcggagcaggagcagctgctgtgttggtttcaccttcaaagttaagacttggtatgcggcaag

SEQ ID NO: 51014 - DNA, 434 bp, Zea mays
agcttgtcgtctagtacacccttaaaagctagtgaatcttcacatcttctaaagacagacacatctacatttgtaaacaaacagttatatcccatattgcataattgactaaccgatagcaaattatattcaagagactctactaaaaacacattagagatagagtgctcatttgagattgcaatttacctaacccttttaccttgccttgattcccatcaccgaatattattgaatcttgggaatctttgtttttgacgtaggaggtgaacatcttcttctcccccgtcatatggtttgtgcatccgctgtcaataatccagcttgaacccccggatgcataaacctgcaaggcaaatttaggcttgggtcttaggtacccaactcatgttgggtcctgcaaggttagcacaaatattcttatggacccaaat

SEQ ID NO: 51015 - DNA, 454 bp, Zea mays
  unsure (1)..(454): unsure at all n locations
taagctgccggggccttaacttatggtaatttttgcacatatgttctaatgcatgacgattctggtccaaagctgaatgatcaggtgagctacacaagactgctgtgatatttttgtaacctttatcgattccatgatcatgactggtggatggacagatgaggtttgactcttacaaggcataatttaacttcaaattgagatgcttctgtatccgctagcgaaatgttgccagatctcgtcactggtgttgagtggtacagctctactatgcacattagtgtacaaagagcttagtccaagagaaccaaaaattaatctcccaatacaagggaataaggatctccctaaatcttttaattccatcctatgggtaccatctccaccagattccaagattttctcanaatttaaatctataaaggccacacataacatatgtagctgccatctc

SEQ ID NO: 51016 - DNA, 433 bp, Zea mays
agcttctcttgagaagaaacatttcttgctttatgcaacgagaggttcccttgcggaattacaatctgaaaatgctaaattaaacgaggaactcctcaaagctcaaacaactttaaaggagaaatcagagcgcttcgagcaagaaagaaaagaactgcaagcgaattccgatgtcaaagctgagaagaatacgaagctgcaggaatcgctagaagaccttcagaataaatgctcggatttcgccacccgctgcatgcatcgattaaaaggaatattcgactcggttgggcccagctctgaagaaattgtcccttcggttgaagatatcctgaaaaccttcgagcatattgaaaatgaagttgatgcgctcaatgaagttataactgggcacaaggatttctgtgctctgttagcttctcgtggcacggctact

SEQ ID NO: 51017 - DNA, 450 bp, Zea mays
tcaccaactacgatgacgcatgcgaccactattcccacatgccatctgtcaacccctgatgggacgtacaatacgacaagagtgcaggatggctctcggacgtgaactctgcctcgctgaaggcgacctcggcctcgggacaaacttcgcctcgcctgagcccggcctcgtttacctgctccccgcgaatactggagcgggctcggtcgtgacctcgggcggacttctgcctcgcccgagcccgactctagcctcaatatccacaacggaaaggcgcccaacgtcaccatatactgcagagctgacatattacttagggactttttgccatactcagtactgtgtcaaccactacggcatgggcaacccccttgtcaggggggctcgggtacgtgaccaagcgctcagcccttgcctcgctctcagcagaaatcaagcgggcacaagtca

SEQ ID NO: 51018 - DNA, 354 bp, Zea mays
tatggacccatcaaggaagaggcctatgttgaacaacctccccgctttgaagatagtgagtaccctaaccatgtggataaaccttctaacgcgctttatgggctcaagcaagcccccagaacatggtatgaatgcctaaaagaatttcttaacattaatggcttccaagccggaaagccgatcatactctctttactaaaactatcacaaatgatttgtttgtatgcccaaattatgttgatgatatcatatttggggctaataaccaatctacttgggaagaggtcagcacgatcatgaatcaaaaattccagatgcctatgatgggggaagtgaaatattttctaggatttc

SEQ ID NO: 51019 - DNA, 454 bp, Zea mays
gccttcgcctcagtatatcacccgcagtccaacggagttgtggaacgcgccaatggaaaaattttcacagctgtcaaaaagatgctcctcgacgaagaaagggtaggtgggccgatttgttacccgaggcgatctgggcgctaaacacgactgagtgcagggcgaccgggttcacccctttccgccttctatatggatcggaggccatgaccccacaagaaataaaacatgggtccccgcgaacagttccgtcagccgtccccgacgtggacgagcccacttcgaaggatctcatcgatggagaccgagtcttcaccctacaagctctagatagataccaagcccagacaaaagcatggcgcgaccacgcaatcatcccgagggaattcagcgaaggggacctcatactcgtctgaacagctcggacagagtccatgggcaagctggagcccaa

SEQ ID NO: 51020 - DNA, 421 bp, Zea mays
agcttgaatctagaataaggaagtttgtacttttcttccaacaagagattaatctaataatatttatgttatatatttgatcttgagattgtttggggtttgctgactcgaaaagcgagctggatagagttcgattatcacatcgtcaactgcaaatgaactttacaaagtatcctcaccacaaatactgaacaatgatcatcagcaagttaaatcgttccatcaaatccagaacataccaaaagctaaaccaatcgatcagatattccaacacatcaggggcgtttcggtgtcaagagatgccggttgcacaattgcagttccatccaacagaatgtcaggatgatacagaccatgcccaagagctgaatctacttcttgggcagggccattcagtcatacctctatgctaaacatatgc

SEQ ID NO: 51021 - DNA, 380 bp, Zea mays
ttgtccaaaattagtaagctggtgtttaactatctggaatccaaggcaaaataattcattggtgctattctaatctacagcggacgaggaatatggcgatgtttatttgacccaagctcactgcttgtggtcaccgctgggtttgattcagcaatcaaagtgcaccatctatgcaactccatttttcatgacatagtggacgataaaaaggtctctggcctgaactatgattctgagatctttgtagtatcctctccttctgtttcggagcagtatggtcccctggataggtgtgatgtacttctttatggtttcacaaattacatggtacctctatctctcatcttgtgacagtggaattggttattcattggttcatc

SEQ ID NO: 51022 - DNA, 439 bp, Zea mays
agctttaagctctctgacaataagattacttttattcttttttaacaaagatgcataagtgcaggaatgaaatgtttgagaggttaaactaggtatgaagcagggaaaaatgcatggacatgctttctcttccttttatacaagatatgtaaagaaagtatagaaaaggaagatttaagtaaaagtttgaatgaaaggaagtagttttacccttttgtaccttcatataaagacactctcttcatcgtgcttgtccttagtcttagttgcttaagacctatactcaagacaatatatggaaatattttgcacaagagagagttctacaactagtgatccttttccaagataatgttagattaaattaaatggatcacaaattgcataaatgaaacatgaattctccttttaacttagtgcatatcttagagagatatcg

SEQ ID NO: 51023 - DNA, 353 bp, Zea mays
  unsure (1)..(353): unsure at all n locations
atgagaattcagattagaagatatgatctttgggccaagttttctaccagttctatacagatttgggggcatgttacttaatcaaacttgtgcacctcatatagcgctatagatttgatatagtgatactcctcaaactgtccatgaattaaaaattattaaggcctaaatataggtagttagtaataatttcaggattcaaaaacttatgtccagactaaattgtgagcttttctctactttttgtttttaaacttgggattctgcacatatgagagttgtttggtagggaaaactntataagtttcatattttgacttttggccagatcctgccagatcaaaatttccact

SEQ ID NO: 51024 - DNA, 427 bp, Zea mays
tagcttggccaaaataacttatatttaccccatatcaagcttctcatgtggggacttaatgggaattctgaatttcagaattctgaaattcagaccttgagccaaagatcaaggatgttcaccttgatccctaactctaaacctaatggccccattgacaaaaatgtgcctaattaacccctctgtcatgtgccaggagatggcaatgggacgcgtgcctcggacacgtcaaaccagagatcttctccctgtgtgtggcagtgagacaaataggatttctcccctctctatctcttaatccagtcagcgaaacttgctagcctccacacacaaacgacaaaggaacctgagaggaagagatctctcaacgggatcgtggccttaatctcaaagatttgggcccaatccgcgtttgaacttgacctct

SEQ ID NO: 51025 - DNA, 396 bp, Zea mays
tatgtcgatgacgtggtgatcaaaatagaaaactcttaatacttcattgaagatttgcagctggtcttcaacagcctgaggcgatactgatggaagctcaatctagagaaatgtgtcttcggagtaccagcagggaagttactcggattcattgtcagccaccgaggaatttaagccaacccagaaaaatcgaggccatcatgagaattgaagtgccatgatcatagaagaaggtacataggcttactggatgcatggcggccctgagtaggttcatatcaaggctaggcgagaaaaggcatgccattctacaaattgctcaagaaggtggacaaatttcagtggaccacagaggcataggaagctctagaggcactaaaaaagttcctgactacg

SEQ ID NO: 51026 - DNA, 337 bp, Zea mays
  unsure (1)..(337): unsure at all n locations
tcctaaagcagacaagagagagtgctttagacatcttacgcccaaatttattaagaattttcatggcaacagctatagaggcatgtaccctgctgccagagcatattgaactgaaggttttaataagcatcttggtccacatttgcaagctgatcctgatggacatgcctgggtacatangaaccatccttttaaatggaagagatgtacttttgatcgcgatattaaatgtgactacataaataacaacttggccgagtggttaataactgggtgaaagatcataaagacctttccagtagtgaattagctgattagataacaaaaaattatggtg

SEQ ID NO: 51027 - DNA, 463 bp, Zea mays
  unsure (1)..(463): unsure at all n locations
atcttaagncacctgcggcatgcaagcttatggtctcctttatgtgaatccaatgtttattatcctatgtcaaattatctgaagcttatggtctcctttatgtgaatttagtgctcatgtgccaaatcatttgaagcttatggtctctttttattatgtgaattcagtgctaatagtccggtgccaaatatcttccatgaaattccaatggcatgattgttgaaacgaatttccaatttaaaatcttctacatgtgcaaggaattgactcggttgcttaagcttgtttggactacatgcattttggtacttttttaatgagacctagatctatacaggagcaagaggtggaagtgtccagcgctatatctgcttcggcgtcgagctgctcctgtgcgtgacctgcaagtgcgacgtccacaaggagtttagcttcaaccaccgtgtcagatcaggtagctcat

SEQ ID NO: 51028 - DNA, 442 bp, Zea mays
ctctgaactagctcgggtgcatcattctctgctgctggtctatataatcctgacctgaagaccttgccgactagtgttctggatgctgcatgtattccacattgccctgcatggacttcctccagaagctgtttcccagtggacggaagaacgcacttcatgagaactcctgatgctccccttctgtataatatctgcccaatgagagtgtagtgagccgactgcctggcaatacgctctgccaagttcttgtcgactggttcttcttcgttctttatatacttgatgatcggccttctccagtcatcagagtctgactcgggttgatctacgatgatgcactcttctgtttgatccattgagatactcggctgcataatttcttgtacgacaactccgggtgggacctgagttcgaccggatccgagtttggacagtacat

SEQ ID NO: 51029 - DNA, 357 bp, Zea mays
cgggttaggcgtgaccccattccgctgttcctcgacgcgcaaggcctcaccctcagggaccgacgatacctcaggctgggccgaggcgctcttgggctcgggcgtgtcgtcgatcttgacggagggttgatgtatgtctctagagaagacgtccacgggaaaccgtgtccgtcccgagctattttagccagctcgtccgcagtctcgttgtaccgtcgagcgatatggttgagttccagcccgtagaacttgtcttccaggcgctgaacttcgtcgcagtacgcctacatcttccggtcgcggtagtgggagttcttcatgacttggtcaatgacaagctgcgagtcgccacgagca

SEQ ID NO: 51030 - DNA, 442 bp, Zea mays
  unsure (1)..(442): unsure at all n locations
agctttatatggacgacgatgtcgcactccttttattttgtctgaacctggngaaaggtacttcttcaagcctgatatggtgaaagaaaccaaggaaaaagtttagaacataattcataatatgaagaaagcccaagctcgtcaaaagagttatgcagacaaacggcgaatgcccttgtattttcttgaaggggactatgtctacctgaaggtttcaccaatgaaaggtgtatcgcgtttcggaataaaagggtagcttgcacccaggtacattggtccattccctatacttgaaagatatgggccagtggcgtatcgacttcaactacccgaaaccttgtctgctgtacacaatgtgttccatgtgtcacaattgaagaaatgtcttcgggtactagatcgaaccgttgaagtgatagatgttgtccttgaaccaaacttg

SEQ ID NO: 51031 - DNA, 378 bp, Zea mays
  unsure (1)..(378): unsure at all n locations
gaaaaaatctcaaatccagatcgagtgtacagagcaccgcaaaagccctagatctacacgcttaacctcaagaattcgattccgaccattacaagatattcatttcttacattcattcacacacgaaaagggaatcgagtttttgatgtctatatccaggtgcgcagttcanaggtgacggcaacagagccatcacttacccaccatcgaggaccaccgtcgaagccaagccgacggcggcacacccgcccaaggagatgcgcacaccggcggaacggcccacggtggccctgctatcgntgaactcgaactgagagcatggtgctcggcgccagctccagtgggcggcgaccagagaactattatatagagagagag

SEQ ID NO: 51032 - DNA, 422 bp, Zea mays
agcttgtcaaaagagttatgcagaccaacgatgacattccttatactttctcgtgggagattatgtctacctgaaagtttcaccaatgaagggcgtatcgcgttttatggttaaagggaagcttgcacccaagtacattggtccattccctatacttgagcaatgtggaccagtggtgtatcgacttcagctacccgaaaccttggctactgtacataatgtgttccatgtgtcataattgaagaaatgtcttcaggtaccagatcgaaccgttgaggtgacagatgttgtccttgaaccagacttgacatattctgaatatcccattcgagtcttggatcaaaaggacagggttacccggagaaaaactctcaagttctataagatacagtggaaccaacattctgaagatgaggctacat

SEQ ID NO: 51033 - DNA, 441 bp, Zea mays
  unsure (1)..(441): unsure at all n locations
actaagcttctaagggagaacacgtgataggtctaaccaatgttcaattcgtttaagatagaccctgtgcagcttgtcaagcagggaaacaggtgggaggagcgcatcacagcaagaatgtgatgaccacttcaagacccctggagctgctgcatatggacctcttcggacccgtcgcctatctaagcatagggggaagtaagtatgggttaggtattgttgatgatttttcccgcttcactcgggtgttctttntgcaggataagtctgaaacccaagggaccctcaaacgcttcctcatgagagctcanaatgagtttgagctcaaagtganaaagataagaagcgacaacgggtccgagttcaagaaccttcaagtggaggagttccttgaagaggaagggatcaagcacgagttctncgcttcctacacaccacagc

SEQ ID NO: 51034 - DNA, 416 bp, Zea mays
  unsure (1)..(416): unsure at all n locations
agctatcatccttcttnctcacatatattgttggacatccccaacgcgaagagcttgggcgaataaatcccttatccagcaactcttgcaattgcttcttcaactctgccaactcagcgggtggcattcggtagggcctcttataaattggggccgttcccggttgcaactcgatggcaaattcaatatcccggtccggtggcattcctggcaattcatcaggaaagacatctgcatactcacagaccactgggatcttcttcaggggtaactccgtcatagaaaaagcacatgactgagaagaaccctgactaggcagaatcaaagtgaaattcccgcagaagggagaattaacttccacggtacgactggctacgtcgagcacaacttggtgcaaggtcatccaatttgctcct

SEQ ID NO: 51035 - DNA, 430 bp, Zea mays
tctaaagggagaacacgtaataggttcgactatcgttcaattcttataagatagaccttgtgcagcttgtcaagcaggtaaacaagtgggaggaacacatcacagcaagaatgtgatgaccacctcaagaccactggagctgctgcatatggacctcttcggacccgtcgcctatctgagcataggaggaagtaagtatggtctagttattgttgatgacttttcccgcttcacttgggtgttctttttgcaggataagtctgaaactcaagggaccctcaagcgcttcctcatgagagctcaaaatgagtttaagctcacagtaaagaagataaggagcgacaacgggtccgagttcaagaaccttcaaatagaggagttccttgaagaggaaaggatcaagcacgaggtcttcgctcctacacaccac

SEQ ID NO: 51036 - DNA, 435 bp, Zea mays
  unsure (1)..(435): unsure at all n locations
agcttctcttctttcgggtcaccttctcctctctgtcagacaccttccagatgtcctccttgaagccctcatgctcctgctcaagctcggcctgctctgaggcgaattggcagaatgtcgccttagtgcgcttctccagttgggtgcaccagtcgctaaggcgctggtgctcggtcttgagcgcctcccactcctgccggataaccgcctcggtttcttggagggcctggtgagcgcaagtcaacacctgagggaggggagttagcattgctctaggttctggtgagcgcaaattcagaagctactgtacacagtaatcctgacgcggcgaaagttgcgacactacttcgagtctcatccggtgactgtggtgtcatccttccccctgngggagatcatccagtgtcgagaggcctcgggtaggataacaaaatg

SEQ ID NO: 51037 - DNA, 387 bp, Zea mays
  unsure (1)..(387): unsure at all n locations
tctccgccgacgagaccgtcagcgccacccgcggaccgatctccagctctttggctntaatatctggttctcgtcctccgcgaggggatgcgaacgagagccttccagcggtagtgtccgccctgngaccatcgctgctgctgcagaggtcgccggtgagtcacctggagcttgtcgtcccgcaggccctccgatgtggaggttgttcatacccgcgggagtggaaccagagttccgtttgtgatggcatcttgagtgccggtgtctgttcattgtggctgtcggggcctgaacatctatgtatttgagggcaataacgtgtttcttccttatttcgagcaccaggactcgcctgtcggctagctgaaccgcttaaccaagtgtgag

SEQ ID NO: 51038 - DNA, 432 bp, Zea mays
agcttgctaaaagtcttttcatctagtggcttgttgtttatatcggctaactgggtgtgggtgataacataagcaattttgatatctcccctttgttggtgatctcttagaaagtgatacccaatgtctatgtgctttgtgtggatgtgttcaataagattatccgccatgcggattgcactctcattatcacataggagagagactttgctcaacttgtagccatagtccataagggtttgcctcattcagagtaactgtgcacagctatgtcctacagcaatatactcggctttggcggtggatagagctactataatttgtttcttgatgcccaagacatcacggatcttcccagagactgacaagtcccttatgtactctttctatcaatcttaccttcggcataatcagcatcataatacctgatat

SEQ ID NO: 51039 - DNA, 435 bp, Zea mays
  unsure (1)..(435): unsure at all n locations
ggatcttaagcgacgcggctgcagcttngaatttataaccgacatttatgtgattgaccttttagnccatatatgtttgagtcaccgttgtaattccttatgaagggtataattgtaattcctcacaggccacgccctatgcctataaataggtgaacagtacctctgtactgttcacgcaatcttgtaatcactggcacatcacgttggaatcattgccttctgctaagacgaaggtataaatatacctaaatgttatgtttcaatatttaagtttacataataaaatatataagaatatagttattcatttttggcatgtcttatttaatgtcttatattttacattctacttcatattgtttgtcaagactgatcacganagtatgactttcgtgatattttgtttatggccttcgtccgaagctcattaaa

SEQ ID NO: 51040 - DNA, 436 bp, Zea mays
  unsure (1)..(436): unsure at all n locations
actcagcttgtcaggagagctgtctgaccgcgatgttctggcttgtctatgtaaggacacaaagatcacctccaataatgcatcagcaaacgtctcgcgccatggcacacgcacgcccaccacttcatcgtggttgggatgatcgttgttgtggcgtattcgatccgccccttataaagcgctagttaccttgggcgtgactctgacatgcttgtggtagccttttctatacttgggcgaaacacagtgaggcagacgtcgctgtgagcactaacatgctttgttggagttctcttggagctacgtatgtttggcgtgcgagcttcaagagtgatggtcatgaagcattcctgtgtagggtcatggcttgccctgctaaacggngtactaataaagctatagtcgaaatcgaatacaaggacgtcatgggatgaat

SEQ ID NO: 51041 - DNA, 417 bp, Zea mays
agcttgcaccccggtacattggtcctttctttgttcttgaacaatgtgggccagtggcataccgactccagttacccgaaacattgtatgttgtacataatgtgtttcacgtgtctcaattaaagaagtgtcttcgggtttcacaccgaactgttgaagtaacagatgttgccttataaccagacctgacatattcagaacatccttgttgagttttggatcaaaaggacaggattacccgaaggagaactctcaagttttacaagatacaatggaaccaatatacgggagatgaagctacttgggaaactcaagactttttagataagaatctcctaggctttttagcttcatgtaaattggaagatgtgtaccattggtggaataaaggaatgaaccccattaccaccctggctt

SEQ ID NO: 51042 - DNA, 402 bp, Zea mays
  unsure (1)..(402): unsure at all n locations
ttgtctcttgaaggcccacaatggaagcgccagtggatagaattgtatgccttacgctttctctcttagcatgggcgatcaacccccgcgcattccaagagaaaatagagcatttcggattcataaagattaaaaaaccactctagatgagacagaatgaagccaccatacaaatccctaccatgaaccctgctgcagcgaaccaccagtgaaagataatttccaacaagggatcgtcgaactaaaacacagcccagatccagacgacaatgtgagattacatggatacaaaggcatgccatggaccctaaagcactgcccagacgcgctaaaaccagcagaanataaatagagaaaaaagggaggggtggacccggaaccgcgccaaaagcgcctatccat

SEQ ID NO: 51043 - DNA, 247 bp, Zea mays
gaagctttggcaatactttcaggcctttcatataattggtccttcatctcacccttgaagatttatgaagaacaaagaagcctctggaaggattggaaagggctgccaaacttaacgaattccccatgattatgggcctagatccttgatccacgcctaggcggtaacagacttcatcaccgattagacgccacggactccggaaaaaaaaacaaataaagatgcccgagcttggacagtgttctgc

SEQ ID NO: 51044 - DNA, 440 bp, Zea mays
agcttctaagggagaacacattctaggagtaacctatgtttattttgagaaagacagaatttgtagtgcatgccaagccgggaagcaagttggcacccatcatccacacaagaacatcatgacgaccgacaggccgcttgagctactccacatggatctattcggcccgattgcttacataagcatcggcgggagtaagtactggctagttattgtggatgattattctcgcttcacttgggtattctttttacaggaaaaatctcaaacccaagagaccttaaaaggattcttgagacaggctcaaaatgagtttggcttaaggatcaagaaaataagaagcgacaacgggacggagttcaagaactctcaaatcgatggctttcttgaggaggagggcatcaagcatgagttctcttcttcctacactccacaacaaa

SEQ ID NO: 51045 - DNA, 423 bp, Zea mays
tcaagcttggcatgacgaggccattgtgtatattcttctcggctccccatgccaattagccgaactggaattcaaagtcgtggcagagcacattagtactcaagatttggtgcaagaatatctgtctaacaaaacctttccaacatctggtgggtgggggatgccgaagaagaaggaagaatggaaaattttgagcttgttcggttgccataccgattcaagtttcagtacgcgttcagcggcccctgggccgaatggttggaaatgatagaacaatgtgcaatgaaatccttgggaactttacaaaaaagatgatcaattgatgacagatgccttcggtactcgaaaaacgaaggctaaactaggtgatagacgcccttaacgtcgagtactcaaactacggaaggcttgacgaatgagctg

SEQ ID NO: 51046 - DNA, 449 bp, Zea mays
  unsure (1)..(449): unsure at all n locations
tatgaagattcttcatcccaacatgggctagtcggtggtgctagagccaacccatgttagtcttagcaattaagcaaatgtcgagttcagctctatcaaaatctactaagtatagctgaccctccaacactctcttaaatgctactgaatcatcacttcttctaaagacggtaacacctatatccgtaaaaagacagttgtagcccattttgcataattgagaaacagaaagcaaattgtaatctaaagagtctacaagaaaaacatttgaaatagaatggtcaggagatataacaaatttacccaatcctttgaccaaacattgatttccatccccgaatgtgatagctctttggggatcttggtttttctcataggaggagaacatcattttctccccttgcatgtggnttgtgcacccgctatcgatgatccaactcgagcccccg

SEQ ID NO: 51047 - DNA, 431 bp, Zea mays
  unsure (1)..(431): unsure at all n locations
agcttcacaccagcgataagctctttatataattaaaatataaggcagaggatcagacttgtcagctttgcggcgctgtggtggaagacaagtggcatgcatgcctttgttcaatgcactgatgcggngaacacctgtccatatggccggcgtggcgaggcacctcctgcgactttcctccaagtctcattccagaagcctgcctggagtatgtagtccctacggtcttttggagaacaggaacgaggtcgtcgtcgtcattagggaggtgtgtcctcgccggcctcttagaattatctccaaaaaaacaaaaaaaaacggctcgaaccactggttttaaaagtattttggtgtatttgagagtacgggacaagtccagataccttcaatggatattactcacaaaaatgtgtggtagctgatccacaacg

SEQ ID NO: 51048 - DNA, 358 bp, Zea mays
  unsure (1)..(358): unsure at all n locations
tcttgatgggctctttctagaaatggagaggagcttctattattactaatagaaggggcctaaaatctctgtcaccaattctcattattgtttgccatgtgcactgcatttctagagtggacgtacttaacgtgatcaagatgtttgcccagagtgaaagagggccacattagttcttcatattctccttttaactatagtactgattttcatggcgagacggctcttgatgtggcaggagcaagctgcgggtcgtggactaagagctgctgcgcctgctgcggaccaaggacagcgggccaccggagctcangatcaccagcatcgacctcccaaaggattttgtcattgagggggg

SEQ ID NO: 51049 - DNA, 341 bp, Zea mays
ctcacttttccaaccgtggggccacttggagtgatagctaaccaccagggacttcataactttgcggtaagtcaagatcgcaccgccaaaatcttcatgaagtccatcttctatagcctccgacctgataaagaatcacatgcactcgggaaaaaactacagcaattcgggtccaccccttggctttatagtgcccagatgaatacgtgagcctaacaaaagcgctaggagtcacacgatgaagatacacacgcaatgctacaaaacttcacccatcatttcgcgcaagtgaaacctcaatcccgctctgagaaacaccctgaaaactaccacctcatcat

SEQ ID NO: 51050 - DNA, 233 bp, Zea mays
cgagctcaagctcacactcaagggacaccatgctttatcacggggagcccgaatggtcggcataggtgccctcggccccccggaggcgggggaggtcccgagctatgcaactccggaattggcgcgacccagagacggagaccccccggcactgggaggttataacgggcgggcgcgcacacgccccccgggacggggaaacgccgcgtctctgatgcccccaagtgcagcct

SEQ ID NO: 51051 - DNA, 438 bp, Zea mays
agcttgtgccttataacataaggatacaagattgttttttgcttttgtgaaagcttttgcgaatcactagaaacgttagtactttcgcgaatgattatgtaaagcgtttgcaaatatgtgcaaaacataataacatgtgtaggttttgcgaacgattttgttgcggtgcctgttgatggtctatgtatgtggatctatcattgcgcaatactaattaaatttgtatatctatgtgattatgtgtataaaaattggcgatttgtgatgctctttgatatatataacacgtgttaatgctaattaatgatatattatcattattaacgactataactaggggcaactttctgttggttgctaaatgtatagcataaccactcacgattggttgctaaatctatagtacaacaacccacagatggtcgctaatatacaata

SEQ ID NO: 51052 - DNA, 374 bp, Zea mays
  unsure (1)..(374): unsure at all n locations
gcatgcnagctagccttcactttagtctatcatccgcatttctaccgtgttgcggagcgtgccaatgggaaaatcttcacagctgtcaagaagatgctcctcaatgaaagaaaacgcagatggaccgactcgttaccggaggcagtctgcgcgctaaacacaaccgagtgcagggcgaccgcggtcactcctttccgccttctattcagatcggaggcaatgacctcgctagaaataaagcatgggtctccgcgcacagctccggcaaccgcccctgacgtggatgagccaacctccaaagatctcaatgaccgagaccgggtcttccccctgcacgccttaaacaaataccatcgccagaccaaagcatggcg

SEQ ID NO: 51053 - DNA, 349 bp, Zea mays
tcaactactgctcattggaattttttttctatgaccctaatcagaagaaagatatattatttccaatgactagaaataaaaggtgagcagtacataataaaacacctaagcgtgaacgcaattgggtaacaacattgcttgcattacatctagatgcaatatttattatactgcgttctttctgcataatgcaagtgttattatttttaataaataacaggcgttggactcttatacctcatactatggaagcccggcgtgcaacggaatatatatacaacaaactatgacaattgaataattgtatgaaaaagcctcagcctattgactagcgacacatgaactcacc

SEQ ID NO: 51054 - DNA, 340 bp, Zea mays
agcttcactggctacgtacgagtgatgatgatcttggcgcatgcaacaatatggtcacgctgcctgccccgggagtggacaggcacgccgcctgtggggtggtctggtcaccatccgtcagcagagcggcagggcgcataaaatgctgaaggggcacatcacctgtcagcgggttagacaagcagcgcgtcttctccgcattaaatgcaaaaacagcgcggtctatgggacttacatcaggctccgccccgctggcttacgtcacgggcaataggccacgtgacaacatttggtctccgcctgagtggggaatgggagcgctctatgtatggcacggaca

SEQ ID NO: 51055 - DNA, 434 bp, Zea mays
ctgcagcatgcatacttatttcggcggcatgatgaatgtgattcttgtctgaagtatatacaactcaagaaatggaagtgagttcactcgaggtgggcgccaatattggggacttgttctcaaatgctatgaattaagaacaaggcaacataatatgttaaatatcaatgcccttcgcccttctgatcattatttcccttcggatataatgaatataagacgaaagtcatgaaggacataccttcacgatcatgataaaagatggagaacattcatacaaagtacagaaagtaacataatgtttggaaacattattattaatctatatccattcatattacttgagaaacaatagcaaactacaaatgtacctctcgcttgaaagaatgaaaatacacgcgtgacagcaaaatgaatgccaagtcatcgtgaat

SEQ ID NO: 51056 - DNA, 374 bp, Zea mays
  unsure (1)..(374): unsure at all n locations
nagctttgcgagagagggaacggattctagtttcttgagaggtcttgtgttgtggagagaaggtttttttgccttgaagtaagcccgctgagataaccttcaaagcttgtcgtgggaaggccctgtgcatctccttttatagatacaaggaggcgatccaactgtacatatgggggtgtagctatgtgctaacatggccggcggagaagtgcttgagccctgtaaaagcgtagctggcggtgcggacccaagttctgctgacgtttctttgccttcgcaaagagctgaaggcggtccacgtcatgggtgcatgcccggaatcatcattacctgctactcggagtatttgatgtaacaccggtcttgttccttat

SEQ ID NO: 51057 - DNA, 442 bp, Zea mays
agcttgtcaatacttatcaaaacagctttatctaccagcacaacaactgcaaaccatacatgtgacatggccatttgcatgctagggactggatatgattggacccttaaagaaagctcaagggggatacactcatgtactggttgctattgacaaattcactaagtggatagagtacaagcccatcgcttctctaactatggctaaggcagtggaattcatacaggacataatattcacgttcggaataccgaatagcatcataaccgacctgcgatccaatctcacaagcttagagttcttcgattcttgtgaacaaaaaagcattcaaatcaaatatgcctcgatggcgtacccaagagccaacgggcaagttgaaagagccaacgagatgatattggaagcactcagaatgaaagtcttcacaagaatgaaaagtcac

SEQ ID NO: 51058 - DNA, 258 bp, Zea mays
agctgcgcccaaaccgtgtcaaaaggatttgcgttgagttccaatatttccaaaatgcggttcaggtaatttggcacgacttaataattggatcttctggctttgagtatggaagagccacagaacacacacgatctttgagaaaagggctgaaaattacaaattcagaaatctcgaatttccctaacggttcatagatcaacggcttgtttggcgataatatcgaattattttggctaaaccctcttaaactttctt

SEQ ID NO: 51059 - DNA, 333 bp, Zea mays
agcttgaaccgaggacccgcgtcaccgggatatttattctctgctcgccggagctcatttccccgccggcgcacgtggaccaggtaaatcactcgagccattttccgaatgattgcacagatagcctctgcatcaccccaggaagctcaccgtgcccttggattgaaccagatcgccgtggtttggccggtacacccgccgccgacgaggacacccgcctgcgcgcgtggactgagcgattccagccatccccgccggcgagccgtacgttgttgtgaccgtcagaaccgtcccgagctaaccctacccctcgtcggacttgtctcgtagccg

SEQ ID NO: 51060 - DNA, 420 bp, Zea mays
tgcaagcttcgcacctctgaactaactcggctgtatttttctttgactgaggccaatagaatcctgacctgaagaccttcccgactagagttctggaggctgcatgtattccacattgtccagcatggacctcctccagaagttgcttcctagtggacgggaggatgcacttcatgaggacgcctgacgcaccccttgagtgtgtagtgagccgactgtctggcaatgcgctcggccgagatcttgacatctggttcttcttcattctatatatacttgatgattggccttcttcaatcatcagagtctgactcgtgttgatctataatgctgcactcttctatctgatccattgagatactcggctgtagtatttcctgcacacagaccccgagtgggacctgagttcgactggatcct

SEQ ID NO: 51061 - DNA, 216 bp, Zea mays
cactttgcagacggaacgagtaccatatattgcgaatgctccgaccacaacgcgcgcttgctgaatttaacatatgaagcgatgtctcactcaagcgcgttaataccaataatagaagctgagcatgctcctctttatgcggaggaatcattcaagatatcatgagtgattaccaccacagatttgtccaactactgcatgatatgtgaagcgggc

SEQ ID NO: 51062 - DNA, 418 bp, Zea mays
  unsure (1)..(418): unsure at all n locations
agctnggtgccgacggacaaacaatattccttgttgtcttggccgtcaaactgcttgccgttgacaaccgttaattcggacggtactccgaagcggcaaacaatgttttgccacaaaaatattcgggcagtctttgatgttattgtagaaacagcccttgcctcgatccatttggagaagtactcgaccaccacgaacgcgaacttaaggttctcctgagcggtgggcaggggcccgacaatgtccacaccccaacgttggagaggccatgtatgggcgaacagctttgtatactgcgaagggctgcctgaccgaggagaaaacttctggcaggcttcacaagaccctgagacccgatttgcggtcacatcattgcgggccaggataagccatggcggatcaccttggcagctagggc

SEQ ID NO: 51063 - DNA, 441 bp, Zea mays
agcttcactgcacctataggttggtgctcgtggcctcacggccggagctaaagccaagaactccgggaattcctcaccagtgatcggggacatcgggaacccgtgccgaggcgtggagtgcttccccgccttcataaatcctggtaagcactcccttgaactgttagccatactcgtagttacgtaaagcgttacctgcgtggtattttgggcactgatgggccgttcgcggagtcgctggcggggttgccgccgccgggtgttctgcgccaccgtggtccggtatcggtggaagaagaaacagccctggcctttggatcggtgggcaaaggctatgattagaatgtccggctatcggatcgagactgttgattgatgatccgacaactttggattatgagcaagggtaccgcgtcgggtacattaccgcgcgtctttgat

SEQ ID NO: 51064 - DNA, 442 bp, Zea mays
agcttgttcttatttggtaaaatctattctcctatggtcaatggggcatgaccttagcagagtatcgctcacattttagcatatgggctctcatgaaggtaagttttcaatgagactggaccggttttgaaaaataaaattgctatgaggcgaatacacgaatcatcaataaccagcaacaagtgaacaacaagggaaaaaacagctaggctacctgagcgctcaccaaatttgagcaaattcaaggccctcctacaaggcatcttattttatgataccagcacatacaaaattgtggtgatgactaatacaatgttcgcgatgaagaatattgtggttatgactatagccttgtagggcagctatcagaagttagaatcagcaacttcgcaactcattcagctattattccttacacctccgtcagttctaaacttatata

SEQ ID NO: 51065 - DNA, 383 bp, Zea mays
gcatgcaagcttcatactctgctgcgttgttatatgtcttgtatatcaactggacagccgacttgatgtgttcgcctcttagtgcagagaacaaaattcctgcgtctgctccctgcagcttcaacgagccatcaaaatacattcgccatacttctgtgggttctggattattcggctcttgcttgtttgttcactctgatacgaagtctaccattgcttgtattttgatggcggtgcgaagtcggaactccatatcatgtgacaccaacttgcaaacccacttggctatccggcccatggccttcttggtgtgaataatgttccctattggataaccatctactactatgactctgtggtcgcaaagtagtgaagcaacttgc

SEQ ID NO: 51066 - DNA, 203 bp, Zea mays
tgcaattcgaaaaagatagaccttgtgcagcatgtcaagcaaggtaacacgtgggaggagcacattacagcaagaatgtgatgaccacatcaagacccctaaagctgctacatatggaccttttccgacaccgcccctatcttaacataaggggaagtaaatatggtttaaatattggggatgactttttccgcttcacttgg

SEQ ID NO: 51067 - DNA, 320 bp, Zea mays
ccctgtagtctggtctattatttgtttacggtaggtgtgccttatgcagtttgaccatttccagcatttgcgcaatgaggactctaaggagaagcctcgtagtgagaccctggccattcacctcggaagtgaatacgggtctagctaacccgggctagaagggaatcgcgactcatgggttaagatgcgccacctttgcagagtgtaaaactgatatatcaaccgtgctcacggttatgagcagcctggactcctcacatgataattgaacttgaagatggaaataaatcgagatccgatgatctgccaatggtttgctt

SEQ ID NO: 51068 - DNA, 407 bp, Zea mays
agcttatcaatcaatccaaattatttgatcttgagaagctagaactgaattcgaagcttatagccgaagtccagaccagctcagaattgaagaaagcattaacaagccttcaagacaaatgcttgaactttggcaataattgtattggacgattaaagaagatattttactctgttggagccaccagtgggaaatttaacccttcggcggaaaatttaccccaggccctcgatcatattgaagctgaaatcgaagagcttgacgaagttatagccgggcacggcgacttctgtgcctgggtagcttctcggggtaccgctgctgcatttctgaatgccggttgcgaacatggaaaggttgtcaacaggcccaacttcaccctattcttatcaatcctggatgatatg

SEQ ID NO: 51069 - DNA, 450 bp, Zea mays
  unsure (1)..(450): unsure at all n locations
cctgatgcatgcaagcttgtgagcattacaagttcagaagggatatatctgtttctgctgaccagccaaaacccatgctcttatgtgaggatatagcatagcagatggtgtcattgggatctcaattgttcgaagagcacgagaaaaccttgataaggtttttgttcaacaataaagatgcttntgcttggtcacctaatgatctttgtggagttaacacggatgttattgagcactcgctcaatgttgatccatccttcagacccatgaaacagaggcttccgaagatgtctgatgacaaggccgatcgtgctcggaatgaaatgaaacgactcctcagtgccggagttattagagagcgtaaatacccataatggttggctaacactgttatggcgaagaatgccactggtaaatggagaatgcgcatcgatattactgatctcaata

SEQ ID NO: 51070 - DNA, 427 bp, Zea mays
  unsure (1)..(427): unsure at all n locations
acccaaagcgactgcagcatgcaagctctntggaataaccgagctaccctttacttattgccatggaacaatcggagattccccagtgaaggcatcaaggacaccaacatgcacgaagctggccactcgaatcaactgtcaaaaaaacgtgccgatatagtcactcgaagccttctcgactttcggacacttaattaagcgtccatgggtgtactaagcatatgcacgtgcccgaggaatattctgacgaacatctcttatatgtctcctcaacctaagatgcacccacagacgacgctattgagccacttacaactgccacttgctgaatataaggagagggttcagattataaaactctcacaatgcgctcccctcggagacacacatgacagtaattctccacgagggactaaggcttattcct

SEQ ID NO: 51071 - DNA, 435 bp, Zea mays
  unsure (1)..(435): unsure at all n locations
cgcttctcaacgctcaactgctcaaggtcttaattatgtattaactggttccgtcgatacaaggacagaattctagatttcaaataggaaagaaaatgaatcatactctatttatgtaggaccggtaaggcgaccaaatgtgttgaatgggagccaatcggatttttgtctccaagcactgaatttaacattttatttcaattgtgatgaagtaagtgcacaaaccataaacacatcaatgaacgactgatctcatgattacaaaatgttcctaatactcacatgagaccagcaaaacaaacgttcgcaaatcggacaccacaaagtcaaaacggtcaatacatatccgcaacaagtgatgtatcagcgacgaaaatctgntcttgattcaaactgactttacgaaatccattgaatgaattttcacatatctga

SEQ ID NO: 51072 - DNA, 434 bp, Zea mays
cagcttaaaacatcacatgggccatatgactcttaatgaagggcgcaaataccaagtcacatgtaagcaccgggtgacagtatatgcaggcagggaagcatgcttgcgttaatctaggattaatgtacagcttatctcgcggcagaggggtttagcccacaccaaatccgcgttaatggactgccagtggatcgtctggtccaatggagagatgtgttccgggcaagtttaggtttgactccacagttggcatggagaagcgcgcaaaagattacccttttaagtggctcgaggcatgcttgaattatgttattctggggtggtactgccaatgtgccagcttacttattttaagttaactaactaactgactatttacatactatagtatcaaattatacttatacttgcttattcatatacttgctccattt

SEQ ID NO: 51073 - DNA, 432 bp, Zea mays
  unsure (1)..(432): unsure at all n locations
agcttgngaatgttcttcatccccacatgttcttagcggcgatgccacagccagcccatgctagtcttagctattaagcatgcatctagaccagcctcctcttttgcaaaatcaactaaataaagtgtgccgcctaatacacccttaaatgctagtgaaccatcacttcttctaaagacagacacatctacatttgtaaatagacagctatatcccatatgacataattgactaacggatagcaagttatatccaagactcttcactataaacacattacagataaaatgctcattggagatttgcaatttacctagcccttctaccttgccttgaattccgtcaccgaatataattgaatcttgcgaattcttattcttgacgtacgaggtgaaacatctcttcctccccgtcatatggtttgtcaatcgc

SEQ ID NO: 51074 - DNA, 388 bp, Zea mays
cggaccttaaagtcactgcagcatgctagcttcacacgacgcgactatatcacaaacattaacacaatcatattgtatatatatctactaatattcttcacattaatccgtctctaaaatctagacttcaacacctaacgcgaccacttcacaatcatcttactgaatgaaacgatgtgtttgaacaacactaatattatcacaagatcatcactactaacacagctagcctagccattcatcaaactagctaacaaaaataataaatcagctcactctagctaaatccgacttgaaaccatgaaattgacactatgttcggcttgcgcatattatcgaacacctgatggggcatcgtactgaattgtgcttctccgacgacaggctg

SEQ ID NO: 51075 - DNA, 443 bp, Zea mays
  unsure (1)..(443): unsure at all n locations
tctaaancgactgcagcatgcaagcttatccttctatactgcttcaattttatgtattacggcgttaatcaatattctctaaaaatcttgttcctctctattcccaactcttccatctaatccctggctattccgctccaatctaggattgaaatttatttgcattcatttgtccaacaaaataacttttgtggcatatattattgcagcacctttttgggcacaatgatgatagcagctatcactactacttcttgtacaaagagaagtaatccaattccgctttctccaatctagtttcaatttcataccttctcgaatnttgttacctgtttctaatcgttgggatttactaaaatgcttctgatttataaagagataacatcgtgtacactcctatgtcatacatgacataatttcttatacataaacaacataacatc

SEQ ID NO: 51076 - DNA, 349 bp, Zea mays
agcttgtccgagctgggcctcgggcgagtctatggtgcgcccgttgcttgaggaggccctcgggcgaggcgagaatccgcctgggtctactgttcctgcccgaggctgggctcgggcgaggcgagatcgtgtcccttgagtggatggagccttgacctgaattgcgcccatcaggcttctgcagcttgtgctgatggtgattactagccgagtttaggagtcttggggtacccctaattatggtccccgacagtagccctcgagcctcaaagggagtgttggtactcgcttggacgctttgtcgcacttttatgcaaggggaccggcctttctcggctacattttgttc

SEQ ID NO: 51077 - DNA, 413 bp, Zea mays
agcttcagcttcatctatgttgaggattgtctttgaatctgtccaattcctctcagcctttctggcagcattcctgactcccatgaatagcaataggtccttgatctgaaggtatcttcatacaaagatatgttggatgaacaattgcttcgaatgcattgagtgatccgcgaccaatgatcgcattgtaaggatactccatgtcgacaatgtcaaacacaaacttgctcagtacttgtattgctgacaaatccgaatgttactggcatggtaatcttgctaagcgctacaatttgtcttcctccgaagccacaaagacggtgcgaagcatcatgaatcttgactttaggctcttgcatctgtctgaaagtcttaccaaaaaaatatctgtcgcactgatgtgtcaaccaaac

SEQ ID NO: 51078 - DNA, 301 bp, Zea mays
ttgatactctgccattcgtggttttcattatagaagctcaatgtactactgacaccaccatgaaccacactcatgtgcgtgcttgacttggctccagagcagatctctgaataggaactatcacgagtcgtgtccaacaccttaactccatagttgtatacttccgggagttttcagaactacagcaccaaagtatgacgtacctcttttgttgcttcaaaaactctataaaagcttgctagacgtggtgtctatagttatatacccgtcatcgccactggttatgagaaaaccatttaaa

SEQ ID NO: 51079 - DNA, 470 bp, Zea mays
atcctctaagacacctgcggcatgcaagcttctaaagggagaacacgtaataggtctaacaaatgttactttcgaaaaagatagaccttgtgcagcttgtcaagcagggaaacaggtgggaagctctcatcatgccaaaaatgtgatgacaacatcaagacccctggagttacttcatatggacctcttcggaccagtcgcctatctaagtataggaggaagtaagcatggtcttgttatagttgatgattattcccgcttcacttgggtattctttttgcaggataaatctgaaacccaagggaccctcaagcgcttcctaaggagagctcaaaatgagtctgagctcaaggtgaagaagataaggagtgacaacgggtccgagttcaagaaccttcaagtggaggagtaccttgaggaggaaggaatcaagcacgagttctcactccttgcacacacagcagaatggt

SEQ ID NO: 51080 - DNA, 288 bp, Zea mays
tggagttagggctcaagcgagtcatgtcgatgtgataaaaatcaaggataccaccgaaaaaaggagatatgggaaggccgtagcccgtaataacgaaaagagtgctaaccactgacttaggggtatttttagttgggacatgggtcccgtggcaagaacgccaaaaaaaatttcccgtggagggagaacccctatggatacacagtggagaagctttacttcataatatacagacatattggtacctgctaaaggtaactgattgttggggtctatggtcgggatcac

SEQ ID NO: 51081 - DNA, 308 bp, Zea mays
  unsure (1)..(308): unsure at all n locations
acacggaaatgaaccgtctgattacttgcggaacctgtaagagcagtttccacgacgggaaaaattgttctgttcactggagccgcgcccagaacactgcacgttattatggttctgtctggtctcaattctcaaaagtagctctgtctaactagagggtgcaatcggcaactcatacagataataggtggttgattacggcatatatactancaatctctatgaccatgtcactttctatcacccatgacgattggcaatgcactattttaactagactcgcgtaatatgatgccaactttatcaat

SEQ ID NO: 51082 - DNA, 274 bp, Zea mays
cagcttatcacatatgaagcatgagcgctttctctttgtcttgggcttgcctggctggcccttgcgaccttttagcgtcctcttgaatctcttgatgataagagccatctcttcatcattaagtcccgcagcctcaatttgtgccaccttgctagggagccgctccttgcttcttgatgccctgaaaacaagaagttgaggcttattgattggaccattcaatgcgtcgaccacctatcttgctttcttgatcatcattccccccgttaccaac

SEQ ID NO: 51083 - DNA, 369 bp, Zea mays
agcttcgacccatgcacgcctgtttgctgatcgtgccggactggcccattagcccatcgggccattgggttaaatcagtgttaaatgttaaaaaagcggggcaggaggtggaacccatgccctgacggaagaagggcggaagacactgggtaaagttgtctaaccaggagaacatcatgttcaggtgtttttaatattgaatataaattgtacatatatatacgattttttgtaaaataaaaaaatataatcatgctgggtcgggccagcactacgggccgaggctactgcccaagcacgacacgacgcttgtgccgggcttgcccaatcattattaaaatgggtcgtgcctcgggccgacccgcctga

SEQ ID NO: 51084 - DNA, 417 bp, Zea mays
  unsure (1)..(417): unsure at all n locations
agcttcgagcttgcaatctttatgacattgtttagttcaacgacgacgatcatttcatgatgactggttcacattggaggtgatctactctagggtagccccagagatggtccctactctaccaaccaagccatcaaccaaggagacgtcaaaaacaatcaagaccatgtgcattggtgatgagcgggtgcanaagtcaatgccacaatagcctatgagtcaagtatgaacagacaatgttctaagaaagtgagccaatcaaagacttcaaagttcatctgacaaacattgtgcaacgctcggcgattctcgatgacccaaagccaatagctaaggtggtggacaagtacttgtgtgtcgcccactcgaggacaagtaactcctgatttcctaaaaaccctcccacatagcacactc

SEQ ID NO: 51085 - DNA, 446 bp, Zea mays
agcttctggtagagtctatgaagccattgtttctgtgatcaagaacattccggtcgtatgtgagtttccagatgtatttccggaagatttgcctggactgccccctgacagagatgtagaattcgtaattgagctaaagcccggtacggctcccatttcccgaagatcgtaccgtatgccccctaatgaattggcggaactgaagactcaattgcaagatctactgaataaaggattcatccggccaagctcgtcttcttggggttgtcccgccattcttgttaagaagaaggatcacaccttgagaatgtgcgtggattatcgacccctaaatgaggtcactatcaagaataagtacctcctctccaggatcgacatcttatttgatcaactgactggcgcgagggtatcttccaaaatgacctccggcgggctatatcaaatcg

SEQ ID NO: 51086 - DNA, 413 bp, Zea mays
  unsure (1)..(413): unsure at all n locations
agctcacagtgagaacaaagaaaacacacctcttntatgttcttattcacagtcttctcagacagtcgcttatatcttcaactcatgctctagaagtcagcattgtcatattcacttctcatagctatacaaatcaccattctgtcttttgggggcgatgaatcattaggtgcacccgaggtgcacccaatgggagtagccccccagcttcgagtggatcatgaaaataatccacttgaagggccacatctcatgctggttttagaaatcatacttccctcttcggggaacgccttataaatcaacattatatcagcaactctatgctttacacgtcagcacacaatatcgcccttgagatcgagcacgcgatccgcccatatcttgtagcgttgaaatctattcacccgcga

SEQ ID NO: 51087 - DNA, 393 bp, Zea mays
agcttcgcataaatgaacgaaaatggttattttcttgatagaattgggattcagatgggccaacttaagatggtagaaatcaaggaggccgcggaaaaagggagaaatgggaagaccgacgccgcagagaaggaaaggagcgtaaatcacggactcatgggtatcctctgtcgggacagtgaccccatggcaaatccaccaagaacagagctccctctggggaaggaccccgatggacacgaggtggagaagttcgggctcggagatgacagacatgtggttacctgcgaaaggcaactggctgttggggtcgattggaggaatcaccgcggcataccaactcgaggcttttctcttgggcgccatctcgattctaccggcgagcagagtggg

SEQ ID NO: 51088 - DNA, 305 bp, Zea mays
gccatagacctcgccatgagaatcacccaaaggatgttcctcaaaatgaaggaagaagacgccaacaacacaattgaagaagaaatgatccatggagaccaaacgacgaatccacctcttcacaagggtcgtatttcaaatccacttctcatatgtgcttcattgctcatgggagcgaccctgaaagccacagtgatgatgaggaggagccacaaacggatagtgaagatgaggatgatcctcaacaaatcctccttcagctaagcaaaaaacaatcgaagagcttgctctaacttatgaaaaga

SEQ ID NO: 51089 - DNA, 347 bp, Zea mays
gcattattcacttctattttagtcccgtgcatacgtagttggcaatcgtaaaaacacctcgcctaatattaccgcgctgcttaagaggttggttatctgaacttaaaatctaacttcgtcagccaatatttgattcaaaaaaaaataaaagccaaatgggtgtgtgaacttttgcttgtgtgagtgagagctaaaacactaaaccccgcggtttccccaggggttgttttctgatgaaataccatctttaatgtgaataccaatcatttgataaacttaatagatcgtgaacttaagggaataccgtgaatccgtcagagaaaagaatgatagctacctttttttct

SEQ ID NO: 51090 - DNA, 335 bp, Zea mays
  unsure (1)..(335): unsure at all n locations
agctttngggtgctcgagcggtttaactcatctcttatctcaagctatcaatcttacattgcctatcctttaagattgaccccaagatgaattgagttgttatatcactaacttcatattcatctctagcaagaacttgtgttgtagggaataaggattaacctttgtgggaatcaagcaaaaggcctacaaccaagtgatatccaaaggatggtaacaattaattcttaagtgcacattgctcttaattggtatattcctttgtgtcttttgtagccacatatgaaaaatgaagcacttgagaatgaacttataagaatttaccttgctttgga

SEQ ID NO: 51091 - DNA, 346 bp, Zea mays
tgaaaagggggagaaataattgacaaaagggggtcgcatcataattaaaacattagatgaacgaaattctgagtgcctaatatgtcatgagcatcacgtttatctatgacacaaagcaccctatgaatagtatgatataagttgtcttcactctctgacccaaatatgtggttttggcattcgagtacaaaattgtgattttctgaaatgcacatatttagggggaggaaactatatcatatgattcaaaatcttatttattaaaccttatgttaactttaaatgtgttcgcatcaatcaccaaaaacggggagattgaaagtgcattcatccctttttgtgagtt

SEQ ID NO: 51092 - DNA, 426 bp, Zea mays
gcctacttgtatgaatactctctccttacttctacgccatctgctctgaatgcgactgagttgcacactcgggcgtggaggtaggctccatcgctccacagctgacaactgtgatatggagtcttttgatacataagcttcaacagctcacaatacttgccatatcactctcctcgggatgacatctcgtttgcatcttaggatccactacatatttactataacttgagtatgatcaccacatcgccagggatctaagaataaccgtgaccatttcatgctcattccattttgtgcttccgaggttgcgcactagattgaccatcgtcttgagtgtcacaccccgatttcaagggctcctaaacccgggcgcgaacatttttatcatgtgtgctgggactcaagctcacacttatgatgaatcat

SEQ ID NO: 51093 - DNA, 59 bp, Zea mays
agaacgaaaacaagcatcgcgtaacgacataaacaatttatgtataaacctcatctaac

SEQ ID NO: 51094 - DNA, 314 bp, Zea mays
  unsure (1)..(314): unsure at all n locations
ggctaacattaccatacccatggcaccgacaccataccatgttactaatgcactgagggactgaggccacgctactgaacgtgcctaccgccaagacaccatgagctacacatgggggttgataatataatgaaagcgtaaatgtgccaacactataaccataaaaagcccgcctgaactataatgactctgccaccaagaatgaggcaatcagaaaaggatatatgtcagctttggcagcaatgtctgagactttaagccgagcaagaaaagctttggcacaccattatnttatctataatgagctgaacaac

SEQ ID NO: 51095 - DNA, 339 bp, Zea mays
agcttaacaatgctcttccaccagatagatccttctcttctattaccagggagacctcgagtaaggtagtaattgttccacatcagatggacccaagggaagtcgctgtggttgataaatttatgccaaaatttaattaaaagagcctcgttctgcgtttctaatcgaagaacacccacgccaccattcacttttctttgagtgacccaattccaagcaatcaaaggtggcctcttggagttgatgtcatttcctctccacaggcagggctttctgaaaatatcaatttccttaatgatgggtctacgaatcttgagcgtgcacatgaagaacattggt

SEQ ID NO: 51096 - DNA, 431 bp, Zea mays
  unsure (1)..(431): unsure at all n locations
cagcaacttacagtgcgagttctggaaacagttttctattcttgnggcacattatacattgagagggatcggttgtagatccgaaaaacgtaacaactatcttggactggaaagcaccaaaagatgtccatggaatcaagagttttatcggaatggctagttattattggcgtttcattgaacgtttctccaagattgccaggccaatgacagccttgttggcaaagaaaagtgagttcaaatggaccccagcatgccacaaagtctttgagacatngtaggagaagttgacaaccacaccagtactgattctgccagatgttcacaagccattcttagtatattgtgatgcctcttacaccggaatgggatgtgtgtcaatgcacgaagggagagcagtggcatactccccctgatagttgaagattcat

SEQ ID NO: 51097 - DNA, 152 bp, Zea mays
aacaagagtcactataatggcggaaggctttttttccaagaaagtagtacacctcggttaaataggaccacctggataacctaagcctatgccaaaacccagactggtgaagccaaaacctaccaaggttaatcgaaggacctacatttcaa

SEQ ID NO: 51098 - DNA, 428 bp, Zea mays
cagctttaccctgtagtctggactatattcttgtttctgaaggtgtgccttatgcagtttgaccatttacaacatgtgcgtaatgaggactttagggagaagccttctagtgagaccctgaccattcacctctgaagtgaataagggtctagctaacccgggctagaacggaatcacgactcatgggtaaagatgcgccacctctgcagagtgtttaactgatatatcagccgtgctcacggctatgagcagcctggactcctcacatgataattcgacttgaagatggaaatcaatcgagatccgatgatctgcccatggttcgcataagctggttcacttaactgttcttgatatactcttatacctttgtttaatgggaatacttgagattcacacttattagaagacacgcgttgtaataaaat

SEQ ID NO: 51099 - DNA, 166 bp, Zea mays
actggatggtggcacccctgaagagatttagatccacgctgcgggaaataggttaaccatattacaagctactccagaaagcggagaaatcctactggacgtcataggcacaagaagctctagatgcaccgaatagattcttgacacaccggctagactaaagccg

SEQ ID NO: 51100 - DNA, 286 bp, Zea mays
agcttaacggccaatgccagggctattattattttaccatttcatccaattctccgaagcagaggccttctagcgggccaacttcctttacctgctgatggaccggcgtaagctatcgccgacaggcagcgggacttcttcttctcatgggccgatcgactccggcctatttatcgtcgtcagcgacagcgtcagggggataagaacgctctagcaaggaatcataccgacatcataccgcgccgcggacggggaccgcgtgtctcaccacctgtcgacacggcgt

SEQ ID NO: 51101 - DNA, 418 bp, Zea mays
agcttaattgtgatagtgatgcaaactcctcttgacatgtcaagaattttaccgaggtatcaagaagcacacatgattcttactaatcctcattaaagctccatgcaagggtagtacacatgagcaccaagctcttggctagataaattcattgatagacatgggccttctccacacgcaagtggtgctccctttacgggctctctcgtatgcttttcatcatattcactatcaagcttcttgctaaaatgtcacgtgcatcgtcccattggtactttgtggcctttatcccttcaagccatacaaagatttgtataacttaaaaaccttattctcacgactctttactactaactcatcagggtgtgtcatgtaaattttctcttctagctctacattaaaggaaagttttttaacg

SEQ ID NO: 51102 - DNA, 420 bp, Zea mays
agcttttaaagggagaacacgcgatacgtctaacatatgttatcttccaaaacgatagtgttggggacttgttctcaaatgcttagagttaacaacaaggctacataaaaagtattaaatgtcaaagtccttcgtccttcaagacattatggcccttcggatataatgaattctggacgaacgttatgaacgaaaagctcttcgtgacctctatggataataaataacaatacatgtatgaaataccaataacaatacagatattatcatcaacttatctctatttgcatcattaaactcaatatgacgaaatatatatgtacctccacattgaccaaaagtaaacgtacacgcgtgatgcgaaaagcgaacgccaagtatcgtaacagacaggagtctgtcatatattatggcacggac

SEQ ID NO: 51103 - DNA, 457 bp, Zea mays
  unsure (1)..(457): unsure at all n locations
cgcagcatgcaagcttaatctatcttcactccaacggatctgttcttatctctataatcgctctgagcgctccgcaatcatcgtagagatntctggactttctatattaacaagaattgttaagtctgatttagaggggctgctagcaatatctttgttgtcagggctgccatagcgaaaaaaaagggattaggcccctgcgaaaaaataacagaagaagaagagaaaaaacgaatataatagacaaaataaaggaacagaagaagaagggggctgaatctctaaatctgttgtttctctttgtgctgcgctagntgttctcttacagtgactacctttgtgcctaagctcacgtctatagcctggttcaccttggaccagcacagcaccaccgttgaacgattattcagctcgcttttgaactaacgtggtactagtgaatccttgctcaaccacc

SEQ ID NO: 51104 - DNA, 268 bp, Zea mays
  unsure (1)..(268): unsure at all n locations
agctcgcatattcaaagtctactcaaggatatcttgtatatcctatgaaccaaccttgntttcttgctagcttcatcttgaatctcggaggcgagattcctgttaagggggttagatttgtaacaccctgaatttgggggtataaaatttcttttctaatattcaccaaaatcaggtgttaccatatcttttccttgcttttcttttctctttactaacacatgaaaaggtattttgggttatatctatgcataaacctaaaaaaata

SEQ ID NO: 51105 - DNA, 264 bp, Zea mays
ggacttaagcaccgagctgcaactggatatccattatatagtctctctttaaatatattctagggtactcaaccagagagacattgtgccagcctatttttattagcaccctttattgggaagacaagctgttgtaaatgaaaactcataaatggctaattcccttaccctcatgccaatatatttgaagacattgatatatgctggtattaatgaagttaaaggtgacttaatcatttagggaggttattaaaaatcaatcaa

SEQ ID NO: 51106 - DNA, 394 bp, Zea mays
agcttctcctgaacaagtgctgcacttaccgttgaatgcgaagctgccacatataataacaaaggagctcctagcgtaagtggagttaatgttgttagatctatcaaatactgtttcagctcttcaaaggccttctgctggattggtccccattgaaagacttccgctgacttcagcacttcgaagaatggtaagtttctctctgctgatctggatataaatctattgagagatgccagcctttctgtcaatctttgagccccctctttgtacttggtggctccattcgaagtatagcttccattttacttgggttggcctcaattccctttgttgaaactaagcaaccgagatatttccccttctttactccgaagacacatttgtcttggat

SEQ ID NO: 51107 - DNA, 424 bp, Zea mays
agcttctccggtgaactcaggcaccgaagctgtttctatatagcgtggccggtgtgtgaggacttttaacctctttctctttgattctggctcgctaggagcagttgcagcttcctcttctgcagaggttgcgttctttcttttctgccctcgagtgggataacgatagttagggtaaaagaacccaattgcatcaaacacccgattgagtctcttcttttttcggcctccgaaggctgctgataacgcagtgttttcagccttcgaatatgtgccaagaagttcgtcacttaatatttcaatgtttttcaaccagttgtcgtcaggttcgacaaaatttgccccatatttgaatgtgtattttaatctgattagtccgccttcgtcggactctttgatggtttccttcggcatttcccacttt

SEQ ID NO: 51108 - DNA, 421 bp, Zea mays
  unsure (1)..(421): unsure at all n locations
agctntacaagatacagaggaaccatctttctgaagatgaggctacatgggaaactcaagacttcttatataagaatttcccaggctttttagcctcttgtaatttgcaagtgtacaacattgttgtaataaaggagtgaattccaaaccacccctgccctgtaccaaaacttatgaaataaaaatgtgaagcatttccttttccactacttaccctaggatttttaatctcaggacgagattcttttatggggggaaggatgtaacacccccggtgttactgctactaaaacttgagcatggcatcataaacattggcatcgcatatgtttgatacacctagagtgcattcactaggtaaaaatttcaacaagttgtattgctttagtgtttgcacataagaccctggaatatgatactt

SEQ ID NO: 51109 - DNA, 405 bp, Zea mays
agcttatgaaggttcttcatcccaacatgttgtttatggcgatgccaaggctagcccatatttgtcttagctattaagcatgcatctagaccagcattctctttcgaaaaatcaactaagtagagcttgtcgtctaatacacccttaaaagctaatgaaccatcacttcttctaaagatagatacatcaacatttgtaaacaagcaattgtaacccatgtgacataattgacttatagatagaagattgtacccgagcgactctactaaaaatacatttgatattgagtgctcattagtgatggctatcttgcccatgccttccatcttgccttggttcccatctccaaagatgatcgtatcctgggtaatcttgttcttgacataagaggtgaacatcttcttc

SEQ ID NO: 51110 - DNA, 433 bp, Zea mays
  unsure (1)..(433): unsure at all n locations
agcttgagttatttttattacagaccagactattaagtgagtgcatagagtaatattatacaaaccagggaggcacaaactcctcccgagaagctaaaagcaaaagattcttaagtggaggaccgagtcctcccgcacttcagtcttgattttcttcttttggaaccaccttggcacagaagcagcaaaagtctgctacttcctcacctaaaaacaacgaagggataaaccctgagtatggaatactcagcaagtcttacccgactaaagaaaagactctcaagggtatgttggttatatgggagtcaaggtaagggcttttaataatcaaagactctgttttgcagaaatgcttactaaagtggatccttaaaaatccaattntatttgtcaatttaggtagaattacctgcactagagttctttctaccct

SEQ ID NO: 51111 - DNA, 433 bp, Zea mays
  unsure (1)..(433): unsure at all n locations
agctttggatttaaggacatattttcgtttattcctaagataagatgtctcaagacaagaagatagttgctgaaacgaagctaaccgaagaggagaagcttcttgaggaaaagactgctggattcattgagtcaattgcaaagacaaatacagaaaagattacaaaagaaattctagaaggcttatctgaagataccgatgacagcgatagttatgatgcggaaagtgggggcaaagactccgaagatcggccctagcgaccaagtcacgtagtcttcaggaaatcgactatcagacagagtcatcttgataacatgagaggaaggtatttccgagacatatctattgtgagggctgacaacggagacaggactgttcctgttcttgaagaanatgaagtcataatctaccgaagcttcttcaaagctggact

SEQ ID NO: 51112 - DNA, 366 bp, Zea mays
  unsure (1)..(366): unsure at all n locations
agcttgagaactctttctaaatcgagagactttatttcctgcaaggctttccacatattcggaggctcttgctagtttttacaaataaataggagtcaatactccacgctcaaatgattacaagaggtagcacacactctcttcttatgtattctcacaaggcactatcgcataacgcacacggatagctatttcttgctcgattctcactttttggcacctatgaggctttgatctctatttgatcgttgctctaataaataggagtgaatacacaactcttatatcttcaaagtgcaagatggggtgtatntatagcccccaacacccaaaatagccattggaatgaagtggacagttctgcac

SEQ ID NO: 51113 - DNA, 371 bp, Zea mays
  unsure (1)..(371): unsure at all n locations
agcttggaggcgtctattgggtgtcgactcttggtatacttctccntcattncntccggcgccttgaatgcgacgggttgaacttccgatgtagatggatcatcaagctcgctgatctttctcgagccttcgatcatgcactccaaacttacaaaatgcgcgattacttccccgggggtcaatttaatatatctaggagtaccaccaaataattgaacttgagtagggttaacgaaaataagagatcttagaataactttaaccacttcatgggcataccactttaccgctccgaggttgcgcacttggttcaccaatggctcgagccggttgtacatgtgtggtggctcctcccctttgcgaaaccggac

SEQ ID NO: 51114 - DNA, 352 bp, Zea mays
ctacagagttttttttgatgccacagccagcccaggctagtcttagcaattaagcatgcatctagaccgacctcctcttttgcaaaatcaactaaataaagtttagtgggctagtacacccttaaaagctaatgaaccattacttcttctaaagacagacacatctacatttgagaataaacagttatatcccatattacacagttgactcacagacaacaaatgatattcaagcgactcaactcagaacacattagaaatagagtgctcggatgaaatagcatttttttcctaccctttcaccttgccttgattcccgtcaccgaatatgattgactcttgggagtctttg

SEQ ID NO: 51115 - DNA, 450 bp, Zea mays
  unsure (1)..(450): unsure at all n locations
agcttccaatctctccaagttccacaattgatacatgtgatcattagtgattagtgactcgagagagagtgattcgtgtgtaatttgtctctcttgttgcttggttttcgcaatcgtgttttcttcatctctttctaaactctctaagtgttgtgtaaagcttgcaagagacacctaattgtgtggtgatccttgtggggttttagtgacccgtgagattaagaagaagcactcaaccggtctgagtgactgattgagagagggaaagggttgaaatagacctggcatttgtggcctcctcaacgaggactangttctttggaaccaaacctcggtaaaacaaatcaccgngttcactcgtcaatcttcacttgatttgttttccctctccaaaagttcccttgctcatattgatttgagtgtgctcccanaggtcattcgcattgattg

SEQ ID NO: 51116 - DNA, 448 bp, Zea mays
agcttcagcgccatgggctgcagcactacagccactggacccaaatcaggagaccctctcccttcgagaagcccgaagccagaaaaggaaagcctccagtccaacactccaagaggaggagctggaccaagaaatcagaaacatggagatgcttcatcagcaagtacaaaggaaaaaggagaagatggccccactagctgatcttcaaaggcagattgacgaagccactgaagaagtacgccatcttgctcaagacgaacaagagtgaaggccccaacatagggagcttcaccaagaaggcttcttcaacgaggatggatggtatgatgattttaatcatgatacctttacctttgacgatgcttgtcccttggcagcagaaatgcaggctattccatggccttcatcatacaagccacctcagctccccatgtatgatggacattca

SEQ ID NO: 51117 - DNA, 329 bp, Zea mays
ctatgttgagcaacctcccggctttgaagatagtgagtaccttaaccatgtgtataaactctctaaggcgctttatgggcttaagcaagccccaagagcgtggtatgaatgccttacatgattccttatcactaacggattcaaagtcggaaaagcggatcctactttgttcactaaaactcttgaaaatgacttgtttgtatgccaaatatatgttgatgatattatatttgggtctactaacgaggctacatgtgaagaatctattacgatcatgacaccctagttccagatgtctatgatgggggagttgaaatacttcttatgat

SEQ ID NO: 51118 - DNA, 404 bp, Zea mays
  unsure (1)..(404): unsure at all n locations
agacttgtcttttgtgtatggactttgtgtctgttttatgctacggacaaggagttgtagcgtcaccaaggtgccagtgtcagaatgcctggtcccgatgttgagctgcgccaaaaccgtgccaaacgaatatggtttgagttcaaactttcccacaatgtgttcaagggaatttggcacaactttgatatttggatcttctggctttgagttttgaaaaacagagaacacaaatgatctttgagaagaggtctgaaattcagaaattcagaaatctgaatttctctaagggttcatagatcaagggctgatttgggaatttatntgagttattctggctaagccttctcaatctttctttgtgcttaataaatatactctaacttatatagatggctcaactc

SEQ ID NO: 51119 - DNA, 292 bp, Zea mays
cgctttgaaaataatgagtaccctaaccatgtctataaactctctaaggcgctttatgggatcaaacaagccccaagaacatgggatgaatgcccaagagattttcttatttctaatgacttcaaaatcggcaaagccgatcctactttctttactaaaacaattgctaatgatttgtttggatgccaaatttacgttgatgatatcatatttggttctactaacaaatttacatgtgaagaggttagtatgaatatgatttaaaaattccagatgtctatgatgggggagt

SEQ ID NO: 51120 - DNA, 431 bp, Zea mays
  unsure (1)..(431): unsure at all n locations
agcttgtgaagattcttcatcccaacgtgtgttaatcggcgatgccagagccaacccatgttagtcttagcaattaagcaagtgtcaagttcagctctattgaaatcaactaagtatagctgaccctctaacactcccttaaatgctactgaatcatcacttcttctaaagacagtaacacatatatccgtaaaaagacaattgtagcccattttgcataattgagaaactgaaagcaagttgtaatctaaagaatctacaagaaaaacattggaaatagaatggtcaggagatatagcaattttaccaagtcctttgaccaaaccttgatttccatccccgaatgtgatagctctttggggatcatggtttttctcgtaggaggagaacatccttttctccccagtcatgtnggttgtgcacccactatc

SEQ ID NO: 51121 - DNA, 306 bp, Zea mays
gcccgacccatccatgttattcttaaccattaagccagtggtcgagttcaacttttataaaaatctacgaaggataaggggacgccttaacacttcccttaaaggctttggaaccacaccttcttctaaaaaaacggacacccatatctatgaaaaaacaggtggagcccccttgacataaatgggaaacacaaagcaagcttaaatctaagaaaccaccagaaaaacacttggaaagggaagggcccggaaaataaaaatatttacccaaacctttgaacaaaacttgatttccatcccccgaag

SEQ ID NO: 51122 - DNA, 422 bp, Zea mays
  unsure (1)..(422): unsure at all n locations
agctctttctggacaagcgccgcacttactgcatagtgcgaagctgccacatacagcattcgaggagcccctgacgctggtggagttaaggttgttaaatctatcagatactgcttcagctcttcgaaggctttttgctgagctgatccccattgaaaaactttggctgacttcagcacttcaaaaaatggtaaatttctctctgctgatctggatataaatcgactcaaagatgccagtcttcttgttagccgttgagcccctttctttgtgcttggcggctccatccgaaagatagcttcgattttatttggattagcttcgatcccttttgttgaaaccaaacaactaaggaatntccccttctttactctgaagacacatttttctggactcagcttcataccagcttgcctaaaata

SEQ ID NO: 51123 - DNA, 348 bp, Zea mays
  unsure (1)..(348): unsure at all n locations
ttggattnttgtgatgaggatatcttctatcttgggaagagcttcactttgctctctcgctctttttagaagtttgagcatgaccaccttatcttctaagcttaaatgaatgtaaagttgcatgaagcttctttcgtcgtccttatcctcatttgtgcttcctctatcattttcattagccacacaacatttgtgggaaccaagatgagaagacaaaccttttggtgaggtggattcatcgtttggtctccaacgttcattgtcttcttcctttaaagggttagtttcacaaggactaaaggaagtagaagcatcatatgaactaacatgtttgaactcatcaaatct

SEQ ID NO: 51124 - DNA, 405 bp, Zea mays
  unsure (1)..(405): unsure at all n locations
agctntaaggcatatttaagtatctatatccatatttataatctcggtcagtgccctcacaagggtatgtaagggcacttccaagcacaatgtctttcccttgttcctctacagcttgatcatctaaaaagcagggagttagatattgcaaaagtactcaataagagcaaggcttagtttcagagcaaatgaaatgcaccttgagtgtcctctccatctccaagctcatcaagagttgaatcatgatccacctgaaaaatttgcaaaatgaacaaatgtaaacctttattcacttgcggattcttaaacttgcacaatgactaaatgtaaaggttcggttcattttctaattcttaaaattggccagtacatgcttcttctttattccacttgaagtaagtttag

SEQ ID NO: 51125 - DNA, 237 bp, Zea mays
  unsure (1)..(237): unsure at all n locations
gaaaaagaagaccctgtgcgcnagcaagcaggaaacaaggggaagagccancacgcaagaaaggaagaccaccncaagaccccggaccgcagcataggacctcttggacccgtccctatctgagcatagcgggagtaagagggctattattgagatgattttcccgctcactgggggtcttttgcagataagctgaacccaaggacctcagcgcttctcagaggctcaaatgagttg

SEQ ID NO: 51126 - DNA, 439 bp, Zea mays
  unsure (1)..(439): unsure at all n locations
agcttcanaagaaagcactgatttctacattctccatgcttcggggaagagactttctcaagcagaaaaactggaagcactacactatgcccaaaaattaaaatacccgaagggggcattagtgtttaatggcagtggggaggaagattttttgtactatctctcggatagtaaagagatatccgtctgccgggagatgggtagaagctttggattcccgaagctggaagatggcctttcaatactatcaaaggatgaactggctgacagcttatcatataatagcataaaggtataaaagtcaattttgtatttgaaaatgaattacttcattttttatacttaatcttgtcctcctcttgcagggcttaatccttagcaatgcccttagagcacagaaaacattgaagatgaaaggatacaatggctctgaacaatc

SEQ ID NO: 51127 - DNA, 364 bp, Zea mays
tcacacctctggactagctcggctgcattactctttgctgttggccagtaggcagtagaaaccagacctgaagaccttcccaactagagtcctaaattttgcgtgtatcccgcattgcccggcgtggatctcatctagtagttgcttcccggtagccgaaagaatgcacttcatgaggactcctgctgcgccccttctgtacagtgcttccccaatgagtgtagtgggctgactgccttgcgatgcgttctgccgtagttttgtcatccggctcttcttcattctttatatatctgaagattggctccctccagtcatctgaatctgactcttgttggcttagaacattgcaatcttctttctg

SEQ ID NO: 51128 - DNA, 275 bp, Zea mays
attttgagaaagacagggtttgtagcccatgccaagcaagaaagcaagttggagcccatcattcacacaagaacatcatgacgaccgacaggccgcttgagctactccacatggatctattccgcccgattgcttacataatacttcggcgggagtaaatattggcttgtaatagcggatgattattctcgcttcacttgggtattctttttacaagaaacatctcacacccacaaaaccttaaagggactctcgagacgggctcaaaacgagtt

SEQ ID NO: 51129 - DNA, 346 bp, Zea mays
tgccatctagaatacccttaaaagctagtgaaccatcacaccttctaaagacagacacatctacatttgtaaacaaacagttatatcccatattgcataattgactaacagatagcaaattatatccaagagactctactaaaaacacattagagatagagtgctcatttgagattgcaattttacctaacccttttaccttgccttgattcccatcaccgaatattattaaatcttgggaatctttattcttgacgtaagaggtgaacatcttcttctcccccgtcatatggtttgtgcatccgctgtcaataatccagcttgaacccccggatgcataaacctg

SEQ ID NO: 51130 - DNA, 393 bp, Zea mays
agcttcttgcgtcaggcttcagaccttggctcctcgcggcccacacgaagatatttagccttataattgcctcgggagtaagttgatgaagatagacttcgaagattttcaacacctccacgacgaagctgctcaaggggaatcgcaatccagctttcaaaaagcttcggtacaccacaacttcattttcttcagggtgtggacaagttttttccccttcgtccgccctcacaatggacagatcccggaaataccttcctctcatattaacaagatgattctctttgatagttgatttaccataaactgaatggcttggtcgccaggggcgatcttcggagtcttcgccactactgtccatatcataactttcactgtcaccagtatcttcag

SEQ ID NO: 51131 - DNA, 346 bp, Zea mays
  unsure (1)..(346): unsure at all n locations
actcaagcttatcaagttcgagttcnggatcagtaattcctgnncttgggncacattataaatcgagaaggattaagtgtggattccaaaaaggtagcagctattctggactggaaaataccgaaagccatccgaggaatctagagtttcattggaatggccagttactattggcatttcattgaaggtttctccaagattgccaggccaatgacagccttgttggcaaaaaaagtgagttcaagtggaccccagcgtgccaagagtcctttgagacactaaagaggaagttgacaacaacaccaatattgattctgccagatgtccacaagtcattctcagtata

SEQ ID NO: 51132 - DNA, 428 bp, Zea mays
  unsure (1)..(428): unsure at all n locations
tgtgttgccatcaatcaccaaaaagggggagattgaaagctctcttgtgagttttggtgtttggatgacaactcaattaaagtactaacaagtgtactaagtgttgaacaggtgcttaaggtaaagcctacagggttcaacacaagtgaacaaatgtgatggtccaagaactagattatggatacataatggacatcacaagtaagatggacattgcataagtgagactcgggtgcgtagctcggagacaactgatcaagccaaggacggaggcaagaaaagcttcgaggtaccaagtgcacaggagaaggtcaaggaggctgaggaacccaaagccaagggtgaagaagaaggcttgcaaagtcaagggtgatcgagtngagaacagctacggcacatcaaggatcactacataagaacgtgactta

SEQ ID NO: 51133 - DNA, 437 bp, Zea mays
  unsure (1)..(437): unsure at all n locations
gcttgaggcccataagctggctcgagctctcagcggatcatgagccttgagcgactcgaactgagctatgtttttgaactcgatggtgaatcaagccgagctgagctagctcctacgactcatgagtcggctcacgagttgcacaaaattaatcgcaatagatattggataattttatagatattcgacttgttccttagccttaacaatttaaaattctgatcacttggaatgttgaatggtgattctatatttcgcatttatatactaataattcactatataatgcaataataggtatcaaagtgtagctcgtgaaccgagctgagtctccttttctagctcgttgagtatgcgagttgagctgagacgacttggtttcagccctanctgggagagagggtggtgtggaggggaagttgtctgcaagtgcttaa

SEQ ID NO: 51134 - DNA, 294 bp, Zea mays
cttgtcgccccacaagctccccggagtggatgttgtttatacccgcggggacggaaccggagtttcgtttgtaatggcaccttgagtgtcggtgtcttgttcattggggctgtcggggcctgaacatgtatgtattttcagcatggagccatgttttttcctcatttcgagcactaagacgcgtctgtcggctaactgaaccactcaaccaagtgtgagttgcctcgtgcgaaagtgacgagtgaggtatccgtatcccggaagcgtaagagtccctcggctcggtcgaccttg

SEQ ID NO: 51135 - DNA, 425 bp, Zea mays
  unsure (1)..(425): unsure at all n locations
agcttcttggcaacagcctccgcctccacctccgttgcaacaaggccagcagccagaagggagccagtatgctccacaccagagggacttcagagagcagtccaaagctcgtacagtcaatagcactgtgccagagtcaaagcacatctattgacaaatatatcctaccttaatagcaatctttttcattcagttntattttctgtaataaaggacattgtttagatttcatgtaattagtttcgttgaatcctacaagggaaatatattttcttcacagccttatgataacaaagaggaccttcgaactatcgaaaattcttcgaagcaacaaaaagtcgttctaaggaacgcagagtaagtttgccaaagtcacaaaaagtcgttccaaagggaacgcagtgtaagtttcttgctccaagtcg

SEQ ID NO: 51136 - DNA, 325 bp, Zea mays
aaagtgtttaatggatctaccactatctttcatgcttgccatgctaaatttattctttcatgttaaaataaaaagatgattgctaaaaaggtaggagccaaatgcaaaagagacaagacttgcatttgggtccctaaggctattgtaactaaccttgtaagacccaacaagagttgggtacctaaagcccaagcctaatttgccttgcaagtttatgcatccgggggctcaagttggattatcgacagcggatgcacaaaccacatgactggggagaaaaagatgtttaccttctacgtcaagaacaaaagattccaagactcaa

SEQ ID NO: 51137 - DNA, 436 bp, Zea mays
  unsure (1)..(436): unsure at all n locations
agcttgtccgctntgctggggaagaggtggttcatcggccaagggaggatgaagtcgttgtttttatgagtttcttcagggcagggctttggttccctctacatgagatgataggagaagttttaaagaattttgagatataccttcatcagttaacactcaatgcaatcgttaaacttagtgtctacatatgggctctccgaagccaaggtatgagtgctaatgccgaagctttctgcgaggtgcacgagctgcactactagacgaaggccagagtggacggtcttcataaaaactttggctgttacaactttgcatatcgganagatacaaaggcccctgtaattggttatcgcaccaagtggccgaccggttggacaagtgaatggttttacataaaggcggatgagatgaaaagggagaagttaatgactat

SEQ ID NO: 51138 - DNA, 358 bp, Zea mays
gtactgtcattcccttccgaatgaaagttcttttgtaattcgacaatgtttctgtttatgccctgtcataatatatgaatacttatattgtccttaatattctttatatttcattcctcgctattacttaatgaatgtatgaaggtatgtccttcataaccttcgtccgcaagccattacatcctaagggaaataatgcttcggggacgaaggactttaacgattaacattttctatgttgccttgttcttaactcatagcatttgagaacaagcccccaacaggtactgtgtgtcaagcgtttgaatgtactaagcccatgccgagaaatattggtaatcgggtagcctagtacctg

SEQ ID NO: 51139 - DNA, 387 bp, Zea mays
agcttcgcgggagagggtttggccttggagtgagccgtctgagttggcctccttcgcctccaccctcctcccctgggaaggccctggacatcgccttttatagatacaaggagatgatccagctgtacatatggggtgtagctatgcgctaacgtggcagacggagaagtgcttgagccctatggaagcgtatctggcggtgcggcctgtggtcctactgacgtttctttgcctccatagagagttgagaaacaaccgacgtcatggacgcatgcaggataccatcattacctgttgccggagtaatctagatgggacaccggtcttgttccttcatagcctgaggcagctagctaggggtagggtaatgatgtatccctgtggcgt

SEQ ID NO: 51140 - DNA, 331 bp, Zea mays
cttcactaaacctatttcattttcagcacttttttttcttatatgaactgcattaatggcacgctgggcttcttctacagcagtatcaaaaccaaatgacttgtctataacctaaccatatatatacaaataatcagcatagtacaggtctctgcactacagtctttcaaatcaagaggtatgcagcaaaagcatctatgcaagctgaaaagagaacaaatagaagtggccaaaaattaccgctatatcattatcaatagtcttgggaataccagcaacaactacttgtagaccacgtcttcggatttcctgcggcgatttaaaaataaag

SEQ ID NO: 51141 - DNA, 445 bp, Zea mays
  unsure (1)..(445): unsure at all n locations
agcttatgatattaatctggaaccacattttacttatttcgagcacccagtttagaatgttgatcaacatgaaagggttacccacagaaaaacaatcaaattctacaaagtgcaatggaataaacattctgaagacgaagctacatgggaatcccaagagtttctaaagagttagcttcctaagttnttagaatcctgcatgtcttaagtttgttgtaatatatctctaatgcaaaccacccggtgcccccacacccctgccttgtaacagaaataaggaaatgagattgtgacgcgtttccttttccattacttagcctcgggctttaatctcacgacgaagattatttttatggggaaaggatgtaacacctttggtgttaccaaaactaatactttggcatgacatcacttgcactagtaattcattatgtatgataaacct

SEQ ID NO: 51142 - DNA, 450 bp, Zea mays
tcaagctgactgtcgattcctcgaagctcataaacggatcgcattctattcgcgacacgaagtgaagacgaacagacacaagcaagaaaccacatatatgcataagaacattacaccatacaaatacaaacataataaaacatggaaaacgaaatagagtgtgtactacggtcacacgaggaaaaagaaacgcgacgatcagggctacgatcgaggagttatcgtatttacactaaataagtgttaatcgacataatcatattaattataactactatttagtttcgattaatctgctacactaacagttgtcagttaagtaagtaatttaattaacacgagagactctaagcggggcaaaattaacgacacgcgacaagatgcgcgacgtgcaagaataatgcgcgaacgatgcacagccacatgcgacttagcgcgcggacgacgcgc

SEQ ID NO: 51143 - DNA, 378 bp, Zea mays
aacactcaagcttaccacatttgaagcatgagcgcttttctttgtgtaatactcaaaattatatcatggaatatatagtgatttcttcatttgatgtgcctcatttgcatcataagaaaagagcccacacaccatttagagattaagtcaaacaaatgataaaaaaatgcatcttgttggagttttatatgtttgtgcattaaaataaaaataagaataataataatacgataatgattctaaggttggattaaaccctagcttgaaaattgggatttgaaaaatagaagaagacaaatgatataaaaatataagtaatataattaaatttccaaaattagtaccttaaggtcacaatataagttgagtataaagttt

SEQ ID NO: 51144 - DNA, 414 bp, Zea mays
agcttctaaagggagaacacgttatatgtctatctaatgtaaccttcgaaaaagatagaccttgtgcagcttgtcaagcaggtaaacaagtgggaagagctcatcacatcaagaaccctggagctgctgcatatggacctcttcggacccgtctcctacctaagcatcgggggaagtaagtatggtttatgaattgtcgatgatttttcccgctttacttgggtattctttatgtaggataaatctgaaacccaagggaccctcaagcgctttctaaggagagctcaaaatgagtttgaactcaaggtgaagaaagcaagaagcgacaacgggtccgagttcaaaaaccttcaagtggaggaggcccttgaggaagaacggatcaagcacgagttctccgctccctcacaccac

SEQ ID NO: 51145 - DNA, 376 bp, Zea mays
gacctgcagcatgcaagcttcaaagggagaacacgtgataggtttgtcttacgtgcaattcgaaaaagatagaccttgtgcagcttgtcaagcaggtaaacaagtgggaggagcacatcacagcaagaatgtgatgaccacttcaagacctctggagctgctgcatatggacctcttcagacccgtcgcctatctgagcataagaggaagtaagtatggtctagttattggtgatgacttttcccgcttcacttgggtgctctttctgcaggataagtctgaaacccaagggacccttaagcgctttctcaggagagctcaaaatgagttcgagctccacgtgataaagataaagagcgacaacgggtcccaattc

SEQ ID NO: 51146 - DNA, 321 bp, Zea mays
attttttatcaaagtacttttgtttttgtttgcgacaatgaaaagtcttcttcactaaccctgaaaagaatggatggtgttttttcggcaaagacttaaaaaccgtacgtttgtaaaatttcatgcatcgtaaaaaattgaaccctaaaaaaaagacaagtctattacattcatgattaccagatattatacataactatattttcagatgtttttacaataacaccctattctttcctaaatactacttccgcagcttcattcaagagttgataacaacttgatccatgatagccttcactatctttttaattccatcat

SEQ ID NO: 51147 - DNA, 424 bp, Zea mays
agcttctccaccatgtcgctgctattctatttgttgcagctacctccatcaatgatcaaacgacatgaacgctccttaatgacacactttgtttgaaacaatgtatgtcgctgattctgctctgccttctccatttgcgcactaagcacacgctgtacaatgaggctctcataatgctctgcatcatctgcaccaatctgttcttcgggtggttccttagtgcctacatcatcagccgcaagcaaagcatgtgtagcttcatccaaatcactagcagaggaatacccaccatcgtcttttaccaccaaaacacgctgattaggacaataacgctgcacgtgttcatagcccttgcatcgataacacagaacatctcttgttctacccgtggaggctactgaagaggcactacctgctggtttct

SEQ ID NO: 51148 - DNA, 313 bp, Zea mays
tctccaccatgtcgctgctagcttagtttttgcagctacctccatcaatgatcaaacgacatgaacgctccttaatgacacactttgtttgaaacaatgtatgtcgctgattctgctctgccttctccatttgtgcactaagcacacgctgtacaatgaggctctcataatgctctgcatcatctgcaccaatctgttcttcgggtggttccttagtgcctgcatcatcagccgcaagcaaagcaagtgtagcttcatccaaatcactaacagaaaaatacccaccatcgtcttttaccacccaaacaccctg

SEQ ID NO: 51149 - DNA, 378 bp, Zea mays
  unsure (1)..(378): unsure at all n locations
agcttcgggatggcccactctttcatatttggaaacactttgcaagccaaaaattcctgcactatagtcctaatcactacaccaagacacaattttagcgtcaaacaactgacggtaaaaataaacgttttgcgacagacaatgtgtcacaaaatattaccatcacactatctggcggtacttattgtattggagtcaacaaatctgccggcaataatggcgagctattgtgaccagccatctgtcggtaaaactgattatgcgtggcacaaagtctgtcggaataaagtagcatcacatcgtttgtcggtaaatggatgtcatgatcctataaaaaaaaataaccagcgtgagtacgtangaatcgggaatcgcact

SEQ ID NO: 51150 - DNA, 356 bp, Zea mays
tgttgatcgagagactacttttgtttaattccataccacttttatcaactcgtctggccactttccttttggcaaagtaaaaattgatttcattatttctgagataataattccattggctcgctctaccagaccattggactctggatgtctcatatatgcatagtgcatcttagcgccaatttggtcacaaaaagttttaaatgtttcaacatcaatttgcgttccattgtccactataatggccttcgactcactgaaacgactaacgacgttctgccataagtgcttttgaactgtggccgacattattgtggctatgaacttagcttcgatccatttagaaaatattccac

SEQ ID NO: 51151 - DNA, 379 bp, Zea mays
  unsure (1)..(379): unsure at all n locations
agctntaattgngttattatggccccgtcttatcccgaccatggcgactgcggataccatatacaattccaagcgttccggctgattgagtgtggccaagcatgaatggttgagccgatgagtatcacgagtatgcacgagtgctaaaacatgattaataatagtaagagcagacctgtgagcgactggccacggagcgcggaggattccgctcaccgacgtttgagaagagggaaatcattgccgcgatgggctctggtgaaattgggaggttacgttgaggctatacgtccgcgaagaattaccgattcactgtgcacacctaatttggggacatgaggacgaggcagtgcgagttttggcttcaatcaagctcact

SEQ ID NO: 51152 - DNA, 196 bp, Zea mays
actttagattcaacttgaattgttgcaaattttacatctggctgctttggttcaacttcggttgcgcttggaacttcggaactgtggggtccttcggctttcgaaagttcttaaaacatgatttaacaatgtttctggactatgattcatgaacatgtaccttgcgacttaggtcagaacaacagtgtgaagaagc

SEQ ID NO: 51153 - DNA, 452 bp, Zea mays
agcttaagtggcagaggtcagactctgattctgacatcaagtgtgattatgtgacaagcaatgtggctgaagtttttaacaattggatcaaagatataaaggacttgcctgttgttgagttggctgacaagataagggagatgattatgattctctcttacaagaggagaaaaattggggaaagattgtatggaaggatattaccagcggtcatacaaatcttgaatgctagaactagaggtctgggacatttaactgttatcaaaggtgataactatgctgctgaggtgtgggacaatttcaaccgtaggtttgtggttaaagcatatttgcatgagtgctcctgttgcgagtggcaacacactggcaagccttgccagcatgctttgtcattgataacagcccgacaaattagaaatgtgaggatggaggacttcgttcatgattactac

SEQ ID NO: 51154 - DNA, 363 bp, Zea mays
gcttctggaaaaggccatagcacttgaacacaaatgtgttcagcttggagagatgaagaggaaggccatcacccaaggccagggagcagcatcattcgttctcgctttgctccaccccagggcacactatctcgttctggaggagggcagcagtcttaccagcgtcctgctcagtagacacctcaggccacacttcagactccgcgtcctcgttaggctgcccccactggcaccccagcgagacctgctggccagaacaccgctacaggcaccacatgcttcaagtgtggtgaggttgggcattatgccaatgcttgtcctaagaggatcccaaccacactatctcgaggtagtaattagggg

SEQ ID NO: 51155 - DNA, 369 bp, Zea mays
  unsure (1)..(369): unsure at all n locations
gctttggccgaggggtccttcgtatcattaatttataaagcaacttcggcttggccaaagttttaacatgttcgcaccctgctttctccaaaatagctgcaactcctctcgcaccagagaaggcacagacgtccccgtggtcgctcaaaatttcttcaaaagcttcggcttcgctgctgatccacttaattgggccatcggggtcgccccgtatgaagttatcttcgcttgaatatgcgccaacgttggcgaagctagtttttatctttttcacgtattctacagaattttcaaaacatctttcttttgatgagcgaagttctgcaactatttttttccaataattnttccagtaatcactggcatctc

SEQ ID NO: 51156 - DNA, 422 bp, Zea mays
agcttgaccctaatttgctaagtgtaccacttaaagctttttagtaagattaaactccaccatgttaaattaatcctcccccatcaaattttaattgcaaaattgcatatcatgccatgcatgtttcttactcatttcattcattagattgcaatcttgctgacgaagagtacgtgctcatccctgagcaaggagctgtccacgaggaagatcaggagcaagctcccgagactgccatcaaggatctccccgcagccccagctattgaaggcaagccccggtttaatgcataaccatttatatatgctattttactacacttaatgtttgtaggcttgtactatgcacttaagtgtaggagttgcctgaaaccctatttgcttgaacttaagattcctttttaagatggatactagtatgtt

SEQ ID NO: 51157 - DNA, 267 bp, Zea mays
aagctttatagtgtattcctagccatttacctattctttgtttatgggtccgatcaacccacgctagatgggatacacgacttgtgcactacaagaaattggttaaagaacgtgggtgacaaaccgtcgaacttaatgtaataagccgtcgaacttaccgtaagaacgtgggtttaccgacgaatatagccgacgacgatttttggacgaacttatagaagtaagttcgacggccccgtcgaacttaacattaagaacgtggtgttc

SEQ ID NO: 51158 - DNA, 365 bp, Zea mays
  unsure (1)..(365): unsure at all n locations
agctntaccaaatggacgtgaagagtgcctttcttatggaccaatcaaagaagaagtctatgttgagcaacctcccggctttgaagatagtgagtatcctaatcatgtctataggctctctaaggcgctttatgggctcaagcaagccccaagagcatggtatgaatgccttagagatttccttattgcaaatggccttcaagncggcaaggtcgatcctactttattcactaaaactcttgacaatgatttgtttgtatgccaaatttatgttgatgatattatatttgggtctactaacgaatctacatgtgaagaatttagtaggatcatgacacaaaaattcgagatgtctatgatggggg

SEQ ID NO: 51159 - DNA, 272 bp, Zea mays
agccaccctatttttttctgggcacgggggcggggtcaccgggacccacgaatccgggcaacccgagcgccagacccaaattcgttcggcccccacgagattgacgactccctgaactcaattcccaaacaaatttcggccgacatcaagtgcaagacttgggccacggcgcgccgcgttaccccgggcagaaaagtccggtgagctacccaagcgacgcttcggtgccttgaactacaacggatagatgcatgacgttcctaacaacgcgg

SEQ ID NO: 51160 - DNA, 443 bp, Zea mays
  unsure (1)..(443): unsure at all n locations
agctgtatgggattaaatagttgtaatatatatgctatgtcatttaatataatccatatgagacatgattacaaaatagataactcaactntaaactccgttataacttagtcggaggtcatcttttggtcaaagcctagttatgggtgaaaagtattatatttactttttaattataaaagcaaatctatgagcacaggctaaactatcatttaattatccctggaaacatgacaaagtaatgttgtttaatgtgtaaacaattttgatacgaagctaactcaactagaatggattcactcggagctaaaatgaattagttatggattttacaaaatcttagattcattnttatagcaaaaacaatttgcaggcgtactttataaagatcaggggctgttttgtaagatccaaggacaaaattgttagnttatttgaactat

SEQ ID NO: 51161 - DNA, 243 bp, Zea mays
agacgaaggaccttcatcttttattattttttgggcaatatgacgcaagttttcattatatctccaatgggttgcggagaccaaccatgtgcaggaccacgaactatggcccatcgcttctgtagtactacaaatgttcgttcaatgtcttttctaacggacttttgaataatggcaaagtgttgtgtcctgacatcatactgatgacggattgttttaacaaacgctggccaagtcggatta

SEQ ID NO: 51162 - DNA, 446 bp, Zea mays
agcttcttgcgtcaggcttcagactttgttttctcgcgggccacacgaagatatttagccttataattgcctcgggagtaagttgatgaagatagacttctaagattttcaacacctccacgacgaagctgctcaaggggaatcgcagtccatctttcaaaaagcttcggtacaccacaacttcattttcttcagggtgtggacaagttttttccccttcgtccgccctcacaatggacagatcccggaaataccttcctctcatattaacaagatgattctctttgatagttgatttaccataaactgaatggcttggtcgccacgggcgatcttcggagtcttcgccaccgctgtccatatcataactttcattggcaccagtatcttcagacaggccctcccagaattccttgggaatctcttctgtggtggacttcgacatc

SEQ ID NO: 51163 - DNA, 329 bp, Zea mays
agcttcagctccatctatattatgaattgcttttgaatctgtccagtttccttcagcctttctggtaacttcctgacttccatgaatagcaataggcccttgatccgaaggtatcttcatgcatagatatgctggatgaagaattgcttcaaaagcattaagtgtcccacgaccaatgattgcattgtaggggtactccatgtcgataatatcaaacacaacttgctcagttcttgtattgttgacaaatctgaaggttactgacatcgttgtcggggaccataattaggggtatccccaagactcctaatctcagctggtaaccccca

SEQ ID NO: 51164 - DNA, 445 bp, Zea mays
agcttggaaattaaaactaggtgttcacttctcgcatcaatgtcaaagtctttacacctagtacaaattacaacatgttctacacaagaattggatttatttgccacttctaatttagcatttaaatcattgttgacaccttctaaagtagaaatggttccatgacaagtagatagttcaaaagaaagcattccatttctcttaatctctaatgcaagtgatttttgtgcttctacaaatttgtcatgttcttcatacaacaaatcctcttgcttttctaaaagcctattcttatcattcaaggcatcaatcaattcattaatgttatctatcttagatctatctaagcccttgaacaagcatgaataatctatgtcatcatcatcactagactcattatcactagaagaagtataagtggagtcttgagtactcacccttttct

SEQ ID NO: 51165 - DNA, 363 bp, Zea mays
ttcctgcttcacagcttcggcactgtgtttaccttcgtatcttttgagcttctccctttctgattcaagtccgaagatacctgttcacacattatactccagaaacattgttaaatcatgtttttgaagaccttcggaagccgaaggcccccaacaattatatttgtatagaccaatttaatacagacacagttaatcaatcattagtttgacttataggccatagacaccacacatacaacatgtttatcaattgttacataaatgataggcataaagtttcattttactgaaatgtgatatattgtttagctcgtgagatggctcattaacaaattgagctagctgattaacgaaccaaac

SEQ ID NO: 51166 - DNA, 394 bp, Zea mays
agcttgaccggccatgtccacgtttcgtttgtttcgaatcgccatttgcctatataccgacgccatgtcaccgttgggggtccatgtcgacctgacctttggagctaccgtctaatccttctttccagttcttctgatcatgtcaaagatttgtgaacggcaccggcacgtgttgttaaaaagagggcagaaggcgttagattttgttttgtgttttagcacaaccacttgagatggagacgacggtttgttctaagatatttttttaggttttggtttaactttgagggcaacggatgttttatttgaagcttttataatctatcccggagaaactattcagaagacgacaaaaacatgtttataggtagttagagcaactctagatagaaaa

SEQ ID NO: 51167 - DNA, 387 bp, Zea mays
ctatacaacactcaagcttaagttgagagacaatacactcctaagttccaccttgcaatccaagcatgttcgtttaccttctcttataaggacaaagtcaatttaactagagtgttgcccactgctataggtcactaaatgagattctctttctaaagaaagtgttggctatcaacaggtcaaaagctaccacaaagtctgagatttttcctgcatcctgatccctactaccatacccaaaacctccatgaaccgtctcaaaacctgcatttgttgtacctacatacccattgtgatttcctctaaaaaacttctccctaatatgtatagttctaaccatgccatctaagtctttctagaaaagtcttttagcactctcatcgtggc

SEQ ID NO: 51168 - DNA, 441 bp, Zea mays
  unsure (1)..(441): unsure at all n locations
agcttgtggaggttcttcatccccacatgtgctaagcggcgatgccacagccagcccatgcaagtcttatccattaagcatgcatctagaccggcctcttcttttgcaaaatcaactaggtaaagcttgccgtttagtacacccttaaaagctagtgaaccatcacatcttctaaagacagaaacatctacatttgtaaacaaacaggtatatcccatattgcataattgactaacagatagcaaattatatccaagagactctactaaaaacacattagagatagagtgctcatttgagattgcaattttacctaacccttttaccttgccttgattcccatcaccgaatattattgaatcttgggaatcctttgtnttgacgtaggaggtgaacatcttcttctccccatcatattggtagtgcattcgctgcaataat

SEQ ID NO: 51169 - DNA, 353 bp, Zea mays
actatacaacactcaagcttcctcccttctttgtcgaaaatcattgttttctcggatgtattcatccattttctgaagcagtttctccagggtttgagggggtttcctggcgaagtactgggctgaaggtcctggccgaagccccttaaccatggcctcaatgacaatttcattgggcactgttggcgcttgtgccctcaaacgcaagaaccttcggacatacgcctggaggtattcctcttggtcttgcgtgcactggaacaaggcttgagcagtaaccggcttcgtctgaaacccttgaaaactggtgatcagcatgtcttttagcttctgccatgatgtgaatgttcctg

SEQ ID NO: 51170 - DNA, 362 bp, Zea mays
tatatatccaatgcatcaatgggtctttgttgacttgacctaactgttgatgggtcatcagaaccttcaaggggtaacaataatcatctttgaaccagtcaatcaagacacagttggctggtccagatgcattggatttggttttggaaagttgcatgcgttatgtggtgctcctttacgggcatgctagatttttttcacacgatggcgagttcaacattaatgaagacatatttttcttgtggttacatattgaaggccggtgcacaataccattgcctggatggtaccagttattattctgcagttatttcagaagaatagcgatgacaactacatactaccagactagcagtcaagcc

SEQ ID NO: 51171 - DNA, 413 bp, Zea mays
agcttcttgtagctgctgccaaaaatgatatgtgaactgcgttcctcgatctgacactatcttcttcggcaccccatgaaggcaaactatccgtgacatgtataactcagctaacgttgctccggtgtatgtggtcttcacaggtatgaaatgggccacctttgttaagcggtccacaaccacccagatggaatcataaccggcccgggtacgaggtaggccaactataaaatccatcccgatctcgtcccacttccactgaggaatccgcaatggctgcaacaacccggcgggcctttgatgctctgctttggttctctgacagctatcacagatggcaacatattctgcgatctctcttttcatgccataccaccaaaacctcctttttaaaatctggtacatcttctcac

SEQ ID NO: 51172 - DNA, 355 bp, Zea mays
ttgggaactatgcccgtatccaatctgtctaagccggaatataagcgcttgccaggtgtccccgtttgggtcgaccacgaccagcacccaacataagacttccctagttatttagccaagaccagagccatgatagttctcatggtagcactgtttttctggatggtcactccatgttctaattaatatgcaataatcttatttaaccatcgggttaaccacaataatgtaaacttaccatttggaacattaatatcataaacgggagtgactgcataaagttaagttgtagcaatagcatagcttcgaaggtaatgtataatacccaagtttgatcaaggaatacggtagaaaa

SEQ ID NO: 51173 - DNA, 417 bp, Zea mays
  unsure (1)..(417): unsure at all n locations
agcttccatacgaattntctaataaggaatattatctccataaaaatgggaggaggtccatccctgctagacatcattactctagcagttaagctaaactaggagcaacacgactctgataccaattgaaagtatcacgatgcccaagagggggtgaattgggcttctctaaaattcttacaaaagattaaatcctaaacatgagcccaacttcacccaatctactagcaagaagtaaaaactatgaaatggagaacaaccctaagtcattatggcaaatactagcaaagcaaatacacaaagtaaaatgctcaaagtaaatgtgaaaagtaaagtagggacaagaagacttctccattttttcccgaagtctcgaagagtcggcactcttcactagtcctcgttggagcacccatg

SEQ ID NO: 51174 - DNA, 383 bp, Zea mays
  unsure (1)..(383): unsure at all n locations
aagtcacctgcagcatgaagcttctctgtccaccctttggcgtttctttacatgtacggnggtgctcgactggatccaaaccctcgccttcccctttcggtactgtagctagggttcgtcgtaccctgtaattgagtacacggccgcctaatctgcagttaattcattggacgaaataaggtatcgatggttgcagtagctaattgtatgtccaatgttgcctgcagtttgcccttatcaactcgctgtcttcgtcttaggttccaatttgcagcgcaaccaaggtactctcatacacattagtacttgttccgggactagatctttgtttgtttcgcacaatacagtttaccaaaatcatgtttatgtgatgttcagatctc

SEQ ID NO: 51175 - DNA, 90 bp, Zea mays
gctccaaaacccataaagactaatcgagatccagcactccctcatgcatcaacgcaacacataatctgacctggaaagggcaaacctcgg

SEQ ID NO: 51176 - DNA, 401 bp, Zea mays
agcttaaatgtattttttgtacaactaacacattttattttgtataccagctgcatgaaaactcttattgagttgttcgacagtatgccgcaccggaatgtgttgttgtggacgatggtgttcgtgggatacacacaagtataattataattaaggtcttgtttgggagcaagagtattggaggggcttagaggactgcaatcccttacttcctcttcatagttatttttatgaaacaccttaagttttgaccaaacaacaatgaagataacatatcttgatccaaatgcactgatgaaagcaataaacacgcggctctactctaaaatgacattgttgatgatattattttgttaaatatttcataacactcttttgcatggaagccatcatcatcttag

SEQ ID NO: 51177 - DNA, 398 bp, Zea mays
agcttgtgaacaatacaagttcagaagggttattgctgcttcggccgatcagccaaagcccatgctcttatgtgatgacatagcagagcagaaggtgatattgggatcccaactgtccgaagagcaggagaaaaccttgataaggtttctgttcaacaacaaagatgtttttgcatggtcagctaatgatctttgtggagtcaacagggatgttattgaacactcgctcaatgttgatccatccttcagacccagaaagcagaggcttcggaagatgtctgatgataaagccgaaggtgctcggaatgaagtgaaaagactccttagtgccggagttatcagagaagtaaaatacccagaatgattggctaacactgttatggtaaaaaaggtcaatg

SEQ ID NO: 51178 - DNA, 375 bp, Zea mays
gcttatgaagattcttcatcccaacatgtgctattctgcgatgcccgagccatcccatggtagtcttagcaattaagcaagtgtcgagttcagctctatcaaaatctaccaagtatagctgatcctctaacactcccttaaatgctattgaatcatcacttcttctaaagacagtgacacctacatcagtaaagagacagttggagcccattttgcataattgagatacggaaagcaaattgtaatctaataaatctacaagaaaaacattggaaatagagtggtcaggagatatagcaattttaccaagacctttgaccaaaccttgatttccattcccgaatgtgatagctcgttggggatcttgggttttct

SEQ ID NO: 51179 - DNA, 285 bp, Zea mays
aagatgttctttttggctcgcctctttgatagagagctttctgttgccagccaaggagaataattcaggatattgttgagctggaatgcccttatttcacagatcgtcccagaaaaggatagttcttccattggcgatgattggagatgcccctccctttgaattttgaacaagactaagtaaacttctccaccaaaaggatccaattcttaaacaactaggaagtctgtccgacctgtaattattgttccagatgagattcacccaaggttagtcattattatt

SEQ ID NO: 51180 - DNA, 359 bp, Zea mays
tgcattgcatatttaatttccttgtattgcatctaggtgtcttgtctaacctagttgagataaccgccaacaaagcgagtgaaaaagcttaactcgggtcaaacctgacaagtcttagttttaagcttttaacacttaaattcttactttctatgcaattattgattcttgaaatatgcatgaggtactgcacttagggggagtattcaaaactcaaatcaactcatgaaaaccccgagtgcaaaccaaaatgcaaatttcaccatgtgcctattttctctaaaaattatctaacctatggcgaaatattttgaaaaatatatgagggtaccaataccctgtccaacaagtgttatttt

SEQ ID NO: 51181 - DNA, 432 bp, Zea mays
agcttctaaagggagaacacgtgttatgtttttctaatgttcaattcgaaaaagatagaccttgtgcagcttgtcaagcacggaaacaggtgggaggctctcatcacaccaaaaatgtgatgacgacttcaagacccctggagctgctgcatatggacctcttcggacctgtcgcctatctgagcatatgagggagtaagtatggtttagttattgttgatgatttttcccgcttcacttgggtgttctttttgcaggataagtctgaaacccaagggaccctcaagcgcttcctcaggagagctcaaaatgagtttgagctcacagtgaagaagataatgagcgacaacggatcccagttcaagaaccttcaagtggaagagttcctttgagaggaagggatcaagcaccaagtcttctgtccctacacac

SEQ ID NO: 51182 - DNA, 433 bp, Zea mays
  unsure (1)..(433): unsure at all n locations
agcttctaaagggagaacacattttgggactaacaaatgttcattntgagaaagacagggtttgtagcgcatgtcaggcagggaagcaagttggtgttcatcatccacacaagaacatcatgacgactgacaggccactcgagctcctacacatggaccttttcggcccgattgcttacataagcatcggcgggagtaagtactgtctagttattgtggatgactattctcgcttcacttgggtgttctttttgcaggaaaaatctcatacccaagaaaccttaaagggattcttgagacgggctcaaaacgagttcggcttaagaatcaagaagaagcgataacggaacggagttcaagaactcacaaatcgaaggcttccttgaggaggagggcatcaagcatgagttctcttcttcctacaccccacaac

SEQ ID NO: 51183 - DNA, 370 bp, Zea mays
cagcttgtgcgtcttaaagtacctggcctttgtcttatggaagacttcgctgatgtagtatactggcttctggatggttcggacccctgcaattgatcctgagtcctcaaactcctggccttccgtcaacatcgtggtggtcggaccaccaccttctcctaggggaactttatgactcccctggggatgttgtgccgccctttcggcgaccagcaccatgctcaccgcctcggaagccgctgcaatgtacaagtacaatggctcccctggctctggagctaccagtattggcagtggcagggacacaaggtgctgcttcaactcttgaaaggcttgttctgcctcttcggtccaagagaatggaccggac

SEQ ID NO: 51184 - DNA, 397 bp, Zea mays
  unsure (1)..(397): unsure at all n locations
agcttggcgaccaagtgttcgcactcttctatttctacgagatcgaagacccggagcatctgtttggtgaaggcaagtgtcctctgacccattatgtcccatttactttataattcactgtcccgtatactatgaacaacctaaggattgactagctttctatttaccttgtccttgattacctgttgggttactatggttagattcatgctattgctttactttaatcaatgaacatgatgtgaacacttacgatacgatgttgtcattatgattatgatgttggactggtgatactttangaggcttgagcggtttctcgagtgcctctccgtaaggacctgttcattggatgaccgcccgggaaaacagtgcaaccatgagggtggaatgggat

SEQ ID NO: 51185 - DNA, 437 bp, Zea mays
agcttgtacttaagctgaaccatgcttatctatgttgcaaatttgagatatttattgctcaacttttaagaataggtctcggttaatggtgagaagacttttcactgagccaaaggtcttgggtttcgaactttcgatgcagtctctgagcaaaatgcagggataagacttgtcttggttcttcctcgaaccatactcatgtgggagccctcagtaatgggtctgtttatttattgctcaactttgctttgcctacaaatcttgattctaaacttgaaggtatgcgttgcagctgttgatctgaaacctgtattgcaatttgcccttggtagtctgattttccttgttcttttccccgctggaagagatctaaatggctggttcttgtatgaagtcctacgatggatgccaattgttctccgttttatatgaatctg

SEQ ID NO: 51186 - DNA, 187 bp, Zea mays
atcccataccctatgacttgggattcaccctggaccataagacaagcctggattcacgtcccctacacacgccctcgatggttgctacggaacatctaccagggtcgtacaaacatttggaacaagacgagggacctaatggaatctctcgttcctatcgtagtaggtgagcttttatagcaacgcc

SEQ ID NO: 51187 - DNA, 442 bp, Zea mays
gcttctaaagggagaacatgtgatatgtcttacaaatgtacatttcgaaaaagatagaccttgtgcagcttgtcaggcaggtaaacaggtgggaggagcgcatcacagcaagaatgtgatgaccacgtcaagacccctggagctactgcatatggacctcttctgacccgtcgcctatctaagcataaggggaagtaagtatggcttaattattgttgatgatttttcccgcttcacttgggtgttctttttgcaggataagtctgaaacccaagggaccctcaaacgcttcctcaggagagctcaaaatgagtttgagctcaaagtgaaaaagataagaagcgacaacgggtccgagttcaagaaccttcaagtggaggagttccttgagaggaaaggatcaaacacgagttcttcgcttcctacacaccacagcaaaatg

SEQ ID NO: 51188 - DNA, 308 bp, Zea mays
ttatcaaatggacgtgaaaagtgcctttctcttggaccaatcaaggaagaggtctatgttgagcaacctcccggctttgaagacagtgagtatcctaaccatgtctataagctctctaaagcgctttacgggctcaagcaagccccaagagcatggtatgaatgccttaaagatttccttattgctaatggcttcaaagtcggtaaagccgatcctactctattcactaaaactcttgaaaatgatttgtttgtatgccaaatttatgttgatgatatcatatttgggtctactaacgaatctacttg

SEQ ID NO: 51189 - DNA, 438 bp, Zea mays
agcttctgccatgaagtgatggtccctgttttaagagaagaatatcacgtttgagctacattcttgactgccatgatgaaagacttggccatgacagctgcattaccttcgtatgaggatatagttgcttcataactcatcaaaaactgcttcgggtctgaatgcccatcatacatcggaagctgaagtggcttatacgatgggggccatgggataacttgcagttctgctgccaagggagaagcatcgtcaaaagtaaaggtaccatgattaaaatcatcataccatccatcatcgaacatgccttcttgatgaaactccctgtgttggggcctttgttcttgttcatcttgagcaagatggcgtacttcttcagtggcttcgtcaatctggctttgaaagtcggctagtcgagccatcttctcttcctcctttgac

SEQ ID NO: 51190 - DNA, 376 bp, Zea mays
gcttcgaagacgaccaactcgccttccggctttttgacctcctctgcccccgggacacgggccactccgccgcaaaaatacccaagctgttgcatgtcttgcacacggaccaaggacattcgcgacacaccgaattccactgggtcgctggtgcgcaactccttcaccggcacattgctcagcgtctcctcggacgacgcaacgtccggcggtgtatcggcagcagaagaggaagatgacgacatggctacgtactgtcggcggtgacgggcggtttgcttcacacaggccagatctccgacgaacaagagctaggagggcagactagcaacgagccggttgagaaagaatctatggttttcacggagcgcggaaa

SEQ ID NO: 51191 - DNA, 436 bp, Zea mays
agcttctaaagggagagcacaattttgggtctaaccaatgttcattttgtgaaagacagggtttgtagcgcatgtcaagcagggaagcaagttggtgtcaatcatccacacaagaacatcatgacgaccaacaggccgcttgagttactccacatggacctattcggcccaattgcttacataagcatcggtgggagtaagtattgtcttgttattgtggatgattattctcgcttcacttgggtgttcgttttgcaggaaaaatctttaacccaagagatcttaaggggattcttgagacgggctcaaaatgagttcggcttgaggatcaagaaaataagaagcgacaacgggacggagttcaagaactcacaaatcgaaggctttcttgaggaggagggcatcaagcatgagttctcttctccctacacgccac

SEQ ID NO: 51192 - DNA, 360 bp, Zea mays
tcagctccatctatattgttgatggcttttgagtccatccaatttccttcagcctttctggcagcttcctgacttccatgaattgcaataagcccttgttccgaaggtatcttcatgcatagatatgctggatgaagaattgcttcgaaagcattaagtgtcccacgaccaatgattgcattgtaagggtattccatgtcaacaatatcaaacacaacctgttcagtccttgtgttgtggataaatccgaaagtcactggcattgtgattttgccaagtgctacgatctaccttcctccgaagccacaaagagggtgtgtagcatcatgaatcttgtcctctagctcttgcatttgtctg

SEQ ID NO: 51193 - DNA, 344 bp, Zea mays
gcttgttctagtgcacgcaagatcatgattaatacctccaggcgtatgtccgaaggttcttgcatttgagagcacaagcacccacaatgcccaatgaaatcgtcattgattccatgatcaaagggcttcggccaggacctacggctcaatacttcaccaggaaaccccctcagactctggagaagctgcttcagaaaatggatgagtacatccaagccgataatgatttccgccagagaagggaagaagcttataagtttttctgagatgactaggggctttggaggaagaatccaccctatgcatgtcagatcaatccacaattccagtcagagtgatgacag

SEQ ID NO: 51194 - DNA, 380 bp, Zea mays
  unsure (1)..(380): unsure at all n locations
agctngtaagattaataatatgtattacatatgttctatctctgttctaaatattaggtcaccataaaataaattgacctatgattatgtccttgtaaataacacttacgccccgtttggatcattggaattgaattccattctaataatagtaatttaggcatatatcaattaagctaattcagttttatacaaaatatatttatatactattattagcaaaatgtcggagatatttatgtgctatattttaactatagatgagcgagacgaagtgtgtcacgtaagttacagagtagaaacaaattctactactgtataaaatcatttctcatcccccaccccatgaatttgagatagactaatatctaaaaatttga

SEQ ID NO: 51195 - DNA, 331 bp, Zea mays
  unsure (1)..(331): unsure at all n locations
aaccgcagaccataccaaggactntgccgttcaccaagaggggactggatatgattggacctttcaagaagactcaagggggatacactcatgtattggtagcaattgataaattcactaaatggatagaattcaagcccattgcttctttaacctctgctaaagctgtggaattcatacaagacataatattcagattcgggataccaaacagcatcataactgacttaggatccaacttcacaagttcaaagttcttcgacttctgcgaacaaaagagcattcagatcaagtatgcatctgtagcacattcaagagccaacgggcaagt

SEQ ID NO: 51196 - DNA, 357 bp, Zea mays
agcttggtgccgatggagaaacaaaaatctttgttatcttggctgtcaaactgcttgccgttgtcaactgttagctcggacggtactccgaagcggccaacgatgttctgccaaaagaatttttgggtagtctttgatgtgatcgtggaaacagccctcgcttcaatccatttggtgaagtattcgacggctacgaaggcgaacttaaggttcccctgagcggtgggcaggggcccgacgatgtccatgccccagcgctggagaggccatgtatgggcaatcagctgtgtatattgcgaggggttgcctgaccgacgagagaacttctggcaggcttcgcaggaccttgtgacccga

SEQ ID NO: 51197 - DNA, 325 bp, Zea mays
tgtgttttcttgaactccatttttttgcgtttctaaacactctgatgcttatgccaaactcattttgagcccgtctcaagaatccctttaatgtttcttgtgtttgagatttttcctgcaaaaagaacacccaagtgaagcgagaataatcatttccaataactagacagtacttactcccgccgatgcttatgtgagctatcgggcccaatagatccatgtggagtagctcaagcggcctgacggtcgtcatgatgctcttgtgtggatgatgaacaccaccttgctttcctgcttgacatgccctattaccctgtttttttaa

SEQ ID NO: 51198 - DNA, 375 bp, Zea mays
agcttgaagccatggtaagtagcataggcctttaatatacgaattgactcaagcctagctacgggtgcatatgtttcaccaaaatccaaaccttcgacttgggagtatcccttggccacaagtcgggctttgttccttgtcaccacaccatgctcatcttgcttcttgcggaagacccatttggttcctacaacattttgattaagatgtggaactaaatgccatacctcattcctagtgaagatgttgagctcctcttgcatcgccaccacccaatccgaatcttgtagtgcttcctctaccctgtgtggctcaatagaggaaacaaaagagtaatgctcacaaaaatgtgcaacacgagatctagtggttacc

SEQ ID NO: 51199 - DNA, 305 bp, Zea mays
  unsure (1)..(305): unsure at all n locations
ttcacatnctattcactacgagtaccgtttatttgttgcattggagggcaagcataagcatgcaatggaagcagtctgaaccacacgatcgttcatagcagagagaggttctcgatctctctctctcggggtatcaaatatatacatgatcttgcgttgaatcggggccacggccatgggcgcctgagccgttgatgagagcagcagtaccgttggtcgcaacggccactgcgggcggtcggcagaccctatgttcgttgtggcggccgtggggccccgcggagcggggtcttacggcaacccct

SEQ ID NO: 51200 - DNA, 445 bp, Zea mays
  unsure (1)..(445): unsure at all n locations
agcttgtgaactatgaccgtatccaatctgtttgtttcggaaatataagcccttggcagatgcccccattctggtcgaccacgaccagcacccaacataagaattccctagttatttagccaagggcgtcccataccaccctcatggtagcactgttttcgtgggtggtcactccatgttccaattaaatcatatgatcttgcttaatcgttggattagcaacaataatataaacttatcatttggaacattaatattacaataggagtgactacataaagttaagttgtagcaatagcatagttacgaaggtaaagtataatacccaagtttgatcaaggaatacacttaanaaggttaggtgtatgcgaataggtaacccatcaaattatgcatatatatccaagaataaactntattagatgtattgtttgggatcaaacag

SEQ ID NO: 51201 - DNA, 362 bp, Zea mays
gagaaaacattcccccatcaaaggttttgtttttctccacctgtcggcacattgacctgaagacgcaatacttacaggaccccaccaatatggatggatgtaccctgtaaaaaaaagggtatacactttgaaacattctgtgaagaacatggcacgacctgaagagtcaattgcagaagcatatgttgctaatgaatgtttgcatgcatgttctaagtattttgacgatcttgagacaagacacaattacgagggaaggaatagagagcccgtcgatatgaaaaagggtgacttatctgtgtttcagcatggaggaaaattacttggagccccaaagaatacttatttagattaagattatg

SEQ ID NO: 51202 - DNA, 319 bp, Zea mays
gaaaaagatagaccttgtgcagcttgacaagcaggtcaacaagtgggaggaacacatcacagcacgaatgtgatgaccacttcaagacctctggagctgctgcatatggacctcttcggacccgtcgcctatctgagcataagaggaagtaagtatggtctagttattgttgatgacttttcccgcttcacttgggtgttctttttgcaggataagtctgaaacccaaaggaccctcaagcgcttcctcatgagagctcaaaatgagtttgagctcaaggtgaagaagataatgagcgacaactggtccgagttcaaga

SEQ ID NO: 51203 - DNA, 439 bp, Zea mays
  unsure (1)..(439): unsure at all n locations
ccggaccttaagtcacctgacgcatgcaagcttcgcaaagttggtcctaaagagcagtttgtttgttattattcagggaacaacaacattgaagatgaaaccatttgttgtctaaacaactaactcattaaattgataaggagctgcctcgcgtggggtgtgtgttgaggtttggcaactacggcgcaccgcggtcttcttccttttgtgccggagtttggtgtaagtaccgtcgagttcctttggccatgtgtagcccgtctagcggagtcgtaattgctcgttacttgtgttgagctcgacaacgatgactctggatgggttctggggggagggataccggataccggtatctgggttgtttgcgcactatgtgtangtttccgacctgtnttttcttataactgagtcaattacattcttcttaattgaaatgcac

SEQ ID NO: 51204 - DNA, 370 bp, Zea mays
gcttcaccaccctctggcagctctgtttactctttggtgctgcacaacctaaaaggacagccagggctaccaagaagcctatctatattagcgatagcgaccctgaggatgaagtggagttgattgatgattcggactttgatgcggacggtgactctgacgagtgaagattgtagtcatccgtactttggctgcaacaatatccagtttgtgtcgttgcatgtgacaatttgataatgcatttcttgtgcgttgtatgtgttcgttgcgttgttcaaaactgttgccaagagctcaagacaacctggttaactggttaactgaattgtatgtctaattttggcatacaagtgtgcctgtggtatgtttt

SEQ ID NO: 51205 - DNA, 411 bp, Zea mays
agcttctaaagggagagcacattttatgatttacaaatgtgcatttcgagaaagacaggatttgtagcgcatgccaagcaggaaagcaagtcggcactcatcatccacacacgaacatcatgacaagtgacaggccactggagctcctacacatggatttattcggcccgatcgcttacataagcatcggcgggagtaagtactgtctagctattggggatgattattctcgcttcacttgggtgttctttttgcaggaaaaatcccatacccaagagaccttaaagggattcttgagacgggctcaaaatgagttcggcttaaggatcaagaaaattagaagcgacgacggaacggagttcaagaactcacaaatagaatgtttccttgagaaggagggcatcaagcatg

SEQ ID NO: 51206 - DNA, 369 bp, Zea mays
gctttatatcatagcatgatgcatattctagtatgatacggatggcttccagtcgagcaaccggtgcaaaggtctctccaaaatctaagccttcaacttgagagaatccttttgcaacaagtcttgccttgttccttacaatcacgccttgatcatcttgtttgttcctgaacacccactttgttccaatgattcttgtaccttgtggaagcttcttgaaagtcgcctagagggggggtgaataggcaaatctaaaatttataaacttaagcacacactacaagccggggttagcgttagaaatataaatgagtccgaaagagaaggcgaaaacaacaagcgaataagatcggatgacacggtgatttg

SEQ ID NO: 51207 - DNA, 342 bp, Zea mays
  unsure (1)..(342): unsure at all n locations
agcttgttngaaaaaagcaaagtcttgtgatgttcttaccgtccgggccttaagggcggaccgttcgtgatcctccagtgggtcctaagtctgtccacttcggacatgtcctgttcatttgcactgcggaccgtccgggccttggggccggaccatacgcagtcctgaccaaaggaggctgctctcggcacagtccctgaattatagagcggaccgtccggccttaatgggcgaaccgttcgcaggtgccaaatttggtttgggcaaggactgtttggtttctgggatttgactacggactgtccggaggataagcccggacagtactgtctccaggtctcg

SEQ ID NO: 51208 - DNA, 309 bp, Zea mays
aatacacaaattctccccctttgacatttttttaccaaaaaccatactcaaacaagaacatatgatgatgtcaaaggacagcagggtgtttaaggaggaaaaatgactatcaaaactcccccttacttattgaacatatgcactatcaacatttaggtaagatacatatatgcaaaaagattaatgcttccttttgtacctttaccatgttgtagtgtacttcccatcttgaaagtatttaatctttcaaaagcttctccacacttgtgcctgattctttatcctaaccttttcttgttgctaagacac

SEQ ID NO: 51209 - DNA, 442 bp, Zea mays
  unsure (1)..(442): unsure at all n locations
agcttcaactccatctatattatggattgtcttgtaatcagtccagcttccttcggcccttctggcagcttcctgactcccatgaatagcaataggcccttggtccgaaggtatcttcatgcagagataagctgggtgaagaattgcttcaaaagcatttagggtaccacgaccaatgatggcgttgtaggggtattccatgtcaacaatatcaaacacaatttgctcagtccttgtgttattaacaaatccgaaggttaccggcatggtaatcttcccgagtgccacaatctgccgccctccgaagccacaaagagggtgcgtagcatcatgaatcttgtcttcaggctcttgcatctgtctgaaggctttggcaaatataatgtcagctgcactggctgtgtcaactangacattgtgaaccanaaaccctttgatcaca

SEQ ID NO: 51210 - DNA, 361 bp, Zea mays
tggatgaagagtcatcatcatcatcatcctatctatcatccgagtcccattcaactaagtaggctttgccatctttcttcttgttataatatttctttttcttcttgtcactttcatctttgcccttcttcttcttgcttggacaattcatggcaatgtgaccgggttccccacactcaaaacattttctatcattgaaagcatttcttctaaatgtttgacctcttctaagttgacctcttttcatcttcatgaatttattgaatttccttacaaataaagccatgtcaccatcactctcgctttcattttcttcatcattgctatcttccttttcaattgcctttgaggccttggcttt

SEQ ID NO: 51211 - DNA, 325 bp, Zea mays
  unsure (1)..(325): unsure at all n locations
cactggacaattctattgatagaattgtgaatagaagcgtcagagatattacaacaaccaaagcctgctaaaaaaatacatggaggctattgcaacaactacccaaaactagtgaaagagacataaaaacaatgggagcaattaaaaacttcaacaattctttgcagtgcaattctctttgtgaactgttaagacaagaatcagatccataccattaccaaccctttttcaaatttggcaacaaactataaanttgcttgactatgggcttgtttggttggcctttttctgaagagctttcttgaaagctggctgtgaagaaaac

SEQ ID NO: 51212 - DNA, 371 bp, Zea mays
taccaaatggacgtgaaaagtgcctttcttatctgaccaatcaaggaagaggtctatgttgagcaacctcccggctttgaagatagtgagtaccctaaccatgtatataaactctctaagcgctttatgggctcaagcacgccccaagagcatggtatgaatgcctaagagattttcttatcactaatggcttcaaagtcagaaaagcggatcctactttatttactaaaactcttgacaatgatttgtttgtatgccaactttatgttgatgatattatatttgggtctactaacgaatctacatgtgaggaatttagtaggatcatgacacagaaatttgagatgtcaatgatgggggagttgaagtac

SEQ ID NO: 51213 - DNA, 397 bp, Zea mays
  unsure (1)..(397): unsure at all n locations
gcacatctgaaatccgcgatttatatctaaatccgggcgacggcctataaattgcgctcgggttcggtttcttcgccacatctcgcacctcagtgattaagcaattgactcagtttcacctgaaaccgtgcgcagtccacanattttcccctcccgtgttcttagctccgccgtgaagaacccctttcagggccagcgctcttcgggtcagtatttatcaaattacttcttgttctagtttgcttttgatctccaatttctctcaatgccaaccaattgagattcggccgaagcccatcaccggaacgcacacttgctctgtaaaacgccgccatgactacccnctctgtcgacccactctttgattcctatttcgcccacatccaagtgagtacct

SEQ ID NO: 51214 - DNA, 352 bp, Zea mays
ttgtcaaccggagagaaatagtgttcttaccaaagcgattgcacaagcagttccgacgtactatatatgtcctgttttaaactctcacgagaattatacaagatgtttttttgggcttggcacttgggatttttacccgggctcaataagtgtatcacatgctgatcgaaaacgaggcccgtgatgaggcatgggtggacgagcgccagatacaaaagcctacgagccagactggtcggatttaaagtatgccaagtcaaattcccatccagtatttgtgttttttatagagactagcacgtcaccctctgccaacgggggacgacgttctcaactcaaacacaagatcatg

SEQ ID NO: 51215 - DNA, 430 bp, Zea mays
agcttgagaacggagttaccgagtcatgttgtgtgtactgtcaatacgggatcagcagcgcctccaatgcagcaacacagccacagtcgagaaatccactctaacatcaatggctttactgctatgtcaaacgccatgagtcagtacgcggggcaagggttatttggatcaggcattcatatgacgcacgcccaagtgcttgggatgttttctggcatgaatggcaaagtcaatggctatatccataggcacccagtaactgctgatagtcttaaaacagcaggacagaacggagatgttggaaaggcaactgtgaaccccgtgcaaagcgcatgccatgatccaaagaccgcgaccgaaaatagctctgctcacccaagcttgaattcagagcccagtcatcaggttcctcgcctaggggaaagctgac

SEQ ID NO: 51216 - DNA, 400 bp, Zea mays
ctaagcactgagctgcagcttttcccttcttggcagaaatcattatctgtctatatgtactcatccattgttgaagtagtttctccagagtctgagggggtttcctggcgaagtactgagccgtatgtcctggttgaagacccttgatcatggcctcaatgacgatttcattgggcaccgttggcgcttgtgctctcaaacgcaagaaccttcagacatacgcatgaaggtactcctcatggtcttgtgtgcattggaataaggcctgagctgtaactggcttcgtctgaaacccttgaaaactggtgaccaacatgtccttaagcttctgccatgacgtgattgtccctggccagagagaagagtaccatgtctgggccacacttcggactgccatgac

SEQ ID NO: 51217 - DNA, 366 bp, Zea mays
tgttccactactctcagggatcatgatttatttctttagacgtatgtccgaaggttcttacgacttaaggcacaggcgccaacggtgcctaatgaaattgttattgaggccatgattaaggggcttcggccaggacctacagcccaatacttcgccaggaaaccccctcagaccttggagaaactgcttcagaagatggatgaatatatccgagcagataatgactttcggcaaagaagggaggaagcttacagattctccgaaatgaccaggggcttcggagggagaatccaccctaggcacgttagatctatccattctactcagaatgatgataggggaagtcagcaacaaaggccgcagtat

SEQ ID NO: 51218 - DNA, 309 bp, Zea mays
  unsure (1)..(309): unsure at all n locations
agcctttanaggaagaacacagccagcgactcacgtctgtttattctgacaaaaacaggatttgcagcgcatgtcaggcaggaatgcttcttggtggacatcatccacacaactaacattgtgaggactgacactccactctggctcctacacatggacctattgtgtccgttcactatcataagcttctacagaagtaaacactgtctacacatggaggatgattatacacactctacttagatgttctttttgcgagaacacttttatatccaccataccttaaaaggatccttgagactgtctcca

SEQ ID NO: 51219 - DNA, 275 bp, Zea mays
agctttgggtcaaggattcgctaaacaggctttgtttatctctaccgagtcttggggtctgttgacgggattggacctgtctctgctcgtcatcgagactgctacaggcggcgaccctgtgccacacgctccatgatgctctaacgatatgcgaggccctacgatgtgatgaagttacggatactgagagatattctagcgccgacttatacaccatatgaactgcggacctcacactcatatgtccacactgacatgcatagtatgaccgtacc

SEQ ID NO: 51220 - DNA, 404 bp, Zea mays
  unsure (1)..(404): unsure at all n locations
agctttngaggaaattctgagtgatcgtgttttgttttgttcgtttctggcgtgagaggagtttcggctatcttggagaaggcgggttacaatcatgttaaaaccctagctcaggccgaagctgccttctctgtggaagacacgaaggatccctcggccgaagcaagtttattaggcggcgaattttttactgatatttgggaaaatggtggccaagaaatatcccatgaaataatgaagaagagcgaaaaagatagccacgactctcgagaagcagcaaagaaagctgagaaagttgcataacttgagagacggataggtattgtttaatggcttgcatcttcgccatttttttcgtggcttcgaactgattgatgtttttctatcgcagctgagctacctcc

SEQ ID NO: 51221 - DNA, 350 bp, Zea mays
  unsure (1)..(350): unsure at all n locations
tcgtaaaacgaaagagcttcggcaaagtttattttttttntcaacttcattcagaaaacaagaaattcaatcatcaaatggctagagtgcgttccacagctagagttacgcgcgacagaaaggaagccgaaggtgctgaaattaccccaatctctgaagtgatgcagcactcaaggctggtaacatcggaggatgtacctgccactaaagcagagcatgctgatgttgagactgagtctgaagatgattacagcgcggtgccaagtaaacccagccacttggacttcgggaaatccaccatctccaaaaatgatttgcctaagatgttgaatttgggctattttaatgat

SEQ ID NO: 51222 - DNA, 428 bp, Zea mays
agcttgcaaggagactcgacgacaacgcttacttttctatccgcgcacgaaggcgaggtcaccgcgacggtgacttctctgctgttcatgacatagagcttcactcgggcattacatctaacacccgcgaagcgccaatgttgcggggctgtgggggaaatctcggctgcgaggagctgcgctgtatatggttgagcatgttttatccgaagtggagggaggggtggtgttgtccactggactgtgcaaaacagggagccgccggagcgcgaagatgccgcggttgctgctcaagggggaggtgccgagggaggagccgctgccccatggatgggagagactcgaccgcggatctccagccctggcgagcagagcatgtcgcgcagggagcaaatgccagcgccatggctgccatcgggcgagagcac

SEQ ID NO: 51223 - DNA, 282 bp, Zea mays
tttttgctcttcgcatgagaaggctttggcttcaaaaaatggagccaactaaaccttgggctgagctttctatccaagtgccacacaagactaaagctttcttctccctagctatgtcttctttgattggtgatggggcatctgtcattttttcacagataattggctgatgggaaacaacattatggagaatgcttcatgggtggttacaattgtttcaaagaagcttaccaaaataagaaccattaaggtgggccttaatggccacacttggattttgga

SEQ ID NO: 51224 - DNA, 435 bp, Zea mays
agcttcggctttgaagacagatttttatttctctctaagatgtctgaagataagaaggctgctgctgagatgaagctgagtctctacgaagagaaaaacttggggtttcttatagcgatgtcgaagaccaatacaaaaaaaatcaccaaggagattctggaaggtttgtctgaagatactggtgacagcgacagttatgatgtggacagtggtggtgaagactccgaagatcgcccttggcgaccaagccatgcggtttttggcaaatcaactatcaaagaaaatcatcttgtcaacatgagaggaaggtatttccgggatctgtccattgtgagggccgacgaaggggaaaagacttgtccacaccctgaagagaatgaagtcgtagtgtaccgaagcttttaaaagctggactacgatttcccctgagcgagt

SEQ ID NO: 51225 - DNA, 372 bp, Zea mays
  unsure (1)..(372): unsure at all n locations
agctttcattcattcataatcattcatatgattttttatnnggggccaatcataattgtgttcatcttaatgcatgccaaacattgctatcatacgaaacaaaacttgtggttggaaaacaagtctcctactaactcaaaccacaaggcagtagtgtagacaaccagacacatgaatcatatcacatacgacacgataaacttttgggtatgttgcacgtcttttacacggcacgtacaagacaacggaattaagagtgatgactattgtagtaaatcaaatgtgctaaaatcctctctaataccaaacgttactaaaaacatgaagattagtggacgttttacatgatcatattataaagttgcgccacaa

SEQ ID NO: 51226 - DNA, 437 bp, Zea mays
  unsure (1)..(437): unsure at all n locations
agcttcagttcttntatactaagagttcatctttttattgcaattcaggtatattgaagctagcaaaacacggctttaccactcgagtgacaagatcgctgctgctacagcccagagtgttctggtgtatgtgtttgaaaacatactgaagttattgcatcccttcatgccattcgtcactgaagaattatggcaggtatcagcacataactgttgattattacttagataatctatcatgtctctcatcagcatcaccagtagaatattattattgttcttatttcaggcatttccatacagaaaacaagcacttatggttactccctggcctaccactgaccttcctaaagatntgaggtccatcaaacggttccagaaattgcaatcattggtaaagcttngcacttgaatattacaatctcaattcgagagat

SEQ ID NO: 51227 - DNA, 373 bp, Zea mays
  unsure (1)..(373): unsure at all n locations
aacactcaagcttgaattgtctgtgaatgtaggtgttcttttataccggngggagccattgggtcattgacagtggatgcacacaacatatgacaggcaacccacggatgttcacctcactagatgagaatgttgatggtcaagataaaatcacatttggagacaactcaaaaggaaaagtgcaaggacttggcaaggtggcaatctcaaatgatttattaatatcaaatgttctcttagttgcacctttgagcttcaatttattatcagtgggacaactctgtgatcttggacttcaatgcttattcactccatcagaggttattgtaacaaaaatggatgatgaatcaatggtattcaagggattcagata

SEQ ID NO: 51228 - DNA, 267 bp, Zea mays
  unsure (1)..(267): unsure at all n locations
agcttctaaagggagaacacgtgtattgttttactaacgtgcaattcgaaaaggatagaccttgtgcagcttttcaagcaggtaaacaagtgggaggagcgcatcacagcaagaatgtgatgaccacttcaagacccctggagctgctgcatatggatctcttcggacctgtcgcctatctgagcataggaagaagtaagtatgggttagttattgttgatgactnttcccgcttcacttgggtgttctttttgcaggataagtctg

SEQ ID NO: 51229 - DNA, 373 bp, Zea mays
acactcaagcttgcccgagcttgtaccgaagacctcctgttttcggaatagcgcaatcgtgctcactggagttcggaaccccaccggagcacgtggaccgggtgagtctccgcaccattttccaattcactgcacgcatagcctctacgtcaccccgtggagctcctcgtgatgtttaattgaactataccgtcgtggtttggccggagcaagagccgccgacgaccttcgccgcctgcgctcgtggccaggatcgctccgaccacctctgacgccgacccgcacaccgacgtgaccgccgtgaccttccctacgtcacttacaaccccgctggagctttactgccgtcggtaagcctcgccgccgtaatcta

SEQ ID NO: 51230 - DNA, 328 bp, Zea mays
  unsure (1)..(328): unsure at all n locations
cagcatgcaacccggagcgnagaaaggaagtcacttggtgtatactgctgcttcgcctgctccggcggatgaatgcgacgggccgagctacccacgcggtggcatcatcaagcacgcggaactatctcgagccctcgatcatgcatacaaaactcacaaaagtcccgacaactgcctcgggggacattccagtctatccagagaaaccgcggattaatcgaacttgactacggccacagaaaataagagatcttagaaacaccctaaacatggtcgggtcactacaccatacgctcgcgaggttgcccacttgatccaccaacgactt

SEQ ID NO: 51231 - DNA, 334 bp, Zea mays
tcttcacccaattttaatatttttaatgctcaaggcaaaggtatggaacacattgcttcaattggtagttgatcaataacaaatccttccaagaggcattctttcaattggtaataatatattctatggaaaggaatgtcaatatgaaggttaaatcccttttggcttaaatttgtaaataagcgcatattgtgaatttactgccccatgtgcattaacttacaaggaatttaatttatgcctttacgcctcataaatgatgattagtccgccattcatatatctttatatatatcatcatccctccataaacactttcttggactactaaaac

SEQ ID NO: 51232 - DNA, 418 bp, Zea mays
  unsure (1)..(418): unsure at all n locations
agcttccataatctttattggtgcttatttattatactttaatgtttatatttggcctaagccatgattctatatttttcataatattttgccccttttcttcaattttacttaaagagctcaattagggttggtattagggtttcaacattttgctcttttgaaaaactcatttgttttgaacatgatgcttttaagtataaactttgtggatcctttattcttaagtcaatntgatgctcatgcttaatttggctcacatgaaatgttgctccttgggttagtactgatagaaaccctgngtgacactggggtgtcacagccttccccccttaaaggaatctcgtcccaagattcgggtcaaagtcctcccggggtgaagcgaanggtgagacttacatgaagtgggtgcttatta

SEQ ID NO: 51233 - DNA, 356 bp, Zea mays
tggcatacaactgacaatctcgtagcctttgatttactttcctcaaatgcttctcatgctcttgctcattttgggaatatacaagaatatcatcaataaacaccaccacgaacttgtctaggtagtccatgaacacactgttcatcaagtacatgaagtaagctggcacatttgtcaaaccgaatgacatgaccatgaactcatacagtacatacttggtgatgaatttcgtcttcggtatatacgagggtcggattctgagctgatggtagcctgacctcaaatctatcttcgagaacacactggcttctctcaactaatcgaataagtcttcgattcttggtaaaaggtatttg

SEQ ID NO: 51234 - DNA, 441 bp, Zea mays
  unsure (1)..(441): unsure at all n locations
agcttcagctccatctatattatggattgcttttgagtcaanccagtttccttcggcccttctggcagcttcctgacttccatgaatagcaatgggtccttgatccgaaggtatcttcatgcaaagataagcaagatgaagaattgcttcgaaagcattgagggtgccacgaccaataattgcattgtaagggtattccatgtcaacaatgtcaaacacaacttgctcagttctggtgttgttgatgaatccgaaggtcactggcatggtgatcttgcccagtgctataatctgtcttcctccgaagccacagagagggtgtgtagcatcatggatcttatcttctggctcttgcatttgtctgaaggccttagcanatataatatcagctgcactgcctgtatcaaccaaaacattgtggaccagaaaccctttgataac

SEQ ID NO: 51235 - DNA, 430 bp, Zea mays
  unsure (1)..(430): unsure at all n locations
agctntgtaggaagattcaactcacaacctctatagctgttctgcttgttctgtggagaggataaggggcacacaactagaacctgccaagttataatacagaaacaaaaaaagatagctgaggccgaagcgtggcaaaatcagtcgcagcaagttctacatactgcttcgtgttattccccatacattccaaagtatgtggggaatcagcaaccattttcacaacctacagtttcagtagcttcaacaagccactctctagctgcgtgggccctaccacaaccaccggtcatggctccaacttcgtcccacaaccaacagcctgaagggcagcaccacattcagcaacaacacgatgcaagaaaagaatctaaagcttgggcagttaatagcactgttccagagttgaggcacatatactgaagctaca

SEQ ID NO: 51236 - DNA, 362 bp, Zea mays
ttggcaaccagtcgagcggcttctagtttctgtgcgacaagcttctttgaagcacgcaaatccctgatggtggaatccttggttgataacagctgccgaagtcgcataacctcatcttgggatacttgcagctcgtgacgatgatgatccagatctgacatggtgaagcggtggctcctctccaacatggtcaaggagttactagcatcacggtataacctgtccagattgtcacaagaggctgcgagtgctcgtttctcctcctacaaacaagaagtaacattcagtaccaaagcaacaataacatggtaaggtcaaccaaaggaatttacctcgtgcgccatcctttcagaatcaagctg

SEQ ID NO: 51237 - DNA, 421 bp, Zea mays
  unsure (1)..(421): unsure at all n locations
agcttcgttggcccgggagcacgtggtctccctggtcgatgaggtgcagtagcggcggctggagcctggccaggtcgtccgctggcgggaccgaccccggagtcaggctgccgaggccatgagccgggctgatgtcctcgggggatagctggctgaggctacggagcagccggtcgaggtgtttgcctgggccgggacccttacggagacctcggctatgatggcccgagcttggtgctggcctcctccttcgaggtggagatccttccgcccgcgtcgtcgtccgaggcgggccagattcctccgaaggtggagacgacgctgagggtggtgctgctccctctattaatgtctgaacctgcanggagagtttgtctgtagtgtgcgtattgttttcgcggccaccggggcccaaacatat

SEQ ID NO: 51238 - DNA, 449 bp, Zea mays
  unsure (1)..(449): unsure at all n locations
agcttcctggaggccatcaagacagcatacaatatcttctccagctctgtataattnttctttgacaaactaagaacctcggatacaaaatatattggggcctgcctcttgacttgaccatcaagcttctcctggaccagcgctgcacttaccgctgagtgcgaagctgccacatacaataacaaaggagcccctggcattggtggagtcaatgttgttagatctattaagtactgttttagctcttcaaaggccttctgttggattggtccccattgaaagacttcagctgacttcagtacttcgaagaatggcaagtttctctctgctgatctggatatgaatctattgagagatgccaatcttcctgtcaatctttgagcccccttcttttgaagtggtggctccatccgaagtatagcttcaattttacttggattagcttcaat

SEQ ID NO: 51239 - DNA, 366 bp, Zea mays
  unsure (1)..(366): unsure at all n locations
taaaactntagagacaaagtatactggggtttgttttttgatttgtccttccaatttctcttgcactagcgctgcactcactgcagagtgcgaagctgccacatataattgtaacgaagcccctagcacaggtggagttaatgttgttatatcaatcaagtactgcttcagctcttcaaaggctttctgttgagctgggccccattgaaagacttcggttgactttagtatttcaaagaatggcaagtttctttctgctgatctagatataaatctattcaatgaagccaatcttcctaccaaccgttgggcccccttctttgtgctcgggggttccattcgaaggatagcttcgatcttgcttgg

SEQ ID NO: 51240 - DNA, 438 bp, Zea mays
  unsure (1)..(438): unsure at all n locations
agcttctttcgaaggttnttctgtaaaaaatatcccaaggggagagaatgagcatgcagatttaatagctaaatcagcggcacatagtacttggatgcagtccgaaggttggaagcttgaaaagtatttagatgtggtccgaaggttggaagcttcttcggaagtactttttgaaacaataaaagcaccttcagtcgagctcatggaaagagtagtgctcacaatctcacctgtacatagtgaagactggaggactgaaatagtttcctttctccagggcaactgttttttagacgatgaagcttataacaagagaatggaagcaagaacaagaccttatgtaataatagaaggtgagttatacaagcatggagtttgctcaccgttgctcanatgcttgtcagagctaagggcaggaattaatgaaggagatacatg

SEQ ID NO: 51241 - DNA, 357 bp, Zea mays
tgacgactgtcagttcgacctctaaaagtctttttacttggtcgcatgcgccgctgtgtacggcaagctcccgcgaagccgccgcttggacgcggtccagagcaactgcaccgcgctgtccatcgttaagcaggggggcctcatggttgtcgccaacgtcgacgactctcgggttgttctggacaccgcatccgacgacgacgccatcacgccgtccagctcatcgtccacctgaagcccaacctgccacgtaagtcgctactggccggacatgaattcttgtgcgctaggacgatggacgttgctgacgttgtgtgagtgtcctcgaacatgatgtatatagtggaataacgcatt

SEQ ID NO: 51242 - DNA, 427 bp, Zea mays
agcttctccaaatctgaggaaactgctatcctttatctacacgatcttctttggtactccatgcaaacacacaatctgagccatatataactctgctagctgagaacctttataagtagtcttcacaggaataaagtgagccactttagtcaatctatccacaatcacccatatagcatcatattctttctgggtgcgaggcaatccagtgatgaaatccataccaatctcttcccatttccactcgggtatcttcagtggatacaatagtccggctggcctctggtgttcagccttaattctttgacatacatcgcacatagccacatgtgcagctacatctctcttcaatccataccaccaatattttcgcttcaaatcctgatacatcttaatactaccaggatgaatagaataatccgaatat

SEQ ID NO: 51243 - DNA, 368 bp, Zea mays
tcaatccttcagaccgtgtctaaatatttttctttcttcgagtctcttgctttacaactcttgtcaatatgaccagaaataacctgggaatcagttttaagaaccgcccttctaatccccattgcttttaacttccgaaggcccaaaagcaaagcttcgtactcagcaatattatttgtgcagttgaaatcaagtcttgttgcgtagcaagttttaactttggagggtgctactaacacagcagctgctcctgcctcgaaggttccccaagaatcgtcacagaataccatccatacttcggtatttttaggtgtttcttctccttgagcccctggcgtccaatcggcaatgaagtctgccaatgcctg

SEQ ID NO: 51244 - DNA, 411 bp, Zea mays
agctctgccaaatagggcgcataatgcactctttttatcttctcgtgctgacaggtcattcttcacataaaaccattctgtcatccagtctccgggccatctctttcgaaaagttggcacgggacagcttgacccggaccgagaaacgaaactgtagcagccaaaattattgtgatattgttccttaccccaaggttttgtttcgcatgataattcgtgtatattgcagaagctttatgcatcaggcttcagaccttggcttctcacggcccacacgaagatattcagccttatgattgcctcgggggtgagttgatgaagatagacttctataatcttcaacacctccacgacgaagctgctcatgggaaatcgcattccagctgtcaaaaagcttccgcacactacgac

SEQ ID NO: 51245 - DNA, 299 bp, Zea mays
aatcctcacgctttgatccaaaccgggacacgcgtagtgtttatttttgtctgccaatgaggtagttacctgtcggcgattgatggcgcgaaagtagctgtccacgcgacgcggcggatcaccaacatcggcgaagaatcttcacgacaccgtgaacccctcccttccaattgcgccctcgtacaacttctacgtaagcaacccaagctttgggttaccaaattggtgcctgagtcgcgctaccggcggctatctaccggggcgggggcgcggcttcctctctctttctttttctggtc

SEQ ID NO: 51246 - DNA, 439 bp, Zea mays
  unsure (1)..(439): unsure at all n locations
agcttccactgcaaatccacaagaattctttttctcacaagcctgccattggtattcaattggtccgtaattgactttcaattattatatttgatactacattcgatatcatttacatgtattctccaatatttggttagactatatttcatatcctatacttcccatgttgctattcatgtataagtggttaaatcatattctgttacctatgcataagggaagttagtctaatcaaatcatgtcttgcacctctatttttcacttgctttttcctaaaatagaagatctatgtcaggggagtatttcttcacctctaaaggggagaaaattcttgctaagggagaacactcgtttagggggagtaattggttagtgcttcaattggtattaatngaccaaatcacttatgaaggcaagtcttatttgcttcctacat

SEQ ID NO: 51247 - DNA, 369 bp, Zea mays
  unsure (1)..(369): unsure at all n locations
tgaagctgatatcagcggctacttatgttttcttatcgncggcaatttgttctactccaatttcaaggtaaaaattactttcgctaggtttcttttatttttgtggtgaaacaaggttttctgatgtcggcttatttctacagagtatgctgctaagtaaggcactgagaatgcaacaagacctcgaagacaagaagaatgaaatcataatcgaaggcttggaaaacaaaattaaagattacgaagactctcttgaaaagcaagacttcctgcttcaagcaacggagggttccctcgtagagcttcaaactgaaaatgccagattaaccgaagagcttctctaagctcaaaaaattttaaaaaaaaatt

SEQ ID NO: 51248 - DNA, 442 bp, Zea mays
agcttgaaacagttaaaataccatgcgcctatcgcgctaagcagcctcttcggctcgcttggcttcttctcgagcttcgtgagtttctttctcattcttctttatagcttcggcggccaattctcgaccaccttccatccaaacgttggagtaaaatttctcgtccaatagagtcacctcagccgaaggatccttcgtgttctccacggtgaagatagcctccgtttgggttgcaggtttaacatgttcacagctagatttttccaaaattgttgcaacccctctcgcaccagcaaaaagcaaaaaccaccgcgctcgctgaggatctcttcaaaagcttcagcttcttcaccgatccattcgataatccctttagaatcgcctctaatatttttttgctcggatgagtaagcacccaccttttgcaaactatcttttagct

SEQ ID NO: 51249 - DNA, 370 bp, Zea mays
  unsure (1)..(370): unsure at all n locations
tctaaaaggagaccacattttatgtactattaaatgttcattnagagaaagacagggtttgtagcgcatgccaagcaggaaagcaagttggtgcccaccatccacacaagaacataatgacgactgacaggccgcttgagctactccacatgggtttattcggcccggtcgcttacataagcatcggcgtaagtattgtcttgttattgtagatgattattctcgcttcacttgggtattctttttgcaggaaaaatctcaaacccaagagaccttaaagggattcttgagacgggctcaaaatgagttcggattaaggatcaagaaaataagaagtgataatgggatggagttcaagaactcacaaatc

SEQ ID NO: 51250 - DNA, 441 bp, Zea mays
  unsure (1)..(441): unsure at all n locations
agcttctaaagggagaacacattttgggactaacaaatgtctcatttgagaaagacaggatttgtagcgcatgtcaggcagggaagcaagttggtattcatcatccacacaagaacatcatgacgactgagaggccactcgagctcctacatatggaccttttcggcccgatagcttacataagcatcggagggagtaagtactgtctagttattgtggatgattattctcgcttcacttgggtgttctttttgcaggaaaaatctcatacccaagagaccttaaagggattcttgagacaggctcaaaatgagttcggcctaaggatcaagaaaataagaagcgacaacgggacggagttcaagaattctcaaatcgaaggcttccttgaggagganggcatcaagcatgagttctcttcttcctacaccccacaacaaa

SEQ ID NO: 51251 - DNA, 358 bp, Zea mays
  unsure (1)..(358): unsure at all n locations
tcggaaaccccatacttctagcttttctttcttcagacagataattctttgttgtctgggaggcagtataagaagtcatcttcgtctgtgccattgaatactaaggcccccttcggatacttcagttctcgggcatagtgattagcttcaaaaatctcttcttcagataacctttttcccgaagcatgtcgtacaatataatcaagtacttcggaagatgctttgggggcagtaatgccagtttcttcagccaaaacttgttctgccatttctgttttttcggcttccaaggatttcaccttggcgggctttgaaagcccancttcagtttcagattgttgctttgaagcttccgcga

SEQ ID NO: 51252 - DNA, 411 bp, Zea mays
agcttatctcaacctgagaggaaagcttattctttgggtgatgtgttagtttgagctttggcgatgtgttagtttgagctttgctagcgtgttattcatatgcttcttgcagtattatatgtgttgcatcatatggactagtgcttccgttgctatgaattaattggcatctattgcgttcattctgaaatagacagtcatgtggataatgatgcatgtggcttatggtgcttaagattgctttaaattagtatctgagtttaaattggtatcttaatggtgaatagtggtaggtagatattcctgtgagatatccactatattgaatggtgttcaactctgattatgtgcattgcgtgttatagcatcatggtttgatctttgacacaatgcattccaaatagtgcttag

SEQ ID NO: 51253 - DNA, 359 bp, Zea mays
  unsure (1)..(359): unsure at all n locations
tcgacttgtgaaagccgaagcatttaattatttttaacggntcatcataatgtccatatagtagaacacaatcaaagtagttcggacggtgaaccaaaggaaatttacactgccgaaatagtttggcctgagcagaccaaatcttcggcttgctcctccttgcagccagttcaaaagaaacagcaggaggagattaagtttacatttaatgttggcaaatgtgataagatattcgatgaattactaaaaaatggtaacattaaaattgattatatcgttccacctgccgacgaactaaagcgtcgcgcatacttgaagtggcacaactcatttttccatgccactaatgattggaatgt

SEQ ID NO: 51254 - DNA, 414 bp, Zea mays
agctatctcaccatgtatagcatgcttatatgaaaattcgtagaatgatgcagtttaatatgaaaacttggtcatcaaacagactattgaccttctgaccagtcagcactaaagtaggtcggctgcctttctggtagattttattaagtcggctttagaataattggaaactagacttcaagatctttccaaaaagtacttatgggccttcatagcttttgggaatcaaaagatatgactgtttcttctggacggttctgtagcgctggactgactcggacatagctcttcttgctgattcgcctttgatatgttttgtccttcctctttggtgaacctaagtaatatcaacatacatgacttacgtagtataaagttctcattagtgtttaatcgaaaattataaagtagcgc

SEQ ID NO: 51255 - DNA, 330 bp, Zea mays
tctaaagagagaacacattttgggacttatcaatattcattttgagaaagatagggtttgtagcgcatgtcaagcaggaaagcaagttggcacccaccatccacacaagaacatcatgacgactgataggccgcttgagctactccacatggatctattcggcccgatcgcttacataagcatcgatgaaagtaagtattgtcttgtaattgtggatgattattctcgcttcacttgggtggtctttttgcaggaaaaatcacaaacccaagaaacttcaaagggattcttgaaatgggctcaaaatgaattcggattgggaatcaagaa

SEQ ID NO: 51256 - DNA, 402 bp, Zea mays
  unsure (1)..(402): unsure at all n locations
cgtcctaaaataggaaagaaagaagctacatctttaatgccatagcagggatatcattatactgcagccagtacttaaataagttgaaccaaacaagaaaaccaggtcctgtatcatgtcatcgctttaaactaaactacccccatacaggtgacgaggatcaggagacaaattgtcagtactgagtactgacttggtgatgccactggcaacttggcatacatttcacattagcgcaacaaactatatggcacatcaaatgtaaagccattagccaaataaacaaccctaattgagcatgtctgagcagtgagcatacacttgttatatctctctctacttgaacattcgcactcccttctctataggtctatcagngaaattaccaggccagaaatctct

SEQ ID NO: 51257 - DNA, 367 bp, Zea mays
tgccaatctctttgctttcttcatccattttctatgaccctgtaagtttccattccttgtgttgcaggattcaagaagaaattagtcagtgaattgaaggttgccgaagataacaaggactggggcctgttcattgattcatgctttacccactgtcaaacaccattcgatatcacatggaattcaccgatctcaccaaggctcggcaacaaggtgcgtgcggtctaaatcaagtgaactgtacattgcaatagcatgctgtttgttttctgtcttcacttggactgatattttctaaactcctgtcgtttgcgtagcagtctatctcagaggccgttggggattggtatttcgatagaaggcaaaa

SEQ ID NO: 51258 - DNA, 415 bp, Zea mays
  unsure (1)..(415): unsure at all n locations
agcttcggcatgttcgcagaaaggtaacttacttaaagatgaaaaggccatttagacctcgatagattgctatggaattatcaccaaatgtaaagggcatgtatgtaattntgtatgggttgtatcccgtgcctataaataggtgaacagtacccccgtactgttcacgctgacttggcattcgctttttgcgtcacacttgtactttcatctccttccaagccgaaggtacacttataatacaatattgtttctatttctctatgataatataacaaagttaaatgaataatattatataaatattcatgttattttttatgttttatatgcttcgtcttttgtatactgtgatgatgaagggtcgtccttcatgaccttcgtccggagatcgttatatcctaanggaaataat

SEQ ID NO: 51259 - DNA, 353 bp, Zea mays
tctaaagggagaacacgtgataggtttgtctaacgtgcaattcgaaaaagatagaccttgtgcagcttgtcaagcaggtaaacaagtgggaggagcacatcacagcaagaatgtgatgaccacctcaagacctctggagctgctgcatatggacctcttcggacccgtcgcctatctgagcataggaagaagtaagtatggtttagttattgttgatgacttttcccgcttcacttgggtgttctttttgcaagataagtctgaaacccaaaggaccctgaagcgcttcctcaagaaaagctaaaatgagtttgagcttcaggggaagaaaaataagagcgacaacgggtccg

SEQ ID NO: 51260 - DNA, 418 bp, Zea mays
agcttgtgaaggttcttcatccccacatgtgctaatcgggatgccacagccatcccatgctagtcttagctattaagcatgcatctagaccggcctcctcttttgcaaaatcaactaaataaagtttgccgtctaatacacccttaaaagctagtgaaccatcacttcttctaaagacagacacatctacatttgtaaatagacagttatatcccatatgacataattgactaacagatagtaaattatatccaagactctctactaaaaatacattagagatagaatgctcattagaaattgcaattttacctaacccttttaccttgccttgattcccatcaccgaatataattgaatcttgggaatccttattcttgacgtaggaagtgaacatcttcttctcccccgtcatatg

SEQ ID NO: 51261 - DNA, 433 bp, Zea mays
  unsure (1)..(433): unsure at all n locations
agcttgaactttcctgttggaaagcccgtttctatattntnttttccggtccggtccaagatgcatttccgtttcggtttttggtagatttaggtttaaaattttaaaatacaaaagtcaaactttggtcaacaaataaattttcggaactccagaccgaaaataaaatctctggctgccaggggcggatctaagtatgtttgaccctcactcatttttgttgcatgtagtagatactattttttaattataaggttctatgtgctcagttcaacttatatatccttgttcaagtgttttgacactcgtctttataaatatgccctcactcttattttgctttgggtccgcccctgatccttggcagctgcagagcaaggcgaagaagacaaagntgagttcttgctcacagctggatcgactcctaatcagt

SEQ ID NO: 51262 - DNA, 362 bp, Zea mays
ctggttcattagctttcggcagaatcatttctttttaatgacaaaggaaagtgtattaaggaatgcaataaggaaaaatataaaataaagacataaaggtaaaagagattttctatactttgttaagtaggtttcgagcttcgtctctagccatctctcggtcaccctttgcccagatttgagtgatgaatctgttgtctatgcttcgagcttcgactggaatatcaactaggtcagccagtgagaggctaaagtttggcctattaacagctcttatatgattgcacccagctttgatgaaagcggcggccgtgccacgagaagccactattgcacaaaaatctccatggccaggtataact

SEQ ID NO: 51263 - DNA, 443 bp, Zea mays
agcttgcggccgcggccccggcgcccttttctcacctaccattagtccaagccctgtgcttttggtttattagattctgctttttttttaaatataccattttaggattcttttggtggccaaaaggatgctgccggcctgctctgcgaccgcgagagagttcagtttggtaggcagtcaaaaagtgagtccttacgaatgtttagatcatctccaaactactagtactcaataaactttttttccgaggaattattgggccctttccggtccgcatgtagcttgctgatcatttcatctgaagcaccattggttatctggtgaatcaacatcttccaagttaataatgttcatttgccgatctgaacaatctatggaaccattctcagggccgccactccagcacgccacggtgacagagcagtgcatatgcaggagctcta

SEQ ID NO: 51264 - DNA, 315 bp, Zea mays
ttgcaacatgtgtgtgagattataatgctttgtactttcccggcgaagcaccaaatttcacgtcggatagtgtgctcaaagaggttgcaaatgcaaccaagccgcctataactaaccgaacaacatgttcacagaggttccaaagcaagtgggtggggcataactcaccgtacatgtctggtgaaagaaaacaggtgaaaaataatacactttgagatttggaacttggccttgccgctccattttctttatattgtagctataactacagttgcacaaaaacacaactaggatgttcccgaagctattgctcat

SEQ ID NO: 51265 - DNA, 444 bp, Zea mays
agcttcaccaaatggacgtgaagagtgcctttctctttggaccaatcaaggaagaggtctatgttgagcaacctcccggctttgaagatagtgagtaccctaaccatgtgtataaactctctaaggcgctttatgggctcaagcaagccccaagagcatggtatgaatgccttagagattttcttatcactaatggcttcaaagtcggaaaggccgatcctacactctttaccaaaacacttgaaaatgacttgtttgtatgccaaatttatgttgatgatattatatttgggtctactaacgagtctacatgtgaagaatttagtaggatcatgacacaaaagttcgagatgtctatgatgggggagttgaaatatttcttacgatttcaagtgaagcaacttcaagagggcacctttctaagccaaacgaagtatactcaag

SEQ ID NO: 51266 - DNA, 381 bp, Zea mays
aatactcacccttgtgaagattcttgatcccaacatgggctatttttttatgccagagccaacccatattagtcttagcaattgagaaagtatcgagttcagctctgttaaaatcaactaagtatagttgaccctctaatactgccttaaatgctactgaatcatcccttcttctaaagacagtaacacctatatccataaaaagacagttgtagcccattttacataattgagaaacagatagcaaattgtaatctaaaaaatctacaagaaaaacattggaaatggaatggtcaggtgatatagcaattttaccaagtcctttgaccaaaccttgatttccatccccgaatgtgatagctcgttggggatcttcgtttt

SEQ ID NO: 51267 - DNA, 396 bp, Zea mays
tgccagcttctacccatctgcattctatctgatatctctttgctatccgggagacaatacaagaaatcttcttctccgctgtcgttgaacactaatgcccccttcggatatttcagcttctgggcatagggttgagcttctcgttcttcttctttagagagtctttttcccgaagcatgacggatgatatatttgatactctcttttaaagctttgggagcaggagcggcaactttttcaagcaaagactggtatatagcctcttcctctgctaccttctcttcaatttctgagggatttttctcagcaagctctgaaggcccagcttcggcactagcctggctcactgcagcttcaacatcggccgggtttgtttcagcttccggttgcattttc

SEQ ID NO: 51268 - DNA, 282 bp, Zea mays
tcacgggcctatggcggagctaatcgattttctggcgcgacttgggcgtgactggagtgggctgaccacggtggcagaagctctggcggcaatggcgggcggaaaggagctcgccggagctaaagaagggtggctggccggtgatggtgagcgcggggtgaagtgaggcgcgcccggggaagctttataggcgcgggcgaacacagcccgaggcgaggctctgacaagcgcttggggcgtgccccgcaaaacccagtgcgtgctatggcgtctggcacaacg

SEQ ID NO: 51269 - DNA, 400 bp, Zea mays
  unsure (1)..(400): unsure at all n locations
agcttcggcgtggcagcaaaaagtgaaatctacttanagatgaaaaggctatttagaccccgatagattactatagaattattatcaagtgtaaagggcatgaatgtaattttgtatgggttgtgtcccatgcctataaatagatgaacagtacccccgtactggaggggctgactgggcattcgctttttgcgtcacgcttgtactatcatctctttcaagttgaaggtacatttataattcaacgatatttctgtttatacatgataatatataattgtttatgttgtcttttgtattccctgcattntatccttcgtcactgtataatgaatttatgaaggtacgccctttcataaccttcgtccaaaaaaccattatatcctaagggaaataatgc

SEQ ID NO: 51270 - DNA, 369 bp, Zea mays
tcagctccatctatattatggattgcttttgagtctgtccaatttccttcggcccttctggcagcttcctgacttccatgaatagcaatgtgcccttgttccgaaggtatcttcatgcaaagataagctggatgaagaattgcttcgaaagcgttaagagtaccacgaccaatgattgcattgtaagggtactccatgtcaacaatatcaaacacaacttcttcagtccttgtgttgttgataaatccgaaggtcactggcattgtgattttgccgagtgctacaatctgccttcctccgaaaccgcaaaggggatgtgtggcatcatgaattttatcttcgggctcttgcatctgtctgaaagcctta

SEQ ID NO: 51271 - DNA, 403 bp, Zea mays
  unsure (1)..(403): unsure at all n locations
agctttgcctcggtcgaaccaataccagatttgctcccacgcaatgggagtggagagatggcgagagtagagtgtaccctccgtggcaagaggctggacagtggtgtatctgtgctctcggttagcgtgaacccattctggtcttgagaaacacggtggcgagttgacatatgcttgggttaagtgctacatatgtcgtgtggatggagatccccagctgggtattaatcgatttggatcgccgttacttctcggatatgtagacttggtcactgacttacacgtagcaatccagtgaactgaagggatgataaaagacggctagtgtatggcaagtgtttgatctanggtagaaagaactctagatgtangcaactacttgacctaataataaaaatggact

SEQ ID NO: 51272 - DNA, 362 bp, Zea mays
tccaatctctccaagtccaacaaataagacaagtgatcattagtgtttagtgacttgagagagtgtgatccgtgtttcatttgttgctcttgttgcttggttttcttaatcgtgcttatgccaataagaggagcaccgggcggcctgccgacccggagcaatcccttggaactcttcccctcgacgggatctctcccagggcgagttctagggttcttcacggagaaaaagaccctcgcggactgtccggaagtgtgcagaggaggaaccgctcctgtgccaagtcgcgaaccgttcgaccctataccgcaaaccgtccacgcctccgtaaagagccccgccaggcggtttttttccatgtt

SEQ ID NO: 51273 - DNA, 437 bp, Zea mays
agcttccaccaagaaattcagcatatattgtttcacctctttcctggagaaggttcacagatctcaggaggcagtaatgtttgaacataataacaagccattgaactggaaacaaacagctgaaagatcgataaagagggacaacataaattgcatgtttaaaaccttggcatgctcaagttcttccaatacgaggacaccagccccttcccccataacaaaaccatcacgtccctgtaacataaagatcaaatatctcactctagcacaacaaatggaccaagctggtaagttaaatagttaattaaaccaacatggtgctgatgtggttgtactagatgatgataattacttatccagcaaaatgttgtcataataagggttgcaataaaagatactaaccatgtcccaaagccgagaagctttgttgggtcact

SEQ ID NO: 51274 - DNA, 356 bp, Zea mays
tctaaagggagaacacgtgatatgtttgtctatcgtgcatttcgaaaaagatagaccttgtgcagcttgtcaagcaaggaaacaggtgggaggctctcatcacaccaaaaatgtgatgacgacatcaagacccttggagatgctgcatatggacctttttggacccgtcgcctatctgagcataggagggagtaagtatggcttagttattgttgatgatttttcccgcttcacttgggtgttctttttgcaggataagtctgaaacccaagggacccttaagcgcttcctcaagaaagctcaaaatgagtttgagcttaaaagtgaaaacaataggggcgaccacggattcggat

SEQ ID NO: 51275 - DNA, 342 bp, Zea mays
atttgaaaacatattttgcctactatattatactatgaggcacggtatcgaccaccattacacaacaactaaacaagccatgtaattaatattgacatttcaaaattattagtttcaaaatttataaatacaatttttacgtatcatttatggagccgtcaatgataagaaaacaaacaaatatgtaaaagaaatgggaaatgtgaatctgttaacactgtatccttatgggacggaatttatgggaccctgctggagaccgagaatatctttaggaccaaatcttttataatgttctgtaaaggacagaaaatatttctttatgggacgaaatttatggga

SEQ ID NO: 51276 - DNA, 368 bp, Zea mays
tcacttggatggctctggcataagaagttttttcatgttgggatgagcacactcaagaaggtattaaagaaagatatggttagaggattaaaggatgtggtgtttgaaaaagacaagccatgcagtgcatgtcaagctggaaagcaagttgctaatacacatcctactaaagctttcatgtcaacatcaaggccactggaactacttcatatggatttatttggacctacaaattatgtaagtgccggtggcaacctctactgtctagtgattgttgatgacttctcaagatacacttgggtgttctttctccatgacaaatctgaagttgcatctatattcaagaagtttgccaagaaagcacaaaa

SEQ ID NO: 51277 - DNA, 315 bp, Zea mays
tctaaagggagaacatgtgataggtctatccaatgttcatttcgaaaaagatagaccttgtgcagcttgtcaagcagggaaacaggtgggaggagcgcatcacagcaagaatgtgatgaccacttcaagacccctgaagttgctgcatatggacctcttcggacccgtcgcctatctgagcatagggggaagtaagtatggtctagttattgttgatgacttttcccgcttcacttgggtgttctttttgcaagaataatctgaaacccaagggaaccttaagcgctttcttaagaaaactcaaaatgaatttga

SEQ ID NO: 51278 - DNA, 432 bp, Zea mays
gcttgatgtcgccggatgctgaaactgttctgtctccagatctgggcgtgccctcgggtccctagggtaagccatgggcgacgaccaccccgtgagcgcacgaaggtaggaggtggggttgagcttgcttgactgccgtgggaggggaggaactggccttggctgaaaggagcatgaagaattgtaaggagaggatggccttttaagcttggggcacagacgagctcgatgcccaaccccaaagcagcaccagcatcttgttggattggtgcacaccgccactctatggtcttgggcaaaacaattaaggcacctcacatctgcatgcctgatgaattttgtcggcgtttcgaccttcgggggtccctggaccgacgagtaaaattgtcgctgtgtgccccaacccagatgggttggcacgagatggaacac

SEQ ID NO: 51279 - DNA, 363 bp, Zea mays
gagatttaagagtcttgagggtacccctatttatggtccccgacactatcgatgatccaacttgagcccccggatgcataaacctacaaaacaagtttagttcctgactttaggtacccaaatggttttgggtcctttggcattagacacaagaactttgggtacccaaacacaagtttttgaccccttgtgcttgcccccaacatatttggcaactactttgccggatttgttagttaaaacataagaggcatcaaaggtcttaaatgaaatgttagaatcatttgatgcattaggagttttcttcttaagcaatttagcatgggttgattgcctagagctagatgtctcacccttatacat

SEQ ID NO: 51280 - DNA, 418 bp, Zea mays
  unsure (1)..(418): unsure at all n locations
agcttgtgaaggatcttcatccccacatgtgctaagcggcgatgccacagccagcccatgctagtcctagctattaagcatgcatctagaccggcctcctcttttgcaaaatcaactaaataaagtttgccgtctaatacacccttaaatgctagtgaaccatcacttcttctaaagacagacacatctatatttgtaaatagacagttataccccatgttgcataattgactaacagatagcaaattatatccaagagactctactaaaaacacattagagatagagtgctcattagaaattgcaattgtacctaacccttttaccttgccttgattcccatcaccgaatataattgaatcttgggaatctttatccttgacgtaggaggtgaacatcttcttctgccncgtcatat

SEQ ID NO: 51281 - DNA, 359 bp, Zea mays
tgatcaggtataaatactacaaatgtgtttttcaacagtgatagtgtgagcttgatcacacatatattcgtacttaggatgtatttgctaaactaaactgaacaattatgtggtctaagtagcaatccgatcctgagttcgacttcctgtgagagcgaatttcaggttgtggctaaaaaatcccctcgtctgtcccacgacaaagcactggtctaaggcccggtcccggccgtggtcgtttctcacatgggctacggtgccactgtgtatggttggggcaagggttcgggggctttctcgacctgcgtgaaaaagtcttaatataatgccctagggcttgcttaccaagtccgcacata

SEQ ID NO: 51282 - DNA, 440 bp, Zea mays
gctttaagggagaacacgtgataggttttacttacgtacaattcgaaaaggatagaccttgtgcagcttgtcaagcaggtaaacaagtgggaggagcgcatcacagcaagaatgtgatgaccacttcaagacccctggagttgctgcatatggatctcttcggacccgtcgcctatctgagcataggaggaagtaagtatggtctagttattgttgatgacttttcccgcttcacttgggtgttctttttgcaggataagtctgaaacccaagggaccctcaagcgcttcctcaggagagctcaaaatgagtttgagctcaaagtaaagaagataaggagcgacaatgggtccgagttcaagaaccttcaagtggaggagttccttgaagaggaagggatcaagcacgagttctccgctccctacacaccacagcaaaat

SEQ ID NO: 51283 - DNA, 419 bp, Zea mays
ctaagcttgttttggctatcctccttcttcatccagatttgatgatttcccgagtagcagtccagtaaactcatgagttctgaagaagctgctgcatccacaaaggaatatattcttggtagtgggaattcatacttcgtacatgccttgttgagatctgtgaagtcaatacacattctccattttccattatctttctttaccatgatagtgttgtacatccactctgggtatcttacttctctgatgatgctggaacttataagtctcttcacttcatttcgtgcaccttcggctgtatctctactactccttaagaaaggagcgtatgcgtccacaccatgttctgccctctgttgttttcccccctgctccggtgtccccaatacccgtagatcccgtcttccccgccatcaact

SEQ ID NO: 51284 - DNA, 449 bp, Zea mays
ctgagctgcagctgctcagccggatgctgtggggttgttttttatcagggacttgccccgaatacaaacacatacactacgctgatccatgggcactgcaaaggaggcagcttcgatcgagcctttgagctgatgaataagatgaagctggaaggtttcctgcccaatatttacacatataatgccattattgggggcttttgcaagaagggaaagattcaagaggcttacaaggtgctccgaatggccactagtcaggggctgcatcttgataaggtgacatacactatactgataactgaacactgcaaacagggccacataacttgtgctcttgatttgttcaagcagatggcagaaaaaagttgccatcctgatatacacacatacaccaccatcattgctatgtattgtcagcagaggcaaatggaacaaagtcagcagctctt

SEQ ID NO: 51285 - DNA, 461 bp, Zea mays
  unsure (1)..(461): unsure at all n locations
tctctttttgtcgaacaacgaagagatcgaaataatgctttatataacaaattggtatataatatgaggagaaatgtttgtcctgctggcagcatcacaaattattaactattgttataaattctctctcaaaattatcatacctaaaaatgttgcataaattgatacccaatttcagatcggtatgagtcattgggtaaaccatgggcaataataaaacgagctggactatacatctctgcatataaaaatctctgcttggcaacattggcctgatgtcatgcactctactaccaatataaacacacattttcctatgtgcctcaaagcacaatgcaaccagtggatgtctttgtgagcgttagaccctgatggtcattntacttgttgatctgaagtcaactaatggctccaaatgacgaatggtattcatgagcccctgaagaagccttatggataaa

SEQ ID NO: 51286 - DNA, 465 bp, Zea mays
tgatgtatcaacctcatgtgatgatttgattcaagaagatcttactagtctacatgctgaattgacagaaagagttgaagtcctgactttttacaaccaaaaattgatgaattacttgactgatgcaactactagaggaaaagttgctattgagaacaatgatttcaacaatgagttggcagtggataaccaaaggcttaagaatgaggtcaagaaactaaaaagtgaaaatgaacatcttgcaacaagtgtgcaaaagttcaacatgggtcaatacctccaaaatgagctgcttatgaacactgttatgaaaaatatcaagagtggtattggatacaatgcttttgtgcataagaaagctatcactcaatacaagccaaagcagactcacaagcctatcaaatgctttgagtgtggaaatgaaggtcattttgcccacaactgcaaagctaaaccaccaactcc

SEQ ID NO: 51287 - DNA, 447 bp, Zea mays
agcttctaaagggagaacacgtgataggtttttctttcgtcaattcgaaaaagatagaccttgtgcagcttgtcaagcaggtaaacaagtgggaggagcacatcacaacaagaatgtgatgaccacatcaagacccctggagctgctacacgcctatctgagcataggaggaagtaagtatggtctagttattgttgatgacttttcccgcttcacttgggtgttctttttgcaggataagtctgaaacccaagggaccctcaagcgcttcctcaggagagctcaaaatgagtttgagctcaaggtgaagaagataaggagcgacaacgggtcagagttcaagaaccttcaagtggaggagtttcttgaggaggaagggatcaagcacgagttctccgctccctacacaccacagcaaaatggtgtggtagagaggaagaacaggac

SEQ ID NO: 51288 - DNA, 300 bp, Zea mays
  unsure (1)..(300): unsure at all n locations
tcttgtatctgctgccaataatgagatgtgaaactgcgttctcgttcttcactatcttcggtggcaccccatgaaggcagactattcgtgacatcgtttacccaacttacgttgctccggcgtatgtcgtcttcacaggtatgaaatgggccacctttgtttagcggtccacaaccaccccgatgggattctatcccgcccaggtaccatgttngccaactatgaaatccatgccgatcttcttccacttccactgatgaatccggaatgggtgcgacaattcggcaagactttgatgct

SEQ ID NO: 51289 - DNA, 429 bp, Zea mays
agcttcggaagaagaaaactctaattctcattacttatttgttctagaattgtcggaggctgagaaagaagagttaagagaatacgccatatcctgcgggtatcaaccaggggcactactcttcggcggtgttgacgatgaaaaatatggctgcgtccgaaatcaaatcggagcgaaggttatcggtactctgtcaaagagtattggtttcccgaagcttgagactgacataagccgctaccgacgacaacatcttgtcggtagtttattctattctaatttcaaggtaaaaacttttcttcgactttttattgattcgaacagcgaaggtgttttttaactaaagttgcttgtgcacacagtatgctgttgagtaaagctatgagaatgcaacatgatcttgaagataataaacatgcaactataatt

SEQ ID NO: 51290 - DNA, 472 bp, Zea mays
tcaagcttgtggcctcgtcaccagccatatctcgaccacccttcgactgtatttgagttatttatctgctccctatgcttgaggcctcgctgataatgtcaaccacatccgttgaagataggctagaagttggtctattgacaatcttgccgtgcgtacagccagctttcagaaatgatgcagctgtgccgcgagaatctagcatggcacacaagtcatcgtgccccgctattacatcgataatcgcctcgactttgccttcgatgtgttcgaaggtgtttgatatgtttttggccgaatgggtaaacttttgatcgctaactccaactgaattgaaaaccttgttcaatcgttatacgcagcggctgccaaaacccagacacatgtcccgaagctctgtcatagcttgcttcagctgtcgattttggacagcttgagcttcatattttgcctgcaagtgctatctatcttg

SEQ ID NO: 51291 - DNA, 379 bp, Zea mays
agatggtgcgactgagagaaccaaccggattcttgaggatatgttgagagcttgtgctttgcaagacaagttacgttgggacaagagattaccatatgcagaattcttcttacaacaatagctatcatgccagtctgaagatgtcaccattcgaagcgctctatgggaggaattgctgacctccattgcattgggaccaactcggtaaaagacaggtgttcggtccacacattttgcttgaagctgaagagaatatcaagatggtccgagaaaatctgaaggcagcgcagtccagacagcgaagctatgctgacacccgaagaagggaactcagttttgaagtgggagactacatctatttgaaagtgtcacccatcgg

SEQ ID NO: 51292 - DNA, 380 bp, Zea mays
  unsure (1)..(380): unsure at all n locations
gcttgtgaagggacaacacacccacatgttctcaacggtgangccacagatagaccatgctagtcttacctgccaggcatgcatgtaaaccggcctcctttattgccacatcaacaacatgacgatcgctgtgtcgttcgcgcttctaaagctaggaaccatcagtccttctgaagacatacacatctacattagtgaataaacagttgtaacccatattgcacagtcgacttacacacgactagttatattccagcgactctcctaagaacacaatacatttagagggctctggtgacatactcattatgactaaccctttcagcttgccttggttcccatcaacgaatatgattgaatcttgaagatctcttgtcttg

SEQ ID NO: 51293 - DNA, 234 bp, Zea mays
  unsure (1)..(234): unsure at all n locations
tgccatgaaaactatgctgaacgcaagactttattaaccacatgctctgaaatcgtattatactgacatcacgcgcattgtgatgatatgaggatgcatatgcanggcacaactcttatgctaatgcatagaaagacgattgattgtgcatgctatgaacatacgctccatccagaagagcatttggcaacttatgacctacaaacaaatgatgcggtgcatgcgctgaatatg

SEQ ID NO: 51294 - DNA, 425 bp, Zea mays
  unsure (1)..(425): unsure at all n locations
agcttctaaccaagtatactttgttttctttttntttatatcctctatgttctttatgtacatgatgatgctatggcatgcttaggctccttttgctcatattgatacaatattgttgagctaagactgctttcataaattgtgaacttgattattacttgctgaatccaaaattcgctcaccattaagattggcacctatcatgtgtaggatgtgttgagatcctttttgttgtcactagtatgctagtttcctatgtctcatgccttgagtcattcaatgtcttgattcattaattctatgctaaattcaataggatgagtgaaattcaaaaagatcgagatgggttagcatttgtcacacatcattgtatcgatactgcttacatttgcactcttggatgaacttgagcggtgtcatggatg

SEQ ID NO: 51295 - DNA, 396 bp, Zea mays
  unsure (1)..(396): unsure at all n locations
tcggcttcatctatgttgtggattgccttngaatctgtcctatttccctcagcctttctggcagcttcctgactcccatgaacaacaatatgtccttgatccgaaggtatcttcatgcaaagatatgctggatgaaggattgcttcgaaagcattgagtgttccgcgaccaatgattgcattgtaagggtacaagcgctatgatttgtcttcctccgaaaccacaaagagggtgtgtaacatcatgaatcttgtcttctggctcttgcatctgtctgaaagctttatcaaatataatgtcggctgcactgcctgtgtcaaccaaaacattgtggactagaaatccttttatgacacaagatatgaccatagcatcattgtgagtgtaatccttgag

SEQ ID NO: 51296 - DNA, 231 bp, Zea mays
gctggaaaatgaaatgaattattgccgtgcacaattgtttcttagactttgcagggttcaatccttacttatgccttgaggactcaagatatcgccttagacgaaggttgcacaatggctcttaacaacctataatctgtagtgattgaactaagaaacgaatgtttataaaaagacttaattctgattatattgatgaacaacagaaaggaagacaaagctgcttacaat

SEQ ID NO: 51297 - DNA, 448 bp, Zea mays
tcacatctgtggactagctcggttgcgtcactctgtgccgtttgttcattttaaaccagacctgaagaccttcccaactagagtcctagatgttgcgtgtatcccgcattgcctagcgtggacctcttctagcagttgcttcccagtagccgaaagaatgcatttcatgaggactcctgttgcgccccttctgtatagtgtttccccaatgagagtatagtgagctgactgccttgcaatgcgctctactgcatttcagtcatccggctcctgctcattctttatatatctgatgattggttccctccagtcatcggaatctgactctggttggctcagaatattgcactcttctgcccgatccaatgaaatgcttgggcgtagtacttcttggacgaaaactctatgcgagaccagagtccgacatgattcctatcttgacaacgca

SEQ ID NO: 51298 - DNA, 436 bp, Zea mays
agcttatgaagattcttcatcccaacatggtttagtcggcggtgccagagccaacccatgttagtcttagcaattaagcaagtgtcgagttcagctctatcaaaatctactaagtatagctgaccctttaacacacccttaaatgctattgaatcatcacttcttctaaagacagtgacacctacatcagtaaaaagacagttgtagcccatttgacataattgggaaacagaaagcaagttgtagtctaaagaatctacaagaaaaacattggaaatagaatggtcaggagatatagcaattttaccaagtcctttgaccaaaccttgatttccatccccgaatgtgatagctcgttggggatctttgtttttctcatatgaggagaacatccttttctccccggtcatgtggtttgtgcacccgctgtcgagta

SEQ ID NO: 51299 - DNA, 442 bp, Zea mays
  unsure (1)..(442): unsure at all n locations
tgagttctcttctcactatacacctcaacaaaacattgttttggagagaaagaatataactcttttggatatggttaggaccatgcttgaagaatacaagacatcaaatcggttttgggtgaaggcgattaacaccacttggtactccatcaaccgactctaccttcaccgaatcctcaagaaaatatcatacaaactcctcaccggtaaaaatcccaatgtttcttattttagaatttttgggagtgagtgctttattcttgttaagaggtagaaattcaaaaattgctcctaaagcgtagacggatttttacttggttatgactcaaacacaagggcatatagagtcttcaacaagtccactagattagatgaaatttcttgtgacattgtgtttgatgagactagtggctctcaagtaaagcaagtngatcttgatgag

SEQ ID NO: 51300 - DNA, 322 bp, Zea mays
cgttcctaaggggatgcagagcttaaataccaccgaaatagaaggtgaagaaagctcaaagtcattcctaaagggatgcagagcttaaataccacccaaatataaggtgaagaagctccaaagtcttcctaggggatgcagagcttaaagactccaaaaaccttcctaaggggatgcagagtcttgtgtgttccaatgtgggcgcgcgtgagtgtgtgttcgacatcaccatcatattgcatcatatcatcgcatcattccgcataacattacatcatacatcatatcgcatcaacgacaaaaagattggatacgaaacaaa

SEQ ID NO: 51301 - DNA, 451 bp, Zea mays
tacttaatccttcttcgaaggttaattcaagggttaagacaaagggtgcatatgcatgtatattaaaaagggtgaaatgtgaacgataaaaagaaagacatgcttctcatcttcgtgcttccacactaatcattttattccttgcaatatatcaaacgattacaaacataccttcagctttgcacaagttgcagctcgaagatatcttcgaaggctgagcgaaatgaggctctgggctctcgaaaatgtgatttatgcatggcaatgttcctttatttatagccacagagtatagcttcagacgaaattacaaatatgtcctcagatcctatacatagtttctacaaccattacgagggcaatatcgtacttgcccatccatatttcctgcatatcaagacttgcgcgattcttatcttcgtctgtttcttcatgaaccatagctccctcg

SEQ ID NO: 51302 - DNA, 431 bp, Zea mays
  unsure (1)..(431): unsure at all n locations
agcttgtaattagatcgagttcaaacactattgattttatagcttanattagggttcggagctcagtttcacacagcatgaagcaaagagaagaggtgggcatacctggtggatgctcgtcgctgttgaaggtcgacctgtgcacctggcctaagcggcggcggcggtctacagtcgcccacccacccgtctacacgatagagagagagagagcgcacggcacgggggtggcgggggtcgcccactcgacgccacggcccgagagagagagagagagagagcacgcgggatgaatgtgagcgaagaanagggcgcacgcactgctggccttctgggtttgaggttgtgtatacagattatgctatttctagaggtgtacccattaatacataaagtttttttctaatatgactagtgtggaaactctattc

SEQ ID NO: 51303 - DNA, 431 bp, Zea mays
gcacattgtgtgactaaccaaggatcattttgtgaaatacaggatttgtaacgcacgccatgcatggaagcgtgttggtgttcatcatccacacaagatcatcatgacgattgatatgacactggaactactcctcatggacctattcagcccgatagcctacatatgcatcggcgggcgtaagtattgtctacttattgtggatgagtattctaacttcacttgggtattctttttacatgataaatctcaaacccaatataccttgaaaggattcttgatatggtctctaaatgagatcggcttgaggatcaagaatataatgaacaacaacggagcacagtctaggaattccaaattgaaggcatccttgacgatgatggcattatgcatgagttctcttctacctacatgccacaacaaaatggtgt

SEQ ID NO: 51304 - DNA, 452 bp, Zea mays
  unsure (1)..(452): unsure at all n locations
cttagagtcacctgcngcatgcaagcttcgccagtgagcaaccatctccaatgttatgttgtacgtggccaaactcggggctctcgtgccgtgctcggccgtcgggtggtcgatggcggngtggcacaacattgtggctgtcgagtggtcgacggcggggtggcggccgtccagcacaacacgacgttcaacatcgccgtcgttgtgttctaccttgattgccgccacaccaaagtcgttgactcgaatagtaactgcaccagtgcgtccgtcgacatctacgccaacacccatcagtccgcggagcccttgcacggttagaagagctgaactctgacaagccacgtgttatcttggcaaaataattgggaacgcgtagagaatgcagtgtttgctacgttcacaaactctcgaggagatgtcaatctaaacatactgggacgctaaatatt

SEQ ID NO: 51305 - DNA, 363 bp, Zea mays
tacggacacttaaaactaagcttggcgacgcaatagatactccggctcatcgatcaagctgttttctatgttctgactacttggaggacgaggagacaaagttgtctccgatatacacagcattgcccgatgtggaccaatgtgtttctagaaactcttctcaaaacacattatcagatagagtgctcacttgagaatgcaaatgtgactgacccttttaacctgccttgaatgccatcaccgaatattattgaatcttgggaatctttggttttgacggaggaggtgaacatcttcttcttccccgtcatatggtttgtgcatacgctgtcaataatccagcttgaacccccggatgcataa

SEQ ID NO: 51306 - DNA, 448 bp, Zea mays
  unsure (1)..(448): unsure at all n locations
agcttgccatgtccctacatctaccgnngatttgttattatttgttctagatgtaaagaacaaaatgatcacataactaagttgaatgccaaaatttccgagcatgagcttgtaaatgaaaaatttaaatttgcccgtagtatgctttacaatgggagacaccctggcattaatgatgggattggcttccaacttgtgggccaaaaccacatcaaacttaatgcccatagaaacaagatttccaactctgttaagggaaaggatctcatggtgcaagatagagaaggttacatattatatgcggagaactatcctgagcataagattataaaaaaatcatgctaataaatctcatcatgttacttatcatgcttatatttacaaaaatgaggcttctagttctaggcatacaactcatgttaagatgcctaagaaaaatattgctgat

SEQ ID NO: 51307 - DNA, 464 bp, Zea mays
tactaagctttccataccacttagactactcatcatggacttttcttttataccatgtacaccttcatctcaaagtcttagctacatgtgataccatattatactggatagcatgtttatcatgctttttaggaccttccaagaccaatgcccccaacagtgataatgaattgtttagagaaaaggatcactatttgtagaattctgtcttgtgcacaataattctatacattgtcttgagcataagacttatgtaaccaaaactaatgacaaaatacaatgaagagagcgtctctatgtgaaggcacaaaagggtaaactacttactatcatttacacatgtacctagattttgctcttatacatattgcatatctctaagttacaagaagaagaaaaagcatgtctatgcattaccctgcttcatacctaatttaacctctcaaaatttcattcccgcttta

SEQ ID NO: 51308 - DNA, 347 bp, Zea mays
tactattatgtacatggccagtttttacttgagatatcataatcaggcttgcgccccttatggacatggaccctatcttacgaagccctagcagaacatcttcgtattcggccatattatttatacaactgtggtccatctgtactgcgtagcgtgtgccgactttatagggcgctgctagaacagcagctgttcctgcacggaaagctccccaagaaccgtggcagagtaccatcccagctgtggcatcctatgttgcttgttctacttgagcccctggtgttcgatcaccaatgagatctgctaacgtctgaggaggaagagaggatctatgtacataatcaagg

SEQ ID NO: 51309 - DNA, 327 bp, Zea mays
agcttataacaagagaatggaggcattgactatatcatatgtgataatagaaggggaattgtataaacatggagtctattccccactgctcaagtgtttatcaagagctgaaggtactgaattaatgaaagagatacacgtcggtctatgtggatctcacattgggtctaggcccttactaagaaaagtttttcgataaggattttactggtcgaaggcagcttcggatgcagcagagctagtccaaaaatgtgaaggctatcaaaaatgtgcaagagaccagaagcaaccttcatctctcactcagataatacatcccacttggtc

SEQ ID NO: 51310 - DNA, 461 bp, Zea mays
  unsure (1)..(461): unsure at all n locations
gcttctacctatgcttactttatgtgtgtcaccatttaaaaatcttatacattntgttcgtggtgccacacggaaaacaaaaatctcacaggaacaacatgatatgccagtgtaaatacccatcttggagttattgagtttatgccttgtaaacagtatctgaacattaaatgagtccatatgccaaaagggaaaatgcaagataaatatttttaacaaatctaaaaactccataaaacccataacactataattgaacttgtagccaattagctgcaagctatattcatacacaaatatgaatgccttgatagatgaatgtgggtaactattttcatttccttctagaggaaagtagaagagatgatatggaatctctttgttatgtgctcatgtatttattataacgacagtatgatattttctcttcaccataatttcatatattcttgggcacataa

SEQ ID NO: 51311 - DNA, 436 bp, Zea mays
agcttgtgtttacgtacccaactcttgttttgttctacaaggttagtcacaatagtttttggaacccaaatacaagtcttgtctcccttgcatttggatcccaacttcctagcaaccactttttcattcttacatgaaactacaaaagaagtgttgcaagcataaaaaacagtagtaggttcattacacattttcttaggcacatgatgcacaacatgatttttcctaggcctatttctaccatgcacaaaagtagagctagaagcaaacataccatgcacaacatgatgttaacatatagctcttattataattggaactactagcaattttcctattataaatgaaagcatggttcctttgaggactacttgccataggcgccttccctttctccttgttgagaatgggagccttctggcttgttaagttcttg

SEQ ID NO: 51312 - DNA, 382 bp, Zea mays
tcggcgacgcaattgatactccgcctcagcgctcaagcggtatactatgttctgactacttggaggaccaggagacaaggttgtcaccgataaacacagcatagcccgaggtggaccaatgtgtatctagaattatggacaacccgttcaatcaacgtcagtatagacgacaagctcaaaggcggaggagcatcgatgaagcccatgaattggagtgccctgaagatagcgtagaacgcgcttcatcccatatatggggctcccacggatcatgcatgtggagacaaacatgttgaacaacataagcaatgtcaggcctggtgaacatcaagtactaaagggcgccagtgagactccaaaattgtgtggcatccgccatatg

SEQ ID NO: 51313 - DNA, 278 bp, Zea mays
agcttgtctgcatgtatgttccttcctctttttttgttttcagcaattgggagataagaggtgcctgaatgctgtgtattgagcgacacacggctcttgaaacatcatttattccctcccaaacctgtaaacttaacgtggttcatgttgtgtacagtcagatacgttcaactatgtaaacctaacgcacgttgttctgtcgtgctaactaaactagagaggttagtaaagcagtactttgtatggaactgttgtgtgtgcatcggtctatatcaact

SEQ ID NO: 51314 - DNA, 449 bp, Zea mays
  unsure (1)..(449): unsure at all n locations
aagattcttcattccaacatgtgctagtcggcgatgttctttccagaccatgttactctcagcagtgaagcaagcatcgagttcaactttatcaaaatgtactaagtatagttgaccctctaacactcactttaatgctattgaatcatcacttcttctaaagacagtaacacctgtattcgtaaaaatacagttgtaacccattttacataattgcgaaactgaaagcaagttgtaatctatagaatctacaagataaatattggaaatggaatggtcaggagatatagcaattttacccaatcctttgaccaaaccttggtttccatccncgaatgtgatcgctcgttggggatcttggtttttctcataagaggagaacattttcttctcccctgtatatgggttgtgcacccgctatcgatgatccaacttgagcccccggatgc

SEQ ID NO: 51315 - DNA, 435 bp, Zea mays
agcttgtgaacagtacaaattcagaatggttttatcatcttcagcagatcagccgaagcctatgctcttatgtgaggacatagcacagcagaaggtgttgttaggctctcaattatccgaagagcagaagaaaatcttgataaggtttttgttcaataacaaagatgtttttgcatggtcagccaatgatctctgtggagttaatagagatgttattgagcactcgctcaatgtcgatccatcctttagatccaaaaagcaaaggcttcggaaaatgtcagatgataaggccgaaggtgctcgcaacgaagttaaaagactcctcagtgcaggagttatcagagaagtgaagtacccagaatggctagctaacactgttatggtaaaaaggccaatggcaagtggcgaatgtgcatcgatttacagatcttaaca

SEQ ID NO: 51316 - DNA, 463 bp, Zea mays
  unsure (1)..(463): unsure at all n locations
gtaccntatggacgtaaagagtaccttcctcaatggacctttcttgaagaggtctatgttgagcaacctcccagctttgaagatagtgagtaccctaaccatgtgtataaactctctaatgcgctttatgggctcaagcaatccccaagagcatggtatgaatgccttagagatttccttatcactaatggcttcaaagtcggaaaggccgatcctacactctttaccaaaacacttgaaaatgatttgtttgtatgccaaatttatgttgatgatattatatttgggtctactaacgaatctacatgtgaagagtttagtaggatcatgacacacaaattcgagatgtctatgatgggggagttgaagtacttcctaggatttcaagtaaagcaactccaagcgggcacctttctaagccaaacgaagtatactcaagatattctaagcaagtttggaatga

SEQ ID NO: 51317 - DNA, 372 bp, Zea mays
  unsure (1)..(372): unsure at all n locations
tctcaagtaagggttcaatggggatttctgtaattcagaattctgaatttcagcccttgagctaaagaccgagcgtgttcaccttgatccctaactcaaatcctaatgcccccattgacaaaattatgcctaactaatccctctatcacatgccagaagatggcattatgacacgagccctatacatgacaaaacccatgatttgcctcgggctcgggcacggagacagaccagatttcatggatccaaatctttgaaaccagtagacaaaatcctatgaccccacacaggatcggtagcttatatggagtagaagatgttttgtgcactggccaanggaagagcangctcggatgaatgaccacacgcacc

SEQ ID NO: 51318 - DNA, 433 bp, Zea mays
agcttagtgtggtgtacactatttttctttatatttctcgatagattagatgtgagataagaaaagtttagatcaaaacccattttcaagattctaaatatgaacatcttagaggggttctaaagacattgggtcctgagttttcgtttgtcagaccattggtgatggcccgatgcctctacgtacttggcccgagagagtctgatcgtcggacgaacaacagatcatcatatcgataagttgagtctaacgatatgtgcaaatagactagagagttttattttatggcgtgtcggactagtccaatggcaaatgggggaccatacgacgcaactgcttgaactatggttttgttttctaaatgacacaactgcttggtaacatcatccgaatgtgaaaagtcacctgccactgtggattgaggtcgtgaact

SEQ ID NO: 51319 - DNA, 385 bp, Zea mays
gcttccgattgaacatggcgcctctcttggctagttttctggctgccattgcgccctttgcaccgcctgaatctcttgataatgagggccatttcttcttcattaagaccggccgactcaatttgcgccaccttgctgggtatcgcctccttgttccttgtggctttgagagcaaaatgttgcggctcgttggtctgtccattcaaggcgtcgtacacataccttgcctccttgatcatcattcgcccgctgacgaattttcctaagacttcttcggacgacattttggtgtacccgggattctcacgaatattattcaccatatgaggatcaagaacggtgaatgacctgagcattaatcggacgacgtcgtggtccgtacatc

SEQ ID NO: 51320 - DNA, 428 bp, Zea mays
acgacgatgtcgtactccttattttggttggacctcgcgaagagatatgttcacgcctgagtttgggaaagagaccgaacaaaaggtcagagaatcattcatcatttgaagaaagctcacactcgtctgaaaagttatgctgaccaaccacgaatgcccttgtattatctggtcggagattatgtttatctgaaggtctgcccaataaagggtgtatcgcgtttctgagttaaagggaagcttgcaccccggcacattggtgcattccctatacttgaacagagaggaccagtggcataccgacttcaactacccgaaaccttgtctgttggacataatgtgttccacgcgcctcaatagtagaagagctttgggttccccatcgaaccatcgatgtaacagatgtggtcctagaaccagacttgaca

SEQ ID NO: 51321 - DNA, 433 bp, Zea mays
tattttttttacagtgtgtttatattgggtactgtaatctatcctataaatttaaggcctagactactgaggataaatcctaggccaaaataacaaaagttagggtagatggtcactttgtactacgactcttatttaagtgggggttctgcactataaattactattgctagcatatatgggtaataacatgcttctatgccaaaaaacactgatggtgccttagtgggtattcagttgtgattctctaaagtcaaataccaaatacgtacttataactaactgggtattggaaaaatatcatgacaacagaacttgtattgttcctagattcctattaacataatagtactcattcctaagattggggtggctcctctttacgattatttgtctatgaatgttctaagatctcactggtttcattaaataa

SEQ ID NO: 51322 - DNA, 429 bp, Zea mays
  unsure (1)..(429): unsure at all n locations
cagcatgcaactgtaccctactacagccccctttcatattantttagcctcatcccccctcttgtgtttcattttgcatcaatccatctgggcagggacacgcagcgtcaaattcactattcggttgagggtcctcgtgggtccaaaacgccgacacttggcgtgggcaacctgatgggacgcgaaatggttcgtctgctgcgttgcgcttgggttgcatgggggtctggttaaccttccactcgttacagctgcatttgttgcggcgcatctccctgctgctctaccttaggtagtgtggtccgtgcccctacgttctgcctctcatagaccccctcctattgttcttctttcttgtgtcgtattagcttactccccgcgcttatggcgtcattctcagctagctttatcaaagagagtcgtctctgt

SEQ ID NO: 51323 - DNA, 437 bp, Zea mays
  unsure (1)..(437): unsure at all n locations
tactaagcttgtaagggagaacacattatgtgactaacaaaagccacgtggatattatcagggangggagcgcaggtcaagtacggaagcaagttggtacccatcatccacacaagaatatcatgatgaccgacgggccggttgagctactccacatggatctattcggtctgatagcttacataagcatcgacgggagtaagtattgacttggaattatggatgattattctcacttcacttgggtattcttcttgcatgaaaaatctcaaacccaagagaccttaaagggattcttgagacgggctcgaaacgagttcagattaatgatcaagaagataagaagcgacaatgggacagagttcacaaactctcaaattgttggctttcttgatgaggagggcataaagcatgagttctcttctccctacacccct

SEQ ID NO: 51324 - DNA, 444 bp, Zea mays
  unsure (1)..(444): unsure at all n locations
agcttctaaagggaaaacacattgtgggactaacttatgtttattttgagaaagacaggattngtagcgcatgtcaggcagggaagcaagttggtgttcatcatccgcacaaaaacattatgacaactgacaagccactcgagctactacacatggacctattcggcccgatagcttacataagcatcggcgggagtaagtactgtctagttattgtggatgattattctcgcttcacttgggtgttctttctgcaggaaaaatctcatacccaagagaccttaaagggattcttgagacaggctcaaaatgagttcgacttaaggatcaagaagattagaagcgacaacgggacggagttcaagaactctcaaattgaaggcttccttgaggaggagggaatcaagcatgagttctcttctccctacacgccacaacaaaatg

SEQ ID NO: 51325 - DNA, 406 bp, Zea mays
catcatagaaccgacctgggaaaccttgccggctgaccagcagctccagttcgacgagcacaatgagcggatgatccaagatgcgaaagcaaagttcttggccaacttcaaaatggacaggaacaacaatgtcgtacgacatcgggcgactgatccggcttcgctccaacccacgccagatattcctaatgtaagtaataccaacgatctgcaatctcttaaaaattatgtagaagatcagcgtgaacaaatgcagaacatcatatggggtatgcaaagcgatcctaagagactagtacgaacatttgataaatctagtatcacaaattttccttcgcacgaagttgagttatggggtaacacgcgtaacacatctgctacaggttgtcacgaccacgcacaaccc

SEQ ID NO: 51326 - DNA, 424 bp, Zea mays
agcttgcagtgctgctaattgtctcaccaatttactttaatcagcatcttctattatatttgatatctctttcctgaacattagctatctgaatttgaaataccgtttagtattaatttacaatgttctctacaatgaagtcttgtttggtggaacataataggtactaacgatgtctgaattaaccaaagggtgttcaatcaaatcaaaatgttagaaagtgtaggacattgcatctttctccttttttatattaatattatgattgttcgagagagaaaaaaagtgtagccatgatggattctcatgctagttgtatcgaaaggacaagaaaaaaaaaggataatataaattgtgtacttggcgactcctacgtacgtagtttctttggtatcattactaccaaatctgcaaagccgatttt

SEQ ID NO: 51327 - DNA, 377 bp, Zea mays
  unsure (1)..(377): unsure at all n locations
gtacttatagaccaccaagttatgcacattngagaccattgttttgtgtcttagaaccatatgcaatatgtgattcacagaaacatgtcactgaggcaagaacagaagaatgtgatgcaaatactgctttaaaacaatataaaaaacagatagcgaaaggcaagagttctcaaactgaacctaactgcaacctaatcccacaaagttttggacatggaaccctgacccttcttcaatcatggaaaggtcatcactatctcaccatattttcaactcgcctgcatagtacagatcaaagcagttcacagatgaattattaacacttgtaaaatatgtactcttgatcaatctaaagatttcgataggtatatcacatg

SEQ ID NO: 51328 - DNA, 448 bp, Zea mays
agctggtcaatcaccggtggctggaagaatgtgttatgcattgtttattgaaccagcctaacccccaaagatagttgctgtacctttatttttatttttatttgctgaactgctgaagtattgtatatgttgtcaccgcagcttaaaggcttgggaaatccttccggtcgaccattatacgaaaaggtaagtataccataatatatatttgtttttgatgtttttttattttacatctcattcaatatactgagggtcagtttgtgtttatatgccagtaacagtaatatagtatatgtattgtaatctaactctggtaatttatttcattcagcggttgggaagtagagataatgggagctcaagctaaggactctgaagatgaaacagaatatgctggtacatgctcattaagtatcagacgtattgacagaaggacccctattat

SEQ ID NO: 51329 - DNA, 462 bp, Zea mays
  unsure (1)..(462): unsure at all n locations
actggttgtattgactgtttcccagtcatcaaggcataagagtttcatccatgacgtgatgtctcccttggcatcatgaaagagtacaaacccaataagtcaaggatccaagccctatagtagaatacaactatatgtcggtcgtctagacaatcagcaaagtatgtcttagccaagtgagtggaatcctagaggtgtggcttccatgcacttatgaaggaaactctatcccatggaaggcttccactcttgctctccaacctctatggacacactggccaatggttggatggccactaacatgaaggccaagcattttctgtgtatcctcaagtgtaattgtcatttttttgtgcaaaataagtgaaaggtgtgagcctncacctatcaccaacaaaacaaatataggagtgatatatgtaagaaaatcttaagtgctctaacggaatataaaaatagaaa

SEQ ID NO: 51330 - DNA, 458 bp, Zea mays
  unsure (1)..(458): unsure at all n locations
tgtggacccgttgcctatcaactgaagttgccacccagctctgcatctattcatgatgtattccatgtatctcagctgcggaaatgtgtccgcctacccactgaagtgctaccggaaccagaaattgagatagaaccagacttgtcctatcaagaataccccgtcaagctactggatcagaaggagaggtcaactcgagcaagatcagtcaggatgtataatgttcaatggagtcaccattcagcagaagaagctacatgggagacggaggattttctacgctctcgctttcccgactttctgcccaaaggagtcggtacgtgatcccagaaccccacccccacctgccctttgaatacaaatataagataaacttatataaccacgatagtctaagttgtggatgtaacttaagaagggctgtcttctgaagttgcanagagaatgacattcgaaga

SEQ ID NO: 51331 - DNA, 417 bp, Zea mays
  unsure (1)..(417): unsure at all n locations
tcctcttcatgtatttnnttgctncctgcgtatattatatattttattgatatttatcctttttcattttttttctaatggtgtgtgttttttctagattcgggtgttcaaagtcctatggttattatattctgattcaaagatgtatcatcattcaaaattttatatcccgcggtaccaaaacaggaaaatacgtaaagttcatttctatctttctttctttttttagtagaatccaaattcagttgctatcttaattctttatatattttatatggtttaaaatctcactcaatatattatttatttgtagatattttgtagttgtttttactattagtagaatacaaattcagatactatcatgttttagttgttaattgcccatgtctctgatcttcattgggtgtagtgttg

SEQ ID NO: 51332 - DNA, 453 bp, Zea mays
  unsure (1)..(453): unsure at all n locations
tgcatgcgacaatgttcaatgatgataccagtgaccntatttttctagtagctattgatgctattggaatgggtcttaacctgaacatttccagaattattttctctacaatgatgaagtttgatggtttctgcaacagggaactaactgtggccgaaatcaaacagatcgctggtattgaattttcgtcttatggttcacctccagcagtttcctttaagccattttattttcccttgattcacaggctgttgatcatcaatttatgaacatcttacatgttgccttttttctgtaggtagggctgggagatatggatctaagttccctgttggagaagtgacctgtctaaatcctcaagatctcccattgctgcactcgtctctgaaatcagcttcctccattatagaggtctctttgctgcacattactttccagcaatatgaatgcagc

SEQ ID NO: 51333 - DNA, 412 bp, Zea mays
  unsure (1)..(412): unsure at all n locations
agcttatgaagattcttcatcccaatatgttctagtcggcggngccagagccaacccatgttagtcttagcaattaagcatgtgtcgagctcagctctattaaaatctactaagtatagctgaccctctaacacaccctcaaatgctattgaatcatcacttcttctaaagacagtgacacctacatcagtgaatagacagttgtaacccatttgacataattgagaaacagaaagcaagttgtaatctaaagaatctacaagaaaaacattggaaatagaatggtcacgagatatagcaattttacccaatcctttgaccagaccttgatttccatccccgaatgtgatagctcgttggggatcttgatttttctcatatgaggagaacatacttttctccacgtcatgtg

SEQ ID NO: 51334 - DNA, 447 bp, Zea mays
  unsure (1)..(447): unsure at all n locations
gcatgctgctgcctgatcaaataatttttctgtaatcactaatcatatcgnttggcccacagagcaaggttgggtgggcttggttgagtgcaatgcaagaaaacaagccccaaaggagctagattccacgcattccgtgtttctgggcggtcaaacatgctcgcatggttttttttttaaaaaaaaaaaatcttcccggattcattccgttattatattgttccatctccgttcgttgcatatctgttttctgaattttcatcgcggaccgaatcggatgtatgcttattgcttacatggatatacagacagtctgttcacttgtacggtagccgaagctgcagcagcctcctgatgccagatcgaacaggcggcccaatatatatatacagtactacatactgaggtactagacggtcatgtccacttgttcttacccatgtattc

SEQ ID NO: 51335 - DNA, 166 bp, Zea mays
gatccttagcacctgcagcatcaacttgattggtcttgaaccaatttctgctcttgtttgaatgtgaaagttggaatgcttgtgtgaacgaatggagcggttggggttaacccctcacccttaacatacactaccctctacaactaaacttcccttcgcgcaccat

SEQ ID NO: 51336 - DNA, 461 bp, Zea mays
  unsure (1)..(461): unsure at all n locations
actggtgccaatggagaagcagaaatcctgaagtcttggctgtctaactgcttgtcgttgtcaactgtgagttcggacggtactccgaagcggcaaacaatgttctgctagaagaatttctgtgcagtctttgatgttattgtggaaacagccctcgccttgatccatttggtaaaatactcgacagcgacgaatgtgaacttgaggttcccctgagccatgggcagggggcccgacgatgtccatgccccagcgctggagagaccatgtgtgggcgatcagttntgtgaattgcgaggggctgcctgatcgaggagaaaacttctggcaggcttcacatgaccttgtgacccaatttgtggcgcatatcattgcgggccagtagaaaccttggcggatcacctttgcggctagggcccttggccctacgtgagagccgcaagtaccactgtggacttcgc

SEQ ID NO: 51337 - DNA, 437 bp, Zea mays
agcttcttcaccatgttatcacggttatcgttatattgttgagcatggcactctcccttcaaaagagttaagctccttcttagccttccaacttcttccttgagctctttattttcttgtgtgataaaaatatcactaattcctgaaatttctagctcaatggaagattggcttgcttgataacaacaattgttagcacatggtaatataatttcaatttcaacacatgtgcacatgtgaggttggtatgatttcaaattagttaacacaacctcatgagccatttctaacatgatatgtgaatccaaaaatttattatgggagcatacaagcatatcatgtttttcttgcaaagctagattttcaatgtttagcttttctaccgcgttcttgagcatagcatttttattttctaattgagcaatatatgatgaatg

SEQ ID NO: 51338 - DNA, 464 bp, Zea mays
ttacggacacttaaaactaagcttacaataattgtccttcatcacaacctctgaagatagttcgttgtatcgagaagctactggaaggattggaaaatgggctgcagagctcaatgaattttgtattgaatatgttcatagatcttcgattcagtcacaggcgctggcagactttattgctgattggacgccacggactcatgatgaggaaacgaataaagacaacgaagcctggacagggttttgtgatggatcttggggaaccttcggagcacgagcggctgctgtgttggtttcaccttccaaagtcaaaatttgttatgcggcaaagcttgattttaactgcacaaataacattgctgagtacgaagcattggttctatgtcttcggaaagttacagcaatgggaatcagaaaggccatacttaaaactgattcccaggttgtttcgggtcatattgaca

SEQ ID NO: 51339 - DNA, 425 bp, Zea mays
  unsure (1)..(425): unsure at all n locations
ggagagcacatnttatgattaacaaatgttcattttgagaaagacaggatttgtagcgcatgccaggcagggaagcaagttggagtccatcattcacacaagaacatcatgacgaccgacaggccgcttgagctactccacatggatctattcggcccgattgcttacataagcatcggcgagagtaagtattgtcttgtaatagtggatgattattctcgcttcacttgggtattctttttacaggaaaaatctcaaacccaagagaccttaaagggattcttaagacgggctcaaaatgagttcggcttgaggattaagaaaattagaagcgacaacgggacggagttcaagaactctcatattgaaggcttccttgaggagggagggcatcagcatgagttctcttctccctacacgccaca

SEQ ID NO: 51340 - DNA, 311 bp, Zea mays
  unsure (1)..(311): unsure at all n locations
ggcatctgtaagcatgtaaacagtgggaggagcacatcacagcaagaatgtgatgaccacgtcaagacctctggagctgctgctatggatctcttcggacccgtcgcctatctgagcatatgaggaagtaagtatggtctagttattgttgatgacttttcccgcttcacttgggtgttctttttgtaggataagtctgaaacccaagggaccctcaagcgcttcctcaggagagctcanaatgagtttgagctcaaggtgaagaagataaggagcgacaacgcgttcgaattcaagaatcttcaagtgga

SEQ ID NO: 51341 - DNA, 418 bp, Zea mays
agcttgtggagggtctttattcttttatgttctaagcggcgatgccacaaccagcccatgcgagtcttagccattaagcatgcatctagaccggcctcttcttttgcaaaatcaactaagtaaagtttgccgtctagtacacccttaaaagctagtgaaccatcacttcttctaaagacagacacatctacatttgtaaataaacaattatatcccatattacataattgactaacagatagtaaattatatccaagactctcaactaaaaacacattatagatagaatgctcatttgatattgcaatcttgcctaaacctttcaccttgccttggttcccatcaccgaatatgattgaatcttgggaatccttattcttgacgtaggaggtgaacatcttcttcttccccgtcatat

SEQ ID NO: 51342 - DNA, 427 bp, Zea mays
actctgcttgctgtagcgaggacgttgcatctttgtctcatgctctcatttaattgcatatgttcatgcgttatgcgtgtgtgcgttataggttgcatgcaaacagtgaccggctgcatgcgttgtcactcaccgggatgccgcacatacgcccgcgtagatgaatgcatgtaaattggggccagttacatgcgtggcgcacgggacgccatgcacatgattacatgcgcccatatgatgaaacgggggcacagatgttgtctacattaacctcttaataagtatgtagagatgtttatttatctactatgaaaccttttttcaatttttatgagacagctaatggtatattttggttgcaatattataatttagaacgggaatcatttattgagtaaaaggccaaacaggtattataccaattttt

SEQ ID NO: 51343 - DNA, 413 bp, Zea mays
catcttgtctttatgagatagtctacatgatgtacgttaaaagttcgtttgatgttaggtgaggatagatagattataccattcatcatgactctatgggttgggttactcttttgctcatggttgagttggtatacacctgactagaatggtccaagtaccactaatctgtttaagcagaccacattggatgagatcacactagcttctgtaatcctatttaagaataccacttaagtaagcatatctagctgacttgtattttatgaaattccagtgtatatatatttctaagtggaacttccaattagtatatattttcttaaaaaacatatgccattaatatgtggtgcatagaatacaacggttaccaaattcttctattacgtaagtgtagagacgtttgggggtag

SEQ ID NO: 51344 - DNA, 138 bp, Zea mays
tattggtgaagaatgatgctctgaggtgctgctctaatagaaagttgatttatttctatgggaggggcccactttttcagcaaattcagtctgcccactggtagcttgcacactgacccagcgttaaattcacaaagc

SEQ ID NO: 51345 - DNA, 364 bp, Zea mays
cttcatccacacatgtgctaagcggcgatgtctcaaccagcccatgctagtcttaacaattaagcatgcatctagaccgggctcctcttttgcaaaatcaactaaatagagtttgccgtctaatacacccttaaaagctagtgaaccatcacttcttctaaagacagacacatatacatttgtgaatagacaattatatcccatattacataattgacttacggataacaaattatatccaagcgactccactaagaatacattataaatggagtgctcatttgaaattgcaatcttgcctaggcctttaaccttgccttgattcccgtcaccgaatatgaatgaatcttgggaatccttattc

SEQ ID NO: 51346 - DNA, 405 bp, Zea mays
atatataggatgcttaatgtattcttcggataatgaggcaggttaatacaaaaacttggtcatcaaactgactgttgaccttctgaccaggctacactaaagaagggaggatgcctttctcgtagaagtggtcaaagacgctctagaagcatgggaaacctaagcttattagtcttcagatgggagaaaatgggtctccatactatagggactcaagagggtagactgattcctttggactgtccaggcgcacgaggctgtatatgcactgaataaatttgtgagaacaccgctcgagctgaaagcaccgcgcttagccacacccattcaaccggttgaagacccgatttatgcatcttttgcaccactctcgtggtgagcagcgagttgtgaaaaagccagccc

SEQ ID NO: 51347 - DNA, 296 bp, Zea mays
cccactccgggttatgaaactggttcttgggtcatcttacttcttcattcatatttgatgatagcctgaaaagcaatccagcaaactcatgagctctgatgaagccgctgcatcaactaaagaatctattcttggcaatggaaactccgccttcggacaggctttattaatgtcaagtaaatcgattcacattctccatttaccattggccttcttcaccataacaatgttagccacaccctctggatattttacctctctaataactccggcactgaggagtcttttacttcatt

SEQ ID NO: 51348 - DNA, 434 bp, Zea mays
  unsure (1)..(434): unsure at all n locations
taaagctcttctcanattggccttgactctaatatctaatgtttctgattcacgggtgaatcggctcgtgctttcttccaaattgatcttgcttctttcagctctttactcaacttttcgattcttacattctgatttgaaattagaataccttgcttctcgttttgaagacgagctttagcaagagagccttcggctaaactaagcaaagagtctttttccttcaaagaattttaaaggtcctcaatatttttctctaaatcactgatgataaattcgttctttctgtctccatcatcttgttgtagtttcaaatctttgctcagtagcaaactctgtatcaaaagacgaagttgtataagaccttcacattccatactctctatggcacaattcactgttcaaacgtcgttctcgcgccgtttgacctctat

SEQ ID NO: 51349 - DNA, 459 bp, Zea mays
  unsure (1)..(459): unsure at all n locations
acctgcggcatgcaagctngcaggaacaataatcagctaggaatgttatctctatattaactgaatagcttgtctgaaaacagaaaaagatttgtcaccatcatttctcactgctcactagctatgaagggagtgaaggagaaattagcttgtgatatcgaacattagagtgagatcagttgtgtgagtaatgaaaatcatacacatcacatatcagatcaatgacatatatgccaacttccaaggacttgcgtattcgaactcatttttgaaaactatccatggaatacgtggcaaataccaaagaacaatacaaaaatctacctcaaagatgtctgcctaaataagccagactttcttcatcgacatcaatctcttccacttgtactcggattgccaatatctgtgaaggacattgaacaaagattaatgcaaattctggacagacaaaatcgtata

SEQ ID NO: 51350 - DNA, 434 bp, Zea mays
  unsure (1)..(434): unsure at all n locations
gttccatgttgtatcatacccaggnttaacctttccatttctttacatatagnggtgtcaggggtccatactgtaagacaatgacaagaagccttgcgactcattgcatctgccaccacattggcttttcctgggtgatagtggatttctaaatcataatctttaatcagctgaagccatattctctgcctcatgtttagttctgactgggtaaaanaatatttcagacttttatgatctatatataaatggcaagtatttcccagctgataatgacgccatatcttgatggcatgaacaactgcagctaattccaaatcatgagttggatagtgctcctcatgctaatgtaattgtcttgaagcataaactatgactcggacctcttgcattatgacacattcaagtccactacctgatgcgtcacaatacac

SEQ ID NO: 51351 - DNA, 424 bp, Zea mays
tgcggctgcaagctcggcttagagcacatttatttttttgtaggatgctcacgatacagagtcgtgctgaaacgaagctgagcgaggaggagaagctctctgaggagaagaatgctggctttattgaatcaatagcaaaaacaaataccgaaaagattactagggagattttagaaggcttatctgaagacactcgtgacagcgatagctatgatatggaaagtggcagcgaacactccgaagatcgaccctggcgaccaagtcaagcaattttcaaaaaatcaactattaaacagagtcatctcgattatatgaggggaagatatttttgagatatgtctattgcgagggctgacaatggagacaagactgcttctactcccgaagagaatgaagacgtgatcattcgaagctcttcaaagct

SEQ ID NO: 51352 - DNA, 400 bp, Zea mays
tttaatgtataaacaatactgttatgaagctaatgcgatttgaacggacagaaacagaattaaaatttgaaagttataactaaaatgggattgtagatcatttattattatcttcacattaaggattagttcttacggtgcattattaaagacgcatggacacatgcacaaatgttcacacctgccatggacggtcggattatatggacttgttcttctgcctcttgaataagctcatgcccaaagaactatctttctcaagtctgatcccaatatatatgagtcctgcacttcctaccatataaagcttcaaatggtggcatcattagactggcttggtaactattattatatgataactcagcattaaggatgactttattcaaattctttcatgctg

SEQ ID NO: 51353 - DNA, 391 bp, Zea mays
gcttacacgatttgaagcacgaacgcttccacttggctctggttttgcttggctgttctcttgcgacctttaagcgccgtcttgaatcttttgatgatgagggccatctcttcatcattaagtccggccgcctcaatttgtgccaccctgctatgtagcgcctccttgcttcttgttgccttgaaagcaaggggttgaagctcgttgatcggtccattcaaagcgtcgtccacgtatcttgcctccttgataatcatccgcccgcttacgaattttccgagttcctactcgggcgtcatcttcgtgtacctgggattctcacgaatattgttcacgagacgatgatcaagaacggtaaatgaccttatcattatgcggacgacgtcgtggt

SEQ ID NO: 51354 - DNA, 343 bp, Zea mays
  unsure (1)..(343): unsure at all n locations
ctagctgatcaaggaaaggaagcgtgttctatctatccaatgcgggatcgagcggctggtggttgctgtttaagggactaaaacgctgcattaagagccactaggatcggaccgcccgcgactgatggatgggtacaggaccgggacctgaacctggacctggaccgatcgtctgagtaatcgctctattaccatgtctctgccacctgtgggctgaggctgctaagactcgatatacaaatcacgactgtcccgcgactgcgctgngtcaaacgcgtgcgagatgtgctgcatcacacgacttttgcggccccgagcctatctattccacgtgctactcttc

SEQ ID NO: 51355 - DNA, 441 bp, Zea mays
agcttcatgagtgggagattaggaattacttgttctcatctgctgccgaagactgttctccttgcaagatcttaggcgatcaagcttggggacgacagtaaccccttttgggagctggatgatttttactcactaaagggatccgtgaaaaaagtctcttatgcttcgggaagccgaaggtccgaaaaacaccttccctgagctcgttgctgagaaacgatacagtttccgagcgcggagcggtcccaccatgcaggttcactttcttgatttttgcgggccaccgtttagtgggtgcgagcgactgtttgtccggtgtaaaaatcttgacgattcaccttcttacctgcaacactatataaacagacaggtaggtgtgaagttaccacagcattcatttctattgcactgtttcgctgccaaaaatttaaccatagccga

SEQ ID NO: 51356 - DNA, 211 bp, Zea mays
atctccatagaggacatcttctcgtgcctgccctaaaactggttgacgttagccgcaccatcattgaacatatatagaacattgatccctcctggggcaccacttatcgaaaaactacatcccttgtctgacaaaaaaacacaagccgctaaagcataaagacaccgctttctaaaagcttgactaacctatcgactatcttaccccacct

SEQ ID NO: 51357 - DNA, 459 bp, Zea mays
  unsure (1)..(459): unsure at all n locations
cggatccttaagcaccgcggctgcagcttgggccgtggaaaacaaaatcttgattcttggctgtcgaactgcttgccgntgtcaactgttagctcggacggtactccgaagcggcaaacgatgttctgccagaagaatttttgggcagtctttgatgtgattgtggagatagccctcgcttcaatccatttggtgaagtattcgacggctacgaaggcgaacttaaggttcccctgagcggtgggcaggggcccgacgatgtccaggccccagcgctggagaggccatgtatgggcaatcagctttgtatattgcgaggggttgcctgaccgaggagagaacttctggcaggcttcgcaggacctcgtgacccgatttgcggcgcagatcattgcgggccagtaaaacccttgtcagatcaccttggcagccagggccctcggccctgcgtgcgagccg

SEQ ID NO: 51358 - DNA, 427 bp, Zea mays
ctaagcttggatacaactgacactctagtagcctctgaagtacttttctcaaatgttcttcatgctctcgctcattctaggaatatataagaatatcatatatgaacaccaatacaaacttgtcgaggtattccatgaacacactgttcatcatgtacatgaaataagctcgggcgttagccaatacgaatgacataaccgtgaacatatataacccatactcggtgattaatgctgtcttccgtatacctgaaagtcggattctgatctgatggtaaactgaccttatatctattcttgagaacacaattgctgctattaactgaccaaataaatgttaattcactgcatatgatactgttattgacagagactctattataagtctgaaataatgaaattctcttagtcgaactttttatcaaaa

SEQ ID NO: 51359 - DNA, 436 bp, Zea mays
agcttgccttcgcctcagtataccactcgtattccaacggagttgtggaacacgccaatggaaaaattttcacagctgtcaagaagatgctcctctacgaaaaaagggcaggtgggccgatttgttacctgaagcggtctgggcactaaacacgactgagtgcagggcgactgggttcacccctttccgccttctatatggatcggaggccatgaccccgcaagaaataaaacatgggtccccgcggacagtttcgtcagctgtccccgacgtggacgaacccacttcgaaggatcttatcgacggagaccgcgtcttcgctctacaggctctaaataaataccaagcccagacaaaagcatggagcgaccacgcagtcatcccgagggaattcagcgaaggggacctcgtactcgtccgaacagctcggacagag

SEQ ID NO: 51360 - DNA, 425 bp, Zea mays
  unsure (1)..(425): unsure at all n locations
gatactttcttgatagctattattatatgaaaactncgccaagggcaaacattcatcccatttctgtgagaagtccagaacacatgcccgtaacatatcttcaagtatctggttcactctcttagtttgtccactggtttgaggatgtggagcaacttggtacccaaggatttatggagttcttcccagaatttggatacaaattgtggtccacgatccgacactatagtcttcggaacaccgtgcaaactgagaatgcaggcaatgtacaactcggcataagtaagtaccgggtaatatgtcttaaccgacagaaagtgagcaatctttgtaagtcgatcaacaatcacccaaatagagtcatatccttttgcggtcctgtgcaagtccacaataaagtacatacttattgtcttccatttcat

SEQ ID NO: 51361 - DNA, 299 bp, Zea mays
gaaaaccaaccttttacttgggaatatccaaaggccacaactcgagctatgttccttgtcaccacaccatgctcttcttgcttgctgcggaaaacccatttggttcctacaacacctttggttatgacgtggaactgaaagacataccacactacttgagaactcgttgagctcctcttcatcgccaccccccaatccgaatgtggaaggcgtcctgtacccttagtggctcaatagaagaaactaacaagtaatgttcactaaaatgtgcaccacctgatgcagcaggtaccccctta

SEQ ID NO: 51362 - DNA, 286 bp, Zea mays
tatcttatcttctttccatcggatccgaccttgtctcaatattcattctgagcgctccgcaatcatcgtatgagatttctggaccctctatattaacaagatctgctaaatctgacttaaaggggctgtttgcaatatcctctattgtttgggctgtcatactgaaaaaaggtttatgcccctccctcaacatgaagaaaattatagaaagaaccctcaatttaaagaataaaaatggggctgaatccctaaacatgtgttctctttggctgtgctaaatgtactt

SEQ ID NO: 51363 - DNA, 389 bp, Zea mays
ggagagcgtacttgaggggttcgcctccacgtgcagtgaagagaattcctgctcctgctccctgcagcttcagcgagccatcaaaatacattcgccatacttctgtggtttctggattatccggcactcgctgttctgtccactctgatacgaagtcgaccagtgcttgagttctgatggcagtgcgaggtcggaactcgatatcatgggaccccaactcgcaagcccacttggctatccggccaatggcctccttgttgtgaagaatgtcccctatgggaaaaccagtaactactatgactttgtggtcgtcaaagtagtgacgcaacttgcgggcagttagaagtactgcatataatagcttctgaacttgacgatactttttcttc

SEQ ID NO: 51364 - DNA, 263 bp, Zea mays
tatgggtcgtgccactcctgtggaactcaagacatcatccaggttagtggtgaacgctattaaaccactcggtcctcatcaacgactctaccttcaccgaatcctcgaattatatgatactatgagcttaccggaccaaactccaatgaacttgatttgaaaatgtttgggagtgagcgcggtattctctgtaataagcattgaataccataacattgctcactaagatcgctaaacagaggtgttacatgtgctcaccactg

SEQ ID NO: 51365 - DNA, 443 bp, Zea mays
  unsure (1)..(443): unsure at all n locations
agcttgagataacatatgngnaacggntnaattacgtttctttctctagctaattgcgatgtagtattgtgttgcgtaagtatctaaaatgtcgtcgtctttttaatggtgttaatgatgaacgccgagaacgtattactagctagcgcttacgtatagtcgttgcagtgttttactaattaatgtttacttcgctatcatgtattgggatatcttgtgttgttttttattatattcatacatatgcatcatgcatctcatttaggcccgagaggtgatgatcatgcaagtgacgtggtgccagccacatgatgcagttggtggatgacctgaagaatgatggacataccagtggatgctcgccaagtgagtatcctccggcaaacactatctaagtgtcaaattaaaggcaagccccgattttatgcataaccgttatatat

SEQ ID NO: 51366 - DNA, 404 bp, Zea mays
tcataactcccagtggtacttattgctacctctggatgccctatgggcttaaaaatgctagaggaagcttcagcagaattactgccaaggttcttcactctcaaataggcagaaatgtgctaacttatgttgatgacattatagtaaaaagcacataacaagataatcatgttgccgatttacaaaatacgtttgccaatttcatgcaagctggtctcaagttgaatccagataagtgtgttttcaaagtgaagaaaggcaagtttcttggttgtcgtgtatcaacaaagggcattgaagctaatccaagcaagatcgaagctatccttcggattgaaccaccaaattcaaagaatggcgctcaacggttggcaagaatgctggcatcgctgaataaatttata

SEQ ID NO: 51367 - DNA, 440 bp, Zea mays
  unsure (1)..(440): unsure at all n locations
agctntgggaactatgcacgtatccaatcatcctgttctcggtactggaagcgcttgccagatgcccccgtttctgtcgaccacgaccaacacccaacataagactttcctagttatttagccgagaccagagccatgatagttctcatggtagcactgttttcccgggtggtcactccatgttccaattaatatgcaataatcttgtttaaccatcgggttaacaacaataatgtaaacttaccattttggaacattaatatcataagcgggagtgactgcataaagttaagttgtagcaatagcatagctacttgattaaatcataatcccacgttaaacaaggagtaaggttgaaaaggttatctaaataggtaacccgtcaacatatgcatatatatccaaaagaataaactttattaaatgtattgcttgggatc

SEQ ID NO: 51368 - DNA, 348 bp, Zea mays
ctctgactatcattacaaaccaccattgctatttattctacaagctcttagagaaaagatctcaccattatggcctttcctattgagaacatattgatgttcaccatcagtggggcgaataatattaatctccatgggcgtcttaacaatgcaggtgatcagtaagatgcgaacaattctataataatcctgaatgtttggtataaaaaagcccttatatgtgaaagagacacacttagttcagaaagtatcttataggccttgatcaaacatgataaattattcacgaagacttgccttcacaaatgatatatactgcaatcatcactaatgatcatatcatcaaca

SEQ ID NO: 51369 - DNA, 443 bp, Zea mays
  unsure (1)..(443): unsure at all n locations
agcttttgaggaagttntgaatagccgcgtttattatgtgccttttcgggtgccagggggattggccaccatttggagagaaaaggttgtgaacatgtgaaatccttgacacaatccgaagccgccttatcttctgaagatataaaagacccttcggccgaagcaagcctggtcggtggaaaaattttcaccgacatctgggaaaatggtggccgagagatggctcaagaaattataaggagaagtgaaaaaggtattcatgacgctagaaaagtagcagaggccgctgagaaaaatgtggacctcgaagaacgtataggtattaactactagtttttgacattatgttgtaactttatgacttcggacttattcgctctttgtaatacgatcgcactatctcttctcccagagcccgccgagccattagcggaaaccaacgc

SEQ ID NO: 51370 - DNA, 431 bp, Zea mays
tctaaagggagaacacgtgatatgtttgactaacgtgcatttcttataagatagaccttgtgcagcttgtcaagcatgttaacaagtgggatgagcgcatcacagcatgaatgtgatgaccacttcaagacctctggagctgctgcatatggacctcttcggacccgtcgcctatctaagcataggagggagtaagtatggtctagttattggtgatgactttttccgcttcacttgggtgttctttttgcaggataagtctgaaacccaagggaccctcaagcgctttctcacgagagctcaaaatgagtttgagctctaagtgaataagataatgagtgacaacggatccgagttcaagaaccttcaagtggaggagttccttgaagaagaagggatcaagcaccaattttccgctccctacacaccac

SEQ ID NO: 51371 - DNA, 443 bp, Zea mays
  unsure (1)..(443): unsure at all n locations
agcttcagctccatctatgttatggattgctttttattcagtccagnttccttcggcccttctggcagcttcctgacttccatgaatagcgatgggttcttgatccgaaggtatcttcatgcaaagataagcaggatgaagaattgcttcgaaagcattgagggtgccacgaccaataattgcattgtaagggtattccatgtcaacaatgtcaaacacaacttgctcagttctagtgttgttgatgaacccgaaggtcactgacatggtgatcttgcccagtgctacaatctgtcttcctccgaagccacagagagggtgtgtagcatcatgaatcttatcttctggctcttgcatttgcctgaaggccttagcaaatatgatatcagctgcactgcctgtatcaaccaagacattgtggaccagaaatcctttgataacac

SEQ ID NO: 51372 - DNA, 459 bp, Zea mays
  unsure (1)..(459): unsure at all n locations
actaagctttatcaagtgccttttcgttgcactctgttcagttgtatatctatactcatttcanacatgataccaactagtagtcaatctgataagtgttccacacttcatcagtaagggaaaatactattttgttgaattatagaaattagcaaacaaagatagtgctgataaatagacaaaatcatgaagcacggtgaattccatatgatacagcaaattggagaaccacactgagttaagaaaaaaattgatcaactatactattatgcccttcatgtgcaacaataaacatttcaaaacaatgccctctatcgtccttgcaacctgtgaggtaatgaaggttgaaggagcatggcactggcacccaagttttgaaaatcagtaataaaaaattggaccattccactacccttggcagattaaaaagaactgatgactggttcttggcatggaaat

SEQ ID NO: 51373 - DNA, 322 bp, Zea mays
agcttaagagttaaagaccataagccaccataagatgatggcagagctcaccacagaggggagggacgacggcgccaagctcgattgggcccgagggagggaggtggagtggctgacgcctggtgtggtggaacaaggggctcggggcgatccttttataggtggccggggaggtggaagggaagacaggtgttcatctccgagtaactcctctaacccatttaaacactctactcacagacagaaggtttctccaagcgagtcatctaggaacacattatatatagagcgctcggattacattgcaaattttcctaaccct

SEQ ID NO: 51374 - DNA, 338 bp, Zea mays
taggatcttttctatcattgaggcagctctttggtcacataaagaggacttgcgtagcacttgatagaaaccctatgtgacactggggtgtcacagcctctcccccggcgtcgtctgatgactcagacgactcccatgggatcgccccagacgtgtggacctatattcgggccatcgagcgcgccgggctcgatggctcggatgattcggagtactcctcggacgaggagaactcctcggacgaggagaattcctcggactcgtccgatgagggcggcggcggcgatggcggtgacagcgacgactactgaggcgatggtgacggcggcggtgactgt

SEQ ID NO: 51375 - DNA, 329 bp, Zea mays
tgaatgcctagctctttgtagtggttgaaagttggaaaacttggatgacttgaatgtggggtggttgggggtatttatagccccaaccaccaaactagtcgtttggtggaggctgtctatcgcatggtgcaccggacagttcggtgcacactggacagtgtccggtgccccagccacgtcaccaggccgttgggttctgaccgttggagctctgactgctgggcccgcctggatgtccggtggcacaccagacatttactgtaaagtgtccggtgcgccacttcgcgcgtgcctgacttctgcgcgctctagcgcgcattaattgcttc

SEQ ID NO: 51376 - DNA, 333 bp, Zea mays
tcttgaccacctcaacgttcaccaagatgttgcagctaccactgtcaatgatggtatgtacacagtagtccttgacgatgatgaacatgttgaaaaaggtgtggcgctgtcttgtgtcattgtcaactaccatggcactcaaaagctcgttgcacaatcaatgccttatatgtctcggtcgctgttgtaccaaagaacctcttcatcaccatcatatgtctctacaatgttatctccaacagtatcttcatctttaacatcagaagcactaacatacccaccattcaccatagcaatgtatgcccatttgctggggcactctcgctaaatatg

SEQ ID NO: 51377 - DNA, 434 bp, Zea mays
agcttcttggcaacaacctttcgtctttatctttgttacagcaaggacagcagccagaagggagccagtatgctccacaccaaagggacttccgagagcagtccgaagctcgtacagtcaacagcaccgtgccagagtcaaagcacatctattgacaaatatcctaccctaatagcaatattttctatccagttttgttttctgtaataaaggatattgtttaggtttcatataaatactttcgttgattcccacaaggaaaatatatttttctcaggcttaaattgttaaagtttaaagacttgtgataatcaagaggaccttcggactaccgaaaattattcgaaacagcaaaaagtcgttctaaggaacgcagagtaagttgccgaagtcacaaaaaagtcgtttcaagggaacgcagtgtaagttttttg

SEQ ID NO: 51378 - DNA, 361 bp, Zea mays
aatggcatgtgcttaatagcaactctcttcccatggcggatggcttcggatagaaccacgcctaccgcctccgggattggagcaagacttcctctacgcgctgagggagaagctggcggagaatggggtgagacccaccttcccgcacctccagaactaccactagacctatcccaaattttggccaatcaaaccagactcattgaagtcctcactcgaagcctgtagaaccagcgcccatgcggtggaatgccccatgacttgatgggagaattcctgatactgacaccgtccacgttctccgtgtgcaacaataccctcgatgctgatgactggctttgcacaatcaatatgaagttgg

SEQ ID NO: 51379 - DNA, 461 bp, Zea mays
tatgtggacgatgtggtgatcaaaacagaaaattcgaaattttcattgaagaattacatctggatttcaacagtctacagcgatatcgatggaagcttattcccaaaaaatgtgttttcatggtaccagcatgaaagttactctggtttattgtcatccaccgaggaattgaagctaattcagaaaagatcgaagctatcatgacgatggatgcaccacgatcacatgagaaagttatagactcaccggatgtatggcagccctgagcagatttatatccatgctgcgagaaaaaggcttaccattttataagttactcaagaaagtggacaagtatcagtggactttagtaacacaggaagccctagacgcattgaaaaagttcttgacggcaacactagtgctaaaaccaccacgtcgagccacaccgactcaatgagctgaagatctgctgctatata

SEQ ID NO: 51380 - DNA, 390 bp, Zea mays
  unsure (1)..(390): unsure at all n locations
tatgaagaatcttcatcccaacgtgggctaggcggcgatgttcttatccattctatgttagtcntagcaagtaagcatgtgtcaagttcagctntatcaaaatctaccaagtattgctgaccctctaacacacccttaaatgctattgaatcattaattcttctatagactgtgacacctacatcatggaatagacagttgttacgcatttgacataaatgggaaacaaaaagcaaattgtaatctaatgaatcaacaagaaaaacatttgaaatggaatggacatgagataatatgaattttcccaaacgcttgggcaaacacttgatttcgttcaccaatgtgaatgctcattggggatcttggtttctctcaaatgaggataacatg

SEQ ID NO: 51381 - DNA, 399 bp, Zea mays
aacaacaagacgatcttttgtaaaaatgttttaattcatagtttataaaacaaaacctaatcttgaaaatatcttaattataaatatacaaatattaggtgtaccattctaatcttttataaaaagagttcataagataaaacacattataaccttattaaactttttttaaccttttagaaaagatatatgttatacatctaaggttaatgaggttaatgagttatgaaacaaattattaaacattaatttatgagaatctaatatataagcctaaacatgttttagttggaaagataatgaaacaaataattatcattatttttattaagaaaaaacatggcctatatattattattaagaaagctatattcaaagtcaatatataaactaacattt

SEQ ID NO: 51382 - DNA, 408 bp, Zea mays
actaagcttggaaagtcttatcccacatgtgcaagcgggatgttcttgtagaccatgctagagttaacaacttagcatgcatctaaaccggacacctcttttgcaaaatcaaacaaataaaggtcgccgtcgagtacacccttgaaagctagagaaccatcacatctcctatatacagacacatctacatttgtttacagacaattatatgccatattacataattgactaacagatagtgaattatatccgagagactcaacgtaaaacacattagagatagagtgttcattagatattgcaatcttgcctaagactttcaccttgccttggttcccatcaccgaatatgattgaatatcgggaatccttattcttgatgtaagaggagaacatcctcctctccccc

SEQ ID NO: 51383 - DNA, 199 bp, Zea mays
  unsure (1)..(199): unsure at all n locations
taagctatgaaagaagattcaactgaagaccccggctgtgntttttttctcgcgcccatctgtatctctgtgcgctatctattggcgttttccctctcggtgcctttctgctgtccgccgtgtgcgccttctgtgcttactgcgaaacggcgacattggccgggttgatgtgatgccttgacttatgttttcttcgctc

SEQ ID NO: 51384 - DNA, 346 bp, Zea mays
tctagatttgtttcctaatctaagtcaagcacttggcctagactatccatcttttaccacctcctgagtatacttgtcactacggggtaggtcagtgaccaagtcttcatgtccaagaaataacggcaatccgaatcgattaatacccagctggggatcttcaatcgcacgacatatgtagcacttaacccttgcatataacaactcgcacctgggtttctcaagaccagaatgggttcatgccaaccaaaagcatagatactccaccgtccaacctcttgccacggagggcacacgctactattgtcatctctccactcctattgcatgataacctttctggtat

SEQ ID NO: 51385 - DNA, 387 bp, Zea mays
tctactgacaagcgctgcacttaccgctgagtgcgaatcttcctcatattattacaaaggagcccctggcgtacgtggagataatgttgttagatctattaaatactgcttcagctcttcaaaagccttctgctgtattggtccccattgaaagacttctgctgacttaaacactctcaataatggtaagtttctctctgctgagctagatatgaatctattgacagatgccagccttcctgtcaatctttgagccccctgttctgtacttgtgggttccattcgaagaatagctccgattttacttgagctgtggccatactcctttgttgaaccttgccaccataaaatctgcccttttttactacgaatacacatttttactga

SEQ ID NO: 51386 - DNA, 439 bp, Zea mays
  unsure (1)..(439): unsure at all n locations
agcttcatgagtggtagcttcggcattacgttattcagcttttgccgaagncggttctccttgcaggaccttcggcgatgaagcatggtcccaacagtagccccttcgcggtgctagatcatttttcgtaacgagattgatccgcgaaaaaagtctcttatgcttcgggaagccgaaggtccgaaaaacaccttccctgagctcgttgctgagaaacgatacagtttccgagcgcggagcggtcccaccatgcaggttcactttcttgatttttgcgggccaccgtttagtgggtgcgagcgactgtttgtccggtgtaaaaatcttgacgattcaccttcttacctgcaacactatataaacagacaggtaggtgtgaagttaccacagcattcatttctattgcactgtttcgctgcccaaatattaaccatagccg

SEQ ID NO: 51387 - DNA, 100 bp, Zea mays
ctaagcttgtgcagcttctgcactcatacccactgcttataggcgtatttctcgctctgaggacacttatcagagaaggagatcttcgacaatgacgctc

SEQ ID NO: 51388 - DNA, 417 bp, Zea mays
agcttgaccaaagaacgtacaatacatttattctcattgtaagtggcacctgtctgggtcgaggggactgagttacaccgtctattccaacgcggagttaccctgtacggaaatgacaatgcattttattcgataaagcctcaccatgggtgctatgatccattggcttatcctcttttcttcccaagaggggagctcggttggcattcaagcatacccaaggtcggtgtcaacactgctagaattgatggacgacaatccacagattccgacaacccacgttagttgcccgtgttcaatactctttactaaggtgttgctttggccataatgttctataatgtcttctctaaaatttatttttttattgtataatagattcgaatggccaactctatgttacgatgcgtgagtact

SEQ ID NO: 51389 - DNA, 447 bp, Zea mays
tactaagcttctaagggagagcacattttatgattaacaaatggtcattttgagaaagacatgatttgtagcgcatgccatgcggtgaagcaagttggagcccatcatccacacatgaacatcatgtcgaccgacaggccgcttgagctactccacatggatctattctgcccgattgcttacatgagcatcggcgggagtaagtattgtcttgttattgtggatgattattctcgcttcacttgggtattctttttacaggaaaaatctcaaacccaagagaccttatagggattcttgagacgagctcataatgagttcggcttaaggatcaagaaaataagaagcgacaacgggacggagttcaagaactctcaaattgtaagcttgcttgatgaggaaggcatcaaacatgaattctcctcttcctatacgccacaacataat

SEQ ID NO: 51390 - DNA, 446 bp, Zea mays
  unsure (1)..(446): unsure at all n locations
agcttctaaagggagaacacattntatggattatattatgttcattntgagaaagacaggatttgtagcgcatgccacgcagggaagcaagttggagctcatcatccacacaagaacatcatgacgaccgacaggccactggagctcctacacatggatctattcggcccgattgcttacataagcatcggtgggagtaagtactgtctagttattgtggatgattattctcgcttcacttgggtattctttttgcaggacaaatctcatacccaagagaccttaaagggattcttgagacgagctcaaaatgagttcggcttaagggtcaagaaaattataagtgacaacgggacggagttcaagaactctcaaattgaaggctttcttgaggaggagggtatcaagcatgagttctcttctccctacacccctcaacaaaatgg

SEQ ID NO: 51391 - DNA, 355 bp, Zea mays
acatactagagcagaatgtgctattgtgatctcaactgtcctaagaacaagataaaaccttgataacgcttttgatcaacaccaaaccatgaaattgcctggtcatgcaatgatactttcggagataacatggatgttattgaacactcgctcaatgtttatccatccttctgaccaagaaagcaaatgcttctgaagatgtctgatgacaaggccgattgtgctacgtacgaattgaataaactcctcaccgccggtgttatcatacaagtataacatccagaatggttggcttacactgttatggtaaataatgccaatggtagatggagaatgtgtatcgatattactgatc

SEQ ID NO: 51392 - DNA, 253 bp, Zea mays
  unsure (1)..(253): unsure at all n locations
gacacccgaacgctcgctccttcggcggatgctgcatacccaaatgtggcgcagcggactcactctactgatgagcaggaagaaaccctgactatgctagtgttccacaatatagatgaatgtgctgtgccgcacctgatctgatgagatgagagcaggggagctagtctgccctccctctcagtntgaccatccttcatacccaggagcccctgacttcagaggatgtctgatgacaaagccgtgagtgctc

SEQ ID NO: 51393 - DNA, 409 bp, Zea mays
tctatccttttataagctggtatctacttgctaattactccctccatcccaaactataattcgttgtagacttaacatacattcattaatcaacctatatatgtagtttgcatgtatgtctatattcagtatcatccattcaaatgtgaacggaaaatagagggctataaaaaactatattttgggacggctggagtattgtttattaatgctgactagactctacagggtaattttattcattatcctaattattagttatttttaattataacaatgtggtctgacatttgctagttcaagttgcatctaataatgaaaacatatatgccctccataattgcagaagttagcagtcaaatgatggagctgtatgttcataaccgtacaccacaggcacaacaatcac

SEQ ID NO: 51394 - DNA, 437 bp, Zea mays
agcttgcacttacgaccaaaccgttttcgtatccatatcacattcaatggctcaacaatagtggtaaggtcaaggtaaccaagctggtacgaattaattttgctattggttcatatcgtgatgttgttgactgtgatgttgtgcctatggatgcttgtaatattctgctaggtagaccatggcaatttgattcagattgtatgcatcatggtagatcaaatcaatattctctcatataccatgataagaaaattattttgcttcccatgtcccctgaggctattgtgcgtgatgatgttgctaaagctaccaaagctaaaactgagaacaacaagaatattaaagttgttggtaataacaaagatgggataaaattgaaaggacattgcttgcttgcaacaaaaactgatgttaatgaattatttgcttccactact

SEQ ID NO: 51395 - DNA, 306 bp, Zea mays
gtcgctgctagcccagtttttgcagctacctgcatctatgatcaaacgacatgaacgctccttaatgacacacttctgttgtaacaatgtatggcgctgattctgctctgccttctccatattgtgcactatagcacaacgcgtgtaccaatgagggctctcataaatgctctgcatcatctgcaccaatctgttcttcgggtgggtacttagtgcctgcatcatcagccgcaagcaaagcaagtgttgcttcatccaaatcactagcagaagaattaccaccatcgtcttttaccaccaaaacac

SEQ ID NO: 51396 - DNA, 326 bp, Zea mays
tatgacaccagaaggtccaacccaaacggcgtttgctgaattcaaaattattgcagagcacattggcactagggatttggtgcaggaatttctagctttcaaagtatttcccactatgaaggaatgggctatgccgaagcttaaaggagaaaagaaagagggggagcttgtctgactaccctatcattataaattcaagaaatattttaaggcaccctgccaagaatggctcgagacaatcgaaataatgagtactgaaattctgggaaattagtctaaaaaagaggaccaattgatgacagcagccttcggcacccggccgaaac

SEQ ID NO: 51397 - DNA, 320 bp, Zea mays
ctgatgaataccaaacactctggtcacttcatcataacgaatgttccaactccgagatgtcttgcttctaccacattaatggatttccgaaatttgcatatctttgcagcattgatcggatcgacaaaaccctcgggctgtatcatatacatgtgctcatctaaggttccattatagaatgctgttgtgacatccatctgccaaatctcataatcgaaatatgcggccatggctagaatgatcacgaatacgatttaatcatcgctactggcgagaacgactcgtcatagacaactccttgaacttgtcgaaaacccttt

SEQ ID NO: 51398 - DNA, 434 bp, Zea mays
  unsure (1)..(434): unsure at all n locations
cttcggcatggnccactctttcataattttatttatcttgaaagctaagaactcttgcactaagtccctagtgccaatatgctccgcaataactctaaattcagctagagaaaattgggttggaccctctggcgtcatgttgcatggnggtctggtctctccgaaaatcaactctaacggactctgcactagcttctccttttcttcgacaactttgacgtagaaccattcaaatttccagccagctggccacttgcttcggtaactgatcactggaaattttgtattcttgtggtaggcaaaattgtaacagccgaagttttcatgtaccccatctcctctacccttggtctgataatgaagctcgcgcactcgacagacaccttcagcaaatggttccaccccttggctttggagagcccaaatataaacgc

SEQ ID NO: 51399 - DNA, 427 bp, Zea mays
gagagcacattatatgactaaccaaagtgcattttttgaatgacaagacacgtcgcgcatgccatgcggtgaagcaagcttggactcatcatccacacaagaacataatgtcgactgacaggccactggagctcctacacatggatctattctgtccgatcgcttacataagcaatcgcgggagtaagtactgcctatttattgtggatgattatacccgcttcacttgggtattctttttacaggaaaaatctcaaacccaagaaactttaaaaagattcttgagacgggctcaaaatgagttcggcttatggatcaagaaaattagaaactactatgggacggaagttaagaactctcatattgaaagcttccttgacgaggagggcatcaagcatgagttctcttctccctcacgccacaacaa

SEQ ID NO: 51400 - DNA, 380 bp, Zea mays
ttgtcactcaactgatgaaacgtgtcgtctggtggatgggtctgacaccgtctgccaactgatggaacaaggcgcattatatgcccagagggcacgtctcccgtcagcgtggtggcacgcggcgcgtcttctccgtaataaatgcaaaggctgcatggctggatggaccttgcatcacgctcggactgctggcttatgtcacgggccacactccatgcggcagcagcaggccttcgcctgagcgaaaagcgtagagtaaggactgtacacgcgccgacaccggacccttacccatgccggggtactccttgtcccgggatcgtgacgagacccggaccttactgatgggagccttgagcttgcttgagggacccaacatg

SEQ ID NO: 51401 - DNA, 371 bp, Zea mays
agacaaaccttgtttgtcctagctgttaagcacgggacgaggtcagatctatcaatatctactaagaattgctgaccctaccacatatcctataatgctattggatcatcacttcttctacaaacagtgacacctacatcagtggataaacagttgtggcccattttgcattattgatatacagaaagcacattgttatcttatgaatctgccagataaacatcggaaatggaatggtcacgagatattacaattttacccaaacccttgaccactccttgtgtttcatacacgaacgtgatagctcgctggggatcctggtttttctcatatgaagagaacatattcttatgcctgtcatgtggttgtgc

SEQ ID NO: 51402 - DNA, 380 bp, Zea mays
ctaccgggggcggatcgtccagcatgacacacgacacgagggacggcgttcctccagtcgcatcgctttccaacacgccaacgtatccctgtccatctgcaatgggccgcacgtaataattaattggtgaaaccatggtttaaaatatggattttctagatgtactctcaaatatattttgtcctaaaatatcataatatgctcaaaaaccacatttgtgtcttagaactaaaaaaaatattgttatcaacccgcactataaacgtgtatatagatatatgtcctctctggttgagttttctgaccatcttttgtttttataagggttagagttttctgaccatatttttatttttataagggttaaattgacaactcta

SEQ ID NO: 51403 - DNA, 441 bp, Zea mays
  unsure (1)..(441): unsure at all n locations
tctccaaagnttgaggaggcttcctggcgaagtactgagctttctgacctggccgaagccccttgatcatggcctcgatgacaatttcattgggcaccgttggtgcctgtgccctcatacgcaataaccttcggacatatgcctgaaagtattcttcgtggtcctgattgcactggaacatatcctgagcagtgaccggcttaatctgaaatccttgaaaactggttaacaacaaatccttcaacttctgccatgaagtgatcgttcctggtcgaatggaggaataccatgtttgagcaacacttctatcagccataacaaaagatttggccatgactgaagcattgccaccatacgaagacactgttgcttgtagctcatcaaatactgcttcgggtctgagtggccatcgtatacagggagctgatgcggcttgtatga

SEQ ID NO: 51404 - DNA, 438 bp, Zea mays
  unsure (1)..(438): unsure at all n locations
aacttatcccaatcatctcttataagncattcaatgatttctaggcgcttgcacacaacagataccatttataatgtcttgatctttgcgtcgcaatgctgttgaaagggtgtttgtgattgctgatacatttagcatcagatgccaatagaagacaaaagcaaaagactgaaagtattccaccctgaattcattaaaccattcaggattaaatcctctattttccccaccaattttagtgctaggaaaatcatgagtgcggggttgacaaggcccattttccaagtattttcttcttaccacatctctgatattgggatggtacttactaatttcttttcttttgcctgngtcaaattcaatcttattctcatccgcccaaatgatgcattgttgatcgttgctggcaccatctggcgttttttttctgaaatacct

SEQ ID NO: 51405 - DNA, 455 bp, Zea mays
  unsure (1)..(455): unsure at all n locations
tcgtgacaaccagttatatgcgaagttctcgaagggggatgtttggttgaaggaagtngctctcttagggcatatcgttactgatggtggaattaaagtagacccaggaaagataagtgagatactaaattggaagcaaccaaaggatgcgtccaagatcagaagttttcttggattggcaggatactatagaagatttattgaaggtttttccaagttagtgaaacctcttacctctctactggagaaaggtaaagagttcaggtgggatgaagcttgccataattgttttgaagaactcaagaaaaggttaacctctgcaccaatattggtaatgccagacattcacaagggatgtgatgtgtattgcgatgcatcacaccttggacttggatgtgtgctaatgcaagaaggaaaagtgatagcttatgcctcaaggcagttgagaaagcatg

SEQ ID NO: 51406 - DNA, 462 bp, Zea mays
tattgtctatctctgtggactccattctccttcaatgagacttctacatgtaagtgacttgaaaacatgcattagtgtcaaagactttagaatatatagtaacctccccctgataagtgtgcatacaggttttgaatacttgtagtagacatgcacattgatgtgatatcaagaggggcaaattatgtataatgcgaggtttggcacatatcagttatatgataccaattgtgatattctaccactttgtactatatcaattgtagtatatgtcatatggaaataccaattgatgtatcattctcttatgaatgatgaataaactatgtgccgtgcttaattaaacattgtaaaccatgtatgtttgctcaagaatacgaattgaaaatgagcaatcctaccatatgaatgacctagtatgcatgcatgtttaatcaaaagtaaataccaaatgaagcacta

SEQ ID NO: 51407 - DNA, 436 bp, Zea mays
  unsure (1)..(436): unsure at all n locations
gcttatgaagattcttcatcccaactttttctattctgcggngccagagccaacccatgttagtcttagcaattaagcaagtgtcgagttcagctctatcaaaatctaccaagtatagctgaccttccaacactcccttaaatgttattgaatcatcacttcttctaaagacagtgacacctatatcagtgaatagacagttgtaacccattttgcataattgagatacagaaagcaaattgtaatctaatgaatctacaagaaaaacattggaaatagaatggtcaggagatatagcaattttacccaatcctttgaccaaaccttggtttccatccccgaatgtgatcgctcgttgggtatcttggtttttctcgtaagaggagaacattttcttctccccagtcatgtggtttgtgcacccgctatcgatgat

SEQ ID NO: 51408 - DNA, 404 bp, Zea mays
  unsure (1)..(404): unsure at all n locations
ngaaacataaacttatgttccgttttcctcacaaatgttattacaccatgtataacaagggcttgagtataacagtggcaaactcctattttttagatggcagcaagagcacgccgcgggcaaaatgagcaagttcccccgccaccaccccatgcttcgacaatgcaggaattaatggctcagcagaatgaaattttgtgatagttggtgcagcgccagctctagccccagcatttcggtggcgggcaacaaaagtgcccgctagcagcagccacataccatgagtttctgagcactcaactgacgttgttcacaaaggctaatgacctgctagacgccgatgtgtggctcaaggttgtggagtctaagtttccccttctcacgggagcttgccctgatgatgc

SEQ ID NO: 51409 - DNA, 435 bp, Zea mays
tctaaaaggagatcatgtgttatgactaaccaatgtctgttttgagaaagacagaccttatgcagcatgtcaggcatggaattatgtgggaagcaatcatcacggcaagaatgtgatgacaacatcaagaccactagagcttcttcacatggacctcttcaggacccgttgcctacctaagcatcgggggaagtaagtatggtcttgtagttgttgatgactattcccgcttcacttgggtattctttctgcaggataagtcagaaacccaagggactctaaagcgctttttaaagagagctcaaaatgagtgtgagcttaaggtgaagaagataaggagcgacaatgggtccgagttcaagaatctacaagttgaagaagttctcgaggaggaatgcatcaagcacgagttctctgctcccacacaccacaaca

SEQ ID NO: 51410 - DNA, 444 bp, Zea mays
tctgtgcagcaacatagctcttttatgccgacagcttcatttgcagatacgccagtggcctcagatgaagatacggggaccaacccacgaagatctactgtctattttgtggcgaagacaacggccatactactagaatgtgccaaatcactatccataagcacaaggagatctcataagccgaagcccggcaaattcaaccgatacaggtcctacacactgcttcgtgtcattcaccctacataccagaatatgtgggtaatcatcctgtagcttttgttgcttcagctaatcaaccacacgcttcttggccacatcttccacctgcaccgtcactacaacctgcctattcactacgtcatgagccataatggagccatcagactcatcagcagtgagatctcatggaggaatccgaaactcgcacagtcaacagtacttgtg

SEQ ID NO: 51411 - DNA, 388 bp, Zea mays
gaaaaagatagaccttgtgcagcttgtcaagcaggtaaacaagtgggaggagcgcatcacaacaagaatgtgatgaccacttcaagacccctggagctgctacatatggacctcttcggacctgtcgcctatctgagcataagagggagtaagtatggtttagttattgttgatgacttttcccgcttcacttgggtattctttttgcaggataagtctgaaacccaagggaccctcaagcgcttcctcaggagagctcaaaatgagtttgagctcaaggtgaagaagataaagagcgacaacgggtccgaattcaagaaccttcaagtggaggaatttcttgaggaggaagggatcaagcacgagttcttcgctccctacacaccac

SEQ ID NO: 51412 - DNA, 445 bp, Zea mays
  unsure (1)..(445): unsure at all n locations
ctcattactctcttgtagatctattgttcagatcttgaatgttgaattctaccccaactccagcgacccggcggttacgacgcggatctgaattatgcaatgccaaatttcttcccctgttcttgactgaaaagttgtcattgctaagagtcggcatcttgttggagatgtgacgagtaatatttttgaagaagtcaacacgcacagagatttcagatgtatccccaattcctccacactgatcctgattttgctgtatagattatgtatgagtattgtgtccagttgcagactcctgatactcctacatgatacctttgttgtttccttccttctttctgtaatagactatcagaggacgttcagattgtgggaaatgaattaaaagagggcagaactgggccaactccaacgggccattgtgaattngtggcgatgctgttca

SEQ ID NO: 51413 - DNA, 424 bp, Zea mays
  unsure (1)..(424): unsure at all n locations
agctntgtctttgtcgcctaatgcatgctcttacgangtggacatggctgccctagggtgagggagccttggccgggacggagattctcccgagcttacgtcccgcccgagacaggcctcgggcgaggcggagttttgggaagacccctgagggggacctcgagcgaggcagagttttggttccttgttctcggaggaagtaccttgatggagtccttatgatttcaggcgcattttaggggcataatctgggtacccgtaattatcatacccgacaggagcccccgagccttccaaagaaatgttttgacacttgtttcaaggttcttctgttctttgtgcgggtacgctatcttttcctaaggagtggaagattttgtttccgacgggtgcgcgcgagcgcgcccgtcgggtgtatccctcg

SEQ ID NO: 51414 - DNA, 462 bp, Zea mays
  unsure (1)..(462): unsure at all n locations
acacttataatactaagcttatgattatgaaccttcggccatcttattcacacagcttcagccgaaagccgcttcttcctatgagaccttcggcgacgaagcatagacccaacatggtccatcgcctcgacactcttcaaagccagttgttcgtttgaacgacaatacatggcctgatggtgttgcaacacggcccatacgtcgcgctcacgatgaatgaaaatcgacttggtcgcggacttcgcataagcccctgtaaaggagaagagccacatcatcacaccactcagcggaagggatctctagcgctaaggaatgattcccttacccgatctattgttcggaattctgaccacatctacttctcctttgcgtcatcgaggacgaagtaagggttgccctcagtgccatctatgtcacggtcggnccttcccacgtcgagaggtatagtccagcgcgaac

SEQ ID NO: 51415 - DNA, 455 bp, Zea mays
accggaacttaagtcacctgcagctgcaagctatcaaagaaatttatttctatttattgagctcatgcctaagtctggtaaaagattgttcatcaagtggcttggttaaaatatcggctaattgatctttagtattaatgtaagaaatctcgatatcccccttttgttggtgatccctaagaaaatgataccgaatggctatgtgcttagtgcggctatgctcgacgggattgtcggccattttgattgcactctcattatcacatagcaaagggactttggttaatttgtaaccgtagtcccgcagggtttgcctcatccaaagcaattgcgcgcaacaatgtcctgcggcaatgtactcggcttcggcggtggaaagagcgaccgaattttgcttctttgaagcccaagacaccaaggatcttcccaagaactggcaagtccctgatgtgctc

SEQ ID NO: 51416 - DNA, 330 bp, Zea mays
agaacacgtgatatgttagactaacgcgcatttctatcaagatataccctgtgcaccttgtctagcaagtaaacataggggaggagcacatcacactcagaatgcgatgaccacttcattacccatgcagctgttgtatatggaccctttccgacctgccgacgttttgaccatacgacgcagtcaggccggtctacttattgataatagacctttgccgctacacttgcgttgtcctcttggaaagacaagaatccgatccttaggaccctcatcggaccggtcacctaacctcacagagaatgccccctcccgcgctaactattgtat

SEQ ID NO: 51417 - DNA, 209 bp, Zea mays
ccgacgacccgacgcctcccagaaagcaagatggccccaagggaggaggtttccagcagtgacgacggtacgtacatggacaggggatagaaggcgacacaggcttctccgcaacgcgcaacatccacccacaagagccgcggggggagagcctggcctgaccatcaacaaagcgcacgaattggggagaacccaacaccaacgagaaa

SEQ ID NO: 51418 - DNA, 197 bp, Zea mays
tgcaagcttgagaatgttctctctccccacatgttcttatctgttatttgcacaccagtccatgcgcgccttatggattgaccaagcatagagaccggcctcttcttttgtaaaaccaactaaatagagattggcgtctaatacacccttaaaagatggtgaacggtcaattgttctaaagacacacacaactacgg

SEQ ID NO: 51419 - DNA, 335 bp, Zea mays
acacttaaactaactgttcgcgagagctttgatttcaagaaatttcttcgttggctaaatctacagtccatcctgctcttaaaaacacaattccctggactgaaaaggcaaaatttcaccgccgtaaaacttctaaaaggttcgttcccgtgatcatcatggactttagatcgctatacaagtgcctatttgaatgcccatatgggaaactggtttacttttgtaacatgccaagaatttcattcatctctctttgagaacaaaatacacactgtttttccaatgattttacagtatcactatcgtgtcggccagcttccgcaattgcacatttt

SEQ ID NO: 51420 - DNA, 428 bp, Zea mays
  unsure (1)..(428): unsure at all n locations
gggagagcacattntgggacttacttatgttcattttgagaaagacagagtttgtagcgcatgtcaagcagggaagcaagttggtgttcatcatccacacaagaacatcatgacgaccgacaggccgcttgagctactccacatggatctattcggcccgatcacttacataagcatcggcgggagtaagtattgtcttgtaattgtggatgactattctcgcttcacttgggtgttctttttgcaggataaatcttaaacctaagagaccttaaagggattcttgagatgggctcaaaatgagttcggtttaaggatcaaaaagattagaagcgacaatggaacagagttcaagaactctcaaatagaacgctctcttgaggaggagggcatcaagcatgagttctcctctccctacacaccacaac

SEQ ID NO: 51421 - DNA, 452 bp, Zea mays
tgtgacatacgtgaattcccatgtgatagaagcggcactcttttcaatgcattgatcggtcgtccacgggtgcatgaaaataatgttgttccatctactctccatcaatgtattaaatacatagattcctcttgggacatagcgcgaatttttgcggacaaaaagccattcacattggcagatactttctatgctgatgccaaattctattttgagccagttgataagttctcataaccgaaaacaatatcatgatcagttcaagacttgcctgatacggacactgggaaagcttttgttaatgaaaggagatatcagtgcataccaagtgatcaaagaagaaaatgagagccaatatttcgtgttataaatgaagcacacaattataaatgtaccacattctcaacacctttacctctttggtcaatatataataatcaagcgaaattgag

SEQ ID NO: 51422 - DNA, 377 bp, Zea mays
  unsure (1)..(377): unsure at all n locations
agcttgttagctagtaaagatctgttctngtatcagnggaacagagnggcaaattatattatgtccactctagaataatccacacatagaggtcatgagaaagattctatctattaattgttttgatctaccacattatctgttcaagagattatcttcaccgtgctaacatgacaacttaacttttatcctatacttgtatgtggtaaggggaaaaccaggtcattaaacaatgacatgtagaaattattataaatacactttagaagataatttggcctctccaataaccttacaattaagagtatcattattcctaattcatttcaggaatcatcaggagggcgaggagtccacctgaacatctncactatctt

SEQ ID NO: 51423 - DNA, 383 bp, Zea mays
  unsure (1)..(383): unsure at all n locations
cgctgcacttacctctgagtgcgaatcttttccatataataacaaaggagcccctggcattggtggagtcaatgttgttagatctatcaaatactgtttcagctcttcaaaagccttctgctggattggtccccattgaaagacttcggctgacttcatcacttcgaagaatggtaagtttctctctgctgatctggatatgaatctattgagaaatgccaatcttcctgtcaatctttgagcccccttctttgtagttggtggctccatccgaagtatagcttcaattntacttggattagcttcaattccctctgttgaaaccaagcatccaagaaattttcccttctttactccgaagacgcatttttctggattaactt

SEQ ID NO: 51424 - DNA, 444 bp, Zea mays
  unsure (1)..(444): unsure at all n locations
agctttcctctctagccacttggcttattttttctaactcctaatcaagttttgtggattaagtttcaagtttttacaggatcacctattcacccccctctaggtgctctcaattggtatcagagccgttctcttcaagaaagggactaatcgcccgaagagatggatcctaagggcaaggggattgtgatcaatgataaggagaaggagtccttcgtcaacgagcctaaagatgacaagcctaccaactcgggctcgggcaacaaacganaagatgagaagaagaagaagacaaggcgcatcaaggagatcgtctactacgacgacagcgacgagtcctcttcttcccaaaaggatgacgacaacaactacgagaaaaagaagacggttaactcaaacttctctttcgattattctcgtattccgcatagctcaaatgcacat

SEQ ID NO: 51425 - DNA, 448 bp, Zea mays
  unsure (1)..(448): unsure at all n locations
ntacttagtgtgatttgcaaaagaagatgccggtctagattctttcttaattgctaagactagcatgggctggctgtggcatcgccgcttatcacatgtggggatgaagaaccttcacaagcttctaaagggagaacacgtgatatgtttgactaacgtacaattcgaaaaatatagaccttgtgcagcttgtcatgcatgtaaacatgtgggaggagcgcatcacagcatgaatgtgatgaccacatcaagacccctggaactgctacatatggacctcttcggacccgtcgcctatctaagcataagaggaagtaagtatggtttattattgttgatgacttttcccgcttcacttgggtgttctttctgcacgataagtctgaaacccaagggaccctctagcgctttctaatgagaagctcaaatgagtttgagctcaaagtga

SEQ ID NO: 51426 - DNA, 267 bp, Zea mays
  unsure (1)..(267): unsure at all n locations
agcttgtcctggacacatgtatctgtatgatttctaaccccgcatgatgttctgcactggcaacatgtttttttttatttaaagaaaaaaaggacgggcgatttggaccatcgattcgcgacgacgtgatgccgcccgtgatgcatgatggcccgatgggcgctggctcgcgcccatgccgccgctacgtcctcggacatgctattgctgccgacgcggnctcctccgcaccgcgcaactcgcacgcacaaaattcgcggggggagt

SEQ ID NO: 51427 - DNA, 451 bp, Zea mays
ctaagcttaccaagagtaattagaattgtgaattgtgaatttcattctctaaatgaaaacaaaaacagaaaataagaatagaaaaaaagaaattggaaacagaaaaaataagagaaaaagaaaaatcgtcgtctgggccgaatctcccctgcgctggcccattgtcgcacggtccaacacccccatccgcacactctctggctggaaaatgcattgagtcgctgactggtgggcccctttcgtcaggatattcttctccacagcatctgacgcagcggattcctctgcggtccgtgtcgtcgggatcctccgaagagttcggatctcgccagctctcccgtttttctcgcgtggtcaacgttcccgtcgggctcgcaacgtgacccgcgccgcactattcctcttccccttctcaaccggagctaactcaatggatctttcgtgcgggcgc

SEQ ID NO: 51428 - DNA, 453 bp, Zea mays
tgcgctgcacgccgatactatgcagatctcggatgtcagtttgtctttatgattgctccagcagcaaacattagtagctccaagtactacattcgttgtgttcctgggcccacatgttggggctcagtaccattgtacgtgccccccttatttaaaaaaggggaggcatgcaacgttacgatgggagagctttacacacactcagactctcagctctcaagcttccacagcaatccaacacatagtggagtagggtattacgctccggcggcccgaaccactctaaatcctcgcgtgttcatgtgctcggtgatcgcttaacaagacacgcaaaatgcttatgccccttcctcatcttatgatttaaggtgggtgcactccgccacccggccggagaatacctctccacagataccaatgagaatataattaagattatttgaaatttgaaat

SEQ ID NO: 51429 - DNA, 438 bp, Zea mays
  unsure (1)..(438): unsure at all n locations
agcttctaaagggagagcacattntatgattaacaaatgttcattntgagaaagacaggatttgtagcgcatgccacgcagggaagcaagttggagcccatcattcacacaagaacatcatgacgaccgacaggccgcttgagctactccacatggatctattcggcccgattgcttacataagcatcggcgggagtaagtattgtcttgtaatagtggatgactattctcgcttcacttgggtattctttttacaggaaaaatctcaaacccaagagactttaaaggggttcttgagacgggctcaaaatgagttcggcttaaggatcaagaaaataaggagcgacaacgggacggagttcaagaactctcagattgaaggcttccttgaggaggagggcaccaagcatgagttctcctctccctacacccctcaac

SEQ ID NO: 51430 - DNA, 454 bp, Zea mays
tactaagctttaggatactattcaactaaagtaagaagaagttgatctgttgccaatgtatgaaaacttcctctccttcagttgttttagtattctatccttagtgggatgtaccatagtataggttaaattccttgcaatataaaatgttcaatagtgcatataattctgacatcaactatatgtgtgcactaatttaaaggaatttaatctatccttttgggtttcaataatgatgattcatttgccatccacatataaggatcatcatttgtgaaaccctctcttgtgtttctaatgctctcttttctaaatgtttcaataaggtccttccaagcgctttcaagatggattcaaaatctatggatataagagtcttggttgtttcaatcattgagttttaattgatcgaatcaagaaaagatgaaagaagttcaagatcacttggttggat

SEQ ID NO: 51431 - DNA, 377 bp, Zea mays
atgccacagctagcccatgctagtcttagcaattaggcatgcatctagaccggcctcctcttttgcaaaatcgactaaataaagtttgctgtctagtacacccttaaaagctaatgaaccatcacttcttctaaagacagacacatctacatttgtgaataaacagttataacccatattacacagttgactcacagacaacaagttatatccaagcgactcaactaagaacacattagaaatagagtgctcggatgaaatagcaatttttcctaaccctttcaccttgccttggttcccatcaccgaatatgattgaatcttgaggatccttgttcttgacataagaagagaacatcctcttttcccccgtcatgt

SEQ ID NO: 51432 - DNA, 316 bp, Zea mays
  unsure (1)..(316): unsure at all n locations
tcacaaggtaatgcttattgtatgtaaattcgaaggggcctcgaagtgcgatgaagcctttgaataattgaagacattattaaccattgctctggtattggctcatgcggacatcaccaagcctttcgatgtatattgtgatgcatcangcagtggactctgctgcgtgctaatgcaagaaagccgaataattgcatatgcttcaaggcaattgcgccgacatgaggagcattacccaactcatgatctatagccagctgctgtggttcatgccctgaaaatttggcatcactatctgctgggaaatatctatcac

SEQ ID NO: 51433 - DNA, 437 bp, Zea mays
  unsure (1)..(437): unsure at all n locations
agcttgcgctaacccaccgtgagatacttttanttttcagggatggcgctcgaggagatcgtgaatcatcccttcatccaggaagaccacatgttccaaaagaccatggacatctgcatccagcgcctccgcaagtgctactgtgggctgacgccgcaccacgtcgtctccaagttcgacgacagaacgtgcacgctctactacaatgtcgccgagcccgaggacgtgaactgcagcgccgcctgatgtaatatgatgtgagggggagggggagccaccccagcatgtactaatcctaattttgctgcccagaagtctcatgatgcagcagtgttaggcgtgcgattactgagagtgaaatactagtggcagactgcccgaggcaatagagttgcccagcctgtacatatacgtgtagggcatatgataaccacaga

SEQ ID NO: 51434 - DNA, 369 bp, Zea mays
  unsure (1)..(369): unsure at all n locations
ctctgttggggtaactctaccgatagtcttgtgccttctccgtacgtaagtgttgttacgattgtggcctctcttggatactatttatcatcttcactatcgagcttctgatcaaaacataccaagccctgctccctccaatatttggtgatagctactgagccacaccacaaatgtagttggtgtgatcttgcatgattacaatcccctatgtctaaataatacaatgatgcaagcaccaacgggtaagaggtgtctattcatattacattanggttaaacatatagaaaacattatatgcatcggactgactaacttaagtgcttcacaaagcacctacattaatcactgagtaattatatgaacac

SEQ ID NO: 51435 - DNA, 438 bp, Zea mays
agcttcagctccatctatgttatgtattgtcttttaatctatccaaataccttcagcccttctggcagcttcttgactcccatggacagcaatgggcccttgttccgaaggtatcttcatgcataaatatgctggatgaagtattgcttcaaaggcattaaatgtccctcgaccaatgattgcattataggggtactccatgtcgacaatgtcaaagacgacctgttcggttcttgtgttgtggacgtagccaaaggtaacagacattgtgattttaccaagtgcgacaatctgccttcctccgaagccacaaagaggatgtgtagcatcatgaatcttgtcctctggctcttgcatctgtctaaaggccttagcaaatatgatatacgctgcactgcctttgtcaaccaaaacattatggaccagaaataccttgat

SEQ ID NO: 51436 - DNA, 415 bp, Zea mays
  unsure (1)..(415): unsure at all n locations
gacacttaaatactcagctctaatgattgctcttcattgacaaatgttaatgataacttattgttaaacagtctcagaggtaggatatatcttantagatgtgcttcgattctggcacaatactgttgactatgcgagcttctgactgctccctgaaatctcgctgctagtgagtgtgctggctcccttctggctactggccttggggataaacaggttgcattggtggtggaggtggaggctgttgccaaaatacctgatgttggcttgccgaaacaacataaactgcaggatggttacccacatactctgtaatgtacggtgagtggtacgaaacaatatgcataacctgctttatctggctctgttgggctgcagcttctgctatctatttctgtttctggatggggacatg

SEQ ID NO: 51437 - DNA, 446 bp, Zea mays
  unsure (1)..(446): unsure at all n locations
aaacgatctagcgccgcgaaaggggctactgttgggtccatgcttcngtgcgccgaaggtcttgcgtgaagaagcaacttcggctgaaatcgtccccaggaaatggccgaaggttcctttttatagagcttcggcggtgcaaaccgacataaagatagaatgacctttttatccatagaggtctaaaataatgttgtaaactttcgtaaagggcataattgtaattcgtcacaggctgcgtcctgtgtctataaatagatgaacagtacccccgtactgttcacacgctgacttggcatttgcttttgcgtcacacttgtacttnttaccttctctcaggaccgaaggtacatnttgtaatttgaaatcatttctattcttccatgttaataaaatagaaatgattctatgatgatgcttatattatnattcatgctttatatgag

SEQ ID NO: 51438 - DNA, 475 bp, Zea mays
  unsure (1)..(475): unsure at all n locations
gtcctagcttgagatgattgtctgaatgaatcatttatttcttttgataattcaatgtcctacanaaccagacagatgtttaaaggatactgaatctatacaaaagaaatgttgatatttcagatgcacctaacgatacaactgtacaggttcgcaaaataagataagactaaaaatgtattcatagtaataacagctaacgctaccttgaacattccctccagcttgttggtaaactgacttccacactcagttntgagctacaaacagaagcatgttgggcatgttggtaaagttgttcttgtccacatatgccagaacatgtgaaaccaaaaaaaaaaaaaaaaactaatgctaataaagatattttactttngtgatcatcgatttttcagcatctattgatgcactctttccaagcagcaacctcttagctagatccttcttgtagaatgcctcanatacatctttaccc

SEQ ID NO: 51439 - DNA, 403 bp, Zea mays
  unsure (1)..(403): unsure at all n locations
agcttatggtaattcgagccactgacactttttatatctttaggaataattcccgtcgcacaatcgtgcgtgtcgtcatgcatagatgtacttcttttcacggtttgagcgtttagatatagaccataaaatgacgaatcgtttcacgtagctagcaacgtgagagctggcgaacgcgtcagttagcaggccgggaacaagatcgcctctcaattctctccttggtctttacccattatatatacagagagagatgtacgagtattatgctagacgcatgcgtacgtactttcctccagcgcatactanagtttgaaaagccccgaccccgacaatgggccggttggaaaaaacatcatatatgatgagctatggtactcaggacacggagaactgttcaacc

SEQ ID NO: 51440 - DNA, 302 bp, Zea mays
aaccgcgataaaaccaccccctcaatcctactttgaacgacaacaaccactcatctatgcgtgcctggacaactgactggtaccaccgttgcatcaacttacatatcctggacatataaattacccttaacgtgtaaaactctaactacgacgacctcatcacataaacgccagtagcacacttttaccctgaccagccctggatcaagcctaaatttaccctcgaccatcaggcataacaccaacggcatgcacatacaatgactaagacaggagtaccgctgcataaacaatcagtaaag

SEQ ID NO: 51441 - DNA, 373 bp, Zea mays
  unsure (1)..(373): unsure at all n locations
gatagggatggcaattttacccgcgggttcgggtacgaatttgtatccgtgggtcttgcccgtgcccgacccgtgataaaatcgggtcgggtaccgatatttttcgtcgtccgcgggttacccatggatatccgtaaaaactaaaaaactagtgagcatgtattatgaagactngaagtgtttccatattatgttctgcatgattgtgttgacgcataattcatgaagacttgtttgaagtgttccctgtatgcataagttntctagaaattttggtggttatgattatattntctagaattntctggattggtatatatatatatatatacacccgcgggtaaccgatatccaacgggtatgggcatgagta

SEQ ID NO: 51442 - DNA, 158 bp, Zea mays
ctcagcttcacgaagaatgttccatctggcagtgcttatgtgccacatagttcttctagggaaaagaaggatcatgggaactgataacatcaacgatgaagaagactaccactagcttgaatataaacattcattcacagtacatggtgacacaagta

SEQ ID NO: 51443 - DNA, 367 bp, Zea mays
agcttgtgaaggttcttcatccccacatgtgctaagcggcgatgccacagccagcccatgcaagtcttagccattaagcatgcatctagaccggcctcttcttttgcaaaatcaactaaataaagtttgccgtctaatacacccttaaaagctagtgaaccatcacttcttctaaagacagacacatctacatttgtaaataaacaattatatcccatttgacataattgactgacagatagcaaattatatccaagactctccactaagaatacatttgatatagaatgctcattagaaaatgcaattttacctaagccctttatcttgccttgattcccatcaccgaatataattgaatcttggg

SEQ ID NO: 51444 - DNA, 155 bp, Zea mays
ccccccccccccggtcccctcccccccccccggggttgtgctctcgccataaacaggcgacacagtaggcgaactctcacacacccccgcagggagcggcaccctcgccaagccgggaaacctcgcgacccccgaagcgagcacggaggaccggg

SEQ ID NO: 51445 - DNA, 413 bp, Zea mays
agcttcatgagataatacgaccatattctgttcatctgtgtcttcaaaagcgtcctcacgttcacgagattcacgacgcaccaactcccatagttcttggatagcatgtaactggacagagtcggcacatttatgtcccttttcccacttttcagcacaatactgacagagaccacgagcgcgacgataagcgcgtagcgacgccaccttgctatctgaagaagaccacggatgtgtgactcccaatttgtgaggagctgattcagcggtctggtggcgatcacatcaagtccgagtagttgaagactgcttcacataatgcttcgttgggcttggaccgtcagaaacactgtattcacggcgtcgtgaacagtccgcctctctctgcaacaatgcgacagcacaaacagtat

SEQ ID NO: 51446 - DNA, 183 bp, Zea mays
atgacgccgaacaacctttatcgtttataccaggaccaccgcgctgggcgacaaagtgtggacaatggcatcacaactgagtggaacctgtccaaagcagaataaaacaaggcacacaaggaaaggaacgcctcgcctacaacacatttcctagacaaagactgtaaccaagcatgaaacaac

SEQ ID NO: 51447 - DNA, 189 bp, Zea mays
cacaccacagccccaaagaccacaagcgcgaaaggccaacaaccccccagtgcccccaataaaaaaaccccccccaatgtcaaaaaaagcccccaaaccgcggaccactaacccgcaaacccaccacagataatggccaaaccccctccccgcggacaaaaaaaaaacaaaaccccccctcccgccagc

SEQ ID NO: 51448 - DNA, 455 bp, Zea mays
catgtatttgttcttgacatccctcttcttcttaagtggaggagaatcatggaacaccttgcgcttacctttctcaattgagccggggtcaggtgtactgttttcaccgccacctacaatttcttcttcgtgaccatcagaagatgaattagcattctccactccaggaacaagggttgtctcattggtgcacacaatggggccaaacataatcttaagatcgtcctcattctcaagcagggcttatttaaattggatacaccctggcattgcctgcattaaatggaatttgctactttcagatgccgatcattattcctaatctaaaaaacagtctacttacttcattttgcttagcccaccactcatctggtgcactgattgaaccagtatgagggtctcgaccaagacctgtagccctctcattcagtgtttccattgcgtgacattctctt

SEQ ID NO: 51449 - DNA, 359 bp, Zea mays
  unsure (1)..(359): unsure at all n locations
tctccacaacttggaggcacttgcccgctctacaattatcaatgagaactttgctccaagactcaagatcacaacacattctgcttgcatctcaaatacaagtgctctatcacttatcactcanatggatgctctatctaagaacactacacaatttgtccagaaatctgcctagaaactatgtgcaccaaacctctcactgtagctggtccggtgcattagacctctgattctgctctgccatataagtgatcattgagtaaaggtgttagctcggcagtgtgtattggatctggtccagtgcacctgaacctaccacgttagagccaccttagccaacccgtggatcttcccttccg

SEQ ID NO: 51450 - DNA, 477 bp, Zea mays
  unsure (1)..(477): unsure at all n locations
taatgatgaactggctagtcttaatgctcaacttaagactatcaagaatgatttcgataagctaaaatctgcaagggatgcctacacaattggtagacacccctcaattaaagatggacttggcttcaagagagaagctaagaacttaacaagccataaggctcccattcccgccaaggagaaagggaaggcccctatggctactagtgctaaaaggaaccatgcatttttgtatcatgatagaagacaaactanaaatgtaagtcatgatgcttatgattcatatgtttatgattctcatgccatgtttgctcctagttcctcttatgtgtatgatagaaatgttactangagaaatgttgttcctaaaagaaatgctattcatcatgtgcctagaaggaatgttattcatgctcctacgaaaatagcacatgaaccttctacaatntattgtgctttgaatgcttcatttgcaat

SEQ ID NO: 51451 - DNA, 257 bp, Zea mays
cccaagtcctacagtgatgaatataagcgcaattgttattcctgtggagttatacatttgtgtattgataagaccattcacaatttcttgaatcggttctttagaaggagtgtcttaaacaaaaacctaattcaagaccgtttatcggaccaaatggccttaaccaatacccttttttaaacggtatataaataaaaattggcttatataatatcttttaagccggttttaaacatctaaatggggacatctttaca

SEQ ID NO: 51452 - DNA, 355 bp, Zea mays
gcttcggcatagtgacatgtctcatgacgaatgagtgaaccgacttaaagatgaaatgacctatagacccatgatagttcgtgtcatgattgtaatcgattgtaaagggcataaatgtaatttcacacaggctgcgccctgtgcctataaatagatgaacagtaccaccgtactgttcacgcaatcttgtaatcacttgcacgcgacatttggattattgccttttgtcaagacaaaggtataaatgtgattaaatgttatgttttaatattcaagtttgtataatgaaatatatgaataagtttatgtgtctagatatattattcctccatgtttatatttaatattcatcttt

SEQ ID NO: 51453 - DNA, 395 bp, Zea mays
  unsure (1)..(395): unsure at all n locations
ctatattatggattgctctngagtctatccttttttcttttttccttctggcagcttcttgacttccatgaatagcaatgggcccttggtccgaaggtattttcatgcaaagataagctggatgcagaattgcttctaaggcattaagagtaccacgaccaatgattgccttcgaagggtactgcatgtcaacaatatcaaacataacttgctcagctcttgtgttgttgatgaatccgaaagccactgacattgagattntgccgagtgctacaatctgccttcctacgaagccgcagaggggatgtgtagcatcaacaattatatcttcgggctcttgcatctgtctgaaggccttagcaaatatgatatcaactgcactgcctgtgtctacc

SEQ ID NO: 51454 - DNA, 473 bp, Zea mays
  unsure (1)..(473): unsure at all n locations
acattgtgtccctgttgaaagcctatgttattcttaatgtcagggcgtctcccactatagagcatgcttctagcaaatttaaatttttcattttctaagtcaggctcatcaatcttggcactatgttgagctatgtgatcattttgtttcttaattaaagctaggtgatcatgaatagcatcaacattaatgtctctacatctagtgcaaatagtaacatgctcaacggtagatgtagatggtttgcaagaatttaattcaacaatcttagcatgtaatatagctttctcatctctaagattggaaatggaaacattgcaaacatttaattccttagccttagcaattaattnttcattctcatttctaaggctagcaagagaggcattcagtttataaatcttagcaattaaactagcattatcatctctaagattggtaattgaatcatcacatacattttgaactctcac

SEQ ID NO: 51455 - DNA, 470 bp, Zea mays
  unsure (1)..(470): unsure at all n locations
tacttatcatagtagcaacacttaccagcacagcttctgtttatcatacctgctacatggccatttgcgtgctggggactggacatgattggacccttcaagaaagcttaatgaggatacactcacgtgctggttgccattgataatatcactaaatggatagagtgcaaacctattgtttctctgacctcagcttaggcagtagaattcatacaagatataatattcaggtttggaataccaaatatcattataactgacttgggatccaatttcactagctctgaattctttgacttctgcgaacaaagaagcatccagatcaaatatgcgtcagtagcacgctcaagagccaacggtcgggtagaaagggctaatggaatgatattggtngcactcangaagaaggtcttcgactagaatgaatagtttgcacgaaagtggatcagagagttgccgtatgtgggttg

SEQ ID NO: 51456 - DNA, 394 bp, Zea mays
agcttgagaccgacataagccgctaccgattatttatcttgtcggtagcttattctattctaatttcaaggtaaaaacttttcttcgactttttattggtttgaacaacgaaggtgttttctaacgaaggttgcttgtgcacagagtatgctgttgagtaaagctttgagaatgcaacaagatcttgaagataaaaaacatgaagttataattgagggtttagaaagcaaattaaaagatcaagcagctgcccttgaaaagaaggatttcgagcttcaaacaacagaaggtttattggcagatgccgaagctaaaattgcaaagttaaatacggagcttctctcgaagtcagaaagcttcgaacaggagaagcagaagttaaatgccaaattta

SEQ ID NO: 51457 - DNA, 466 bp, Zea mays
  unsure (1)..(466): unsure at all n locations
agcttgtgagcaatacaagtatagaagggatatttctgcttctaccgatcagccgaagcccatgctcttatgtgacgatatagcagagcacaaggtgctattgggatctcaattgtctgaggaacaggagaaaactctgataaggttcctgttccacaacaaagatgtctttgcatggtcagctaatgatctctgcggagtcaacagggatgttattgaacactcgctcaatgttgatccatcctttagacccagaaagcagaggcttcggaaaatgtctgatgacaacgccgaaggtgctcggaatgaagtaaaaagactccttatcgccggagtcatcagagaagtgaagtacccagaatggctagccaacactgttatggttaaaaaggccaatggaaaatggaggatgtgtattgattntaccgatctcaacacggcttgtccgaaggatgagtttccatta

SEQ ID NO: 51458 - DNA, 458 bp, Zea mays
  unsure (1)..(458): unsure at all n locations
tatanaaactcaagttatgaagattcttcatcccaacgtgggctactcggtgatgtcagagccaacccatgttaggcttagcaatcaagcaagtattgagttcagctctattaaaatcaactaagtatagctgaccctctaatactcccttaaatgctactgaatcatcacttcttctaaaggcaggaatacctatatccataaaagacagttgtaacccattttgcataattgagaaacagaaagcaaggtgtaatctaaataatctacaagaaaaacatcggaaatagaatggtcaggtgatatagcaattttaccaagtcctttgaccaaaccttgatttccatccccgaatgtgatagtctttgggaatcatgggtcttctcgtaagaggagaacatccttttctccccacgccatgggattgtgcaccctctatcgantatccaacttgagcc

SEQ ID NO: 51459 - DNA, 404 bp, Zea mays
  unsure (1)..(404): unsure at all n locations
agcttctaaagggagaacacgtgatattgatgtcttatgtaaaattcgaaaaagatagaccttgtgcagcttgtcaggcaggtaaacaagtgggaggagcacatcacagcaagaatgtgatgaccacatcaagacccctggagctgctgcatatggacctcttcggacccgtcgcctatcttagtataggaggaagtaagtatggtctagttattgttgatgacttttcccgctacacttgggtgttctttttgcaggataagtctgaaacccaagggaccctcaagcgctttctcaggagagctcanaatgagtctgagctcacagtgaagaagataaggagcgacaacgggtccgagttcaagaaccttcaagtggaggagttccttgaggaggaagggatc

SEQ ID NO: 51460 - DNA, 423 bp, Zea mays
  unsure (1)..(423): unsure at all n locations
tgcacgccaaggatacgcagacctcgagcattattgttcattatatatgcctcggcaatagacactagaggacccaagcactatattctttatgtctctgggcccacatgtcggngccagtccttttgtgcatgccccccttcagctataaaaggggaggcatacgacgttacagagaggaggcgctcagacctagctttatgcagacactcataagttcatacaagtgtcgaagcaatacatcacacagtggagtaaggtattacgctccggcggcccgaaccactctaaaccctcgcgtgctctcgtgtgttgatccaccagcctcgtagcaagcaaaacgcttaagcccctcctctctttaagatttagggcgggtgcaatctgccacccggccggggagaattccttcccgacaggatc

SEQ ID NO: 51461 - DNA, 283 bp, Zea mays
  unsure (1)..(283): unsure at all n locations
agcttatgaagattcttcatcccatcttggttntagtcggcgatgccagagccaacccatgttagtcttagcaattaagcaagtgtcgagtttcgctctattaaaatcaacctagtatagctggccctctaacactcccttaaatggtactgaatcggcacttcttctaaagacaggaacacctatatccgtaaaaatacaattggagcccattttgcataattgagaaactgaaagcaagttattatctaaagaatctaccagaaaaacattggaaatagaa

SEQ ID NO: 51462 - DNA, 439 bp, Zea mays
agcttcaagcccacgcgcccctcgatgtatgtctacgacgaactattccgtcgcctagccgcaactgatttagacgcagatggaagcgtcggcggcctccgacgaaaccctagccgacgtgctcgaccacctcaagccccacactatcgctctcctccaccttctctacaaccgctgcccacctctagctccgcctcctccctacgcgaaatgggtgggcatcgcgtgggcacagctccatctccgggcacgcagggtggcggcgcgtcgcggatctggagctggtcgatcatcgcgtgtcgtcggtagccaggtaaatctgactgattcttcttcttacctgcttctcccagtgtggatctcggctctcgacgagtttcaaggatccgtagcggcggcgacggccatggacaagagccctggtgctggctttcactta

SEQ ID NO: 51463 - DNA, 399 bp, Zea mays
  unsure (1)..(399): unsure at all n locations
agaacacgtgattttgtctttcttatgttcaatttgaaaaagatagaccttgtgcagcttgtcaagcaggtcaacaagtgggaggagcacatcacagcaagaatgtgatgaccacttcaagacccctggagctgctgcatatggacctcttccgacccgtcgcctatctgagcataggagggagtaagtatggtctacttattgttgatgacttttcccgcttcacttgggtgttctttttgcaggataagtctgaaacccaacggaccctcaagcgctttctcaagagagctcaaaatgagtttgagctcaaggtgaagaagataaggagcgacaaccggtccgagttcaagaaccttcaagtggaggagttccttgaggaggaanggatcaagcatg

SEQ ID NO: 51464 - DNA, 216 bp, Zea mays
ctgcagcttgtgaacagacaattttattgtgtatagcagcttcagcagatcagccgaagcctatgctcttatgtgaggacattgcaaaacagaaggtgctgttatgctctcagttatccgaagagcaggagaaaaccctgataaggtttttgttcaataacaaggatgtttttgcatggtcagcccatgatctctgcggagtttatacagatgtta

SEQ ID NO: 51465 - DNA, 485 bp, Zea mays
  unsure (1)..(485): unsure at all n locations
tgacattgtctccctttcagaagccaaagcctttcttaatgtcatagcgtctcccattataaagcatactacgagaaaatttaaaattttcattttctaactcatgctcggcaattctagcatctaattttcctatatgatcattttgctgtttaatcatagcaatgtgatcatgaatagcatctatgttaacatctctacatctagtgcaaatagtaacatgctcaacggtagatgtatagggttcgcaagaatntagttcaacaatcttagcatgtaaaatgtcattctcatctctaagattggtaatcgaagcattgcaaacatctaaatccttagccttagcaattaatttttcattctcatttctaaggctagcaagagaggcattcaatttttcaatcttagcaattgaactagcattatcatttctaagaatggcaattgaatcatcacaaatatttgacttctcaaccttagcaatc

SEQ ID NO: 51466 - DNA, 120 bp, Zea mays
cgatagaagtgccaagagacttttctggtaagacttagatgacatggtgttgttgacacctttttggaggcgccaatcactcaaaagaaccagcggcggtgctctctggtcaggcgcgga

SEQ ID NO: 51467 - DNA, 418 bp, Zea mays
agcttgtgaaggttcttcatccccacatgtgtttattggcgatgccacagccagcccatgctagtcttagctattaagcatgcatctagaccggcctcttcttttgcaaaatcaactaaataaagtttgccgtctaatacacccttaaaagctagtgaaccatcacttcttctaaagacagacacatctacatttgtaaatagacagttatatcccatatgacataattgactaacagatagtaaattatatccaagactctctactaaaaatacattagagatagaatgctcattagaaattgcaattttacctaatccttttaccttgccttgattcccatcaccgaatataattgaatcttgggaatccttattcttgacgtaggaagtgaacatcttcttctcccccgtcatat

SEQ ID NO: 51468 - DNA, 468 bp, Zea mays
  unsure (1)..(468): unsure at all n locations
tatgaagattcatcatcccaacgtgggctagtcggcgatgttcttttcaacccatgttagtcttagcaattaagcaagtgtcgagttcagctctattaaaatcaactaagtatagctgaccctctaacactctcttaaatgctactgaatcatcattccttttaagacaggaacacctatatccgtanaaagacagttgtaacccattttacataattgagaaacagaaagcaagttgtaatctaaagaatctacaagaaaaacattggaaatagaatggtaaggtgatattgcaattttaccaagtcctttgaccaaacctttatttccatccncgaatgtgatagctcgttggggatcttggtttttctcgtaggaggagaacattcttttctcccctgtcatgtggtttgtgcacccgctatcaatgatccaacttgagcccncggatgcataaacctacaaaac

SEQ ID NO: 51469 - DNA, 447 bp, Zea mays
  unsure (1)..(447): unsure at all n locations
agctctaagaaaagatagtgcttggcaacgttgattatctatcaattagacgggtcttttctcattctattcaatcgacttctgtntccttctgcttcttggggcattacaaacaatgaggtactcatgacttcaaacatggcccgaatggctgatattgactggtgtcaactagtttacacggatttgtgtgatgctgctgcacgttggcataaaaggaacaaaacanacatcacagcaacaatatatggatgctcactcattgttttagtaagtaattttctcttgtttactgtgcatatatatggnatccaaatattnngtatgtactaattttatatatttgtgcattcctttntttcagatttactatcttgatcacctacatcaccctgctgcttcggataacaaatatggtactccacgcattaagtttttggataatga

SEQ ID NO: 51470 - DNA, 466 bp, Zea mays
  unsure (1)..(466): unsure at all n locations
aagtcacctgcggcatgcaagctngaaccacaaataccagttntggtatgcattcttgaaaaaatatttcctccaggtttcttcaatctgatgcaacatctacttgttcacctaccatacgaagctaaggtacgtggtcctgtccagtatacatggatgtatcacattgaaaggacactaaagaagctacgtgcaatgattagtaataagagacgagttgaagggtgcattgcggaagaattaaaatacaaagagatagcatcgttttcgggcttgtaatttgcagaggaacacaatgtcaacgcgtctgcgttgcggtatcaaaacatagcctaccatctcacagaanaaaatgcagcatatattaaaaagaaggttacttgaaaacagtggttagatggatacgcaatacgttgtcagatcatgtcatgctggtttcactaataataactcnttgcacccattg

SEQ ID NO: 51471 - DNA, 409 bp, Zea mays
  unsure (1)..(409): unsure at all n locations
agcttgccagttcttatcanagcaacaacatttactggcacagcagctgcagaccatacctgtaacatggccatttatgtgctgggggctggacatgcttggactcttcaagaaagctcagggaggccatacccacgtgctggttgccattgacaagttcaccaaatagatagaatacaagcctattgcttctttaacctcagccaaggcagtggagttcatacaagacataatattcagatttgagataccgaatagcatcataaccgacctgngatctaacttcactagctctgaattctttgatttctgtgaacaacagagtatccagatcaagtacgcatcagtaacacacccaagagccaatggtcaggtggaaagggccaatggaatgatacangaagcactc

SEQ ID NO: 51472 - DNA, 317 bp, Zea mays
  unsure (1)..(317): unsure at all n locations
cacttaanaagaaagaggggagaactcttaaatcttgcggatttgaactccttgaagcacctcataataagtgtgttacggcgccttcttctgctgttgctgcttgagcgggctgcggagaaatgactgacacacggttgattctgggacaaccttcctcccatattctcttcactatctactttctactgcaccctttctttctctttgctcttcccactggaagattctatcaaagagtattaccatcatacagaggaggaaaccaaagactatgaaccatgtacaacagtcttcaacccaagaatcaccaaaca

SEQ ID NO: 51473 - DNA, 469 bp, Zea mays
  unsure (1)..(469): unsure at all n locations
cagcttctgcttggcgacggcctggnatcatatgacattggcgacactccccatatatgcttgtcgtaacgcgcgccggcaagcttctcagcacctgctcttcctctgctactccttcttctcgcagcacagcacagcacatcacaacacaagtacagtggcattgggtgggagcgagaaacggagggtgtgagagcaatataaagagatgacgcgctcgctcttggcgcttctgcatgtgcagacaaggcagctctgtaaggaagacaggagcgcanggaaagggaggtgtttgtcatcggaacggatgatacactggaagcgggaagcgagggtggctctcctacactgcttcctcatgcgcttctgcaccacgtgcacgtggacgtgcacaggaaaccaatggataatattgaaccgaattcttttatcggtaagcttgtctctttgccctgcactcagatgctcc

SEQ ID NO: 51474 - DNA, 461 bp, Zea mays
  unsure (1)..(461): unsure at all n locations
atcgatatctccgtagactgttgaagaccagtttcaatatcctccatgaaattntgcgaggcatctgtcttgatcaccacagtcattcacaatagcttctacacacttgccccagtggtcggctaagcatgtctcaatggctctatggaaagacactccgacatctctaatgccgaacgacatggacgtataacacagaccttcaaaccgcgtgatgaatgcaaggtggttcttcatctttcttttgccaaactgatctgatgatacccagagtagcaatccaagaaagacaacatacagcacccactggttgaatgcaccacctggtctattctatgaagtccgaaaggatccttcngacagtgcttgttgagatctgtatagtcgacgcacatgcgccaatccactttattcttntttagtacaagaacaggatgcgctaaccattcatgatgcgacac

SEQ ID NO: 51475 - DNA, 431 bp, Zea mays
agcttctaaagggagaacatgtgatatgtcttactaatgtccatttcgaacaagagagaccttgtgcagcttgtcaagcagggaaacaagcgggaggctctcatcacaccaaaaatgtgatgacaacatcaagacccctggagctgctacatatggacctcttcggacccgtcacctatctgagcatatgaggaagtaagtatggtctacctattgacgatgacttattccgcttcacttgggtgttctttttgctggataagtctgaaacccaagggaccctctggcgcttcctaaggagagctcacaatgagcttgagctcagagtgaaaaagataaggagcgactacgggtccgaggtcaagaactcttaattggaggaatttcttgaggaggatgggatcaagcactaatgctccgctctctacaca

SEQ ID NO: 51476 - DNA, 398 bp, Zea mays
tctaagggagaacacgtgatatgtttgactaactgttagattcgttattagatagaccttgtgcagctcgtcaagcaggtaaacacgtgggaggagcgcatcacacgcagaacgtgatgaccacatctagaaccctcgagcttgttcttatggaccttttaaacctgcgcctttttgacatagaggaagaagtatggcctggtattgtgatgactttcccgcttacttggtgttcttttgccgaaagtctgaaacccaaggaccctcaagcgcttctcagagagccaaatgagtgagctcaagtgaaaaataagacgaacgggtcgagtcaaaacttcagtgaggagtcctgaggggaaggataagccgattttcgttcctaccacccagcaatggtg

SEQ ID NO: 51477 - DNA, 409 bp, Zea mays
agcttggtgccaatggagaagcagtattcttttaagtcttggctatcaaatggcttgccattgtcaactatgagctcggacgggactccgaaccggcaaacaatgttttgccagaagaatttctgggcagtcttcgatgttatcgtggatactgccctcgcctctgatccacttggtaaaatactcgacggcgatgaaggtgaacttgaggttcccttgcgccgtgggtagtggcccaacaatgtcaaggccccagcgctgaaggggccacgtgtgggcgattagctttgtgaattgcgaagggcttcccgagcgtggagaatacttctggcaggctttgcatgatcttgtgatccgatttgcggcgcatatcatggcgggccagtacatgccttgacagatcaccttt

SEQ ID NO: 51478 - DNA, 401 bp, Zea mays
  unsure (1)..(401): unsure at all n locations
agcttgtgcctttcatcaagtttgtatgatctctctggactttntcttctggttctttaaccaggtcaggcctgaagaaccacctttctccaggttcaaaccaatttaagggggtacgacaccgtcgtccatacagtgcttcaaatggtgccatcttgatgctctcttgatagctgttattatatgaaaactctaccaatggtaaatattcatcccatttttgtggaaattccaggacacatgcccgcaacatgtcttcaagtatttgattcactctctcagtctgtccacttgtttgaggatgataggctgaactgtggagcaacttaatacccagtgatttgtggagctcttcctatgaattggataccaaatgtggtctgcggtccgacactatagtc

SEQ ID NO: 51479 - DNA, 374 bp, Zea mays
tagcttattctcatgtacccaggacttctgattaatacctccaggcgtatgtctgaagggttctgcgtctgagggcacaagcgccaacagtgcccaatgaaattgtcattgaggccatgattaaggggcttcggccgggaccttcagtgcaatactttgccaggaagccaccacaaactttggagaagctgctccagaagatggacgagtacgtctgggccgacaatgacttccgccaaagaagggaggaggcatttatgttctctgaaatgactaggggcttctgaggaagatttcatacgaggcatgtcaggtcaattcataactccactcaaagtgatgatagagggagccaacagcaaaggccacaatac

SEQ ID NO: 51480 - DNA, 413 bp, Zea mays
  unsure (1)..(413): unsure at all n locations
tcagatattctatattgtctgccatctnccgacagacattgttttctttattgtcaggcagacaatacataaagtcattctcatcacccccaccatacaccaatgaccctcgagggtactgcagatccctggcgtaatgttgcgcttcagcaatttgttctttcgataatttttcccctgaagcatgacgcactataaattctaattcctcaatagatgctccaagggaagggggttcagattctttggtagccctatctttntctaacagtaatggtgcattcgtggcatttgaaggtcttgtttcaagagcctgtccaacagccttcaaaagtcttgcttcgacgggagccgagggcctagcctcaactgcaacctacgtcatgccagcttcgacagatttctttgtattc

SEQ ID NO: 51481 - DNA, 396 bp, Zea mays
ttaagtcacctgcggcatgcaacttggcccccctgcttctctattcttccttgaggggcccggggcactgtcgtaccctagaaaggggtaccccttaatgccgtaaaaaggcacagtacccacgcggctatccttggtcgcgtggtaaaagacctgtatgtgggaccagaccatgacctgcccaagcctcgggcgactactctgggccagcaacaatacctgaccacaccacatgggcaggtctggtgccgccacgtgtctagagaatctgacactgaggcacctccgttgagtgggtccggacccccatggaaaggtaccggacccctgtatatacagtccacgcctctcagtatggtccaggacctccacgtgagcaaatcggacccctgggat

SEQ ID NO: 51482 - DNA, 333 bp, Zea mays
  unsure (1)..(333): unsure at all n locations
tttaggtcacaataaaataaatgaatctatgntgatgtacttgtaagctacacttatggaaataataatctatttctaaataaagttaatgcttggtataagttatgattataccttggatttcattatcccttacgtagaattgcgtcctttaagatgtgtccaatgttggacatgtttgtgtgatgttcatttgtacttccaaaatatagaatgcatgctcgctttattatacaacgagcagtccgatgtttctgagtgtgttgttggagacctctctgagcaacaacctgttgaaggcaagtgtcctctgacctactatgtcctacatac

SEQ ID NO: 51483 - DNA, 256 bp, Zea mays
agcttcccctgcatgccgatgatactcagatctcagatgtcaggacacgagaagattgccccagcagtgaacatttgtagctccaagtgctaaattcattatgtccctgggcccacatgtcggggctcagtacctttgtgcatgccccccttcagctataaaagggaaggcatgcgacggtacaagcatatccaatcttaggctcactcagacactcacaagttcatacaagctctcaagcaatacatcacaaagt

SEQ ID NO: 51484 - DNA, 357 bp, Zea mays
accctgctggccatttgcttcgggagctgatcacacgactactccgcagtcttccgacaagcaaaattatagcaaccaaaattctcatggaactcatcttttctagcctttgtctgatacgggcaatcgtgaacccggcacaagcctgccgcaaacggctccacccgctggcttcggagtgcccagatataaacactgagcctaacgatagcgttgggggtcagctcgtgaaaatagattccaaaattctttaatactctctgaataatcccatgaagggggaatcttactcagcctttaggagctcttaaaaaacaatccactctttccggctctgggaagccttctccccaagcg

SEQ ID NO: 51485 - DNA, 129 bp, Zea mays
  unsure (1)..(129): unsure at all n locations
ctcagcttggacagcagctaagaagatgtcagcggctgctagcactgtaccttcatcatccacatctcgntgtggtgctgtctctgtatctgtagaaaaggccttaatgtatgataaatatcaatattt

SEQ ID NO: 51486 - DNA, 385 bp, Zea mays
  unsure (1)..(385): unsure at all n locations
atgctttttgtcccaagcaagttggggtatgttatatntgaaagccaacagaaaccacaagtaaaggtccagccacatggatagctatttttcatgcactcctattcaagactaaatctttgtctatattttatcccttcaaatctcgttttagtgcctctttccatgtcaacttcgcccttcctctcccctctttttccattgctctcgcgtcttagaanttttttctcgaacgcgcaggagagctgcacatctttatatattagagaagagggtcttacaagacaggactntgctgagcaaggtccaaagccaaacagaaaagataaaagtacatttcagtaacaatacccgacccaacactctaagagcttcagtatcccta

SEQ ID NO: 51487 - DNA, 451 bp, Zea mays
  unsure (1)..(451): unsure at all n locations
agcttgacaacgaggagatgacgctcatcatcaggatctttcgccaaatcatcaagcaaaggaggggaaaagattacaaaccccgctccaaaagggtgtgctacaagtgtggtaagctcggtcattttattgctaaatgtcctatgtctagtgatagtgacaggggcgacaacaagaggggaaagaagaaggagaagaagaggtactacaagaagaagggcggcgatgcccacgtttgttaggaatgggactccgatgagagctccaccgactcctcctccgacgaagatgccgcaaacatcaccgtcaacaagggtcttcttttccccaacgtcggccacaagtgcctcatggcaaaggatggcaaaaagaagaaggtacaatctagaaccacccncaagtatactacatctagtgatgaaggtagttctagtgatgatgaagatgatct

SEQ ID NO: 51488 - DNA, 103 bp, Zea mays
  unsure (1)..(103): unsure at all n locations
tctcagcttatttctctggagcttcattctttgcgatttgattcttatttgtatagntttagaagtcaaatgattgcttcctaagccttggttgttgagagaa

SEQ ID NO: 51489 - DNA, 420 bp, Zea mays
agcttgcacaaacacacctaaaaatatcgttcatgggcaatgatttgttaaatataccagcatccaaaatgcatattggcattacagaagcatggcatcagatattactatattaaagaacatcaaaacaataatgactgcactggtagaaacttatctcggagctctatttttcacattttcttgaaaagacaaacagaataaagataataaatttaaagcagataaggatattctttgacacaatgttctgcgacatggactcgaaccttgtttgctgcaattatcagcgttcaagtgagtgggagacggtggtaaattatttgaaggagatgctaatgaaaccttatccaaaggcactcaccatctgtccaaggaggttctggacctgaaatggaaagctaacaatcagcaattaca

SEQ ID NO: 51490 - DNA, 444 bp, Zea mays
gtgccttcctcaatggaccattctatgaagaggtctatgttgagcaacctcccggctttgaagacagtgagtaccctaaccatgtctataagctctctaaggcgctttatgggctcaagcaagccccaagagcatggtatgaatgcctttgagatttccttattgctaatggcttcaaagtcggaaaggccgatcctacactctttactaaaactcttgaaaatgacttgcttgtatgccaaatttatgttgatgatattatatttgggtctactaacgagtctacatgtgaagagtttagtacgatcatgacacagaaattcgagatgtctatgataggggaggtgaagtatttcttatgatgtcaagtgaagcaacttcaagaatgcaccttcatcagccaaacaaagtatactccagacattctatacaagtttgggatga

SEQ ID NO: 51491 - DNA, 447 bp, Zea mays
agcttgtggaagaccagatcatcgtattcttttagtttctggatgagaagtggtcacccaagttccgttgatgaagcaccagaagactaatcaaggaaggaatccatgtggaagttcgcaagaggaagggttgtgtgttggcatccatgcttcttcaataagctagctgccaagcgaaacctagaagcctgaagatgatcttgagtagccagaatcagcgtttgcaatcgtcaaccagatgctcctcaaggccagatcttgttgaagttccatctcctcgaagagttgcaaagtgaagatatgtagctgaagtaaagctatacccataacccttctaagccgaatctcgaggatgagattccttttaagcggcgtagatttgtagcatcccaaaaattcaaatcttggaaaattctcacactcgctctaaattgaaaatgaatttca

SEQ ID NO: 51492 - DNA, 418 bp, Zea mays
  unsure (1)..(418): unsure at all n locations
agcttctcctatacaagcgccgcactctctttagagtgcgaagctggcacatacagcagtagaggagcccctgcgttggtggagttagcgtcgttagatctatcagatactgcttcagctcttcgaaggctttctgctgagctgatccccattgaaagacttcgaccgacttcagcacttcaaagaatggtaaatttctctctgctgatctagatatgaatcgattcaaagatgccaatcttcctgtcagacgctgagccncctttntgtgcttggtggctccatccgaagaatgtcttcaattttgtttggattagcttcgatcccttttgttgaaactagacaaccaaggaatttgcccttcttactctgaaacacatttttctggattaaactcaggccagcttgtctaaagtta

SEQ ID NO: 51493 - DNA, 389 bp, Zea mays
  unsure (1)..(389): unsure at all n locations
agtctcataagaggcactacctaagtcnctgttgcacttgcgactcagttagagataatcttgacataacaatacgatagtggagagatgtgtcatatgatgtcaagaatcaaatatggaatatgctattaatgacgttcgttctgcctcggggttcacaagaactcgtgaaggaatacaccatgaagcatctcgcaatcaatttcccaaactggaggtctgatatgaacacaatagtttgcgaagataggtcttgacctcaccaaaaaatttaaaatctcagcaggtcagtgagcagtatttctagagcagaggagcagctctgatttcatatctctaactgaggcaaattctgaactattaaataagaacatgctccgccaccacct

SEQ ID NO: 51494 - DNA, 297 bp, Zea mays
  unsure (1)..(297): unsure at all n locations
agcttctaaagggagagcacattntatgattttcatttgttaattctgagaaagacacgatctgtagcgcatgccaagcatgaaagcaagttggtgctcatcatccacataagaacattatgacgactgacaggccactcgagctcctacacatggatctattcggcccgatagcgtacataagcatcgtggggagtaagtactgtctagttactgtggatgattattctcgcttcactcgggtgtctttttgtatgacaaatctcatacccaagaaaccttaaagggattcttgag

SEQ ID NO: 51495 - DNA, 461 bp, Zea mays
  unsure (1)..(461): unsure at all n locations
tcagcttgttgggctaaagagccatgattaccatgtnttgttacaatatntacttccacttgccgcgagaaggatattaccagaaaaagttagtggtgcgctgattcgtgtgagcaatttttttaagcaaatctattcgccagttattcatataagcgatatgcataagctagagtcagaaatagctgagactctaagcattcttgagactatattcttaccatcctcttttgatattatgggacacttaatggttcatcttcctactcaagtcagaattgctggccctgttcaatttcgtaatatgtacccagtggagaggtaaattttaatatatcttagctacaaattaaacttaggtttactcataggaaggtttaacatatatggcacttctctctatagggttgtaatgagatgtaaaggctatgttcgcactatgagtcacccacaggggtcaa

SEQ ID NO: 51496 - DNA, 483 bp, Zea mays
  unsure (1)..(483): unsure at all n locations
tctaagggggaacatattntatgacatgatttgtagtgcttgtcatgcacggaatcaggttggagtttatcatccacacaagaacatcatgacgaccgagaggtcgcttgaactaatccacatggatctattcggcccgattgcttacataagcatcggtgggagtaagtattgtcttatagttgtggattattattctcgctntacttgggtgttctttttgcaaaaaaaaatcacacacccaagagacattaaagacattcttaagaagagctcataatgagttcggattgagaatcaagaaaattagaagcgacaatggaacgaagttcaagaactctcaaatcgaaagatttcttgaggaggagtgcatcaagcatgagttctcttctccctacacacctcaacaaaacagtgttgtggagagaaagaatagaactctcttggatatggcanaaccatgctcaatgaatacaagacatc

SEQ ID NO: 51497 - DNA, 438 bp, Zea mays
  unsure (1)..(438): unsure at all n locations
agcttctaaagggagagcacattntatgactaaccaatgttcattctgagaaagacagtatttgtagcgcatgccaagcacgaaagcaagttggctctcatcatccgcataagaacataatgacgaccgacaggccactagagctcctgcacatggatctattcggcccgatcgcttacataagcatcggcgggagtaagtactgtcttgttattgtggatgattattctcgcttcacttgggtattctttctacaggaaaaatctcaaacccaagagaccttaaagggattcttgagacgggctcaaaatgagttcggcttaaggatcaagaaaataagaagcgacaacgggacggagttcaagaactctcaaattgaaggctttcttgacgaggacggcatcaagcatgagttctcttctccctacacacctcaac

SEQ ID NO: 51498 - DNA, 473 bp, Zea mays
agcttgaagccatggtaagtagcatatgcttataatatacgaattgactcaagcctagctacgggtgcataggtttcaccaaaatccaaaccttcgacttgggagtatcccttggccacaagtcgggctttgttccttgtcaccacaccatgctcatcttgcttgttgcggaacacccatttggttcctacaacattttgattaggacgtggaactaaattccatacctcgtttctagtgaagttgttgagttcctcttgcatcgccaccacccaatccgaatcttgaagtgcttcctctacccccttatgaatgtcgccgaggatagtgtcgacggggtgatctcattggattgcttggtggactctcgggtgtggcggccttgcttcttcatcctccttgtcttgatcatttgcatctcccccttgatcattgccgtcatcttgagggggctcatctctttgatcttctac

SEQ ID NO: 51499 - DNA, 325 bp, Zea mays
tcctcaatctttcttggtgcttatcaaatatactttaacttaataattggctcaactcaaaattttaaactcttcattccctttttcttattttcttgaatattgctcatgggattcacttacgggtctttattaggggtgcacattctttatttttcaagaatctaatgtttttaaccatgacccctttaaatatatccttggagaatctttattacttaagttaatttgatgctcatgcttacttttggtcacataaaataatggttcttggtttggcttcttagagaaaccctagtgacactgggtgtcacaccttccccct

SEQ ID NO: 51500 - DNA, 363 bp, Zea mays
  unsure (1)..(363): unsure at all n locations
agcctgggaaggatcttcatccctacatgatcttatctgttatgccacagctagcccatgcaaggcctaacaattaagcatgcatctagaccggcctcctcttttgcaaaatcaactaaatacaggttgtncgtctaatacacccttaaaagctaatgaaccatcactttttctaaagacagacacatctacatttgtgaataaacagatatactccataatacagaggtgactaacagacaacaagttatattcaagcgactcaactaaaaacacattagaaatagagcgctcggaagaaatancaatatttcctaaccctntcactntgccttgggtcccatcaccgaatatgaatgaatc

SEQ ID NO: 51501 - DNA, 426 bp, Zea mays
  unsure (1)..(426): unsure at all n locations
agcttgttggaatttagtgtcgaatattatattaatcttctattcacctncgcccctctaggtgctctcagtaatggtatgcggaatgatgcgatgatatgatgcagcatgatgattatgccaaagacacatgtncacacggaaacagtctgactctgtatcgccttaaggacgtcttttgagtctcttcaccttatatttcngcggcatntaagctctgcattcccttaagaacgactctgtagcttctccgccttctatttcggtggcattttaagctctgcatcccttaggaacgactttggagcttcttcaccttctattttggtggcattntagccctgcatttccttaggaacgactnttgagcttccgaacttactctgtgctctcttangaacgacttttgtagcttcagaacttact

SEQ ID NO: 51502 - DNA, 323 bp, Zea mays
tgacctgtcctgcaaatgcaatgaaacctttcatcccgtggaaggtgtactgaccacttggtccggtattggctccaccgaatatagagaaaccttttgatgtgtattgtgacccatacgcaaaagactccgatgtgtcctaatgcacgaggtgccgactatatcttatgcttcaagacaattgctcggcaagaggagcactatccaactcataacttggagttagctgcagttgttcatgcccctcacatatgccatcattatctgatgggaaatacttgccatttatatacagagcataacagtctgaaacacatgttacc

SEQ ID NO: 51503 - DNA, 439 bp, Zea mays
  unsure (1)..(439): unsure at all n locations
agcttataagacagtgaatcaagctaagtttgtgattctttntatggccaatccagtgggttaaaggctgtgagctgtgtagataaattagagactattagaagatgattaagtgttcctaagacaagtaggcttgatcctgtacaaatattgaagaaaaagctgctcaaagtcgagctgtcagactaacagttcaggttatcagacagaacagtttaatctgaatacctatctgtctgctccactttgtgggcttgcaaaggctgtaacgtgtagctttgtgcccaagtatctacagcaaagtgggagaggtagtatctatgaacaatatttatcaagggaccatagcttaacactatacaaggttggaagattcaggcatccaaagatgataagtcagctgcgcaagactgaaggatacagttcacactgatctaat

SEQ ID NO: 51504 - DNA, 378 bp, Zea mays
  unsure (1)..(378): unsure at all n locations
agcttcgacatgcttgcnccagtggtcggcttatcttttctgaatgactctctggtaagtcgctccagcgtttctgaggccaaatggcatggaggtatatcataaagccccgaacggggtgatgaatgctgcttttttcttgtcttcttttgccaagctgatctgatgatacccggaatagcaatctaagaaagacaacacataacacccggcggtcaaatctaccacctggtctattctgngaagtccgaaaggatccttctgacagtgtttgttgagatccatatagtcgacgcacatgcaccaatccactttattctttttgagtacaaaaacaggatttgctaaccactcgggatgtaacacttctctaatgaa

SEQ ID NO: 51505 - DNA, 354 bp, Zea mays
cggcatgcacttaaaaaggtcctatgcttttatttattgtaggaccacaccttcattttttaattggctaacctgaattgctcactgagtgctactcataggatacccaaagatgttgatacctcatggcccatgagaactattggtatgcaaatattttggaaggggtgcactggagttgcatggttcaaagaccttgggcaccagtgaatgtgaatttaagatgcataaatacctcaagttgtgagcttcattaatggcaggaaacgtgtacggcccttgatcatgtacagctagccactaggaaagaagacatatgataagtgtggtatcataaaagtgtcgagtgttgtg

SEQ ID NO: 51506 - DNA, 399 bp, Zea mays
caaaaaagcatcagatacaggaatgaaattcttgagaggttaaactacgaatgacgcacggatatgcatagacatgctttctcttccttttataaaagatacgcaaagaatgtataagaggaagacttatgtacatgtgtaaatgagaggaagtagtttacccttttgtaccttcacatagagacgctcttttcattgcgctatgtccttggtcttggttacttaagacctatattcaagacaatatatggaaatattttgcacaagagagagttctacaactagtgatccttttctaagtcatgttatcatatatcaagtagatcacaaactgcatagatttatactgaaatcctctttaacttagtgcatccaaagagagattgactgatagtatat

SEQ ID NO: 51507 - DNA, 470 bp, Zea mays
  unsure (1)..(470): unsure at all n locations
atcattaaagcgacctgaggcatgcaagctcgtgtacgttcttcatccccatatgtgttttgcggtgatgccacagccagcccatgctagtcttagctattaagcatgcatctaaaccggcctcttcttttgcaaaatcaactaaataaagttcgccgtctaatacacccttaaaagctagtgaaccatcacttcttctaaagacagacacatctacatgtgtaaatagacagttatatcccatattgcataattgactaaccgatagcaaattatatccaagagactctactaaaaacacattagagatagagtgctcattagaaatagcaattntacctaacacttttaccttgccttgattcccatcaccgaatataatcgaatcttgggaattcttattcttgacgtaagaggtgaacatcttcttattccacgtatatgggttggcatccgctgccataatctac

SEQ ID NO: 51508 - DNA, 250 bp, Zea mays
gtcccggatcttaagcgactgggctgcagctttaagggagccatctatgattccttgttcttctgaaaaacagattgtgcgcatccaagcacgaaacaagtggcttcatattcgcataaaaataatgagaccgaaggccctaagctctgccatggatctatttgccccatgcttacataagcctcgcgggagtagtactgcttgtattgggatgataatccgcttacttgggattcttttacggaaaatc

SEQ ID NO: 51509 - DNA, 402 bp, Zea mays
actcagcttggtgggacctctctcgatacatagagattgctctttatttttcacactaaccagagagctgattggcacttatgcctcgttatgtgtattggggtcccgactgagtgttcttggaaaactacgatccacggaaacattgccagagctatcaacacattacaagctaacaaagtcacctaatagggggcataacggatgcaaagctgggcgaaccacttattcggggcggatcaacacgttcgctaattgagattatagcgtgggagattataacggctaacttcttttgtatgagacacagtgtatggtctatttacttagaacgcataaccatgcctggttattgcttcgatttggtcaaacacgccgtgcaaagaacgaaggtgttacaca

SEQ ID NO: 51510 - DNA, 420 bp, Zea mays
agcttgtgaaggttcttcattctcttatgttctaagcggcgatgccacagccagcccatgctagtcttagctattaagcatgcatctagaccgacctcttcttttgcaaaatcaactaaataaagtttgccgtctaatacacccttaaaagctagtgaaccatcacttcttctaaagacagacacatctatatttgtaaaaagacaattatatcccatattgcatagttggctaacagatagcaaattgtagccaagagactcaactaaaaacacattagagatagagtgctcattagaaattgcaattttacctaacccttttaccttgccttgattcccatcaccgaatataattgaatcttgggaatccttattcttgacgtaggaggtgaacatcttcttctcccccgtcatatgg

SEQ ID NO: 51511 - DNA, 427 bp, Zea mays
  unsure (1)..(427): unsure at all n locations
agcttaatacacagacaagttaggagtcaatcttgattctttntcaagacaagagaaacctatgaaggccagatgaagggaaaagtggatgattttgtgacatggcaattttactaagtcgagcaattaccctaaagaaacaaagtggttgtacacagtttctccaaatagcattatattagaagcacactacggcatatacataacagtaatgtgtatagcaggtaccagctcatcagtacgaatagattcctgattttcattgaacggtatgacataatctagacgcctgcacaggttatctcgccagctcatcatttangtttttgtcagacaaatttggttcagccttctgcagcagtttggcctccagacagtgggcaccttcgcttactgataattngagtttctgatacagcaagctctc

SEQ ID NO: 51512 - DNA, 363 bp, Zea mays
  unsure (1)..(363): unsure at all n locations
tgcagtggcagcgcctgccgctgtgcagtctacattgtctattgcagctttagtagcccgcagaaagagcataacagcgctggcaactggcgccttcttattgcatgtaatccccagaagactctatcgtggtcgtggtcgtatgtatataccttcttcccagcgtcttgtgggaggatgccgcaacaactttccccttagctgtcaactgaaaatttcactctttaggtgtatagtttgatttaactttgtcgcggtaggcgatgcggcatgatattataaatcctgcctgaactgacaagacaaaatcgaattgtgacccaagaagccggcggaagaactngtgaaattgcattgacgtgc

SEQ ID NO: 51513 - DNA, 457 bp, Zea mays
ctgaggcatgcaagctttaaggagctcagccaatatgctcactgttttgctcatagtacagaatctgggatctgcgatggcggatgttgttatagatgcaatggttgcggaagcagttcgatcagccgggtaggcttcttgatgtttcctgtgtccctatttggcatgctgctatggagtattgtgaaaacctactaattttatttccaggccggagtttgctggcgatctacagtcattatcttggtcatcgatggctgtaggtgggatttttgggagtttactgggaggatatgcattatccaatctcccaatacatgcaatatatattgttttctcagtcctcccattcttccaattagtttcctgcatgtttggtgaggattctccacaaggggtccacaacgccagtgatgaacataagtatgtagacaaccagagttctggtactggtttt

SEQ ID NO: 51514 - DNA, 343 bp, Zea mays
gagaaagacaggatttgtagtgcatgccaagcagggaagcacgttgggactcatcatccacacaagaacatcatgacgactgacaggccactggagctcctacacatggacctattcggcccgatagcttatataagcatcggcgggagtaagtactggctagttattgtggatgattattctcgcttcacttcggtattctttttacaggaaaaatctcatacccaagaaaccttatagggattcttgagacgagctcaaaatgagttcggcttaaggatcaagaaaataagaaacgacaacgggacgaagttcaagaactctcatattgaaggctttcttg

SEQ ID NO: 51515 - DNA, 441 bp, Zea mays
  unsure (1)..(441): unsure at all n locations
agcttgtggtaatgctgcacgataattatgattgtctgttgtgggatatggaagtcatcccctgaattgcataggcgcgagtatgctataccggcttaagccatcaatgactttagccgataactccgttagtagggcatagtggtcaccctgcgttaagtaagcgtgagcatgttgcaccgccttaagtcgttgccgacttaagtcgattgctccgtttgtagggcatagtggtcaccctgtgttaagtaagcgtgagcatgttgcaccgtcttaagtcgttgccgacttaagtcgattgctccgtttgtagggcatagtggtcaccctgngttaagtaagcgtgagcatgttgcaccgccttaagtcgttgccgacttaagtcgattgctccgtttgtagggcatagtggtcaccctgggttaagtaagcgtgagcatg

SEQ ID NO: 51516 - DNA, 439 bp, Zea mays
aagatgttctccgaagtacacttccgaagtcaatatgttctgttgcacttacatgattcccttcaaaatcctcgaagatcgacgctgtccttctttgcctaacacaagagctgatgctatgctatagcaaacgatgctatgacgctatggtgggttacatggtgtctattccttaaatacacacacattcctgcaaaaacacatagtctcttaaatcaccggtgtcgctttaccataaacctctgtcatgagctacttcgcctcttacttcaacggaatcagcgattattcttcgctgtgaaccctccttaagagcttcttctggctttacttacaccgggattccggtgacttttgcgcttcccctttacttatgcggtatcagcggtgacttttcgctgtatgctctgattcgccttggacgaacttggagcaaaac

SEQ ID NO: 51517 - DNA, 471 bp, Zea mays
  unsure (1)..(471): unsure at all n locations
agcttaagttaagaataggagccttttcttcttttttttgatacatcattgggttgccttcttgatgatgaacccaccttgactttgggtgcacctagcttatcaaggttagtcgcacaagcattcatatcataaagacaagttatgcatggaatttacaacttagtgatccaatcctagtgtgaagcatatggataccgattgaagtagattcctaagatatcaatttgtaggtttccaaaatttagaaattatggatcactaattttaccttttacagtttaaaatcatatccatgttagtgcatatgtatgtgatgaatatcaacaaaaaggattcttatgcacttttagatttaacgataagggaattntaaactgtatcaagagtagctatttagaaaacaaagattacaatccatatgaatgagatacanatctaccattctggattatcttagtatagcttact

SEQ ID NO: 51518 - DNA, 406 bp, Zea mays
  unsure (1)..(406): unsure at all n locations
tctaaagggagagcacactctatgatcaacaaacggccattttgtgaaagacaggaattgnagcgcatgccaagcagggatgcaagttggtgctcatcatccacacaagaacatcatgatgactgacaggccactggagcctctacacatggatctatttggcccggatagctatataagcttcggcgggagtaagnactggctagctattgcggatgattattctcgcttcactcgggtgttctttttgcaagaaaaatcccacacccaagaaaccttaaagggattcttgagacgggctcaaaatgagttccgcttgaagatcacaaagtgtcggggaccataattatgggtaccctcaagtcttctaagtctcagcttgtaactcccatcatcataaagctgc

SEQ ID NO: 51519 - DNA, 518 bp, Zea mays
  unsure (1)..(518): unsure at all n locations
tcttcccggatccttgagtcacctgcngcatgcaagctttacagggaaaggagatgatatgaatcttttttgtgcttgagaggatcaattcaattcatattaactcaagctatcaatcttataatgatctgtatctctaagattgactgtcggagaggaaatctccgggcgggtggcggaatgcacccgccctaaatcctaagataaggaggggcctaagtgttttgcttgtcagctaagcgatgaacgaacacaagaacacacaagggtttatagtggttcgggcctgcggagcgtaataccctactccacagtgtgatgtattgagcttgagagcttatatgaacttgtgagctgaagcgtccccaatcctctgggactcanatgtgatacaattactagtcccaggaggctagtaaacacatttatacatcagatgattacagatctgcttaaacgacaaacctataaaggtggcgaacaatcttaagagttggtccacaacctgcgaaatatca

SEQ ID NO: 51520 - DNA, 383 bp, Zea mays
tagctttatagacaagagattcctatgtttttttttcctgaatccggagcgagtcttctcgagctagtggaactttggaaaggcctcgtagtgctacctgcatcgcctcctcggtagaggtgtatgggattcatgaccccatggtagatgggtatcacaacttgtgggtaaagatgcgcaacctctatagagtgctaaactggtatattagccgcgctcacggtcataagcggctcgaacactcacaagattaacttatggaattaaacttaatccgtcatatgcattgcattgggggatttattatcaattgtgatctattactttattgcgatggtatatacttatacttagtaactgctagtaaaatctcgaccaacttg

SEQ ID NO: 51521 - DNA, 429 bp, Zea mays
gaccttaaataccagcttaaatatgccgaacttctggagccatcattacttatactgtaccttctccaactctgtataacttttctctgacaaactaagaacctcggatacaaaatatattggggcctgcctcttaacttggccttcaagctccttctgaacaagtgctgcacttaccgctgagtgcgaaagctgccacatataataacaaacgagcccctggcgtaagtggagttagtgttgtcagatctatcaaatactgtttcagctcttcaaaggccttctgctggattggtccccattgaaagacttctgctgacttcagcacttcgaagaatggtaagtttctttctgctgatctggatatgaatctattgagagatgccagccttcctgtcaatctttgagcccccttttgtgtacttggtg

SEQ ID NO: 51522 - DNA, 338 bp, Zea mays
agcttccaccgatatcgccgtagactgttgataacaagctgtaaatcttcaatgaaatgttctgaattctctgttttgatcaccacatcatccacataagcttgcacacgcttgccccagtgatcagctaagcatgtgtgaatagctctctgataagtcgctccagcgtttctgaggccgaacggcatggaggtatatcagaaagctccgaatggagtgatgaatgccggttttctctcgtcttcttttgccagactaatctgatgatacccagagtagcaatccaagaaagacaacacagaacatttggtggtggaatctaccacttgatctatcct

SEQ ID NO: 51523 - DNA, 472 bp, Zea mays
  unsure (1)..(472): unsure at all n locations
actcaagctttgaggagattttgagtgaccgtggagacgcctgtgcattttctgttgcgagaggggntgcagcccgtttggagaaggcaagttgcgaacacgttaaaaccttggcccatgccgaagatgccttttctgttgacgataccaaggatccctccgccgaagcgagtttaataggtggaaaaattttcactgatatctacaaaaatggcggccgagggatggctcatgaaataatgaagaagagcgagaaagatattcatgatgctcgagaagcaacgaaagaagctgagaaagctgcggagctcgaaagacggataggtattacttaatggctcttagctttggtgttattctcgaggttcaaactaattgatgtcttctaccgcagctgaactatctcctccgccagagaccgtcgaaccactggccgacccagagacaaagaaagcgatagaaattattaata

SEQ ID NO: 51524 - DNA, 465 bp, Zea mays
agcttatgaagattcttcatcctaacatgtgttagtctgcgatgccagagccagcccatgttagtcttagcaattaagcatgtgtcgaggtcagctctatcaaaatctaccaagtatagctgaccctctagcacacccttaaatgctattgaatcatcactttctctaaagatagtgacacctacatccgttaaaaaaccgatgagcccattttcataattgagaaccgaaagccaattgttatctaatgaatcaacacgaaaacattggaaatggaatggccaaaggatataactattctacccaaacctttgaccaaaccttgagttttattctcgaatgtgatagctcgctggggagcctcggctttctcgtaagaggagaacatattcttcttcccagacatgtggtgtgtgcacccgctatcgatgatacaacacgagccgccggatgcatatacctaca

SEQ ID NO: 51525 - DNA, 470 bp, Zea mays
  unsure (1)..(470): unsure at all n locations
tatgaagaatcttcatcccaacatgggctagtcgggggggtcttatccaacccacgtgagncttagcaacaaagcatgtgtggagagcagctctatcaaaaattaccgagtatagctgaccctctagcacacccttaaatgctattgaatcatcacttcttctaaagacagtgacacctacatcagtaaagagacagctggagcccattttgcataattgagatacaganagcacactgtaatataatgaatctacaagaaaaacattggaaatagaatggtcaggtgagatagcaattntacccaatcctttgaccaaaccttgatttccatcctcgaatgagaccgcccgttggggagcctggtttttctcgcacgaagagaacatcatnttctccctaaccatgtgagttgcgcacccgctatcgatgaccaacttgagcccccgatgcataacctacaaacaagtt

SEQ ID NO: 51526 - DNA, 437 bp, Zea mays
agcttcatttaccccagtggttcctattgttttctccggacgcccgagaggctcaaaaatgctagaggaagcttcaacagaatgacaacaaatgtgctgagttctcaaattggcaggaatattctcacctatgttgatgacatcatagtcaaaagtatgaagcaagaagaccacagcgcagacttgcaagaaacatttgctaatttcagaaaaacaagccttaaattaaacctagaaaatacatatttggagtgaagaagggaaaattacttggctacctagtatcaactaagggaatcaaagctaaccaaaacaagatagaagcaatacttcagatggagccaacgaagtccaaaaagggtgcctagaggttggcaagcatacttgcatcactaaatagattcatctcaaggtccacagagagaaatctatcattc

SEQ ID NO: 51527 - DNA, 64 bp, Zea mays
ggacctataaaactcagcttagactgacataaaccgtaccgacacgaatcttgttgttgttatt

SEQ ID NO: 51528 - DNA, 445 bp, Zea mays
  unsure (1)..(445): unsure at all n locations
agcttctagacacagactactatccatggacgctggttggtccaatagcgtgagctgagagtagcagagcaccttggatatcaagggcttcttgggtgccatccctccgtacttcttctccgcgcatgcctgcaaagccaaatagatggttcaagaaccgcttgcgttccgggtcagggaaggcttttagcctatccgttcgttcaggggtcagcccatcatcacagtcacaggagacacggacgcttcctcatccagcgggctgacatgacaagacggcatggattntttgaccactccattattcccattcatcatcataataattccgcggcgaccaagaagacaagcatccctttcgggccctctcgctcgcgcgggcaataaatcgcatgctatctatgcgggcgcttttgatccataaaaagcatgcgaccgatctact

SEQ ID NO: 51529 - DNA, 473 bp, Zea mays
  unsure (1)..(473): unsure at all n locations
agcttgtgaaggttcttcatccccacatgtgctaagcggtgatgccacagccagcccatgctagtcttagctattaagcatgcatctagaccggcttcttcttttgcaaaatcaactaaataaagtttgtcgtctaatacacccttaaaagctagtgaaccatcacttcttctaaagacagacacatctacatttgtaaaaagacaattatatcccatattgcataattgacttacagatagtaagttatatcccaaagactcaactaaaaacacattagaaattgagtgctcattagaaattgcaattntacctaacccttttaccttgccttgattcccatcaccgaatataattgaatcttgggaatccttattcttgacgtaggaggtgaacatcttcttctcccccgtcatatgggttgtgcatncgctatcaataatccagcttggagccccggatgcataaacctg

SEQ ID NO: 51530 - DNA, 481 bp, Zea mays
  unsure (1)..(481): unsure at all n locations
agcttctaaagggagaacacgtgataggttttacttacgttcaattcgaaaaagatagaccttgtgcagcttgtcaagcagggaaacaggtgggaggagcacatcacagcaagaatgtgatgaccacttcaaggcccctggagctgctgcatatggacctcgtcggacccgtcgcctatctaagcatagggggaagtaagtatggtttagttattgttgatgatntttcccgcttcacttgggtgttctttttgcaggataagtctgaaacccaagggaccctcaagcgctttctcaggagagctcaaaatgagtttgagctcaaagtgaaaaagataaggagcgacaacgggtccgagttcaagaaccttcaagtggaggagttccttgaagaggaagggatcaagcacgagttctccgctccctacacaccacagcanaatggtgtggtagagaggaagaacacgacgctcattgacat

SEQ ID NO: 51531 - DNA, 270 bp, Zea mays
ataaaccaacccgaaccaaggccaaagggccccaacgtttttcacccccccaatcccgggagggagaaaaaaaaaagaccctccaacgcccgctcggccagaaccggccccccccccccgcaggagaggagacaacccctccgtaggaaccccacggggggggaaaaaaaccccccccgggggggccccccccgccccccccggggggagcgggaagcccaccccccgcgcctcaaagagtctcccccacccggccacccccccccgccc

SEQ ID NO: 51532 - DNA, 401 bp, Zea mays
  unsure (1)..(401): unsure at all n locations
agcttaaaacacctaataagccaaacaagtgttggtgcgcataagagctaaaagttgagtaagcaagagcagatggcaagaaagcgtgccagatgtgctcgcggtgtgctcttatttatacgcccagtgcgttgcaagtgggagggccccgcttgtcattgcctgatgctattctagcaaagggaaggtgttttttcggaccttcggcttaaggccttngtccatatcacaatctgaatttatcattctaacaaattaatattgcgaggggctactgttgggggccttcngcttccgaaggtcctcaaaaatatgatataacaatgtttctccagtatgatacatgaacaggtacctttggacttatgtcaaaactacagcgtgaagaagcacaaagaata

SEQ ID NO: 51533 - DNA, 406 bp, Zea mays
  unsure (1)..(406): unsure at all n locations
agcttcaatacttttttcctccgaagcaggtcttaatatggagcttcgttcgattctgacaaacaagcttcggcgacggttaaaaattttggcagcaaaacagtgcaaatagtagtaaatgctgtggtaacttcacacctactcgtctatttatatagtgccgcaggtaaaaaggcgaagcgccagaagttttacaccaggcggacacccgctcgcactcgctgtacggtggaccgcagagaccgaacagtaactctgcaaggtggggccgctacgcgcacggagattgaatcgtttctcgacaacgagctcagggaaggtgtttttgagaccttctgcgctccgaagcttaagaaactttnttcacggatcaagcttgttacgaanaacgatctatcaccgcgaa

SEQ ID NO: 51534 - DNA, 388 bp, Zea mays
  unsure (1)..(388): unsure at all n locations
agcttcttcaaggctggacttcngttcccttttatttgtttgtagttgaagtcctgaagatctaccaaatctttcttcatcagatcacccctgaagccgtaataaggatggggatttttgcctatgcaataaggagtcaagggctatatccaagcgcgaagtgcttctgcagtatgcaagaacttctatatgagacgaaggccatgggtaaagaacagtaccacaacaacttcggttgttatggatttatcgcccgccccaacgcaagccacccggtgccgacatttcggaaaagatggcctgnggcctggatggaagagtggttttatgtaaaaaatgatttgaaagcaagggaagacattaaggaagtcattatgcgccccatttg

SEQ ID NO: 51535 - DNA, 472 bp, Zea mays
  unsure (1)..(472): unsure at all n locations
agcttcgcacctctggactaantcttttgtttcgttcttcgctggcggccaatagaatcctgacctgaatacccttgcgactagagcgctggatgctgcatgaattccacattgccctgcatggacctcctccagaagttgcttaccggtggaccggagaacgcacttcatgaggatgcctgacgcgccccttctgtttagatcctccccaatgagtgtatagtgagctgactgcctggcaatgcgatctgccgagttcttgtcatctggctcttattcattctgtatatacttaataatcggccgcctccagtcatcaaggtgtgactggggctgatctatgatgttgcactcttctgtgagatccattgagatactcgggtggagaatatttgctcgaacactccgggtgggacctgagtttgactggatacgagcttgtacagcgcatcaggtgtcgtgctccgatctc

SEQ ID NO: 51536 - DNA, 425 bp, Zea mays
  unsure (1)..(425): unsure at all n locations
agctttatatcatagcatgatgcatatgctatttgatacagatggcttccagtcgagcaaccggtgcataggtctctccaaaatctaagccttcaacttgagagaatccttttgcaacaagtcttgccttgttccttacaatcatgccttgatcatcttgtttgtttctgaacacccactntgttccaatgattcttgcatcttgtgggggcttctccaggatccaaacttggttacaggtgaagttgttaagttcttcatgcatggcgttcacccagtccggatcctatagcgcctcatctatacatgtaggctcaacacaagaaacaaaggagtgatgttcaataaaagaagcatgtttatgtgatcgagtaataaccccttgtgaaggactcccaatgatttggttttgatgatgagcttga

SEQ ID NO: 51537 - DNA, 153 bp, Zea mays
agcttgtgaaggttcttcatcccccttgttctaagcggtgatgccacagccagcccatgctagtcttagctatgaagcatgcatctggaccggcctcttcttttgcaaaatcaacgtaatgaagattgccgcctaacacacccttataagcta

SEQ ID NO: 51538 - DNA, 457 bp, Zea mays
  unsure (1)..(457): unsure at all n locations
ctgtgaagattcttcatccncacatgtgctaagcggtgatgtctcagtcaacccatgctaatcttagcaattaagcatgcatctagaccggcctcctcttttgcaaaatcgactaagtaaagattgccgtctaatacacccttaaaagctaatgaaccatcacttcttctaaagacagacacatctacatttgtgaatagacaattatatcccatattgcataattgactaacagataacaaattatatccaagagactcaactaaaaacacattagatatagagtgctcggatgaaatagcaattttacctaacccttttaccttgccttgattcccatcaccgaatattattgaatcttgggaatccttgtttttgacgtaggaggtgaacatcttcttctctcctgcatatggttatgcatccgctgtcgataatcagcttgaacccggatgat

SEQ ID NO: 51539 - DNA, 455 bp, Zea mays
agcttattattactgttagatgtccacttttatattctttatgacagaacccacccctaagtaagagttgtagtgcaaagtggcccatttacacaacttttgttatttttgtctagagcatagctttttttaaattaaacctcaaaatcctaaaacaggctataatgaccaatgatcaacccactgtaatttttacagaatttttggaaaaagctaaaccactattgtagctcaaacctacactagaaaccataaatggaaaataaagaaagggaaaaatgaataatataaattagtgtcatcctaaaacccttgtgaattgtccactaaattataataaggaaataccaatcctctatgcttattcttaacaaaaacctaaacctatagtgataagcataaaccactaaataagccccgtatgagcaagaaaacactaagttactcattaactt

SEQ ID NO: 51540 - DNA, 440 bp, Zea mays
cttgcatagaaatacccccttcttcatggagtatgggtcagtatcattgttgccagcaaaccttgcttgtgtggcacccaagggatcctccacaaacatcacagaagaagaagcaacccagctcacaaaattgatgtgctagaggaggaacggctaaatgttgttattcagtcggctagataccaccaaacccacagacgctaccaccacaaggcgatacgtcccctgagcatttgcagaacgagatctggtgctccgccacgtacattctggggaaagacaccacaagctatcaacaccctataaaggaccctccttggtcacagaagaaactaagcaagctcataccggctaactcagatggacagtactccacatacgaactcttggaacattgagcatctcagaaagatttacccgaaacagaatcataaactcta

SEQ ID NO: 51541 - DNA, 430 bp, Zea mays
  unsure (1)..(430): unsure at all n locations
agcttgaacccggcttgtttgtgatgacgattgaacaactcgcagatagccttgcctataacagtatgaaggtaagaatattctaacttgttggaaaatagattatttttgtaacttatttctttatcaggatgtgctcatcctttgtttttgtagggcttaattctgagcaaggctttaaaggcccagaagaaagcagaagatgaaagctgcgagttagctcttggaaatcttccatcagaggttattacactaaggaatgaagctcttgataaagacaaaatactgctctccttattggataggctgagaactagcgaagccaagcctaacgcacaagacgaagctcacaaagccgaggtcgaagattaaagaaaaacttgctgaaaaaataaaaatttgaagtgctaaggtcatcnagaaataagtg

SEQ ID NO: 51542 - DNA, 434 bp, Zea mays
cttttcttgaagatccattcgcaacctatatgttgacaactattacgacggccaacgacctcccaagttccattagacataggagattccatctcactccttactgcttccttccataagtcagcatcatgagaggaatatgcctcagtaatggtagttggtgtgtcttccacaacgtacactataaagtcattaccaaaggattttgcaaccctctgtctcttgctctttctagtgaccatagtgtcatcctcatcacggatgtgcacgtgagaatcctcagcatgatctatatgaatcgacagttcctgctcatggggaaatatagtctcatgacttgtatcactatgtgtattcttcatgggaaactcattctcataaatgttgcgtctcttgattccatgatagtatcaacatacatatcaggcacatca

SEQ ID NO: 51543 - DNA, 307 bp, Zea mays
aagcttccatggtcaggataatgagggctatattttatatcctgctaattatcctgcgcacaaaattaggagaattcatgctaagaaaactcattctgtttctcaccatgcttttatgtataagaatgatgcttctagctctaggcaatcaacccatgttaaattgcctaaaaagaaaactcctactgcatcaaataaacctaacatttcatttaagacttttgatgcatcttatgtgcttactaacaaatcaggcaaagtagttgccaaatatgttgggggcaaacataagggctccaatacttgt

SEQ ID NO: 51544 - DNA, 466 bp, Zea mays
  unsure (1)..(466): unsure at all n locations
tgagtaacaaaatatcagntggagaaaaacgaatgtttgtttgtgtggtatcaaaaccgtgaggcatggataccggcatatttagagaaantnggcttaagggcattctgcgaacgacgtcaaggtcagagagtgcaaattcatttttcaaccgtttcatcggtcgcaagctcgcactagttgagttctggatatggtttgacactgcattaaaatgccaacggcaggaggaactaatagatgataacacttccatgcatacgaaccctaaactatttacaccatgggaaatagagaggcatggcggttctcgattcacacatgaggtatttagaagatttcaagaggaggtgcttgcagcatgggagcaatgtgatgtacataccaccgatgaaatggacgattgtataatcggtacagttgcagacaactcacatagagctagagaagtgaatcgcttcaatat

SEQ ID NO: 51545 - DNA, 428 bp, Zea mays
aagtcacctgcggcatgcaagcttgcttcagccgaggggtcttttgtatcttctatagataaggtagctttggtttaggccaaagctttcacgtggtcacagcctattttctccaaaatagccacgattcccctggcacctgagaaggcgcagacatccccgcgaccactcaaaatttctaaaaggcttcaacttcgttgctgatccaatcaattgggccttcaggatcgccccttacgaagttgtcctcgctagagaatgcgccaacattggcgaagctagattttatttgttgcacacactctatggatttttcttaacatttctcatttgaagaccgaagttctacaactgttttcttcccaataattttccaatagttactggcgtctcggtccgcttcggcaattgcacactttaacttcgct

SEQ ID NO: 51546 - DNA, 192 bp, Zea mays
acacgaaactagctagaatccaggcagaccaaatgaggttggtttttgtcaaaacggcaaagagttgcggtggctattaaccctcggcgtgaagtgaagaacacctgctgaggtgtttctccaagggagagggtttttgcgcttggaaaaaggctttttctttccgacactaatttattttttgaaaaaata

SEQ ID NO: 51547 - DNA, 468 bp, Zea mays
  unsure (1)..(468): unsure at all n locations
agcttccgcatggcccactctttcatagttttaaattactttgaaagccaaaaattcttgcactaagtccctagtgccgatgtgctccgcaataactctaaattcagccagagcacattgggttggaccctctggtgtcatgttacacggtggtctggtctctccgaagattaactctaatggactctggaccagcttttncttatcttcgtcaactttgacgtaaaaccactcagacttccagccagctgccacttgctacggtaactgatcactnggaaatttgtagtcttgcggtaggcaaaattgtagcagccaaagttttcatgtaacccatctcctctagccttggtctggtaatgaagctcatgcactctgcagaaaccttcggcaaatgggtccaccccttggcttccgagagccaaatataaacgctaagcctaacaatagcgttaggagttagctgat

SEQ ID NO: 51548 - DNA, 386 bp, Zea mays
agcttgaagccatggtaagtagcataggccaataatatactaattgactcaagcctagctacgggtgcataggtttcaccgaaatccaaaccttcaacttgtgaataccccttggccacgagtcgagctttgttccttgtcaccacaccatgctcgtcttgtttgttgcggaagacccacttggttcctacaacattttggttaggacgtggaactaaatgccatacctcgttcctcgtgaaattgttgagctcctcttgcattgtcatcacccaatccgagtcttgtagggcttcctctaccctgtgtgggtctatagaggaaacaaaagaagtatgcttacaaaaatgtgcaacaccagatcgagtggctacccccttatgaat

SEQ ID NO: 51549 - DNA, 435 bp, Zea mays
  unsure (1)..(435): unsure at all n locations
agctgcctcactgtcgagaattcattngcgtgtatgggcctctgttttattatttgttatcaactatgctcttattgggacttcctttatcgggctcagtagagaataagcatttcagtcaccaccatcatttctagatttatgaacgaatactatgctggataaacaaaaagtatcatacgtctgggttgtgcaaatctatgcatgtctgacacacgtattgatgttggacacatgcgagctgacaatcgtatgagatcagtaatctctttccacttacgactattctgagtgcttctctgatctaggctgatgtaggttctccactgttatgcagacgggctgctctatgaaccctggtgcatgtgctaaatatgtcggctcgtctctctcacatcttgtttccaatttcgaggtacacaagtgataccttat

SEQ ID NO: 51550 - DNA, 170 bp, Zea mays
cccctcaaagggccaaggacccactatgcaagcaactagagacagcaacaaaggaataagaaaaaacacaaaaggcgagcagttgggagggatcacaaccacatcatcaagcgcaaatgctcaaggttttcaagcgcacagtagcagacgagaaagaacaactccaataa

SEQ ID NO: 51551 - DNA, 343 bp, Zea mays
  unsure (1)..(343): unsure at all n locations
gctgagatgcacttgttctgcttcactagacgaactcgggactctctatataagccggggcggcggtgtcctctcctggaccgccgatcgaacggggacatgccatgtgcgcatagacacactgcagtgccggcccatctatcttattcccaaaatatcattacgcagacacacgtgttacgccagacttcctgctagtagacgcgccgcgagtcgnggagctcaatgcatacccatcatttcagccctgtagcacgcgcaccatatttggtccgcctacgactagccggtcaaagatggcctgctgctacgccgacaccggcaccatcaaggcatcatgcag

SEQ ID NO: 51552 - DNA, 327 bp, Zea mays
  unsure (1)..(327): unsure at all n locations
agcttctgtgccagaaatcacagaatgttattggatggntatttagttgtgattgtccaaagnttaatgccaaaaaggcactttctactgccttgctttttaaaaaatgtcaaacagcagatttcatatttttcctaagttcttaataacaaaacattaattatcccaaggtttgtggtatttttgccttggggttatttttctatggctcttctaagatttccttggtttcttaaaataaaaggtatccccattattttgttcttaaccagagtataatataattttctattgaactacactgaataagtggactaacaaaaatat

SEQ ID NO: 51553 - DNA, 484 bp, Zea mays
  unsure (1)..(484): unsure at all n locations
agcttgagggagcaccaattgagcttgtgtatgtgttaaatttcttctatcaacaaagaatttcctcatttttatgagacatgaaatataaatatatattattacaccatatatcattatatcatgaaaatctaaaaaatatactccccgtcccaaaatagtattctttattctttttaggctaaacatacattcatcaataaatctaagaatatagttgatatgtatgtctagattcattatcattcatttgaacgtggatgaaaaaagagagctagaaataactatattttggaaaggagaaagtatttaagttgagcaattgaaatattaaaatgtgtcatataagcttgaggagcactaatttgagcttgtccttgtgttaaatttcttctatcaaccaagaatttccttattnttaatgtnttttctagaatatgcaaatgacatngttagaattcagaatttttgtctaagtatatat

SEQ ID NO: 51554 - DNA, 87 bp, Zea mays
gacctataaaactcagcttcgcatctgaaggcagtttcctggaaaaagattaatcttgttctcaatcttcctatgaacaggagatat

SEQ ID NO: 51555 - DNA, 394 bp, Zea mays
agcttctcaaatactggatgggcaattagtttattgtaggaggaatttgacatgattgttgtagggggtttatgtggctccgaataccatgtaaatattcagagggcaggtgaagcgtcttaccctgttaggggccgcgtgcgtgtttatatgggcgcccggtgcgcaaggctatacaacagatatacttgagtaacaacctttatctattcctaagcaaacatatctagccaataaagtagcgggaggttgttacccgagtacaggatatacatggatatagaatacattgcatatctattctaatagtgcactctaccatggcggcagtcgccttctcccagaccctcgccaagggggctagagcgttggcaacaacagcaagctgacaaag

SEQ ID NO: 51556 - DNA, 443 bp, Zea mays
  unsure (1)..(443): unsure at all n locations
cggatacacaacgaactccatcactgcataacaagatccccattcttatcacccaaaggcagatgtggaattgcacatactcgtagttataaggaaatgaaaaacgatcaaataaatatctcatctgacaaagtcccaaagcaaaaacgatcagatgactgaattttgagattaaaacaccaaaaaatgccagactacattaatactaaacataaacatagacatccacaaattagctttactatttcataccaaaacagatgttgaacttccaaacgaataatttagagatgaaaaacgggttcgcaacacaaccaagcatgctttactttntctgagatgttgtgaaaccacaacacctatatagttctatggcattcgtgttattntcaccacagatcaattaagaacaaatacatatagacgtctcatatacattaata

SEQ ID NO: 51557 - DNA, 495 bp, Zea mays
  unsure (1)..(495): unsure at all n locations
actcaagcttagaagtcgataaactattgggtaacgatcatgtcttctattcttcttcattttctgagaaagctcagcaatagtctgtatgttggagaatctatcatcatttatcacatcaaatatgtagaggccaagttcattgctaaggtccctcagattcccagaatcaaaatcatgtggataaagctttgctaggctcaacaacttgttcacattaaaatcacaaaacgagtctcttggactaaaagaggccgagcatacaagcaattgagagcttgtctcgttgaagcggctgtcaagctcttggagtacccaatcaataatatcattgaaacaatctacttgatagcaatgcttggttgtgattccagatttgtgcctcctcttctttggatcaatatattcatctttcatttccaatttggcaatatcattcttctcacannaatcatacacatcatctattagtttttcccacttttctcttctaag

SEQ ID NO: 51558 - DNA, 477 bp, Zea mays
  unsure (1)..(477): unsure at all n locations
agcttcggtacactacgactttattctcttcatggtgtggacaagtcttctgcccttcgtcggccctcacaatggacaaataacggaaataccttcctctcatgttgacaagatgattctctttgatagttgatttaccataaactgaatggcttggtcgccagggacgatcttcggagtcttcaccaccgctgtccacatcataactgtcgatgtcaccagtatcctcagacaagccttctagaatttccttggtgattatctgtgagttggccttccacatcgctataagaaaccccaagtttttctcttcgtcaagactcagcttcatctcagcagcagccttcttatctccagacatcttcggaaacactaaaaaactgttttcaaagccgaagcttcaaaactaaaagctcagcaaatcttagtgcacaaaagctaaanatcgagtgagcgagagcagatggcaagagagcg

SEQ ID NO: 51559 - DNA, 439 bp, Zea mays
  unsure (1)..(439): unsure at all n locations
gcttctaagggagaacacgtgataggtctaactaatgttactttctaaaaagatagaccttgtgcagcttgtcaagcaggtaaacaggtgggaagctctcatcatgccaaaaatgtgatgacaacaatcaagacccctggagttacttcatatggacctcttcggacccgtcgcctatctaagtataggaggaagtaagtatggtcttgttatagttgatgatttttcccgcttcacttgngtattctttttgcaggataaatctgagacccaagggaccctcaagcgcttcctaaggagagctcaaaacgagtttgagctcaaggtgaagaagataaggagcgacaatgggtccgagttcaagaaccttcaagtggaggagtatcttgaggaggaaggaattaagcacgagttctctgcttcttacacaccacaacaa

SEQ ID NO: 51560 - DNA, 379 bp, Zea mays
  unsure (1)..(379): unsure at all n locations
agcttctaaagggagagcacattttatgactatacaaatgttcattntgagaaagacagggattgtagcgcatgccaagccgggaaacaagttggcactcatcatccacacaagaacatcatgacgactgacaggccactggagctcctacacatggatttattcggcccgatcgcttacataagcatcggcgggagtaagtactgtctagttattatggatgattattctcgcttcacttgggtgttctttntgcaggaaaaatcccatacccaagaaaccttatagggattcttgagaagggctcanaatgagttcggcttaaggatcaagaanattagaagcgacaacgggaccgaagtcaagaactctcatatcg

SEQ ID NO: 51561 - DNA, 384 bp, Zea mays
agcttatgaacgatgttcattctatgatgttctctaccgcggagacagagccaggccatagtatacttagcgattaagcatgcatccagatcgacattttctttagagaaatgaactaaatggagcttgccgtctaatacacccttggaagctgatgaacgagcatttcttgtaaagacttactcgtcaatatgtgttagtgagcaattatcacccatatgacataatcggcttacagacagcagatggcgctggagcgactctactagagacacatgagaaagggtatgctccgcagcgatgactattctgcctataccactgaccttgccttgggtgccatctacaaagatgatagtgtcttgggaaagcctgctcttgacc

SEQ ID NO: 51562 - DNA, 333 bp, Zea mays
tacagatttttaaaccaacttttctttcttcatcacgctaccatccagcagagataataactccacatccggcaccttacgttgcaagcaaccagccgccagcaaacgcctgtaggcactgcggggaccccaatcatttcaaaaacaactgcccccaattgaaggacccatggcccacctactccaaatcggtgaacgggccccaagtttcatcaacacccacccacaaggcgctcccgttcaacagccacctgagcaagactcaataccagggcagggcccgggtcaaccaccttgacgcgcaagaaacccatcaagccccgggagtagtgt

SEQ ID NO: 51563 - DNA, 319 bp, Zea mays
  unsure (1)..(319): unsure at all n locations
agcacctatcttggactggacagcaccaaaagatgcccgatgaatcaacacgttcattggaatggcccattattatcggtggttcattgaaccgctctccaacagtgtccggttcaagatacccttgcttgctaaaaangttnattccaantggaccccaccatgctcaacgtccttcgagacattgaacgacacatcgacaacatcgccaccattaattctgccatatgtccacaagtaattctcagtatattgtgatgcttcgcacaccggcctangatgtgtgttaatgcatgaaaggagagtacnggcatactac

SEQ ID NO: 51564 - DNA, 384 bp, Zea mays
gagggatacagtacacctgcacgcatgcagcttgtgagcagacaagtttttaatggagaaagctgcttcagccgatcagccgaagcccatgcttttatgtgaggacatagcagaacagaaggtgctattgggatcccaactgtctgaagaacaggagaaaaccttgatgaggcttctgaacagcaacagatatgtttttgcttggtcagctaatgacctttgcggagtaaaaagggatgttattgaacattggctgaatggcgacccatcctttatacccataaagcagaggcttcagaagatgtctgatgacaaggccgaatgtgctcggaatgaagtgaaaaggctccttagtgccagagttatcagagaggtaaaataccc

SEQ ID NO: 51565 - DNA, 440 bp, Zea mays
ctcggcgtagatgatgttgaggcagctgcccccgtccatctgaccttggtgagcctgacattgccgacaacggggtcgacgacgagcgggtatttccccgggctcgacacatggtcggggtggtcggcccggtcgaaagtgatgggcttgtcggaccagtctaggtagactggcgccgccaccttcaccgagcagacctcccggcgctcttgtttgcggtgccgacccgacgtattcgccgcatgccctccatagatcatgaagcagtcgcggacctcggggaacccccctgctgggtgatcttcgttcttgtcgtcgttgtgggccctgccaccctcggcgggtggcccagccctgtggaaatgacgccgaagcataacgcactcctcgagggtgtgcttgacgggcccctgatggtatgggcaccgctccttgagcat

SEQ ID NO: 51566 - DNA, 372 bp, Zea mays
tgcttattgaattttaaagtattttttttctcagaaaagcttactagtagcggatccttatgccaaacttttacttcacaaattaagtattttctctgaatttagatttgcctaatctagagcattcacttgtcctacactagcttcattttagcagctatagtttcacttggtatctacgatgcagggcagggatccaatcttcatatccgataagtaacggcgatccgaattgattaatactcagctgaggatctccaaccacacgacatatgtagcacttaacccttgcatatgtcaactcgcccatgggttattcaagaccagaacgggttcacgcgacctgtgagcacaacactccaccgtccagtc

SEQ ID NO: 51567 - DNA, 397 bp, Zea mays
  unsure (1)..(397): unsure at all n locations
ctgcgtggaatctgngagaggattcgatctcttgaaagtgtctataattgaatgcctanctctctgaagcggctggaagtgtgaaaacttggatgcaatgaatggtgggtggtcgggggtatttatagccccaaccaccaaactacccctttggtggggctggctgtcgtatggtgcaccggacaatccggtgcacaccggacagttcggtgcacaccggacatgtncggtgcgccanccacgtcaccaaagccgatgggttccgaccgttggagctctgncttatgggcccgcctggatgtccggtggtgcaccggacatgtactgtataatgtcccgcgcaccctcatgggcgtgcctgtcttctgcgcacactggcgctcatttattgcgctac

SEQ ID NO: 51568 - DNA, 365 bp, Zea mays
cactttttactctttcccttttattttctattctaggcttcaacctaaaggcacaattcataccatagtctctatatatttaacttcaaaatgcacatgcacaataaactccagcattaaaagtagatttttatattaattaagtcatacaccttaaaatattcattataaggaaataattcctagtgtatatccctttacaaagagacgatttaacttaaattctgagggagtacgtatagttttgaaccaataaattacttagttcccatagggatccttttcatttaatcttttactaaacagtatttattacatggtgcaaaagctattgtaacgtatgcgataatgcttccaatcaaaca

SEQ ID NO: 51569 - DNA, 476 bp, Zea mays
  unsure (1)..(476): unsure at all n locations
ctaagctcnttgacaataaaatcacttcacctagttctaacacaaatgcatagatgccggaatgaaatttttgagaggttaaactatgtatgaagcagggatatgcatagacatgctttctcttccttttatataagatgtgcaaggaatgtatagaagaggaagtagttttacccttttgtaccttcacatagagacgctctcttcattgtgctttgtccttagtcttagttgcttaggacctatattcaagacagtgtatggaaatattttgcacaagagagggttctacaactagtgatccttttctaagtcattgttataatatatcaagtagatcacaaattgcataaatgtatcatgaattctccttttaacttagtgcatatcaagagagatatcgattganattatatgaggcactaagaaacataagtgttaattgaagttattcaataatcaaacaaataacagat

SEQ ID NO: 51570 - DNA, 345 bp, Zea mays
agcttgtattatgattgtcagcatttatatagggcatgaatgtaatttctcacaggctgcgtcctgtgcctataaatagatgaacagtacccccgtactgttcacggaatcttgtaatcgcttgcacgcgacactcggattatttcctcctgtcaagccgaaggtacatgtgtaattaattactatgttttaatatttaagtttatatgataaaacatatggataagtttatgtgtgtgaacatattaacctttgtatttcatgtcttatatattctatcttttcattatttcataaccctagtcatgaaggtacgcccttcatgacctttgtccaagaccttca

SEQ ID NO: 51571 - DNA, 251 bp, Zea mays
ggtcattcccattatttgacaaagcgcacacccactgatcagctaatacaccatcaagagccttactattattagcactctgactcttatgtgggtcaaaataaatggatttcaaattggacttgtgttgcctccatctttctccaattgatcgcagcacccatgttttcatgcgggcagggtaaagaaatctcttctgcataacaattggaaaagaactgtgaaagtgtactgttactacatggcaactg

SEQ ID NO: 51572 - DNA, 353 bp, Zea mays
agcttgccgacgaggatattgctcttattattaagcgcttccggtaaattctcaagaaaaggaaagggaaggattacaaaccctgctccaagagggtttgctatcggtgcggtaagtctggtcactatattgctaaatgtccatatgaaagtgatagtgacagggacgactacaagaaagggaagaagaagacggagaagaagtactacaacaagaagaagggtggtgaggcgataggaagggagtgggactccgacgagagctccaccaactcctcctctgacgaggacgccgccaacatcgccatcaacaagggtcttctcttccccaacgtcggccacaagtgtctcatg

SEQ ID NO: 51573 - DNA, 461 bp, Zea mays
  unsure (1)..(461): unsure at all n locations
tgcccagtccaacttaagaaagtcgtggacaacctatttactgacctcgttttcttgctagcctcttcttgaatctcgggggcgagattcctgttaatggggttagatctgtaacaccctgaatttggggggtataatttttttctctaatatccatcaaattcaggtattaccctctcttgtccttgcttttcttttcattatcctaaatattgtagagttattttgttatgtatatatgcgtaagcctagtaaataaaaccctaaaggaaataatgattattgcatcatgccacaatacatctatttttgtatgatgatttgttttggtgtgcatctatttaaactcgtagagcatgcttgaacttgaattcanaacttaaaacaatattcaaatagagaaaagggagaanaataaaaagagaagataaacccaataccnccttccatgctccccaccc

SEQ ID NO: 51574 - DNA, 362 bp, Zea mays
agctttaatcttttatagctcaaattttatggacatatttgaaacttttatgtgaatgcacataatttcagcttcaacagagtttatatggatcattttttggcttttggagctttgctttgcactagcaggcgtcatgacactgtcacatgtggagtagcagccccagttgtgagcgcagcactgtccacactcacctaggtagcgcataatattaaatgcttttaggccgtgttcgatagtacacctatatatagtcactcaaaatatttttttgcaatgttttgtagggccggtgatgtaacacccctggtgtaactagaactaaaacatgggtatgacatcatatgcattgacatttc

SEQ ID NO: 51575 - DNA, 464 bp, Zea mays
  unsure (1)..(464): unsure at all n locations
tggcaccacatgtttgnttttgcaagcccttttgtaaatttttttcaaagtctttttgcaaatagtcaaaggtaaatgaataagattttgagaagcattttcaagacttgaaattttctccccctgtttcaaatgcttttcctttgactaaacaaaactccccctcaataaaatcctcctcttagtgttcaagagggttttaagataccaattttggaaatactagtttctcccccttttgaatataataagatatcaattgaaaaatgcatcattttaaaactttttcttaacttcaattntggaaattggtggtggtgcggaccttttgctttgggctaatactttctccccctttggcatgaatcgccaaaaatggatacttgagtgaaatataagcccttgtaactaatttctccccctttggcgaacacaatatgagtgaagattatatccaaagtgga

SEQ ID NO: 51576 - DNA, 369 bp, Zea mays
  unsure (1)..(369): unsure at all n locations
agcttctctctaccgaagctttcatcacatgtatagnttataatactctctctatatcaaaataaaatttgttttgcttctttagtggatttatcatcgctgtcacaacccaaccaagtcattgctgtcacaataaccaatccagaacataaactttaaaaaacaggagttgagcggaagtgactgggccgaaaccgacccgctcggcccacgaacacatgagaaaactggccccgcgccatccacctgcgccagcgctgtgcaattttgcgcaatcaccctcgttgcatcagctaaccgaataaaggtcctatgtaatatttgattgtttcactgacattagcactgagatccctgtctttttgctta

SEQ ID NO: 51577 - DNA, 365 bp, Zea mays
agcttttggctcttcaattctttcatccttcggtgttgcagtcagctcttcagttttctgcgcaggtataggttttttggcttcagtagccgaagaagcctcgccgacaaactcgggcactatggccggctcaatgtaacatggccggtgggtaagaaccttcaccttttttctcttcggtgttggctcactaggagcggccgaagcaacttccttcacagaaactataccttttcttttgtgaccccgtgacgggtagcgatagtcaggatagaccaacccaatagcatcaaaaactctattcagcctcttctttttccggccttcgaaggccgctgataacgcaatatcttctgcctttgagt

SEQ ID NO: 51578 - DNA, 447 bp, Zea mays
  unsure (1)..(447): unsure at all n locations
tctaaagggagaacatgtgatacgtctaactaacgtgctattttttaagatagaccttgtgcagcttgtcaagcaggttaacaagtgggaggagcgcatcacagcaaacatgtgatgaccacttcaagacccctggagctgctgcatatggacctcttcggacctgtcgcctatctgagcataggagggagtaagtatggcctagttattggtgatgacttttcccgcttcacttgggtgttctttttgcacgataagtctgaaacccaagggaccctcaagcgcttcctcacgagagctcaaaatgagtttgagctcaaggtgaacaagataangagcgacaatgggtccgagttcaagaaccttcaagtggaggagttccttgaggaggaagggatcaagcacgagttctccgcctcctacacaccacagcataatggtgtggta

SEQ ID NO: 51579 - DNA, 356 bp, Zea mays
agcttgaaggactgcttctttatgagagcttccgaacgtgaagacttgttcgatccacggagtcgctttatccgagcgcgagttacttatcgcagaaggtgatgagtgaggtatccgtatcccggaggcgtaggagtccctcggctcggtcagccttggctgcttacgtgtactccgtcgtttccaggatccgctttccgaagtagtcaagaagcacgaaagtaatccttctaaaaagagatcctttttcgaggaaaaattcgacgcagagggggtctccccccttttagcccccgagggagggtcgggctttgccgaggctatgccgaccctttcttgatgactaaactttgcgc

SEQ ID NO: 51580 - DNA, 440 bp, Zea mays
  unsure (1)..(440): unsure at all n locations
tctagatatgtcgaggtgacaaatgatgagggtgaattggtagttacaaaggtcgcagctaagcaacttcgttggttgcccatcattccttggctttcaagggtgttcctcaataaggaaatagctctgcatatgacatggccaaagaatggggtacgtctcgtcactgatccagaaataatggtccatccgtcggacggtgatgcgtggaaggcatttgacgagtttgatcccgaatttgcaaacgaccctaggagtgtacggcttggtctatcgacggacggattcacacctttcaatagcagtgcaagcccttactcgtgttggcttgtcttcattgtgccatataatcttcctcctgagttggtcaataaagaagagttcatgttccttgaactaatcatnccacgccccgagcattcaaggccaaagctgaatat

SEQ ID NO: 51581 - DNA, 355 bp, Zea mays
agcttctaaagggataacatattttgggactaaccaatgttcattttgagaaagacaggatttgtagcgcatgtcaggcagggaagcaagttggtacccatcatccacacaagaacaacatgacgaccgataggccgcttgaggtactccacatggatctattcggcccgatagcttacataagcatcggcgagagtaagtattgtcttgtaatagtggatgattattctcgcttcatttgggtattctttttgcaggaaaaatctcaaacccaagagatcttaaagggattcttgagacgagctcaacatgagttcggattaaggaccaagaaaataagaagcgacaacgggac

SEQ ID NO: 51582 - DNA, 452 bp, Zea mays
gtagcatacgcaagtaatatactaattgactcaagtctagctacgggtgcataggtttcaccgaaattcaaaccttcgacttgtgaatatcccttggccacaagtcaagctttgttccttgtcaccacaccatgctcatcttgcttattgcggaatacccatttggttcctacaacattttggttaggacgtggaacaagatgccatacctcattcctcgtgaagatgttgagctcctcttgcattgccaacacccaatccgaatctctcaatgtgtcttccacccggtatggctcaatagaagacacaaaagggtaatgctcacaaaaatgtgtgacacgagatcgagtggttaccctcttatgaatatcgccgacgatggagttcacggggtgatcttgctgtatcgcttgatggactcttgggtgaagcggtcatggaccctcatcatc

SEQ ID NO: 51583 - DNA, 359 bp, Zea mays
agcttggagagagcatcaccttgtttcttgttccaccttcagatttctcagagcaagtactgagagtgcctggaaatgtcaacatatctggagtcattctgagggttcagcagtcaaatccagattacagctcaccaaatcgcaaaccattggatagagctcacccatcttctgcaagtaattttaacactgatgtaagaaattgtgaagatctgcatgcactgagaaggctcaatccttcagatatcagcacattccctcagggtccaaaatatgtctgctcatcaggtggaagctataccccaacaaatgcagattttattccgccctataagccagagagtgcttcttcatatgtc

SEQ ID NO: 51584 - DNA, 446 bp, Zea mays
  unsure (1)..(446): unsure at all n locations
actcaacttctaagggagaacacgtgataggtctaactaatgttcaattcgaaaaagatagaccttgtgcagcttgtcaagcanggaaacaggtgggaggctctcatcacaccaaaaatgtgatgacgacatcaagacccttggagatgctgcatatggacctcttcggacccgtcgcctatctgagcataggaggaagtaagtatgggttagttattgttgatgacttttcccgcttcacttgggtgttctttttgcaagaaaagtccgaaacccaagggaccctcaaacgcttcctcaggagagctcaaaatgagtttgagctcaaagtgaacaagataaggagcgacaacggatccgagttcaagaaccttcaagtggaggagctccttgaagaggaagggatcaagcacgagttctccgctccctacacaccacagcaaaat

SEQ ID NO: 51585 - DNA, 365 bp, Zea mays
agcttctcctggacaagcgtcgtactcactgcagagtgcgaagctgccacatacagcagcagaagagcccctgacgctggtggagttagtgtcgttagatcgatcagatactgcttcagctcttcgaaggctttctgctgaactgatcctcactgaaagatttcggccgacttcagcacttcaaagaatggtaaatttctctctgctgatctggatataaaatcgattcaaagatgccaatcttcctgtcagccgctgagcccccttctttgtgcttggcggctccatccgaagaatggcttcaattttgtttggattagcttcgatcccttttgttgaaattagacaaccaaggaatttgccct

SEQ ID NO: 51586 - DNA, 471 bp, Zea mays
  unsure (1)..(471): unsure at all n locations
tgatgtttagaatgacattagcttctcccaaatctttcatttcgaaatttctcgatagaatatttttaacttcctcaatcacattgagatttgatccaaagatcaagatgtcatcaacataaaggcacatcataacagactcacccccaccataccgatagtatacacacgtgtcagattcatttacagcaaaaccagcagttgtaagagtattatcaaatttttcatgccattgcttangtgcttgttttaggccatacaatgattttatcaacctgcacaccttgttctcttgaccatccgcaatgaacccttctggctgatccatgtagatctcctcatccaactctccatttatgaaagctgtcttaacatccatctgatgaatgataagaccataagaggctgccacggctattaatgtgcgaattgagtcaattgagccactggtgagtaggtatcaaagaaatc

SEQ ID NO: 51587 - DNA, 366 bp, Zea mays
agcttcatctccatctatgttatttattgctttcgaatcagtccagtttccttcggcccttctggcaacttcctggcttccatgaatagcgatgggtccttgatccgaaggtatcttcatgcaaagataggcagggtgaagtattgcttcaaaagcattgagggcgccacgaccaataattgcattgtaagggtattctatgtcaacaatgtcaaacacaacttgctcagctctagtgttgttgatgaacccgaaggtcactgacatggcgatcttgcccaatgctacaatctgtcttcctccgaagccacagagaggatgtgtagcatcatgaatcttatcttctggctcttgcatttgactgaa

SEQ ID NO: 51588 - DNA, 468 bp, Zea mays
  unsure (1)..(468): unsure at all n locations
tgccgaggttcttcatncncacatgtgctaagcggcgatgtctctttcagcccatgcaagtcttagccattaagcatgcatctagaccggcctcttctcttgcaaaatcaactaaataaagtttgtcgtctaatacacccttaaaagctagtgaaccatcacttcttctaaagacagacacatctacatttgtaaatagacagttatatcccatattgcataattgactaaccgatagcaaattatatccaagagactctactaaaaacacattanagatagagtgctcattagaaattgcaattttacctaacccttttaccttgccttgattcccatcaccgaatataattgaatcttgggaatccttgttcttgacgtacgaggtgaacatcttcttctcccccgtcatatggttggtgcatccgctgtcgataatccagcttgaacccncggatgcataaacct

SEQ ID NO: 51589 - DNA, 368 bp, Zea mays
agcttcaatagcttctgagttctttttctgcttgctgaaacccgcactcgttgtgagcaccctgtcttgcacacctgcaagacacgtaacattgggaagtcaacattaactgcggactagaagtcacttcatgcttaaataatgtcccgaagatggaattactcttgataataaaagcgggaaaataattggatgcttccatgaaaataaaagcggcaaaataattggatgctcttgtctgttgattctgacattgaaactgcatcgaatattcaggtcctcaaaaggaacccattaaaaacataacgaaaggtcaaccatagaggcacatggaacccaaataaaaattcattcccaacttaccaccc

SEQ ID NO: 51590 - DNA, 496 bp, Zea mays
  unsure (1)..(496): unsure at all n locations
cctatacaaactcaagctcgggttcgccccctcggngaggagtgcggtgcatttaagaaatctatctggcggctacagacctgcggaatcttcgtaaaggctacttaatgatgccctgctaagccacctatgtagtggtcaatggggagtagctctctccgggcagatagggaatcacgccttgtgggtaaagtgcacaacctctgcagagtgtctgataactgatatatcagccgcgctcgcggttatgagccgccaatggagctccactgattactggtacttgatcagagacactttggtttacaggtggcaatgaaactgatggttttggttatgactatggcgctggtaagtggtattccttccgtctggaaagggtacatcgggctaataacttgagttaatactaacacctggctttctactagtaaataataatctgaccaacttaaagcaactacttgacttatccccacataaagctagctcacta

SEQ ID NO: 51591 - DNA, 323 bp, Zea mays
agcttactagtagtaggtccttatgccaaacttttacttcataggttaagtacctttcctgaatctagatttgcttaatctaaagcattcacttggcctacactagtttttttagcatctttagttcccacttggtaactacaaagccaggcaaggattcctcttttcatattctaaaaatgtggccacccaaatctttaatacccaaagggggatttccaccccccaacatagtaactttacccttggtattgaaacctcccccgggtttgaaaaacaaaaatttttcaccaaccggaagcaattccccaccttcacccctt

SEQ ID NO: 51592 - DNA, 445 bp, Zea mays
  unsure (1)..(445): unsure at all n locations
tgaaccagataaacccgctaacccactgtctcaagctcatcgttctagtcccaacggttcaccatgtagagtgagtccactagcttttcctccgaacacaaatcctattgtcacctggtttctgaaaccacgaaaaaatcgtttcttgtttcaacaactcataaatagattatatgtccacaactttaaaaaatccgtaggcgcatttgatcctagttgtttgtacgtccagaaaatgctgcgtttattaattttaagattaacaaaatcaccacggacatatcgtttaatattttaaaaatgattggatatataaactcaagcacccgttataagttggagagccaaatcaagatgattgggtttgactatcttcttagttggcctacaaaatttataattataaaataatatcctctacatctaanaaatgcaactctaccga

SEQ ID NO: 51593 - DNA, 362 bp, Zea mays
agcttatgaagattcctcattctttcatggtctaatcggcgatgccagagccaacccatgttagtcttagcaattaagcatgtgtcgagttcagctttttcaaaatctactaaatatagctgaccctctaacacacccttaaatgctattgaatcatcacttcttttaaagacagtgacacctacatcagtaaatagacagttgtagcccatttgacataattgggaaacagaaagcaagttgtaatctaaagaatcaacaagaaaaacattggaaatggaatggtcatgagatatagcaattttacccatacctttgatcaaaccttgatctccatccccgaatgtgatcgctctttgggg

SEQ ID NO: 51594 - DNA, 298 bp, Zea mays
  unsure (1)..(298): unsure at all n locations
tttggggaaaaaataattaacctctattctacacaaaaataaccagaactatgacagacggggcattttacactacatcttctatctataagtgagactgtagatatttttcctcggatctaagtgcaacaacatggtgctctgcctaatttcacccaaagatacttaccggcgttttatctatggggtttcgaaatntaatgcaaaagaagcacttacaactaccttgccctttgaaaaatgtaaaacaacccatctcataattttcccaagcctctctgttgattaatatgggacg

SEQ ID NO: 51595 - DNA, 363 bp, Zea mays
tagttcagaacgggcttcttttgtctatgttgagtggcccatgggacttggaagagggtatagatgtccaaatgggccacccggcacggacccggtccgaacccgttttggcccggtatcgaatagggccgggtcaggcatgggccgttaatgcttcgagccgggtcgtgctaacccacgtgcctatgaacatgcttaaacccgacacgcacagggataaatcgtgtcgggccggcccgttcgcccggtgggactcaacgtaccggaccggccactgctccggaccaacagtacagcatatataaatacatacatttaacagaattaatcatataaacagtatactaaagtgatcatataaac

SEQ ID NO: 51596 - DNA, 471 bp, Zea mays
  unsure (1)..(471): unsure at all n locations
ctctcttcatgaccgatcttaacgatcgaaccatncttcttttatctgcaaagcaaacggtaatgaagaaaaatgatagacaaaagtggaagcatagggagagctatgaatggacatccccaaagtcgattctttacggatagtctaccacctgcaagctttatgtgttttcatattcgagttggtctcgatggctaacatgtagaactctaagaaaacattggttggcaaaatgcacaaagggtatttgaaacacataaaatgtgcaggttgtcaaactcttttacatgacccctttcgccttcttgatttccatgttctacgacctcaagccttgccaggcttggtttctttaagctcctctaagccaccaacagtaggctcctcaactcccacaccccatctcanaaaacaccctctcccaacttgtattgcttggccacncttctcagcaacaatcattaatacatg

SEQ ID NO: 51597 - DNA, 362 bp, Zea mays
agctcctgctctacttcttcttccttttcgaacgcctcgcggtgcttcgccgccgtgtcctgcccatcatgcccccagtccagaaccttcactgcatccaactacaatgtgttcgaaatttttagccgaaataaggctttccagtttccatcagcctccacgccgataatatatttctgattttctatcggtgaaaaattaaaccgtacgcgttttggattttttttaaccggtgaaaatttaaaccgtggcagcggcagcacatcgtccgggcgagcggtgttgtatatatatatggctgatagagcaagcatgttcagcggcgtcgcttaatttgtttccacatataagcaggagcggcg

SEQ ID NO: 51598 - DNA, 473 bp, Zea mays
  unsure (1)..(473): unsure at all n locations
tttccatttgatggtggtattttaattcatttgggatgacacctatatggaactttacaattntgttgcacgtaactaggttcttagataactgtaggctgtcgaccacataccctgtaatgttttgttttggtggtagattgatgatggtatacctgtgatgactgattattttttcttgatagccatctgatgattgccattgtgctttatagattgatagcttttacatgggcataatggatcaataactgccatatatgcaacacaactgtgctatgcaaatgcgtcattttgacttttggtgactcattcatggtgaaaataaaaacttgtgcatgagcttttatgcaagtgaattgctaggccaggtaattctgtcctaatgagtcgtgagatataagatgtgattcccagtagatgggttgggtttgagaagatatattagttatatctattactatctcacatgt

SEQ ID NO: 51599 - DNA, 369 bp, Zea mays
agcttaataggtggataaattttcactgacatctgggaaaatggcggccgagggatggctcacgaaataataaagaagagcgaaaaagatactcatgacactagagaagcaacaaaagcagctgaaaaggctgcggagcttgagagacgaatatgtattacttaatgattttaaactttgttgtttacttttgtgacttcgaactgatttacgttttctatcgcagctgaactatctcctcccctggagcccttcgagtcactggtcgaagcagaggcaaaggaatcatcagaaattattaacatggctgaaactattatagacgaagtcgttacccaactgctgaccgaagctacagataaatgtttg

SEQ ID NO: 51600 - DNA, 437 bp, Zea mays
  unsure (1)..(437): unsure at all n locations
tatcgtgctcccaatttgaacgctactacgctatgtcgttttgaacgggccgagaaagcttcaaatccgcgggtgctcatagaccgagctctaggatggcgttcatgcttaattgttgatccccagtggaacgccaagggttgaattagatgtgagaacaaatttgagcagagattataggatagcgcggccagtattagttcaccggagcaacccacgccaccatccanggtcggggacctggtcatgcgaaggagaaagaaggggagggtttatgtgcacatgtcagtgagacatgtaaatagtacgtagggattctttaccggtttttcaaatggccgagggtctctgcgcaaagttgtcagcgcgggcgcgcgcacgtgtttccccgtctgcgggctgggttgggccatattttggccaacactattcataat

SEQ ID NO: 51601 - DNA, 343 bp, Zea mays
agcttgtgcgcttcttgattccttgataaaaggtcaatgagagtttgcatctctatttcatttaatgtttcacatttatattgctacgtttagttgtgtgctttagctttcatagcttagtcacagattagttggtaggactgaaacacaagctgtataaattcgtgagatagcaagcaacacttaaacaaagtcttattagttgcacgtagcagcccttcccaacaggccaaactttgtaataataattgtaaaagcaaagttgaaccctctggaaacaaaatatacaagagaggagagcctggtgaacggtgaccacggccgtgcacgtgcacgagtgagc

SEQ ID NO: 51602 - DNA, 475 bp, Zea mays
tctatgcttagtgtctgtagatgacactcgacaaaggaagtgcctttattgagtgccaacctagggcactcaacatagttaacggttgtcagatgtcgtcggatgttgacgccgatggatccaggatctgatcacaccccggaccggtcgatttaatcaactagagttccaatatattttgagataaatgtaatcaagttacgtagagatatacggatcatgtctcgggtagaggtgacaatgggtaaatacccaccgggtattactatcccatactcatacccgcgacaaaaaaactaaccccgttgggtcatccatatccgctggtgggtatggatttacccccatacccatacccatacccatacccatgtgggtatgggtcacccgtacccacaaaggttaaacatctatcataaaataaattatacatacatcaagtatatcaatctacatatcattacaaaatttcgag

SEQ ID NO: 51603 - DNA, 353 bp, Zea mays
agcttgggcacaccaccgtgaggccccccgagcaaggaatcggagtttccttcggcggagaagccagtccacgctcgccggagctctcgaccccgccggagtacgtggactgggtaaaccactccaccacccttcgattccttgtgcacacagtcgttgcttgaccccgtgatgctcaccgtgccctcggattgaaccagttcgccgtggtttggccggtatactcgccgccgacgaggacacccgcctgcatgcgtggaccgggcgattccggccacctccgacgtcgaaccgtaccttgacgtgaccgctagagtctccccgagccaaccccacccttcgccagaccttcc

SEQ ID NO: 51604 - DNA, 458 bp, Zea mays
aaacccttcgataaatcttcaataatattctgcaagtcccaagaaacttcggtcctccgtaaccgtagtgggtatgctacacaccactatctccttgactttagcaggatccactggtattctgccattagaaatgatatgttcaagaaatgacccctcgccaatccaaaactcgcacttgctaaacttatcgtagagttgattatcttgcaacttctgtagcaccaaccttagatgttcttcatggtcactctcattcttataatagataagaatatcgtcgatgaacaccacgacgaatctgtccaaatactccaagaacatcttatgcatcaaatccataaaataagctggtgcattagttaatccaaacgacataacgatgaactcatataatccatatcgagtcgagaaagccgtcttaggaatatctgatggtccaatcttcatctgatggg

SEQ ID NO: 51605 - DNA, 350 bp, Zea mays
agctttgattcccttttatttttgtaaatctttttcgcttatgcctaaccgtacacagatgacttctcatggatcctcggaaggagggaacacacattcccacaccgatggacttgcaccaaaaggttttccccccattttgtgggaggtgctccaggaacctggtattccaaccccttccaaaaacccggtgcacttgttcaaggacaaccgggtgccccgctgtagggtgaggatgaccctggagcctcatcccttacacccaggctggcgttcgttggactctgagtctttccgataccgagctgaggatactttcgaggccattgctctccacgggctaacaacct

SEQ ID NO: 51606 - DNA, 426 bp, Zea mays
  unsure (1)..(426): unsure at all n locations
taagatagtcttcagtcctggtgttgcaatctcattgacagtaactgtagtaatgatctgaacatcacatcaagcaagcagtcaatagaactcaaacttgagaaaaataacagatcaactaattagtcgcagaccaaattgttgaccaacacaaatagcatgcttgatactagtttgttagactacaattatgtgatatcataagaaatgaacatgttacaggtccattntgagcaaggcatgcaatttccaggggttaagtatataaatgtacatacagagagagaacgagagatttacatttgactctgagtttgctttcacatctacggtcatgttcttgttctttatctgtgaatggatctcactgaagatcaagtcagctctctttgtgctagtagcagtgacagcctgcctgaaagagta

SEQ ID NO: 51607 - DNA, 365 bp, Zea mays
agctttatcttagcctttaccttgatcaagtccttggtgaggcggatcacttcttacttgaggtcctcatttttccttgaaataacattcgtaacacgaacttgtttacaagagggtgagttttaaactaataattcaaagtggagacatcctttttgttaaattcaactatttcaattttagatgccttggggtgctatcggtcaactctagctaattgttagcttataattatactagttatgtgcccgtgcgttgtcacggaagtgaaaaattaatataatatatagatacggaaggacaaacatcactatgatatgcagaatctatatgacaaaatattatcgtaacattaatattatatt

SEQ ID NO: 51608 - DNA, 435 bp, Zea mays
  unsure (1)..(435): unsure at all n locations
agcctacttggtgtagactccctcttttcttcttccgtcaccttgaatgcgacgggttgcaccttgggtgttgaggtggtgccttgctccaagttgacaatatgtttggagtctttgatcataagtttaaagctcacaaacttgccaattactttctcgagagacatctgtttgtatctagggtctccacggattagttgcacttgagtgggattaccaacaacatgtgatctaagaataaccttgaccattctatggtcatcccacttggtgctcctgaggctgcgcacttgattgaccatggtcttgagccagttgtacatcgcttgtggctcctctccctttgtgaggacgaatcgnacgagttctccctcgatcgtttcgcgcttggtgatcttggtcacctcgtctccttcgtgcgtcgtcttgaggatg

SEQ ID NO: 51609 - DNA, 349 bp, Zea mays
agcttgctctgacgagtgttatttggtgggtactcgccaaaggatttgcataatccctaaagacagactttgtcgagtgcttgtcagcttgcactccgtaaagacatctttgcgagagccaggcacagggcactcatcaaagtatatttttaattaaaaaaattatttgccgagtgccaaatcgcgggtactcagcaaagaagtgaaacttaacagaccgcagccctctccttctcctttcattctctctcactcacccaccggtgtgcccgcctctctcacccgtcaccgccgccgtcacgccagcctccccggacatcttccccgccgacggcgctaccgcgtacct

SEQ ID NO: 51610 - DNA, 366 bp, Zea mays
agcttgaagccatggaagttcatatgcaagtaaaatgcgaattgattctagcctagctacgggtgcataggttacaccaaagtccaaaccttcgacttgtgaatatcccttggccacaagtcgagctttgttccttgtcaccacaccatgctcgccttgcttgttgcggaagacccacttggttcctacaacattttgattaggacgtggaactaaatgacatacctcgttcctagtgaagatgttgagctcctcttgcatcgccaccacccaatccgaatcttgaagtgcttcctctaccctgtgtggctcaatagaggaaacaaaagagtaatgttcacaaaaatgagcaacacgagatcgagt

SEQ ID NO: 51611 - DNA, 474 bp, Zea mays
  unsure (1)..(474): unsure at all n locations
tcgcgccaccatgactaaggtttatcttcgttaacaccgccggtcgtgctcggggacgggaattgtgaatatgaaagaatcggggggcagaaggaaaagtgtcagagagacatagaaacaagacttgggctctttccaaattgtttgaatggccaggggcctcggtgtaaatccgccagcgcgggttgcgggcgcgcacagttctgcgtggacttgggccagttgggcctatttcgacccagntctgttatagatttctccttttctttntgctgaccacttaggaaatgtgtgcaaaattgtagaaaaatggaaaaataatgaaatcaatttttctaaattcctaaaatcaagtagtatttaataaaaataattgcaagacttttattcaaactctgaattatgtagcatttaaaggtgcttagaccaagccttttagaaatctagaaatagttgaataattccaaaaatcat

SEQ ID NO: 51612 - DNA, 305 bp, Zea mays
aagcggacgatgcctcaaccatcccatgctatccttagcaattactacatgcatcttaaaccggcctcctcttttgtgaaatcaactaagtaaagattgccgtctaatacacccttaaaggctaatgaactcatcactttttctaaagacatacacatttacattagtgaataaacagttatatcccatattgcatacttgactaacagatagcatattatatccaagagactcaactaaaaacacattagaaaaagagcgctcatttgagattgcaattttgccatagcctttcaccttgcctt

SEQ ID NO: 51613 - DNA, 430 bp, Zea mays
  unsure (1)..(430): unsure at all n locations
tttcctatgtcgggtattttctctttctcccctccccatggcgcggccatgtgcatcgttacttcattcaaaccatgcncaaaggagagacatttatgacaacaaatctcatttttttataacatgattncgaccgcatgccaagcagggaagcaagttggtattcatcattcacacaagagcatcatgacgactgacaggccactataactcctacacatggacctattcggnccgatagcttacataaacatccgcgggagtaagcactgtctagttattgtggatgattattctcgcttcacttgggtattctttttgcaagaataatctcatacccaagagaccctaaaaggattcttgagacgggctcaaaacgagttccgcttaaggatcaagataattataagcgacaacgggacggagttta

SEQ ID NO: 51614 - DNA, 362 bp, Zea mays
agctacttctccttatcttttctgcattcagcaacacgcctgattttctcttcgactatacgtcgttgctcggcagcaagctcctctcgacttttttccatcctctctttgtcctctgcatcccacttttgaagattctccaaccactacttgtctttctctgatatttctgagtcaatccactgcttaaaatcacatagcggtggaggagtctacaaaatatgcaattattagtacgcaaaaaaacatttacaaaaacattcacaaattgtaaacatattacaagactattctcaccattaaattcatccgacgtagaacaataattggctcaaatgcaaagtttgcacacattcaatacc

SEQ ID NO: 51615 - DNA, 452 bp, Zea mays
  unsure (1)..(452): unsure at all n locations
acgcgtgtgttgattaccattgcgtgtatgattgttttattgtatggcatgaactcagtctgcataggaaggtacagtttatgtgtttttttatctgtccgcctgtataagttgagacgcgaggcatctccgtttctaccggaacaggctggtacacaccaggtggaggcgggatcggcaaccaatgaagccaattaaattactttggtgccatttttctgaatcctcgtgttcgcataaaatgacagtatctgtccagcctgatgcgcgtgagctaaagtgtgtgactaaaggggtatttggtttatacgagtaattcttagttcttttatcttattacattgtagtcgttaaattaacaaatacggaaactaatataaaatctagttnttatatttaacaatttataaactaaaatgaaaagactaacaattagtctctataaacaaact

SEQ ID NO: 51616 - DNA, 362 bp, Zea mays
agcttcgatgttggttgctttcctatatagtcttcttggcaatgcggtatcgaaaagaagcataagaaaagcaaatttaagcactggggattctattgagcgagctaccaagatgaaggctgctaggaacttggataaatcttttactgaaggtacgcaacatgttgcaccctcttgtttcttgcctagtgagaaaatcctttccaaccttagacatatcgctttcaaattttctgattgctctagtgacttacagaagtttgtggattttctttctaattctgtaaattcctatgctttagtaccgagtgacacaaatgtgatagatagggctattgctaaagaggaaaaggagttttatg

SEQ ID NO: 51617 - DNA, 472 bp, Zea mays
  unsure (1)..(472): unsure at all n locations
ntaatgcacaatttctcccccttcgacatcaaacaccaatatcacattcgagcaaggacatangatgatgtcaagggacaacagggtattaaggagaaaaaacatactaacaatactcccccttactcattaaacgtatgcaccgcaagcattaagatacatatacgcgaaagatcaatacttccttttgtacctttaccatgttgtggtgtagtttccatcttgggagtttaatctctaggaggctccttcacatttgtgcttgatcctttatcctaaccttttcttgttgctaagacaccaaacttataacaagttatagtattgcggcacaagatgaagcttctattctagtgattaccaaaagttctcaattgaagcatactaccaaggctaccaaaatcattactatcattgctccatagtatttatagataagcatctagaatcaccaactattatagagcacgag

SEQ ID NO: 51618 - DNA, 359 bp, Zea mays
agcttatcctcgacatttgttgttcgtgggcttagggtcgacgggaattaaccatataccgacgggaattagtaaacctcgtcagtttaatgcttattcccgtcggttctaggccgacgggaattaattggatttctgtagtgctagcgcgcccgcgcccttgtttccgacgaacctccaccgcgggcacgagcggcgccactactggtggtcagggaaccctgcccgtgcttgccgttggatcttgggcattcatccgatatcggtggacctaggtttaattagactagatctaatctcaatcatccatttccaattcggtcgctcgggtgtgtgtgccctcacccgtgccactgcca

SEQ ID NO: 51619 - DNA, 463 bp, Zea mays
  unsure (1)..(463): unsure at all n locations
taacctcatagaaagagatgaacaattttattatctctatctccactaatttagagcacagtttcgtgtgtcatgcgtcacgtaccaagcgtgtatgtgtgttctcgcttctcgcctaccaacgagtgcaataagctattacaccatagatgagccatgaaccactcaaattcaacacgataaggaaccacacgcagtgcaacgctcccacataataccatctcgttagctgaaggatgccagacaaccgagagagctataaaaaaggggaccgaactcattttcaactcgtacctttntcggtcttttgactaagataaaatgtaatatttgctcttatcagttcgatgtctgatatgtggaccatatattcactttgatatntaaatttttatgggtattaaataagattgtgtgctagcatatagccagtgctatcgctacgatcctgaggaggtaagcg

SEQ ID NO: 51620 - DNA, 370 bp, Zea mays
cccgggatcctctaagtcacctgcggctgcaagcttgtttagaagtgattgttttgttactctgttacaatctcactatgtggtaaaggtgttgagtcactttggttatagtgaatgtgatcctgctccaacaccttatgaccctagcatgcttttgagaaataatccgagaatatcaagggatcaattgacatactcccatatcattggcttgctcatgtaccttgcaagtgcaacaaggccagacatctcttatgctgtgagtaaactaagtccgtttgtgtcgaaactaggagatgatcactatcgtgctcttgagagagtgttgcggtttttgaaaggcactttgacctaccatattcattttatt

SEQ ID NO: 51621 - DNA, 439 bp, Zea mays
  unsure (1)..(439): unsure at all n locations
ggctcatcctctttcttcatccacatatggcgattttctttgtattagtccaataagctcatgaggtccgaagaagctactgcatctacacgggagtctattcttagtaaagtgaactcatccttccgacatgccttgttgagatatgtgaaatcaatacacatttccattttccattagccttcttcaccataatagggttagctagccactctggatatgttacttctctgatgacaccaccactgagaagtctctttacttcattctgagcaccttcggctttatcctcagacattntccgaagtctttgctttcttggcctgacagatgaatccacattaagtgaatgctccatgacatctctgttaataccacagagatagctggttgtcccagccgaaaacatccttgtgttgaacaaaaatcttagcacagt

SEQ ID NO: 51622 - DNA, 365 bp, Zea mays
agcttagcttcaaatcactatttttaaagtctgaacttcccaacctctctaaagtggcaccgactcataggcttatcatatgttctatgcaccgagttaatatgtccaaccgcgccatccgatccgatcaagcataagcatgataatatgccacctgacattgcatggtatgattatagttttgtgccatattgggtccgtacatcgtgccgacctctcggtccaagcttggtttggtcatataccgtaattgtactgcatcgtgcctaggggtggataacgagccaacttgactcgttaaggtaacgagccatagagtcagctctactcggctcgtttacgagctcgagctggctcatttagct

SEQ ID NO: 51623 - DNA, 444 bp, Zea mays
  unsure (1)..(444): unsure at all n locations
tgacacaccatntgacatcttacataaaatttctgagatctagaatatttagttcattcctcaacatgcaaaagcgggtcttatcaagaggcttagtgaaaatgtctgctaattgatcttccgatctcactccttctaaaatgatatctcctttagcaacatgatatctaaggaagtgatgacggatatcaatgtgcttggtgcgagagtgttgtacatgattattagcaattttaacagcactctcattatcacacaacaaaggtaccttttctagaactactccatagtctagaagagtttgtttcatatataaaatttgtgtgcaacaagcacccgcgtcaatgtattccgcttcggcagttgacaaggcaacactattttgctttttggatgtccatgaaactagtgatctaccaagcagatgacatnccccagaagtac

SEQ ID NO: 51624 - DNA, 352 bp, Zea mays
agctttatgggctcatattttatctaaacaccgtgctactaaagtatcttcatttgagcttgactatgggcaggaagcagtgctacctataaagagaagtttaaatgttgacaggttctctaagcaaaatgatctgactgttagtgattattatgatttaatgatggataatattgatgaagtaacccacaagagagtgacagccttaggagaaatagaaaaggacaagatcatggtcgccaaagcttacaacaagaaggttaaggctaaatagtttcaagtaggagacctactatggaagacagtcttgccactaatgagcacagactgatagtttgggatgtggtcgcca

SEQ ID NO: 51625 - DNA, 241 bp, Zea mays
tctctttgagacatttctgtcccaacacacaaagtttaataagagagtaatggtttccactttactatttatgattatgaccaaagaggataccccattgggcatattcaaatcaacccatgtatataaaataatgccagatcaactgctgttataatataaccaatacctaatgaacttatgtttttattgataacaatcattcatttgttatactgctgacgatgataatggccctaga

SEQ ID NO: 51626 - DNA, 380 bp, Zea mays
  unsure (1)..(380): unsure at all n locations
tgtatgagaagaaagagcagctaaggatgatgtcccaaagtgaggaatggtgtaaaattagtcatgtgaagaaaagtgctaaaggtgtaacagccacagccacattggtgaagccaaccttttggaatggtgtctctctctgtttgagagtatttgagccattacttaaagttcttcgccttgntgatggagacattaaaccatcaatgccttgggtgtatggcgaaattatttacacccccgaccaaattacaccggctgcatgaaacttacacaatacacggactggtttgtacaagacacttatggaagctgtggaggcgcccatcaccactagatctgcctgncctattcacatcgctgcctacttgtttaaccct

SEQ ID NO: 51627 - DNA, 446 bp, Zea mays
acatgtgctaagcggcgatgtcatatccagcccatgctagtcttagctattaagcatgcatctagaccggcctcttcttttgcaaaatcaactaaataaagtttgccgtctaatacacccttaaaagctagtgaaccatcacttcttctgaagacagacacatctacatttgtaaatagacagttataccccatgttgcataattgactaacagatagcaaattataaccaagagactcaactaaaaacacattagagatagagtgctcattagaaattgcaattttacctaacccttttaccttgccttgattcccatcaccgaatataattgaatcttgggagatcttattcttgacgtaggaggtgaacattctcttctcccccgtcatatggtttgtgcatccgctgtcgataatccagctctgaaccccggatgcataaac

SEQ ID NO: 51628 - DNA, 362 bp, Zea mays
agcttgtgaaggttcttcattcccacatgtgctaagcggcgatgccacagccagcccatgctagtcttacctattaagcatgcatctagaccggcctcttcttttgcaaaatcaactaaataaagtttgacgtctaatacacccctttaaagctagtgaaccatcacttcttctaaagacagacacatctacttttgtaaatagacaagttataccccatgttgcataattgactaacagacaggaaattatatcccagagactctactaaaaacacattagatacggagtgctcattaacaaatgcaactttacctcacccttctacacttgcttgattccccaccccgaatataatgaat

SEQ ID NO: 51629 - DNA, 462 bp, Zea mays
  unsure (1)..(462): unsure at all n locations
tatgaagactcttcatcccaacatgggctagtcggcggtgccagagccaacccatgttagtcttagcaatcaagcaagtgtcgagttcagctctaccaaaatccaccaggtatagctgaccctctaacactcccttgaatgctattgaatcatcacttcttctaaagacagtaacacctacatcagtaaatagacagttgtagcccatttggcataattgagatacggaaagcaaattgtaatctaaagaatcaacaagaaaaatattggaaatagaatggtcacgagatatagcaattttaccaagtcctttgaccaaaccttgatttccatccccgaatgtgaatgctctttggggatcttggcttttctcatatgaggagaacatncttttctccctggtatgtggttagtgcacccgctgtcgagtatccaacttcgagccccggatgcataaaccta

SEQ ID NO: 51630 - DNA, 369 bp, Zea mays
agctctagttgactaagagtcccttgttggatgatccccacgcttagcttttccattccctgacacaaagtattctcggaggtcttctccataatacagtggcaggaagtcttacgactcaacgcatctgccaccacattggctttacctgggtgataatggatctccaattcatagtctttaatgagctcaagccatcgtctttgtctcatatttaactctgactgggtgaaaatgtacttcaaacttttatgatctgtatatatgtgacagatattacccagcagatagtgacgccaaatctttaggacatgaaccacatcagctagctccagatcatgagttggatagtgctccttatgtcggcgc

SEQ ID NO: 51631 - DNA, 476 bp, Zea mays
  unsure (1)..(476): unsure at all n locations
ctatcctcatagccgaagcatctgccttctctgtatgatatgatgataatgattctatgtatgtctaaatgaatgtttatgaatgcaaatgtcatgatgtaatgtatcgtgcaaatgaatgttcaaatacatattcgaagccataagcatagccctcattcccttatgaatgactcaagtctttttgccgcttatttttcggcttcactgtttatctatcggtgtatcagcgctgacttttcgctgcaagcctcccttatgagcttcttcgccttttacttcagcagaatcagcgtttatttttcgctgtaagcctcccttaagagcttcttcgccttttacttcggcggaatcagcgtttatttttcgctgtaagctctgcattcccttatgaacgacttttgagcttctccctcttttcttttattntccctttgcacacgatggtgcattatcagcttttacatttacatttt

SEQ ID NO: 51632 - DNA, 326 bp, Zea mays
agcttctcacctctgaattaactcgggcgtatcactcttcgcttggggccaatagaattccgacctgaagaccttcccgactagtgttctggatgctgcatgtaatccacattacccggcatggatctcctccacaagacgctttctagaagatgggagaatgcactctatgaggacgcctgacgcaccccttctgtacaattgagagcacctagagggggggggggggggaatgatggatattaaaattctaaaaccccccttatcgtgatgtgggactgccaagactgaactcccaaaacgctgttcacaaccctattggaagc

SEQ ID NO: 51633 - DNA, 428 bp, Zea mays
  unsure (1)..(428): unsure at all n locations
gcgatccttgaggccccactgaatggatcaccggcgaagccgatgctttctaggaaattataaatggtcgtggagacgtctgcgccttttctggcgcgaggggagttgcagctatcctggagaagataggttgcgaacacgtaaaatccttggcgcaaaccaaagctgccttatctattgaagatacaaaagacctctccgccgaagcaagtttaattggtggaaagattttcactgacatctacgaaaatggtggcccacgaatggcccacgaaattataaagaaaagtgaaaaagatactcacgatgctagagaagcaacacaggcaactganaagactgcagaacttgaaaggcggataggtattgcctacactgtttaactctatgctttatatttgtgacttccgacttatttgtgttttata

SEQ ID NO: 51634 - DNA, 365 bp, Zea mays
tacttttcaacaaacttatatgaaatagagagtcatgtatgagaattaagaacaaaaaaatatgtcaacgaacttgattacatggccctaactacgtacgtacaaacaaaggagagatatttctcctcgattttcttaatgaccgttgatgtcttcacaacatgtttcatatttggtttttgccgctatcatatcgctaaaatatacagcacccccaattaatagtactctctctccatatatccaatcggatcccttgtgcgcgtcgtctacatttatttattaacaacagtttttcaacacgaattgaacggatgatgcatgaggcagtaagaccacccaagactggcccccgatcaaaccat

SEQ ID NO: 51635 - DNA, 420 bp, Zea mays
actgcttccgcaggagagcttccgaacgtgatgtctcgttcggtccacggagtcgctctacccgagcgcaagttacttatcgcagaaagggacgagtgaggtatccgtatcccggaggcgtaggagtccctcggctcggtcagccttggctgcttacgtgtacctcgtcgtttccaggatccgctttccgaagtagtcaagaggcacggaacaaaccctgctaaaaagagatcctttttcgaggaaaaattctacgcacagggggtctccccccttttagccctcgagggagggtcgggctttgccggggctaggccgaccctttcttgacaactaaactttgcgtaggtgcgaggtatatggaccactcgaaaacatcttaagggtagaagcgacgcgtagctgtttgatgttcccagc

SEQ ID NO: 51636 - DNA, 390 bp, Zea mays
ttaaaaaccaccacgccagcatgctatccttaataataatcttaatttcaaccagggctaattcgcggtgctatatccaacctatgttagtctctagcaataaactaatgctctactcatattctttgaaaatctaccaagtatatctgaccctttaacacttcctaaaatgctattgaatcatacacttcttttaaagaacatgacacctaacatctggaaatagacagctgtagcccattgacataatcgcgaaacggatagcatattgtaatatagagagtctacatgaaaaacactggaaatggaatggtcatgggaatatacaattttacccaaacctttgaccaaaccttgatattcatccccgaaagtgataacacgttgggg

SEQ ID NO: 51637 - DNA, 483 bp, Zea mays
  unsure (1)..(483): unsure at all n locations
ctatgaaactcagcttacatatcggggttcggtcctataccaccagccaccatggatacgattcgagaagagatagccaattaatccaagacagcctatgaatcaatatgtcgggctcctcggggtcgtcataacgaaaaccatatgatcaccgattttacaccatcgcatacccccgcaagggactaaaataccatatttctccaaatttttgggtgagtgtggtaagagcacacatgagcacataggctagttcttagcacaactaggtggattagccactatggaagttttcgacgttcggttattttctatgtcccttactggtactatctttgcatggtacattgtcttgccacctaattctattggctgctanggtgatttaaaacataagttccctaagcattctttctctagcgaatatgagttagaattagttgatctagcagcactctgatagggacgcgatgaatcaattag

SEQ ID NO: 51638 - DNA, 462 bp, Zea mays
tatgtcgatgatgtggtgatcaaaacagataacacatatttcttcttgaagatttgcagctggtcttcaacagactgaggcgataccggtggaagctcaatccataaaaatgtgtctttgaagtaccagcagggaagttgcttggattcattgtcatccaccgaggaattgaagctaacccggaaaaaatcgaggctatcgtgagaatggaagcaccacgatcacagaagaaagtgcaaaggcttattggatgcatggcagccttgagcaggttcatatcaaggctaggagaaaaaggcttaccattctacaaattgctcaagaaggtggacaagttccaatggaccacataagcacaggaagccctcgatgcactgaagaagttcctgaccacaccaccagtactgatagccgcacgccgagccatgccagatcagccggaacaagatctgatgttataca

SEQ ID NO: 51639 - DNA, 450 bp, Zea mays
  unsure (1)..(450): unsure at all n locations
tgcagnccataatgcctgccagtatgtgatgccctctgattgttgccttgaactctctccattccaccacgtggtcaactggctgcatagcgaggaagtggttccaccatgtccgtgcgggtccgcgaagctgctgggtggcgaacctgaccttagccacatctgaacaaactccatttatcagtgggaatttggattccactactctgagccatacatcagcatcaagcggatcctctgcccgagtgaacaacgacggcttagtgttgaggaactcctgataagtggctgctgctgggggacattgatggtgatcaccaccaccatagtgctgaggtggcggctgacgctgaaccaactgtcgcagaatctcattctgctgagccatcaactcttgcatggtangaagccgtggcggtggtggaggaatgcgctcattctgtccacacc

SEQ ID NO: 51640 - DNA, 366 bp, Zea mays
agctttatatgcttgaaagttggtacgaccaggatggatataggcccgtagccacccgagccatgggccaagctccaatatagattattgtctgtataggcccgtagccacccgagccacatgagccaaaattttgttaactcctttcaaaataccaaaaaaatctcatgattaatctacctcgccctaatgatattttattgtctgtattggaaatattgatttacattatctttattacatgtttcaaggatttaatatatgtttttattcttgtattagaatatatatctaaatttgaaataattgataaagaagaataaagatattgctttataaagctaatggtatctatatttacatcat

SEQ ID NO: 51641 - DNA, 433 bp, Zea mays
  unsure (1)..(433): unsure at all n locations
tctcacaattntctttgagggcattgtgagagggcttgatcttctcttaagacacttggagggttttatacaattccttcaagggcttaaattnttctttttctttgtgcatgtagtcatcggcctcacctaacattctcacaagatcatcatatgaatagccatcatcatcaacatcatcgatatcatcatcatcatttatatcatttaaatcggggatgatttttaccttatcatctccctttgccatgagacaatggggggatgagaagagtgagggagcttccttgatggcaattccggcattaagcttggatgaggtgtcatcatcatcatcatccgagctatcattcgagtcccattcaactaagaaggctttgccatctttcttcttgggataagaattctttttcttcttgtcactttcatcttt

SEQ ID NO: 51642 - DNA, 362 bp, Zea mays
agcttgagaagattcttcattccaacatgggctagtcggcggtgccagagccaacccatgttagtcttagcaattaagcatgtgtcgagttcaactctatcaaaatctactaagtatagctgaccctctagcacacccttaaatgctattgaatcatcacttcttctaaagacagtgacacctacatcagtaaagagacagttgtagcccattttgcataattgagatacagaaagcaaattgtaatctaatgaatctacaagaaaaacattggaaatagaatggtcaggagatatagcaattttacccaatcctttgaccaaaccttggttttcatccccgaacgtgatagcttcgtgggg

SEQ ID NO: 51643 - DNA, 172 bp, Zea mays
gcagaatgacagccaaaggccctcactctcaaatatgttggaatgtgctgacttatgttgatgacatcatagttaaaagcacgaagcaagagaatcatattgcttacttgcaggagacatttgccaatttcaagcaagctggtctgaaattaaatccacaaaagtgtgtttt

SEQ ID NO: 51644 - DNA, 369 bp, Zea mays
agcttgtgaaggttcttcatcctcacatgtgctaagcggcgatgccacagccagcccatgctagtcttagcaattaagcatgcatctagaccggcctcttcttttgcaaaatcaactaagtagagtttgccgtctaatacacccttaaaagctagtgaaccatcacttcttctaaagacagacacatctacatttgtaaatagacagttataacccatatgacataattgactaacagatagcaaattatatccaagactctccactaaaaacacattagagatagaatgctcattggagattgcaattttacctagcccttttaccttgccttgattcccatcaccgaatattattgaatcttgggaa

SEQ ID NO: 51645 - DNA, 466 bp, Zea mays
  unsure (1)..(466): unsure at all n locations
ggtagtaacgtcttacggaaacagggatatgatcaagctntctcttaatgggctactgtnaatgtcttccctgtccttttgtgtccagtagcagttaattaacgttgtctctgtgtaattaagcaaatccgaatgttactacttatggtactacctgatgttattatggtcagatcagtgttctttttgttttcttcttaatccgagagcacacgtattttcaaaactctacacttgttttgcactagatggacaagtctggcaaagtgattgcaaagtgggatattagaccaacaaaaatttacacagaaatttgtgtagaagaggtcaatgcccggaacatgccacaacacgttctaaatgccgaacggtatgctaacctcataatgaagtttaaggaacgcactggtcgcacttacaccanggatcaaatgaagaatatgtgggactccttacagagaatgtt

SEQ ID NO: 51646 - DNA, 361 bp, Zea mays
agcttgatgactaagattgtcgtttttctcccgctgccgctgagccagctcatatacatttaaagatatatttttgcacatggagaagaatgctgcaatgccatggaccatatgagcacccattccacgaccatgaccttgaccacgaccacgaccacgtggtgtgggagatccgcgaccaggagatggacgcgagggtctggtatcattaggtccacgagagctggagggcgctttcctcagatgccctgctggattgtttggatcaatccatacaggggtgtaagacagatgtcttgtgcctttctcatagcgaaattgagtgaccactttaatcatcttcatgatgaacggggcgtgg

SEQ ID NO: 51647 - DNA, 426 bp, Zea mays
  unsure (1)..(426): unsure at all n locations
agagagatttgcttgtgttctttcgagctcttgctctcggattgctttcttctttcttgactctttcttgcaatcaaactcacttgtaattgaggcaagagacaccaatcttgtggtggtccttgtaggaactttgtgttccaagtgattgagaagagaaagctcactcggtccgagggaccgtttgagagagggaaagggttgaaagagacccggtctttgtgaccacctcaacggggagtacgtttgcgagaaccgaacctcggtaaaacaaatccttgtgtcgcaccgctttactcgcttgcgattagtttttacgcnctctcgcggactcgtttatatttctaacgctaacccggcttgtagttgtgattatttttgagaatttcagtttcaccctattcaccccccctctatgcgactatc

SEQ ID NO: 51648 - DNA, 362 bp, Zea mays
cagccttgcgagagagagcgttctccaccctattgtcgctgcctttcttgtaagagactgagtattggagatcaagcaactttgttaacaccttttgctgccatacagtatgtgagcgttgatcattcaaatgtatcaagcttttctggtcagtatggataacgaaactagaatgttgcagataagatcttcagtgatcgacagccatcaatattgcgaggtactccttttcgtatgtggacaggccacgtgttttaggaccgagggctttactgacgtaagcgagaggatgtccaccttgcatgaatacccccccgatttcttgatcacatgcgtcagtctccaatatgaaagatttggag

SEQ ID NO: 51649 - DNA, 460 bp, Zea mays
  unsure (1)..(460): unsure at all n locations
gaaacgctgaggtaaagagggaactatatcaaaaatctttgttgttcttttgatacaaagnccctccactatgctggaaagccttttgaagcatttgggtactggcattgtgggagatcatatacatgaaaaatccaagctggtcttcgacactaactnctcatggggtacgtaacaaaccctctcttctaaaaaaatctgatgtggctttaaatatttctagctccattcnaaactcaaactngcaccaactctcgtgcccctcaagaatcttcttaaccttcttggcaccaaagagaagatgtatggatagaccttttctcttcagagaggaactggagtataccagggagaagaataaagaacaactcntcatcgcttcttcttcctcaacannaatgcctactagcgcttccaagacccatattagagaatcgagaatacctatcaacacataatc

SEQ ID NO: 51650 - DNA, 366 bp, Zea mays
agcttggacagtgttctgctatggtttctgaggaaccttccgtgcaggagcgactgctatcctagtagcaccttctaaagtcagaacatgttatgcagcaaggcttgattttagttgtacaaataatattgctgagtacgaagcacttctgttggggcttcggaagttaagggtaatggaaataagaagggccatcctgaaaactgattctcaagtcatttatggccatatagacaaatgtagcaaggcaagagactcgaagcttgaaaaatatctggatacagttcgaaggttggaggcttctttcgaaggtttttctgtcaagaatattccaagaggagaaaacgagcatgcagacctgttagc

SEQ ID NO: 51651 - DNA, 379 bp, Zea mays
  unsure (1)..(379): unsure at all n locations
tctaaagggagaacacgtgatanggttgactaacgtacatttctaaaaagatagaccttgtgcagcttgtcaagcaggtaaacaagtgggaggagcgcatcacagcaagaatgtgatgaccacttcaagacccctggagctgctacatatggacctcttcggacctgtcgcctatctgagcataggagggagtaagtatgggttagttattgttgatgacttttcccgcttcacttgggtattctttttgcaggataagtctgaaacccaagggaccctcaagcgcttcctcaagagagctcaaaatgagnttgagctcaaggtgaagaagataaggagcgacaacgggtccgaattcaagaaccttcaagtggaggaa

SEQ ID NO: 51652 - DNA, 413 bp, Zea mays
  unsure (1)..(413): unsure at all n locations
cgtcaacacgcagcacgccccgacctattgttcctactgtcggcgcttcgaccccggngggaccctggaccgaccagtaaattgtcgccgcgtgccccaccccatatgggtgggcgcgagaccgagcacgacagggggaaacgaggagacacgcctaaaggggaagcccctggccttcccgcttgtcctgcgcccacctcaggtgcgctcgcaacaaggggttacaaaccctctcccgtgaaggaacgagaggcctgcgtgcgttgagctgtcctctccgcgcgaccaacctccccgtaagagagccatgaaccctccttttataagcgtaaggagagggtcccggtgtacaatggggggtgtagcactgcgctaacctctctagcacataagagctagcgccctaagtacat

SEQ ID NO: 51653 - DNA, 374 bp, Zea mays
ctgcagcatgctgctactgcgcgttttttttcctcgcccgagcaggcgctgcgccctttcacaggatcatccctgggaagcgcgtccagcccctcgggcgactcgacctcccagtctgctttgggacacccttcaacttccgaagggagaccctgacgttcgaagtggtccggttccgaggaacctaccacgccgtgctagggaggccatgctacgcgaagtacatggccgtccccaactacacctacctgaagctcaagatgccgggccccaacggggtcatcaccgtcggccccacgtacaaacacgcgtccgaatgcgacgtggagtgcgtggagtacgccgaggccctcgccgagtccgaggccctcatc

SEQ ID NO: 51654 - DNA, 471 bp, Zea mays
  unsure (1)..(471): unsure at all n locations
ntatcaaacggacgtgaagagtgcctttctcaatggttctatctttgaagaggtctatgttgagcaaccttccggctttgaagacagtgagtaccctaaccatgtctataggctctctaaggcgctttatgggctcaagcaagccccaagagcatggtatgaatgcctaagagatttccttaatgctaatggcttcaaagtcggcaatgccgatcctacattatttactaagactcttgcaaatgatttgttcgtatgccaaatttatgttgatgatattatatttgggtctactaacgaatctacatgtgagcaatntagtaggatcatgacacagaaattccacatgtcaatgatgggggagttgaagtgtttcttgtgatttcaagtaaagcaacttcaagagggcaccttcattagccaaatgaagtatactcacgacattctaaacaagtctggaatgaaggatgc

SEQ ID NO: 51655 - DNA, 363 bp, Zea mays
agcttctctatgttgtgcttgttgcgtccaggaagctgcgccactatttccaggcacacagggtcatggtggtgacctcctttccattaagggccaccctccacaactctaacgccacaggcaacatcgccaagtgagcagcggagctcgctgagttccaactggacttccagcctcgccacgccatcaagagccaggtcctggctgacttcatcatggagtggacgcctcccccaagtgctcctgggggtctgaatcctgactcgggccccacacgtgcggagccaggggtccggtcttcaccgagccccactggacactcttcttcgatggattcgcccgtcagcaaggtggcggggctgg

SEQ ID NO: 51656 - DNA, 417 bp, Zea mays
tgtggcttctcattattttttgagcagagctatggattgacctaacatgtctcgggtgaaatcttccttcgaagcccctggtcatttcagaaaacctgaatgcttcctcccttctttggcggaagtcattgtcagctcgaatgtattcgtccattttctggagcagcttctccaacgtttgtggtggctttctggcaaaatactgcgctgatggcccccgccgaagccccttaatcatgggctcaatgacaatctcattgggcactgttggcgcctgtgcccttaggcgcagaaaccttcggacatacgcctgaaggtactcttcatggtcctgggtacactggaagagagcctgagcggtgactggcttcatctgaaacccttgaaagctagctatcagcatatccttcaatttct

SEQ ID NO: 51657 - DNA, 365 bp, Zea mays
agcttcatcgtcggattgatagggaggggctctcgagggagccgtcgccgcgaaacgcctgatgacgacgacgatgatgaaggtgatgacgaggaaaacgacatggctgtccgccttggcctcaaccctggcttgaggttaggccaggcgccgtctagccagcccccgagcgggctgataccgtcagtccccaaagttgggacgccggggtcccggcccgaggagcgggggcaatccgagagggtacttgacccctcggctgggggagttgaggcgaccccggggagccaggctgaggcgtctgctccccgagagccgtcgcccacgccggcagcgcaggagagcgaccctcaggtcgccatggc

SEQ ID NO: 51658 - DNA, 469 bp, Zea mays
  unsure (1)..(469): unsure at all n locations
ctgcgagagagggaacggatcccaggtctcttgatagattttgtgttgtggagcgaaggttgcactgaagagttctttgttggtgttgtgtgtgagaacaactacagggggggtgaatacgtgatcctgtaaaaatcaaatacttgtagccacaaaacttggctaagtgttagctcaatagaatcaagtggctaaggatcaagctcttgtgaaacacaatggtcactaacaaaacaagcacaacatacacggtgatttatcccgtggttcggccaagtataccacttgcctactccatgttgtggcgtcccaatggacgagggtcgcactcaacccctttcaagtgatccaatgatcaacttgaataccacggtgttttcctttcttttactatctcccgttcgcgaggaatcttcacaacttggagcctctcgcccttacaatnggtgatcacaaagtagcacggaag

SEQ ID NO: 51659 - DNA, 367 bp, Zea mays
agctttaaatggaagactctatgcttcagaaattaatcttccctcaagaagcatcccatctctcaaccacacatgagaacttaatcttgatgcatgtatagggtatatatacctcctctaaagtcaaacaatacacatcaaaatctagtaagatgaagttatattggctatcccatctacaatatctataataacttatatgttttttggttaacaaaaatatgaagacaacatgaaaagggcgagcggggcatctaaatggtgttcgagtagagatggaaaaatggtttgataaagctagtcttctcgtatcatctaacacagtagtccttgacaactccccgtgattttatttggcaaagctttc

SEQ ID NO: 51660 - DNA, 219 bp, Zea mays
  unsure (1)..(219): unsure at all n locations
tcgngagagagggtttggccttaaggtgagccgccttagttatccttcctttttccccctccctccttgggaaggccctgngcatccccttttatagatacaaggcgatggtccacctgtacatatgggggtgtagctatgtgcttacgtggccggcggagaagtgcttgagccctgtagagccgagctggcggtgccggcctgggtcctgctgacgtt

SEQ ID NO: 51661 - DNA, 360 bp, Zea mays
agcttgagacattattacttattggtcatgtgttgcccgaaggacacacttgaggtcatcatatacatgcaccacagaaccatataaagccttcaatgtccatacaatctctgtaatggaccacactcgttcctttaaaacaactcaaagaacttaaccaattcagatcagattttaagataagaagaacttaaaatctcattcccaatgatactcatcaagtatctatcttatgggaaaaacatgaccaatagaattgtccatgacttttcaattcatcctaataatggaattaccaatttagtcttacccaacatggtaagtatcatcacatgaaaagttattacaaatgcaacacat

SEQ ID NO: 51662 - DNA, 469 bp, Zea mays
  unsure (1)..(469): unsure at all n locations
tagtgaaaggtttagggtcgtagatcgacccacggatggcttatattgagcaagcgtactcgttcacacaaccatgatccgcactgttggatcgatttctggtggctgagattagttgatgttgtaccccttcgattcattaaaccagagccgttgagcaccgatcgggcggctcacaggagccgataccgcttcgctggctgattgcaaatgagcccttcggttattagataactaacccgccatcctgtgggtattattcacttagtctggtttaaattacccgctagcccctgcagtttttagtattcgaggcctagtccagataattaataaaaccaggaaaatagtttagaaaatggtttttattacaaatttaattgcagaaactagtttaattcatagaaaatgcatatgaactccaaattggaccattccagctcctataattnggtaatattattatcta

SEQ ID NO: 51663 - DNA, 360 bp, Zea mays
agcttgaatgcggatccgttaaagcttgaagacggatccgcgaggacgacccccactgctgttcgccgctcggagcaagacaaacgaatcgcgggacacggcggatcgacacttaccttctccggcggcgaatacgtcgcccttggttcgcctccttcgctgtccgtggagttttccgagcgcgcggtcgcgtggccgaaggaaccggctggggagaaatccggcgcagtagcgtgtccatccatttagcgggagagagaaggaatcgggaggggagaggaggaggaggaggaagccggtgaagagaataggggcgcactgtaacccctaaaacagctacagtggtaggggagggggagc

SEQ ID NO: 51664 - DNA, 446 bp, Zea mays
ttagccgtctcgccagaatcaaactcgtttgggagctgatagcggatgtgcagattggattggcagtgcgcgtgtgacgagagaaacgtggacgacctcactgggcagcggccggcggcgggcacacgaggcaagatggagcgcagatgacctcgtcgggctggtggtacgcgacggccaccgacgaggatgcaggagcggcaacacagacaccgccgacacctctactccatcaaacgtgcagcgatgcaacctctgtggtgggccatggctcacgtctcgaaggccaaggcggcctaccacccctccgtgactctgtgtgcacctgtgcgcggaaacgaacagtgggaaaagagagagtaaaaaaagctatgagctgaaccagaaacgtgtgggatgcaatatcaaacaagcgttgaatccttcagttgtgcacgtgtcgcaca

SEQ ID NO: 51665 - DNA, 356 bp, Zea mays
agcttagaatttatatgtttttcccattcacccaccctaggtgactatcaaaaacacatagtaattataataatctagccacgtcattaaccattgaaatctaaatagggcctatatgttttcaccgtgtgcaatcattgtacgaccaaactattttaagttctactaaaatataaaaagtatacctatattttattatttattctatcaatatatcaagttttaatttaccatatgctaagatatgtaaaaaagataaaattcatagtttttaatcatctgtatttggcaattatttacatctcttgatgtataaaaaaacataacttaaaatttgatatattgatagaataaat

SEQ ID NO: 51666 - DNA, 440 bp, Zea mays
  unsure (1)..(440): unsure at all n locations
tctaaagggagaacacgtgatatggttgactaacgtacaattcgaaaaagatagaccttgtgcagcttgtcaagcagggaaacaggtgggaggccctcattacaccaaaaatgtgatgacaacttcaagacctctggagctgctacatatggacctcttcggacccgtcgcctatctgagcatacgaggaagtaagtatggtctagttattgttgatgacttttcccgcttcacttgggtgttctttttgcangataagtctgaaacccaagggaccctcaagcgcttcctcaggagagttcaaaatgagtttgagctcaaggtgaagaagataacgagcgacaacgggttcgagttcaagaaccttcaagtggaggagttccttgaggaggaagggatcaagcacgagttcttcgctctctacacaccacagcanaatg

SEQ ID NO: 51667 - DNA, 369 bp, Zea mays
agcttcgctctaagcgagatttattatggttaaagtagagtaaatttagcctttattttatactatactagagagtgggagccaaaaaaaaactttgcttattgttgcttctaacctagtccccactctctaacccctcagatttcacttcatggattatttaccgaacggttttcgccaaatagattcacttctactacagaattatttggaatcactctatttaataatcagctcttatagctagagaatgatggagaagggctttaccaaaggagccctaaataagttagtgacaaacaaacaacacaaattattggagtggattatataatctaggtacttacattatgacaatccataagccaa

SEQ ID NO: 51668 - DNA, 432 bp, Zea mays
  unsure (1)..(432): unsure at all n locations
tgactcgncgaagcaacagaaactgcacgatgattgcctctatattctggaatgtanggcgaatgatacgaagctgtatgcatgacctgcttcggctgagcttgttgtgctgctgcttcagctatttccttttgcttctgaatggtaacatggcacatcctggtagtatggcctttgttctcaccgcagaataagcaaaagattcttctcggttgatcgccaaatcttcctccaaaacccctggcgcctctgcctcttggagctggtggtctgaaggagctttggtgttgccccgaagcctgtgaggaacattgtggcctttgttgttggctgcctctatcatcattntgtgtagagttatgaattgatctcacgtgcctcgggtaaaacctcccttcgaagcccctggtcatttcagaaaacctgaaagct

SEQ ID NO: 51669 - DNA, 366 bp, Zea mays
agcttgaaagaattttctccttttttttcaacccaatgcagcatttgattcttcatctcccctatgaggcacgaatgggggggcccgtgcagggacgttggtgctatccaatcgagagatgtctaaagactattcgaaagaaatgtagaaataaatgcaaaatcgaggcttccattgcagaggcatacattctagaggaggtctcaaacttcacaacaacttattatggtgacaaactgccgagcgtgcataatccaccccctcgttacaatgatggcgacaatgaatcgaaccttagcatatttcgaggccaactcggaagcgcaagtggctctaccacgaagaccctgacacatgaagagtggt

SEQ ID NO: 51670 - DNA, 169 bp, Zea mays
ggagagagtcgtccgaggagatctcgtggagctgtgtacgctcggttcgatcgtttaaatcaaagccaaaattgtaaggactttagaaataccaggggtccctttaccagagggcttgcagagcactttggatctgggggagttacatgaattaggacactcttagtca

SEQ ID NO: 51671 - DNA, 386 bp, Zea mays
ggaccttaagcaccgcggctgcaacttgctgagaagcttgtttgttcctcctactgtaagacagcttcaattccactgccactagcatcagtctcaataacaaaagtcttggcaaagtcaggcagagccaaaactgttgcctgtaccagagctgtcttaagtgcatcaaagacctgttgtgtattactgttccacacaaacaactgaccttttctcttcaaattggtaagaagtttgctaatcatcccaaatccaaccacaaaccttctatagtacccagccattccaaaaaaactcctcacatccttcacacattgaggaataggccagctctgaaaaactttcacctttttatggtcagtagctacctctgcagcacttataat

SEQ ID NO: 51672 - DNA, 454 bp, Zea mays
  unsure (1)..(454): unsure at all n locations
ttcatctatattgnggattgcttttgaatcactccaatttccttttgnctttctggcagcttcctgactcccatgaatagaaataagtccctgatccgaaagtatcttcatgcaatgatatgctggatgaagaattgcttcaaaagcattgaatgttccctgacccatgataacattgtaaggatactccatgtcgacaatgtcaaacacaacttgctcaatccttgtattgttgaccaatcccaaggtcactggcatgataatcttaccaagcgctacaatctgtcttcctccgaagccacaaaaagggtgcgtaacatcatgaatcttgtcttcnggctctcgcatttgtctaaaggccttatcaaatataatatccgctgcactgcctgtatcataccaaacattgtggaccagatattctctgatcacacaagagataaccatagcatca

SEQ ID NO: 51673 - DNA, 363 bp, Zea mays
agcttttaaagggagagcacattttatgactaaccaaagttcattttgagaaagacaaggtttgtatcgcatgccaagcaggaaagcaagttggtgcccatcatccacacaagaacatcatgacgaccgacaggccgcttgagctactccacatggatctattctgcccgattgcttacataagcatcggcgggagtaagtattgtcttgtaatagtggatgattattctcgcttcactagggtattctttttgcaggaaaaatctcaaacccaagagaccttaaagggattcttgagacgggctcaaaatgagttcgacttaaggatcaagaaaattaaaagcgacaacgggacggagttca

SEQ ID NO: 51674 - DNA, 381 bp, Zea mays
  unsure (1)..(381): unsure at all n locations
tgcggaggttcttcatctccacatgtgctaagcggcgatgcctctaccagcccatgcaagtcttagccattaagcatgcatctagaccggcctctctgaaagggaaatgtgcccttgggccatttctaagtattttggtgattgagtgcccacacaagtgcttaaatgtgaaatcatgcttgtggatggacaaagtgcaaatcaagagcaaaggtatgtttctatgtcttagtacatctggtctgtgtactaatatacttgtctaagtattggaaacaggaagaaaaagaaaagaanagagttggctgtgtacagccaacgggctgtttcggtctggggcaccggactgtccggtggtgcaccggacagtgtccggtgcgc

SEQ ID NO: 51675 - DNA, 371 bp, Zea mays
tacctgcacgcatgcaagctacaggttctctgtatgattttggcttcagaggaaaaatccacctgaggcatgtcatgtcaattcacaactccactcagagtgatgacagaggaagtccgctgtagaggccgcagtatacttcacaataattggggcaacaacaaagctcttttatgccgcaagctccaagaggcagaggagccaggggcttctgaggaagatatggggaccagcccatgaagatctactgcctattttgtggtgaagacaagggccatactacaagaatgtgccaaatcactatcccaaagaagaaagagatcgcaaaagccgaagcccggcaaagtcaaccgaaacaagtcctgcacact

SEQ ID NO: 51676 - DNA, 477 bp, Zea mays
  unsure (1)..(477): unsure at all n locations
tactaagcttccttcgaatatgttcaggagcttactagtgatcattcttttcctattgaatacagntagaagcacaagcaggagtaaaaaaatactggtgctggcagagaaagagaaaccaattagtaacaggaataaatagatatcaatttgaagtgttcagttggtaaaaaaaacttgagaaagttaatcagatgagtgccgatggatgtgattgatagtcgcagaattctattcaagtcagtttgcaatcccaaagcaacaggaagcaatatgtagtatccttcataagtggtgcagccacaccaagggttggtcgaatgggttattatcttggatggatatgaaaatgcaagcaacaaactccatccaagcgtctaaagcccatggcgttattctcatgtgctttatgtttgtgtattctctacccaagtaatacacataacacaaacaatggttaccgtctaacttaccaac

SEQ ID NO: 51677 - DNA, 365 bp, Zea mays
agcttatgaagaatctttttctctcttgggctactcggcggtgccacatccaacccaagtatagtcttagcaatcaagcatgtgtcgagctcagctttatcaaaatctaccaagtatagctgaccctctaacacactcttaaatgctattgaatcatcatttcttctaaagacagtgacacctacatcatttaagagacagttgtagcccatttgacataattgggatacggaaagcaaattgtaatctatagaatctacaataaaaacattggaaatagcatggtcaggtgaaatagcatttttacccaaacctttgaccaaaccttgatttccatccccgaaagtgaaacctcgttggggatc

SEQ ID NO: 51678 - DNA, 467 bp, Zea mays
agtcaatcatttgcaaagaataattgatgctcatatttatttctgggcatgaagcacatacgagagaagataaggactggagtagccaaatgtttcaaggaagacgatcaaggtgtgatattgtttaaaaaccacatagtagtgccaaagaacgaagaactccgccagcaaatccttgatgaagcacatcttagtcgctattctattcatcccggaagcactaaaatgtatcaagacttaaagcaacattattggtggacaaagatgaagattgaaattgcacgctatgtggctaactgtgacacttgcagacgtgtcaaggccatacacatgaaaactgctggtccattacaatctttgccaatcccaacatggaaatgggaagacatcagtatggactctattgtgggactgcccacgacgacaaaagggtatgactctatttgggttataattgatcgacttac

SEQ ID NO: 51679 - DNA, 365 bp, Zea mays
agcttgtcaacaatataagttctatagagagaaggctgcttcggcagatcagccgaagcctatgctcctatgtgaagatatagtagatcaaaggtactactgggatctcagctatctgatgagcaagaaaagactgctaagatttttgttcaacaacaaagatgtcttcgcttggacagctaatgatctttgtggtgtcaacagagatatcatcgaacattcacttaatgtggatccatctttcaggccaaggaagcaaagacttcagaagatgtctgaggataaagatgaaggtgctcggaacaaagtaaagagacttctcagtgctggtgttatcagagaagtaattgttggggacttgttct

SEQ ID NO: 51680 - DNA, 461 bp, Zea mays
  unsure (1)..(461): unsure at all n locations
ntagcggggttggagttttggttacttgtaataccatgggataaccttcaagcatctgcctccctctaagaaaatgatgagtgactacaactccaccaaatcgagcatgtacatcataggtctctttctctctacgggagcggggtgggcttgcggaatacctagtgtattcacccagatttatttatgtttttcagcagccgaggacttcttttctgctatgcttgattaagagggctgtgtctgcacccagttctgcctgtggcttgngctagtgtattttcctgctacgcttctctatttggctctctctcgagcttgtaccccgttattgtaataaatttatctaaactctgtactatttgaagtaaggaatgtgtttactagcctcctgcgaactagtaattgttcacatttgagtcccaaaggatcgggacgctttangtggtatcagagcccat

SEQ ID NO: 51681 - DNA, 358 bp, Zea mays
agcttgtgccttaatttttttgatacacgaagttggagtgcttttttgaaggcttttgcgaatcacttgaagcgttagtacttttgtgaatgattttgtaaagtgtttgcaaatatgtgcaaaatataataacatgtgtaggttttgtgaatgattttgttgtggtgcttgttgatggtttatgtgatgtacatctatcattgcgcaatcctaattaaatttgtatatctatgtgattatgtgtataaaaattggtgatttgtgatgcttttgtatatataactgttgttgaatgctaattaatggtatattatcattattaacgactataactaggggaactttctgttggttgcta

SEQ ID NO: 51682 - DNA, 427 bp, Zea mays
tcaaagccgttactaagggaatgcatagctcaatgaatactcgttgtaatggtgtaaatgctctgaagtcattcctaagggaatggagagctcaatgaaaacacctattaaaggtgtaaaagcttcgaagtcattgctaagggaatgtagagctcaacgaaaacacctagtaaaggtgtaaaagctctgaagtcgttcctaagggaatgtagagatcaatgaaaaccacctataaaaggtgtacaaaaacaaagaactgtgaagctgttcccaaatgaacatagagtaagatccaaaagatgaaggcattcttgaatttcacattgttatcatctttttgcactgcatatgcttttcatacctttgtaaagagtatacatagaagacataagggcaaagaaggcggaaaatcattcttctctagtag

SEQ ID NO: 51683 - DNA, 362 bp, Zea mays
agcttgagaagtacctggattcagttcgaaggcttgaagctacttttgaaggggtctctgtcaagaatattccacgaggagaaaatgagcacactgatctgctagccaagtaagcggcacaggggctgcctttatcttcggaagtattctttgagacaatatgagcaccttcggtggaacttctcgaaagagcagcgctcaatatatatcctgttcatagtgaagattggaggactaagattatatcttttctccaaggcaactgcctttcagatgacgaagcttataataataaaatgaaggcaagagcacgaccatatgtaataatagagggggagttatacaaacatggagtctgctct

SEQ ID NO: 51684 - DNA, 473 bp, Zea mays
  unsure (1)..(473): unsure at all n locations
actcaagctcggcccatgcacatggcctcccgctcgataggtgaagcttctggctccggcgttctgggcgcccgtcctcattcgtctcaaccccagcaccaagctcacattgccagcaacgtcgcgttccagtccacgacgccaactcttgatcctcagtttctcgccgccctgaacaacctctccatcagcacccnctcaaccagtggcaactgattcctggacactggtgcctccttccacatgtcgtccgcctcgggtaatcttcagttctctaccccctttcaatcaaattctcgcattgtcgttggtgacggttcttcaatttccattacacacactggccacaccactcttcccacacacaccgatcctcttcttctcaataatgttcttgtttcacctactcttattaagaatctcgcgtctgtcgtgctttatcacgtacgacatccataccatgaattaaaatc

SEQ ID NO: 51685 - DNA, 268 bp, Zea mays
agggaaagatggttttcacgcccgatatgtgtaaaaaatgggacaaaaaagttcaccgaattattcttattttgaaaaaaacacatgccccccaaaaaaattttgcaaacaaacaacgccaacccttggactttcaaagtgaaaactatgtttacctgaaagtatccccaatgaagggtgtatctcatttcggggaaaagggaaagcttgccccacggtactttggtcggttcccattttgaaaaagtggggccaggggtttcccatt

SEQ ID NO: 51686 - DNA, 440 bp, Zea mays
  unsure (1)..(440): unsure at all n locations
tctaaagggagaacacgtgataggtttgactaacgtgcatttctaataagatagaccttgtgcagcttgtcaagcaggtaaacaagtgggaggagcgcatcacagcaagaacgtggtgaccacttcaagacccctggagctgctgcatatggacctcttcggacccgtcgcctatcttatcatatgagggagtaagtatggtttagttattgttgatgacttttcccgcttcacttgggtattctttttgcaggataagtctgaaacccaagggaccctcaagcgcttcctcaggagagctcaaaatgagtttgagctcacagtgaagaagataaggagcgacaacgggtccgagttcaagaaccttcaagtggaggagtttcttgaggaggaagggatcaagcacgagttctccgcttcctacacanccacagcaaatg

SEQ ID NO: 51687 - DNA, 360 bp, Zea mays
agcttgcgatattctttatttatcatgcaatatcttgtaatacgattcttccatgtaccatttgactgcaaactaaattttgtaaatttagccacgcaccttgtcatttaccattctcagcattgcagacaaaaatattaaagttgacattccaatatcatgtataataaataaatcctgtcattttgattggcaacaaaattgtcaggaaggatcaatataaggtagtcacgcgtcctgatcataaccaccccttttcctttttcttcccctaatcctattgaatgtaaatattcctttgccgcctttttgcttccaggtgcggaaaatcctttttcttttgtatgggacccagggccg

SEQ ID NO: 51688 - DNA, 419 bp, Zea mays
  unsure (1)..(419): unsure at all n locations
agttccaagactactactagttctatgagtgggntagcggcaacccccagtctgctgcctgtgaaggccgcacctatctatgtttcttttccgcactttgatttattgtaagaactatatggacgtctcagacgtatgatgtaatcaactattattcccttttaatactattttgagcactgtgtgatgatgtccatgttatgtaactgctgtgtacgtgaataactgatcctggcacgtacatggttcgcattcggtttgccttctaaaaccgggtgtgacaggtggtccttgcggcgtctaagtgacccgcgggattaaggaagaagcctcactcgatctaagtgaccgtttgagagagggaaatggttgaaagagactcantctttgtgaccacctcaacggngactatgttcttt

SEQ ID NO: 51689 - DNA, 368 bp, Zea mays
aagttacctgacgatgcatctttcatccctctattttacaattgaactagtgatcaatagagtttaatgacttgaaagaatgtgatccgtgtctcattttaacctcttcttgcttggatttcttaatcgagcttttttcatcttctttcaaactctctagtgacactgtatgctagcattagacacctaactgtgtggtgatccttgtgggatcttatcgatccttgagaataataagcactcaaatcggtctgagtgatccattatgagagggaaagggctgaatagacaccaccttcttggcctccttaactgagagtatgtttaatggaaccgaaccttcggaaacaaatcgttgagttcatttg

SEQ ID NO: 51690 - DNA, 440 bp, Zea mays
cctaaagggagaacacgtgataggtttgactaacgtgcattttcaaaaagatagaccttgtgcagcttgtgaagcaggtaaacaagtgggaggagcgcatcacggcaagaacgtgatgaccacttcaagacccctggagctgctgcatatggacctcttctgacccgtcgcctatctgagcatacgagggagtaagtatggcttagctattgttgatgacttttcccgcttcacttgggtattctttttgcatgataagtctgaaacccaagggaccctcaagcgctttctcatgagagctcaaaatgagtttgagctcaaggtgaagaagataaggagcgacaaccggtccgagttcaagaaccttctagtggaggagttccttgaggaggaagggatcaagcacgagttctccgctccctacacaccacagcaaaatg

SEQ ID NO: 51691 - DNA, 372 bp, Zea mays
agcttgagagtgtaaaggattaccattaatatcttgcagaagactacgactcaaacatgtacaaaattcactatttaagcataaaacatctgttgccaaacacacagaaacggatcaccttgggtggacgcccaaatcgcaagtcataaaaagttttgttcagaaggctcaatgaaaaatgtgatttaacaaatggaagcattgttgatcgctttggacaaaaactttctatgactcctatgctcatcatgcattgtccaagccatctcaacaagagtccaatttttgcgatcaacaatgccattctattgaggtatatatggagagtaaaattgatgattatgacccaaaggtgcacaaaaagtcacaaaa

SEQ ID NO: 51692 - DNA, 453 bp, Zea mays
tcttcatgcttaatgtctgcatacttcttcatggagatgtttcatttgttatgcctatcacaaatatctccaatttggaacaacatggtcttaagggtgtagacaatttgtggttgtttacagtcaacaacaacaccactaacaaggatcctaatgatatcaatgtttcccttgattgtacatgcaatgctctctaccatattgatggatccttgttcatctttggactataaaacaccacccacaaatcattgaaataatgaacatattgtacatgggttgtaacaccccgtacattctcggactgatagtacttactcctagtagccctctaagatcatagaccatctaagaccgatagtacttactctcggtagccctctaagaccatagactatacccacagaacaacatgagtctttcgtgcaccctttatcctcactcatgtgcaca

SEQ ID NO: 51693 - DNA, 370 bp, Zea mays
agctactgcgcgccctccttttttatgcgacgctgcggctcctgatcgcacgcattcttgctcgccgaccgctaccccgccctggttcctatggtgcgctcggccccctgctccatcctttgctcagccgtccaatgcttccctgcgccgtggtttccttcctccctcgctccagctcttggctctggcgctctcccctccctgctcgctcttcggcgttgcgcagcgcggctcagccgacggcagggagagtcttttcgtcgcttgtccctacttccctttcccagccgtgaaacccccatggagcccggagcttctctccgatgtatctcgccatggcgcgcgctctgcttctacctactgtgcgcac

SEQ ID NO: 51694 - DNA, 472 bp, Zea mays
  unsure (1)..(472): unsure at all n locations
taacaaactcttttcacggatcaagctcgttacgaacaactatctttcaccgcgaaaggggctactgttgggtccatgcttcgtcgccgaaggtcttatatagagaagcgatcctcggatgaagctgtttgtataagatagccgaaggttcctcttcgtaaagcttcggcattgcgaaccgacttaaagatagaatgaccttttagtccataaatgtctgagtcaatgttgtaagtttttataaggggcatacttgtaattnctcacangctgcgtcctgtgcctataaataggtgaacagtacccccgtactgttcacgctgacttggcatttgcttttgcgccacgcttgtattttcatctccttccgagccgaacgtacatttataattcaatattggttctatctctctatgataatataataaagntaaatgaataatgctatatgactattcatgctatcttctat

SEQ ID NO: 51695 - DNA, 363 bp, Zea mays
agcttgagaaggttcttcattctctcatgtgctaaacggcgatgccacagccagcccatgcaagtcttatcaattaagcatgcatctagaccggcctcctcttttgcgaaatcaactaaataaagtttgtcgtctagtacacccttaaaagctagtgaaccatcacatcttctaaagacagacacatctacatttgtgaatagacaattataccccatattgcaaagatgactcacagataacaagttatatccaagcgactcaactaagaacacattataaatagactgctcggatgaaataacaatttttcctaaccctttcaccttgccttggttcccatcaccgaatattattgaatcc

SEQ ID NO: 51696 - DNA, 465 bp, Zea mays
  unsure (1)..(465): unsure at all n locations
attcgcgtccaccgccgtgggaacctcccctgtttttattgtgaaggtatacggagtcatggcgacgcggtggaaaagcttggacacgccgcgcacactcgggaagcggnggtcaccggcgagttaatctgctcatccgcacagagggagagagggccacgggggttaccggagtgatcgccaactcaccgacggngaagatcttttaccgtgtgcccttatccgcccatcctgagcacaagtcgggccggcaacggcacgaatcacggcggaattggtcgtccgcggtgggcttgctggcgtccttatctgtttcagttgaacactgtaccatggtgaacaccaacttatagcgactgacagagcacattggagcttcattttcttccaatttcatgtgacaacaagtgcaagtctctgcatcaaagttgtagtgctacataccagctacaacttcgctatatg

SEQ ID NO: 51697 - DNA, 367 bp, Zea mays
atctatcgacactgaccatttattgtttctcctcgtagccccagctattgaaggcaagccccggtttatgcataaccgtatttatatatatgctactttactacacttaatgcttgtaggattgtattgtacacttaagtgtaggagttgcttgaaacctctatttgcatgaacttaggattcctttttgagatggatactagtatactaggtctagtatctgctttgctaaacaggatctctgtagaagtcgagtgatttttctagcactcgcgcgaggtcaagaattgattgttttcatcttgataacgagatctatgttagtctatggacttggatccaaggaggatgccttgtccatgagatg

SEQ ID NO: 51698 - DNA, 470 bp, Zea mays
  unsure (1)..(470): unsure at all n locations
ctcatcgataccgccgcagactattgaaaaccagctgtatatcttttatgaatttttctgagttttctgtcttgatcaccacgtcatccacataagcttccacacgcttgccccagtggtcggctaagcatgtctgaatagccctctggtaagtcgctccagcgtttttgaggccaaatggcatggaggtatagcagaaggctccgaacggggtgatgaatgctgttttttcctcgtcttcttttgccaagctgatctgatgatatccggaatagcaatctaagaaagacaacatagaacacccggcggttgattctaccacctggtctattctaggaagtccgaagggatccttcggacaatgtttgttgagatccgtatagtcgacacacatgcgtcaatccactttattctttntgagtacaagaatacgaattgctaaccactccggatgtaacacttctctaatg

SEQ ID NO: 51699 - DNA, 407 bp, Zea mays
  unsure (1)..(407): unsure at all n locations
agcttcccacacccttagaccgagcgccacctcaccggagccaccgttattctctcgccggacttcttccgctcaccagagagcgtggaccgggtaagccactgcgccatttccaaattcctcacgcatactgcctctgcgtcacttggtaaagctccccgagccaaccaattgaactattccgccgtgagcaggccggaacactctcaccaacgagcttccccgccttcttacgaggaccaaccgattctggccatctnctgcgccaacccacacattgacgtgaccgccgtaatctccccgacctccctggacacctcaccggagctagatcgccgccggtaagcctcgccgcccttttcttcgccacggtcacagttncaatacggctatgagtgcagggtaga

SEQ ID NO: 51700 - DNA, 367 bp, Zea mays
agctacatgagcggttttttttgtataacgtataaccaggtttttgcgaaggcgtttcttactgtgggaccttcggcgacgaagcatggccccaacaagtatgtagcttgaaagttatttgagctagtgcaaaacatcaactagaaggatcacactcaccaatatgttccagctccaagagaaatgagttccattccctaatagccaacatcatcctccgcaatcttgatgaggccaaagtctgtaacttttacaacaccagcctcattgaagagagcattgccgagtttaagatcatagtgaatgaccttttggccgctcttgtttagataaactaggccctaaaatatttcaacaattttaattc

SEQ ID NO: 51701 - DNA, 428 bp, Zea mays
  unsure (1)..(428): unsure at all n locations
gctaataggggcacaaaccttgataatttgtgttattggtgggngcgctcgtcgatgggatccaccaattctcgagtttcccagagaagactatggtcgcggtatgcttgacgttgcatatcagatgtgtgttggttgatctcttggatctcatccctcatcgaggttgcgtggtgttcatgaagagacattcactccatcatggagacaaggcgtctcatgatacgaccatccaagtgcagcatgtggagatataaaattttctaatattactctaagtttgctaatattagcttaaggtataaaaaactatggattttcaaagttttaaattaaattgatagcttttagttatgtgatggttatttgttgctcgactatgtgttatgatgtgtaaatcttttgaaacacgaatagaacacgatgct

SEQ ID NO: 51702 - DNA, 367 bp, Zea mays
agctttgcacagggatggtctttgatgtattgctcgagtttagaatcatctctaaatctgaaaccgtacaaagcctgacgttgcgttagaccgactgggtaaattctgtatagtttcaggtcatccccacctctaatactcggtggcctttcatccttccatacaggaacgtggttgagggacctaaatttaccgagcactgcagattccaaggctcccagtgttaactggcccgatctgcacagcatatagatagaaaacatgtttagacatgtacaggcagcaagatgcagtgaaagatattgtcaatcaacaacacaacttggcagtcattgagcaacaaaaatagtaggatagctcgctcaat

SEQ ID NO: 51703 - DNA, 368 bp, Zea mays
tacttgaggtcgacctttttttttcaactcatcagtctctggatgagaagtggtcttcccaattccattggtgaatcactacaagagcaatctatgaagggtcctcttgattttttcgcaataagaaggtttgtgcgtcagcatcgatgcttcttcaataagctaactgccaagcaataactataagcctgaagatgatctttgagtagccagaaacaatcgtttgcaatcaacatccggatgctccctgtaaggccatattttgtatgaagttccatctcctctaagagtctgcacagctgatagatgtcactgtatgtatagctatacccattacccttgtaagccgaatcttcatgactagattc

SEQ ID NO: 51704 - DNA, 328 bp, Zea mays
  unsure (1)..(328): unsure at all n locations
tcttcgctgccattgaacactaatgcctcctctggatattctcagttttgggcatactgttgagcttctccttcctcttctttagagagcctttttcccgaagcatgtcggatgatatattcaatactttcttttaaagcttcgggaccaggagtggcaactctttcacgcaaagtctgttctatagcctcttcctccgctgctttctctctaatntctgaaggttttttctcaacgggttctgaaggcccagcttctgcactagcctggcttactgcagctccaatttctgcccattttgtttcaacttccatcttgcattttgaag

SEQ ID NO: 51705 - DNA, 360 bp, Zea mays
cagctcggcattgcatattttcttttatttgaaccttgactaatacttctcataccgtgatataacatctaaagctctttattcaattccagcaccagcatactatgcattgatactacgatcgctcactgtactggaaaggttagcactctatgctgaccctgaatttaaggggcttgctgcatcgaatccttactttgcgaaaaggctactcactgatcccaatccatacctcaaagacgctttacttgagcttctattcaatgatggaagattcacgcaagtacctgctcatatgtatatatattagtctttcgacagaacaaagaaccactcaggacagcattgtctaacgttcac

SEQ ID NO: 51706 - DNA, 363 bp, Zea mays
agcttgccttttcctcagtttatcacccgcagtccaacggagctgtggaacgcgccaatggaaaaaatttctcagctgtcaaaaagatgctccttgactaaaaaagggcaggtgggccgacttgttacctgaggcgggctatgcgctaaacactactgagtgcagggcgactgggttcacccctttccgccttctatatggatcggaggccatgaccccacaagaaataaaacatgggtccccgcaaacagtttcgtcagctgtccccgacgtggaggaacccacttctaaggatctcatcgatggagaccgagtcttcgctctacaggctctaaacaaataccaagcccaaacaaaagcatg

SEQ ID NO: 51707 - DNA, 448 bp, Zea mays
gcacgctttggttcccaccgctagatggttctcttatggttagacaacaaagatctacgaacccacatgtcctttgtgttagcgcttggcaaatttattgcctttccaccacaagttgccattttgggttgcctctctatatatgaatccaatgacaacctcttagtggaggagatacccatgggacaatccttgcattgatgtcccttttccccgcacgtgtagcataggcgtttttcacactatgaacattacttctttcctttgttggtgcttgctacatggttagtaaaaactttcttttctaaccctatgcccttttgtttaaatggggacaacatttattaaagtgctccttctctgaacatttaaaacaaagattattatccttgataatatccaagccatttttaatatatggacatgatctaatgaagcgcccctcttc

SEQ ID NO: 51708 - DNA, 318 bp, Zea mays
caactgctagtagggctggacgtgaaaggacctctagcctagcggttaaggcttccaagtagccttccaagacccagggttcgattcccctcaagggcgaattttctggcttggttaaaaaaaatcccctcgctgcgcctcatccgctctcgggttacgatgtcctgtgcgtgcaccacccctccgattgggccgttgcagagtagacggttgacaccggcccgttagtaatgggggccaaggttcagagattttctcgatcggggccaatgtttcggtctcttcttagccatcggtgggttgtatgcatcctcgagt

SEQ ID NO: 51709 - DNA, 437 bp, Zea mays
gtgcacgggagaaggtcaatgaggctgttgaacccaaagccaagggtgaagaagaaggcttgcaaagtcaacggtgatcgagttgagaagagctatgacacaccaaggatcactacataaggacgtgacttacaaccaataaggtaacagctacagttatgtggtgtaagtcataaagatcaagatcaagctctaagaaggagaacaaagtcactagaaggagaacaagtgtcaaaaccagaactagaagcagcccaaaagagctaagttcaccttgatctttagtttgggttgttcctatgtttggagatgttctatgtgacctttgcaggatgttggagctaagtaatgtcaatctaaatcaagtcaagctgacttgatgatttatgagtccaacatcaaagctcaagcatgtcaaatgttatagatgtaataat

SEQ ID NO: 51710 - DNA, 360 bp, Zea mays
agctcgtgaagttcttcatttccacatgtgctaagcggcgatgccacagccagcccatgctagtcttaactattaagcatgcatctagaccggcctcttcttttgcaaaatcaactaaataaagtttgccgtctaatacacccttaaaagctagtgaaccatcacttcttctaaagacagacacatctacatttgtaaatagacaattataccccatatgacataattgactcacagatagcagattatatccaagagactcaactaaaaacacattagatatggagtgctcattaaaaattgcaattttacctaaaccttttaccttgccttgattcccatcaccgaatataattgaat

SEQ ID NO: 51711 - DNA, 439 bp, Zea mays
  unsure (1)..(439): unsure at all n locations
tctcacaattctctnttagatcgttgagagaggtcttgatctcctcaaaatacactcggagggtgttatacaattctttcaaggtcttaaacttttctttttctttgtgcatgtagtcatcggcctcacctaacattctaacaagatcatcatatgaataaccatcatcatcaacatcatcaacatcatcatcatctatatcatttaaatcggggatgatttttaccttaacatctccctttgccatgagacaatgaggggattagaaaagtgaaggggcttccttgatggcaattccggcattaagcttggatgaggtgtcatcatcatcatccgagctatcatccgaatcccattcaactaggtaggctttgccatctttcttcttggtggagaatatcttcttcttcttatcatctccatctttgcccttcttctt

SEQ ID NO: 51712 - DNA, 369 bp, Zea mays
agcttctaaagggagaacacgtgataggtttaaccaatgttactttcgaaaaagatagaccttgtgcagcttgtcaagcaggtaaacaagtgggaggagcgcatcacagcaagaatgtgatgactacgtcaagacctctggagctgctacatatggacctcttcggacccgtcgcctatctaagcataggaggaagtaagtatggactagttattgttgatgactttatccgcttcacttgggtattctttttgcaggataaatctgaaacccaagggaccctcaagcgcttcctaaggagagctcaaaacgagtttgagctcaaggtgaaaaagataacgagcgactatgggtccgagttcaagaacc

SEQ ID NO: 51713 - DNA, 474 bp, Zea mays
  unsure (1)..(474): unsure at all n locations
atccagtcgggctcaggtcccacctggagttntcgtactagaaatattgcatctgagcatttcactagatcgggtggagaaatacaatgctttgagccagccagagtcaaattctgatgactggagggagccgatcatcaagtacataaaaaatgaggaagaactagatgacaaaaatgcaacagaacgaattgcaaggcagtcagctcattatactctcattggggaaatgctatacagaagaggcgcatcaggagtcctcatgaaaagcattctctcagccaccgaaaagcaactgctagaagaggttcatgctgggcaatgcgggatacacgcaacatccaggaccctagttgggaaggtcttcaggtcgggtttctactggccaacagcaaagagtgatgcagccgagttagtccagaggtgcgaagcctgccaatacttgtcaaaacagcaacatctaccagcacaact

SEQ ID NO: 51714 - DNA, 331 bp, Zea mays
tcaatctttgttgttggccaatagaatcctgacctgaaaaccttccctactagtgtcttggatactacatgtattccacactgcccagcatggacctcatccagaagttgcttcccagtagacgagagtatgcacttcatgaggacgcctgatgcacctcttctgtataatgtctccccaatgagtgtgtagtgagccgactgtctggcaatgcgctcagctgcatttttatcaactggttcctcttcattctttatatacctgatgattggccttctccagtcatcagagtctgactctggttgatttataatattacactcttctgctt

SEQ ID NO: 51715 - DNA, 473 bp, Zea mays
  unsure (1)..(473): unsure at all n locations
taagcttctacgggagagcactatttacgactaacaaatgttcattctgttttatacaggacttgtagcgcatgtcaagcagggaagcaagttggagtccaccattcacacaaaaacataatgacgacagatatgtcggggaccataattaggggtaccctcaagacgcctaattctcagctggtaacccccatcagcataaagctgcaaaggcctgatgggtacgattaagtcagggattagtccacacgagtgactcggtcacgctttacccgagcctagcctccgccaagggcagccgacctcgagagacttncgtctcgcccgaggcgcncattntactgcggacacacctccggctcgcccgaggccttggcttcgctcacaagcaaccctgactaaatcgccacaacgactgaccaagttgcaggagcatttaacgcanaggtggcctgacacctttatnctgacac

SEQ ID NO: 51716 - DNA, 285 bp, Zea mays
ttttgcctaaggcacctaggcagcttagttgatcaacattgaactggacaaacacctgattatatgaattaactagcgtaacggaattctaaattaagctcgctatctcaacaacatgaacaacgattaacctgcctaaaataaaacacacaacagccacgaaagaaaacaaaataaaatcaataaaaaaacgggggcggctgaaccggcacggggcggctgaaccggcctgtgcaagggcggcggcagtcaactgtgcgggggcggcccaccaccggcggcgcc

SEQ ID NO: 51717 - DNA, 456 bp, Zea mays
  unsure (1)..(456): unsure at all n locations
atgcagacaaacggcgccggcccttgttctttctagttaatgattatgtgtacctgaaagtatcaccaatgaagggtgtgaatcattttgggataaaagggaagctagcaccctgatacattggcatgtttcccattcttgaacaatgtggaccagtggcataccgacttcaactgccagaaacattatctgcaatgcatgatgtattccatgtatctcaattgaagaagtgccttcgggttcctgatcgaaccatcgatgtagtggatgttgttttagaactagattntacttattcagaacatcccattcgagttttggatcagaaggactgaattacccgaaaaaggactcttaatttctataaggtacaatggaaccagcatatggaagatgagctacctgngagactcaagacttcttggagaagaatatccaagggtcttagcttcatgt

SEQ ID NO: 51718 - DNA, 343 bp, Zea mays
agcttatatctcccatagctctgggggggcaaaaaattcatgcatgtccgaaccattgtattctgtatcgtggcgattttgagaacgcatcaagatgcccagtttgcaatgtcagtcgatacaagaagagctaccatcaagattgtgtaaaaaaattcccgaagaaaaataaaaacaagaaatccactattgtacctgaaagtgacgatgacacttttgatgacatggatgggaaaaagatgtcaaagaacccagctttggtgatgtgggatctttccataattgatcgcttaaaacgttgttttcaaccctagggagctgacttatgcgttggctgctgaaa

SEQ ID NO: 51719 - DNA, 472 bp, Zea mays
tctaaagggagaacacattgtgggactaacaaatgttcattttgagaaagacaggaatagtagcgcatgtcaagcacggaagcaagttggtgttcatcatccacacaagaacatcatgacgactgacaggccactcgagctcctacacatggacctattcggaccgatagcttacataagcatcagcgggagtaagtactgtctagttattgtggatgattattctcgcttcacttgggtgttctttttgcaggaaaaatctcataccccagagaccttaaaggtattcttgagacgggctcaaaacgagttctgcttaaggatcaagaaaattataagcgacaacgggacgaagctcaagaactctcacattgaaggctctcttgaggaggagggcatcaagcatgtgttctcttctccctacacgccacaacaaaatggtgtagtggagaggaagaatcgaactctattg

SEQ ID NO: 51720 - DNA, 366 bp, Zea mays
agcttcacgggccactggttaatctaaccgagtgacaggcgcagcttggacgtggctggagtgagctggccgcggtggccgaggctcgggcagtgatggcgggcggaggagagctcgtcgaagctaagggaggggtgtctggccagcgagggtgagcgcggagtgaggtgaggcgcgcccgggggtggttttaaaggcgcgggcgagcacgaccgaggggaggctctgacaagcgctcatggcgtgtgcgggcgagcgctattgcgcgctctggcgtgtgggcacggcgtctagcacgaggcagcgcaaagagaggtcgtgttcaagcgtggattggctccaaatctttgagatatggccatgttc

SEQ ID NO: 51721 - DNA, 450 bp, Zea mays
  unsure (1)..(450): unsure at all n locations
ctgaagngggtgattcagtgtggttgcacttgagaaatgatagatttccagcgttaagaaagtctaaattgatgccacgtgctgctggtccatataagattttggagaaaataaatgataatgcatataaacttgagttgcctcccgagttccgggttagttctacatttaacattgcagatttgaaaccgtatttgggggaagaggatgagcttgagtcgaggacgactccacttaaagagggggaggatgatgaggacatcactcccatggattcaaacaacactaccctagttaatgttcaaggtccgattactcgctcacatgcaagacaattgaattcgcagatgagctcattcatatgtacttattcttgtgcatttgagaatagtgtgctacctaatgaattaattgtacttaggaatgaaggaaaggaccagcaaggacatg

SEQ ID NO: 51722 - DNA, 358 bp, Zea mays
agcttcgcacctctgaactaactcgtctgcatcaatcttcgttgttggccaatataatcctgacctgaaaaccttccctactagtgtcttggatactacatgtattccacactgcccagcatggacctcatccagaagttgcttcccagtatacgagagtatgcacttcatgaggacgcctgatgcacctcttctgtataatgtctccccaatgagtgtgtagtgagccgactgtctggcaatgcgctcagctgcatttttatcaactggttcctcttcattctttatatacctgatgattggccttctccagtcatcagagtctgactcgggttgatttataatattacactcttct

SEQ ID NO: 51723 - DNA, 455 bp, Zea mays
  unsure (1)..(455): unsure at all n locations
tgcttttgaaataaatgtaagattatgtaattcgcttccgtatttctttatctccgatgttctgtaatgtctgcaagacgggtgagacgttcctggtgagataaggaaagataccgaacttgtcaagtagttcaggggcacctacagggttgtctgatgtccgttggacaaggacaactgtaggtgggcctaattacttgggaggttccgtcacagctggtatcggagcgtagcccttcttggcagatattatgaggcatcttcaaaagaattttccaaaatcttacctaaaaattcttttctcttcttacctaagttttctgaagagtctatcttaaagaccagataggaagagtgcaacgtatagaaggttgaatcgactaaggttgattctgtaattatacatgcatcatgctaagcactatactaataacattntcccncttagaaagatg

SEQ ID NO: 51724 - DNA, 299 bp, Zea mays
agcttgaagactgcttttttgagagcttccgaacgtgaagacttgttcggtccacggagtcgctttatccgagcgcaagttacttatcgcagaaggtgatgagtgaggtatccgtatcccggaggcgtatgagtccctcggctcggtcagccttggctgcttacgtgtactccgtcgtttccaggatccgctttccgaagtagtcaagaagcgcgaaagaaatcctgctaaaaaagagatcctttttcgaggaaaaattcgacgcagagggggtctccccccttttagcccccgaggga

SEQ ID NO: 51725 - DNA, 457 bp, Zea mays
  unsure (1)..(457): unsure at all n locations
tttcagcatactctttctcatagtcatgtgcaggctctttcttctcttnttgggtggnctatcccagataatttggactatgataatggggctggggatgataccacaacaaacatattttagctggtggttttgttgttcttgtttgtcgctttacctcccattgttcctttatggattcggaaaaataattgtttggaatgtaagaggactcgactctttggctcgacataattctatctgtgagctcctcaactgttatggtgcggatgtaatctgtcttcaagaaactaagatggcgcaaccttctcaacgtactctcctctctatgttgggatctgattttactggttcgttggccctaccttctattggagcgaggggtggtattcttattgcttggagacaacatttgggggtcactggagctaacaagacagacattcatagtgtgtct

SEQ ID NO: 51726 - DNA, 362 bp, Zea mays
cagcttttgctaaaacgaagctgatcctttctgaggagaagaatcttggctttattgaatcaatagcaaagacaaatacagagaagatcactagggagattttagaaggtttatctgaagacactggtgatagtgacagttatgatgtggaaagtggcggggaagacttcgaagttcgaccctggcgaccaagccatgcagtttttggaaaatcaactattaaacagagccatcttgacaatatgagggtaagatattttcgagatgtgtccattgtgagggtggacaacggagacaagacttctcctactcccgaagaaaatgaagtcgtgatcttctgaagcttcttcaaggctgggctt

SEQ ID NO: 51727 - DNA, 435 bp, Zea mays
  unsure (1)..(435): unsure at all n locations
tcaattgggagcctacttgtgggaggagactcttccttcttttctttcgnngctctgaatgcaacgggttgcacctcacgtgtggaggtggtgccttgctccaagttgacaatatgtttggagtctttgatcataagttcaaagctcacaaacttgccaattacctcctcgggagacatctgtttatatctaggatctccaccgattaattgcacttgagtggggttatgaaagacaagagatcttaaaataaccttgaccatttcatggtcatcccacttggtgctcactaagttgcgaacttggttgaccatacgcttaagccgattgtacattgcttgtggctcttctaccttgttgagaacgaaccgaccgagttctccctccatcgtttcgcgcttggtgattatggtcaccatgtcttcttcatgcgcc

SEQ ID NO: 51728 - DNA, 361 bp, Zea mays
cagcctcgatgaatgcaagttcatctttcccttgatgcattatttacctatttctctctaccactgcctaagcctggattatgggatgggaatcgaattgcatggtgagcattagagagcccgcattaactattacttcgattaaaagatatgggacaagtgaaaaggggtataagtgaaatgttttccaaaagagtgcgatgaagggtgctcaccctcatcacctggtgaagtaggatgatcagggactccctggtttaggggagggcctaaggtgttggctcagctggtttatgcgtgagcagaaggatcgtcctctcatataaggaccagtttgtcatctttcattacctgtactctc

SEQ ID NO: 51729 - DNA, 364 bp, Zea mays
tgcccctatcgctcatgtgagatctgcgggccaccgacgggggagtattgctgggaatggctcgtccgagtacaacaaccacgccatgccggtgtttaccgcggacagatatcctatacacgccaccctctgtgattgatgacttccccatttcaatatgcttagcgctacatggtgcaaccgattgaatggaggatatgacgttatagcacgtgatcatggtgccccgccatggcactgccatgtggtgcgtatgcaccgctgttctgggaagccgacaagaggctgataggatcgctaccgtcgatccatggggatgcagctacgattgaatcgggtcgaaaccagatatgggctgtctatc

SEQ ID NO: 51730 - DNA, 362 bp, Zea mays
agcttgaaacatgaaaatcttcgatgtcactgaagcttctatcagtctttggacctggtctttcaaaaaagaagctcgacaacaaagcctgcattttagagatttggatgtcatgatatccctttgctagctatacaatgtgtatcctttgtttgttttgtttgcgtttggctcgtccagttggctgtctgcctgacctctcttagtcatgaggtcttgtctttcttagtgcaaggtgctagtggttagacagggtcaggtctctgttgtaagaaaactcttttctccctattttcttctaatatatttatttccactatggggatctcaccacagtctttccattcaaaaaaggctcctac

SEQ ID NO: 51731 - DNA, 432 bp, Zea mays
  unsure (1)..(432): unsure at all n locations
ttaactcatganaattgaagcgctggttgtcctcatgcaaatgcaaccactagatgctctatgaggcactaagctttacatagatcaaagtcattgacccctcttaatagtacgactatctagcctactaattcggtcaagtatcttctctaaactcctcaagactggcaaaaatgaaacctatgttatacctttgccttcacttgatccacaaccaatgcttatgaatctccaagatttcctgttctatgtggtccaaccctgcattcttatttctccaagaatcgttagcccacaagcagttgtcattaattaccaaaacatcaccaaggggcctagatgattcacaatctccccctttttggtaattgatgacaacactacaaaatgtattcaagagaaagtttggtttttccaaatctccctcatacc

SEQ ID NO: 51732 - DNA, 353 bp, Zea mays
agcttagcctataatttataagaatatcgaggaataacccatagaggcattgatttgcatagtttggattatgctaacatagctatcaataattttgaacaagttttattccatagttgaaaattgggatgttacaactcctaattcaccattatttatttctaaccttaaccctaggtgaagtgcgtgttcaaaatttataaatttcaggttttgcctattcaccccccctctaggcgaatttcaattggtatcaaagcccgacgcttcattagagtctaacaactcgaagtgatgtcgggagaacacgccaagagggagatggtcaccggcgaaaagcctgaaggctcgtg

SEQ ID NO: 51733 - DNA, 459 bp, Zea mays
  unsure (1)..(459): unsure at all n locations
tattttcggcgggctacacatggccaccgaaaataagtaattntagagaaaaaatgtgaaagaaatgtggattcaacagcgatttcaacaacaatataataacagcaacagaaattccagaattacacacattcaacacaaaatatcacaattcaccataatttctcacaaatacatcacaatccaccaaagtaccttacaaatccattacaatctaccacaaactcataattccatcacaaatacatcataatctatcgcatcgtccaaattcaccaaaatacttaaatcatcacatataagggtcatttgagttgtgaccactacctccagaagcgaagaagttgtttacgaagtcgtctatctgggttggagtctgaaagaaagaagaatacattaataagtacaatgttaagttgaccactattcaaacgaattggttgcaaactaacttcttct

SEQ ID NO: 51734 - DNA, 355 bp, Zea mays
agcttcaagtgatttgaagttccatgttgtatcattcccaggttcaacttctccatttcttggcataacataatgtcagaagtcttcatcatcagacaatggcaggaagccttgcgacttaacgcatctgccactacattagccttgcctgggtgatagtgaatctccaattcataatccttaataagctcaagccatctcctttgtctcatatttagttctaactgggtaaagatgtacttcaaacttttatgatctgtataaatatgacagacattccctagcagataatgacgccatatttttagggcatgaaccacagtagctaactccaggtcatgagttggataatgtt

SEQ ID NO: 51735 - DNA, 365 bp, Zea mays
tgtcctcaaaatattactccccctaaatgagttttcttctttagaaagagtttttctcctcctttagagatgaagaaaagctccccctgacagagatctttggaaaaagcatgtaaaaattagaggtgcaagacatgatttgaaaagactaacttcccttatgcatacgtaacagaatatgagttaaccacttatgcatttttagcaacatggaagtatatgatatgaaatatagtctaatcaaatactggagaagacatgtaaatgatactagatgtagtctcaaaagataccgattgaaattcaatggcgagcttgagagacatgagagttcttggagattttgcagtggaagattgttgtct

SEQ ID NO: 51736 - DNA, 357 bp, Zea mays
agcttagtaatgtttatgtgttctttctttgaggtatctagaggggttttcgagagaattgatttttttcgttctaggttcttttggcaaggcgagaatcataagaagaaatatagactagacatcctacgccagcctaagagcaactccaacgctgagccctaaaattagtccctaaaattcgtattagttaatgttttgtttcagttagggctcgaaaaaatattgatctccaatgcttaggcctcaaatcacgtatactctgttttttagttgttgccgccattctagtcgtgtgcgctcactcttcccgcgcccaagcgcctgattcccgccctctgaaattatttactgctg

SEQ ID NO: 51737 - DNA, 364 bp, Zea mays
  unsure (1)..(364): unsure at all n locations
ntgatacacggattgaacatcgccatatcactgttcttttagagattgatggtatacggagattctctggtagtcatcagccagataaacaaggaatgggattgtttaagcgattcaatgggaaaatactgcgctgccgtccgaaagctggaagataaattcgagggtctggaatttcatcatatagaaagagatcggaacacagcagccgatgtactgtccaagctcggatctagtcgaactcaggtcccacccggagtcttcgtgcaagaaattctgcagccgagtatctcaatggatcaaacagaagagtgcaacatcatagatcaacccgagtcagactctgatgactggagaaggctga

SEQ ID NO: 51738 - DNA, 356 bp, Zea mays
agcttgagacgggaacaaccgtggcatgcactacatcccttgaagaaaatgtcaaggatttgaggattgccatgaggaggaaacaaaaaatgaaattcaacacctcctccaaaagcctcaaccacgcctccacaaaaggcaacatccaaggtaatgatcaagccacacttcacattaagaggtgtagtgaatgctttgaaatggggcacttgattaggtcatgtccctatattaatggcttgattattaacaaggatgatagactttgttttaaatgctctaagaagggacacttgcttagatcttgtccccatttaaaacaaaaaggcatagggttagaaaagaaagtttttact

SEQ ID NO: 51739 - DNA, 366 bp, Zea mays
tctaaagggagaacacgtgataggtttaactattgttcttttcgaaaaagatagaccttgtgcagcttgtcaagcaggtaaacaagtgggaggagcacatcacaccaaaaatgtgatgaccacatcaagacctttggagatgcttcacatggacctcttcggacccgtcgcctatctgagtataggaggaagtaagtatggtcttgttatagttgatgacttttcccgcttcacttgggtattctttttgcaggataaatctgaaacccaaggaaccctcaagcgcttcctaaggagagctcaaaacgagtttgagctcaaggtgaaaaagataaggagcgacaatgggtccgagttcaagaacct

SEQ ID NO: 51740 - DNA, 354 bp, Zea mays
agcttctcttggacaagcgccacacttaccgctgagtacgaggctgccacatataacaacagaggagcccttggcgttggtggagttagcgttgttaggtttatcaaatattgcttcagctcttcgaaggctctctgctggaccggtccccattgaaaaacttcggctgacttcagcacttcgaaaaatggtaaatttctctctgctgatctagatatgaatctgttgagagatgtcagtcttcctgtcaatctttgagcccccttctttgtactgggtggttccattcaaatgatagcttcgattttatttggattagcctcaatcccttttgttgaaactaggcagccaaga

SEQ ID NO: 51741 - DNA, 368 bp, Zea mays
ttaaaggattcaaaagggaagtaagcaataaagtttgttgggaatagtttaagaccaaatacaacatcatcatcatcatcatcaacaaagccttttagtcccaagcaagttggatagactagagttaaaaccaacataagccgcaaatcaaggttcaaccacgtggttagctgtttttcatatgctcatattcaaagctaaattttttggtatattctatcctttcaagcctctttttgcttcaattatcaacgtcggtcttcccctttctctcttactatcgtgtctttagatcccactatgtgctgatgcttctgaaggcctctgttggatatgtccaaaccatctcaatcggtgttggataagct

SEQ ID NO: 51742 - DNA, 353 bp, Zea mays
agcttctaaagggagaacttttttattgtctaaccaacgttcatttcgaaaaagatagaccttgtgcagcttgtcaagcagggaaacaggtgggaggctctcatcacaccaaaaatgtgatgacaacatcaagacccctggagctgctacatatggacctcttcggacccgtcgcctatctgagcataggaggaagtaagtatggtctagttatcgttgatgacttttcccgcttcacttgggtgttctttttgcaggataagtgtgaaacccaagggaccctcaagcgcttcctcaggagagctcaaaatgagtttgagctcaaggtgaagaagataaggagcgacaacggg

SEQ ID NO: 51743 - DNA, 360 bp, Zea mays
tttggtgtacttgtgcacagctcaagattctttttgagcgcctgagcctgaggcagctcctccaggggtatggcccatttgcgtgtaaccgaagttttttctatagctggtggctttctttgccagattccaacatgttctatctgccttggacgacgaggttctcgggagcatgctggagtccatcaaagtcgagaggggcgacaatgcaacgtcgtgaacgaaatccgcccaaaatccaacttgcatttgctggcccagggtgtgcgtctgacagcctgatcatggagggattcagagcgcctagtgttgcctaaccttgaaagaacggaaaggttaaatgagattttgctggtcttt

SEQ ID NO: 51744 - DNA, 352 bp, Zea mays
agcttctaaaggggggacacgtgtattgtttgactaacgtgcaattcgaaaaagatagaccttgtgcagcttgtcaagcaggtaaacaagtgggaggagcgcatcacagcaagaatgtgatgaccacatcaagaccactagagctgctacatatggacctcttcggacccgtcggctatctaagcataggaggaagtaagtatggtctagttattgttgatgacttttcccgcttcacttgggtattctttttgcaggataagtctgaaacccaagggaccctcaagcgcttcctaaggagagctcaaaatgagtttgaactcaaagtgaaaaagataagaagcgacaacgg

SEQ ID NO: 51745 - DNA, 362 bp, Zea mays
tttgaagaccactacttcatcctttcctgtcttctgagtaatctcctccccgccgaaatgaaccagctccttcttcgcttcactgaaatagcccaaattcatcagcttcggcatgtcaccttcgaaaatggtggatttcccaaactccaggtggctgggtttagttggcactgcgctgtaatcatcttctgactcaacttcctcagcatcagcctgctcagcttcagcggcaggtgcatcctccgatactaccagccctgaacgcttcattactttagagattggagcaattttggcaccttcggcttcctctccgtcgcgagtaactctagctgttgaacgtactttggccatctgatgat

SEQ ID NO: 51746 - DNA, 351 bp, Zea mays
agcttgaaaataatgccgaatcttcctggatgccattaacacagcatacaacactttctccaattctgtgtaatttttctttgataagcttcatacttcggagacaaaatatactggaacttgctttttagtttgtccttcaagtttctcctgtacaagtgccgcacttactgcagagtgcgaaactgccacatacaatagcagaggagcccctggcgtgggtggagttagcgttgttagatctatcaggtattgcttcagctcttcgaaggctttctgctgagctgatccccattgaaagacttcggctgacttcagcacttcaaagaatggtaaatttctctctgctga

SEQ ID NO: 51747 - DNA, 364 bp, Zea mays
ttattgcattaacaatttgttatttttgtattttataaaatataaaacctgggcatgtgaaatttgtacattgttcatgatttgttattacctatgcctcatacaaattccagccccaaattagatagtttcatatggtactaaaatgacacacattttataattataagaacaattagtgaaaatttagaagtaaacaagggcatgcatgtttcttgaaatacttaagtgccttgatataaattgaaactttacaactaggtcataatgatttgaatttaagaaattggtgataatatctctctatgagtttgcttggtgatttagttaagtgctcttgtgctagcaaactaaaatttatggg

SEQ ID NO: 51748 - DNA, 351 bp, Zea mays
agcttctaaatacaacaacttcattatccttcggctccgaaatggttttgtcaccagtgaatctaattaaattgtcattcttcttgccaatatacccaagtctcttcatcacatcaaagtctttagccttcatagtagatttcccaaactcaatgtggctaggcttacttggataaaggatattaagatcctcttcatcatagtcaccttcgacttccaaattatttttctctgacgaaggcacctcttccccatccttcggctcgacaatgcctaactccctcatcacttctgaaatcggagccgtctcagtcacgaatgcggactggctctcattgatcaatttagcgg

SEQ ID NO: 51749 - DNA, 363 bp, Zea mays
tgagtcagttctcttgcaaaggataattattgttcttaaggataatgagggcatgaaacacattcgtgaaaagttaaggactggaaaagccaaatgtttcaaagaagatgatcagggcattgtatggtttaataaccgcatagtggtgccaaagaatgaagagctccgccagcaaattcttgatgaagcacatcttagccgctactctattcatcccggaagcactaagatgtaccaagacttgaagcaacattactggtggacaaagatgaagatcgaaattgcacgctatgtggctagatgtgacacctgcagacgtgtcaaagcaatacatttgaaagctgccggtccattacagtcgct

SEQ ID NO: 51750 - DNA, 348 bp, Zea mays
agcttctaaaacgatttatttgtttttaataaatatactttccttttcctaaaaaggaaaaatgctcagaaaactatgaaaaattatcagagacttctatgggggtatattaatatgtttcaaacatgttttgcgcttaaaaatactatgcaacgacatacccaattcaaccttatgattcattttagttgacttgtaataaaataaaaatatataaaactataatgtttgattctaaaccactcaaatcttatcaaagcaaactaaattttgagaaattttgccgattcaaaaattaggcattacacaatagtacgccactatggcgcatgcatggacaacaaccgc

SEQ ID NO: 51751 - DNA, 362 bp, Zea mays
tgtgaaggttcttcatccccacatgtgctaagctgcgatgccacagccagcccatgccagtcttagcaattaagcatgcatctagaccggcctcctcttttgcaaaatcaactaaatagagtttgccgtctaatacacccttaaaagctaatgaaccatcacttcttctaaagacagacacatctacatttgtgaatagacaattatatcccatattacataattgactcacagacaacaagttatatatccaagcgactcaactaagaacacattagaaatagagtgctcggatgaaatagcaatttttcctaaccctttcaccttgcccttgttcccatcaccgaatatgattgaatctt

SEQ ID NO: 51752 - DNA, 379 bp, Zea mays
catcaggacctataaaactcagcttcgcattcgggtctattccttgtcttttagtgcccaaatgaagacgctgagcctaacgatagcgttaggagtcagctgatgaagatagatttcaaaattttccaaaacttccccaatcatttcattcaaaggaaacctcaatcctactctgaagaaactcctgaaaactaccacctcatcattttccggtgtcggagcggtttcttgcacgccaaaacgaatcagtttcttctcagcttctctgaagtagcctaactttatcatcatacgtgtatcagcctcagaagcagtagatttcccaaagtctaggtggctcggtttggctggcatgagaatggtataatcttcctcttct

SEQ ID NO: 51753 - DNA, 346 bp, Zea mays
agcttcttgaccaactcaacgttcaccaagttgttgtagctaccaccgccaatgatggtatgtacatggcagtccttgatgatgaggaacatgttgaagaggttgtgacactgtctgttgtcgtcgtcactagccgtggcactcaaagctcgttgcacaatcaaggccttataggtctcagtcgctgttgtaccaagaacctcttcaccaccatcataagtctctgcaatgttagctccaacagtatcttcatcttcaatatcagaagcactaacatacccaccatcactagtagcaatgtatgcccgtttgctggggcaatctcgctgaatatggccaagtccct

SEQ ID NO: 51754 - DNA, 357 bp, Zea mays
tgcttttgaaataaatgtaagtttatataactgcttccgcatttctttatctccgatgttctgtaatgtctgcaagacgggtgaaacgttcctggtaaggtaaggaaagataccgaacttgtcaagtagttcagggcacctacagggttgtctgaggaccgttggacaaggacaattgtaggtgggcctaattacttgggaggttctgtcacacaaatgctcctgcccacttcacctatttgatgaactcggtgttcatgcccgagttggacaagttcgtggtagtcttcatcgacgatatcttgatatattctaagaatgaagaggaccatgctcagcatctacggattgtattga

SEQ ID NO: 51755 - DNA, 355 bp, Zea mays
agcttataacaggaggatagaggtttgatctcgtccatatgtcatgatagaaggggagttgtacaagcatggagtttgtgctccgttactcaagtgtttatccagagccgaaggtatagagttgatgaaagaaatacatgcaggcctgtgtggatctcacattggatctaggccgttacttggaaaaattttccgccaaggattttattggccgaaggcagcttcggatgcagcggaattagtccaaaagtgcgaaggttgtcagaaatgtgcacgagatcaaaaacaaccttcgtccttaacacaactcatacaacccgtttggccattgcaaaggtggggccttgacttgtta

SEQ ID NO: 51756 - DNA, 382 bp, Zea mays
ttagaaactcaagcttcgtcatctgaaagaaagttaccctagagaatttattttatctcagttctccagtcctcactataaacaggggatatgttgaggactgctctttcaagaagctcaaccgaaggtgcttttattgttttgaaaaatacttccgaaggtaatggcagcccctgtgctgctgacttagctaataaatcagcatattcattgtcaccacgaggaatatttttgacagaaaacccttcgaaggaagcctcaatccttcggaccgtgtctaaatatttttcaagcttcggatctcttgctttataacttttgtcaatatgaccagaaataacctgcgaatcagttttaagaaccgcccttctgatttccattg

SEQ ID NO: 51757 - DNA, 356 bp, Zea mays
agctcgaggctgtgtatagattatttctctcttaatgcggcaactatcaagaacaagtatcctttgcctcgtattgatgttctctttgaccagttggtcggggccaaggtgttttccaagatagaccttcgctctggctaccaccagatcaaaatacgagcaagtgatattccgaagacggcattctcaaccagatatgggctatatgaattcttggtaatgtcattcgggctcacaaatgcgccagcatatttcatgtatctgatgaattctgttttcatgccggaattggacaagttcgcggtggttttcatcgatgatattctggtgtactcaaggaacgaagaagaacatgt

SEQ ID NO: 51758 - DNA, 365 bp, Zea mays
  unsure (1)..(365): unsure at all n locations
tatgaagattcttcatcccaacatgggctagtctgcgtttttatagccaacccaggttagncttagcaattaagcatgtgtcgagttcagctctatcaaaatctactaagtatagctgaccctataacacacccttaaatgctattgaatcatcacttcttctaaagacagtgacacttacatcagtaaaaagacagttgtagcccattttgcataattgagaaacggaaagcaaattgtaatctaatgaatctacaagaaaaacattggaaatagaatggtcaggagatatagcaattttacccaatcctttgaccaaaccttggttaccatccccgaatgtgatagctcgttggggatcttgg

SEQ ID NO: 51759 - DNA, 348 bp, Zea mays
  unsure (1)..(348): unsure at all n locations
agcttcggcatttcaacaagctttgtttttatggctggcgagaagaagactattgacccggcgctgtccgagttctacgaaggtatggaaagaaccaatgcagaaaagattgcacatgagaccctagctgggatatttgagggttccagtgatagtgaagactttgatgtanaaagtgagaatgagggtgtcgaagatcgaccgtggagaccaagtcatgttgtcttcggaaagtcaacgatcaagcaagaacaaattgatgccatgaggggaaggtactttcgtgacatttctattgtgaaggctggagtggagaataatgtctctctgcccgaagctgacaaggtg

SEQ ID NO: 51760 - DNA, 366 bp, Zea mays
tcgtcacgatgaagcaggaaggagacataggtgttttttgttgttcaaattgttgagtgcaaatgacaatactgaccctatgacatttgtaaactattggtaacttatcctcaaatgctgtgaatcaagaacaaggcaacacaattgttaagtattagggacctttgccttcggaagcattatctcctcatggacataatgatcatcagacgaaggtcatgaaggacatgccttcatcatcttatagataaacaagaatgcaaagagacgaaaacagcaagtgtatcccattgattcattcatatttgcattccacagaacatgtatgaataataacaagatttatattacaatgataccttcggc

SEQ ID NO: 51761 - DNA, 352 bp, Zea mays
  unsure (1)..(352): unsure at all n locations
agcttagaagagggtcattatgcttcttacatcaagggtaggaccaataccttctatttttctaacctgttaatgccactcttccacttcaaattctcttgttctaacttgagttgctaactcaataggatcacccaaaatatgctgattacctcaataggcccatagagaactatatgcctatgcaaatcatatttggaagtggggttgccacaggtaagtttgcaatgggttcaaatgagcctttgggcaagccaactgacattgttgacatcctagatganggnattgaagtgacctcaaattttgttgattgttccaatctaactaacaaggggaagactgttgacaa

SEQ ID NO: 51762 - DNA, 363 bp, Zea mays
ttatcaaatggacgtgaagattgccttcctctttggaccattcaaggaggaggtctatgttgagcaacctcccgactttgaatatagtgagtatcctaaccatgtttataaactctctaaggcgctttatggtctcaagcaagccctaagagcatggtatgaatgcctaagagattttcttatcgctaatggcttcaaagtcggaaaagccgatcctactctctttactaaaactattgcaaatgaattgtttgtatgccaaatttatgttgatgatatcatatttgggtctactaacaactctacttgtgaagagtttagtaggataatggtacaaaaattcgagatgtcaatgatggggga

SEQ ID NO: 51763 - DNA, 383 bp, Zea mays
tctgccccccggatcttaagcacctgcagctgcagcttgtgaagtcttatcttctatgtgctaagcggcgatgccacagccagcccatgcaagtcttagccattaagcatgcatctagaccggcctcttcttttgcaaaatcaactaaataaagtttgccgtctaatacacccttaaaagctagtgaaccatcacttcttctaaagacagacacatctatatttgtaaacagacagttatatcccatattgcacaattgactaacagatagtaaattatatcctagtgactctactaaaaacacattagagatagagtgctcattagaaattgcaattttacctaacccttttaccttgccttgattcccatcaccgaatatg

SEQ ID NO: 51764 - DNA, 363 bp, Zea mays
tcaaagcaccaatctgagactgaagctgtgtctttttagtccaccacagggaaatccttggaagccgaagaaacagaaacaacagaacaaattttggctgaagaaactggcactgccgcccccgaagcattttccgaagctttcgattatattttacgacatgcttcggggaaaaagttgactgaaaaaaaaagcaagaggcccagttttacgcccaaaaactgaaatatccaaagggggcgttgatattcaacggcagcggagaagaagacttcttgtattgtctccctgacagcaaggagatttctgtctgtcgggagatgagcaagagcttcggattcccaacactagaagacgggctct

SEQ ID NO: 51765 - DNA, 379 bp, Zea mays
  unsure (1)..(379): unsure at all n locations
ccggatccttaaatcacctgcagcatgcaagcttatgaaattcttattctttttgtgctagacgacggngccagagccagcccatattatacctagtgattaaacatgcatcttgattggcattctctttagtgaaatcaactaaataaagcttgtcgtctaatacacctttaaaagctaatgaaccatcacttataaagacagatacatcaacatttgtaaacaaacaattatagcccatataacataattgacttacataaagcaaattgtgtgatatcctggcccctaggatggtgatatcctggcccaaggcttaattgaattaatagagtatccataccaataaggtgcatgtcttggtctgtggggacaatat

SEQ ID NO: 51766 - DNA, 362 bp, Zea mays
tcggaatttacaaaccgacataaaagtttatttttcttttattccataaatgtttgagtcaccgttgtaatcccttatgagggacataattgtaattcctcataggctacgccctgtgcctataaataggtgaacattacctctgtactgttcacgcaatcttgtaatcactagcacattacgctggaattattgctttctgctaagacgaaggtataaatgtacctaaatattatgtttcaatatttaggttcatataataaaaaatatgtgaatattgttattcattttcggcatgtctttctataatggcttatgttttacattttacttcatattgtttttcaagtctgatcacgaag

SEQ ID NO: 51767 - DNA, 361 bp, Zea mays
tatcttaagggtgaagattaattttttttgtgttctaaaggactcaaaggggtttccttgagttcctttgatcttaaagaaaaatgtgttagtttgttgataatacttatcatatgcttcttgttgtattatatggtgataatgcaaaattagtgcttccgttgatatgaatcaattggtatctactgtgtttatcctgtgatagatattcatgtggttctgacgctttaaaatcggtatcttactggtgaatagtggtaggtttatattcctatggtatatttatttaattggtgtttaactctgattctgtgcatttgtgtgttatacgcatcacggtttgattcttcacacaatgcat

SEQ ID NO: 51768 - DNA, 352 bp, Zea mays
agcttgacaatgaggagattgtttttatcatcaaaagctttcgccaaatcctcaagcaacggaaggggaaggactacaaatcctattccaagaaggtttgctacaagtgtggtaagcccggtcactttattgctaaatgtccattatcaagtgacagtgacagggataacgacaagaagggcaagaggagagaaaagaagaggtaccacaagaagaggggcggcgatgcccacgtgtgccgcgagtggaactccgacgagagctccaccgactcctcctccgacgacgaggacgccgccaacatcgccgtcaccaagggactcctcttccccaacgtcggccacaagtgtct

SEQ ID NO: 51769 - DNA, 385 bp, Zea mays
acactgtgacacagtcaagcttacgaggattcgacatacgggcatggtctaatttttggcgccaaagccaacccgagttggggttaacaagtgcgcaccgtgtacgaggtgatctatatcagaaatctaccacatgctccgaccctgtaacactccttaaatgctattgaatacatcacttttgtaaagacagaggcacctacatcactgagatgactgttgtagcccattcggcataattgagaagcagggagcgccttgaagcctaatgagtcaacaggagaggccttggaaacggaagggacaagtgaaaaaccaaccatacccaaaactttgaccaaaccttgacccccatccccgagtgtgatcgctctctggggatctt

SEQ ID NO: 51770 - DNA, 347 bp, Zea mays
agcttatctaggtggcatctcctattcagcttgatggcgccaaggaataatacttagtttgctttattgttctcatttatttttgtaagacttctgttatgtaataatgatatttatgacatttatctctatacactgtgtcattatatgtgatgttcttctttggtgcacatatgagacgcacccagctttatcccttaaatccgggtgtgacagaagtgctataagaggaaatgttgacttaggacaaaacctagatagaattgaacaaaacccttacctacttaccttactctgattctttctatacttatcttgatcctgtctcacctttttgttgttctgct

SEQ ID NO: 51771 - DNA, 360 bp, Zea mays
tgagcgtgcacgtcgtgcaaaggaagctttggttgagaaccctgatgcattttgcaagggcaaatggccccgttgcactcagtagtctaggtgttttatttgaagttatgtagtaatgaacttattattcggtattatgtattgtcgaacaatgatatttggtaatggattaccttcaaattgatgaaaacgacataaatacgcaattgatgaaaactacattaaaagcaattattgaaggcgacttcaagcaattgataaagataatcaacacgctgaaagcaattgatacagaagagttttctagtagtgctcccacattccaaattgtgtggacccttctccatagtatcctcacat

SEQ ID NO: 51772 - DNA, 287 bp, Zea mays
acaccaacactattttagtcccaaaacggcccccccccaaaaagtggaaataacacacgcggacgaaccacacaacccccaagggccaacgcctcatggaaccaacgcgggctcccaacaaagcttctccaggccatcaagaccacggaccaaaaaggaggaggacagagctcgcctaagcacaccacagagctgggcggcgcgggaaccgacctgcccaaggggcaagccccaccctaagcaccggaggacgacaggacaccacatggaggacaccggcgggggaa

SEQ ID NO: 51773 - DNA, 373 bp, Zea mays
aactataaaaactcaagcttggcaaaattgttttgaagaacttttttttttgtttctactgcaccaatattggtaatgccagacatccacaagggatatgatgtgtattgcgacgcaccacaccttggacttggatgtgtgctaatgcaagaaagaaaagtgatagcttatgcctcaacacagttgagaaagcatgagaagaattatcctacgcatgatttggaactagctgccgtaatgcatgctttgaagatttggaggcactatatgattggaaacaagtgcaaaatcttcatggatcacaaaagcttgaaatacatattcactcagaaagaactcaccctaagacagagaagatggcttgagttgatca

SEQ ID NO: 51774 - DNA, 346 bp, Zea mays
agcttgtgaagggtcttatccttcatgtgctaagcggcgatgccacagccagcccatgccagtcttagcaattaagcatgcatctagaccggcctcctcttctgcaaaatcaactaaataaagtttgccgtctaatacacccttaaatgctagtgaaccatcacaccttctaaagacagacacatctacatttgtgaatagacagctatatcccatattgcataattgactaaccgatagcaaattatatccaagagactctactaaaaacacattagagatagagtgctcattagaaattgcaattttacctaacccttttaccttgccttgattcccatcaccg

SEQ ID NO: 51775 - DNA, 357 bp, Zea mays
tgcccgagcttgagccgaggacctttcttactttaatagtgcgctcgcgctcgctggagtttgtgaacccgccggagcacgtggaccgggtaaccccctgtaccatttctcaattccttgcgcccatggcctctacatcacccagtggagctcctcgtgcactttaattgaaccccaccgtcgtggtttggccggagcaggagccgccgacgacctccgccgcctacgctcgtggccagggcagctccgaccacctcagacgccgacccgcacaccgacgtgaccgccgtgacctccccgacgtcactgaccactccaccggagctctactgccgccggtaagcctcgccgccgtga

SEQ ID NO: 51776 - DNA, 355 bp, Zea mays
agcttcggctcattgctcctcgacttcgtcatcctgtacatatcaaagcggtataaggaaagtgcaaatttcaagaagaaggtaaagcagtaggcacaagtttattaccggcttgaggtggcttcgagcttcgtcaccagccaagtttcgcctgccctttgcccagatttgagtaacgaatctgtttccgatgcttcgggccaggccgggtatgtcatccaagtctgctggtgacaggctgaagtttggtctgcttgcaatgttttcatgtgtacagccagccttcatgaaagcaacagttgtgcctcgagaagctagcagagcacaaaagtcaccatgtccagctataacttcg

SEQ ID NO: 51777 - DNA, 365 bp, Zea mays
tctaaagggagaacacgtgataggtctaactattgttcatttcgaaaaagatagaccttgtgcagcttgtcaagcagggaaacaggtgggaggctctcatcacaccaaaaatgtgatgacgacatcaagacccttggagatgctgcatatggacctttttggacccgtcgcctatctgagcataggagggagtaagtatggtttagttattgttgatgatttttcccgcttcacttgggtattctttttgcaggataaatctgaaacccaagggaccctcaagcgcttcctcaggagagctcaaaatgagtttgagctcaaggtgaagaagataaggagcgacaacgggtccgaattcaagaacc

SEQ ID NO: 51778 - DNA, 182 bp, Zea mays
acacgagtcactgatgatatttttttattgtatccctgagtattgctttcctggttcttaccgagacctgacaagtgtaacattgcattgctcggtttggtcaggcggctagataaccctgcaaaaatagaacggaataaaacttttcacctactaagcattgcctatctggtcagctgcca

SEQ ID NO: 51779 - DNA, 359 bp, Zea mays
ggatgtgttgaggttggatgccagcgcacctgtatatgtcgtcaacaatcctcacgaggcagactcgccgggatctggatctgtacacaacttttagctagaaagcattagcagtacaccccatagggctctccggctgacattaatcgccctttcatacatgctcgggacctgcagggtttagtccgggtggccaagttgcgtgtccggacccccctgggtcgtggttctagatactaggacaacttgtcgcagggcggcggagcgtgcaggcccaccgcacgggacaaggctgagcggctgcatgggctccggaccactccaggagacaaatgtccgttctctagctctggccccga

SEQ ID NO: 51780 - DNA, 367 bp, Zea mays
aagtcacctgcagcagcaagctaatcctgagaagtggtttttggtgccccgaggcatgctcctagggttcatcgtctccgagcgaggcatcgaagccaacccggagaagatcgcggccatcaccagcatgggacccatcaaggacttaaaaggggtacagagggtcatgggatgcctcgcggccctgagccgcttcatctcacgcctcggcgaaagaggtctgcctctgtaccgcctcttaaggaaggccgagtgtctcgcttggacccccgaggccgaggaagccctcagcaacctgaaggcgctccttacaaaggcgcctgtcttggtgcccccggcggacggagaagccctcttggtctacgtc

SEQ ID NO: 51781 - DNA, 366 bp, Zea mays
tgaatgctcaaaatcaagaacttcaagtgcatcttgttttttgtaagaacatcaatgcctcatctttagtgattgaatctaagtctagctccttaaatgataatttttgcaaacattgtgccaaatatcatgcttcttgttgtctaactaaccatgcaaggaagaatagcccacaggtgaaggtcaaaggaatattgaaaagatgctctagcaatgatgggttaaagaaagttgaacccaagtacaagtccctaaagcccaacaatggaagaagggggcttgggttcaactcatccaaggaaaaccctagcacagtgcataaggggtggagatcccccaagttcatagagggaaccaccctatatg

SEQ ID NO: 51782 - DNA, 353 bp, Zea mays
agctttaggtttctctccttttttggttgagcaagtcttcttgagcgtcaagggttgtttccttttatctagcttctccatcaatttagtgattacattgtatccatttaaaccaaattctttaatcattttatttttcatgacaagtttttcattatcatcattagtaaaatcatcattaaataagggtaccttatctccttttgccatgaggcaagtgggagtgtaggagtcatcggagaggttggtgaagagttgcgaggttgaggtggaatgaatggcgacattagccacctcttcctctacctccgagcttgaactctcttcgtctgagttccattcttcacctatgc

SEQ ID NO: 51783 - DNA, 366 bp, Zea mays
ttgcaagggaaaggagatgatatgaagctttgtatgttcttgagcgggttaattcaattcttattaactcaagctatcaatcttacaatgttttatatctctaagattgacacaaagttattttaaattattatatctaaaactcatatcatctcgagcaagatattgatgttgtagggaataaagtattatcctgtgtagaaaatcaaagcctacaacatggagtaaagctaaaggatggtaacacttatgtctttaagtgcaagtatcttcaattatcatttctcttgtgtcttgtgtagtcacatagaaaaggaagtacttaagaatattgttaaattatgtcaccattctttagagaaagtt

SEQ ID NO: 51784 - DNA, 345 bp, Zea mays
  unsure (1)..(345): unsure at all n locations
agctttgagtgaagccatctttttgttgttggntacaagttgaaaattgggttccagttcaaaagaagccaaggaactagtggcaactactcaagctacactataggaagaggctagacaagatgctagtgctattactgtaactgacacaggaagtggtgctaatgaagagcctacatttgaagtagtctcgacaaatcaagtgtgttcattattaacctgaaagggaaatgggcaagatagacatttctacatgctttggtgattgaatatccaacacaacatcgtggagtaacttgcttgctaagtctatgagtataggttcactaggatgcccattggagg

SEQ ID NO: 51785 - DNA, 310 bp, Zea mays
aaccaagcgtcttgcgaaacaacaaccgcacccgcattatgggaagccccaccacaccccaccacaaacgaacaaaccgggcgcaccgcaaggccgcacgctacaaaaaccacacacaaaccaccacggaaagggagccccaaaccaaagtacgcccgggcccaacacacacaacccaaacaaagagacgaacgacaacgggacaatccccgcccgaaaggggcccgcagaaaacgccccacaaacaaaaaaaggcggaagggcacaaacgcaaaaacccagaaaaccataacacggcggccccgaaaca

SEQ ID NO: 51786 - DNA, 352 bp, Zea mays
agcttgaagtaggtattgttcatcttcttcgccttctggcccttccatttagtctattggatgcataagatatttacacaccttttagctgctatctcaactaactcattaacttacctgtaagcgaccctacattccaactacctagaatcctagttggtttgactagctttcttatcttttgcacccgtcgatgatgtaaagagccttgcacatttttcactacacttggacgtttatgtagtgcgctaaggaagtagcgacccgatccttattcacttgacaccgcgcctaaatcgtgacacgatacgtcaccaaaggggtgccaacccagcccttgtgcatttaatac

SEQ ID NO: 51787 - DNA, 363 bp, Zea mays
tataagttcctggatgagaagtgggccttctttttttttgatgaagcactaaaagaccaatcaaggaaggaatccatgtggaagttcgcaagaagaaggtttgtgtgttggcatcgatgcttcttcaataagctagctgccaagcgaaacctaaaagcctgaagatgatcttgagtagccagaatcagcgtttgcaatcggcaaccagatgctcctcaaggccagatcttgttgaagttccatcccctccaagagttgccaagtgaagatatgtagctgaagtaaagctatacccataacccttctaagctgaatctcgaggacgaaattccttttaagtggggtagatttgtaacatcccaa

SEQ ID NO: 51788 - DNA, 349 bp, Zea mays
agcttctgccttcggaggttctttattgaaatgaatgaagctgccgaagaatgccagagggccttcggcgctatctgttcttttattggaacgagggacttactacaagagcatatcgccttcagagtatggccgctcgcggagaaatgggaaatgccacaagaaaccataaaagagaccgacgaaggtggacttatcaggttgaaatacacttttaaatttggagataaattcgttgagccagatgatgattggttaaaaagtattaaaaatttaagtgatgaactgcttggggcttattcgaaggccgaagacactacaatgtcagcagccttcggaggccgaaaaa

SEQ ID NO: 51789 - DNA, 362 bp, Zea mays
tcagctccatcgatgttatggattgcttttgattttgtccagtttccttcggcccttctggcagcttcctgacttccatgaatagcgatgggtccttgatccgaaggtatcttcatgcagagataagcaggatgaagaattgcttcgaaagcattgagggtgccacgaccaataattgcattgtaagggtattccatgtcaacaatatcaaacacaacttgctcagttatagtgttgttgatgaacccgaaggtcactgacatggtgatcttgcccagtgctacaatctgtcttcctccgaagccacagagaggatgtgtggcatcatgaatcttatcttctggctcttgcatttgtctgaa

SEQ ID NO: 51790 - DNA, 351 bp, Zea mays
agcttggaggcatcgattgtatttctttcttggtgtagactccttcttttcttcttccgtcgccttaaatgtgacgggttgcacctcgggtgttgaggtggtgccttgctccaacttgacaatatgtttggagtctttgatcataagttcaaagctcacaaacttgccaatcacctcctcgggagacatctgtttatatctagggtctccacggattagttgcacttgagtgggattacgaaaaacaagtgatctaagaataaccttgaccattttgtgttcatcccacttggtgctcccgaggttgcgcacttggttgaccaaggtcttgagccggttatacattgcttg

SEQ ID NO: 51791 - DNA, 362 bp, Zea mays
tcgacgaggctttctgtggagagggaggaaggttgttaatggtggccattgtctgctgacttggcccaaagtcactagacccaaggacctggggggtctgggtattagtgatcttcggatcatgagctgggcactgcgggctaggtggccttggctgcaaaaatctgataggactaagccatggtcggacttccagattcaaacctgcgacattgtgcaaagcttgttggctgcggctgttatcactcatttgggagatgggtctgatactctattttggaaggatcgttggctgaatggcaaatgtattaaggaggtggcacctgctgtcttcggtatggtgcccaagcgtattgcttcta

SEQ ID NO: 51792 - DNA, 348 bp, Zea mays
agcttcgggtccttagccttattacttttgtcaatatgacccgaaacaacctgggaatcagttttaagtatggcccttctgattcccattgcttttaacttccgaagacctagaaccaatgcttcgtactcagcaatgttatttgtgcaattaaaatcaagctttgccgcataacaaattttgactttggaaggtgaaaccaacacagcagccgctcctgctccgaaggttccccaagatccatcacacaacactgtccaggcttcgttgtctttattcgtttcctcctcctgagcccctggcgtccaatcagcgataaagtctgccagcgcctgtgactgaatcgaa

SEQ ID NO: 51793 - DNA, 360 bp, Zea mays
tgaaggactgcttcggcaggagagcttctcgatcttgatgactcgttcggtccacggagtcgctttacccgagcgcaagttacttatcgcagaaagggacgagtgaggtatccttatcccggaggcgtaggagtccctcggctcggtcagccttggctgcttacgtgtacctcgtcgtttccagggtccgctttccgaagtagtcaagaagtacgaaagaaatcctgccaaaaagagatcctttttcaaggaaaaatttgacgcagagggggtctccccccttttagcccccgagggagggtcgggctttgccgaggctaggccgacccttccttgacgactaaactttgcgtaggtgcg

SEQ ID NO: 51794 - DNA, 349 bp, Zea mays
agcttaccttgtgattatgattatctatctttggtccaaaggtggagggtccttaagtttctttgaaaccttaaggggaaatgcttcgaatatttggaacatgctttcttaagtgcacaatctgacatgagcctcatgtttatattatgacacattgcacttcacaatttctacgatatagatatgttctcattaacctcattatgtgcatttgacatttaaggccaaaatatgtattcctctcaaaacacatacttatggggagcaatctatattataaaaccatgattaagcttaattgacatatcttttgatctaatatatctctttcagttggtacctgctctta

SEQ ID NO: 51795 - DNA, 358 bp, Zea mays
taccaaggatatggctaaggtcgagcattattttctaattaagctgatcaaaactttattagcaatgactaagtataagtatatatcatattaatgaaataagtgatcaacaaatgtaataccaacaataaaacacatgtctgattttatttaattcaataaattaatcaggtaagggttcaagatgctcttggccgtgagcacgactgatatatcaggtctacactttgcagaggttgcacatctttacccacaaagacgtgtaaaagttcaaagaattttgcacctaaccacgttgtgttgatcagacacaataccagactacataggtgtgattgcatatgaacactaagaagcc

SEQ ID NO: 51796 - DNA, 346 bp, Zea mays
agctttttggaaaatcacctaatcgcggatcgtccgagcccttgcggcggaccgtccgcgacactagggtgagcctcggacaaaaccaattcaaaaacacaagtctgcactatggaccgtccgatggaaaaggaagcaccatccgagaccaagtgcgggccatccggcctcaggcgcgggccgtccggtcggtgaagaaccaaacccgaaggtgacaggttcggtaaaatgaattatagcgtcctcgcggaccgtccggggtgcacaaccggactgtccgcgactgcctttatctgacatctgatgacacattaaatgctatatagtcgttgatatagccgctact

SEQ ID NO: 51797 - DNA, 361 bp, Zea mays
tcacttgtcgtccttcttataattttgcttccttgttccaccaagttttttctttctttttctgtcggatagcccatgagtccaactagaagcaacacatgaagatcacattagaaggatcatacaaagatttatcaccaaaacaccatgaaagttgcctagaggggggtgaataggcgaaacctgaaatttataaacttaaacacacactaaggtcgtgggttagcgttagaattaaattcaaatccaaaagaatatctctcttgctaggagttgctcaaggattatggatgacgtatgggagccaactcaaattcacactagcaaagagatgttagagagggaaaaacaaatcaaacaa

SEQ ID NO: 51798 - DNA, 357 bp, Zea mays
agcttgagaaaatatttcctccatcattttttgatgtgatgctacacttgacaatccatttacccgatgaagcaatccttagaggtccagtgcaatatggctggatgtacccagtagaaagacgtttatacactttgaaacatttcatgaggaacatggctcatcctgaaggttcaattgcagaatcatatgttgctaatgaatgcttaaccgcgtgttcgaggtattttgatgatcttgatacacgacacaacagggagggaagaaacagagagcgtgttgatttgaccaagggtgagttgtctgtttttcaacatggtgttcatttacttggagcccctaagattacatatgtag

SEQ ID NO: 51799 - DNA, 364 bp, Zea mays
tcatctatctgcctctgaaggtcagctagacgttccttcttctccttctttcattgcacctgttgttggagcatctccaggttttggatttcctgatccaagtcatcctccggaggcgtgggactggtagccttcctcttctggcttcggacctccctaagagaaaggacgtcctgattggggtccagcggctgtagagtggcagcccctgtcgctgaagccttcttcggcggcatgacgaaggtgatgtttgccgaagatgttcaaaagctcaataaatggaagtgagttcaccggaggtgggcgccaatgttggggactcgttctcaaatgctatgaatcaagaacaaggcaacacaagatg

SEQ ID NO: 51800 - DNA, 357 bp, Zea mays
agcttccaagtttgggttgaagcctctttaagcttctccacacggttatcttatcgaggttgttcttgtagcttgttgcaatccaaaataaattaagtacatgggttcactttgctcatgaacaaactcatatgctaccactagtttcaatcaacgaaaataaccaatagtggtagaacatgaatttaaatatttcatttaatatgcatgatactattaagtatgtactatatgcactaaccacatactagtaggggatgatatgatcatgcacatcacaatgatacctttgctatgttggagtagaggatagtcaaaattctttcgattagctctccaatagcaatgtgaagtcca

SEQ ID NO: 51801 - DNA, 366 bp, Zea mays
tgagcacattagcctccacactactgaatttactcatttgtgtttacaatgatgattgtttgtcttggtattcagaatgatatccataaaggatatgatgaatctgtgatagattcgaaaatttcagatcattaatgaccgtcagtaatgaattgtcatttccaactagttatggttggagtcaggaagttttgcacgctcctgacttgtgattaactgcatgtactgcatgtacaagttcccctatggttttagtacgtgggaatccatgaaagatttcccatgcgtacattgggtatgttcccaatctcaccactgcagcgtacatgtatgggcacacagaaaactggggatctatatgagaat

SEQ ID NO: 51802 - DNA, 355 bp, Zea mays
agctttaccaaatggacgtgaattttgtttttctcaatggaccaatcaaggaagaggtctatgttgagcaacgtcccggctttgaagatagtgagtaccctaaccatgtgtataaactctctaaggcgctttatgggcttaagcaagccccaagagcatggtatgaatgccttagagattttcttatcactaatggattcaaagtcagaaaggccgatcctacactcttcactaaaactcttgaaaatgacttgttcgtatgccaaatttatgttgatgatattatatttgggtctactaacgagtctacatgtgaagaatttagtatgatcatgacacaaaaattcgagatgtc

SEQ ID NO: 51803 - DNA, 366 bp, Zea mays
  unsure (1)..(366): unsure at all n locations
tattaagggtcttcatcccaacatgtgctagattgttanttctaagccagcccatattagtcttagctattaagcatgcatctagatcggcattctctttcgaaaaatcaactaaatagagcttagcgtctagtacacccttaaaagctagtgaaccatcacttcttctaaagacagatacataaatatttgtgaataaacaattataacccatgttacataattgactcacagacaacaaattatacccgagcgattcaactaaaaacacattagagatagaatgctcggatgtgatggctattttccccaaccctttgaccttgccttggttcccatctccaaagatgatcgtatcctaggaat

SEQ ID NO: 51804 - DNA, 353 bp, Zea mays
agctttagtatgatactttttaaacttttgagtacctagctattcatacatggtatcaaacattttatcaatcaatgtctttttccaggcacctcatttccactttttactcaatgtagcagcatgaatcaagcagtctcattagatgcgagaagtagacaattcgaatcgagttttaaccttgcaagataaacctaaacacacgacgtggcgaggcactccgtccccacacatatcaactgtccccatcgattccttggcaacagaatagggctcactgccttggcgtacaatgtctcactgaccctgactgccgtcgtggagtgaccgcacttgtacccaccataaccgga

SEQ ID NO: 51805 - DNA, 385 bp, Zea mays
cagcgaccttgaaactcaacttcgctgatctgctgaagcagccttctctcttttgttcttatactgctgataagcttcgacttcatctatattatggatagcctttgaatccgtccaactcccttcagccctcctggcagcttcttgacttctgtgaacagcaataggcccttgttccgaaggtatcttcatgcataaatatgctggatgaagtattgcttcgaaggcattaagcgtcccttgaccaatgattgcattgtatggatactccatatcaacaatgtcaaagacaacctgttcagttcttgtgttatggacatagccgaaggtaactgacattgttatcttgccaagtgcaacaatctgtcttcctccaaagccacaa

SEQ ID NO: 51806 - DNA, 351 bp, Zea mays
agcttgcttttaaaataaatgttttttatgttatcgcttccgcatttctttatctccgatgttctgtaatgtctgcaagacgggtgaaacgttcctggtaaggtaaggaaagataccgagcttgtcaagtgacttaggaacatctacagggtgtctgatgtctgttagacaaggacaactataggtgggcctaattacttgggaggttccatcacacatctctcaaacaaagtatacgcaagacttgctgaagcggtttgggatgaaggacgccaagcccgcaaagactccgatggggaccgacggacacaccgacctcaacaaaggaggtaagtccattgatcaaaaggc

SEQ ID NO: 51807 - DNA, 365 bp, Zea mays
tgacaacgaggagatagcgctcatcatcaagatttttcgctaaatcctcaagcaaaggagggggaaggatacaaaccccgctccaaaagggtgtgctacaaatgtggtaagcccggtcattttattgcaaaatgtccaatgtcaagtgaaagtgacagggacgacgacaagaaggggaagaagaaggagaagaagaggtactacaagaagaagtacgacaatgcccacgtgtgtcgggaatgggactccgacgagagctgcaccgactcctacgacgaggacaccgctagcatcgccgtcaacaagggcctcctcttccccaacgtcggccacaaatgtttcatggctaaggacggcaagaaaaa

SEQ ID NO: 51808 - DNA, 52 bp, Zea mays
agcttcaccaaaaggcaggtggcatgagttgaacaccataagtggtggactg

SEQ ID NO: 51809 - DNA, 362 bp, Zea mays
tcttgaccacctcaatgttcaccaagtttttgtatctaccactgttaatgatggtatgtacacggcagtccttgatgatgaggaacatgttgaagaggttgtggcgctgtctgttgtcgtcgtcactagccgtggtactcaaagcttgttgcacaatcaaggccttataggtatcggtcgctgttgtaccaagaaccttttcatcaccatcataagtctctgcaatgttagctccaacaatatcttcatcttcaacatcagaagcactaacatacccaccatcaccagtagcaatgtttgcccgtttgctggggcaatctcgctgaatatggccaagtccctggcagcggtggcacttgatg

SEQ ID NO: 51810 - DNA, 354 bp, Zea mays
  unsure (1)..(354): unsure at all n locations
agcttccaccactttgntctagttgttttgttatgcttattccgttgtaaacgaatcttaaaacggaagtcagctacgacaagcttatgttgggttaccacacactctccaggtataaccttgcaatctaagcaggcatgcatgtcctcttttctcaagaggacgaaatcaatctggctagtgcattggccactactgaatgtcaccaggtgggatttcctcttcctaaagaaagtgtttgctataaacatgtcataggctagagcaaagttcaggatttcctctccttcttgattcctagtcccaaagctgaagcctccatgcacaccctcgaaactggtgctagatgtaccc

SEQ ID NO: 51811 - DNA, 361 bp, Zea mays
tgtcaacaatatagacacaaaagagagaatgttttttctgcagatcagccgaagcctatgctcctatgtgaagatatagcagatcaaatggtactgctaggatctcagctatctgatgagcaagaaaaaactttgataaggtttttattcaacaacaaagatgtcttcgcttggacaaccaatgatctttgtggtgtcaacagagatgtcatcgagcattcacttaatgtggatccttctttcaggccaaggaagcaaagacttcggaagatgtctgacgataaagcagaaggtgctcggaacgaagtaaagagacttctcagtgttggtgttatcagagaagtaacatatccagaatggc

SEQ ID NO: 51812 - DNA, 352 bp, Zea mays
agcttacccatgacgaggcttgttgtcagttaaagggtcctcaatcagcaagcctacatcggtacggtccttaatcgactcaaacgaaggcactacatcgagacttccttctcgtgcaagccacccgcccggtctcgtctttatcatttaaaacccaaagtttggtacctgtcagaggtacatcttttctgatgttgaacccatcatgccatgatggatccaccatcaagttttatttttgaaaacatcccattccatctgaagcatcatcttttgttaaaacccaaacatttttgttttctaaagcaagactaagcatcataaaaccttttaacaaaacaggtaatcatgg

SEQ ID NO: 51813 - DNA, 358 bp, Zea mays
tcaagtgatttgaagttccatgttgaatttttcttgttcaacttctccatttcgtggcataacgtaatgtcagaaatcttcatcgtcaaacaatggcaggaagccttgtgacttaacgcatctgccactacattagccttgcctgggtgatagtgaatctccagttcataatcattaataagctcaagccatctcctctgcctcatattcaactctgactgggtaaagatgtacttcaaacttttatgatctatataaatatgacagatattccccagcagataatgacgccatatttttagggcatgaaccacaacagctaactccaggtcatgagttggataatgttcctcatgtc

SEQ ID NO: 51814 - DNA, 349 bp, Zea mays
agctttggataccccatgttgtttattatttcacagcaaacattgatctccttactgtctggtaagcattagaggaagtcatcttcgttgtctcctccgtataccaaagacccctaggggtatttcagctccttaccataattttatgtttcagcaagttgctctgctaacagctgttttcctgaagcatgtcgaacaatatagttcaaatcaccttgcggaggtgcttcgggaacaggtgttgtgggcttttctagaagactctctcccactagatttactggtgtagcttttgaaggtcctgcttcagcatgaacagaagaagcgctcgtagagaccactcctcttg

SEQ ID NO: 51815 - DNA, 349 bp, Zea mays
cagcttattcaaagggttatattttacttaagtagctaaaatcaatgaattaattgatgcttttaatgaaaaagatagattgtttgagaagcaagaagatattttgtatgaagagcatgacaagtttgttagtgtgcaaaaatctcttgctgtagaggttaaaaggaatgaaatgctttcttctgaattatctgcttgtcatgaaactgtgtctagcttaaagagtgttaatgatgatttaaatgctaagctagaagtagccaataaaactagatcttgtgtagaacatgttgccatttgtaataagggtaaggattttgatgttgatgcttgtgttgaacaccttaca

SEQ ID NO: 51816 - DNA, 358 bp, Zea mays
tccacacgcttgccccagtggtcggctatagcatgtctggatagctctctgataagtcgctccagcgtttttgaggccgaacgacatggaggtatagcagaaagctccgaacggggtgatgaatgctgttttttcctcgtcctctttcgccaagctaatctgatgatacccggagtaacaatccaagaaagacaacacagaacacccggcggtcgagtccaccacttggtcgatcctaggaagtccgaagggatccttcggacagtgtttgttgagatccgtatagtcaacgcacatgcgccaatccaccttattcttttttagtacaagaacaggattagctaaccactcaggatgt

SEQ ID NO: 51817 - DNA, 350 bp, Zea mays
agcttcatgtatacattaattagttcttttgatatcaataaactagcatcttttaacattctataatcttacctttgcattacatcctagcaagtagatttgtttcaattttggtatctattatttgcttgctttgatcatattgccaccaattataaaaaagtgagattgtaatgaaaatggaccgagatccatttaaagctaatgttttagtgtttgatgatcaagaccatttggattaacattactccctccatcccaaattaaaatttgtttgacctttttgtaccacgtttgaccagcttgtcctattcatttttttgcgaaaaaaatttaaaaaattcaaagcc

SEQ ID NO: 51818 - DNA, 359 bp, Zea mays
tgtatggattgcagaatgtggaatgtatttttttggatcaatattctggaatataccgatccctctacacttgttgtgtgccgacctgccaggctgccaccgagccatcagggtcacagaatcggtgggcaccgtgtgattgttccttaaatgtcaattcactgacgctgctaacctgttctcggcgaaatcacgaaccggatcagcctatgaatgggcaagccacgcgtccagatctcccattaaaaaaaatgtcaagaaaaaaaagaaaccaaccttgttgagagtaacgtgatgctacaacacatcatcaaaagtaatgattcggactggtcaaatcatgcgccccaaacattatt

SEQ ID NO: 51819 - DNA, 346 bp, Zea mays
agcttttccttggcgtcatctattttgacatagaaccactctgatttccagcctgctgcccacttgcttcggtagctaattacagggaacttggtagttttccggtaggcaaagttatagcaaccaaaattatcgtgcaatccatcttttctagcctttgtttgataatgcagctcgtgaacccggcagaagctgtccgcaaatggttccactgcttggcttcggagtgcccagatataaacaataagcctaacgatagcgttaggggtcagctgatgaaaatagataccgaacctcttcagcacctctccaatgatcccatgtagggggaatcttaatccagcct

SEQ ID NO: 51820 - DNA, 360 bp, Zea mays
tctagattcttcctgattagcttgttctttctttcggcttcagtcactaagtcaggtccaaaaacttcactttctccaggctgagaccaattgaggggtgttcgacaccttcttccatatagggcttcgaaaggtgccatctttaggctggattggtaactgttattataagcaaaatctgccaaggagaggtacttatcccagttcttgccagaatcaattgcacaaacccttagcatatcttcaagaatttgatttaccctttcggtctgaccatcagtctgtgggtggtaagctgaacttcttattagcttggttcccaaagactcttgcagttgttcccaaaatctagcaacaaat

SEQ ID NO: 51821 - DNA, 356 bp, Zea mays
agcttctaaagggagaacacgtgatatgtttgactaacgtacaattcgaaaaagatagaccttgtgcagcttgtcaggcaggtaaataggtgggaggagcgcatcgcagcaagaatgtgatgaccacatcaagacccctggagctgctacatatggacctcttcggacccgtcgcctatctaagcataggaggaagtaagtatggtttagttattgttgatgatttttcccgcttcacttgggtgttccttttgcaggataagtctgaaacccaagggaccctcaagcgcttcctcaggagagctcaaaatgagtttgggctcaaggtgaagaagataaggagcgacaacgggtcc

SEQ ID NO: 51822 - DNA, 366 bp, Zea mays
taaccttagtaatctgttttatatgttacttattctttatgttttcattggttttgtgtagaaaacgcaaaccaaggaagaattccacaaaacaatggtttcccaaagaattagtccaaccaaacatcctgtcagatatggtgattgggactgagtcaattcaacaaacagtcagttcagactacatccccagtgcagacttggaggtcggcccttcatcgcctccaagaattattagaagagttatacgcaagattacaccgaagaagaaaactgcagacttggagatcggcccttcatcgcctccatgaactatgtggttcagtggagtcgcttcagtgtatgcccaagtgtatgaactatgtt

SEQ ID NO: 51823 - DNA, 354 bp, Zea mays
agcttcaagtccctgtgaacaatttctttgctgtggaggtggttcaaaccctcgcagacccccttgatgatctcatagcgtgactgccaatcaagtgattcatctgtttgtgtacgtacgtgcaaggcaatgaggcttgcatgatataagcagatatatttactaattataaacagatggtatataaaatgattagcagcatgcttggagcagatcgattaaaagaccacacaccagcgacatgcttcctcaggcttcccttctccatgtacttgaagcagagggctcttatctttctgtagacagggcgtccgtcacgcagaacagtggacgacggtgtatacccgttgcagt

SEQ ID NO: 51824 - DNA, 364 bp, Zea mays
tctaaagggagaacacgtgataggtataacttttgttcatttcgaaaaagatagaccttgtgcagcttgtcaagcagggaaacaggtgggaggctctcatcacaccaaaaatgtgatgacgacatcaagacccttggagatgctgcatatggacctttttggacccgtcgcctatctgagcataggaggaagtaagtatggtttagttattgttgatgacttttcccgcttcacttgggtgttctttttgcaggaaaagtccgaaacccaagggactctcaaacgcttcctcaggagagctcaaaatgagtttgagctcaaagtgaagaagataaggagcgacaacggatctgagttcaagaac

SEQ ID NO: 51825 - DNA, 353 bp, Zea mays
agcttcgggtctcttgctttgtattttttgtttatgtgaccagaaataacttgggaatcagttttaaggatagctcttctgattcccattgcctttaatttccgaagacccaaaagcagagcttcatactcggcaatgttatttgtgcaactaaaatcaagttttgccgcataacaagtttttactttggaaggtgaaatcaacacaacagccgctcccgctccgaaggttccccaaggcccatcgcaaaacactgtccatgcttcgacgtctttatttgtttcctcctcctgagcccctggcgtccagtcagcaatgaagtctgctaacgcctgggactgaatcgaagatct

SEQ ID NO: 51826 - DNA, 364 bp, Zea mays
tagaagcacttttgtttcttagtccccccgacttgatcttttctcacgcggttaagcgttagaacaaggattaggctctgataccaattgaaagttgcctagagggggggtgaataggcaagttaaaactttttcaacaaaaactagaagcaaactgggtaaaactgaattgatcttgaaattcacccagttaactttggaaatgagatgttctaaatgatccacagggttcaaagtagtagatctgagaagcgcacttctcaaaatccacacaccaaaaagatataaacaatctttcacggaatgatgagagaacgaagaacacaaacaaacacaatgagcaagaacacaagagacacaagat

SEQ ID NO: 51827 - DNA, 354 bp, Zea mays
agcttgtgacaatatagtctatttgattattgacaagcggtgtttattgcctcggcccaataagaatccgacacattatattccgctagcatagacctaaccatatcaatgagagtcctattctttctttaaacaataccattttgttccagagtatatttggaagataattcatgtttaatacccttgtcatcacaatattcatcaattcttgcatttttgaattccgtcccattatcacttctaactttcttgatatcaaaatcaaattgattttgagccaatatagaaaatgacttgaatgtttcaaacacattagatttatctcgaagaaaataaacccaagtgaatctt

SEQ ID NO: 51828 - DNA, 364 bp, Zea mays
tgttgatggatgctgtcatcagtttaaattttttttttttaattggtgccttttaaaatccttttgttgaagtcggagtctatcatgttgttttaactttttctccgcgataaaatcttgaacttgaaaatgtggtgttaagtatgtatgtgatttttcagatggccgggaggcagcgtcgtggccagaatgagcgcgttcctccaccgccgccaccacctcccactctgcaggagctcatggctcagcagaatgagatcctgaggcaactggctcaacgtcagccaccacctcagcactatggtggtggggaccatcagcgtcaccccgcggcggctacctaccaggaattccttagcaccca

SEQ ID NO: 51829 - DNA, 344 bp, Zea mays
  unsure (1)..(344): unsure at all n locations
ancanatgaagagaattgacccctactttgctanncggcggcgccagagccaacccatgttagtcttagcaatcaagcaagtgtcgagttcagctctatcaaaatccaccaagaatagctgaccctctaacactcccttgaatgctattgaatcatcacttcttctaaagacagtaacacctacatcagtaaatagacagctgtagcccatttggcttaattgagatacgaaaagcaaattgtaatctaaagaatcaacaagaaaaacattggaaatggaggggtcaggcgaaatggcaattttacccaaatctttgaccaaaccttgatttccatccccgaat

SEQ ID NO: 51830 - DNA, 204 bp, Zea mays
ttatcaaatggacgcgaaaagtgccttcctcaatggaccaatcaacgaagagggctatgttgagcaacctcccggctttgaagacagtgagaaccctaaccatgtctataagctctctaaggcgctttatgggctcaagcaagccccaagagcatggtatgaatgccttacagacttccttattgctaaaactcttgaaaatga

SEQ ID NO: 51831 - DNA, 315 bp, Zea mays
tgggcgaatcggcggcgccagagccatcccatgtcaatcacagcaattaagcaagggaccaaatcagctctatcaaaatctaccaaggatagctgaccctctaacactcccttaaacgctattgaaccatcacttcttctaaagacagggacacctataacagtaaaaagacagccgtagcccattcgacataattgagaaacggaaagcaaatcgccatccaaagaatctacaagaaaaacattggaaatggcaaggtcaggcgatataacaattctacccaatcctttgaccaaaccatggattccatccccg

SEQ ID NO: 51832 - DNA, 343 bp, Zea mays
agcttatgaagattctcattttttgtgggctagtcggtggtgctagagccaacccatgttagtcttagcaattaagcaagtatcgagttcagctctattaaaatcaactaagtatagctgaccctctaatactcccttaaatgctattgaatcatcacttcttctaaagacagtaacacctatatccgtaaaaagacaattgtagcccattttgcataattgagaaacagaaagcaaattgtaatctaaagaatctacaagaaaaacattggaaatagaatggtcaggtgatatagcaattttaccaagtcctttgaccaaaccttgattttcatccccgaat

SEQ ID NO: 51833 - DNA, 345 bp, Zea mays
  unsure (1)..(345): unsure at all n locations
agcttatgtccgacggctttggtgttttaaattgtttcgtttactgtagtgcatgtttgcttaactatttttagctagttgcatgtgagaatgagcggtgttgaagctagaactgtgttgcgttcaaggtgcggcaaggagtggtcatcgccatatcgtgcatgaaacatccttgcgttttaggcgggcacgatgcagcgtgaacacacatggagggaggatcgtgaggctcanaccgtgtaaacaccaatatataagaggaacaaatgaaaccaaaaaggctacaactcttggcagtggcattcttctatgtccgtgtgtgttagaggattgtgcgacgccgta

SEQ ID NO: 51834 - DNA, 349 bp, Zea mays
agcttgaagccatggtaagtatcatatgacaatagtatacgaattgactcaagcctagctacgggtgcatacgtttcaccgaaatccaaaccttcgacttgggagtatcccttggccacaagtcgagctttgttccttgtcaccacaccatgctcgtcttgcttgttgcggaagacccatttggttcctacaacattttgattaggacgtggaactaaatgccatacctcattcctagtgaagttgttgagctcctcttgcattgccaccacccaatccgaatcttggagtgcttcctctatcctgtgtggctcaatagaggaaacaaaagagtaatgctcacaaaaat

SEQ ID NO: 51835 - DNA, 349 bp, Zea mays
agcttctaaagggattacatattttatgactaacaaacgttcattttgagaaagacaggatttgtagcgcatgccaagcagggaagcaagttggaggtcatcatccacacaagaacatcatgacgaccgacagaccacttgagctactccacatggacctattcggcctgatcgcttacataagcatcggcgggagtaagtactgtcttgtaattgtggatgactattctcgcttcacttgggtattctttttacaggaaaaatctcaaacccaagagaccctaaagagattcttgagacgagctcaaaatgagttcagattgagaatcaaaagatcagaagcgacaat

SEQ ID NO: 51836 - DNA, 348 bp, Zea mays
agcttcattcaaaagatgttttctggcgatcatataagtcaaataagtcacaacaattcacatggactaaaaagaaacaagtgcgtgacagtttacatgaaaaaagcacttgacagaggggtgcaccaaagtttttcatactccaaaaataccgtggtattgccaaaaccaaggtttttatatagtgtggttttaaatggtctacccagcaccttttggcctctaaaaccatggtactcttaaatagcacagtattgtcttgggactaggaaaatacagtatcttcaaacagggcctcagtgtttggtttgcttataaaattatttgagtctacactattttacatag

SEQ ID NO: 51837 - DNA, 353 bp, Zea mays
agcttagcaagtgtgagttcggatcttttttttctattcttgggtcataatataaaccgagatggactagttgtggatccaaagaaggtagcagcgattctggactggaaagcaccgaaagatgtccgaggaatcaagagtttcattggaatggacggttattatcggcattttattgaaggtttctccaagattgccagaccaatgacagccttgctagcaaagaaggttgagttcaagtggaacccagcgtgccaagaatcattcgagatgttgaagcagaagttaacaacagctccagtgttggttctgccagatgttcacaagccattctcagtgtattgcgatgcttc

SEQ ID NO: 51838 - DNA, 356 bp, Zea mays
  unsure (1)..(356): unsure at all n locations
agcttgtcgtagctgacttncgtttttttattcgtctacaacggaataagcataacaaggtcactagaacaaagtggtggaagcttaaaggggatgtggcccaaactttcaaggagagagttatcgaggagggcccttgggcagaagagggagacgcaaacatcatgtggaggaagatggtgacatgcatccaaaagatagcttcagaagagtttggtttgagtcaaggaaacataagggaagttaaagacacttggtggtggaacgaagatgtccaaaaggctatcaacgagaagaaagattgctacaaacgcttacatcatgacaagtgtgcagacaatatagacaagtacatg

SEQ ID NO: 51839 - DNA, 305 bp, Zea mays
tgaacggcggatcactaaaaccaccacttgcaacaacattccctacatcatcagaactcgatgagaacagcgagaactccgcgacggtgttgccccacaagctcatcaaaccccgatcccccccaaggtgaagcccgagaactaccccccactaaggaaacagaacgaggaccaaacgccatcgtgactcacaaccacatcatggatccgcaacccagaaacaccacaagttattagcacacccggccttaaaacgcaaaccgaacgccaaccatgcccctgccaagaacaacaatgcacccaca

SEQ ID NO: 51840 - DNA, 350 bp, Zea mays
agcttgtcaagccctcagacccggccttacttcaccggaggcccgagatcgacctcaccggacttcggtcttccgccgccgcgcgtggaccgagctatccagtgagtctccgaccaattccttgcacccatatcttctctggcatcccgtgaacctctctgacccatccaattgctctatctcgccgtgaccaggccggactcctcgtcccgacgagcatccccgcctgcgcgcgtggaccgaccgactccggccatctccgacggcgacccgcacaccgttgtgatccccgagacctcccctacgtcctcgaccacttcaccggagcaatctcgctgccggtaagcccc

SEQ ID NO: 51841 - DNA, 354 bp, Zea mays
agcttcagattaactaatcataattactttagagtctctgtgatagcaaatgcatgtgacaaaatcttgagcaattccattagaaatgaggtgggcccaaaatgcgcaagccacatacaaaagtctgggagatattgagtggcattttttatgtgatgaaacttttgtgtagcattaacctgaattccctcaaggcaagcaaaacctaaacatccaaggtcctataaagaacaactaaactcaggtaataatcaaatttagcaaattatataattcattcaaggaaaaataatacagatcttaaacaaagccctgttaatccagctgtctcttgttagaaaattaacatcaaaa

SEQ ID NO: 51842 - DNA, 350 bp, Zea mays
agcttaaaagaataccattattttctcaaaatcaaagaaaacacagggtaatttcatctttgagctcaaacatcatgtgagggcctataccgactttaaccgcgagcatgaatgatatatcacgcctacaccctctataggtgtcactttcaccataagctatgtatcccttgcagcataggtttgcaaagcccttaaacactactgaggtgaatgactagcgattcacctaatgtttttagaaagacgcatttactataaaataatcagctaaggtttcaagtcaccgcggagtacgatcctcactaatgtgtgcattaccttaaccaagcataccatccaagagaacc

SEQ ID NO: 51843 - DNA, 353 bp, Zea mays
agctcgccagtacttgtcttaatcttctacatctaccagcacagcaactgcagaccataccagtgacttggcccttcgcatgctggggactcgatatgattggaccttttaagaaagctcaaggaggatacactcatgtactggtagcaatcgacaaattcaccaaatggatagagttcaaacccattgcttctttaacctcagctaaggccgtggaatttatacaagacataatattcagattcgggataccaaacagcatcataactgacctaggatccaacttcacaagttcagagttcttcgatttctgcgagcaaaaaagcattcagatcaagtatgcttctgtagcg

SEQ ID NO: 51844 - DNA, 351 bp, Zea mays
agcttgtgaagatttttcatcctaacatgggctagtcggcgatgccacagccaatccatattagtcttagcaattaagcaaatatcgagttcagctctattaaaatcaactaagtatagctgaccctctaatactcccttaaatgctattgaatcatcacttcttctaaagacagtaacacctatattcgtaaaaatacagttgtaatccattttgcataattgagagacagaaagcaaattgtaatctaaagaatctacaagaaaaacattggaaatagaatggtcaggtgatatagcaattttaccaagtgctttgaccaaacctcgatttccatccccgaatgtgata

SEQ ID NO: 51845 - DNA, 348 bp, Zea mays
agcttgccttacaacaaaaattttattatttaacaaaatgaccaatgacgaaaatatttattgtcacaggatattcgtcataaaaggtcacatgtgttgtagtgtctgcatgctcgttttcttctctcgagatatttttttatagaaaaacattcaaaagaggcttccatcctttggactgcatccagatatttttctagcttcgggtctcttgctttgctgcttttgtcaatgtgacctgagatgacctgtgagtcggatttaagtattgcccttcttattcccattgctttaagctttccgagccccaagagaagggcttcatactctgcaatattatttgtgaaa

SEQ ID NO: 51846 - DNA, 345 bp, Zea mays
agctttggcatcctttattgctttttcatcctgagctcctagcggccaatcagaatgaagtctgccaacgcccgagattgtattgaagatctgtgcacataatcaatggtgaattcggtatgttctgcggcccatttcctgaaccttcctgtagcttctctgctactcattatatccttcaagggttgcgatgaaggcactattatatgatatgcttgaaaataatgccgaagctttctggaggccatcaatacagcatacaacacctttttcaactctgtgtaatttctctttgaacggctgagtacttcggaaacgaagtatactggtgcttacttttttacc

SEQ ID NO: 51847 - DNA, 343 bp, Zea mays
agctttgaatggctctccatctttttgagttccattatcgaccgtgatagcctttggcacaccgaagcggcaaacaatactctgtcaaaagaacttctggactatggccaaagttattatagctagaggtttagcttcgatccactttgagaaatactccactgctaccacaatatatttgaagttaccttgtgttggtggaagtgggcctagcaaatataggacccaccttttgcattggccaggtgggctgaattagttgggttaaagacgaaggttgtttctggtctctggcacacttctgatagttttcacatttttgaaccaaatctgctacatctga

SEQ ID NO: 51848 - DNA, 353 bp, Zea mays
agcttctggtgttcatgaatggcggcttgctatgaaataagagttggatgctcttgtcctcttgatcgtacgggtacttgggatcttgttcctttaccatcacatgcagcccctataacatgtaaatgggtctttaagattaagaccaaatttgatggttcggttacatccaagatcttattgcttgctcgctctggtctgagtgataatcgcacagctgcaacacccatggatattcacttacaactttgtctggatgatggttcaccactgaaggatccatccagatatcgtcatatagtcggcagtctagtctatctcactattactcgaccggatattgcacatgtcgt

SEQ ID NO: 51849 - DNA, 354 bp, Zea mays
agcttgctattactgatagatgtcttcttaataacccttaggatagaacccacccctagttaagagttgtagtgcaaagtggcccatttgcccaacttttgttatttttgtccaaggcataccctttttattctgaacctcaaatttctagaatagactatagtaaccaatggcaacccactgtaatttttacagaatttttggaaaaagttaaaccactattgtagttcaaacccacactagaattcataaatagaaaataaacaaggggaaaatgatggaaattagtgtcaccctaaaaccctttgtgaattgtccactgaattatataagggaaatacaaatccactatgc

SEQ ID NO: 51850 - DNA, 363 bp, Zea mays
  unsure (1)..(363): unsure at all n locations
cttaagacacgcagctgcagcttgggagcccaataaatttttatatccctcngctcctcaagaaaccacgggaatggccttccgcagctatgtcaccgtaccgctactagcccgaaatggcactccactcctgatatttttatttatccatgggtaaaaccgagatttttcctcggtgatggcagcattggcagggcagggacgcggggaaccaattggtggccggcacgttcggcagcgtcgacgacgttaaacaattccaatcgtgctcccgcgctcgcgtactgctatgtaactttttccactttcgaacgaagccggccgtgctgagccaaatcgctccacgcaggccggcgctgccgt

SEQ ID NO: 51851 - DNA, 350 bp, Zea mays
agcttctaaagggagagcacattttatgattaacaaatgttcattttgagaaagacaggatttgtagcgcatgccaggcggggaagcaagttggagtccatcacccacacaagaacatcatgacgaccgacaggccgcttgagctactccacatggatctattcggcccgattgcttacataagcatcggcgggagtaagtattgtcttgttattgtggatgattattctcgcttcacttgggtattctttttacaggaaaaatctcaaacccaagagaccttaaagggattcttgagacgagctcaaaatgagttcggcttaaggatcacgaaaataagaagcgacaac

SEQ ID NO: 51852 - DNA, 350 bp, Zea mays
agcttctgcttcaacaaaatattttatcagcacaatggtgcaataacaatgaatgttgtggtaacttctcaccaactcgtctgtatatattggcccgcaggtgaagaaggcgaaccaccgagacacgcgtactggctgatcggtggactggaaagcgccgtgaattttatattcgtttttaataacaagctcagggaaagtgttttcggaccttcggcatccacaagccttcgtatttttcgcggatcgagctcgttatgaaaaaacgatccaacactgtaaaggggcttctgttgggggtcttcttcttcaccgaaggtcctcaagacgaagacatcgtttgtaagcga

SEQ ID NO: 51853 - DNA, 379 bp, Zea mays
cccgggatccttaagtcacctgccgcatgcagcttggaaggttcttatccttcatgtgctaagcggggatgccacaaccagcccatgctagtcttagcaattaagcaggcatctagaccggcctcctcttttgcataatcaactaaataaagtttgtcgtctagtacacccttaaaagctagtgaaccatcacatcttctaaagacagacacatctacatttgtaaatagacaattatatcccatattacataattgactgacagatagtaaattatatccaagagactcaactaaaaacacattagagatagagtgctcatttgatattgcaattttgcctaaacctttcaccttgccttggttcccatcaccgaata

SEQ ID NO: 51854 - DNA, 348 bp, Zea mays
agcttatcaatcaatcaaatcattttgatcaggagaagctagaactgaattcgaagcttaaagccgaagtccagaccagctcagaattgaagaaagcattaacaagccttcaagacaaatgcttgaactttggcaataattgtattggacaattaaagaagatattttactctgttggagccagcagtgggaaatttaacccttcggcggaaaatttaccccaggccttcgatcatattgaagctgaaatcgaagagcttgacgaagtcatagccgggcacggcgacttctgtgcctgggtagcttctcagggtaccgctgctgcatttctgaaagccggctgcgaac

SEQ ID NO: 51855 - DNA, 344 bp, Zea mays
agcttctccagaagatggatgttttctttcgagctggcaacgatttccgcctgagaagggaggaagcttacaggtattctgagatgactaggggcttcggaggaagactacaccccaggcatgttagaacgatccacaatcccaacacaaatgatgacagggcaaatcacacctatagcagtcagcaaagctcgcaatctttgggaacgcaacaaacttcctacaggccaccaaccccaagaggcagaggggggagaagcttcggaggcaggtttggtactcaacccaggagattgttctgcttattttgtggggaggataagggacacacaacaaggacgtgc

SEQ ID NO: 51856 - DNA, 344 bp, Zea mays
agcttcggctttgaaaatagtttttagtggctccgaagatgtctgaggataagaagactgctgctgagatgaagctgagcctggacgaagagaaaaacttggggtttcttatagcgatgtcaaagaccaatacagaaaaaatcaccaaggagattctggaaggtttgtctgaagatactggtgacagtgacagctatgatgtggacagtggtggtgaggactctgaagatcgtccctggcgaccaagccattcagtttatggtaaatcaactatcaaagagaatcatcttgccaacatgagaggaaggtatttccgggatttatccattgtgagggccgacgaa

SEQ ID NO: 51857 - DNA, 349 bp, Zea mays
agcttgtgaaggttcttcatcctcacatgtgctaagcggcgatgccacaaccagcccatgctagtcttagcaattaagcatgcatctagaccggcctcttcttttgcaaaatcaactaagtaaagcttgccgtctaatacacccttaaaggctagtgaaccatcacttcttctaaagacagacacatctacatttgtaaaaagacaattatatcccatattgcatagttgactaacagatagcaaattgtaaccaagagactcaactaaaaacacattggagatagagtgctcattagaaattgcaattttacctaacccttttaccttgccttgattcccatcaccga

SEQ ID NO: 51858 - DNA, 347 bp, Zea mays
agcttcgttcctcagcttaatatcctctgttcgtaggttattgaaagcaatattatagctctcgtcttcagcattcttttgagctctcaaagcgttgctaagtattaaaccctatatgaaaagaattagtataacaataaaagaataatttaaaaattatagatttccaaatatacaattttcataccttcagactattatatgcaaggctatctgcaagatcgtcctttgtcatagcgcagaggctagcttcaagcttcgggaaccccatactcctagccatctcccggcagacagataattctttgttgtctgggaggcagtataagaagtcatcttcgtctatg

SEQ ID NO: 51859 - DNA, 355 bp, Zea mays
agcttggaggcgtcgattggttgtctacatgatgtagattcctccttcttctcctccgttgctttgaatgcaacgggttgagcttcggatgtggtggcatcatcaagctcgttgatcttcctcgagccttcgatcatgcattcaaagctcacaaaattcccgataacttcctcgggggtcattttggtatatctaggattaccacggattaattgaacttgagtagggttaaggaaaataagtgatcttagaataaccttaaccacctcgtggtcatcccactttacgctcccgaggttgcgtgcttggttcaccaaggtcttgagccgattgtacatgtgttggggctcctccc

SEQ ID NO: 51860 - DNA, 274 bp, Zea mays
atctttgagtggaatttggagaggattttatctcttttgtgcgtctctcaattgaatgctatacctcttgtaaatagtcggaaggtggaaaacttggatgccttgaatgtggggtggaccaattccttgccctcataacttctttggcctcccgcgtaccttccttacccatttgattttatctttactctcctaccattccccttactcttttcgcttcatatcatcccccccttctccccttgatccacctaattcttgcatcttctaattc

SEQ ID NO: 51861 - DNA, 349 bp, Zea mays
agctttgggagaaggaaggttccttttctatttagccactggaccaccagcgtttgaaactttacccctgaggatcagttctagtctgtttaccaaatcaacagaaggaattctcctattggtaactccggttgagtcggccagccctcggtaaagatatgccggataggccctgtcttttagcggctgaatgtttttgaaaacgaaatctgtgaccacagcttcggcagtcagacctctctctttcagtaatccaacttcagtaagcaacacgcctgcctcggccacttcttgatccgtgggagactcagtccaactcatagtacgaacgtctggctgtcttcctgaa

SEQ ID NO: 51862 - DNA, 351 bp, Zea mays
agcttagatctagtgcttaggggtctatttaccctctctgtatatggagagggattgtattcattgaaggtaagcaagatattagaaggaaatctcttctctcttgccgaccgtgggcaaagccctgcggtcggccttcccagcgtccctaaccctagccgtcgccctctaaccctagccatcaccctcaaacccttgcagctatctgccgcccataacacatgttctggttaataaaaacacaaagtaaagagaaccaatgatataacacaaacagaaaacccttctggactatttggctccagagatctttaaactggaactgacaatacaaatgttcgtgaaaatctg

SEQ ID NO: 51863 - DNA, 344 bp, Zea mays
agcttgtagagacattttctatttaagaaagccgcgaacaacctatgaaccaaccttgttttcttgctagctacttcttgaatctcgggggcgagattcctgttaagggggttagaattgtaacaccctgaatttgggagtataaaatttcttttctaatattcaccaaattcaggtgttaccctctcttttccttgcttttcttttctttttctaaagaatggagtgttattctgttatatattagcgtaagtctactgaattgaaccctagagaagctttgcgtgctgcatttcatgctgaagtattgtcttgtttgctatcgcatttaagttatttgggca

SEQ ID NO: 51864 - DNA, 353 bp, Zea mays
agcttcatctttccagcctgatgtttataatcataaacacagaagtcctcgaaagtatattaaagatctgaagacattaaagtttgttattggtgtatttgagagaaaaaaaactttgccattgaggaccagaccaatcaatatgcttggataacccttcatatgctgatagctctatgggactaagggtttgttcggattatcagctctgctcgcctcaccacaccaggcaaggacaagctaagagagtgtttgaatgcactacaactaatagttagttggctaaaaatagtagaattagctagctaacaaatagttacctaaatattaactaattaaccaaaaatagctaa

SEQ ID NO: 51865 - DNA, 352 bp, Zea mays
agcttgccaagccctcggacccggctggacttcaccgaaggcccgagatcgacctcaccggacttcggtcttccgccgccgcgcgtggaccgagctatccagtgagtctccgaccaattccttgcgctcatagcttctctggcatcccgtggacctccctgacccatttgattgaactatctcgccgtgaccaggccggtctcctcgccgccgacgagcatccccacctgcgcgcgtggaccgaccgactccggccatctccgacggcgttccgcacaccgttgtgatccccgagacctccccttcgtcctcgaccgcttcaccggagcaatctcgccgccggtaagcccct

SEQ ID NO: 51866 - DNA, 347 bp, Zea mays
agcttcgggacctccaggcccatgtcctgcacaatcaccatggccgcacgtaagacgccgcccgcccgtacgcctccctctctttttgctccatctagcaccggtcgattttagcaacctctatgattagtattatagagcttcagttagctctcatggcctggagattttcctgcggagggaagatgcaaattttattgttccgttcgcgctgtgttgccagcttctttcctcaagccatgaggaggtcctcgtctcctggtctggtgcatatcattgcaaattatcgtcagttattcattcgtaacacaaatggatgtcacatcccagttgcaatttcacctctt

SEQ ID NO: 51867 - DNA, 349 bp, Zea mays
agctttctggtgtctaagcaaatgcctagtaccagtagaagatctagcagataaacgagtcttacacattctacaaatagcagcaattcgaacattggacccattcactttctcaaatacctcatcaaaatcaacccagacagtagatttacgcttaccaacagatgaggtactagtaccaccatcggtgctggtggagccgaccggagtatcggtggccgtagcatgccctccaccagcgttggtcggattagaacttagatcgacaggagcagaggttagatcgataccgagcaaagcagcagcatcgacctggatgtcgtcttcgtcatctgggacaagccttgcc

SEQ ID NO: 51868 - DNA, 347 bp, Zea mays
agctttctccagctgtcaccatcttagcaccgacggcggcgtccacctacccaccaacaccgtactagcgagcgccggccgccccaaagcgcaccggcaggtcctcactcccgtcctcgccacaaagacgaggacagaggacggaatgttgcaccctgactgggcagcaacagttcgccttcctcggcatggctggagggcgcctcctccgcagagctggaagatggtttccacccccagaagttggaggaagaagcgggacgccggcccgtacgcgaggtagagctccggctcagctcgccctccgccccagcaagaatgacgaagatccttgaagctgagggcgg

SEQ ID NO: 51869 - DNA, 348 bp, Zea mays
atcttaaagccatggttagtattttatgcaacaaaaatacgaattgattcaagcctagctacgggtgcataggtttcaccgaaatccaaaccttcgacttgtgagtatcccttggccacaagtcgggctttgtttcttgtcaccacaccatgctcgtcttgtttgttgcggaagacccacttggttcctacaacattttggctaggacgtggaactaaatgtcatacctcattcctcgtgaaattgttgagctcctcttgcattgtcatcacccaatccgaatattgaagtgcttcctctaccttgtgtggctcaatagaggaaacaaaagagtaatgctcacaaaaa

SEQ ID NO: 51870 - DNA, 344 bp, Zea mays
agcttgtgaagggtcttcatccctatatgtgctaagcggcgatgccacagccagcccatgctagtcttagctattaagcatgcatctagaccggcctcttcttttgcaaaatcaactaaataaagtttgccgtctaatacacccttaaaagctagtgaaccatcacttcttctaaagacagacacatctacatttgtaaatagacagttataccccatgttgcataattgactaatagatagcaaattatatccaagagactctactaaaaacacatttgaaatggagtgctcattagaaattgcaattttgcctaacccttttaccttgccttgattcccatc

SEQ ID NO: 51871 - DNA, 460 bp, Zea mays
  unsure (1)..(460): unsure at all n locations
agcttgtgaagattcttcattccaacgtgggctattcggtgatgccagagccaacccatgttagtcttagcaattaagcaagtgttgagttcagctctattaaaatcaactaagtatagctgaccctctaacactcccttaaatgctactgaatcatcacttcttctaaagacagtaacacctatatccggaaaaagacagttgtaacccattttacataattgagaaactgaaagcaagttataatctaaagaatctacaagaaaaacattggaaatagaatggtcaggtgatatagcaattttaccaagtcctttgaccaaaccttgatttccatccctgaatgtgatagctcgttggggatcatggttnttcttgtatgaagagaacatcattctctccccagtcatgtggttggtgcacccgctatcgatgatccaacttgagcccncggatgcat

SEQ ID NO: 51872 - DNA, 450 bp, Zea mays
  unsure (1)..(450): unsure at all n locations
tgtgcaaagtccactcgagctaactntcggagaaacccgatctttctgcaacatgacaccagagggtcaaactcaacgggcaatggatgaattcagaatcattgcagagcatattggtaccagggatctggttcaagaattcttagcattcaaagtctttcctactctgaaaaaatgggaaatgccaaagttaaagggggagaagaaggaaggggatcttgtccggcttccttaccacttcaaattcaagaaatattttaagaagccctgccaagagtggctggacacagatgaggtgatgtgtaatgaaattcttggaaattattcgaaaaaagaagatcaactgatgacagcagccttcggtacccgtccgaagcgaaggctgaaccgagtgcttgatgcactgggcttcgaatatcctgactatgcgcagctgaacaaggatgctga

SEQ ID NO: 51873 - DNA, 360 bp, Zea mays
  unsure (1)..(360): unsure at all n locations
acctgaggcatgcgagctttgactntgacccgaactgtcaatcctatagtctattttggaggaggccatcacccgngtataggggtgttgggggtacccctaattatggtacccaacagtatttcgcgagcctccaaaggagagcatgcactctcttggaggctctgtcggatttttgcgaggggagcagcctttcttggatatgtttcattccggagggtgcgcgcgagcgcacccgccgggtgtagccaccgaggcctcggaggagtgatttgactcctctgaggtcttaattcttagtgtgatgcctcagtcaacctgggtgttccctcatgcagcctgaccgcagcccgagtgcat

SEQ ID NO: 51874 - DNA, 214 bp, Zea mays
tctttgaatctatccaaatttggacaacaaagcctttcttatgtcttttgatcctgatatgcattgaattaacctaatatgtttataaatgaaatatatacaattttactagcttcctaaaaagtctaagagcgcctcaactggatgactgagactccaactatggattttcgaagtgagtagttgaattctgtccaagtctggacaaaattta

SEQ ID NO: 51875 - DNA, 511 bp, Zea mays
  unsure (1)..(511): unsure at all n locations
gatccttgagtcacctgcngcatcaagctttgccaatagggcgcataattatacctttaatatcttcccgtggtttcaggtcattcttcacataaaaccattttgtcatccagtcgccgggccatctcttccgaaaggttggcacgggacagcttgacccagaccgagaaacgaaactgtagcagccaaaattattgtgatactgttccttaccccagggttttgtctcgtatgataattcgtgtatgttgcagaaacttttcgcatcaggttccagaccttggcttctcatggcccacatgaaggtattcagccttatgattgcttcgggggtaagttggtgaagatagacttcaaatattttcagcacctctacgacaaagttgctcaagggaaatcgtagtccagctttcaaaaagcttcggtacactacgacttcattntcttcaaggttcggacaagtcttttcttcttcgtcggccctcacaacagacaagtcccggaatatctt

SEQ ID NO: 51876 - DNA, 442 bp, Zea mays
ctaagcttacaagctattggcgaagctaaccgagtggctagcacggcttgttagtgactggagtgggctggccacagtggccgatgctcgggtggcaatggagggcggaaaagagctcactggagctaatgaggggcgtctcgccggtgaaggtgagcaccgtgtgaggtgaggcgcgcccgtgaaggctttataagcgcgggtgagcacgaccgatggcgaggctctgacaagtgctcatggcatacgcgagcgaacgctagtgcgcactctatcgcctggcacagcgtcgagcacgaggcagcgcagagagaggtcgagttcaagcgcggattggctccacatctttgagattatggccatgatcccgttgagagatctctttccctgacatatctttgttatttgttagtggaggcttgctagcattgcttgctggatc

SEQ ID NO: 51877 - DNA, 298 bp, Zea mays
ctgagctgcagctagtagggttggaagcagcctacttttgttttttcaaagaaggtgaagatgatccaatgaatgcagaatcttcatttatactacttcttattcaaacttgttatatggcagggtgcccacatttgatatatggcagggttgcccactataagttctgactgttaattttgtagccataagagtttatgggcctgaccccactcttatatcagttaactgcgacatcattcattatcacttaccaaacatgatgatgaaactaactattgataagggtagtaatgct

SEQ ID NO: 51878 - DNA, 77 bp, Zea mays
atccattctgctgcttgatgctctgtctaagtcgaacaacgtgagtatcgtatgaggtcatcatcattctttgacga

SEQ ID NO: 51879 - DNA, 361 bp, Zea mays
tatgctagtattagcaactaagcatgcctctagacctgactcctcttttgcaaatcaaccaactaaagtctgccgtctaatacacccttaaaagctagtgaaccatgacttcttctaaagacagacacatctatatttgtgaatagacaattataacccatattacataattgactatcagatagcaaattatatccaagacactcaactaaaaacacattagagatagagtgctcatttgaaattgcaatcttgcctaagcctttcaccttgccttgagtcccatcaccaaatatgattgaatcttgtgaatccttattcttgacgtaagaagtgaacatcttcttctcctccgtcatat

SEQ ID NO: 51880 - DNA, 418 bp, Zea mays
  unsure (1)..(418): unsure at all n locations
agcttgtgaaaggtcttcatccccacatgtgctaatcggcgatgccacagccagcccatgctagtcttagctattaagcatgcatctagaccggcctcttcttttgcaaaatcaactaaataaagtttgccgtctaatacacccttaaaagctagtgaaccatcactccttctaaagacagacacatctacgtttgtaaatagacagttataccccatatgacataattgactaacagatagcaaattatatccaagactctctactaaaaatacattagagatagaatgctcattagaaatcgcgattttacctaacccttttaccttgccttgattcccatcaccgaatacaattgaatcttgggaatccttatttttgacgtaagaggtgaacatcttcttttccnccgcatatg

SEQ ID NO: 51881 - DNA, 370 bp, Zea mays
tctatggcacgtacgtgcgcctcgggaatttctgtgacctccgaagctgccggcagcagccgggagagtctctccgggactacatccggcgattctcgaagcagcgcaccgagctgcccaacatcaccgactcggatgtcatcggcgcgttcctcgccggcaccacctgccgtgacctggggagcaagttgggtcgcaagacccccaccacggcgagcgagctgatggacatcgccaccaagttcgccttcggccaggagacagtcgaggctatcttccgataggacaagcagccccagggccgcccatcagaagacgctcccgaggcgtcaactcagcgcggcgcctagaagaaaggcaagaagaagtc

SEQ ID NO: 51882 - DNA, 95 bp, Zea mays
aaaccaacaccaaaggaacaagtcaacgggaccagcaagagaccaaacgagcggaaacggaaacacaaaggaacccaaaaggaaggaacggcaga

SEQ ID NO: 51883 - DNA, 368 bp, Zea mays
  unsure (1)..(368): unsure at all n locations
atgggtatnaagatgttagtgcaaaagaaccaagtggctatatattcatctcttgcgaatcacattaatcacagagaaagacaacacaagatacatagtggtctatcccgcggatcggccaagtataacacttgtctacctccatgatgcggcgccccaatgaacgaaggttgcactcaaaccctttcaagggatccgatgatcaacttgaatgccacgacattcttccttatagatttctctcccgttgcaaggaatctccacaagttggagcctctcgcccttacaagattgatcacaataaaagcaccgagtcagggtggtaagagcatcgcacactacaattaaattcacatccgatactatgc

SEQ ID NO: 51884 - DNA, 436 bp, Zea mays
  unsure (1)..(436): unsure at all n locations
agcttgagaagagtattgtggcctttgctgctgactctctcgatcatcagcttgagtagagttatgaattgacctaacgtgcctcgggtgaaatcttcctccgaagcccctggtcatttcagagaacctgaatgcttcctcccttctttggcggaagtcattgtcagctcgaatgtattcgtccatcttctggagcagcttctccaacgtttgtggtggcttcctggcaaagtactgcgctgaaggtcccggccgaagccccttaatcatggcctcaatgacaatttcattaggcactgttggcgcctgtgccctcagacgcagaaaccttcggacatacgcctgaagatattcttcgtgatcctgagtacactggaatagagcctgcgcggtgactggctntgtctgaaatccttggaagctagttatcaacata

SEQ ID NO: 51885 - DNA, 382 bp, Zea mays
  unsure (1)..(382): unsure at all n locations
ctctgatgctcaccgtgatgcccgactactcaatccgttcttttatgagcgggaacgtctgcccatgctcacagtttncgccgtgcacatggacaagccgctctcagggtgttcgtgccaaattgatgggtgttccgaggtccctgttagtcgctaatgcctccccgatcgctagccgtagtatcaacacctgccatgaccaagtacgggttgcaccacggtcgatctgtgtgcacgccatggccaggggtactcgtggggaagaaaataaagtacatggacctgtccgtatagtgtctgtgaccctgggcaacagtaaagaaaccggattccagtttgtgcaaacactgaggtgttttccgcaatacgcctgatcgcgcgg

SEQ ID NO: 51886 - DNA, 321 bp, Zea mays
atttgacacactcgcacatataggaagggtatggtttcaagtatctttgatatatattagtgactttgaagagcagatgacaataatttcacccctcccgattcctttatggtgatgtggcaagttgtttatggcttaaagctcgatataatttatttctgaaactttgatatcgttttattaatgcggtacatatcgctggtcatttgtgagaatgaagctgttattatgcttgtgatatacaagtatgcctatgttgatttcactatgtttttcatggtcgagttttattacaataatattgctatatatgcttgactg

SEQ ID NO: 51887 - DNA, 279 bp, Zea mays
  unsure (1)..(279): unsure at all n locations
atctaccttcatcaacttcctcccgaagcaatcatacaaatgggcatcttcgtctgggccgtgaggagccaaagtttacaaccaaatgcacaaagtttctgcaacatacatgagctattggatgaaacacaacccctgcggtaaagagcagtatcataacaatnttggctgctacagcttcggcgcccggtctgagtcaagctgtcccgtgccaacctttcgaaagaggtggcccgacgactgtatgacggattgtgtttatgtgaataatgacttgaa

SEQ ID NO: 51888 - DNA, 347 bp, Zea mays
  unsure (1)..(347): unsure at all n locations
tgaccgttgntagcattgtgaagcttctagatatgtctatgtgacaaatgatgagggtgaattggtagttacgaaggtcgcagctaagcaacttcgtcgggtgcctatcattcctcggctttcaaggctgttcctcaacaaggaaatagctctgcatatgacgtggccaaagaatggtgtacgtctcgtcactgatccagacataatggtccatccgtcggacggtgatgcgtggaaggcatttgacgagtttgatccccaatttgcaaacgaccctatgagtgtacggcttggtctatcgacggacggattcacacctttcaataccagtgcaagcccttactcgt

SEQ ID NO: 51889 - DNA, 270 bp, Zea mays
agaacacgtgataaggccactaacgttaattcaaaaaagacagaccttatgcagcttgtctagcaggtaaacaagcgggaggagcacactacacttttgaaagagatgaccacttcaagaccgctggagctgctgcatatggacctcttgagacccgtctgcttatcgagcataggaggatgcaagtgtggactacctattgttgacgactatacccagctcactagggtgcactttgtgcaggataagccagacacccaagggaacctt

SEQ ID NO: 51890 - DNA, 489 bp, Zea mays
  unsure (1)..(489): unsure at all n locations
ntctggattgctgcaatgaatgccacaattaatcacatctatacgtatttcatgatataataaaaagaatcacgatctaatgtaactatttttttagaatatacttacgtcgaagatgatgggtgttgtgatggaacggattgaagtgtattgcggtatgatccgaagactccaggcactctagaattacacatttaaatctccgttacgaatcattataaagcaaaacctagtgacagatgttttgaaagacgtaaagacatgatgtaccttgtcttctgaaccgtctaaacataatcccaattattatgccataatcctccttagccaacgcccagcggagtgcatttttgtttagtaaggcaccccacactttaatgatatgtgaatattccctacgacattcaatttggtgagaatacggtacgaataattagacttggatattaactcgacagtaacagatatacctacatccttatacaattt

SEQ ID NO: 51891 - DNA, 319 bp, Zea mays
cacgcctatgggaaaatattcacagctgtcaaaaagatgcttctcgatgaaagaataggcagatggaccgagttattaccagaggcagtctgggcgctaaacacaaccgagtgcagagcgaccgggttcactcctttcccgcttctatacggatcggaggcaatgaacccgcaagaaataaagcatgggtccccgcgtacagttccgtcagcctgtcccgacgtggatgaaccaacttcaaaagatctcattgacggagaccgggttctccgcctacaagccctatacaaatatcaagcccagaccaaagcatggcgcg

SEQ ID NO: 51892 - DNA, 418 bp, Zea mays
  unsure (1)..(418): unsure at all n locations
tccatcttgganagcatctctaatgaatagggctggcacggtcaccttggttagacatgttctttctgcaattcctatgtatatgctaatttctactaatgttcccaaatggtccatcaaggcagcggataaaatcagaaaagggttcttatggaaaggcagagaaaagggttcttgggataaagtcactcgaccttttgagctacgaggacttggtattcccaacttgagttgaatgtcatggcgtgggatttgcaattaacgtggtagtggcataaaaaagtgagggttgatcggccatggacagacataaaactcctctctcatcccaaagctttggctcttttctcancaatactagtgacaaaggtccggaatggctacaacacccgcttctcgatggaccaatggattgatg

SEQ ID NO: 51893 - DNA, 486 bp, Zea mays
  unsure (1)..(486): unsure at all n locations
agcttagagcaatggtgggaaataaggcaagagttgaatgttgtattgcggaacaatttaaactaaaggaggtagcacacttcacaagttgttactttgcggaagaacataatgtatttgctcgaaagaaaaggtatcatgatgatgaacgagtgatgcctccgtgtagtgatctttcganttttcagacaaacggcaaagccgttggtccacccaaggcatatcacctcagtatggaagaatggaagtctgctttactgtacatgttcacgaatatgcctgaggtggagaaatactttgtgtaagacttattttcttaaactgttcatatgtgaattagtttatgttatcaaatatctcatgtcatacaataatatttgacagcgagtttgatgaacaaaacatgatgtgtctcggtaggcccacagcgagagacatagacaaatggcgatgcgatggtatgcatangcgaactaatttcattat

SEQ ID NO: 51894 - DNA, 452 bp, Zea mays
  unsure (1)..(452): unsure at all n locations
tggtacccatcgcttgatgggtccatctatgttagtcaacaaagatctatgaacccaaaagtcctttgtgttagaacttggtaaactcattacctttctagcataagttgcaattttgggttgcctagttacatgtgaaatatttgacaagctagaagtgggatagttaccaatgggacaatccttgcattgatgtcccttctttcagcatatgtagcaaaggcgatcttcaagtcttgaagatttcttctttccttgtttcttgcttgctacatggttagttaatattttcttttctaacactatgcctttntgttcaaatagggacaagacttaattaagtcccttctttgagcattagaaacaaagattatcatccttgttattaatcaagccattttaatatagagacatgacctaatcgagtgtccctcttcatagagtcactacac

SEQ ID NO: 51895 - DNA, 440 bp, Zea mays
agctagactggggtggaaagcgaccacgacgaatgataattattatccgaagctacgcgcagaaaagcttcggcatgacggcagaaaagaggaaccaacttaaagatgaaaagtcaagttaaacctcgaaagattgctataaagttattgacaggtgtaaagggcatcaatgtaattttacacgggctgcgttccgtgcctataaatagatgaacagtactcccgtactgatcacgctgacctggcacacgcttctccgcatcacgactgtacctttattttccatcaatctgaaggtacatgtgtaatttgtctttatgagtttgataataaaaataagtcgatgataatacttgcatcattactcgtgttttatatatgtgtgttctttattaccatctatcaaccttacgaacgtcttttctttattatcttcgcca

SEQ ID NO: 51896 - DNA, 459 bp, Zea mays
  unsure (1)..(459): unsure at all n locations
tataaaactaagcttgaaacgaggagatggcgctcatcatcangagctntcaccatattcttaagcaacggaaggtgaaagactacaagccccgttccaagaaagtttgctacaagtgtggtaagcccggtcatttcattgctaaatgtccattatctagtgatagtgacaggggcgacgacaagataggaaggaggaaggaaaagaagaatcactactagaagaagggcgacgatgcccacgtgtgtcggaagtcggactccgatgagagctccaccgactccttcgactacgaggacgccgccaacatcgccatcaacaaaggccttctcttccccaacgtctgccacaagtgcctcattgcaagggacgacaaatagaatgtataatctacagcctccactanatatgcaacatctagtgatgaggataactctattgatgatgaagataatttgc

SEQ ID NO: 51897 - DNA, 407 bp, Zea mays
agcttgtgaaagttcttcatccccacatgtgctaagcggcgatgccacagccagcccatgctagtcttagcaattaagcatgcatctagaccggcctcctcttttgcaaaatcaactaaataaagtttgccgtctaatacacccttaaaagctaatgaaccatcacttcttctaaagacagacacatctacatttgtgaataaacagttatatcccatattacaaagttgactaacagacaacaagttatatccaagcgactcaactaaaaacacattagaaatagagtgctcggaagaaatagcaatttttcctaaccctttcaccttgccttggttcccatcaccgaatatgattgaatcttggagatccttgttcttgacgtaagaagagaacatcctcttttc

SEQ ID NO: 51898 - DNA, 448 bp, Zea mays
tcttaaggctaggacttcggttcccctaagcagttttgtgtgtggaagttctgaggacataccaggtttaccttcatcaaattacgcccgaagcaatcataagaatggggatcttcgtatgggctgtaaggagtcaaggcttggagccaaatgcaaaaagtttctgcagtatgcacgaactgttatatgagacaaaaccctgcggtaaggagcagtatcactaacaatttggctgctatagcttcgttgctcgctctaggtcaagctgccccgtgccaacctttcggaaaagatggcctggagattggatgaaagaatggttctatgtgaaaaatgatttgaaggcacgagaggatattaaagggattattgtacgccctatctggcaacgcttctgcctccagaaaccgaaggtagaaattgacgaagcgaccgaagaatgtcgcaa

SEQ ID NO: 51899 - DNA, 418 bp, Zea mays
  unsure (1)..(418): unsure at all n locations
tttataccttctatggataaagtagcttcggttagcgccaaagaattcacatgttcgcagcctcccctctctaagatagcggcagtccccctagcacccgagaaggcgcatatgtccccacagccacccaaaatttcttcaaaagcttcggcctcgcccgtgatccagtcgaatggaccttcgggatctcctagtacgaagttgtcttcattcgaatatgcgtcgacgctggcgaagctagttttaattgtctccacagatttcatggatttttcataacatctttcttttgaagaccgaagttctgcaatagttttctcccaatgattnttccaataattggtggcgtctcggtcagcttcggcagttgcacactttaatttcactccagccagctggttctgaagaatttcaattt

SEQ ID NO: 51900 - DNA, 422 bp, Zea mays
  unsure (1)..(422): unsure at all n locations
taataatagggccaaaattagttacactatttgactgtggttatgataaatttgagaagnttgtatctacctactagaccaagtaaaaatgttaaacccctctgtctactccatttaaattagttttaccctttattctacaatatgcttaaggataaggaaaatagaaaatgtaatttaattcatgaaccagagagtacctctatttttgttaggatacttattcaatatagttcactggaaaaatatattataccctgttttagtataaaataagtaagatcccttttgttttaataaaacaagtggaacttatgaaaactctacaaaaataaccccaaggtaaaaacacccccacccttgggataactaatgttttgttattaagaacttatgaaaaataagatatctgctgtttgaca

SEQ ID NO: 51901 - DNA, 377 bp, Zea mays
  unsure (1)..(377): unsure at all n locations
acttgaacgatcactggacaaagatctctgcgctgatatgaaggatgactaacaatgcactgataatttgtagagatcacaccgacttggactcatgtccattcactttcgttgaactcattcctagctataccatccattaaaagaaagaatttctaactttactgaggctggataggaggacttaagaaaccagatattaagcttaaaaattgggatgtctgaatgccatgttatggtgcattggaatgtgactccattctgatgaactgagaaaactggcatttatttgatactccgtagccngaatcatcggatgccggtagttgaccatagatatatgtgtacattacactacctgaatctgaattttactc

SEQ ID NO: 51902 - DNA, 388 bp, Zea mays
tctaaagggagaacacatcttatgactaaccaatgtttattttgatatagacaggatttgtagcgcatgccaagccgggaagcaagctggcactcatcatccacacaagaacatcatgacgagtgacaggccactggagctcctacacatggatttattcggcccgattgcttacatatgcatcggcgggagtaagtactgtctagttattgtggatgaatattctcgcttcacttgggtgtgcttttgcaggaaaaatctcatacccatgagaccttaaagggattcttgagacgaactcaaaatgagttctgcttatggatcatgaatattagaagcgacaatgggatggatgtcaagaactctcaaattgaaagctttctcgatg

SEQ ID NO: 51903 - DNA, 316 bp, Zea mays
ataagcgaccctctaacacttccttaaaggctgctgaatcatcacttcttctaaagacagtaacaccctacatctgaaaaagacaggcgcaccccacttacataattggaaaactgaaagcgaagtgggatctaatgaatctaccagaaaaacatcggaaatagaatggtcacgtgatataacaattatacccaaacctttgaccaaaccttgattccatcctcgaatgagaagctcgtagggatcttggttttctcgaggaagaaacatcttttctcctagcatgtggttgacacccgtgtcatgatcaacttga

SEQ ID NO: 51904 - DNA, 270 bp, Zea mays
gaccttgtgcagcttgacaagcatgtaaacaagcgggaggagcacatcacacctagaacgtgatgaccacctcaagacctctggagctgctgcataaggacctcttcggacccggcgcctatctaagcactatgaggaagtccagtctggtgaatgttatttgttgatgacatattcccgcttcacttgggtgttcttcttgcaggataagtctgatacccaagggaccctgcagcgcttcctcaagagagctcaaaatgaacatgagct

SEQ ID NO: 51905 - DNA, 408 bp, Zea mays
  unsure (1)..(408): unsure at all n locations
agctaggaaaagcttcacggcctcccggagatattttccaagggctcgggcgaggctgtgggtcgacggaaaaggctggccacgatgaccatgctcaagtagtggtggcgggcggtggcgcttccctttcacggtgaacttcggtgatcactggctcgggcggagctttgggtgcacgagtgaagacggctaaggccttggggcacgtataggcggaggcgaggcgcangcacgcggngtgggacgaccgcacatgggggcgcgcgctgccgcgaccagtccacgctcggccggcctgacaaggcaccgagcacgtgactctntgcttctgcccgcgttcaagcgtccataggctgcatatcttcacgtatttgggcaagatcaatatacaagatatgttcttccaac

SEQ ID NO: 51906 - DNA, 327 bp, Zea mays
  unsure (1)..(327): unsure at all n locations
agtatttggtaaactcattacctttctaacacaagttgcaattttgggttgcctagttacatgagaaataattgacaagntatgagcgggattgtaccaatgggacaatccttgcattgatgtcccttcttccggcatgtgtagcatagacgttttccaagttttgaagatatcttctttacttagttgttgcttgctacatggttagtatagactttcttttctaacatcatgccattttgttttaaatagggacaagatttatgaagtgtccttcttttgaacattaaacanagtctatatccttgtaataataagctattttat

SEQ ID NO: 51907 - DNA, 450 bp, Zea mays
  unsure (1)..(450): unsure at all n locations
atcaaatggacgtgaatagtgcctttcttcatggaccaatcaaagaagaggtctatgttgagcaacctcccggctctgaagatagtgagtaccctaaccatgtctataaactctctaaggcgctttatgggctcaagcaagccccaagagcatggtatgaatgccttagagattttcttatcactaatggattcanaatcggaaaggccgatcctacactctttaccaaaacacttgaaaatgatttgtttgtatgccaaatctatgttgatgatattatatttgggtctactaacgaatctacatgtgaagagtttagtatgatcatgacacacaaattcgagatgtcaatgatggcggagtcgaagtacttctcgtgaattcaagtgaaacaactccaagaggccaccnttctaagccaacgaatatactcagatattctaacaagtt

SEQ ID NO: 51908 - DNA, 366 bp, Zea mays
  unsure (1)..(366): unsure at all n locations
tcggctatggtcaaatattntaccagcacaacattacttatttattgaatgctgtggtaacttcacacctacccgtctgtttatatagtgctgtacgcgggaaggtgaatcgtcaagccacttgcacccgccgaacagccgctcatattcactgaacggtggaccgcatggcgcgagaacgagaatcaccagatcgcgtgtacccgtcctatggtgggaccacctcgcactcggaatatttaaatcgtttctcaacaacgagctcagagaatatgtnttttggacctttggcattccgaagcgtaaaagaatatttcatgggtcgagctcgttacgacaaacgatctggccccgtgaatgggctac

SEQ ID NO: 51909 - DNA, 382 bp, Zea mays
tagaccttgtgcaacttgtcacacatggaaacaggtgggaggctctcatcacaccaaaaatgtgaggacgacattcagacccttggagatgctgcatatggacctttttggaccctgacgctatctgagcataggaggaagtaagggtggcttagatattgatgatgacttttcccgctgcactcgggtgttctttatgcaagaaaaggcccaaacccaatggactctcaagcgcttccttaggagagctcacaatgagttcgagctccaagtgaagaagatacagatcgacaactgatccgagttacgaaccttcaagaggaggagtttcttgaggaggaaaggatcaagcacgagttctccgcctcctacacaccatagc

SEQ ID NO: 51910 - DNA, 303 bp, Zea mays
  unsure (1)..(303): unsure at all n locations
ccttctatagggcgaacacgctataagcctaacatatgttactttctataaacatagaccttgtgcacgctgacaagcangcaaacaggtgggaagctctcatcataccaaaaatgtgatgactacatcaagacctctggagatacttcatatggacctcttcggacctgtcgcctacctaagcttacgaggaaagaagcatggcctcagtatagatgacgatttatccccctccacttgacgattacttttgcaggataaatctgatacccaacggaccttcaagcgcttcctaatgagagc

SEQ ID NO: 51911 - DNA, 440 bp, Zea mays
  unsure (1)..(440): unsure at all n locations
agcttcactttcactcataagtcccaactcatgtttaagtaccctaccctanggttaagcacttntcaagccacatcattacaacttgtttcaaatttttacctagtgaatgcactctaggtgtaacaaacaatatgaaatgtcaatgcacatgatgtatgctcaagttttagtgctaataacaccaggggtgttacactctccttcacatccctcaccaatatgtctgtccctacctccgccgcgtcgttgtccccgtgcccattgtcatcccccgtcgcgcacccttctccactcatcgtcattcgcaaccccgctcccncttctgtgatgggatctangagcaggaaggccaccactgcagatgacctcgaccacccacatgctctcctctggaccgacgtcgaaatcgaagggtgacgacgtcatcccacagtgtc

SEQ ID NO: 51912 - DNA, 473 bp, Zea mays
  unsure (1)..(473): unsure at all n locations
tcggctccatctatgttgtggattgcctttgaatctatccaactcctttctgcccttctggcagcttcttgacttccatggatggcaatgggcccttgttctgaaggtatcttcatgcataagtatgctggatgaagtattgcttcgaaggcatttagtgttcttcgaccaatgattgcattgtatgggtattccatatcgacaatgtcaaaaacaacttgttcaggtcttgtgttctggacataacctaaggtaactgacattgtgattntgccaagtgccacaatttgccatcctccgaagccacaaagaggatgtgtagcatcatgaatcttgtcctctagttcttgcatctgcctgaaagcctttgcaaatataatgtccactgtactaccagtgtcaaccagaatattatggaccagacatccctcgatgacacaagatatgaccatagcatcattgtgaggatagtc

SEQ ID NO: 51913 - DNA, 275 bp, Zea mays
  unsure (1)..(275): unsure at all n locations
caaaaccagncaaagagaaaaccgcagccgagacactattgtacaacacccagacgcgaacaatggacaacacccccactggacgaaaccccacacatccgcccaggaacgacatccggacgaaaacgacagagcggcggcggcctctttctcatgacgaacgccacgagtctgtgggactataacacaaccgcagaagcgggcgagcagcaaccccggaactgagcgtggacgccataccagcgacccaaacacagccgaccacccgtacaacg

SEQ ID NO: 51914 - DNA, 458 bp, Zea mays
  unsure (1)..(458): unsure at all n locations
agctngtgaaggttcttcatccccacatgtgctatacggttattgcccagccagcccatgcaagtcttagcaattaagcatgcatctagaccgacctnctcttttgcaaaatcaactaaataaagtttgtcgtctagtacacccttaaaggctagtgaaccatcacaccttctaaagacagacatatctacatttgtgaataaacaattatatcccattttacaaagttgactaacggataacagattatatccaagcgactcaactaaaaacacattagaaatagagtgctcggatgaaatagcaatcttccttaacccttttaccttgcctttggtcccatcaccgaatatgattgaatcttgggaatccttgttcttgacgtaagaagtgaacatcttcttctcccccgtcatgtggtttgtgcatccgctgtcgataatccagcttgaaccccc

SEQ ID NO: 51915 - DNA, 370 bp, Zea mays
  unsure (1)..(370): unsure at all n locations
tcagatgtgcatcgactacaccaacctaataaggcttgtttaattgtttatatccacttccgcgaatagatcanatcgtggattctaccctcgggtgtgaccttctgtctttcttagatgcttactctggtttccatcaaatccagatgtctagggaagataggaagcataccgcttttgtaacagtagatgggctttactgctatcgtgttatgccttacggtctgaaaaacgccttgccaacatttgtgcgggcgatgagtaagactatcggggacctgattatggacaaggtggaagtatacctctatgacatcgttgtctagacttagagaggatcgaccctagtggaagacttgatcctggtctt

SEQ ID NO: 51916 - DNA, 483 bp, Zea mays
  unsure (1)..(483): unsure at all n locations
agcttgtgaagattcttcatcccaacatgggctattcggtggtgccagagccaacccatgttagtcttagcaattaagcaagtgtcgagttcagctctatcaaaatctaccaagtatagctgaccctctaatactcccttaaatgctattgaatcatcacttcttctaaagacagtgacaccaatatcagtaaaaagacagttgtagcccatttgacataattgagaaacagaaagcaagttataatctagagaatctacaagaaaaacattggaaatagaatggtcaggagaatatagcaatttaccaagacctntgaccaaaccttgatttccatccccgaatgtgatagctcgttggggatctttgtttntctcataagaagagaacatncttcttctccctgtcatgtgagttgtgcacncgctgtcgagtatccaacttggtgcccncggatgcataaacctacaaaacaagtttagt

SEQ ID NO: 51917 - DNA, 378 bp, Zea mays
  unsure (1)..(378): unsure at all n locations
atatgcaagtactccttatcatacatcttgtggatcagataaaaatattatggccactatatttacatcatatgtttcagttggagcgatacctgngagtattaaaaggttatgtgcgaaatcgcgctcacccagagggttcaatcatggagggatacactacagaagaagtgattgagagctgtatagattacatcagtgacggaacaatgataggtgtgcctgtacctaaacatgagggtaaactatgtgggagagggagaatgggcaagaaaacttttcgcgttgaggattacaagctagtacattgtgctcatggtagtgtactacaacatctcacgatagccgagccttacatagaggaacacctagatgagc

SEQ ID NO: 51918 - DNA, 321 bp, Zea mays
ggagattcttcacccaacgcgggcttctctgttatgctatagccaacccatatcactcatagcaatcaagcaagtgtctagctcggctttggcatcggcaaaatcaactaaatatatgtgtacttggaaccctcccataaaagcgagtgaatcatcacttctaaagggtgtaacatcaacatcagcgataaacacatgcagcccatttcgcataatggcgatacagaaagaatatcgtaacctaaagattgcacaaggaaaacatcacaaatagaatggtcaggagatgtatcaatcttaccccaacctttgaccatactt

SEQ ID NO: 51919 - DNA, 342 bp, Zea mays
  unsure (1)..(342): unsure at all n locations
atcacgtgacacaaaaactaagctgccagccctcgacccggcggacttaccggagcacgatatctatcttccggacttcgggcttccgcgcgcgagcgtggaccaagctatggagtgagtctnctaccaattccttgcacacatatataatctggtgccctgtgaacctctctgacccatccaattgctctatctcgccgcgaccatgccggacgcctggacggcgacgagcataccctcctgcgtgcgtggaccgaccgactccggccatctacgacagcgacccgcacaccgttgtgatccccaagacctaccctacgtgctcgaccacttcaacggagc

SEQ ID NO: 51920 - DNA, 380 bp, Zea mays
  unsure (1)..(380): unsure at all n locations
ctacgttagccctcacaatagacatatctcgaaaataccttcctctcatattatcaagatgactctagttgacaagtgatttcccaaagactgcatgacttggccaccacggccgatctttagagtcttcggacctactttccacatcatagctgccgccatcatcagtatcttctgataagccttctagcatatctctgagaatcttttctgtatttgtttctgctatcgattcaacaaatctagcagtcttctcctcaaggagcttctcctcttcactcagcttcgtctcagcagcaactgttatgtcttgagacatctcttcttcagaaatggcaganatgtgtccttacaaccgaagcttatgaagtctgagaaac

SEQ ID NO: 51921 - DNA, 480 bp, Zea mays
  unsure (1)..(480): unsure at all n locations
agctnttaagtttcctcaacttgtgttaagtttttacccctttaatccctatntagggctaagcaccttattccagggtcttaattgcgaaacaataatacaacttgcttgaaatttttacttagggttccaatatttgagcacctataaccttttgctcttnttcaacaattgctccacaacataaggaaatcttcaaatgggaaaaatgttaggctctccaaacccaatcactttgatatatgcactttttccaaaagtatggctaaatctccaaatccacttttggggctcaagtttagggtttagagatactcaaccaccctaagtgcttcaccatttctaatgctcatactgaaaacaaacttctccatcctcctaaagccaagctactctntaaccttaaatccaactgtggtatatagagctcatgtccaaagtgtgcttggtttanggtttactttgcttacacactatttc

SEQ ID NO: 51922 - DNA, 404 bp, Zea mays
  unsure (1)..(404): unsure at all n locations
ntatcanatggacgtcgaaagcgctntcctcaatggaccaatcattgaagaggtctatgttaagcaacctcccggctttgaatacagtgagtatcctaaccatgtttatagactctctaaggcgctttatgggctcaagcaagccctaagagcatggtatgaatgcctaagagattntcttattgctaatggctctaaagtcggaaaagccgatcctacactctttactannacactcgcaaatgatttgtttgtatgccaaatttatgttgatgatatcatatttgggtctactaacgaatctacatgtgaagagtttagtacgatcatgacacanaaattcgagatgtctatgatgggggaggtgaagtatcttctaggattctcagtcaagcaacttctag

SEQ ID NO: 51923 - DNA, 338 bp, Zea mays
  unsure (1)..(338): unsure at all n locations
gaagtgtccaaaagctaacacgaaacaactaacgccatatgtactatgcacttagaccggatagcctaaaccaggccaacaatccaaaataggtgaaaggatcgagacacacgtggcctgaacataacccactcaacaaataaaccctccacccaatatgggatatgatcccacctaataagctggagcagacaacaccaaagagtggcnaggctccaaaaatgtaacgcaaacagctatggcaaaggcgtcggctcgattacaggccgcaacaaatctgaataagctggtatcaaactctagtgaggaaacagattacggctggactaacaccaaca

SEQ ID NO: 51924 - DNA, 352 bp, Zea mays
gggccaatcatgtatcttccaaagctaatctataaatatggtatatcattcagagatcacggagggaggaaaacatcccatggccaccgacagtaacctcctgagcagtaaagatggactcgcgacggcgtaatgcataatacaattcgcacagatatacaagcaccacaaaaatttacaaaactaaagcaacactgaacaaaacaccagtggatagaatcggagaaagcgtctgacctgaagctaaaacataataacctgcgcagatatacctctgcactgacatacttgaggcaactaaatcctagctgtaatcctcccctcgcgagcaagacacgaacaaaaaaggcac

SEQ ID NO: 51925 - DNA, 88 bp, Zea mays
agctccccatattcatttattagggatcgcacaacaagagatcgactccgccgccaaacgtcataccaacccacgatacaccaagaaa

SEQ ID NO: 51926 - DNA, 421 bp, Zea mays
agcttcgataccattatgctgtaatgttatattctgttgtacaccttgtaagcccagatcattcttgtagtctatgggaagtatccattatgttttgacatatttccacttctctttgtttccttttgctttcacagatttgttgatctgccaaatttagctgcctccatctatagtgtagagctgtcaaatcgtctacgcgcttttcttgttgcttgccctcctgctggtccagcatcacctgttgctgatttggtggttgccacagctgattttcagaaagatctggctagctggaatatctggtaattctgtttacttgtaaataaatttaaatcaagtctcttattgtatttatgtctttgtcatgccttatgtttgaatttcgcacagcaatataaaagcaggtgttgatgcaaaa

SEQ ID NO: 51927 - DNA, 433 bp, Zea mays
tgtgaacagtacaagttcaggaggggaaaagcagcttctgctgatcagccgaagcccatgctgctgtgtgaggatatagcagagcagagggtgctattgggctcgcaattatctgaagatcaagagaaaaccttgataaggtttttattcaacaataaagatgtttttgcatggtcagccaatgatctatgtggagtgaatcgggatgttattgaacattcgctcaatattgacccatccttcagaccccgcaagcagaggcttcggaaaatgtctgatgacaaggccgaaggggctcgcaacgaagtaaaaagactcctaagtgcaggagttatcagagaagtgaagtatccagaatggctagctaacactgctatggtgaagaaggccaatggaaaatggagaatgtgtattgatttcacagacctcaaca

SEQ ID NO: 51928 - DNA, 375 bp, Zea mays
  unsure (1)..(375): unsure at all n locations
gcttattntcggagtcgtgccctggctttatttttctgccgtgcgccatgggcgaacccctcattttcggcccagacgcaaggccgaacagccatgccgcccgtcgccttgcgccttcgagccagttatcctccgttccgccatgcccttcacccaagacatacatattaccttcggcgtctttccacacgcttggacttaccttattttcggngccatgcccgaacctcggttttccgctcctgcgccatgggcgaacccctcgttntcgggccaaacgcaaggccgaacagccatgccgtcccgtagccatcctgcccttacccgaagcatacgtcgcagcttcggtgtcttgcacacgctaggacttgggct

SEQ ID NO: 51929 - DNA, 343 bp, Zea mays
  unsure (1)..(343): unsure at all n locations
tagtgcaagcgtgtggaatgganagacaacgattctattgtttatgtatggctngagtgaacggcacggtggatcggagggaaaacgggaggaggcgcgcggcgacaggcggcagggctgttcggccttgcgtctgggctgaaaacgaggtgttcgccatggcgcacgggccgaatacggaggctcgggcacgaactcgaaaataagcttagttcaagcatgtggaaagacaccgaacatacagtgtatgtctttggtgaagggcacagtggaacggagggaaaacgacacggaggcactctgcgacgggcggcatggctgttcagccttgcgtttgggctga

SEQ ID NO: 51930 - DNA, 314 bp, Zea mays
tatgttgagcaacctcccggctttgaagatagtgagtatcctaaccatgtatataggctctctaaggcgctttatgggctcaagcaagccccaagagcatggtatgaatgccttagagattccttattgaaatggttcaaagtcggcaggctgatcctatttattactaaaactcttgacatgattgtttgatgccaaattatgttgatgatattatattgggttactaacgaattacatggaaaatttattgacatgaccaaaattcaatgttatgaggggagtaaagatttttatgttcaagtcagcactca

SEQ ID NO: 51931 - DNA, 308 bp, Zea mays
  unsure (1)..(308): unsure at all n locations
gctgttcgcatgctggggactggaatgattggacctttcagaaagctcaaggaggatacactcatgtactggtagcagncgaaaaattcaccaaatggatagaattcatacccattgcttctttaacctcagccaaggccgtggaattcatataagacataatattcacattcggaataccaaacaatatcataactgacttaagatcaaacttcacgagttcagaattattcgatttctgtgagcaaataagcattcagatcaagcatgctttggtagcgcaccccatggccaacgggcacgtcgaa

SEQ ID NO: 51932 - DNA, 420 bp, Zea mays
  unsure (1)..(420): unsure at all n locations
cgattggaagtctacttggtgtagactccttcttctcttctatcgctntgaacgtgacgggttgcacctcgggtgtagaggtggcgccttgctccaagttgacaatatgtttggagtctttgatcataagttcaaagctcacaaacttgtcaataacctcctcgggagatattagtttatatctaggatccccatgtaataattgaacttgagtaggattatgaaatgtgagggatctaagaataaccttgaccatctcatggtcatcccatttggtgctcccgaggttgcgcacttggttcaccatggtcttgagccgcgtgtatatggcttgcggctcttctcctttgttgaggacgaatcgaccgagctcgccctcaatcgtctctcacttggtgatctttgtcacctcgtcccctt

SEQ ID NO: 51933 - DNA, 472 bp, Zea mays
  unsure (1)..(472): unsure at all n locations
tctatcttcnggactnncatgttcttcaatgtgactactacatataatagacttganaacaggtattagtctcaaatacttaaattatagagtaatctccccctgaaagtgagcatacaagttttgaatacttgtaggagacatgcactctgatttgatgttaagaggggaaaattatttataatccgagctttggaacatataagttaaacgataccaattgaagcataattgaagtattataccacttgtagtatatgtcatatggaaatatcaattgatgtatcattctcttaagaattctagataagctatgtgtcgtgcttaattaatcattttaaaccatgtatgtgtgctcaagaatacgaattgaaagtgagcaatcctactgtcacacccgtgtttggaaagcaaaccgaatgcgaaccatgtacgtgccaggatcagaaactcacatacacaacgaatacat

SEQ ID NO: 51934 - DNA, 427 bp, Zea mays
  unsure (1)..(427): unsure at all n locations
tggacgtgaaaagtgccttcctcaatggaccaatcattgaagaggtctatgttgagcaacctcccggctttgaagacagtaagtatcctaatcatgtctataagctctctaaggcgctttatgggctcaagcaagccccaagagcatggtatgaatgccttagagattttcttattgcaaatggattcaaagtcggtaaagccgatcctacactctttactaaaactcttgaaaatgacttgtttgtatgccaaatttatgttgatgatattatatttgggtctactaacgagtctacatgtgaagagtttagtaggatcatgacacagaagtttgagatgtctatgatgggggagttgaagtattntctaggattccaagtgaagcaacttccagagggcaccttcatcagccacacaaagtacac

SEQ ID NO: 51935 - DNA, 326 bp, Zea mays
agcttaacacttcagagacaaaatatactagctctagctttttattttgtccttcaagcttctcttgtacaagtgccgcactcactgcagagtgcgaagctgccacatacaataacagaggagcccctggcgtgggtggagttaacgttgttagatgtatcaagtattgcttcagctcttcgaaagctttctgctgagctgatcgccattaaaagactttggccgacttcagcacttcaaagaatggtaaatctctctctgctgatctagatatgaatcgattcaaagatgccagtcttcctgtcagccattgagcccccttcttt

SEQ ID NO: 51936 - DNA, 329 bp, Zea mays
  unsure (1)..(329): unsure at all n locations
ggcttactgcatcgtcaaccgaagccattcattntgctcattcttcttaacaagaaagagcttcggcaaagttaaaaacttttcaacttcaacaaaaaacaagaaattcaatcatcagatggctagggtacgctcaacagctagggttcctcgcgacggagaggaagccgaaggtgccgaaaccgatccaatctctgaagtgatgcaacggtcatggctggtagtatcggaggatgcacctgccactgaagttgagcaggttgatgctgaggaaactgaatctgaagatgattacagtgtcgtgccatctaaacccagccacctggagt

SEQ ID NO: 51937 - DNA, 481 bp, Zea mays
agcttataacaggaagatagaggcaagagctctttcatatgttataatagaaggggagctgtacaagcatggagtctgtgctccattactcaagtgtttatccagagccgaaggtatagaattgatgaaggaaatacacgcaggactgtgtggatctcacattggacctacgtctttgcttggaaaagtctctcgtcaaagaatttattggccaaaggcagcttaggatgcaacggaattagtccaaaagtgcgaaggttgtcagacatgtgcaagagatcaaaaacaaccttcgtctctaacccagttaatacaacccacttggccgttgcaaaggtggagcctagatttgttaggtccgttaccgccagcacaagggaacttaagatatgttgtagtggcagtggaatatctttctaaatggattgaagcaagcctttaccacaataacttggtactattaaaagttttctgcaaatat

SEQ ID NO: 51938 - DNA, 438 bp, Zea mays
  unsure (1)..(438): unsure at all n locations
ggcgaagaattttcattccaacatgtgctagtcggcgatgctagatccagcccatgttagtcttagcaattaagcaagtgtcgagttcagctctatcaaaatctactaagtatcgctgaccctctaacactcccttaaatgctactgaatcatcacttcttctaaagacagtaacacctgtatccgtaaaaagacagttgtaacccattttacataattgcgaaactganagcaagttgtaatctaaagaatctacaagaaaaacatttgaaatggaatggtcaggtgatatagcaattttacccaatcctttgaccaaaccttgatttccatccccgaatgtgatagctctctgtggatcgtggtttttctcatatgaggagaacatcttcttctcccctgtcatatggtttgtgcacccgctatcgatgatccaac

SEQ ID NO: 51939 - DNA, 441 bp, Zea mays
tatctctatgccatgttcatgaatgatgaatcctaagaagttaacagtcgacactccaaaagcacatttacgaggatttatttttaaaccatactgccacatcttatccaaggctttgtgcaactcatctatataagaacaaaattcagctgatttaactactatatcatcaatgtaaactgaaagggaaatgtgccctcgggccatttctaagtattttggtgattaagtgcccaacacaaatggtttaagtattaaagtgtcgcaagtggtggatgaagtgcacatcaatacaaaggtataattctagacttagcacattggtttttgtgtactaacactattgtccaagtgctagaatcagagaacatacacaaagaataagacctggctggagcaaccaatactctgtgtactctgtgtgcactggacagtgtcccg

SEQ ID NO: 51940 - DNA, 446 bp, Zea mays
  unsure (1)..(446): unsure at all n locations
ngactctcganaccaaacgaagctccagcttgaagcctacttttgtagataatagaaaacttccgaagagaagtatttaatttccaaaaaatccagaattaaatggctagagtgcgctctactgctatggttgagcgtgagggatgcgaagctgaaggatccgagtctgttcccatcttcgaagcgatgcaacgatccggactggtaatcttggaagaaatccccactgctgaaacagaacaggcaactgccgaagcggaagaaggagacattgaggaaactgattccgaagatgattatcatattgccatgcccagtaagcccagccacttggacttcggaaagtcgactgtctctaaagctgatctctccaagatggaaagactggttatttcattgagagtcagaagaagctacttcgctctcggggggaagatactacaccg

SEQ ID NO: 51941 - DNA, 393 bp, Zea mays
  unsure (1)..(393): unsure at all n locations
tcattgtctttccatcgtgccaaccgggcggattctctatccgacagggagcaacaaacggcctacatgagtaactagcaaggcatgccagcaatgccaaactacagagggaatcagctttgcttgatctcatcaagacaccaacatacaaaaccaactcccatagtactgatatagctctccagatatgaatcatcctgtacagcaaatgataagaaagatgctcacaataaaacagatgatcataacaagcacttattacgagggatgatgcccaagagaaaatcaggaatacagctgctcctaacaccattccataaatggtggcactgaatcagaatgctcttatggcacgatgggacataatcgaaatntgagagtatgtcaactcac

SEQ ID NO: 51942 - DNA, 468 bp, Zea mays
  unsure (1)..(468): unsure at all n locations
agctntacttgntagtcatggcttgactctgttattaattcgcggacaaagttatgatggggctagcaacatgagaggtgatattaaaggattgaaaacattgatcatgcaagagtcaccttctgcttattatatccattgttttgcacatcagctccaactagttcttgttgttgttgccaagggaaataatgaatgtgtgtggttctttgatcaagtaactctcttattgaatattgttggagtttcttgtaagcgtcacggtatgcttcgagatgctagacttgagaatctcatgaaatcacttgaatgtggtgaacttgaaactgggagaggatngaatcaagagatggggttgcctaggcctggtgagactcgatggagctcttattacaaaactatatgcaacataattactatgtatcctgtaatccgagatgttctcatgaatcttggagaggatactac

SEQ ID NO: 51943 - DNA, 439 bp, Zea mays
  unsure (1)..(439): unsure at all n locations
tagagatccctgatcncaccagtgatcattttttatagagcctgcaggcgagctgcatatatatcccctttcagtttcagcatggtcgactgtcctattcggctgttgctgccgctactactgcaggttggatctctgcatcaggttgtggagccaaaacacgtgtagcggatcagcttacaatatggcccgaaaggtcttagcactcgttctacgttactaccatttttttcaacaatgagcacagagatggactgtcagcttgggcggagccagtggggcgggcagtatagatggccaattggcactaacatgataggccagttcagacataatctggtccgactactatagtgtcagtgtctaacacggcacggcacctaagccgccatctcgatccgtaagtcttgtacggacacgacataattatataattttt

SEQ ID NO: 51944 - DNA, 372 bp, Zea mays
  unsure (1)..(372): unsure at all n locations
agcttcacccggattcgatagaatttatgatgtgtggaagaaagagagagagagagactccccncaataaaaagagaagaagaaccctgcatagaatcaacctgtccagccaaagtgaagcatcatcgagttcagcgacgacaggcgcgcctcctcttcgaggccgagaaacgaaagtcacctcgcgaacaggaacagcccacgatacggaaaggctcaaacctgtggcgcaagaacacgacgaacccaagacggcgcaaaagtataagcaaatcgtaaacccccaagacgagcaagcacccggcggcacggcatcatgaggaggaggaggaggggagcacccaagctagacaagatccagaaacggagcac

SEQ ID NO: 51945 - DNA, 376 bp, Zea mays
  unsure (1)..(376): unsure at all n locations
ctatcaaatggacgtgaagagtgccttcctcaatggttcattctaggaggaggtctatgttgagcaacctcccggctttgaagacagcgagtatcctaaccatgtctataggctctctaaggcgctctatgggctcaagcaagccccaagagcatggtatgaatgccttacagattntcttattgctaatggcttcaaagtcggaaaagccgatcctacactctttactaaaactcttgaaaatgacttgtttgtatgccaaatttatgttgatgatattatatttgggtctactaacgagtctacatgtgaagagtctagtangatcatgacacacaaattccagatgtctatgatgggggagttgaagtatttc

SEQ ID NO: 51946 - DNA, 427 bp, Zea mays
accgacggaccaagaacctcgcaaagtccttataatcctcattggtgcccctacgcaaaggaaggccacacaagggccaagcacattggacagataactttgtaggtagtcgtggaccttctccacatggaagtggcgctctacatttggcctctctctgatgctccccaccgtcttcgctatcgagctttcgggcaaaacggcgtgggcctcgtttcctccagtacatggtggcgaccacaccacaaacgcggttggtgtgatctcgcaagacttttaccctacacgatgcaattacaacgactcgtgcaagagctgaaggtgtttaaggtgtctaacctcactcaaacaactagactaaacctaaagcaagcgctatgagtagtggtctaactaacataagcacttcacagagcacctgtgctaa

SEQ ID NO: 51947 - DNA, 382 bp, Zea mays
cctcttccttgtcgtcattactcttgacatagaaccactctgattttcttcctgctgcccacttgcttcggtagctaattacaggatactatgtagctttccgatcggcgaagttatagcaaccaaaattatcgtgcaacccatcttttctagcctttgtttgataatgcaactcgtgaacccggcaaaagctgtccgcaaatggttccactgcttggcttcggagtgcccagatataaacaataagcctaacgatagcgttaggagtcagctggtgaaaataaatactgaacctcttcagtacctctgcaataattccatgtagggggaaccttaatccagcgtttaaaaaactcttgaaaataacaaattcatctttctc

SEQ ID NO: 51948 - DNA, 330 bp, Zea mays
gcttcatagcaatttctttttctttccccgtctctgcggtcacagcctcttcggcggcggtagtagcttcttctgcagccatgtctagcagtatttggtcaatatgttcaattgtgctctccacgttcaaatcttcagctgaagcagtttccgcagctgcggcctccgaaggtgcaatatcaatatctgtcttctctgcagccgctggtgttttctgggctgaagctcttggcggcgtcttgtgaattacctctgtcacgagaataattctttgtttctttgccctgaggattttcttcaatatttcgggcggcttgtccttctgaaaaa

SEQ ID NO: 51949 - DNA, 470 bp, Zea mays
  unsure (1)..(470): unsure at all n locations
tatgaagattcttcatcccaacgtgggctagtcggcgatgccagagccaacccaagttagtcttagcaattaagcatgtgtcgagttcagctttatcaaaatctaccaagtatatctgaccctctaacacacccttaaatgctattgaatcatcacttcttctaaagacagtgacacctacatcagtaaagagacagttgtagcccatttgacataattgagatacagaaagcaaattgtaatctagagaatctacaagaaaaacattggaaatagtatggtcaggtgatatagcaattttacccaatcctttgaccaaaccttgatttccatccccgaaagtgatagctcattgnggatcttgngttttctcatatgaggagaacatcttcttctcccctgtcatgtggtttgtgcacccgctgtcgagtatccaacttgagcctcccggatgcataaacctacaaaca

SEQ ID NO: 51950 - DNA, 372 bp, Zea mays
aacagaaggcaccattttattacacacatcatgcagagagaagcggaacaagcctccgcagtcatattctgtaccaacaaaagcaccatgtgtcgacacaacacatttattagactcaagaacaaccttggatccatctcgacatagcatagaagcactaacgagattcttcctgatagagggcacatgctgcacgctattcaatggcaccgtctttcctgaagtaaactttagaatgactcgaccaacaccaagaacatgagcacgcgacccattttcaattaacaaggcgccagaccttccgacctgttaggaagtgaacatagaggcatcaccacacacatgaatggttgaccactgccatccccactc

SEQ ID NO: 51951 - DNA, 383 bp, Zea mays
  unsure (1)..(383): unsure at all n locations
tcatanatattactttcaatactaaaataataacacgatactatgctcaacaggagtaattggacgtcaataagacaatccacataaccaaactaccttgattaacctcacatacaacaaaacctactattactgcacttgatacaattgcacctcgtgatatcacaggatgcattcaaagtagtagacatacatgatctatcaaaccatcattcctataaaaaatctcaatccgatgcaacaaccccatcattaaagagatagatgactaacaaacataagcaactcccagttaagcattgacttcgtttaagataaagcggtccaaataatgaattaacaagcatgcatagagaaactgatcataaaagaataaactacca

SEQ ID NO: 51952 - DNA, 328 bp, Zea mays
  unsure (1)..(328): unsure at all n locations
tgaaaacttcgtctncttcacttagtttactattctatccttagtgggatgtaccatactataggttaaattccttgctatataaaatgttcaatagcgcatataactttgacatcaactatatgtgtgcactaatttaaaggaatttactctatccttctgggtttcaataatgatgattcatttgccatccacatataacgatcatcatttgtgaaactctctcttgtgctttaatgctctctctttaagagtacaacgagtccttccagagcttcaagataattcnaaccaaccaagatgatatagttcatgacacttgatggat

SEQ ID NO: 51953 - DNA, 400 bp, Zea mays
  unsure (1)..(400): unsure at all n locations
tgtagntntaaattgggtagaacgggctaccgatccctattttttaggtacccgaaaatttgggtacccagtatataaagcatgtgttcgggtaccgtctcaagatacccgaaatttaaaaagcccgaataacccgacctgaaatttcgggctagctcgaatgctgaagtctaagtgacggacatgcgatcgaactcggatttggtggctgtctggctggagtgcttccaccaggatgacatcatcatggcctacgatgggaggagaatgaaacaatgccactgatatgcttgtgaccgctgaagcatgatcgtgcagctgtaaagccaaatgctgacgtggctgaatctgagaacagatttcttcctgcttaatatatagaaatttacacacatctagc

SEQ ID NO: 51954 - DNA, 288 bp, Zea mays
  unsure (1)..(288): unsure at all n locations
ctaagcatgncaacgggtattcatcccacatgtgctaatcagcgaatcttcttttatttccatgcatatctctacaagtaagcattgcatctagaccggcctcctactttgcaaaatcaactaaataaagttagacagctaatatacccttaaacgctagtgaaccatcgcttctgcttaagacagacacatnctaactggctaacggacaatgatacgccatataggataaatgacctacagaaagcaacgtatatccaagagacataactcaaaaacactaaagaa

SEQ ID NO: 51955 - DNA, 414 bp, Zea mays
agcttgacacatagctcttttgaataccttttatcatattttcttttatatgctatgactaatgtgttttcaagtttatttcaaaccaagtcatacgtatattgaaagggaattggagtcttcggccaagacaaaggcttccactccgtaactcatacttcgccaccactccgagcaactctatcttctttcgcggaaaaatgagcatcaaggaagagggctctaatgattccgtttttggcgattcatgccaaaaagggggagaaatgagcccaaagcaaaaggaccgcaccaccaccacacaattcataaacttagtgcttctcaaaagctctctatcattggtatcctattgtgttcacaagggggagaaagtattactctctaatagtatatcaaaaccctctctgacac

SEQ ID NO: 51956 - DNA, 142 bp, Zea mays
  unsure (1)..(142): unsure at all n locations
ctgtgcacagnccactcgaactaatcttcggagaaacccgaccttgttgcaacatgactccggaaggtccaacataacaagcattgaatgaattcacaattattgcagagcatatcagcacaagagacctcggtcatgagtt

SEQ ID NO: 51957 - DNA, 439 bp, Zea mays
agcgactgagctgcactttaaggaaccatttggactttatatttcattttgagaaagacaggatctgtagcgcatgttaagcagggaagcaagttggtgttcatcatccacacaagaacatcatgacgaccgacagaccgcttgagctactccacatggatctattcggcccgatcgcttacataagcatcggcgggagtaagtattgtcttgtaattgtggatgattattctcgtttcactcgggtgtcctttctgcacgacaaatctcacacccaagagaccttaaagtgattcttaagacgggctcaaaatgagttcggcttaaagatcaagaagattagaagcgacaacgggacggagttcataaactcacaaatagaaagcttcttgaagatgagggatcaagcatgagttctcttcttcttacaccccacaac

SEQ ID NO: 51958 - DNA, 373 bp, Zea mays
  unsure (1)..(373): unsure at all n locations
tctaaagggagaacacattntangactaaccaatgttcattttgttatattaaagatttgtagcgcatgccaagccgggaagcaagttggcactcatcatccacacaagaatatcatgactagtgacaggccactggagctcctacacatggacctattcggcccgatagcttacataagcatcggcgggagtaagtactgtctagttattggggatgattattctcgcttcacttgggtattcttcttacaggaaaaatctcaaacccaacagaccttaaagggattcttgagacgggctcacaatgagctcggcttaatgatcaagatatatataagcgacaacgggacgaagttcaagaattctcaaatt

SEQ ID NO: 51959 - DNA, 383 bp, Zea mays
  unsure (1)..(383): unsure at all n locations
gtcacctgaagcatgcaagctngaacaagaatcaaaaagatcttgcactgtacaccttgcttctttctgcacacaagacgacttcagcaaaactgaagtctgccagtgtggctgcttctgctcacgcagcaactttggacaaatctacctacctacctgagtggcacccaagtaaggaaccaagcattgatctcaacttgaaggcctttaagcctggtntgatgcatctctaaacaatcgacccctcataaaaaacgagagagagaaaacactgatcacgacagacagactacctggatcaccacatggttcctggccagcaagcccaaaaaatggtaaaacagaatagaatcaatctttagtaaatgatgatgaatcgatgc

SEQ ID NO: 51960 - DNA, 463 bp, Zea mays
  unsure (1)..(463): unsure at all n locations
ntatgggctcatanaatatctaagcatagtgctactaaagtatcttcttttgagactgactatgggcacgaagcagtgttacctgtggaaataaatatgaatgctgtcacgtttgccacacaaaatgatctaactactactgattattataattcaatgacggataatattgatgaggtgaccgacaagaggatgatagctttgggagcaatataaaaggacaagatcatgatagctatggcctacaacaagaaggtcaaagcaaaatcattccaagtaggagacttggtgtggaagaccattctgcctctaacgaataaagaccgatagttctggaaatggacgcccagctgggagggttcttataaagtgaaacacgtgatagttggcaacgcttatttactacaaacattacaccgcaaggatgtacctaaagctttaaatgggcgtttctcaaacaaac

SEQ ID NO: 51961 - DNA, 337 bp, Zea mays
  unsure (1)..(337): unsure at all n locations
ttctggatgagaagcggccaccccagttccgttgatgaagcactacaacagccatcaacgaagggacccatggataacttcgcaagaagaaagcttgagtgctggcatccatgcttcttcaataaactacttgccaagcaaaagctacaagcctgaagatgatccttgagtagccagaatcagtggttgcaatcagcaaccacatgctcctgaaaggccagattntgttgaagttccatctcctcgaagagtctgcaaagtgaagatatgtagctgaagtaaagctatacccataacccttctaagtcgaatctcgaggatgagactcctcttaagt

SEQ ID NO: 51962 - DNA, 365 bp, Zea mays
  unsure (1)..(365): unsure at all n locations
ctgcttaatagcatactctgtacacgaataaccttctttacttataatattttgctgaaataacacagtagagggagattgtatacctagaaatcggaataaaacaaactaccgacgacgtgttgttgacgatagcggctaatatcggcttcgagcttcgggaaaccgatactctttgatagagtactgataanctttgctccgagctgaactcggatgcagcctaacttctcatcatcaacacctccgaagagaaacgcccctggtcggtaaccgcacgacatggcatattctttcattcttcttttcggcttccgctaattcttgccaaccaagcattgaaaatacaattctcatcctctaga

SEQ ID NO: 51963 - DNA, 452 bp, Zea mays
  unsure (1)..(452): unsure at all n locations
tggagattgcttggtttgtccaacggagacctccagaagcaccaatgcgtagtgggatctaacgcgcaatagtgatgggaggaggcaggagaaggccgaacttgacatgggaagaagcggtaaagagactcgaaaggatggaatgtacccaaagatttaaccttggatagaagtgaatgaaaaacagctatcgacgtgcctgaaccttgatttgtggttttaactctagcctactacaacttgcttgggactggttttatcgttgttgttgatgctatcagtacatggtaaccctgctnttgacaagcaatatgtctatacagtgcanaaaatagaatcacttttcaccacgacaagattatgaactataaactataaacgaattgttccttcttcttacaataagaataagacacaactgcaatatgaaacagatagtacataaccctaag

SEQ ID NO: 51964 - DNA, 432 bp, Zea mays
  unsure (1)..(432): unsure at all n locations
ntgacaagcattcagcagccgcttgagcggctgagtctgttgagtaccaacccgtggggctgatgatgagcttgtgctgttctttctgtgccacagaagtatccgcttgcgagcgatttcacatacctcttcatttgacattacatcccagaggccgccactggcaagaataaggcactcgtcatccttagcccgcggaactattgttacctctgggactggaattatccatggcttcagatatctgtcacctgcaacaaatagaagccaatacagttatgatataatataatacatgtttttgcatcttggaatcttgtttcaagtgaaacaactaaaactagcatgctaagagtactcagttcttctacaggcagaattgaattgaagaaaaaatgtactgttctgttgccttctgtggccttgcttatg

SEQ ID NO: 51965 - DNA, 365 bp, Zea mays
  unsure (1)..(365): unsure at all n locations
cgggtacaaaccaaccaactaataatgatacaatcatattttgtatgaaacatgcgaaaacaccatatctctccctntatatcaaaaggctctttacgcacgtgtctagccgagatacttgctttatgacgtccctaatttgactcgatgtaagagcgaacgatagaattaagtttttcagcgcatgtacatttctaaaggcgccactgtacatgtgtctggctggatgcataaaacgagatgaaaggaggcagccaccctttatatgcgcgttggatgaggagcacgcgagagcgaagtgaacactatagcaattttctgaagcggcggacgcccagcaatcgaacggatggtgtcgtcccctg

SEQ ID NO: 51966 - DNA, 391 bp, Zea mays
  unsure (1)..(391): unsure at all n locations
agaaaaacagggagtagtagcgcaagccaagcaagaaagcaagttggcgccaatcacccacacaagaacatcatgacgatcgacaggccgcttgagctactccacatggatctgttccgcccgatagcttacataagcatcggcgggagtaaatattgtcttgcaatactggatgattattctcgcttcacttgggtgttctttttgcaggaaaaatctcaaacccaagaaaccttacagggattcttgagacgggctcaaaacgagttcggcttaaggatcaagaanatcagaagcgacaacgggacggagttcaagaactctcatatcgaaggcttccttgaggaagaggagatcaagcatgagttatctctctcctacacgccacaac

SEQ ID NO: 51967 - DNA, 408 bp, Zea mays
tatttgacaacccacaagcagtttgagcagtatgcgtggacttacctctgacttgtgatcctctatttttcctggatgcatgcacgtgttgtcagcatattctcttttgttgtaatagcaagcatgtcaagtattgtgtgtgcatcagtgaatttatcttcagcactattttctataaaaccaccatgattcactctaatgaaatagttagtagttctctactcgattgcaatttcaaagtgaaacataacttggactgtttatttaacttcagtgccttcttaactgaagtaacttgcttattaatgtgatggattaccctgccgatgatgactgaaatacctcacttcagctgcatcatgggtgattgtatattgtgatatatctcagatccaatcttggatcaat

SEQ ID NO: 51968 - DNA, 463 bp, Zea mays
  unsure (1)..(463): unsure at all n locations
agctagccttaaaatggactgtcagtatattgtttatttagtggntcagagctgaaactctgaaaaacagccaatgatgctctgtttggagctcagttgtgattaatatatatggttttagaccaagagttgtatatcaaaatggaataccatatataggagaacaaatttctttaagtgagtttggtttggtgctacacagaanaaggagtaaaagtggctcanaattggactgtcaagctggttccaactgctttgggttcagtctctgaaacctgaatttcagtataggatgcttaatttggagctgttttgtgatcaatatgagtagttttagactatagtttctatagcaaagttggataccagatatagatggacaagtttcatgcaaggagatggtcctgttgttatgtaaagattgagagataatggagctgtaacgtcctctgtcagaaatagt

SEQ ID NO: 51969 - DNA, 484 bp, Zea mays
gattcagtcattacctttagaacttcttcttcgtctgcaacagaaggtgttgaaggagtctcttcctctatttcagttgtttttggcttcggagccgcagccttcctcttctttggaataaccaccttcggttcagggctggactttctcctcttcagaatttcttcatcttctttcaccattctagcagcttgtttgctcaaaacactaacaatcctttttctcttttgcccttcggcacccttgttcaattgctcatagtcaagatattcaaagttcagggcatccatcacccgattcaaccttcgcttctgtcgggtgccgaaggccgcagtcatcagctgatcttcttttctagtgtaattacccaaaatctcgttgacatggtttctatcatttctaaccattcttgatatggccctctgaactgtttcttgaatttgaaccgataaggtagtcgcacaagctcattcttctcctttgt

SEQ ID NO: 51970 - DNA, 388 bp, Zea mays
  unsure (1)..(388): unsure at all n locations
gacacttcttcgattaaccctcataaagaacaccgccacttaagaatcagagtctacggctcgaaattgagcccataccgaagcgtatatgtctacctttccatcgatgtatgaaaagcttcgatgtggacgaaacttagattgtttgacccgaaggcgacaaacaccttcccttcttgtcgtacacaacgaagcatgaatctgcttctgaaactgtatgcttagagccgaagcaacaggctgtatctcgatgacatgatgatgacgatcctatgtatgcctagacgaatgttcatgaatgccatgtatgaccgaatgcatngtgcaaatgaatgcccatacacacatgcgaagatgcatccacaaccttgcattccttacgaataac

SEQ ID NO: 51971 - DNA, 314 bp, Zea mays
aagacacggataggagcgcatgtcaagcagggaagcatgttggtgttcatcatccacactagaacatcatgacgaccgataggccgcttgagctactctacatggatctattcggcccgatcgcttacataagcatcgacgggagtaagtattgtcttgtgattgtggatgactattctcgcttcacttgggagtgctttttgcaggacaaatctcagacccaagagaccttgaacggattcttgagacgagactaaaatgagttcggattgagaatctaaaatatgagaagcgatcatgggaccgagttcaag

SEQ ID NO: 51972 - DNA, 347 bp, Zea mays
  unsure (1)..(347): unsure at all n locations
agcttaagtnntcttttaagataacacatttctatttgcatcgcctctatagacttcagaggacaatcctataaaggttttacgacgacattaatctccatcattcattttcctttctttaatttccatttacggcttctagtgcacgtttgaactacgacagggttttaataattcccaaaaattctgtaaaaaattacagagggtcgccattcgctattctagcttgctctaagaatttgaagcttaaaagacaaaagctaggctctaaacaaaaatagcaatagttaggcaaaatgggccactctacactacacctcttagctaggggtaagctctgtcctaaa

SEQ ID NO: 51973 - DNA, 467 bp, Zea mays
tgacgacgtaggttgtcgtcagtctcccgctgactgtttattcctctcacggacatccgcagcaatgttccggcacatggagaagaatgacgcaaacccgtgggccaagcgggcacccatccctcggccacgacctcgaccacgaccacgaccacgtggcgtgggagatccacggccaggggaaggacgcgaggcaccggcagcagcagcagcatgaccagcagacggacccgcagatgtatgagcacgagagctggatggggctttcctgaggcgccctgctggattgttgggatcaatctacaaaggggtatatgactaatgtcttgtacctctgtcaaatttaaactgtgtcacaacctcaatcatcttcatgattaacggagcttgaagacaccccttcaatggagagcacgcggcatgaatgattacctgccacatcatatcaaagacatttatactctctg

SEQ ID NO: 51974 - DNA, 419 bp, Zea mays
  unsure (1)..(419): unsure at all n locations
agctagtgaaggttcttcatccccacatgtgctaagcggttatgccacaaccagcccatgctagtcttagcaattaagcatgcatctagaccggcctcttcttttgcaaaatcaactaagtaaagcttgtcgtctaatacacccttaaaggctagtgaaccatcacttcttctaaagacagacacatctacatttgtaaaaagacaattatatcccatattgcatagttgactaacagatagcaaattgtaaccaagagactcaactaaaaacatattggagatagagtgctcattagaaattgcaattttacctaacccttttaccttgccttgattcccatcaccgaatataattgaatcttgggaatccttattcttgacgtaagaggtgaacatcnttcttctcctcgtcatatg

SEQ ID NO: 51975 - DNA, 368 bp, Zea mays
  unsure (1)..(368): unsure at all n locations
tattatctatttccntaaaatccagaagcaatgttttaagttattttaaatgctccaaaatttcttatttgacctataaatcatggaactatctttattaaattctatggaaaattaggaatctatccaaattggtttggcatttttaccatttttctgtgattttctacatatttctaaagctctactgaaaaagaaaagggaaaaactggaacagtgttgggccgattccagcccaagcgggccaaagtcaggggaaaacgcgcccgcgctcgcgcgcctgcagaacttgcacggagaccaccgtggttgtgagtatccccaaccgagtccaaaacactatttaaacagtcgctgacattttacac

SEQ ID NO: 51976 - DNA, 424 bp, Zea mays
  unsure (1)..(424): unsure at all n locations
agggagaacatgtgataggtctattttacgttcttttcgaaaaagatagaccttgtgcagctcgtcaagcagttaacaagtgggaggagcgcatcacggctacaatgtgatgaccacttcaagacccctgtagctgctgcagatggacctctccagacctggcgcctatctgagcataggaaggagtaagtatggttgacttattggtgatgacttttcccgcttcactagggtgttctttatgcaagataagtctgaaacccaaagaaccctcaagcgcttcctcatgagagctcanaatgagtctgagctcaaggtgaacaatataaggagcgacactgggtccgagttcaagaaccttcaagtggaggagtttcttgaggaggaaaggatcaagcacgagttctccgctctctacacacca

SEQ ID NO: 51977 - DNA, 137 bp, Zea mays
  unsure (1)..(137): unsure at all n locations
cctataaaactcagctcgttgaaactngagaagtcttggtcgcgcggactgtccggtccttgttggcggaccgtccgcgatcctccagatggtccaacgtttgaccatttgtattgactctgagctcttttgcactg

SEQ ID NO: 51978 - DNA, 422 bp, Zea mays
  unsure (1)..(422): unsure at all n locations
gcaagcttgacacttaccattttggattaagtacaatttctgatatcaagaatatttagctcattcctcaagatgcaaaagcgggttttgtctaatagctttgtgaaaatatccgctagttgatcttccggtttctctccttctaatacaatatctcctttagcaacatgatccctaaggaagtgatgacggatgtcaatgtgcttggtgcgagtgttctacaggaatattaagcaatttaacggcactctcattatcacgcaacaaaggtactttatctagaactacaccatagtctagaagaagttggttcatantaaataattatgtgcaacaagcaaccacgacaatgtattctgctttggcggttgacaaggcaacactaacactattttgctntttagaggtcatgaaactagtga

SEQ ID NO: 51979 - DNA, 443 bp, Zea mays
  unsure (1)..(443): unsure at all n locations
tcacgtgacacttagaaactaagctaagcattctctgaagttcttttaggatttctgcatatttgatattttatccatctcagttttcaggctggcttcaagatatttcttatattgctcaaatttttctgactgttggagaaattcattctttaagttgttattctcagcttggactttagccaaagaaccctccatagtctgaataacaaaatctttcttttctaatgcaccttcgtgctctttaaccatgatttcaaggtcctgaatggtgaagtctttcattttcagattagcttcgtaattntcaacttttttagccaaatcttggatgacggctgtgntcttctcttcttcgagatcttgttgcgattttagaaccttacctaataatatgctctgtcgaaacgatcttcgntngaaaacgaccttcaagataataa

SEQ ID NO: 51980 - DNA, 414 bp, Zea mays
  unsure (1)..(414): unsure at all n locations
atccttgagtcacctgaggcatgcaagctnnttcattttgtcaaacactntcttccttagcgctttctagatcagnctggcggccctttccacttggccattggctattggatgcgctactgacgcgtacttaatctggatggtccgttgttcatagaaatcgaagaattcagagctagtgaagttggatcccacgtcagttatgatgctgtttggtatcccaaacctgaatattatgtcttgtatgaactccactgccttggctgaggttaaagaggcaataggcttataatctatccactttngtgaattgtcaatggcaaccagcacatgagtatagcctccctgagctttcttgaaaggtccgatcatgtccaacccctagcatgcaaatggccatgttataaggatgct

SEQ ID NO: 51981 - DNA, 382 bp, Zea mays
  unsure (1)..(382): unsure at all n locations
tgaaagctggattgcgattccncttgagcagcttcgtctttgttgtgttgaanatcttcgaagtctatcttcatcaacttactcccgaggcaattataaagctaaatatcttcgtgtgggccgcgaggagtcaaggtctgaaacctgacgcaagaagcttttgtaatgttcatgaattattatatgaaacaaagccttgtggcanagaacagtaccataacaactttggctgctacagcttcgtttctcggtccggngcaagctgtcccgtaccaacctttctgaagagatggcccggggattggatgacagaatggttttatgtgaagaatgacttatcatcacgagaagacatcataggtataattatgcgtcctatttg

SEQ ID NO: 51982 - DNA, 418 bp, Zea mays
  unsure (1)..(418): unsure at all n locations
ttcactacaaaacatcaaatcacaaacctcacatctatagttatttacaacaatanctacacaagcgaggtgatttaccagctatttctaacttagcattccaatcatcattaatgctcctcaagctataaatcgtctcatagcaagaagataattcacaagaaagccatttcatttctcttaactcctaaggcatgaaatttctgtgcttctacatatttgtcaagttcttcatacaacaagtccccttgtattctaaaaacctattcttatcattaaggcatcaatcaattcattaatcttatctacccttggttctatctaggaccttacataaacatgaataaactaacttatgctcatcactagattcgccctcactcgaagaagcatagtagagtttcgagtacataccttc

SEQ ID NO: 51983 - DNA, 478 bp, Zea mays
  unsure (1)..(478): unsure at all n locations
agctntaaggttaatcttcacctataataatatttangaatgctcaaggcaaaggtatggaacaaattgcttcaattggtagttgatcaatagtagttccttccaagtggcattctttcaattgataataatatattctatggaaagaaatgtcaatataaaggttaaaattccttttggcttaaatttgtaaattagtgcatattgtgaattcactgctccatgtgcattaacttaaaaggaatttaatttatgcctttacgcctcataaatgatgatttgtttgtcattcatatatagatatcatcattcattaaatacttccttgtactactaatacctcttttctaagtgttttatcgactagttttaaaaggaaaagagataacaaagaacgaagtctccacatatgatgaaaagaagaatactaaggtgacaccaccacagatagtaagatctggtcaaatggtataacaaa

SEQ ID NO: 51984 - DNA, 380 bp, Zea mays
tgtggaggttcttcatccccacatgtgctaagcggttatttacatccagcccatgcaagtcttagccattaaacatgcatctagaccgacctcttcttttgcaaaatcaactaagtaaagcttgccgtctattacacacttaaaggctagtgaaccatcacttcttctaaagacagacacatctacatttgtaaaaaggcaattatatcccatattgcatagttgactaacagatagcaaattgtaaccaagagactcaactaaaaacacattggagatagagtgctcattagaaattgcaattttacctaacccttctaccttgccttgattcccatcaccaaatataattgaatcttgggaatccttattcttgacgt

SEQ ID NO: 51985 - DNA, 466 bp, Zea mays
  unsure (1)..(466): unsure at all n locations
agcttggaattactatacgacactttcgcatgttattaagcacantcagaactagttatatatctcaagcataatgaggccgtcgactgcctgccgcccctaaaagacttcaaaagaaaacctaacttttaacatatgtagaggagagttgttgagtacattggcaaattgaaattcaatatgcaatctaataagatacagganaccatattagcatttagcacagtgactcttgttcaccctggattgtttcttctgtagacttagtttgaatntggtattgtagcacaacaaagcatcattttctatgaattgtagtggggacagtacataaaaaaacttgacatgcggggacattgtattaataaaaagacatcatcacatgtcaagacaacctntgaacctctgtctcatccatacatagcggcaccgtagcccatgtgataatgaccatgggtcggaccat

SEQ ID NO: 51986 - DNA, 476 bp, Zea mays
  unsure (1)..(476): unsure at all n locations
tgcttctaaagggagagcacattttatgattattctatgcncactcngagaaagacacgatttgtagcgcatgccaagcaaggaatcatgtcggtgcccatcatccacataagaacatcatgacgactgacaagccactggagctcctacatatggatttattcggcccgattgcttacataagcatcggcgggagtaagtactgtctacttatcgaggatgattattctcgcttcacttgggtattctttttgcaagagaaatctcatacccaagagacattaaagggattcttaagacggactctaaatgagtctggcttaaggatcaaaaagattataagcgacaacgggacagatttcaagaactctcatcatgaaggttttcttgaagaggagggcattaagcatgagttctcttctccctacaccccacaacanattggtgtctcggagaggaagaatagaactctactg

SEQ ID NO: 51987 - DNA, 374 bp, Zea mays
  unsure (1)..(374): unsure at all n locations
tgcatangtgatcttcctttcaaaacaggaagaatatcttattctattgatatgtattctctgcttctcttctagtatctattggtatatgacaggtccggaaccttattcatctcctcaagaacccattgtggcaaaggaatcctggaaaggtagtaaattccaaccatgaacaaaaaagagatatgcttttaaactatattacagtgaagtaaaagtcacgctctacttgtgttcagttaaagggtgaggccataaaacagcacacaacaatcaacgtgcccaaatttcatacaatacttttgttcgttagaggaacaatctctcgaaccaatggctgtttgggacacaacaatcacagcttcaagctagta

SEQ ID NO: 51988 - DNA, 454 bp, Zea mays
  unsure (1)..(454): unsure at all n locations
agcttctacccgagcttacttcatgtgtgtcatctatttataaagctaatacattntgttcgtggtgccacacgaaaaacaaaaatctcatagaaacaacatgatatgccaatgtaaatatccatcttggagttggtgagtttatgccttgtaaacaatatctgaacattaaatgagtccataggacaaaggaaaaatgcaagacaaatattntttaacaaatctaaaaactccttataacctgtaacactatacttgaacttgtagccaattagttgtaagctattcatacacaaatctgaatgccttgatagatgaatttgggtagctctcttcatttgcttctagaacaaagtagaagagatgatgtggaatctcttcttatgtgctcatgtatttcttaagaggaagagatggtattctctcttcaccacgaatacatatattcttgtcc

SEQ ID NO: 51989 - DNA, 472 bp, Zea mays
  unsure (1)..(472): unsure at all n locations
tctttctccctctcccagganattccttctgatcttgtctattgctttgaaaacccaccaaggaaggtccatggccatcattaagtagatattcattgaagacaggacagnctggacaataatcagtcttccagctctagtcaacagatcagctttccagcagggaagacgatctgcaattttatcaatgaatggctgaaagtgttgtctgccgagcttctttaaggatagaggcacccccaaatatttgcaggggaagttggcaacaacgcatggcagcagattatgaatggtatccagattttcagcagtacagtggatggggaaaatgctgctctttgccatattcactatgagcccagctgcctccccacaaatcctgataatgtccatggtgattactaaatcaagagccaccgggtggaggaaaatcaccacatcatcagcatacatagaaatacggctatgaact

SEQ ID NO: 51990 - DNA, 372 bp, Zea mays
taacatcttgtcttacaaatactttatgacacatggtatttttatgatgtgtattacataacacattcattcatgaaacaaaagctgcatcagtgcagacattataaagtgtggtctaaggtctgataaataatgggtatgctctccatgtactaatggtccaagatcgcattacgccaatcgataaacacggtactggagtcacagtgacaaataacatgtagagtgagttaaagacactacctgtgagttcaaagggcttgtcttgttgtacttctctccatgcatctagagcttcttattcttcataagccttgacttcagcatctttttgctcattagtatacctttttaagttccatgcttcgcaac

SEQ ID NO: 51991 - DNA, 364 bp, Zea mays
gactcacaagatcactggccttcgtaaatggaccgccaacaaacgctattatcatatcaccagaaccacaaacacaaacctcaaagagactgactgcaacacataacgcaactccagtgtacctagaagcacgccaatcaactggaacatggcaaaggtgctcttgtctttctccataacaccgccacacccgcgtttagaacgcaaacccgaatgcgaaccatgtacgtgccaggatcagcaattcaccgacacagcgattacataaaagactcatcatagcacacagcttccaattacacaaaagagtaagtaataatgctacagactagagccattcacataatataaatcaaagcacaca

SEQ ID NO: 51992 - DNA, 422 bp, Zea mays
  unsure (1)..(422): unsure at all n locations
tataggatactattcaactaaagtaagaagaatttgttatgttgccaangtatgaaaacttcctctccttcagttattttagtattctatccttagtgggatgtaccatagtataggttaaattccttgcattataaaatgttcaatagtgcatataactttgacatcaactatatgtgtgcactaatttaaaggaatttagtctacccttttgggtttcaataatgatgattcatttgccatccacatataaggatcatcatttgtgaaaccctctcttgggtgtttaatgctctcttttctaagtgttacaacgaggtccttccaagagctntcaagatggattcaaaatctacaataaatgaatgaagctcaagatcactcggttggatgatatcacatagagaaaagagatcaccgtg

SEQ ID NO: 51993 - DNA, 448 bp, Zea mays
  unsure (1)..(448): unsure at all n locations
agcttctaaagggagaacacgtgataagcttgtctaacgtgtctttcgaaaaagatagaccttgtgcagcttgtcaagcaggtaaacaagtgggaggaacacatcacagcaagaatgtgatgaccacttcaagacctctggagctgctgcatatggacctctttggacccgtcgcctatctgagcataggaggaagtaagtatggtctagttattgttgacgactnttcccgcttcacttgggtgttctttttgcaggataagtctgaaacctaagggaccctcaagcgcttccttaagagagctcanaatgagtttgagctcaaggtaaagaagataaggagcgacaacgggtccgagttcaagaaccttcaagtggaggagttccttgaggaggaagggatcaagcacgagttctccgcttcctacacaccacagcataacggtgt

SEQ ID NO: 51994 - DNA, 380 bp, Zea mays
  unsure (1)..(380): unsure at all n locations
gaagagagacaacaagacagattacccgaacgccaaaggcgaagcacacgctggaaaggagtgcgattcggagtgctcttccgccgactncgacgacgaaggactcgccgccactgcctccaacaaaacggctctcttccccaacgagcaccacactagcctcatggcaaaggacaagaaggaatcactcgcaacgataacacttatgattcttctacagcaaacgaatccagagaggacgaaatcgatcactctaggtcatccaagggataggacagaactaacatacgcaagactaatgaggtgagtgatgccctaaatgaacaggatagaatctcacagaaacaagaagaccttctatacgaagagcatgacaaatt

SEQ ID NO: 51995 - DNA, 289 bp, Zea mays
  unsure (1)..(289): unsure at all n locations
cgtcgcaantgtgtcaaccgtcgactcgtgccggctatttgttgtttatagagccgccttgggcacctccacggacaccacccttaacatgtactcgcgccccggactgagcgcctccacgcgcatagcgaggcttgccacctttgcggactcgcggcgaggactccaccttattcttgtcaccctgacaggcctcccactacccccgcatgagatgaagcttcctgccgatagtgataagcccaaagggagccatgggttcatagacatagaccaccttgatacgacc

SEQ ID NO: 51996 - DNA, 428 bp, Zea mays
  unsure (1)..(428): unsure at all n locations
agcacctgaagctgcagcttggctgacttttcacagcacttttagctttttttatgncactgttagcacgaacctgcacactgatggcagttcctgatatcagaagctcaccaccacatacagcgatgctagataggagtcagtcagcctatgtagtaggatatatgctgaatctttccataccgtcgttgtacctgttggaggaggtgggagccatctcctgctggctctgctgccccatatccatgtggactacgctctgaaggtcatcttgccacaaagtcccgacctgtgtggtgtgtgaccagatgtatgtatgtatgcattgcatccccagtgtcactgcgtgcatgtgagtagttgtaataaaagctggaagagccaaggacgttggctgtcggttctcttttcttttacctgggacgctg

SEQ ID NO: 51997 - DNA, 118 bp, Zea mays
gcttgagtggattgagaggattcgatcactctggcgtgtctatatattgtatgctagagctcttgtaaatactcggaaagtggaaaacttggatgacttcaatcgtcgggtggtcgcc

SEQ ID NO: 51998 - DNA, 439 bp, Zea mays
  unsure (1)..(439): unsure at all n locations
agcttatctttattntagaaaaggggagaaattattacttattggggaatcataagacaaacataagatgaagaaagttgataagtgcattccatgtcatgagcatcacgtttattntatgacacactgcaccctatgaatagtatgatataagttgtctatactttgacctaaatatgtgcttttggcattagagtacaaaagtgttattttctgaaatgcacatgtttagggggaggaaactatatcataggattcaaaatcttatttatcaaatcttatgtaagctttaaatgtgttgtcatcaatcaccaaaaagggggagattgaaagtgcattcatcccttttgtgaagtttggtgatttggataacaacacatttaaaggtctaacaagtttgctaagtggtgaacaggaaattcagtatgatgaacatact

SEQ ID NO: 51999 - DNA, 383 bp, Zea mays
  unsure (1)..(383): unsure at all n locations
ggtgaaggttcttcatccncacatgtgctaaacggcgatgctacattcagcccatgctagtcttagcaattaagcatgcatctagaccggcctcctcttttgcaaaatcaactaaataaagtttgccatctagtacacccttaaaagctaatgaaccatcacttcttctaaagacagacacatctacatttgtgaataaacagttatatcccatattacaaagttgactcacagacaacaagttatatccaagcgactcaactaagaacacattagaaatagagtgctcggatgaaatagcaatttttcctaacccttttaccttgccttggttcccatcaccgaatatgatagaatcttgtggatccttgttcttgacgtaa

SEQ ID NO: 52000 - DNA, 415 bp, Zea mays
  unsure (1)..(415): unsure at all n locations
gctagaacctagccatgtcgtccactggcgggaccaaccccggaatcgggctgccgaggccatgagccatgctgatgtcctcgggggacagctggctgaggcttctgagcggccggtcaagccgtctgctcgggccgggttcctagaggagaccctaacgatgacgtcccangcgcggtgctaacatcttccttcgaggtggagatcctccgcccgtgtcgccgttcgaggtcgggccagattctgccgaaagtggagacgacgccgagggtgctgctgctccctctgttgatgtctgaacctgcaaggagagtctgtctgtactgtgcatatagtttttgcggccgccgaagcccaaacatatcatcgtcgtactataaagctgcattctctcttctctagtttcgagatcatg

SEQ ID NO: 52001 - DNA, 433 bp, Zea mays
accccttacgtacaacatggagtacttgtctgaaatctcccccaaacacaatagtcttcccaccaaagggcagaccaaggcgtcccatgatatcacgcatgctgttgtccaatgcttcaattgattgtctcttagccattgatgcctcttcccaaataatcagcgacgctttctgtagcaacttccatgtcccactttgtttcgtgaaggtacatatagcaccatcatcaatagtaagtggtatcttgaagcgtgaatgggcagctctcccaccacgcattatggaagccgctaccccacatgtatctgttgcaactgcaatcttgtcctgactacgtagcaccgcaagcaatgccttatacagataaatctttccagtcacaccaggcccatccacatagaacacaccgccattactggtgtaacaacagat

SEQ ID NO: 52002 - DNA, 310 bp, Zea mays
tcagcacagctaacatattgtttaaataacgctaatggcacaagcagcgtttcgaatgcagtcggtgtgacatcctatatatacgcacagcgcactccaagttggagggccccatctgtcattgactgttgctattctaacacaaggaaggtgtttattctgaccttcggcataaggccttcgcccatgacgcaatctgaattcgttattctaacaaaataatatcgcgatgggctactgttgggggccttcctcttccgaaagtcctcaaaaacataaattgacaatgttttccgagtgcaatatgcga

SEQ ID NO: 52003 - DNA, 363 bp, Zea mays
  unsure (1)..(363): unsure at all n locations
tccctctaaacacccccccccgcaggcctgacctgatacctgagaccggacntaagcaccgagcatgcaccgcacaaagagacccctttttggtcccacggaacacaagactagaaccaaggcctggcaacacagaaatatacactcagccagtgaactgggcgcccgacagaaataattgcaactagagggcgtgtccaagggacaactgatgagccctcttggcaagaacaagcacccaaccaagatctccttctgtcttctgtaaggtaggaaattcttctacacagctttgtccaaggacaaccaacaggcctctgacataaacaatacacctgaaaacagcatctaatagacaacaaa

SEQ ID NO: 52004 - DNA, 141 bp, Zea mays
  unsure (1)..(141): unsure at all n locations
ctccccctccattnccatttccccccccccgagggtgacgaaccgaacggacccaggcgagacacacaaccggacaacattatggacgaggggcaaacgcaagagcggcagcaacaccccggagaaacgaaccgagcagaa

SEQ ID NO: 52005 - DNA, 349 bp, Zea mays
aatatactatattgtttataattggctcaagccatgatcctaacattttcgtacccttctccctattttcttgaatactgctcatggcgctcacttacgcgttttattacggttgcaacattattacctctctgaaagacccatctgctctgatcatgataccttaaggcatatgcttggcggattccctactcttaagtcaatatgatgctcatgcttactttggttcacataaaacgaaggaactcggaccggcattctaagagaaaccctacgtgacactggtgtgtcacaaccttccccccctaaacgaatctcgtcccgagattcgggcaagaatcctccccgc

SEQ ID NO: 52006 - DNA, 414 bp, Zea mays
  unsure (1)..(414): unsure at all n locations
ntaactatgtccaagntctgtgttgtatcactcccatttctactttttcatttcttggcataaggaggcgtcacgtgtactgactgtaaaacaatgacaggaagccttgcgactcaatgcatctaccaccacattggctttttctgcggtataatggatatccaaattataatctttaattagctcacgccatcttcgctggctcatattcagttctaactaggcgaaaatatattacagagctttgcggtctgtatataaatgacacacattccccagcagataatgacgccatatcttgagggcatgaacaaccacagctagtctcaatcatgagttgggcagtgctcattataccggcgccgtngtcttgaagaataagctatcgaccttgcctctttgattatgacacaa

SEQ ID NO: 52007 - DNA, 357 bp, Zea mays
  unsure (1)..(357): unsure at all n locations
tgggctntcgaggccctgtccatcgtttcttcattgtcgagggcgtagtcgggattccgaaagcggaaggtcgctccgggggcctgtactacgccaaagcccgtttgcagccatctggagcatggagaacttcatcgcgaaatgcgcaaaacccctacccggcgcaccaactgtaggtgttttgaacctcgctctgacaagtaaatttattgtacgcgctctgggctcctaagggtgtgcacaatgggcgcaaaatttatactggttcgggcagaacatccctactttcagttattggcggcttgcgctaccgacacaattgatgatcaaaactcgtagtatgagttacaagtggac

SEQ ID NO: 52008 - DNA, 414 bp, Zea mays
  unsure (1)..(414): unsure at all n locations
tgcaccacttgttnntgttttgcaaacattcttggatattcttttcacagtctttttgcaaatagtcaaaggtatatgaatatgattntgagaagcattcttaagatttgaaattttctccccttgtttcaaatgcttctcctttgactaaacaaaactccccctcaatgaaattcccctcttagtgttcaagagggttttagatattaattctgacggaggtcataccaatttgaaattatatcaaaaataagataccaattgaagaacttctttaataccaattgaaagactacattttttaaatcgttggcggcgcgcgccttttgctttgggataatactttctctccctttggcatgaatcgccaanaacggatactctgtgagcganatataagccctttctcaaact

SEQ ID NO: 52009 - DNA, 303 bp, Zea mays
  unsure (1)..(303): unsure at all n locations
agaccaanataacatccttgaaagagaaattagcccgaactaacaaagaaagaacacgtgggaaattcataaagatgaaaaaacggaaccgactcaaaagggaaaaggctatttagacctcggtggactaccctaaagtcattagcaaatgagaacgtcacggatgcaatcttacactggctgagtcccgtgcctataaatagatgaacaggacccccgtactgttcacactgacttatactcatatttgcgtcacgctagcactttcatattctagcacaccgaaggtacaaatataattca

SEQ ID NO: 52010 - DNA, 438 bp, Zea mays
ttgcactatgcacctgttcaacacttagcacacatgttagttctttaattgggttgtcatccaaaccaccaaaatccataagagagctttcataaactttagggtagaactagataattcgatggtcacttaaacaacatcaccatgttgataagtgtaatgcatgtgcacataagactcacatttagtgccattagatatataaccgtcattgtaactaaaggtttctcctctttatggaacaaccttctattttaaactaaaccatgcactctattgcaccttagttggcacaaataaagctctaacaatatacctctgccttgttgctggcttttcactctccaataaatgaacccttgcgtgcttgtgatcatgaacctcatcatcttatatgccatgctcatgacccttaaatggaccctacccaaaccttct

SEQ ID NO: 52011 - DNA, 364 bp, Zea mays
  unsure (1)..(364): unsure at all n locations
actatanaanactcaacctctactttacaggactcantgttacgccccangtgttatttatggttntcactcaagactatacaagtaagcccatcatcacatgtgacttaagttgggaaaagtacaccaaatttggagctcaagatcctaagtaagtgcaacctatcttatatgtcatgccttggcttaccatgtacattgaaggggtagaaattgcccaaaaccctaatgcaccccctgtggacaatcggagtactatatgtaagtatgaccaaaaagttatgaaaaccacttgatcatgtcttgtgccaattataaaagatgtagcgcacttaataccctacaaataacagtaagatagtaa

SEQ ID NO: 52012 - DNA, 478 bp, Zea mays
  unsure (1)..(478): unsure at all n locations
atgcaagctttggctgtcttatgcggttagcacatattttctatttcttaatcaactaggncaaaaagtctaagtgccatgtgtgtgttgaatcaaaacaaccccgcaagcctcacaaggctgctgaggcgaggagcttggcacctctagaacttgttcattctgatctgtgcgagatgaatggaattttgaccacaggtggtaaaagatactccctcacttttatagatgactccactagattttgctatgtgtatctcttacaaacaaaagatgaagcgttcaattattttaaggcctataaagctgaagttgagaaccaaattgagaggaaaatacaacggttaaagtctgatcgacgtggagaatatttctctaatgtgttcgatgaggtctgcgtggaacatggtattattcatgagatgacaccgccattctcccacaatccactgtgatgctgaaagaanaccgtctctac

SEQ ID NO: 52013 - DNA, 364 bp, Zea mays
  unsure (1)..(364): unsure at all n locations
ctaagctgtgcgtctaagggacctagcctttgcctcatggaggacctctctgacttattagaccggcttctggatggttcggacccctgtggtcggtccggtgtcctcaacctcctggccttccatcaacatcgtggtggtcggaccaccaccttctcctaggggaacttcctgactcccctgtggatgctgtgtcatcctttcggcgaacagcaccatgctcaccacctctgaagtcgctgcaatgtataagtacaacggctcccctggctctggagctaccagtattggcacggacacaaagagctgctntaactcttgaaaggcttgttctacctctttggttcaagagaatggaccggac

SEQ ID NO: 52014 - DNA, 347 bp, Zea mays
  unsure (1)..(347): unsure at all n locations
agctttccccggctgtcaccacgtcagcaccaatgattangtgttcgnctctccaccaacgccgcaccggcgaacgcgggccactccaaagcgcaccggcaggtccttgctcccatcctcgccacgaaaacaaggaagagggcggaatgttgcatcctagttgggcagcaacagttcgtcttccccagcatggctggaggacgcctcctccgtagagctgggggatggtttccaccaccataagctggaagaggaggtggccagccgacccgtgtgggaggtagagccccggatcgcctcactctctgccccagcaaggatggtaagcatccttgaagctgagggag

SEQ ID NO: 52015 - DNA, 365 bp, Zea mays
  unsure (1)..(365): unsure at all n locations
ctataaaactaagcctgccacatatctcatntaaatacccttgatcatatctcttttatatgctatgactaatgngttntcaagcctatctcacacgaagtcataggtatattgaaagggaattggagtcttcggcgaagacaaaggcttccacttcgtaactcatgcttcgccatcactccgagcaactctctattccttggggagaaatgagcatcaaagaaaaggacttcatccttggcggagagagtaaaagctcaaaagcaaaaggaccggacttcatctttggtataatcttaactcgttacttatgaccaaaggggaagaaattacttccagggctctaatgattccgcttttggcga

SEQ ID NO: 52016 - DNA, 473 bp, Zea mays
gcttataaaatcactccacccaaatctgcctttccatttgtgagaaatggagcgcttatggagctttgagagttctacctcacaaacaagtgtggtgtcccaaaccaaaccatctcaggaacacacttgatactctgctatacatctctaattatcccctctccagagtgcctcagccacccaagaagacccactcccacaaacagatttcacccaagagagaggtgaggttccattgtgagtatagtgagagagatgggcatttggctgcctcttgctctaagaagaacagagatgatgtcacacccagttttagaaggcaaactgaacgcgaaccatgtacgtgccaagatcagcatattacgtacacagtagtacataatcggacacatcacacaatgctcgaataataacataaaagaaggtaattgtatatcctcaaaaaacttgcacaagtgatcttcgtgcgggat

SEQ ID NO: 52017 - DNA, 353 bp, Zea mays
tcaccacttcaccacgaacaccgcgcaccatccttcttcacctatctctcttccgtaggcctcaccggcgacctcgccgccgcgggagcccgccacctcaccgtggaccggtcggcctgagcccccaccagccaaattgaccccaccactgtgaccccctaccccgcccgtgctattccaccaccccaaccacccaagaactcggtcaccggcggagaaccgccgtcggaccaccggcggccggttcttcctccccgtggacggaccgtcgttcttccccctgacgtcgattacctctccccttgctggcatgtgggcccgcgcccacggcgccgtctacgagccacgccctt

SEQ ID NO: 52018 - DNA, 463 bp, Zea mays
  unsure (1)..(463): unsure at all n locations
agcttcgtcatctgaaaagaaattgccctggtataaaatatttatctcagntctccaatcttcgctataaacaggagatatattgagcactgctctttcaagaaggtcaaccgaaggtgcttttattgtttcaaagaatacttctgaaggtaaaggcagcccctgtgccgctgacttggctagtagatcagcgtgctcattttctcctcgtggaatattcttgacagaaaacccttcgaaaggagctccaagccttcgaactgtatccaaatatttctcaagcttcggatctcttgctntgtaacttttgtcaacatgaccagaaataactcgggaatcagttttgagaactgtccttcttatccccattgccttcaacttccgaagccccanaagcaaagcttcgtattcagcaatattatttgtgcagctgaaatcaagtttcactgcatagcatgttctg

SEQ ID NO: 52019 - DNA, 380 bp, Zea mays
  unsure (1)..(380): unsure at all n locations
tcggaagataacgacttcatcatctccgggagtcggcacagttttttctctggcatctgctcttagaatagacatatctcgaanatatctcccnctcatgttttcaaggtgactttgcccaatagttgattntccgaagactgaatggcttggtcgccatggccgatctttggaatcttcacccccactatctgcatcataactgtcactatcaccagtatcttcagacaaaccttctaaaatctcccttgtaatcttctccgtattcgtctttgctattgactcaagaaaacccagatgcatctcttcagaaaggctcagcttcatttctgcagcaaccttcttctcctcagacatctcttcggaattcttgcctctcg

SEQ ID NO: 52020 - DNA, 399 bp, Zea mays
  unsure (1)..(399): unsure at all n locations
ctatatgtatatatattccgtattaattacacaatccaactcttacgatctacggtcctagaagtatctcggtcttgcagccgggatagccataagactggagtccacgctgaggtgagcaggaccggtgctgagtcccaacgggagcggaggaaccaccatccaagagacgacgttccacgcgctcagcccgcaactgggcgatctcagcacgagccctactcagcntcgctaatgcatggaccagctccgtgtttagcacggcggctaggttgactgtgctgctcaacctaagattgccctcaccgacaggtgagacaatcacgcctcctgtgctgccagatggaccgcggtggtaatacttcatgtcaagaccgtcacgtgccccaccgaataccg

SEQ ID NO: 52021 - DNA, 390 bp, Zea mays
acacacaataaggcgcaacgcaccatttatataatccttaagccatcacaaccatctcaagttagctctgcacttactccaaaatagtacctgagtaaagggatactaattatggagccagatcagacctgccgcgcgcctaacgagcattcaaaaaagtaatggtatattaattatggcggcagactagcatatgtcagcacaagaggcattcgatcacatgcccacaaaatgaacctgatactctagcccaaattcagacccctaacagaataatcaatgacgcaaaattaccgacaagagcagataacttacccgtaggcgcgcacaacccaccaacctgtgacaacttgagcacatgagcagatacagcggccatccatgccatgg

SEQ ID NO: 52022 - DNA, 342 bp, Zea mays
  unsure (1)..(342): unsure at all n locations
ntagctaaagcttcnncttcagctttgccaagcttcattatttgtaatcttcancttcgtcatgctgtatataccaaataccagagtaagaaaggcacaaatttctaaggagaaggcataagtaataaacataagtttcttacgggtttaagatggcttcgagcttcgtcgcccgccatttttcgcccgccacttacccacatctgggtcatgaatctatttccgatacttctggctaagcctgaaatattcatcatatctgaagctgacaagctgaagattggtctgtttacaatattaccatgtgtgcagtcaaccttataaaagccgacgctggccttg

SEQ ID NO: 52023 - DNA, 280 bp, Zea mays
ttttcaaaatcaactaaataaaggttggtcgctaatacaccctctaaagctaatgaaccattacttcttctaaagatagacacatctacatttgtgaataaacaagtatatcccatattacaaagttgactcacagacaacaagttatatccaagcgactcaactaagaacacattagaaatatagtgctcggatgaaatagcaatttttcctaacccttccaccttgccttggttcccatcaccgaatatgaatgaatcttggggatccttgttcttga

SEQ ID NO: 52024 - DNA, 362 bp, Zea mays
  unsure (1)..(362): unsure at all n locations
tcctatcattgtcttacagtaaggacccctgacaccacactatgtctagaaatggaaaagttaaacctgggtatgatacaacacgaaactntgacacaattaaagcttgagtcagttcttctacagaggattattgatgcccaaaggactgacaagggtatgaagcatattcatgagaaaatagaagctcgcaaagcagattgcttcagaaaagatgaccaaggaataatatggttcaatgatcgcatagtggtgcctaaagatgctgaagtccgccaacaaacttttgatgaagctcatcttagtcgatattccattcatctcgaaagtactaagatgtatcaagactttaagcaacacta

SEQ ID NO: 52025 - DNA, 430 bp, Zea mays
cctccaggggagaagactgcttagtcctctacagattatctcttagtcaatagaagaagtcatggacttggatgtaattttacccaggctgcgtcctgtgcctataaatagatgaacagtaacaccgtactgttcacgttgacttgtattcactcgcacgtcactcttgaattcttaccttctgtcaagccgaaggtataaatgtaactcaatattattaatgtttgttcatgatcatataatgagtatatagataatctaatgatgtgatatgactactcatattctgtgtatgtaacatatgttcctgcttttcattacatattgagatgatgaacgtatgtccttcataaccttcgtacgaagatcattatatcctaagggagataatgcttcgaaagacgaaggtctttatccattaacatctgtg

SEQ ID NO: 52026 - DNA, 451 bp, Zea mays
  unsure (1)..(451): unsure at all n locations
tcttcaccatgtgattaccgctatcttgagaagggttatctttgttcttcccttntagttgggtcaagctcatttttagcctctcattttcttctttgagcttttgatatgaatcatcatttgttcctgccaattctagctcaaaggaagatttgctcgttgacggacaacaagcattagcacatgataatatagtatcaatttgaatacatgtgcatgagtgaagttgctgggattataagttttctatcacaacctcgtgagcaatattcaatatgatatgatcatccataagattttcatgaagacatagaagcatatcatatttttcttgaaaagctagattttcaatnttttagctattctacttgcgccttacgcaagggatgtctctttactaattgatcgatacaatgtaaagcgtatcttgctcaattgaaatagtttctac

SEQ ID NO: 52027 - DNA, 476 bp, Zea mays
gcttgtgaagattcttcattccaacgtgagttatttggcgatgccagagtcaacccatattagtcttagcaattaagcaagcatcgagtttagctctattaaaatcaactaagtatagctgaccctctaatactcccttaaatgctactgaatcatcacttcttctaaagacagtaacacctatatccgtaaaaagacagttgtagcccattttgcataattgagaaacagaaagcaaattgtaatctaaagaatctacaggaaaaacattggaaatagaatgtcaggagatatagcaattttaccaagtcctttgaccataccttgatttccatccccgaatgtgatagctctttggggatcattatttttttcgtaagaggagaacatccttttctcccctatcatgtggttagagcacccgctatcaatgatccaacttgagcccccggatgcataaacctacaaataaagtt

SEQ ID NO: 52028 - DNA, 257 bp, Zea mays
cattattaagcaatcacattgtacagcacactattcatgcagtagcataaaattcagtcagtacccagcagtgacattgtactatcaaatccgataactgattcacagcaaacgaattgagtcatgtgttaaaaatcaaacaaagcattttaactctaacacacagccaaacgctcgcatcataaacgcctgctccacctcgagctccaaactctaatgtcgcgcctcaacccatcaccctatagggaacatatctg

SEQ ID NO: 52029 - DNA, 291 bp, Zea mays
tattggaaacgaagcaccctactattgcgctgtacagtgacttacaggtatggagggatagggctcatcgcaccttctagcttcgtgagtcaaatccgaagactggtcaaatcattttaagcctttctaaataacataccatgcgtttttattctttaaagctctcatgtgacactttttcctcctagttattacaatcattatcaactctcatcttggtgttgaacattaacatatctttattatctgtgattctctcagcactgcagtgtgtcaccactgccagcatat

SEQ ID NO: 52030 - DNA, 360 bp, Zea mays
  unsure (1)..(360): unsure at all n locations
tctaaagggagaacacattntaggattaacatatgttcattttgagaaagacaggatttgtagcgcatgccaagcagggaagcaagttggctctcatcatccgcataagaacataatgacgaccgacaggccactggaactcctacacatggacttattcggcccgatcgcttacataagcatcggcgggagtaagtactgtctagttattgtggatgattattctcgcttcacttgggtgttctttttacaggaaaaatctcaaacccaagagaccttatagggattcttgagacgggctcaaaatgagttcggcttaaggatcaagaaaataagaagcgacaacgggacggagttcaa

SEQ ID NO: 52031 - DNA, 422 bp, Zea mays
  unsure (1)..(422): unsure at all n locations
gatgtgatattctatgcatatttactctatctgttctcttgcatggagtactgtttggttcctaatttgaatggatggatgtatgtatgctcgcaatcgcatagagaacgatccggttgaagagcccgatgaactcgcatgagaagcccctgagcagcagtcggttggtggaggcaagagacccttgacctatctctngcctattcattctttaattcacctcccgcactacacatttatgcctaaggattgactagctttgttatccatgtccttcgttacctatttgagttggattattattgtatagctttatgctatcgctcaaactctaatcattgaacatgatgagattatctatgatacgctcgtttcccttctctattatgattgttgacttgtgggctttaagggggctcgag

SEQ ID NO: 52032 - DNA, 402 bp, Zea mays
tgcaagctttatctgctacgtttcagattccttactttgataatgttaatgactatgttaagtaatgactctgtggatgtcttggacatcttgatttaataaagtacctttcagctatttactttgagcattgtgtgatgatgtccaattatgcaatcgttgtgcacatgagtttctgatcctgacacgtacatagttcgcattcggtttgccttctaaaactgggtgtgacatgttactctgctggagtgctgtcaaaaagattgtaaacagccgcagctctatcgtaaccgacaatgacatagtggaagcctttgtctgtcaccttgacagatctgagcaaccggaggacgaagtgagatactccaagccaagggttggcaaactccaacatggatatag

SEQ ID NO: 52033 - DNA, 462 bp, Zea mays
  unsure (1)..(462): unsure at all n locations
aatactaactgacataaagagattaattgngagtcagcttgctttgttattgatggcgaatttaaaaatgaacacatggacggactttatgtcttcctcttgatagagaactaaatgaagaaagctgagcaaaatataataacacaaagactcttacctttggtatctgattattattagggttctacttagaggactcatgaaccaatgaacctatttggattaggattcctactctatattggtctatatgaagtctggacaaagaaagtctatattgtccggtagttatagagagatgacctacaaatgaatggacaaaaaatatgctgaaatttcgcctctctattattagctatagttgaaagactagatttctatctatgaattgtggcataatgcctagatacctctaaatgtcataacgagcatttgccatacataaataatgaaaactccttg

SEQ ID NO: 52034 - DNA, 282 bp, Zea mays
  unsure (1)..(282): unsure at all n locations
atttgcatcatcagactccggagtcaaggactcttgaaagagccatggcatcataatgaccggaataatgaagttaatcttcaatccacccaggggaaaatggcctgatcaattaaccaaagtggtgtggagccacaatacaacaatatcaaggtctacaggttttactccattcaagttattatttggtgacgaagcaataactccggaggaagctaaaaccggatcaataatggtaatagctttcgcagatccagttccgaagctgttatntgtggaaaa

SEQ ID NO: 52035 - DNA, 472 bp, Zea mays
ttgagcccatgacgaggagcttagcctatccagccataacttgtttgttctgtgttaaacactacacgaagaaggtcatgcgctgtattctcatatgcaccccagtgaacctgcggatcatgtctggatggaagccggaccttctcatgtagcaggagaagcacttgatagtgcactggaccttttcaagccccctccctatatgaaggtggatgacgaataggcttctaccgccaacagtaaagctaccaaaagtgaaaagaagtggtgtaccaagtgcccttaacattggctagacaggactttcctactaatatggatggtctgaaaagccatgacatagatgtcattttgggcatgaactggttagtacagcaaaaagctaatctcaaccctgatctaagaaccatcgagttgagttatgaccaatagagagttgatgacttgattgccttaaccattttaggctatt

SEQ ID NO: 52036 - DNA, 365 bp, Zea mays
agcttgatctctggtattgattaataaccaaaaagattcgtgagtacaatcccgaatggctaagtgcatacctatctaaggcccctattcgatgccatgtttggtggcacattaatcacgctcaatgagtactacacctcttagacaagatttacattctctctgagtatcttgctcgatggtcatcgaacacgcctagagagtactgagtactaagtgtctaaagctaattctgcaagctctgtaagtgacgtatccagtgcacaccagatatgacggtgttgccctccacataaagggaccatccctatttgatgcccccatttgatgtgcacgagcaagattggtgctaccgtatcaccgcc

SEQ ID NO: 52037 - DNA, 424 bp, Zea mays
  unsure (1)..(424): unsure at all n locations
ttgatgcgggtgcttggccgttcttcattttattatgaagtatcccggctgaggacaagattggagggacatcatttgtgggcctttcttctcctctggcactcaagagcttctgaatggcatggcacgaagacatattgaacactagaagaaagactcccgacgaaggggatccctctcctcccacatagctcatctatgtcgaacnacatggatggatctaaggtcaacatgttgtctaaaagctgaacacgctggtctgcccttggatctttcccccagaacacctctgcatcgggtatctatgtatgcagatgaagaggcactttccttacaccctacggcagaggataaagctataactctagatatcttacatctatttggggaagcttcacgtctccgcaacaacgaacaaaaggct

SEQ ID NO: 52038 - DNA, 413 bp, Zea mays
agcttgcaccttcatctattactgattcatccaaagatgcttctagtaagtgtacctataacacttagagatataccagagaacaactattatcttggtggtttgagaaccttcggaagaagaaggcccctaacactcctcctttccttctcccctaagcaagcccaattaaactctaaccctagcacttgtctataaatcgaagtgctccccttgcaattggagtcatttttctagtcccactcctgaaaccccaagctgccaccggccacttcctcctccccccatgcgtagcttctctcagtcgttgttccttttcgtctgctagctctgtggtctaaaagcatcgccattccctacctcttctctggtctaggtgcccaccatggacatcagcgctgccaggactcgac

SEQ ID NO: 52039 - DNA, 455 bp, Zea mays
  unsure (1)..(455): unsure at all n locations
ntaacttattattcattnttaaagctaaagtggagaaggtgtgcccagttagtgtntttgagattgaccatcatatggtggataataaagtgagaggtaagattataaacaaagaatgttttataagggtgttcgtttcattcaaagcatgttggagtgggttattagctggttgcaggccttatctatcagtggatgcaacaactctttatgggaggtttataggcaagttagtagctgcttgtgccattgatgcacataattggctcttttccagtggcttatggtgtcctcgaggcagagtcaacaaaaagttggacatatttcttacagaatttgtgtcagattatagagtttccacatgtattgactatacacacagatgcttgcaagggtttataaactgcagtggattacgtgttccctatagtagagcatanggaatgtatgaggca

SEQ ID NO: 52040 - DNA, 307 bp, Zea mays
gacggatggcccatgaatatataaataaaagtgaaaaagatactcattaagctagagaagcaacaaagggcgctgaaaaaactgcagaacttgagaggcggataggtactgactaattccttttgactttatgcggtaattttgcaacttcggacttaatttatgtttatattgcagccgaactatcttctccccggagcccttcgagtcactggctgaccccgaagcaaaaaaggaagaaaaaattactaagatggccgaagctattatggacgaagctgctactcaactactgaatgaagctgcg

SEQ ID NO: 52041 - DNA, 432 bp, Zea mays
cacatgtgctaagctgctatgctctctccagcccatgctagtctgtagctattaagcatgcatctagaccggcctcttcttttgcaaaatcaactaaataaagtttgccgtctaatacacccttaagagctagtgaaccatcacttcttctaaagacagacacatctacattggtaaatagacagatataccccatgttgcataattgactaacagatagcgaattataaccaagagactctactaaaaacacattagagatagagtgctcattagaaattgcaattttacctaacccttttaccttgccttgattcccatcaccgaatacaattgaatcttgggaatccttattcttgacgtaggaggtgaacatcttcttctcccccgcatatgtgttgtgcatccgctgtcgataatccagcttgaacc

SEQ ID NO: 52042 - DNA, 393 bp, Zea mays
agcttggtgaaacaaagagacataaggggtttgatatggtttatcttcttctcaaactggtattgttgttgccggtggcgacagcaattgttgaaaggacattttctgcactgagtttggggaagcctaaattaaaaaacaagaagtgtgatagtcttttggatgattgtcttgttacatacatcgagagagatattttcttcttagtgaatgaagaagatattattgaaacttttttggcgttgaggaagcgcatgccacataagtagtattattgcaatctttatgtttaatgtatgcaattttcatgcttatttgttgagggtcaaactttatatctatatatcaaattgtttaccaaatttactatgatattatatgtacattatatag

SEQ ID NO: 52043 - DNA, 439 bp, Zea mays
  unsure (1)..(439): unsure at all n locations
tagaagcactntcgtntcttatgccacccgacatgatctttttctctcacggttaagagttagaacgaggattatgcttcgatacccatcgaaagttgcctagaggggggtgaatatgcaagttaataacttttcaacacaaactacaagcacactgggtaaaactgaattgatcttgaaattcacccacttaactttggaaatgagatgttctaaatgatccacacggctcaaagtagtagatctgagaatggcacttctcaaaatccacacaccaaaaagatataaataatctttcatggaatggtgagagaacgaagaacacaaacaaacacaatgagctagaacacaagagacacaagagttatcccgaggttcggtcacaccaccaaggtgccctacttcctcgttgaggcgctcacaaagagccgggtctctt

SEQ ID NO: 52044 - DNA, 381 bp, Zea mays
acattaagcatctccatgtgtcttaaatccatgccatatcttgtcatatagagctcaacttatacacaaacaacttcaacagtgctctattttataattttttctacaaaaaatatagcacatcataaattgacctaaatatactacacccctaggttagcgctctatatttagtctttacatcattcttaacctttttattactaataatataatttagtttctaaaatacataatttaaagattaaccgttggagccgaatttatttttagagccttaaacactttaagtatataatatgttgagtcaccttatcaaagatgctctatgatagtaaaatatactctacttcgtgtgcctggccggatgcatgctgcttg

SEQ ID NO: 52045 - DNA, 449 bp, Zea mays
aaaactcgagctttacatacaaaacataaagacactatctccttctgctctatgctttacatagcaagacataaaagactacttcttctttctggccaagccttcacatagcctaacatataagactacgttttccttctgccgaagcttttacatagcaaaacataaaagactgggactcttatacacaacgatcataaagaccacttttcgaacctttctttacataacgaatcattacaaaccatttatacgaaacttttctctgtgccgaagcaaccatttgggaacacaaatgctatgaatgaatgcttatgcatgcaaatgccatgatgaaatgtgcaaatgaatgtccgaagcgtatgtccgaagccacactcatccatcattgtcttaggagcgaacacacgtcagctctgcaattccttaagaacgactttggagcatct

SEQ ID NO: 52046 - DNA, 305 bp, Zea mays
  unsure (1)..(305): unsure at all n locations
tttaagccccnaggcattcgaaatagcaatagtgccacagggggtatgaagcagtcttcgctcatttgagagcacctaagggggtgnaatagtgatcctgtaaaaacttgaaacttaatgccacaaaacttgattaggagttaacacaataaagccaagtggctatagaggagttcttgtcaaacacaataaccacaagaaaatcaacacagagaggcacagtggtttatcccgtggttcggccaagtccaacactttcctactccacttgtggagtcccaacggacgaggttgcactcaacccc

SEQ ID NO: 52047 - DNA, 388 bp, Zea mays
tgatcatgttttcatgggccttcatcccttttcttcttttctacttaaatagcctaattaagggtggtattaaggtttcaacattttttccttttttggaaaccttaaattgtttaaacatgattctctagatataaacttagtggaccttttattcttaagttgatatgtggcttcaggctcaatttggcttacatgaaatgatgattcttgagttagcactgagaaaaaccctatgtgacactggggtgtcacagccttccccccttaaaggaatctcatcccgagattcgggtcggagtcctcccacggtgaagcgaagggtgagacttacttgaagtgggtgccttatttattaaggcaactgctcttccaatgtcattctctt

SEQ ID NO: 52048 - DNA, 404 bp, Zea mays
agctcttgaacgcactaaacacatgccggtttttatggttaccggtaaacctagtacctgattgaagccgggcgcggactttattcctcatgtgacctgagactgggtctcccatgctagctatggtgggtacaagtgcggtcactgcacggtggcagccggggtcagtggagcattgtatgccaaggcggtgaggcctgtacgcgaatggggaatcgatggggacgggtgtcatgtgcacggtcggagtaccctgacatgccatgtgtttatgtttaccttgcaaggttaaaactcgattcgaatcgtctacttctcgcagctaatgagactgcttgaccccttgtactgcatcgagtaagaagtgaaatgaggttacatgagataacttattgattgaacta

SEQ ID NO: 52049 - DNA, 459 bp, Zea mays
tcgcacctctgaactaactcagctgcatcactctttcctgtttgccaatagaatcctgacctgaagaccttgccgactagtgttctggacgctgcatgtattccgcattgcccagcatggacctcctccagaagtcgctttccagaagatgacagaatgcacttcatgatgacgcctgatgcaccccttctatataatgttccccaatgagtgtgtattgagctgactgtctggcaatacgctcgaccgcatttctgtcattcggttcctcttcattctttatatacctaatgattggccttctccagtcattaaagtctgactctagttgattcacaatattacactcttctgcttgatccattgagatgctcggctgtagtatttcttgtaaaaaactccaggtgggacctgagttcgactggattctagcttggacaatacatacactgtcgtgtt

SEQ ID NO: 52050 - DNA, 384 bp, Zea mays
agcttggcattgtagaaggacaaatatttgatttttgtctaatttttctcatagcgcgatataacttctaaagctctttattcaattccagtaccagcatactatgcattgatactacgatcgctcactgtactggaaggtttagcactctatgctgaccctgattttaaggtgcttgctgcatcgtatccttactttgcgaaaaggctactcactgatcccaatccatacctcagagacgctttagttgagcttctattcaaggatggaagattcaggcaagtacctgctcatatgtatatattttagtcttttgacagatcaaagaaccactcacgacagcattgtctaacgttcacgtctctgcagatggaataggcttga

SEQ ID NO: 52051 - DNA, 221 bp, Zea mays
acttcgcagaaccccacaagaatctacaggcgtggaggacaaaggcattgccaagatctatacacgtgaaagtatcggctgataaaactatgaccttcaaaaatcactagagaatcaccacaggaatagatggagcctataataaccacaagagagtttgacaacaaggtgaatatccaggagattggctaaagaatttagatgtccacgactgaattgat

SEQ ID NO: 52052 - DNA, 354 bp, Zea mays
gccctcggacccgaccggccttcaccggaggccctagatcgacctcaccggacttcggtcttccgccgctgcgcgtggaccgagctatctagtgagtctccgcccaattccttgcgcttatgtcttctctggcaccccgtgaagctctctgacccatccaattgccctatctcgccgtgaccaggccggactcctcgccgccgacgagcattcctgcctgcgcgcgtggaccgaccaacttcggccatcttcgacggtgacccgcacaccgttgtgatccccgagacctcccctacatcctcaaccacttcaccggagccatctcgccgccggtaagcccctccgcccttttac

SEQ ID NO: 52053 - DNA, 447 bp, Zea mays
  unsure (1)..(447): unsure at all n locations
cccttcttggtggtatcttcgtcaaggcccggatcatataggttgaaagacttagatggtaatgacatcccaaggtcttggaatgcggatgagcttcggagatactatgtgtaaaccatgtaattttattcttttttcctatggcacccttttcctttcaatagtaaaatgagagacgttctcgaatgctatgagttaagaacaaggcaacataaaatgttaatggttaatgaccttcgtccttcgaagcattatctcctttaggatataatgatcttcagacgaaggtcatgaaggacataccttcatcatcgttgnttatgttattgaaagaagaagcatatgaaatatgagagacaacatgaataatcatatgacattattcatgtattcgtatatttctattatgtcatcataaataaacatgaagaatattgaattacattt

SEQ ID NO: 52054 - DNA, 406 bp, Zea mays
  unsure (1)..(406): unsure at all n locations
ccggacctaagcactgagctgcgctgattttattaccataaaacctctaggtccctgaataaatttcttagaagagtagcgcccactatgtgagaagctagtttttaatttcttnacgcataccaaggatttttcagaacacttttcctttgattcgcaaagttcttcaacatttttctctagcttattcttccaatattcactaatctcttggttagcctgtgcgagcgcgtagttctcattagcttcggccagttgtcttccaaggttttcaanctcggctttttgggcttcggcctgagcattgtacttagattcatattcttttattttactcaccaatgaaatcaaatttgtgtttctctagaccttcgtttttatttcattaccttgagcgaagttgctg

SEQ ID NO: 52055 - DNA, 309 bp, Zea mays
gcgattgtgatgggcacaccatgcaagcgaacaagttcacgaaagagcaaaggagccatatgagtagcatacggcagtttatgacatggtatgaaatgtgccctcttacaaaatctatcaacaaccacaggcgcaatatcaccgtccttgctaagcctaggcaatcccagcacaaaagtcatagaaatatcttcccaaggagcactatgaacgggtagaggcaaatactaaccgtgaggatttaaccgtgactgcgccttttgacatgtcgtgcaacgagcaaccaatctcaccacatctcttgtcatc

SEQ ID NO: 52056 - DNA, 348 bp, Zea mays
  unsure (1)..(348): unsure at all n locations
tattttggctaagctttctcaacatttcttggtgctcattatatatacttcaatttttataattggctcaagtcataactttaaacttttcatcccctttnttctattttcttgaattttgctcatggggctcacttagggtttttaatttgggttgcacattctacccttttcaaggactcaattgttttgatcatgatacttttaagtatatacttggtgaattctttattacttaagttattntgatgctcatgcttactttggttcacataaaataatggttcttggtttggcatttgagataaaccctagtgacatggggtgtcacagccttcccccttaaag

SEQ ID NO: 52057 - DNA, 468 bp, Zea mays
  unsure (1)..(468): unsure at all n locations
tattacgggccttgtctataatatgcatttctgaatgactgtctgtaacctnctcttgtgagaatattctggggatagtccgggatacttgagggcataaacatccttgccacaggacggtggccactcgggtgcctataaatacccccgtacaatgcccttgagaggccaaattaacagagctattgcgcattccccgttgaactttgcaaacactctctccactttcccgttgtatctacttgcccaggaaagcaagtgccaacatcgcacccttcatatatacatatgtgtaagatgtatataatcaagcactttttgtgctctcccctagaccgatgtttgttcggtcatgatctcacatctcaccttacctagagcgtcgatccattcaatactgaatggcctcaaaaacaacattacacatgtttgcaattccccccgattgttggttagtgtgttaatcta

SEQ ID NO: 52058 - DNA, 414 bp, Zea mays
  unsure (1)..(414): unsure at all n locations
agcttctaaagggagagcacattttaggactaacatatgttcattttgagaaagacaggatttgtagcgcatgccaagcaggaaagcaagttgtgactcatcatccacacaagaacatcatgactagtgacaggccactggagctcctacacatggacctattcggcccgatcgcttacataagcatcagcgggagtaagtactgtctagttattggggatgattattctcgcttcacttgggtgttctttntgcaggaaaaatctcatacccaagagaccttaaagggattcttgagacgggctcaaaatgagttcagcttaaggatcaagaaaataagaagcgacaacgggacggagttcaagaactctcatattgaaggcttccttgaggaggagggcatcaagcatgagt

SEQ ID NO: 52059 - DNA, 453 bp, Zea mays
tgaaggaccacttcggcagaagagcttccgaacgtgaagacttgtccggtccacggagtcgctttatccgaacgcgagttacttatcgcagaaggtgatgagtgaggtatccgtatcccggaggcgtagaagtccctcggctcggtcagccttggctgcttacgtgtactccgtcgttcccaggatccgctcttcgaagtagtcaaaaagcacgaaagaaattctgctaaaaagagatcttttttcgagggaaaaattcgacgcagagggggtctccccccttttagcccccgagggagggtcgggctttgccgaggcgatgccgaccctttcttgatgactaaacttttgcgtgggtgcgaggtatatgaacaacttgtaaacatcttaatggtagaagcgacctagttgtctgatggtccaagccgtgtcgtagacctcgccttgattgtg

SEQ ID NO: 52060 - DNA, 286 bp, Zea mays
cttcagttgcgccaagctcactcttagccactcatcttatactcgagcttctgacaaggatcattccttgtatctggaaatgctagctcaaaggaggatttgctcgtcgacggacaacaagcattagcacatggtaatatagtctcaatttgaatacatgtgcatgagcgagggcgctgggaattctaaagttttctatcacaacctcatgagcaaatctcaacatgatatgatcatccataatattcttatgagaacatagaagcagatcattttttcctgacaa

SEQ ID NO: 52061 - DNA, 425 bp, Zea mays
acacaataaaactcagcttggcacgaggcaggaatggggcaccaccttctgtttcgttcatgtcgcattagcggagacagaggaggaagctctgctcctagctcacgccaacatataactatcttcagtagtaccggccgcaacaagactcctacaccttgatgagttgagagcacgctctttcctctgcgacagctccaacaacgacatgatcgaatgatggtgcctcgatgaacaccccattgttacctagggttcttctcagcgctatctcacgatcattatcacatgtgaatccgattgagcaacagacaccaaaaacttatgagcaaaaactcaactaagtctttgatcttaaagatcatgccttaaatatatcatgcacctcatagtgagagaaatgcccaaaccctataataacccta

SEQ ID NO: 52062 - DNA, 403 bp, Zea mays
  unsure (1)..(403): unsure at all n locations
agcttcaggttatgcctagntctatcacaagttatgtgcttcaatgtttaatataaatattcttgaatctcatctctgcatgtaaatacctgagcaatagcgtcatgcaaagtcatgtctgaaattctgctctttggctcgaaatcttgatgtgtatcaagatcagcagctattcgcgttgtagatgagttcgtgtttgcattgggatcaccaccatgtggtgatgaatagttcataaattgctggaatgctggttggtacataacctgctcttccgattaacaagcagacaaggattcactaaaaataaaatggaaacacaaactactgaggtgccaaatataaacactaaccgaacagtaaatacatcatgaccatgtacagtagtgtgattttcccacat

SEQ ID NO: 52063 - DNA, 429 bp, Zea mays
  unsure (1)..(429): unsure at all n locations
ngaagccatggtaagtagcatatgccaataatatactaattgtctctagcttagctacgggtgcataggtttcaacgaaatccaaacctttgacttgagagtatcccttggccacaagtcgggctctgttccttgtcaccacaccatgctcgtcttgcttattgcggaacacccatttggttcctacaatattttggttaggacgtggaaccaaatgccatacctcattcctagtgaagttgttgagctcctcttgcatcgccaccacccaatccgaatcttgaagtgcttcctctaccatgtgtggctcaatagagtaatgctcacaaaaatgtgcaacacgagatctagtggttacccccttatgaatgtcgccgaggatggtgtcgacgaggtgatctcgttgaattgcttggtggactcttgggt

SEQ ID NO: 52064 - DNA, 277 bp, Zea mays
  unsure (1)..(277): unsure at all n locations
ctgcagctgtgaggtatgatcatagaccttcctattctaagaaggaaactaaacaatatactgggctccgcacttgctacacgattaaacatatggagaaacaaaggactgatataaacacatggatacaagagaacttaacgtcgattaccatgtgacaataacaaaagttacactaggatgtttaataaaacagaattntgaacaacttgagatcaatgggcaaacctagataacttaaggtggtgcaaatgcaacatacataccatataaccca

SEQ ID NO: 52065 - DNA, 454 bp, Zea mays
  unsure (1)..(454): unsure at all n locations
ttgaatacctttgatcatatctcttttatatgctatgactaaagtgctctcaaggtatattcaaaccaagtcataagtatattgaaagggaattggagtcttcggcgaagacaaaggcttccactccgtaactcatacttcgccaccactccgaacaactctctcttctttgggggagaaatgagcatcaaggaaaaggacttcctccttgcgggagagagtaaaagctcaaacgcaaaaggatttcgtctttggtataatcttaactcacttatttatgaccaaaggggaagattgcacttcaagggctctaatgattccgtttttggcgattcatgccaaaaagggggagaaatgagcccaaagcaaaaggaccgcaccaccaccaccaaattcaaaaacttagtgctttccaaaaggctttatcaattggtatcctatngtgttcaaaaag

SEQ ID NO: 52066 - DNA, 383 bp, Zea mays
agctttaccaaatggacgtgaaaagagcctttctcaactgaccaatcaaggaagaggttatgttgagcaacctcccggctttgaagataatgagtaccctaaccatgtttataaactctctaatgcgctctatggacttaagcaagccccaagagcatggtatgaatgcctaagagattttcttatcactaatggcttcaaagacagaaaagccgatcctactttatttactaaaactcttgacaatgatttgtttgtatgccaaatttatgttgatgatattatatttgggtctaccaacgaatctacatgtgaggaatttagtaggatcatgacacataaattccagatgtcgatgatgggggagttgaagtatttttggg

SEQ ID NO: 52067 - DNA, 402 bp, Zea mays
  unsure (1)..(402): unsure at all n locations
nagcttatcaaatcggccctcaatggccggttattttanttctctgatatttctccaagcaacattatagagccgactcgggaaaccttgccggcggacgagcagctccagattgaggagcacaaggagcggatgatccacgatgcgaaagcaaagttcttggccaacttcaaagtggacaggaacaacaaggtcgttcgacattcggcgacggatccggctttgctccaacccacgccagatatccccaatgtaagtaataccaacgatctgcaatctcttagaaattatgtagaagatcagcgtgaacaaatgcagaacatcatacggggtatgccaagcgatcttaagagactagtacgtgcatttgataaatctaataccgcaaatatttcttcgcac

SEQ ID NO: 52068 - DNA, 414 bp, Zea mays
atcgagtcatttttatatgtttcatcagttgctctaacttctgatatctggaatggcgaagctaaagaggactacatccctgttgttgctcactctgtgaattccaattgggagctataaaataagttgattggtcttaagctcatagatgtgaaacattctggatataatatagcagaccgtgttaacatggctgctgatgagtatgggttatgtgataaaatatttgctattactcttgacaatgcttcctctaatcaaactgctatgcattatcttaaaccattgttctctggttatcttggaactctatctgatgttgatgaaaaagaattgtccttcattcttttgcatcaacagtgtgcatgtacatcattaatctatagtaagtcacgtctgaaagattaaacatta

SEQ ID NO: 52069 - DNA, 391 bp, Zea mays
  unsure (1)..(391): unsure at all n locations
acctgcagcatgcagacttgatntcttgcttgcacttttgttttatggtcagaataacttgngaatcagctgtgagaaccgcccttcttatcctcattgccttcaactttcgaagacccaacagcaaagcttcatattcagcaatattatttgtacaactaacatcaagtttcactgcttagcatgttctgactttggaaggtgcaattaaaacggcagctgcacctgccccgaaagttccccaagaaccatcgcagaatactgaccaagcttcggcatctttacttgcttcttcctcctgagcccctggcgtccagtcagcgatgaaatctgctagcgcctatgactgaatcgaagatctatgcacataatcaatgcagaattcattgag

SEQ ID NO: 52070 - DNA, 398 bp, Zea mays
actgtcgcatcagacgaagctccagtttaaagtgtacttcgctctaagaagaaacgtcagaaggagaaagttttagttcccaataattcagaattaaatggtcagagcgcgctctagcgctagagttgaacgtgaaggaggcgacactgtacgatcggagactgttcccatctccgaagcgatgccacgatccagacctggcgacctcggaaggaatccgtactgcctggacaaatcggactattgtcgaggcagaacaagtggctgccgaagcacatgaaggaattattgacgaagcatgacccgatgatgattaccatactggcgcgcgcagaaagcctagccacttggacttcggaaagtcgaccgtctataacgccgatctctccaagatggtg

SEQ ID NO: 52071 - DNA, 354 bp, Zea mays
gactctagcctatctaccggtgcataggtttcaccaaaatacaaaccttcgacttgtgaataccccttggccacgagacgagctttgttccttgtcaccacaccatgctcgtcttgcttgttgcggaagacccacttggttcctacaacattttggttaggacgtggaactaaatgccataccttgttcctagtgaaattgttgagctcctcttgcatcgccatcacccaatccgaatcttgaagagcttcctctaccctgtgtggctcaatagaggaaacaaaggagtaatgcttcacaaaatgtgcaacccgagatcgagtggttactcccttatgaatgtcgccacagatg

SEQ ID NO: 52072 - DNA, 402 bp, Zea mays
tactcagctctgagtgctccggcgtagatgaagatgagctgcttcgcttcttcttcaagaccttggtgagcctgacatctgcgactacggagtcgacgacgagcaggtatattcccgggctcggcacatgggccgggtggtacggccggtcgaaagagatgggcttgtccgaccagtctatgtagactggtgccgccaccttcaccgagcagacttcccggcgctcttgcttgcggcgccgagccgaggtattcgccgcatgccctccatagatcatgaagcagtcgcggacctctgggaacccccctgctgggtgatcttctatcttgacggcgtcagtgggccctgtcaccctcggcgggtggctctgtcctgtggaaatgacgccgaagcataacgcac

SEQ ID NO: 52073 - DNA, 412 bp, Zea mays
agcttataataagagaatggaggcaagaacaagaccatatgttatgatagaaggggagttatacaagcatggagtctgctctcctcttctcaagtgtctatccagaactgaaggtatagagctgatgaaggaaatacatgcaggattgtgtggatctcacattggatctagacctttgctggggaaggtcttcaaacaaggattttattggccgaaggcagcttctgatgcaaccgatctggttcaaaagtgcgaaaattgccaaaatgtgcaagagaccagaagcaaccttcgtcgttaacccaactaatatagccaacctggccattgcaaagatggggcatggatttgttaggtccacttccaccagcacaaggcaatttaagatatgttgtggtggctgtagaatatt

SEQ ID NO: 52074 - DNA, 472 bp, Zea mays
  unsure (1)..(472): unsure at all n locations
ntgtggatggataacgtgtcgctgcaatttaagcctagttagagcacatctacactntaccttgcattgcgaanaacatattcagttatatatttatttcttctacttccctctaggtccaccttaaggctcatgcgccatatttggtagaccaacattttttcatttttcctctgttgtatctagtttggggttagtacaaccaagccttactagaattgttttctcggccccacctgcttaacttggcattatgaaagaacatatttagtgatatatttcttccttctaaatctatgatgaaatttattactcactccgacttattataccatgccttgtagaaaaacatgtttgtcatatatttattttttctacatcaagacaccaaatttggaaaactctcatactaattaccttggtttcttcatgtttcttgtctctagttttgtgaccatgcgatcaaagcctc

SEQ ID NO: 52075 - DNA, 378 bp, Zea mays
  unsure (1)..(378): unsure at all n locations
cgcacccttgaactaactcggctgcattgtctcttctctgttcgccaatagaatcctgacctgaaaacctttccgactagtgttttggatgctgcatgaattccacattgccctgcatggacctcctccagaagttgcttcccagtggaccggagaacgcacttcatgaggatgcctgatgcgccccttctgtacaatatctccccaatgagtgtatagtgaaccgactgcctggcaatgcgctctgccgagttcttgtcgcctggttcttctcattcttatatacttaatgatcggctttctccagtctcagagtctganctcggttgatctatgatgttgcactctnctgtttgatccattgatatactccgctgc

SEQ ID NO: 52076 - DNA, 479 bp, Zea mays
  unsure (1)..(479): unsure at all n locations
gaaactcaagcttacacagtatcacatgtnccaatctttacaagtctgcaatctcggtctgtgataactcttttgcacaaagctgacggaagaaatagctcaactctgaaagcgctagccagacatgctcagggacatagccttgaaccattgcaggaagaatctgttcaatccatatgtggaagtcatgactcttcatctctaagactcgcagagtagataagttcaccccctactcatgttagctgcacaccaataagggaacatcaacatcttgatccactgaagtacttcctgatagaagacgcggcccgatctttcgtgagatacgataacttgattgagtggagatctcgacgttgatgatccaaggcttcgagcgaacggttcctcacaatcactacaccacggcttcgttggttatcacccatgacacacgaatgacctcaccacgaaggcttatcccggctagcgcaatc

SEQ ID NO: 52077 - DNA, 394 bp, Zea mays
  unsure (1)..(394): unsure at all n locations
agccttaagtgatttaaagttccatgtngaattattcttatgttcaacttcttcatttcttagcataatgtaatgtcagaagtcttcatcgtaagacaatggcaggaagccttgcgacttattgcatctgccactacattggccttgcctgggtgataatgaattttcaattcataatccttaatcaactcgagccatctgctttgcctcatattcagctctgactgggtaaagatgtacttcaaacttttatgatctgtatagatatgacagatatttcccagcagataatgacgccatattttcagggcatgaaccacagcagctatattccggtcatgagttggataatgttcctcatgccggcgcaactatcttgaggcgtatgctacaa

SEQ ID NO: 52078 - DNA, 451 bp, Zea mays
  unsure (1)..(451): unsure at all n locations
cactgatatctaagaaaatggctggcgtatggatgtccatganataatgaagaagagcgaatgagacattcatgacgctcgagaagcaacataagcagctgaaatagctacggaacttgaaagacagatgggtattacttcaaggttctaactttgttgtttacttttgtgagttcgaactaatttatatcttatactgcagctgaactatctcattcccaagagccattcgacccactggccgacccagagacaaaaaaggcaatagaaattattaatatggccgaagctattgtagatgaagttgtcaccaaattactaaccgaagttgcataaaaagtcctgaaggaagaagaatagctattcgtaaaaacattgctagaatattaatgtaacatttgctggactatgctcgtaatatactgtgctcatggggtttgaatagtatata

SEQ ID NO: 52079 - DNA, 261 bp, Zea mays
  unsure (1)..(261): unsure at all n locations
cttctttgcnaatcaactaagtaaagcttgccgctaatacacccttanaggctagtgaaccatcacatcttctanagacagacacatctacattngtaaacaaacagttatatcccatattgcataattgactaacagatagcanattatatccaagagactctactanaaacacattagagatagagtgctcatttgagattgcaattntacctaacccttttaccttgccttgattnccatcaccgaatattattgaat

SEQ ID NO: 52080 - DNA, 447 bp, Zea mays
  unsure (1)..(447): unsure at all n locations
tacggacacttaaatactcagctttntcagggatttctgtcataatatcccttgaggacataatgaacatgctcgattgctagctaagtcaacagcacaggggctgcccttaccttcggatgtgttcttcgaaacaataaaagcaccttctgtggaacttcttgaaagagacagcctcaatatatctcctgtttatagcgaagattggagaaccgagatcatctcttaccttcagggtaaattcctttcagatgacgaagcttataacaagcggatagaggcaagagctcgtccatatgtcataatagaaggggagttgtacaaacatggagtttgtgctccgctgctcaaatgtttatccagaaccgaaggtatagagttaatgaaagaaatacatgcaggcctgtgtggatctcacatcggatctatgccgttacttggaaaaat

SEQ ID NO: 52081 - DNA, 346 bp, Zea mays
agcttgcagtcgtggacagccgccagaatcctttttttctgttgttccctcgtcgctcagaagaggggtctgcgatgttcgccggggcaagcgcttgctaccagtgatccttctagaggaatttctgggagcgtcggcgtccaatttttcatcgggttcaaaatccactgaggagcatgagagcgcctggggcctgtgttcctgcctcacccccgaaggaaattcgtcttcctggatgttctgcattcactcctaatagggtagcaccacgttaattttggtttaatgcccggtgatggtggaattttatctcgcgggtgagcttcaccgcggggagggcctgcca

SEQ ID NO: 52082 - DNA, 253 bp, Zea mays
ctccgaaagagaagatgccgcatccaccgacacagtcctcgacttcgaagtcatgatacaatcaggactaggctgtaacgcgaagaggcattggcgaaggcgcacctaccgtccaggctgaatacgctgtcgcctacgaataaaacgttgccgaggaagaggatgactacaacactatgatcccatccaaacccgaccacttggactttgaaaaaactactgtgtctgaggatgatgtacccacgatgatgaa

SEQ ID NO: 52083 - DNA, 310 bp, Zea mays
gctgcatgctagcttattaatatcttcatcccacatgttctcttcggcggtgccatagccaacccatggtagtcttagcaactaagcaagcgtcaaggtcagctctatacaaacacactgagtatagctgaccctctaacactcccttaaacgcgattgaatcatcacttcttctaaagacagggacgcgcacgatcagcaatagacaagtgtatcccatactgcataattgagaaacggaaagccgattgtaaattactataatgaatcctaccagaaaaacattggaaatagaatggtgcggggatat

SEQ ID NO: 52084 - DNA, 461 bp, Zea mays
  unsure (1)..(461): unsure at all n locations
ntaccaaatggatgcgaaaagtgtcttcctcattgtgccttataaggacgaggtctatgctgagcaaactaccgactttgaagatagtgggtatcctaaccatgtgtataaactctctaaagcgctttatgggctcaagcaagccccaagagcatggtatgaatgcctaagagattttcttatcgctaatggcttcaagggtggataagccgaccctactctctntactaaaacaattgcaaaagatttgtctgtatgccaaatttatgatgatgatatcatatatgggtctactaacaaatctacttgtgaagagtttagtaggatcatgattcataaattcgagatgtctatgatgggggagttgaagtacatcttaggatttaagtgaagcaactccaagagggcaccttcatcagccaaacgaagtacattcaagacatactcaccatagtttggga

SEQ ID NO: 52085 - DNA, 449 bp, Zea mays
acacttaaaactcagcttctaagggagaacacgtgataggtctaactaatgttcaattctaaaagatagaccgtgtgcagctcgtcaagcagggaaacaagtgggaggctctcatcacaccaaaaatgtgatgacgacatcaagaccctcggagatgctgcatatggacctcttcagacccgtcgcctatctgagcatatgaggaagtaagtatgggttagttattgttgatgacttttcccgcttcacttgggtgttctttttgcaggaaaaatccgaaacccaagggaccctcaaacgcttcctcaggagagctcaaaatgagtttgagctcaaagtgaagaagataaggagcgacaacgggtccgagttcaagaaccttcaagtggaggagttccttgaagaggacgggatcaagcacgagttctccgctccctacacaccacaac

SEQ ID NO: 52086 - DNA, 249 bp, Zea mays
  unsure (1)..(249): unsure at all n locations
aatctaccaagtatagctgaccctctaacactaccttaaatgctgttgaatcatcacttcttctaaagacagtgacacctacatcagtgaatagacatgctgttcccatctgacataattgagatacggaaagcaaattgtgatctatagaatcatctacataaacattggaaatggaatggtcangagatatagcaattttacccacacctttgaccaaaccttgatgtncatcaccgaatatgatcg

SEQ ID NO: 52087 - DNA, 227 bp, Zea mays
acacatgagatcacaagacaacccgaatggcaccctggtctggcgcaccagactgtccagagtgccaccggacagtgtccggtgcaccaagggacttaaggctgaacacttcaccctctgtaatattcaaggcgcaacgcttgattcaccggactgtccggagtgacagctgagcaactactacttcgtgcgcaacggcagacttgaacgcatcagatgcgcgcctg

SEQ ID NO: 52088 - DNA, 383 bp, Zea mays
agctttaaggtttgctgcaacacttatgggttttatatcttttctatgctagctacatcattcaggatctggccaaattggtttgactcgattcgggtaaaccaaaccgaagttatgaatttttctagtccagtctggatttaattagaatatttaaaaaggtttcctggaaatccactttgcaccgaagaccctgggttctttctaaactaatccttttagttatacccctgcgctactattctcctgagtcgctgacagcgcacaaaatcccctggccttttcttcttctcccccgagtccctcccttatgtaaacagtaacccgaaaaggaaaaggcatcgtggcttaccggcgcgaaagagtccgggaggggcgtgttg

SEQ ID NO: 52089 - DNA, 407 bp, Zea mays
tgcaagcttatgcgatatgtacccatattcatattttgtttaataatcagatcgtcgtccaatgcagtgtcgtttactgcatcagatcgatactgcatctgcagtgtgcgttttactcttttttttggtagatcgtctgatggccattcttttgtgcgattttgtaataaaaaatatatgacactttgcattcgcaagacacaaacgtgggccgcaagactggctttatcagcttatgtatctcactatttgcaaccgggaacacttgtgaacgcataagttattgtttagtgatgcttatctaagaattgtacgagataaattgaaccagagaaatgtaccagagaagctctatacgatccttgatgcattgttggtccaatgaaacgtcaacaacaaaaagagat

SEQ ID NO: 52090 - DNA, 389 bp, Zea mays
gaggctgacaggcagccaggcccggtctcaagcaccatatgatactccgcttcgcccgacccagggctcggactcgggctaagccccggaagacggcgaactccgctccgcccgacctagggctcggactggggctcagcctcggaagacggcgaactccgctccgcccgacccagggctcggactcgggctcagtcccggaagacggcgaactccgctccgcccgacccagggctcggactcgggctcagccccggaagacgacgaactccgctccgcccgacccatggctcggactcagccctgtgcttcgccgacagtctccgcctcgcccgacccaggggctcggactcgacctcgacctcggaagacagactcgacctcgaatc

SEQ ID NO: 52091 - DNA, 322 bp, Zea mays
atgcaacttggaccatataaagaacctcccgtttttttgttaaaagactatcataaaatcatgagtaaaagtttttcatgttagggccaataaaaactgattgacgggtctataggccatcttaataatataagtaaattgttgcatacggccactgaggaaggttgttataacatataacagtccagcgttgactgtgaagggaaatgcacccaacttgaaagttggaaggatctcgttagcaagctttttgggtgtagaaaggccatttacagtcttataaaggctcacttataacacgaaagtactaatgatatgccca

SEQ ID NO: 52092 - DNA, 464 bp, Zea mays
tacgcgacctataaaactcagcttccatctttgaacaactcgctgcatcgtcttctccgttggtcaatagaatcctgacctgaagaccttcccgactagtgttctggatgctgcatgtactccacactgccctgcatggacttcctccagaagttgctttccggtggacgggagaacgcacttcatgaggacgcctgacgcgcccctcttgttcaatatctccccaatgagtgtatagtgagctgattgtctggcaatgtgctctgccgagttcttgtcatctggatcttcttcattccttatatacttaataatcggccgtctctagtcatcagagtctgactccggttgatctatgatggtgcattcttctgtttgatccattgagatactcggctggagaatttcttgcacgaagaccaccggcgggacctgagttcgaccgatccgagcttggatagaca

SEQ ID NO: 52093 - DNA, 397 bp, Zea mays
  unsure (1)..(397): unsure at all n locations
agcttcagcattattttcaagcataccacataattgttccttcgtcatagcctctgaaggacataatgaggaacatagaagctactggaagaattggaaaatgggctgcagagcttaatgaatttgctattgactatgtgcatagatctccaattcagtcccaggcgttagcagacttcatcgctgattggacgctatgggctcaagaagaagaaataaacaaagacgccgaagcttggatagtgttctgcgatggttcttggggaaccttcggtgcaggagcggctgctatcctagttgcgccttcgnaagtcanaacatgttatgcaccaaggcttgactttagttgcacaaatatattggtggataccaaacactcttgttgggctttcgaagt

SEQ ID NO: 52094 - DNA, 425 bp, Zea mays
ccataaaactagctcacaagaccatggcatgaaggaaactaaatgattgtatcttttgacgaaggtgaagctccagatgcatgatctctaagatgccattgagattggtggcatcaacttgcaagaggagggactggtgtttgaaacctcttctaacgtaatgcttatggctggggccactactcttaagctagctatggacgagagattgatgtgggagatggacgcggccaaatacctttcctatcttgctgccctcctccctgaggactatagtttttggagtggctctgagtcctagatgatctttttttcagttctctatgtttttggtctccataaggagtcccctgtattgggtctgacctctttcaaacctttgtttccttccttcttaatataatgagacgcagctctcctgcgtg

SEQ ID NO: 52095 - DNA, 410 bp, Zea mays
catgcaagcttctctctcctgagtttcaaccttccatagaacagttgattcgctacctccctgctagtcgacagattttgatgttttcagcgacattccctgtgactgttaaggagtttaaggacaaatatctgcctaaaccttatgtgattaaccttatggacgaacttacactgaagggaattacacagttctatgcttttgtggaagaaagacagaaagttcactgtctcaacactctcttttccaaggttttgctgatggacacctctatcatttcatgatttatttgactaggcatcttgcttcccacctaagtcataacgctcaagtcattcaattgttgattgttttggtacagcttcaaatcaaccagtcaataatattttgtaactctgtaaatcgtgttg

SEQ ID NO: 52096 - DNA, 488 bp, Zea mays
  unsure (1)..(488): unsure at all n locations
acactatgaatactaagcttctgaactgatacangtgaaggttcagaaggcctgtatagctgctgtaaatatgaagataagatggagcttattgtactgtatgcattaaaacaggttgcatattacctatgtttctttggtctgcatgccgcctatctgtatgtaggcaatttgactggaacctttgaaattattcctgagaggttaagacatcttcaacgctgcattggtgaagctcgactgatagctgagaagcaattacaggagtctcatccgtcattatctgtcatcgagacaatccttagatctaatacccaaatcgaccaaaagatccttatagtgtctgatagagctntctggttgccattgggccaaaagcttactgcaatgaagataacatctgttgagtttggaacataccattcaaccacttattcagatgcggtgattgagacaaattctaaaagatgtatgctgcaagaattatg

SEQ ID NO: 52097 - DNA, 88 bp, Zea mays
gcatacccgccggcagatagtcccgggcgagaaaataagcccaacagacttagcaatcagcgaggtaatccatcggaatatctaccta

SEQ ID NO: 52098 - DNA, 412 bp, Zea mays
  unsure (1)..(412): unsure at all n locations
agcttctaaagggagtnacacatttgggactaaccattgttcattttgagaaagacagggtttgtagcgcatgtcaagcagaaaagcaagttggtacccaccatccacacaagaacatcatgacaaccgacaggccgtttgagctactccacatggatttttttggctcgatcgcttacataagcatcgacgggagtaagtattgtcttgtaattgtggatgattattctcgcttcacttggatattctttntgcaggaaaaatcacaaaaccaagagaccttaaagggattcttgagacgatctcaaaatgagttcagattgagaatcaagaagataagaagcgataatgggacggagttcaagaactcacaaatagaaggctttcttgaggaagagggcatcaagcatga

SEQ ID NO: 52099 - DNA, 444 bp, Zea mays
tgatccgaaatggatgcatggaatctatatatcatgtcagagaggcattaatgactagattcaactacaataatgataaaatattcttgatgtgaacccttaatatcttgtagcaaaataaaacattactttatctataacaataatagatcatttttcaacaacttaagcatgctaatctaaagaacaaaatttcaaatgagattattgtgaagatagttgttagctaaacttagacaacatatcggtaactacacctctaccacacaatttttgtttccttgcatgcataaaaacaccaccacacaaaactacttaccttctaattaaactttccatataatgggtgtacctacttctctttgaccattcctaaatataacttgcatgtgtacacattctttatgccttggctgtctcacttccattggagagcaaatggat

SEQ ID NO: 52100 - DNA, 406 bp, Zea mays
  unsure (1)..(406): unsure at all n locations
agcttatcttggcgtgctgccgcatttcggtttatgtaagtatctgtatcactgccgtcctgngatggccggggggcaacatcagttggtcggaggtgccagtttggagatgcgtcatgggcagaagaccgagtatctcgagatacccctcaaagatagcattaaaggttggcgtctggagtggtttatagttgataattatggaaattctctcccctcccggtcaggaagacagccagacgttcgtactcctagttggactgagtctcccacagatcaagaagtagccgaggcaggcgtgttgcttactgaagtcggattactaaaagagagaggtctgactgccgaagctgtggtcacagatcttgttttcaagaacattcagccgctgaaagacagggcctat

SEQ ID NO: 52101 - DNA, 464 bp, Zea mays
tcccctgcatgccaataccatgcagatcgcggatgtcatggtacattaagattgctctagcaactccaagtattacatccattatatttctaggcccacatgtcggggctcagcacccttgtacgcgccccccttgagctataaaaggggaggcatgcaacgttacagggggacggaaaaaaaaggaaaaacttaaacttagacccagctcaagctcacaagttcatacgagctctcaaggtcaatacatcacacagtggagtagggtattacgcttcggcggcccgaaccactctaaacccttgtgtgttcttgtgttcggtcatctcttagcaagacaagcaaaacgcttaagccccctcctcatcttagtatttatggcgggtgcactccgccacccggccggagaaatccctcttcgacatttggcgcgccacgtaaggggctaggctttaagtttttgc

SEQ ID NO: 52102 - DNA, 427 bp, Zea mays
atccttaaacacctgcggcatgcaagcttctaaagggagaacacgtgatagggttgtctaatgtgctattctaataagatagaccttgtgcagcttgtcaagcaggtaaacaagtgggaggagcgcatcacagcaagaatgtgatgaccacttcaagacccttggagctactgcatatggacctcttcggacccgtcgcctatctgagcataagagggagtaagtatggtctagttattgttgatgactcttcccgcttcacttgggtgttctttttgcaggataagtctgaaacccaagggaccctcaagcgcttcctcaagagagctcacaatgagtttgagctcaacgtgaagaagataatgagcgacaacgggtccgagttcaagaaccttcaagtggaggagttcattgaggaggaagggat

SEQ ID NO: 52103 - DNA, 416 bp, Zea mays
  unsure (1)..(416): unsure at all n locations
ccctcaccatagacattatccgtatgtaccttcctctcatgttctcaaaatgacttgtgttgatggtctatcttctgaagattgaatgacttggccaccacggccgatcctcataatcctcatccccactttcctcattaatatctatcactgtcaccagtatcttcggacaaaccttccaatatctctttagtaattttctctgctgttgttgttgccatcgactcaacaaatccagcaatataaggatccacaaccttctcctcaaacagcttcgcctcttcagacagcttcatctccgtagcaaccttcttttccggagacattttttctcctaacatgatgaanacatgtcttttgatccgaagctcagagagcttgagaaacttatctgtgctattgaacaagagctatat

SEQ ID NO: 52104 - DNA, 393 bp, Zea mays
  unsure (1)..(393): unsure at all n locations
agctntggcacaccttacctcatcagccatgttttagaaaaacgatgccacacaaagtgttttctgtccagcaccaccgccaccattccaaatgccaccaaaagaacatttcaggtgggtacatgcttcatccactttaagagatttcacaacatcattcttgcattttgaataacttgcaccagaaggtgaagctgaggcttcaaatgtctcagagccatatttatattgccctacacccacaaacccaatacaagtatgtgctctcagtataagatcaatagatgagttatgtcacaaagcacgcccacaaagcatggcatgnagaaagcttcaatgtaaatccaacgggctcatatatcttactgtgtatgtatttgttgtatatatgat

SEQ ID NO: 52105 - DNA, 458 bp, Zea mays
  unsure (1)..(458): unsure at all n locations
ctcagctgaagtgggaaggacctctatcaggtgacatctttgtttatacccagntccttcaagtgaaaggatatggacgacaacgacattcctagatcttggaatgcggatgaacttcggcggtaatatgtgtaacctgaaggaatcttttttattcttacctatggcaaccctttcctttccaaagggggaaaaacgtttttaatggggccatagcatgtaatttctcttttacttataccagctctacaagagcaatatcccctaaagatgtaaatgtaaaaactgggcatgcaccatccggtgcaaaagagaaaaaggataaacaggaaaaagctcgaaagacgtccctaataggatgcagagcacgacgaatctacacatagtcgctcctaaaggagcgcagcggaagttttctactcaaaagtcggtcttaatggaatgtatagcttacagcg

SEQ ID NO: 52106 - DNA, 315 bp, Zea mays
ctgagctgcagctgccgaactaaagaatcgtcctatggagcgcatcgtagttttctgctccaaagtcgttcctaagggaatgcagagctaaataccgccgaaagtaaaaggcgaacaagttccaaagacgttcctaagggaatgcagaacttacagcgaaaatggcttgtggatcctccccttggtgaagcatgaagcgaccgagctccccctcgatcgtttccgcttggtgatctttgtaacctcgtctacttcgtgcgcggtcttgagtacgtcccaaatttccttcgcactttttaacccttgcaccttatt

SEQ ID NO: 52107 - DNA, 451 bp, Zea mays
  unsure (1)..(451): unsure at all n locations
tgccgcttacgagcgggagctgatcagcttggntcatgtggtgtgccattggcggccctatctttagggtcgtcatttctgcgtccggactgaccactacagcttgaagtacctgctcgactagcgactatctacagtgccccagcaccagtggctgagcaagctcttcggcttcgacttcgaggttgagtatcgtctgggccgcctcaatgtcgccgcagacgcactgtctcgccgcgacgccgagctactccagccagccgcaagggagccgggggcagcagcagccctggccctctctatgcctttgttcgccttcctcgaagacatccgtcgtgccacagtgacatccccggacagcagccgcctatgccagcagctccaggacggtaccttgaccgccccatggcgcctggaggatggcctccttcttcatggctcgcgcgtctat

SEQ ID NO: 52108 - DNA, 298 bp, Zea mays
caacatgtgttattcggcgatgccaaagccagcccatgtaggtcttagcaaataaccacgagtcgagttcagctctaatcaaagaacaccaagtatagctgacccctcaacactcccttaaatgctattgaaacatcacttcttctaaagacagtaacacctatatccggaaaaagacaggcgtagcccattttacctaattgagaaaatgaaagcaaggtatagtctaaagaatctacaacaaaaacatcggaaatggaatgggcacgtgatatagcaattttacccaatcccttga

SEQ ID NO: 52109 - DNA, 435 bp, Zea mays
  unsure (1)..(435): unsure at all n locations
ntgataccaactgatagtagcctagaggggggtgtataatctacacctganatttttcactacaaacttcgagataggtcaaattaaagttgcactggtgcataccggttcagttgattttgtttaccactgaacaagtttgaacctgctcaacttagaataaataatcagttaaacaaatatgaccaagtactgaaagattttgctaatgacttgccctatagaaaatccactcaaatagatgaatatgaaccaaccaacaatttaaggcacttaacaagaacgcacaagaacacgcgatttaacccgaggttcggcaaccaccacaaaggtgtnctactcctcgttgaggagcccacaaagggccgggtcttttccaaccctaatgctccacaagccgaccaccaatgtcaaggcaatctttctcaaatttgc

SEQ ID NO: 52110 - DNA, 294 bp, Zea mays
agcttccttgatctcgtagggtccaatgtaactatgagccaacttgcccttgatcccaaatctctggacacccttggtgggtgataccttaagataaacatgatctcccacctcaaactgtagaggctttcgcctcttgtcatgatagctcttttgcctggcctgagcagcttctaagttcttcttgatgatcctgacctttgcctctgcttcaagtaccaaaatctggcccaaaaatttccctctctcctgcttgagaccaattcagcggggttctgcatcttctcccatata

SEQ ID NO: 52111 - DNA, 394 bp, Zea mays
gtgcttcagcttcggcgcccgctctgggtcaagctgccctgtgccaacctctcggaagacgaggcccggatcttggatgactgaaaggttctatgtaaaaaatgacctaccgactcaagagaatgtgaagagtgtcattatgccaccaatctggcaacgcttcggtcttctaaggccgaaagtccaaataggacgaagctgtcgaagaatgccaaagggccttcagagaagtctgctcgtttattgggacaacggacttggttcaagaacacattgccttcatggtatggccacttgcaaaatagtgggaaatgccgaatgaaaccatcaaagaattcgacgaaggcggactaaccagattaaaatacacattccaatatggcgacaaatttgt

SEQ ID NO: 52112 - DNA, 465 bp, Zea mays
  unsure (1)..(465): unsure at all n locations
tnccaattccactccaacctagacaatntggcaagcagattctacaatcaagaatagcttacagaaacaaaacgaaggtatataggtttcgcccatgttgagtcttcttaagctgcttttcgggtctttntctgattcgcttccatctccgacgcctcaatcagcatgcccatggcttgactatgcatccctagctttgaaagtgccactgcttgcatgtacagtgaggttgggcagtcgggatactgacgctgcgcttgcattgcatcgcggagggcggcgtccaggttgccgcacatgaggtggcagcaactgcgtcgaacgagaactgttggtgacgccttctttggccccacatccatacactgaaccaagaccaaaaaaaaacagattattagttacgtgtgttcgttgacttcgttcgttggttggttgcagaacatgaaatcaagtctttctttatca

SEQ ID NO: 52113 - DNA, 315 bp, Zea mays
tagctttacgccattcaaactattgtttggtgactttatcaataacttcggaagaagccaaagccggatcaataagaatagtagctctcgcagaaggcgaagctgaagctgattactctgtggaaaaagatgctatagaggggatcaggccttaagctgtggaaaacatcaacaaataccaagctgaaacaataaaatggcgtgatagaaaggttaggctaaagaacatcgaactatgacatttggtgcttcgaagagtagccaacccacagacgtatgcaaattacagctgaagtgggaaggaacctttttggt

SEQ ID NO: 52114 - DNA, 246 bp, Zea mays
atcttaccacgtttagtacatgccgacagataggacagatgactcccagttactgcaatctactcattgagacttataagatagtctgagaactgagacatgcgaagttctctcatgcctcctaggatgccaatccctatgtcaagcgaggcggccacgtccaccatcagagagagcacagtatatcttagagcaatggatgcacttaactgtaaccttatcttcttacccttacagtattgatga

SEQ ID NO: 52115 - DNA, 299 bp, Zea mays
tacctgcacacataggccatatgaataccctttatcatatctctcttatacgccatgacaatgtggtttccagcctatttctaaccaagtcattagtatattgaaagggaattggagtcttctgcgaagacaaaggcttccactccgtaactcatgctttcccatcactccgagcaactctatattccttggggagaaatgaccattcaaagaaaagattttctccttgggggagagaacaaaggctcaaaacaacaggaccggacttctctttggtataatcttaactatttattatg

SEQ ID NO: 52116 - DNA, 457 bp, Zea mays
  unsure (1)..(457): unsure at all n locations
cgtgaagattcctcatcccaacatgggctagtcggcggtgtcatatccaacccatgttagtcttagcaactaagcatgtgtcgagttcagctctatcaaaatctaccaagtatagctgaccctctaacactcccttaaatgctattgaatcatcacttcttctaaagacagcgacacctatatcagtaaaaagacagtngtagcccatttgacataattgagatactgaaagcaaattgtaatctaatgaatctacaagaaaaacattggaaatggaatggttaggggatatagctattttactcaaacctttgaccaaaccctgggttccatccccgaatgtgatagctcgttggggatcctcagttttctcataggaggagaacatctttttctcccctgtcatgtggtttgtgcacccgctgtcgataatccaacttgagcccgcggatgcata

SEQ ID NO: 52117 - DNA, 350 bp, Zea mays
  unsure (1)..(350): unsure at all n locations
gcttgtactanatgcttgctaccatgtatgcttatattgagcctacttaattaagctaatgatgctaaaaattgaaaagctaaaacttgattntagatacagctagtgcttttggcaaaccaaacccctcagccaaatatatgcattgtctagaggtagaggagtagattcctcacaccgtgtaagtctagctgagtattagtatactcagccttgcttgtggcataatttttgcaggtacgctgcaggatatggttaatggtgtgacttggcctaccaccccgccaccgggttatacggtcgagtgggatgctgctccgacagaagaggagcaagaagagtagtgggct

SEQ ID NO: 52118 - DNA, 421 bp, Zea mays
  unsure (1)..(421): unsure at all n locations
atacaatactnaaacttatagcctcgtatagatcacctaatcttagtaacgataatgctgccttggtttatgataatgacggttacatcttaaaccctgcaaattattccaaacacaaaattaagaagattcatgagaggaaacctcacaaagcatctcatcatgcatttatgaataaaaatgaagcttccagctctatgcataccacacatgtttaaatacctatacaaaaaaatcctgctgcatcaaatgagcataatgtatctttaagacttttgatgcttcatatggtttaactaactaatcatgcaaagtagttaccaattatgttgggggcaaacacaatatgtcaaagacttgtgattgggtacccaacgagatagtttcttacctcaaaggacccaatactgtttgtgtacct

SEQ ID NO: 52119 - DNA, 339 bp, Zea mays
  unsure (1)..(339): unsure at all n locations
agcttataataagagaatggaggcaagaacattatctatgttatgatagaaggggagttatacaagcatggagtctgctctcctcttctcaagtgtctatccagaactgaaggtatagagctgatgaaggaaatacatgcaggattgtgtggatctcacattggatctagacctttgctggggaaggtcttcagacaaggattttattggccgaaggcagcttcggatgcaaccgatctggttcaaaagtgcgaanattgccaaaatgtgcaagagaccagaagcaaccttcgtcgttaacccaataatatagccaacctggccttgcaaagaggggca

SEQ ID NO: 52120 - DNA, 464 bp, Zea mays
  unsure (1)..(464): unsure at all n locations
ttgtggatggataacgtgtcgctgcaatttaagcctagtttgagcacatctacactntaccgtgcattgcgaaagacatattcagntatatatttatttcttctacttccctctaagtccaccttatagctcatgcgccatatttggtagaccaacactttttcatttttcctctgttgtatctagtttggggttagtacaaccaagccttactagaattgttttctcggccccacctgcttaacttggcattatgaaagaacatatctagtgatatatttcttccttctaaatctatgatgaaatttattactcactccgacttattataccatgccttgtagaaaaacatgtttgtcatatatttaatttttctacatcaagacaccaaatttggaagactctcatactaaataccttggtttcttcatgtatcttgtctctaattttgtgaccatgcgatc

SEQ ID NO: 52121 - DNA, 398 bp, Zea mays
  unsure (1)..(398): unsure at all n locations
gcttcgggaacaccatactcctagccatctttcttatacatataattctntggtgtctgggaggcagtataagaagtcatcttcatctgtgccattgaatactaaggccccctttggatacttcaattctcaggcatagtgattagcctcaaaaatctcctcttcagataatctttttcccgaagcatgtcgtacaatataatcgaaggctctggaggatgcttcgggggcagcagtgtcagtttcttcaaccaaagttggctctgccatttttgtttctttggctcccaagggttttaccttggtgggctctgaaggcccagcttcagtttcagattgttgctttgaagcttcggcaacaaaggcttcagtatgcacttcagaagtttncacagttt

SEQ ID NO: 52122 - DNA, 396 bp, Zea mays
atacaacgcgagagaaaacagaaatagcatggcctgctggaccctataaatatatacaaacgaaaggctttaaggccgaacaatataaatacattgcacatggcggcaatcataatgcacaacccgccgcccttatgcacacagtagctgttcatatcatgtcagctgtcgccatcgatacaactcccttcagcattaaaataatcttctctggcgtcccacaagcaaatcatatccatggattttttagatattaataaacagttaagcgccctcaagattaatacatacagaggaacgggctggtctcgcgctatcagcattccacgcgcaccaacttgtcaaaagtcaacgacatgaaggatcggatcccataagctttattaactgcttgtc

SEQ ID NO: 52123 - DNA, 380 bp, Zea mays
agcttgtccgagctaagcctcgggcgagtcgatgtgtgctcccgttgcttgaggaggccatcgggcgaggcgtgaatccgcctgagtctactgttcctgcccgaggctgggctcgggcgacgcgagatcgtgtcccttgagtggacggagccttgacctgaattgcgcccatcaggcttctgcagcttgtgctgatggtgattaccaccctagtttaagagtcttgggggtacctctaattatggtctccgacaggctggctcggcacagtcagtatgccgacatgatgtgcatgagccagagttgtggtccgcgggcgtctgacctatgtcgggccgtcatatgcccatctatatgcgtgcaacggtttaatttgaaat

SEQ ID NO: 52124 - DNA, 355 bp, Zea mays
  unsure (1)..(355): unsure at all n locations
actnaagcttttaagggagaaacgtgataagtttatctaatgtgcaatttgtataatatattacctgtgcagcttgtcaagcaggcaaacaggtgggaagctctcatcacaccaaaaatgtgatgaccacatcatgacctttggagatgcttcacatggacctcttcggacccgtcgcctatctaaatataagaagaaataagtatggccttgttatatttgacgacttttcccgcttcacttgagtattcttattgcaagataaatctgatacacaagggaccctcaagcgcttcctaaggagagctcaaaaccagtttgagctcaaggtgaaatagataatgagccacaatgg

SEQ ID NO: 52125 - DNA, 273 bp, Zea mays
agctttgcaatttagccggaatatttatattcctttatagcaacaagtgattactaactactgtcatggctgactattggaagaatgacataatcttatatcacaatccgacctcttgaaaaaaagccctgttgagcaagctgggaagcaactatgatatagtcgtataaccatacccttggtgtatgtcttaacaacatttatccttgtaagagtatggactaacaacgagccttgcataagagattactataagtcacccctcttgaagca

SEQ ID NO: 52126 - DNA, 362 bp, Zea mays
cggaccctgatagccgaccgccgagacaccgacactcgacaaagaacccctttgaccagcgttacactcaccacagagaccaggatacacctctttaatttggtttagctagttcctccgcacgaaccagagacctagcacatatacgtccaccgcatagctcacaaagagcataagtcaaactagatatcgcacgattaccaacatgtgcgaacacaaacgtaagtatccaacactcgagaacataagtctcaaggatctcacaaagcattatcaacatcgaataaggtcagaccgggttatctcacaaagtgttaacaacactaacagagacaatatctcatctacatggggggctggat

SEQ ID NO: 52127 - DNA, 406 bp, Zea mays
agctcgtgcttgccttgtcccactctttttgtatatctggtggtaaccggagaagcaatcgaggagggcattacctcgcagcctgctgcgctatcgactatcttgtcgatccgcggtaaggggaagttatcctcgggacaagccttattgaggcttgtgatgtctatgcacatgcgccacttgccactcttcttttgcaccatgaccaccttggtgagccatgtaagataagcgattggctcgatgaatctggcttccaataggcgatgcacctcggccttggcggcttcagttttctcatcggacattttgtgcagtcgctgcttttttgggcgcaccgaacggtcgatgcttacgccgtgctagatgatggagcggctaaccccgaccagatccatggcggacc

SEQ ID NO: 52128 - DNA, 466 bp, Zea mays
tgtgtcagtgcttctacatagtatatgcgacgctcttaattattatgagggtatgaaacatatacgtgagaagatatggctggataagccaattgctttcgagaagacgatcaatgcattgtatggctcaacaaccgcatagttgtgccacataatgacaggatccgccagctaaattacatgaagcacattttaatcgctattttattcatcccaaaagcactaagatgtatcaagatctaaaacagcattattggtggacgaatatgaaaattgaaattgcacgctatgtatctagatgtgacacttgttgacccgtcatatccattcatattaatactgctgggccattgcaatcattatcgattccaacatggaaaagggaggatattaatatggactctattgtgggattaccccagaccgcccaaagggatgattgtatcttggttatcttaactactta

SEQ ID NO: 52129 - DNA, 289 bp, Zea mays
agtctagcggtgcggagcggagctccatgcttgagtgttgtcgtctccgccatccttgctgcctgtccctttctttttttgtgaaagccctacgcatcctcttttataaatacaaggggatggtccagctgtacatatgggggtgttgctatgtgctaaccgggcctgcggagaagtgcttgagccctgtaaaaacgtaactagcggtgcggacctgggtcctgctgacgtttctttgccttcgtagagagcttgaggactattgacattcatggacactgtggggaaa

SEQ ID NO: 52130 - DNA, 466 bp, Zea mays
  unsure (1)..(466): unsure at all n locations
tctctttgtcgtcatcaaccttgacatagaaccactctgacttcctacctgctgcccatttgctccggtagctgattacaagaaactttgtggntttccgatatgcgaaattatatgctaccaaaattgccatgcagtccatcttttctagccttcgtctgatagtgcagttcttgaactcggcagaaactgatcccatatggctccactgcttggctttggagtgcccagatataaacactaagcctaacgatagcattatgagtcagctggtgaaaatagataccgaacctcttcagtacctctgcaataatcccatgtatggggaatcttaatccatcctttataaagcttttgaaaataacaatttcacccttttccggctgtggggtagtctcttcttcaccgaagcgtaataacttcttctgattatcatataaaagcccgactttaccaatttggagag

SEQ ID NO: 52131 - DNA, 309 bp, Zea mays
gactcatgtgaggaatcatagttaaagcaccaagcccgagaatcatattgctgacttacaaaatacattggcgaatttcaggcaagctgggcttaaactaaatccagaacaatgcggttttggaagaaacaagggcaagttccttggctgcctggagtcaacgaagggaatcgaaggcgacccaaataagatcgatactatccttcggatggagccgccaaattcaaagaaaggagctcatcggttggcaggaaggctatcatcggtaaatacatatatatcaagatcagcagaaaggaatctaccatt

SEQ ID NO: 52132 - DNA, 426 bp, Zea mays
actgagctgcagcttccccactgaatagtaagtctttactctgcattgtaatagaacatgcttgtactaccatgactactgaagaaagtggcattagcttggctaactatgctaattgcttgatcatgctgttgtctcggtgattctctcacagacggacaatgtcgtactattcgcacgtacatttatttaatagtcagtcgtatctggtgattgtatttcacatcgctactcgattgcttcgctacctaatcatgtaatcactacaataccgagtgtgaagctcgatattataaggctgcgtaaaattatagatgaattgagccatggtcttctggtgctggaactaattgtgaagctgctagaataaagtagtgttcgataaagaacactcttatatgaaatgcatctgcgagctatattttg

SEQ ID NO: 52133 - DNA, 436 bp, Zea mays
acattcatccatctcggagacataccgatcagaaattattattttcttccgtcacgaacacaaaaagagcagttgacttgctatattactcgatagctcatactcttataagcgacacggccacatcataaccgtaccatatatgaagaaaaaaaaacccaatgttcctttataaagaggacggcagaaaggtgagaagttcacggaggccatgctccaaaagtcactgacgttctaatatgtaatcatcgcagtggtgaacataagagaacgccactactagacgagtagacggtttacaacatttcgcccaatcggtgatgctggaaccaagccagatcttcaggtgtactataacatgaggcgcacttcatgcgccctacagtgaagcacctaggagagggaagccaaagcctagttaattgcatcatcaaca

SEQ ID NO: 52134 - DNA, 399 bp, Zea mays
  unsure (1)..(399): unsure at all n locations
tgccagcttgcagacttgtcgccaccggncctgatttttctcttgttggangctcccgacaccactttgagtggtgaaactctaatgaaataacacgccttcatacccactgaaagtcctctataaaggggtggaataagcaaatcctcaatttatcaacctttagcacaactacccacccgaagtaaccgcttgaaaataaatgcgagcccaaacaagagggcaataccaatcccacaccaattaaagccgttgacagggggattgttttaacagaggctggtttttgaaacacactcccttagaggggaaaaaaaaccgttcttttaaacctttctcttttctaaacggtaccaaaacaggggagcttttttctttaaaaacggacacttacacccc

SEQ ID NO: 52135 - DNA, 400 bp, Zea mays
atgtagagactctgtcgcagtctggctattggatcttgatccgtccccctggaacgatgcatgcctcctcttttatagctaaagggggcatgtacaagaatgctgagccacgacatgtgggcccagaaacataacagaggcagtacttggagctactaatgttcgttgctggagcaatcttcttgcgccctgacattcgagatctgcgtatcatcggcgtgcaggggaagtttttcgtacaatggatgatgagatcagtgcaccactcagtacgggcatactgtttgacaacaactagacatgtgcgtcgtctgcaggatggtcctagcgttgcctgccagcagagtggacaggactcattatatgctgtgagggcacatcttctgcagcagggtggaca

SEQ ID NO: 52136 - DNA, 301 bp, Zea mays
  unsure (1)..(301): unsure at all n locations
gcttggatattattcatctattactactgttattgtcgcgataaataaaaagtcttcttcacgaaccatgaaaagacgtgaatgtgttttctcgtcaaagactcataaactgntcgtatgtaatatttcatgcttcgtaaagaattgtaccatagaaacaggtatactatattcagggtcacaagatattacacatgttacatttcagaaagttctactataaatacttaatcttctctcagaacaacttccgcagcttcgttcatgagccgattaacaacttcgtccatgatggcttcag

SEQ ID NO: 52137 - DNA, 266 bp, Zea mays
gaccatggtacaggaattcttggctttcaaggttttccctattgcaaaagagtgggaaatgccgaagctggacgcggaaaagaaaatatgtgaacttgtacgtttgccttactacttcaaatttaagaaatactttaaagctccttgccaacagtggctggataccattgaagtgatgtgcaatgagatacttggcaattattcccataaagaaaatcaactgatgactgcagccttcggcacccgtccataagaaggctgaatct

SEQ ID NO: 52138 - DNA, 378 bp, Zea mays
agcttctaaagggagaccacgtgatatgtttgactaacgtgcaattcgaaaaagatagaccttgtgcagcttgtcaagcaggtaaacaagtgggaggagcacatcacagcaagaatgtgatgaccacttcaagacccctggagctgctgcatatggacctcttcggacctgtcgcctatctgagcataggagggagtaagtatggtctagttattgttgatgacttttcccgcttcacttgggtgttctttttgcaggataagtctgaaacccaagggaccctcaagcgcttcctcaggagagctcaaaatgagtttgagctcaaggtgaagaagataagaagcgacaacgggtccgagttcaagaaccttcaagtgg

SEQ ID NO: 52139 - DNA, 462 bp, Zea mays
  unsure (1)..(462): unsure at all n locations
ctgtcacattcattcatcttggagtcattccgatcagaatgtcattttntcttncgccacgaacacaaaatgatcattcgtctcgttatattttttgtatagatcattctctcttaagcgttatggtcacttcataatcgtaccatttatgaagaaaaaaaaacccaatgttcctttttaaaagttaagggtaaaaggtgagaagtttacggatgccatgctccaaaagtcactgacgttctaatatgtaatcatcgcaatggtaaacataagagaacgccactactagacgagtagacgttttagaacatttcgctcaatcgttgttgctggaaccacaccagattttcatgtgtactataacatgatgcgcacttcatgcgctctacattgaaccaccaaggagagggaaacgaaagcctatttaattgtttcatcaacaaatagtatgatttatttggt

SEQ ID NO: 52140 - DNA, 346 bp, Zea mays
  unsure (1)..(346): unsure at all n locations
gctttgagagctcaaaaggaagcagatgacgagagctaccagatagctcttggaaatcttcgatcggaggttatcacattaaggaacgaagcttttgaaaaagataagataatgttttccttaatggacaagcttaagacttgtgaagccaagcttattgctcaagacgaagcccataaagccgaagtcgaacatttaaagaaaagacttgtagagatgaatganaattttgaagttgcaaaggctaaacaagaaataagtgaaatggaaagatctagagtgcaaaagaatgttgaagagcttcgagatgtcaaggaaagatgctacgaaacatctatagaatgcg

SEQ ID NO: 52141 - DNA, 467 bp, Zea mays
  unsure (1)..(467): unsure at all n locations
tgacccggaggccctcgtcaccggaatagcccaatcgcgctcaccgtagttcaagaacccgccggcgcacgtggaccgggtaagcccctgcaccgttttccaattctttgcgcgcatggcctctgtgtcaccccgtgaagctcctcgtgcaccctaattgaactataccgccgtggtttggccggagcaagagccgccgacgacccccgccgcctgtgctcgtggccagagtagctccgaccacctccgacaccgacccgcacaccgacgtgactgtcgcaacctcccggacgtcactgaccacctcgccggagctctactgccgccggtaagccccaccgccgtaaactatgccgcgggtactgtttcagccggtcagggagcgcgggttagatnttatttaagtccagggggctttgcgcaatgtcagtgacccaagccaatagtggaccaagggctgttctgtg

SEQ ID NO: 52142 - DNA, 314 bp, Zea mays
agaacacgtgataggtctaactatctgtctttcgaaaaagatagaccctgtgcagcttgtcaagcagtaaacagtgggaagctcgcatcatcccaaaaaatgtgatgaccacatcaagacccttggagatgcttcatatggacctcttcggacccgtcgcctatctaagcataggaggaagtaagtatggtcttgttatagttgatgatttttcccgcttcacttgggtattctttttgcaggataaatctgaaacccaaggaccctcaagcgcttcctcaggagagctcaaaatgagtttgagcctcaagtga

SEQ ID NO: 52143 - DNA, 475 bp, Zea mays
  unsure (1)..(475): unsure at all n locations
ctcaacttcttcctcataccaagaanatcataacctgtgactcatcattatgaatattccaactccgagatccttgcttcaacccataaatggacttatgaagtttctaaacctgaagcccattataactcctatatcaggtctaattcggatccttatctgacctcgtccaattcgaatccttatccaagttaaggtttcatccccctaactgtgcgaccctatagattcacattcacatagacatggcctgagtactcctactcggcccaatagttgacagcggcctctatcaagacatgttgatttttatgcacacgtaaatatcatatcagacgaaccatcacaacattatgtacatgctattccctttgtctcacgatatttggtctagctctaagatgacctctctttctagatgtctgaatacagaatccttctatgggttaacacttaaccctagcacgaccatgca

SEQ ID NO: 52144 - DNA, 406 bp, Zea mays
  unsure (1)..(406): unsure at all n locations
gcagcttggtgtcttttccgggactaaacttcttacaatgagactaccaccagaaagagacttgcacagaggtattagtctcaaagtcttagattatagagtaatctccccctgaaagngggcataccagatttgaatacttgtaggaaacatgcactttgattagatattcaaaagggcagatgatgggggccctcgtccttcgaaagtccccaaaaacgtaatttaacaatgtcttccaagcatgacttatggataggtaccttcggactcatgttaaaagcatacacgatgagaatagcatgaacgtgacaatgctgccattacttccaaactacgcgcaagggagcttcagctcaatcgcggaaaaaaagaaccgacttaaaggggaaaaggctattctatt

SEQ ID NO: 52145 - DNA, 414 bp, Zea mays
agcttgccttctcctcatagtaccacccacaatttcttgacgttgttgtggcagaaccacccgaattattccagcttaagtgcctaagtcacgcctcacgggccgtatcacacttaaatcggaataacccgtcagtccctcagatctagtctgatagaggcacttaaccaggatcaaattccacaatctcactcgaaggtgagtcacagtaagaaatacaataaaacaggaaacctcaatttaagtgctgaattattacatagattggagtttttgagtagcaaataaagttcacaaaatatagtgcaacggataatcgatgtcgtcggcaatgaggaaatgggcaaggcctagcccactactcctcgtgctcctctcctgccggagcaacatcccactcgaccgtgcaacccg

SEQ ID NO: 52146 - DNA, 360 bp, Zea mays
  unsure (1)..(360): unsure at all n locations
ctcctatgagaaaatcttcacagctgccgataagatgctcctcgaggaaatagggcacattgacccatctgttacccgaggcggtctgggcactaaacacgactcgatgcatggccacctggtttactcctttccgccttctatacggaacggaggccatgaccccacaagaaataaaacatgggtccccgcgaacagaaccgtcagccggacccgacgtggacgagccaactncaaaggatctcaatgaccgagatcgagtgttcgccctacatgccctaaacaaaaaccaagcccacacaaaggcatggcgccaccacgtagtcgttccgagggaattcatcaaacgggacctcgtac

SEQ ID NO: 52147 - DNA, 409 bp, Zea mays
agcttggcaggtgaacaaatccttccagatatttttgttcttattgcgaagatttgcacaccatccgcgcttgaacatgggcagaggcaacgggaacacgtgttcgactcgggctgacaccctcggttgatgcccgttcgcgcaccgcgcctcccagtgcacgcccgcacgcgctcgccggtccacgaccgtccgtgcaccgcgccgtgcctataaagccttcccaggcgcgccccactttgacctgactcaccctgaccggccagccacttttccttagctgcggcgagctcaattccgcccgccattgccgccagagtttcggtcaccggggtcagcccactccagccaccctcaagtctagccagtgcttctgctagctccgccagtagctcgtgagcttgccagc

SEQ ID NO: 52148 - DNA, 359 bp, Zea mays
agtgaaaaaatcagtacaaccatgcactatatactgtatgaaaccaaagcctgaatagagcagaagcaccctgctcttacactgcttcggaaatgggggttaaggcatagtatatgctcactgtgactatttgttgtttccgccccaaacagaaattgaggaaggcttcagtggaagagagcttccttcattcagagatcattggaagcagagaagacagtgagtgttaacagtgccataaatcaggaagtacgttcagtttcgttccacacatttcacagatgaaggctagacgatgcacttagggcccgttcgcttctttccgaacgacgggccgaaataattccctgtcgaaacta

SEQ ID NO: 52149 - DNA, 465 bp, Zea mays
  unsure (1)..(465): unsure at all n locations
cttcatacaaactttccaatagagaatatcgctaccatcatatatgggaggaggtccattcacgctggacatcattactctatcggntaagctaaactatgagcaacacgacttcaataccaactgataagatcacgatgcccaatagggggtgaatagggaatttctaaaattctcacaacagattaaaccctaaacatgagcccatcttctctcaatctactagcaaaaagtaaaagctatgaaatagagaacaaccctaagttattatggctaatactaacaaagaaaatacacataataaaatgttcaacgtatatgcggaaagtaaagtatggacaaaaagactcctccaatctttctaaaggtatcaaatagtcggcactctccactactcctcngtggatgacccgcgcaagggtatcactctcccttggtcctcgtgagaaccaagggctcactatg

SEQ ID NO: 52150 - DNA, 423 bp, Zea mays
acctgaggcatgcaagcttgcactgcaaaagacctttcaagtggttttattccacattcggtatcatttacatgtcttctccactctagaatagactgacattttcacatctcttgccctccatgttgccatatatgcatatgttgataactctttcatttgtatcattagaatatcctttatcatttgtctctgcatagattaagagggagttagtctatttcaatcttgtctcgttccctctcgcttgaaattattatgcttttccaaagtggagagtttttcgacaagggagtatgtctttatctgtcaggccttgtctggatactctagtattcaccccaatccacatgtattgaggtgtactgtgtgtaaattgaactatattacaccccaatcccactcaatacatgtggattgggg

SEQ ID NO: 52151 - DNA, 449 bp, Zea mays
ttaccttgattcccaaagtccatcacatccttgagaatctttttcctttgatggagaagacttgcgatagtacactccgtactctgcgttctcaaacccatgttgttgtatgtgatgaaactgctgaattctactgattctgttccaaggtggttcccatgtatgaggaggagaactaagacttacctggggaatgtgttttgccttcatgtaatgtaataataaggttaagcactcaatacccggatatgtaataatcaacactctctatatattacttatgaacgtgagatatcgtactataatcccttctgcttactccgatggtgcgtaactgctacgagacgggataagcgctcttgggcgatgtgatgaagatacagataaccggacctgtcgagtcattgtgcgcacctgcatgactatctgaggtcctcaagacaaggaca

SEQ ID NO: 52152 - DNA, 351 bp, Zea mays
caactttgttttgtgtctaatccataacttcggagaagccacgccggatcaataagaatagtacctcccgcctaaggcgaagctcgaactgattactctgtggaaaaagatgctatagaggggatcaggccttaagctgtggataacatcaacaaataccacgctgaaacaataaaatggcgcgatagacaggttaggcttaagaacattcaactacgacatatggtgctttgaagagtagccaacccacagacagtatgcaaattacagctgaagtgggaaggaccttttctggtaatatcttcgttaagaacccgttcctacagttgaacgatatggacgacaacgaca

SEQ ID NO: 52153 - DNA, 329 bp, Zea mays
ctctcaccccactactaacaggagatatattgttgacttgctctttcagaaacatcatctgaagtgcttttacttgttcaaataacacattcgacagtaatggccaccccctgtgccgcttgacttagctagcaaatacaacatgctcattttctcctctaggaatatttttgatcatataatccctcttatgaggcttcaatcctacagactgtgtctagatatttttcgagctttggatctttagccttacaactcttgtcaatatgaccggatacaacctgggaatcacgtttaaatatggccttctgattccattggttttactt

SEQ ID NO: 52154 - DNA, 364 bp, Zea mays
  unsure (1)..(364): unsure at all n locations
cattctcacatgtgcttagcggcgatgccataaccagcccatgccagtcttagccattaagcatgcatctagaccggccttttcttttgcaaaatcaactaaataaaggttgccgtctagtacacccttaaaagctagtgaaccatcacattttctaaagacagacacatctacatttgtaaataaacaattatatcccatctgacataattgactgacagatagcaaattatattcaagtctctcaactaagaatacgtttgatatagaatgctcattagaaaatgcaattttacctagcccttttaccttgccttgattnccatcaccgaatataattgaatcttgggaatccttattttga

SEQ ID NO: 52155 - DNA, 427 bp, Zea mays
  unsure (1)..(427): unsure at all n locations
attaactcctacgtaatttttagagttatttcttaatatttcgcatttggctntaccgaatttgtgggaacatgaattgtactggactgatgacaataaaccatattttacgtcttctgaaactagagctgaacagaagtatgatgatagtgtttataattgttatgtgatatatgcaatgatcaacgtgtatacaagtatctaactaaattatctgaagtgcgtgcgtgaacattagattgtctcagactgaagactcaacaagagtagcgtttcctttggaacaataattgacaggagatcgatggttcctagctagagatgtcaatgaggacccgatacccaccaaacccgtggggaattcccttattagggtacgagtatgtggacaaaaattgtccccactgggtacggatatgggacaaaa

SEQ ID NO: 52156 - DNA, 292 bp, Zea mays
  unsure (1)..(292): unsure at all n locations
aacgcgcacgatgggaggagatcagatnggaggcttcgcatggggacggatcgcaaccgctcgtacacgagtatggctntgggcagcgctgcgaggcgagggggtggctcgtcaagcggacgctgngaggagcagagtgctgagagagaggaagaagacagacagactnttcacctgcgcatgtggagctcggctacngcggcaactcgacggactggatgcgcgcacagagggngctcagcccgccatggccgcagcagcagtttggttgcaactgcgccgatccggagcg

SEQ ID NO: 52157 - DNA, 478 bp, Zea mays
  unsure (1)..(478): unsure at all n locations
aaaactanagctcaaaggaagccatttaagataacaaatgttcattttgagaaagacaggatctgtagcgcatgccacacaggaaagcaagttggtgctcatcatccacacaagaacatcatgacgactgacaggccgctggagctcctacacatggacctattcggtccgattgcttacataacccattggcgggagtaagtactgtctagttattgtggatgattattctcgcttcacttgggtattctatttgcaggaaaaatctcatactcaagagaccttataaggattcttgagacgagctcaaaatgagttcgggttaaggatcaagaaaattagaagcgacaacggaacggagttcaagaactcacaaatcgaaggctttcttgaggaggagggcatcaagcatgagttctcttctccctacacgccacaacaaaacggtgtagtggagaggaagaataaaactctattg

SEQ ID NO: 52158 - DNA, 188 bp, Zea mays
gaagtgaccagccaatgcatgttgacttgaatgtgacctgtgtgagcacacccccgagaaaggccccctcattatgtgaacagcttatacgatctactaaaaagatgaggaattaccattcaggcaaaagactaatgtcctgaaggttgacaaactgatatgcagtgacaaataaaaaagtgtgctct

SEQ ID NO: 52159 - DNA, 275 bp, Zea mays
aattacgcatgcatatataccggcatcctactttgcaaaatcaactacaataagtttgtcgtataatacacccttataagcttatgaaccatacttcttctaagacagaacatttactttgagaaaagcgatcatgtcccatattccacagctgactcacagacaataacttatatcccagcgactcaactaacaacacattacatatgaactgcccggataaaatggcactccttcctagttccttaaccctgtcttgatacccgtcgccaaat

SEQ ID NO: 52160 - DNA, 393 bp, Zea mays
  unsure (1)..(393): unsure at all n locations
agcttatgaagatatcttcatccaacgtgagctatttagcgatgccagagccagcccatattagtcctagcaattaagcaagtgtcgagttcaactctattaagatcaactaagtatagttgaccctctaacattcccttaaatgctactgaatcatcacttcttctaaagacagtaacacctatatccataaaaagacaattgtaacccattttgcataattgagaaactgaaagcaagttataatctaaagaatctacaagaaaaatattagaaatagaatggtcaggtgatatagcaattttaccaagtctttgaccaaacctgattntctccccgatgtgatagctattggggagctggattttctcatagagagaaatcctttttccc

SEQ ID NO: 52161 - DNA, 422 bp, Zea mays
  unsure (1)..(422): unsure at all n locations
ctctattccacccatataaagttgcagtgccgttggcacctcgacgccgtcctacttttggaaattctccagaatacaacagatggtcctctcactggcagtcaacgtagagtcagcatatgaacaaactgcttggactgctcatcattctgttccggaaatgttaagattcaccaattagtaatatcttagcccactcttggtgaacgtgctgatagcaatgacacatctacaataatctacgttgcacagaaccttttaacttnttctggccatacccaattccaagtctccttgactgaaagtcagtgcagctcgaacaggatactaacttctcggaaggtctttgatgcatggaaccatgctctcaaatcatattttttatcagcagcatcattaagagcgccagagacaatggaaac

SEQ ID NO: 52162 - DNA, 413 bp, Zea mays
agcttgcttacttggtaagatgaccaaggcgctcttttttttttaccggagaggacgctagatttattggaactcatacatactgatgtgtgcggaccaatgagtacgacagctaggggaggattccaatacttcataaccttcactgatgattttagtagatatgggtatgtctacttaatgaaacacaagtctgaatccttataaaagttcaaagagtttcagaatgaagtataaaatcagcgtggcaagaaaattaaagcactgcgatcagatcgtggtggtgaatatttgagtcatgagtttagcaatcatctaaagagttgtggaattgttccacagcttacgccgcctgtaacacctcagatgaatggcgtgtctgaacgacgtaatcggactctattggatatggg

SEQ ID NO: 52163 - DNA, 253 bp, Zea mays
aaggagaaaaggcatttaaggccacaagacccggagcgaacgcacacagagagaccaaaaacagagcacggggccaagacaaggcaagaaacgaagccggagagccacggatcccacaaaggctcagacggacgaaccaccgaacagaacaaaggacaccaagcaagcaagaaaaaaaccggccacagaaacacgaagaaacgggaagaggcagaccaagccagagggacgacaccccccccaagagcaagaa

SEQ ID NO: 52164 - DNA, 334 bp, Zea mays
aacacttcgcccataaaaaaagaaaattctcttttctcattgtctgtctgcaagataagtgataattgccataagtaacatgatatgttaaccaaaaggtatgctagcaccagatacgaccaaagaagatggtatgctatgaaagatattacgaagaagacattcacccggctcaggaaggaatcgctcccctagttttcaatcaaaatcacttactcgagcagtcgctgatggcgacgatgacatataagttctagtttacaacgaataatttaaaattaagcaacaatgataatatattctgtagccaataaatataaataagaatgttgag

SEQ ID NO: 52165 - DNA, 386 bp, Zea mays
attcccacgcctctgggatacagatacctcactcgttccttccgtgataagcaactctcgctcacactaacatccctattaccgacagagtccagatgctcggaacatgatgaaaaaagacgcatcttcgcgagcgcggcgagggcgtgttcatctggcctcggtggccgcagaaagcacacgctacaagatgatctgatcctgcaggctctggtcttcacgccgaaaggagtcgtatcaccctctggatcgacgacgttttcagcatagcccgacccagcctcgggcggtgccgcgtgccaagggctcctccgggaatacggcccgagcaagcggctcaaccggttacccctgtggcctcagtcaaccggcttccaagggcgcca

SEQ ID NO: 52166 - DNA, 346 bp, Zea mays
cagcatgcaagctcggaataatgtaacacaggttgtgttattgtgatatgtaataatcaaaatgctctcctccttagatgacctccaaaatctgtagacatgatggggctggaacttctcgcggtgaggaggaaactccaatcccacagactatacctcccacgctggcagaggctattgctgctttgattaatgcccctactgataatactcatattcttccagaaatggctggaattcaaattcatcaccagtgaggcagaggccaacaccaggcccacagagacaccacttacatggaatttttggaaactcgtccacctatcttcattaaattagaagaacc

SEQ ID NO: 52167 - DNA, 279 bp, Zea mays
  unsure (1)..(279): unsure at all n locations
gatgggtcccttatggttagttaacaaagatctangatccaaaaagtcctttgtgttagcgcttggtaaactcattacctttctagcacaagttgcaattttgggttgcctagttacatgagaattaattgacaagctaggagtggaatagttaccaatgggacaatccttgcattgatgtcccttctttcggcatatgtagcaaaggcgatcttcaagccttgaagatttcttccttccttgtttcttgcttgctacatggttagtaaataatttttt

SEQ ID NO: 52168 - DNA, 366 bp, Zea mays
tatgaagattcttcatcccaacatgggctagtcggcggtgttctagccaacccatgtagtcttagcaattaagcaagtgtcgagttcagctctatcagaatctaccaagtatagttgaccctctaacactcgcttaaatgctattgaatcatcacttcttctaaagacagtgacacctacatcagtaaaaagacagtggtagcccatttgacataattgagatacggaaagctaattgtattctaatgaatcaacaagaaatacattggaaatggaatgggcaggtgaaatagcattttacccaatcctttgaccataccttgattttcatcgcccagagtgatagctcgttgtggatcttggttt

SEQ ID NO: 52169 - DNA, 338 bp, Zea mays
cctgcagctgcaacctgtcatctcaaagtctattatatcttaatttaccaaggggacctctttaataacaagccttcgaagagtgatacattatttaataagcctactacattataccctccttacgtaagggcttcattgttactctatgttttaacatctcaaacaattgtaagtgttgcattgcatcccaacaaaatgactgattgttccaaaaggcatatgcttgttctcttttacttccaaatactatagtcctttcaaaataacatacataagaaacgggaaaaggccttcttacggtcctaatggctccaacataccttcacaataatttt

SEQ ID NO: 52170 - DNA, 213 bp, Zea mays
agaaagggtgccctctcggctgctcacacaacacataattaactatcgttatcagcgatctcctgatattaggataccctaaagaggttgcatatatcgacacccacattcacaacagtataataaccgggtaaaccatacacaataataaaatgagctgggctatacatctttcaatataaaaacccctgctggtgagcattggccagatgc

SEQ ID NO: 52171 - DNA, 300 bp, Zea mays
  unsure (1)..(300): unsure at all n locations
tggagatnccctcccccgccgacgccccgatcgtcgatcagtgagttaacccccgattggatacacgcaaaacaatgcggaggcgaaggtgaattaatgagccaagttntaccggctgaggtgctatggtgaggtcggcccgcggcacggagcggcgacacggcggtgcagagtcttccggtgagcaattcgcggtgccccagctctcttaacgtcgaattgagggttgcagaagcttccacatgcgctcacgaccctttttgtttctcttggaacccgctgtcgctagaaagcaggcac

SEQ ID NO: 52172 - DNA, 359 bp, Zea mays
aggtatgattttgttaccagcttgaggtggctccgaacttcgtcactagctttgctccgaccaccctttgtccatactaactctattaaatctatttgcaatactccgagccaaattgggaacatcatctaggtctgccggtgacaggctgaacttgggtctattaacaatcttgccgtgttcatagtctgacttcaaaaaagcaacggatgtgccccgagaagctgccacggcacagaagtcgctatgcccagctataacttcgtcaagatcattaatttcaccttcaatatgcctcaaggcaccagacaggtcttatgacgaaagagtaaactcttcactactggctccgacaaaaa

SEQ ID NO: 52173 - DNA, 157 bp, Zea mays
  unsure (1)..(157): unsure at all n locations
cggtatggcacggcgtcaaattgatgactataaggtttccgatacgactatcacgtgcctaacacaataacaccaagtttgtctttgaacaacccggctacctcgtccctaattttttncattatgtctagtgaccatccattaagtttggggtgaa

SEQ ID NO: 52174 - DNA, 344 bp, Zea mays
  unsure (1)..(344): unsure at all n locations
tgcacgaacangctntntcttccttttatacaatgatatgcaagttatgtatgaagattttatgtacatgtatgaatgagatagagtaggtttacctttttgtacctttacatagagatgctctcttcattgtgctatgtccttagtcttagtcgcttaagacctatactgaagacaatgtatgaaaatattttgcacacgagagaattctacaactaaggatccttttctaagtcatgttattatataccaagtagatcacaaagtgcataaatacatcatgaattcttctttaacttaatgcatatcaagatgatgttgaatgaaattaccaattgaaatca

SEQ ID NO: 52175 - DNA, 414 bp, Zea mays
agcttgaaatcgagcacacatgcatacactaattatttcatcgggcctagatggcggaatattaagcaaactaccaattattgaacgataaagtttttgatcaacaatagtacctccttcatctaagtctagatgaccatttgttgccattggagtcttgataggctttgcattttctaaaccaaacttctttagcatgtccttcaaatattttgattgacttataagaaattccatctttcaattgtttgcatttgaggccaagaaagaagctcaattctcctatcatagacatcttcaattctttggacatcatttttctgaatttctcacaaaataattcattagtagatccacaaataatatcatcaacatagatttgacaacacaataagttctttgccaattttttag

SEQ ID NO: 52176 - DNA, 415 bp, Zea mays
  unsure (1)..(415): unsure at all n locations
agctttaatgcacaacttctcccnctttgacattttacaccaaaaaccatactcaagcaagaacataggatgatgtcaagggacagcacggtgttttatgaggaaaaaacacactatcaaaactcccccttacttattgagcatatgcactaccaacatttaagtaagatacatatacgcaaaaagattaatacttccttttgtacctttaccatgttgtagtgtacttcccatcttgaaagtatttaatctctcaagagcttctccacacttgtgcctgattcctaaccttttcttgttgctaagacaccaaacttataacaagttatagtattgggcacaagaagaaacttctattctaatgattatcaaaagatgtcaattgaagcaaactatcacggctaccaattgaaag

SEQ ID NO: 52177 - DNA, 451 bp, Zea mays
  unsure (1)..(451): unsure at all n locations
tcggcatctttatctgctntatcttctcgagcccctggcgttcagtcttcgatgaagtctgctaacgcctcggactgaattgaagatgctgaattattcagttcacagcccactttccaatccttctagtagtntctctgttcctcatgatatccttcaaggccgtgtgaagggcaattatatggatgcttgaaaaaatggcgaagcttcctggaggccattaagacagcatacaacaccttctccaattctgtatagtttttctctgataagcttagaacttcggagacaaagtatattggggcttgctttttgatttgtccttccagattctcctgcacaagcgccgcactcactgtagagtgcgaagctgccacatacaatagtaacggtgcccctggcgcacgtggagttaatgttgttatatcaatcaagtattgcttcagctctt

SEQ ID NO: 52178 - DNA, 165 bp, Zea mays
agtgggaattcgattgctcctcctccgactccgacaatgagggactcgccgccaccgccttcaacaaatcggccctcttccccaacgagcgtcacacgtgtctcatggctaaggagaagaaagtaagtacctcaaactctacttatgccttcttctatgataatg

SEQ ID NO: 52179 - DNA, 366 bp, Zea mays
  unsure (1)..(366): unsure at all n locations
ttatattatgataatctcataatattcttattagtagcttatttaaaatattcttttgcaaaatacccactatgtattattatgtgcataaaattaccatgttgttcattttatttttccccaaatcacacgcacacatggtattgttgactttgccttcatgtctcacaaatcaataatctttattcatataatctggtcattcaaagagatacttatatattataatctcaacagattataatctatattatataatctctgaaacaaacaggccacgatgagattacgagattattataatncgaacattagattaatgctggaccataatnctagtaattatttaacagtcagattatttat

SEQ ID NO: 52180 - DNA, 115 bp, Zea mays
ccacagaaagacccgggcagacgacagcactaacaagaaagaggaaggacactcccgctgaccaggatatgaatctacggagagacgccagccttcctggcaagcattgagcccc

SEQ ID NO: 52181 - DNA, 326 bp, Zea mays
  unsure (1)..(326): unsure at all n locations
agcnntatgaactttgactctatatttcatttcctcgattataacctcattcttcttatctttgaggagttgttgcattctcacagctttgcttaacaacataatctgtgcaaaataaccttcgttagaaatctttgcttcatcacaaaacaatataaactgaggaaaaaagctttaccttaaagatggagtacaataagctgtcgacgatatgctgtcgtccgtagctgctgatgtcagcttcaagcttcggaaaaccaacactcttcgacagagtgctgataatcttcgcaccggtgcggtctccaatgcatcgtaaggcttct

SEQ ID NO: 52182 - DNA, 396 bp, Zea mays
agcttgttactgctacttcctaactggtgcatttattatttaacgccgcttgtgcggcaatctccatttatatgtgacctgcaaaagataaatccttaaatagtaaggcaattgcgaagctttgctagtgatgatccgatgatcaagaaccgaagcaccttctaggtacagtttcctttatttgctaaactgtgttaattgttttgttctagaaaaatagtgtagtcatggcatatgtatgcatgcggtgtattaggaaaccatgactacaaaacagttatgggtaagtccatataactcttctatgtgctcgttatctgttttcttataaggatcttctaatacttttgtccaactctactgtagagaaaatagaactttgatgtaagttacaaa

SEQ ID NO: 52183 - DNA, 304 bp, Zea mays
tctcgccttgaccacgatgtcttagacataagcctcgacccgtctagacgatgtgttctccgaacacgtggttcatgcacctttggtatgtcgtgcccgcattcctcataccaaatggcttttattatagcactacatgccaaatagtgggatgaaagaaatcgcgagccggtcagactctctcaccttgatttggtgataccctgagtaggcatcgacgaatgacacggtttcacacccagcagtggaatccacgatttgatctatgctatgcagagggtagggaaccttctgacatgctttg

SEQ ID NO: 52184 - DNA, 220 bp, Zea mays
gcccatgttaggcttagcaattaagcaagtgtcgagttcagctctatcaaaatctaccaaatatagctgagcctcttacactcccttaaatgctactgaatcatcacttcttctaaagacagtaacacctatattcgaaaaaagacagttgaacccattctacataattgcgagactgaaagcaagtataatctaaagattcacaacaaaaacatttgaa

SEQ ID NO: 52185 - DNA, 308 bp, Zea mays
tgcagctcgtcaagcagggaaacatgggggaagctctcatcatgccaaaaatgtgatgacaacatcaagaaccctgcagttacctcacatggacctcttcggacccgtcgcctatctaaatatacgaagaacgtaatatggtcttgttatagtcgatgatatgtcctgctttacttgggtattctttttgcacgataaatctgaaacccaagggaccctcaagcgcttcctaaggagagctcaaaatggagttgatctccaggtgaagaagataatgagcgacaacgggtccgagttcaagaaccttc

SEQ ID NO: 52186 - DNA, 205 bp, Zea mays
  unsure (1)..(205): unsure at all n locations
ggtgttatggggtcttcttctgttgctgctgcttgaacacgctgccaacagatgactgacactgggttgattctgggataaccttcttcttatcttctcttcactatcctcttttctcttgtcacttttgactaactctttctttctctttgctgctnccactggaggaatttcttcaagatattactattatacactggagaaa

SEQ ID NO: 52187 - DNA, 364 bp, Zea mays
gctccaagaaagtttgctaccaatgtggtagcccggtcatttaattgctaaatgtcctatgtctagtgacagtgaccgacgcgacgacaataatgggagaagaaaggagaagataaggtcctactaaaagaatggcggcgatgcccatgttcgtcgggaatgggattccgacgaaagctcaagcgactcctccgacgacgaggacgccgcctacatcgccgtcaccaagggactcctcttcccaacgtaggccacaaatgcctcatggcataggacggcgaaaagaagaaggttaaaaccaactcctccactaaatatgaatcttctagtgatgataatgctactgatgaggaagataatttgc

SEQ ID NO: 52188 - DNA, 325 bp, Zea mays
ggctggtcaccgtggttgctctctggcggcactggcggatcgaggcgacgtcgccggagctaatggctgggtcgggttagtcaggcgaggtacggatgatgccacggggaaggaagccgagcactggggcgggctttataaccatggcgcgggcgtggtcacgggctgccgctggcgcgcggtgttcgcgcaccggcgtgcccccggatgtcaactctcgtcgaacacgtggaaagcttgcttctgccatggttcaacggcggattagagcgccatagcgtgcgtatcttggcaaagtcactgtgtacggtcgcttctatgctcc

SEQ ID NO: 52189 - DNA, 500 bp, Zea mays
taaaactaagcttattatcagacaaggcaagagctgacgacctacacaagaactttatttgctataacttcgcataccacaaggacacataggcccctgtgaaaggctaccgcaccaaatgaccgaccgggtggatgaacgagtggttttacgtgaaagttgacgagaagaaaagggagaaactcatgagcatggtgatgagtccgttgagattgaacttcggcatgactcggtccttgtgcaatatgcagatggggtctccttgccagttggccgaagtggagttcaaggtcgtggctgagctatcatcactagagacttagtacaagaatatttgacgaaccgaacatttctgacctcttggctgtggggaatgccgaacaagaaagaagaaaggaaagttatgagcttgtctggctgccttaccaatctaagttccacaaaagattcaaggaaccatgcaatgaatggttagaattaatagaaactatgtgtaatga

SEQ ID NO: 52190 - DNA, 450 bp, Zea mays
tgcaagctttaacccatgcgagacctttgtccgtttttttctaactataacgaatgcgatatcgaatgtcatacttgatgcatattcactctatctgttcctttgtatgatgtactgtttgcttcccaatctgaacggatgaatgtatgtatgcttgcaatcgcatatagaacgatccggtccaagagccccatgaactcgcacgagaagcccctgacagcattctgttggtggaggcaagtgtcccttgacctatctctgtcctattcattctttaattcacctcccgctttacatatttatacctaaggtttgactagcttttgttatccctatccttgcttacctatttgggtcggattattaatgcttagctttatgctatggctcaactctaatcaacgaacatgatgagaatatctatgatacgttgttctcccttctcttata

SEQ ID NO: 52191 - DNA, 471 bp, Zea mays
  unsure (1)..(471): unsure at all n locations
tntgaacaatcgaagacattattaaccactggctcggtattggctcaaccggacatcaccaagccctttgatgtatattgggatgcaacacgcagtggacttcgctgtgtattaatgcaacaaggccgagtaattgcatatgcttcaaggaaagtgcgccgacatgaggagcattacccatctcatgatgtggagctagctgctgaggttcatgcccttaaaacttggcgtcactatttgctgggaaatatctgtcatatatatacagatcattaaagcttgaagtatatctttacctattaagaattaaatatgagacaaaggcgatggcttgagcttattaaggattatgaactagaaattcattatcacccaggctaggcttatgttgtggcagatgcactgaaccgtaatggttctgccattgtcttaccgtgaagaactctgacaataccttatgtcaggaaatgg

SEQ ID NO: 52192 - DNA, 430 bp, Zea mays
  unsure (1)..(430): unsure at all n locations
atgccagctatcacaggaggatagaggccagagcttcttttatgttataataaaaggcgacgtgtacaagcatggagtctgtgctccattactcaagtgtttatacacagccgaaggtattgaattgatgaatgaaatacacgcacgcctgtgtggatcttacactggatctacgcctttgcttggaaaagttttcgtcaaggactttattgtgcaaaggcagctttagatgcagcagaattacnccaaaagtgcgaaggttgctcgaaatgtgcaagagatcaaaaacaaccttcgtctctaacccagataatacaacctacttggccgctgcaaaagtggggtcttgatttgttacgtccgctaccaccagcacaacggaacttaacatatgttgtcatgcgagtggaatatttttctaaatggattg

SEQ ID NO: 52193 - DNA, 419 bp, Zea mays
ctgtcaaaaatatccctcgaggacttaatgatcatgctgatatgctagctaagtcagcagcacaggggctgcctctaccttcggatgtgttcttcgaaacaataaaagcaccttcggtggaacttcttgaaagagcagcccttaacatatctcctgtttttagcgaggattggagaaccgagatcatctcttaccttcagggtaaattcctttcagatgacgaagcttataacaagaggatagaggcaagagctcgtccatatgtcatgatagaaggggacgtgtacaaacatgcgagttgtgctccgctgctcaaatgtttatccacaaccgagtgtagtgacctaatgaactaaatacatactgtgcacgggtggatctcacatcggatctaggccgttacttggaaaaattttcgt

SEQ ID NO: 52194 - DNA, 452 bp, Zea mays
  unsure (1)..(452): unsure at all n locations
catgcaagcttgtgaagccggaagctnctggtaatatatantatattaacccangngcacactttaattcagctcagccttctgtagatcacttgtgcttctcacggccactggactcatgcactcacatgccacacgattgtccacctccactcccttttgtggccacgttaccagagggcaaaaagatatcgtatacttttcggccgcaacatggtgaaaagtttcgcatctgatggaaatctcaactccacagcataccctggggacaataagttggcagcaaggaaatctctatccatcttttatgctgctatctgccggacccaagttatcacaaaattcaactgatctcgaacatgaggttgcaatgaacctttgctttttgcctaaacaaacccatatttatatctggtaatgggtacaagcacctcttcgctgtgtatttattt

SEQ ID NO: 52195 - DNA, 480 bp, Zea mays
  unsure (1)..(480): unsure at all n locations
ttatgcancctcttgctattcttcttctatctgtgtctaatacttatacatgtatattagaactcaaaaccaatgtactaatgcatagaaacataccttttcttgcgatttgcactatgctcatccaagggcatagattcacatttaagcactagtgtgtgcactcaatcaccataatacttagtaatggcccaagggcacattaacctttcaatctcccccgttatggtgatttatggcaacacaacattaagcaactagaacaagtgcaaaatcatttcaaacaagaactcataattgttttggatcaatcttggcataatatggatcatccctatgccaccaacttggcttgcttttgcaaatcaaactcaaatttctatctctaagtcaaacacacatgttgaagcataaagagagtcatttcaaaagagattgatcacagaatttcaaaactccctaattcccatactacttctt

SEQ ID NO: 52196 - DNA, 472 bp, Zea mays
  unsure (1)..(472): unsure at all n locations
atccttgagtcacctgcggcatgcaagcttcanaacttanaagctaagcaaatcttggtgcgcaagagctaaaaattgagtgagtgagagcagatggcaagagagcgtgccaaatgagcttgcggtatgatcttatttatacgcccagtgcgttaaaaattgaaagaccccacttgtcagtgaatgttgctattctagcaaagggaaggtgttttttcggaccttcggcttaaggccttcgtccatgtcgcaatttaaatttattattctaacaaattaatattgcgaggggctactgttgggggccttcggcttccgaaggtcctcaaaaacaagatttaacagtatttctggagtataatgtgtgaacaggtatcttcggactcgaatcggtaccacagtgggagaagcccaaagaatacgaaggtcgacacagcaccgaagctgtgagcaggaaagcttctgcgtaata

SEQ ID NO: 52197 - DNA, 470 bp, Zea mays
  unsure (1)..(470): unsure at all n locations
aaacttaaaagctaagcaagtcttggtgcgcaagagctaaaaattgagtgagcaagagcagatggcaagagagcgtaccaaatgagctcgcggtatgctcttatttatacgcccagtgcgttgaaaattggaagaccccgcttgtcagtgaatgttgctattctagcaaagggaaggtgttttttcggaccttcggcgtaagaccttcgtccatgtcgcaatctaaatttattattttaacaaattaatattgcgaggggctactgttgggggccttcggcttccgaaggtcctcanaaacaagatttaacagtgtttctggagtataatgtgtgaacaggtatcttcggactcgagtcgatatcacagtaggagaagcccaaataatacgaaggttgatacagcgccgaagatgtgagcaggaaagcttcggcgtggtagcagaaaaggaaaccgacttatagatgaaa

SEQ ID NO: 52198 - DNA, 399 bp, Zea mays
  unsure (1)..(399): unsure at all n locations
agcttaattcgctatctaagcatcatcttttttagcttcaagcacgcatgacatagagcgccgactgtaaacaattccgtacacaactccagctcaaattgattcttgtaccgttttaagtactaacttcgttcacaaatatataacatcattgacttaccactcgtcttatttaaaatacttattaaaaatataaaattttacggtcaacaccatcttaagtgataaaacaaacccaaaaaataaatgataacttattatttttttaataaaactagtggtcaaatttttctaaaaaaaatcaatgaaggcatataatcaacgaccgcactgactggatgacagaagaacgaaccacanattgtgcttaaaatttgacatcaaaggggtacagtacat

SEQ ID NO: 52199 - DNA, 385 bp, Zea mays
caatgcgcctaataaatatctaactctgttaagttctattctcccatggctcaggataacgtagggtacattttataccctactggttatcccgagcacactattatgagaattcattctatgaagacgcactctggctctcatcatgctgttatgtataaaagagaggcatccacttctaggcaatccactcatgataaaattcctagaacgaaaactcattttgcatcaaatgagcctattatttcatttaagattttccatgctctatatgctgtaactaacaaatcacgcacagtaattgccaaatatgtctgggcaaacacaatggctcataaacttgtgtacgtgacacaaagtgcttgcctctaatgtgaaatgaccc

SEQ ID NO: 52200 - DNA, 375 bp, Zea mays
agctttatcaaatggacgtgacaagtgcctttctctatgtttctatcaaggaagaggtctatgttgagcaaccttccggctttgaagatagtgagtaccctaactatgtatataaactctctaatgcgctttatgggctcaagctacccacaagagcatggtatgaatgccttatagatgttcttatcactacaggctctaaaggcagaaaggctgatcctactttatttactagaacacttgcagatgagttgtccgtatgccaaacatatgctgatgatattatatttgggtctactaacgaatctacatgtgaggaatttactaggatcatgacacagaaattcgagatgtctatgatgggggagttgcagt

SEQ ID NO: 52201 - DNA, 434 bp, Zea mays
  unsure (1)..(434): unsure at all n locations
actatggctcgagcttattaaggactatgaactggagatccattatcatccaggcaaagccaatgtggtggcagatgcactgagccgtaaggcttcctgccactgtcttatggtgaagacctctgacaacactttgtgtcaagagatagaaaagctaaacctgcggataatccaacaagggactctaaatcagctaaagcttgagtcaatcattttgcaaaggataatcgatgctcacaaggataatctatgtatgaagcacatacgagaaaagataagggctggaatagccaaatgtttcaaggaagacgatcaaggtgtgatatggtttacaaaccgcatagtagtgccaaagaacgaagaactccgccagcaaattcttgatgaagcacatcttagtcgtactctattcatnccggaagcactaagatgta

SEQ ID NO: 52202 - DNA, 322 bp, Zea mays
tgcatcaagctgtgtgtaggctggttcattctattattagatattcagcgcaacagagtcagctttgagtgtgaattcaaccatgatctagtgatcaaatgagctcagtcactatagtcgaaatataggtggtatgtagctctacaactttgctgcaggtcactggatgagttgccatttgaaattaagagaaaacttggcttcaaattgggctgtcaggtccatttgtctgaactttgccatggtacagtgacctgataaggatcataacgccagcgctgctcgctcgtcgccggtgacctccctgcgcatagattcatgc

SEQ ID NO: 52203 - DNA, 494 bp, Zea mays
  unsure (1)..(494): unsure at all n locations
tacggacacttagaaactcaagcttataccatcttcttttcctgcaaagcttgtcaagcatattttggtacccatctctcgatgggtccatcaaggttagtcaacaaagatctaagaacgcaaatgtcctttgtgctagcactaggtaaactcattacctttctagcgcaagttgcaattttgggttgcctagttacatgagaattaattgacaatctagaggtgggatagttacccatgggacaatcctcgcattgatgccccttctttctgcatatgtagcatacgcgatcctcaagtcttgaagggttcttctttccttggttctttcttgctacatggttagtgaatattttcttttctaacactatgtcttattgtttaaaagtggacaagacctaaacaagtgtcccttttggagcatttaaacaaaggttacatccttattataatcagtcattntaatatatggacatgccctaatagagtgcccc

SEQ ID NO: 52204 - DNA, 311 bp, Zea mays
  unsure (1)..(311): unsure at all n locations
ggctcccatgcctcaagataacgagggctattctttgtatcctgctggttatcctgaggataagattaagagaattcatgcaaagaagactcattctcatcatacttttatttacaagaatgaggcttctagctctaggcgttctacacatgttaaaatacctaagaagaaaactcctattgcatcaaatgatcataacatttcatttaagactttcgatgcttgctatgtgctcactaataaatcacgcaaagnagttgccaaatatgtggtggcaaacacaaagcgtcaaagacttgtgtttgggtacc

SEQ ID NO: 52205 - DNA, 495 bp, Zea mays
  unsure (1)..(495): unsure at all n locations
tgcatgacggacctataaaactcagcttatgcccctaaaaattgctaacttcgtaagggcaattctcccatggggcaggataacgagggctatattntatatcatgctggttatcccgaacataagattatgagaattcattctaagaagtctcactctggctctcatcatgctnttatatataagagtgaggcatctagttctaggaaatccactcatgttaaattgcctaaaaagaaatctcctattgaatcaaatgaacctaatgtttcatttaagactttcgatgcttcttatgtgctcactaacaaatcacgaaaagtagttgccaaatatgttgtgggcaaacacaagggctccaagacttgtgtttggataccaaggtgcttgtttctaatgtcaaaggacccaagaccatttgggtacctaagaacaaggcctaaacttgttttgagggttatgcatctacgggctcaagttggatcattgatagcg

SEQ ID NO: 52206 - DNA, 434 bp, Zea mays
gctggagtaagcatggtccctgtggggctttcatatcggaaaccttatgacagccgatttgatcaccacccatacccacagggaaccaggatacccgaattcgcaaaattttcggatgaccaaagaaaaaacacgcgcgaacacataggccagtttttagcacagttaggggaattggtcgacacagaagcattttgcgtgcgtttattttcattatctttaacaggaaccgcgtttgcatggtacgccactttacctccaaattctattttgtcatggggggatttagaacaaaaatttcatgaccactttttctctggtgactatgagttagaattggtagatttagtgtccttgtgacaagcaaaagatgaatcggttaatgattacatccggagattcaagatacagaaaccgatgcttcatattcattt

SEQ ID NO: 52207 - DNA, 490 bp, Zea mays
  unsure (1)..(490): unsure at all n locations
actataaaactcagcttaaagggtgccatcttgatactttcttgatagctattattatatgaaaactccgccaaaggcaaacattcatcccatttctgtgagaagtccagaacacatgctcgcaacatatcttcgagtatttgattaaccctcttagtctgtccactcatttacggatgataggccgaactgtggagcagcttaatacccagggatttatggagttcttcccacaatttggatacaaattgtggtccacgatccgacactatagtctttggaacaccgtgcaaactgagaatgtgggcaatgtacaactctgcattggtaagtaccgggtaatatgtcttgaccggcagaaagtgaacaatcttcataagtcgatcaacaatcacccagatagagtcatacccttntgcggtcctgggcaatcccacaataaaatacatacttatgtcttcccattntccatgtcggattggagtgactg

SEQ ID NO: 52208 - DNA, 481 bp, Zea mays
  unsure (1)..(481): unsure at all n locations
ttaagtcacctgccgcatgcaagctntgggaactatgcncgtatccaatctgtttgttccggaactataagcgctggccagatgcccgcgttcctgtcgaccacgaccagcacccaacataagactttcctagttatttagccaagaccagagccatgatagttctcatggtagcactgttttcccgggtggtcactccatgttccaattaatatgcaataatcttgtttaaccatcgggttaacaacaataatgaaaacttaccattttggaacattaatatcataagcgggagtgactgcataaagttaagttgtagcaatagcatagctacttgattaaatcataatctcacgttaaacaaggagtaaggttggaaaggttatctaaataggtaacccatcaaattatgcatatatatccaaaagagtaaactttattaaatgtattgtttgggatcaaacagagtatgcagagggag

SEQ ID NO: 52209 - DNA, 494 bp, Zea mays
  unsure (1)..(494): unsure at all n locations
ctcagctntattgtctcttattgtctctattntcaaaagatggcttcttgttgngagaagtgttgattatgggaaaaagggggagtttttgaaatccgtggtcaaattcttttgaaatgactctctntatgcttcaatatgtgtgtttgacttatagatagagatttgagtttgatttgcaaaaacaaaccaagtggtggcaaaggatgatccatatatgccaaaattgaatcaaaaccaatttgagtttttatttgaagtgattttgcacttgttccacttgctntatgttgtgttggcataaatcaccaaaaagggggagattgaaagggaaatgtgccctcgggccatttctaagtattttggtgattgagtgcacacacaagggcctaaatgtgaacatatgctcatggatgaacaaagtgtaaatcacaagtaaaggtatggttctaagccttagtacattagttttgtgtactaacatcttgtctaag

SEQ ID NO: 52210 - DNA, 479 bp, Zea mays
  unsure (1)..(479): unsure at all n locations
taagagactcttntcacggatcaagctcgctactaanaactatctatcactgtgaaaggtgctactgtagngactatgcttcgtcgccgaaggtctagtaggaagaaacagctttcggctgaagctgtatgtatgagatggctgaaggttcctcttcatgaagcttcggtattacaaaccgacttaaagatagaatgaccttccaggccataaaggtctaagtccatgatgtgaactcttatgatgggcataaatgtcattccttacaggctgtgacctgtgcctataaatagagagacagattgctttactgttcacgcgttcttgtaattgcaatcgcattagttcggaaccaatctttgacctgcataggtgtaactgcattccacgatacaatatcataacctaatgtgatctgatgcattcatgactcatatacctttgctacgctctactctatgctatcttatacaagctat

SEQ ID NO: 52211 - DNA, 358 bp, Zea mays
cgaaacgagatacactctttattggtgaaactttcacgtagacataatctccaactagaaagtacacgggtatccgacatttggctgcgtaactcttctgacgagcttgagcttggttcacattatgaattattcggtgaactctctcttttgtctcctttaccatatcacgcctgaagaaaaatctttcacttggtttataccacgttaacagagtacgacacccgcgtccatataaggcttcaaagggtgccattttgatgctctcttgatagctattattgtatgagaactccactaatgggtaacaatcatccccattctgtgggaagttcagaacacatgctcgcaacatatc

SEQ ID NO: 52212 - DNA, 482 bp, Zea mays
  unsure (1)..(482): unsure at all n locations
ntgccgagtgccgtgccaagcactcggcaaagaacctgatatggggaccctctctggcggattctttgccgagtgtctgaccgacaacactcgacaaaggtaactcctttgccgagcgtcacccgggacactcggcaaagacgtcgtctccgtcacccgacgccgtaacggctgcttttctttgccgagtgctgtctacctctttgtcgagtgcccgagaaaaagtactcagcaaagaaggctttgccgatgcactatgtgccgagccttctttgccgagtgtgacactcggcaaaggcggcgattccggtagtgactntaatgacgtggtgcaataccttggagatccaagggagtgctcgagcatcacatcattaggtgcatcagcacatagaccctcgacatcaacacccaaatgatggagccactggattgacttgtcgtcataatccttcaatggttgctaccagtgatatgaactt

SEQ ID NO: 52213 - DNA, 459 bp, Zea mays
  unsure (1)..(459): unsure at all n locations
agcttgtgaagattcttcatcccaacatgtgttattctacgatgccagagccagcccatgttagtcttagcaattaagcaagtgtcgagttcagctctatcaaaatctactaagtatagctaaccctctaacactcccttaaatgctactgaatcatcacttcttctaaagacagtaacacctatatccgtaaaaagacagctgtaacccattttacataattgcgaaactgaaatcaagttataatctaaagaatctacaagaaaaacattggaaatggaatggtcaggagatatagcaattttacccaatcctttaaccaaaccttgatttccatccccgaatgtgatcgctctntgnggatcttggtttttctcataggaggagaacatcttcttctcccctgtcatatnggttgtgcacccgctatcgatgatctaacttgagcccctggatgca

SEQ ID NO: 52214 - DNA, 482 bp, Zea mays
  unsure (1)..(482): unsure at all n locations
ttatcaaatggtcgtgaaaagtgtcttcctcaatggaccaatcaatgaagaggtctatgttgagcaacctcccggctttgaagatagtgagtaccctaaccatgtgtataaactctcaaaggtgctttatgggctcaagcaagccccaagagcatggtatgaatgcctaagagattttcttatcactaatggcttcaaagtcagaaaagctgatcctacactctntactaaaactattgcaaaagatttgtttgtatgccaaatttatgttgatgatatcatatttgggtctactaacaaatctacttgtgaagagtttagtaggatcatgatacaaaaattcgagatgtctatgatgggggagttgaagtatttcctatgatttcaagtcaagcaactccaagatggcaccttcatcagccaaacaaagtacattcaagacatacttaccaagtttggaatgaaggatgccaagcccatca

SEQ ID NO: 52215 - DNA, 479 bp, Zea mays
  unsure (1)..(479): unsure at all n locations
cgagcggngaccggcttcatctgaaccccttggaatctgttgatcatcatgttcttcagcttctgccatgatgtgattgttcctggccgaagagaggagtaccacgtttgtgcaacattcttgactgccatgacgaaagacttctccatgactgtagtattgccaccatacgaagatatggttgcttcgtagctcatcagaaactgcttcagatctgagtgtctgtcatacatggggagctggggtggcttgtaagacgggggccaaggtgtagcctgcagttctgctgatagaggagaagcatcatctaaagccaaatttccatgatggaaatcctcataccagtcattctcgttgaagaagccctcttgatgaagctctctatgttgaggccttcggttntgctcatcttgagcaagatgacgaacttcttcagtggcttcgtctatctgcctttgatgtcagctagccgagccatt

SEQ ID NO: 52216 - DNA, 451 bp, Zea mays
agcttggacagtgttctgcgaggtttctgttaaccttctgggcaggtgcagctgctattttagttgcaccttccaaagttagaacatgctatgcagtgaaacttgatttcagctgcacaaataatattgctgaatacaaagctttgattttggggcttcagaagttgaaggcaatggggataagaagggcggttctcaaaaccgattcccaagttatttctggtcatattgacaagagttgtaaagcaagagatccgaagcttgagaaatatttggatacagttcgaaggcttgaagcttctttcgaagggttttctgtcaagaatattccacgaggagaaaatgagcatgctgatctgctagccgagtcagcggcacaggggctgcctttgccttcgaaagtattctttgagacaattaaagcaccttcggtggagcttcttgaaagagc

SEQ ID NO: 52217 - DNA, 368 bp, Zea mays
  unsure (1)..(368): unsure at all n locations
ggaagcaagtctcaagactgaggtcgagaaaaattcatatttgtataaatcattgaaggatctccaagagaaatgcctaaatttctgcagccgatgcgtgcagtggctgaatgacgtatttcactctatcggagccagttctgaaaaattttcaccttcagccgaaaacctgcccagcaccttggaacatattgaaggcgaggttgatgctcttgacgaagttattggtgggcatgccgacttctgcgccctggtagtttctcgaggcacagataccgtttttctgaaggctgtctgtacgcacggagagattgtgaataggccaaatcttatcttgtcagcaacagattgggntgatatcccacgct

SEQ ID NO: 52218 - DNA, 333 bp, Zea mays
gatatttcatatctgaatctcgcaagatctctttccttaaaatggcgatgtttacttttccaaacatcaaggaccacccctgctccgatttcagttttcatgcaacaataatggcgttagttaaacagatcccttggcattctaaagccagtaaagaatcccttatggcatgtacatttctgagccaccagttccggttccaagtataaaagacgattgagaggttacatggtacaatcctgagacactggatcatccatgcaggtaagagacaccgtgtatgaaaagttgtgaagaaacatgctcttcccgaagagccacgtcttatatttt

SEQ ID NO: 52219 - DNA, 395 bp, Zea mays
tttgtgaatttactagtaaatggtaaacttacacacttgaagaattcaggagcccctggtcctgcatttgaaagtgtacacggtaagggaaatacaaaacagcaaatcgcttatagagcagagcactagtgcaatttgatattcttacgccatgagggaatcagggaatgcaaaggtgacaatatcatagtctatgaaacaaaggatagcacaatgaggggagcatgttcttgatgagggaagaagtgtttagtacctatctccaaatcatgccatgggtgagcagcaacatgtttctgggacatggaagaaaggatacgctcattgagaacagcaggtccagccatggctacgaattaaaacagttccgttaattcaacaattctataattcaa

SEQ ID NO: 52220 - DNA, 371 bp, Zea mays
cctgaggcatgcaagctttcttcggcgatatccagcgcacgtttttgcgccccgggaattactgggacctccgaagctgccgacagcagccgggagagtctctccgggattacattcggcgattctcgaagcagcgcaccgagctgcccaacatcaccgactcggatgtcatcggcgcgttccttgccggcaccacctgttgcgaactattgagcaagctgggttacaagacccccaccacggcaagcgagctgatggacatcggcaccaagttcgcctccggccaggaggcggttgaggctatctttcggaacgacaagcagcccacggccgcccatctgaagatgcccctgaggcgtctactcaacgcg

SEQ ID NO: 52221 - DNA, 482 bp, Zea mays
  unsure (1)..(482): unsure at all n locations
cgagttattttattacagaccagagctaacagtgagtgcttagtattaatattatacaaaccaagggaggcacatactcctcccgagaagatataagcaaaagatcctaagtggaggaccgagtcctcccgcacttcagtcttgtttttcttcatttggtaccaccttggagcaaaagcaacaaaaatatgtcgcttcctcacctaaaaacaacaaatggataaaccctgagtatggaattactcagcaagtcttacccgactaatgaaaagactctcaagggtatgctggataaataggagtcaaggagaggctttatcaagaatcaacttatacttttgcagaagtagcttactaaagtgagtccttactttcaatcttntaacgccatattaagtattaatagactctatttgcagctagtctaatttcacatcacatcaagacaacatctattttatccatagtgttcacgtcctgac

SEQ ID NO: 52222 - DNA, 422 bp, Zea mays
gcaagcttgaacaagcctcacggcctcatctatattctatctgagggcttggatcaaacggaggaggacgggaaaaggggctggccaccgtggttgctctcgggcggcactggcgggtcgcggggaggtcgcccgagctaatggctggctcgggtaagtcaggcgaggtacggaggaggcaacggggaatgcacccgagcactggggcgggctttatatccgtggcgcgggcgtggtcacgggcggccgcgggcgcgcgggggttcgcgcacgggcgtgctctgagcacgcccccggatgtcagctcgcgtcgaacacgtggaagcttgcttctgccatggttcaacggcggattatagcaccatagcgtgcgtatcttggcaaagtcactgtgtacgggcgcttctctgctccatatccta

SEQ ID NO: 52223 - DNA, 419 bp, Zea mays
agcttgggaagggtcttcatccttacatgtgctaagcggcgatgccacagccagcccatgctagtcttagctattaagcatgcatctagaccggccttctcttttgcaaaatcaactaagtaaagtttgccgtctaatacacccttaaacgctagtgaaccatcaattcttctaaagacagacacatctacatttgtaaatagacaattatatcccatattgcataattgactaacagatagcaaattatatccaagagactctactaaaaacacattagagatagagtgctcatttgagattgcaattttacctaacccttttaccttgccttgattcccatcaccgaatattattgaatcttgggaatctttgtttttgacgtaggaggtgaacatcttcttcttccccgtcatatg

SEQ ID NO: 52224 - DNA, 494 bp, Zea mays
  unsure (1)..(494): unsure at all n locations
ctattacgcgacctatgaaactcagcttgggcgccctcnggcgtnctgccgcagtctaagtaccaagtctcccacctagaaatctcggggccgaacccctcgggcgtgatagcgtcgcagagactgctgataccgtgccgagtgtagtaaggccttgtcccgagcctcttccagctggtccagtgagtcttctcggctggtctggttgctttggtcgtcgtacgcccttgtcctcggggaaccgtattctaagtctgtgggcaagatagcctcggccccatagactagaaagaacagcaaaaaacccgtggctcggcttgacgtcgtcctcagactccagaccaccgagggtagctctttcatccatcgcttgccgaacttgttgaggtcattgtagatccttcggttaagttcctgcagaatcaagccgttgcacgctccacctgcccattcgtcatggggtgagccacggcggtctantccacacagatgtg

SEQ ID NO: 52225 - DNA, 461 bp, Zea mays
agctatacaaaacacttagaggtttagagatagtatatttaatgcacgattaagagccaagcaacaagagcaatataaaaagacacacaatcacactctctcaagtcactaatcactaatgataattgctcacaattatggaacttggagagatttggaagctcgaatgtgtctttggttgaagtgaatgctctcgtattgaatgacagtgaatgacaggcttggatgtggtgaatgtaggtggttggggttgtatttatagcctcaaaccacttactagccattactccttttctgtcgaccgcgaacggtccgcgcccctggtccgaacggtccgcccctgcacatcaacggttcaaattgcaacggtcagcagtaacagctatatcaacggctatagtgcatttaatgtgtcgtcagatgtcagataaagcggtcgctgacggtccagccgtgcaccc

SEQ ID NO: 52226 - DNA, 61 bp, Zea mays
  unsure (1)..(61): unsure at all n locations
tataaaactaagcttggggctcacccattggtgnaaaatacaaaaatattttcttttttta

SEQ ID NO: 52227 - DNA, 433 bp, Zea mays
tcgacatgaccggactctattgtaccgattatccgacctttctatagacctgttcgcctatatgactagtgagaggtggtctacacatgatattgaggaccactgtgatgcgatcgcccgcaacaccttacatatgcaatattgcgattaatcacattatctgattcaagtaggatacccattcacggaccttaacacataagtggtgctctttcacgcacgtgaatacgatccgtcaaggctcatcatgatccatatgatggttgtgtgatctttgattatcatccataagctcctccactaatatctccatctgtggcatgagctaccgagttcatactatgtttgaagtgggagagaacatctgggagaccaatagacatatcgtgatcttcagaatttcatacagcgtagtgaacgcggtcttgggata

SEQ ID NO: 52228 - DNA, 381 bp, Zea mays
gcttgcttttgtcgagtgccacgccttatttctctgctaataagctttaccggcgcccaggaatggcactcggcaaaatgttctttatcgagtgtcacgcgatacgacactccgcatagaatcttctttgcccaatgccacaacctaacgttcggcatagataacagccgtcagctatagacggctgctgacggctctttgcctatcaccgaattgtgtcgagtgtttggcactcgacaaagtaatctttgccactactttgccgagagtctttctgtgccgagagtcctattatcggccaacgcgatcgttatcgagagtgaaactttgtcgagtgtggcactccgcaaagaagtgtccagtgcccgattaaaaacactt

SEQ ID NO: 52229 - DNA, 442 bp, Zea mays
  unsure (1)..(442): unsure at all n locations
atgagggatcgtcctacttataacatcgcacgctatgacatatatgcaatataaacaagtagaacaataagaatggcattcacacaacagttgtgattcggtatggcttgctgtcacatggtgatccccatctccaataatctgtccatcacgatgatctccatctccatgatataggtatgccatcctccaggtgatgagtccttcaagacctatctaacgtatgctggtaaacaaattacatatacgctttggatcatcacatgttgacacgcaggtcattacatntaaattggacaatacatgtggctccagccgtattgccctgttcacgacacgcaggtcattgaataattattaacatgcatcatatacacaatagccataccgatcacaagatgtccttgcaaaacctcacaggattccatgcatcgtatgtatg

SEQ ID NO: 52230 - DNA, 462 bp, Zea mays
  unsure (1)..(462): unsure at all n locations
agcttaatcccataaagtgtgttntcggggtctctcttgaaaattacttgggtttatcgtcagccaccacggaattgaagctaatccagaaaagatcgaagctatcatgaggatggaggcaccgcgatcacagaagacggttcaaaggcttaccggatgtatggcagccctgagcagattcatatccaggttgggagaaaaaggcttaccattttataagttactcaagaaggtggacaagtttcagtggacttcagaagcacaggaagccctagacgcattgaaaaagttcttaacgacgccgccagtgctgaaaccgccgcgacgggccacgtcgactcaaccagctaaagatttgctgttatatatctcttgcacgactcacgtggtgagcaccgcgttggtagtcgagcgagcagaagaaggacatgcctatccagtgcaacatcctgtntatttcat

SEQ ID NO: 52231 - DNA, 433 bp, Zea mays
  unsure (1)..(433): unsure at all n locations
ttcaaactcagcttgttccctactacaagcaccccgggcaagaaatataagcctcatcctccctctgctggaagtagggccctcttagcccaaaccaggataaatcttgtgtttcgtcttgcatcaatccatccgggcagggacacgcgccataaaattcactagtcggttcggttgagggtcctccgggtccgaaacaccgacacttacctctntaaaatttcaactgagttgactcttctcttgtagatggttcgtactctccaaactacccgcatcaacaccaactacgcccctctgccccggcaaatctctgtctacccagtggtagtcgaggaagttacagcggatctcccttccatccgagtggagaatggagttatcctaaaggacagctctgaggaacagcttgtgacgcccaccccattggcag

SEQ ID NO: 52232 - DNA, 433 bp, Zea mays
  unsure (1)..(433): unsure at all n locations
agcttgtggcgccctcaggcgtcttgctcgttattaatcaccaagnctcccacttagaggtctcggcgccgaacccctcgtgcgtggtagcgtcgcaaagactgctgatatcgcgccgagtgtagcaaggccacgtgccgagcctcttccagctggtccagcgagtcttctcagctggtctggttgctttggtcgtcgtacgcccttgtcctcggggaaccgtattctaagtctgtgggcaagacagcctcggccccatagactagaaagaacagtgagaaacccgtggctcggcttggcgtcgtcctcagactccagaccaccgagggtagttccttcatccaccgcctgccgaacttattgaggtcgttgtagatcctcggcttaagtccctgcagtatcatgcgcgtggcacgctccacctgcccatttg

SEQ ID NO: 52233 - DNA, 460 bp, Zea mays
  unsure (1)..(460): unsure at all n locations
gtttcttcattgtagaatcaaanatgcagaanatacaccgctcaatattataatagngagaatntatatagaaaagatcagagcaactccaagagactatgtatatggttttgtaaaggtaaatttagctaatattaaaagaaaattgtatccaatagactctgtaaacgactcttcaaatttagtggctctctatttctccatcttcgctctccattttttgatagtctgcttcactctctattcagtccgtaggtttaccgattttgttggattaggctacactttttctctaaaatctattttagagagtagctaaatcagtaaatttggctagtctttntagataatctcttggagttgctctcataattcataactcataaatggagaaatactgcgaaaattcactttngcagcaagaaaatgttattggacgcaccagacgaaactcaaatgc

SEQ ID NO: 52234 - DNA, 323 bp, Zea mays
  unsure (1)..(323): unsure at all n locations
agcttcatattgcacgctttgtcctgttcattattcataaagagnatagcatcatccgcgtattggagaattgagaacccgccctcaacaaggtgagggatcattcccaccacctggtcaatccgtttggccctactaatgaacacttgaacatgtttgcctaatattgaacaagagggagataaggatcccctgtcggatcctttttttgttgaagaaatctccgaatcgtattaacattcaccgtacacttcctcccgaaatgaagtcttaatccaagaatccatttggacgaaaaaccttattctgaaagttgatataaa

SEQ ID NO: 52235 - DNA, 336 bp, Zea mays
tgactctcgtccgcagcatatggcggaggggtatattgattctcctggaatgaggcttgaattcggcttgtgaagatggaggttgaccatatgaagacagaggatattgatactcatgatacggatacaggtatggtggtggacgcccaccccgatatatcgcacgggggagtgaggctgaaacatccgagcgactatgtagagaataagactcatcctacggaagggtcgtatgtgacccatcggactgcatgagataccggaaggtgttcaaatctggggaccaacccgacatagtgtgaatacaaaggagtttggagtaaaaaatgatataaa

SEQ ID NO: 52236 - DNA, 437 bp, Zea mays
  unsure (1)..(437): unsure at all n locations
acctgaggcatgccagcttatgaaatcccatactctcagttatttttttgtttattngaatancccggganccgggagacaatagaggaaatcttcttccttactaccattgaacactaaagcccccctcggatattttagtccttgggccaagtgtctaacttctagcatttcttactgggataatctcttccccgaagcatgtcgaataatgtagtcaacatcttcgttctgagtttcgggggcagcagattcggtcttttctggtacaatctgccctgccgtttttttctcacgtgcggcaggcttcgtctcggtggacactgaacgcccagctttggcttctgcctgaactttcgtagcttcggcaattttcttaggggaagggctcaaggccttcgtagtctctatgacagcgtctagtaccttggccatcc

SEQ ID NO: 52237 - DNA, 453 bp, Zea mays
  unsure (1)..(453): unsure at all n locations
tgtncattngaacacttattttgcaaccatattatactatgtttcttntaccgacaacaattacacagcaacaaaacaatcaatgttattattattgatatttccaatttattgctttaaaaattaataaatacaatcttttccgatcatttatatagtgtcaaatgagaagaaaacaaagaaaaatgaaaaagaaatggaaaatgtgaatctgttaacactgtacctttaggggatggaatttaaaggacgctgctggagacggagaatatatacaagatagaatcttgtagagtgttctgtaaaggacagagaatattcctttaggggactaaaattaagggacgctgctggagacagtctcattcaccgattcctcaaaagctttgacaaatccttattcatgcgagtcatccatcacaacttttggaatgcctaacgtcttcacctttc

SEQ ID NO: 52238 - DNA, 440 bp, Zea mays
agcttgagaaatatttggatacaggtttattgtttgtagcttccttcgaagggttttctatcaagaatattccacgaggagaaaatgagcacgctgatctgctatccaagtcagcggcacagaggctacctttaccttcggaagtattctttgaaacaataaaagcaccttcggtcgaccttcttgaaagagcagtgctcaatatatctcctgtttatagcgaagattggagaactgagatcatgtcttttctccagggcaatttcctttcatatgacgaagcttatcataagagaatagcggcaagagcccgtccatatgtaataataaaggggagttatacaagcatggagtctgttctccattactcaaatgtttatccacagctgaaggtatagagctgatgaaagaaatacatgcagggctgtgtggatctcaca

SEQ ID NO: 52239 - DNA, 473 bp, Zea mays
ggaagcgtgatgatgtatacgagaccaagtgtaactcttgggaagacaagagaggaaggagactccacatatcaaaaccttgtttaaaaagaagtctgtggggtttgttgaagccaaagccaacacccctttgtttatctttcaacatggcaccgagacagtctacttattactctatgttgattatatcatcctcaccgccttcagaaagagtttcctactaaggatctcgggcctcttcaacattttcttgggattatagtagaacgtacaccagatggcatttttctccagcaacgtacttatgctcttggtatcattaaccgcgcaggtatggcaagttgcaaaccctgctcaaagccagttgatcttcagttcaagttggttgctgattctggtcctgcagttcaggatgacactcactttcggaatctagccggcacacttcaatatttgacggttacccgtcctaa

SEQ ID NO: 52240 - DNA, 420 bp, Zea mays
agcttgcttaacttggaggttcttttatatatgcttccgaaaaagaagaagcaccttattggtatggatactctattaattctattaagccttacgccaggatatcaccatcccaaggggtcaagatatcacaacgtgggtatttacaaggcacccgggggcatgtagacttaagtgtaattatccccctggttacttgctacattcctggaatattacatacagcgaggtcattatagtatagcaaaacccaactacccaactacacctaatactctactcttcttgggggcatataagtggggccaccgccgccaggcgaaacctataccctgccgagggcggctaaggtcttcgcgcttggtatattctcattttgtgacgcgagacacctacagggggtgaatagtatcctgtaaa

SEQ ID NO: 52241 - DNA, 483 bp, Zea mays
  unsure (1)..(483): unsure at all n locations
tcggccttcggaggccgaaggttganatgaatgaagctgtttattaatgccagagagccttcggcgcagtctgctctttcattggaacgagagacttattacaagagcatattgccttcagggtatggccgctcgcggagaaatgggaaatgccacaagaaaccgtaaaagaggccgacaaaggtgggcttatcaggttgaagtacacttttaaatttggagataagtttgttgagccagatgatgactggttaaaaagtattgaaaatttaagtgatgaactgcttggggcttattcgaaggccgaagacactgcaatgtcagcagccttcggaggccgaaaaaagaagaggctgaatcgggtatttgatgcaatcgggtttgtctaccctgactattgctatcccattcgaaggcagaagaganataacacaacctctgcanaagaagaagctgctactgctcctagcgagccagaaccga

SEQ ID NO: 52242 - DNA, 436 bp, Zea mays
  unsure (1)..(436): unsure at all n locations
agcttggtatatcactaattctgttgccatttcttgagagacggcgggcagnanggtgctcatgtcgcttggcctggaacgagaggagggcacgaccgcgtccccaagtgacactgctngtgcctagcgagagcggatgatatcgccccactgggcaatgcgctggggcgggcgatgagcgggcggagcgagttggcacattctgattggtccatgtggccacgttagcgccacatgtgctaaatgttgcaactagctgattttgaccgtctggagtccaaaaaatntaaaaattgcaaaaaaacacaaaattcatccctaataaatctataaattgccatgcctaggtggagttcattccacacaccatttcatctcatttcttttctctaaactcccctctcgtaacacaatgtcnggttggtccccatatttc

SEQ ID NO: 52243 - DNA, 470 bp, Zea mays
  unsure (1)..(470): unsure at all n locations
tgtggcgccctctggcgtcctgccgcagtctatgtaccatttctctcacctagaaatctcggcgccgaacccctcgggcgtgatagcgtcgcagagactgctgataccgtgccgagtgtagtaaggccttgtcccgagcctcttccagctggtccagtgagtcttctcggctggtctggttgctttggtcgtcgtacgcccttgtcctcggggaaccgtattctaagtctgtgggcaagatagcctcggccccatagactagaaagaacagcaaacaacccgtggctcggcttgacgtcgtcctcagactccagaccaccgagggtagctctttcatccatcgcttgccgaacttggtgaggtcattgtagatcctcggttcaaggtcctgcagaatcaagccgntgcacgctccacctgcccattcgtcatggtgtgagccacggctggctagtccacacagatgtggt

SEQ ID NO: 52244 - DNA, 444 bp, Zea mays
  unsure (1)..(444): unsure at all n locations
agcttctaaagggagaacatgtgataggtcttacttatgttcatttcgaaaaagatagaccttgtgcagcttgtcaagcagggaaacaggtgggaggctctcatcacaccaaaaatgtgatgacgacatcaagacccttggagatgctgcatatggacctttttggacccgtcgcctatctgagcataggaggaagtaagtatggtttagttattgttgatgacttttcccgcttcacttgggtattctttttgcaggaaaagtccgaaacccaagggactctcaaacgcttcctcaggagagctcaaaatgagtttgagctcaaagtgaagaagataaggagcgacaacggatccgagttcaagaaccttcaagtggaggagttccttgaagaagaagggatcaagcacgagttctccgctctctacacaccacagcanaatg

SEQ ID NO: 52245 - DNA, 482 bp, Zea mays
  unsure (1)..(482): unsure at all n locations
tgaagccatggtaagtagcataagcaagtaaaatgtgaattgattctatcctagctacgggtgcataggtttcaccgaaatccaaaccttcgacttgtgaatatcccttggccacaagtcgggctttgttccttgtcaccacaccatgctcatcttgcttgttgcggaagacccacttggttcctacaacattttggttaggacatggaactaaatgccatacctcattccttgtgaaattgttgagctcctcttgcattgccaccacccaatccgaatcttgtagtgcttcctctaccctgtgtggctcaatagaggaaacaaaagagaaatgttcacaaaaatgagcaacacgagatcgagtagttacccccttttgaatatcaccaaggatggtgttcacggggtgatctcgttgtatcgcttggtggactcttgngtgtggtggtgtggtaacttgtcatcttcctcatcttgatcat

SEQ ID NO: 52246 - DNA, 206 bp, Zea mays
gagaaactcaacacaagagatggcattagtagcacaagcactagtttcttatttagcaattccttatatgtggaaggcacacgagctgctaacatacagaaacctcataatatggactaaattctccttgagccctcatgcacaatatattttgaatgacatggataataagaatggttgttcaatgaagtctaaagggctgacat

SEQ ID NO: 52247 - DNA, 463 bp, Zea mays
agcttgtgaagctggatccgcttggatagaataactgtcgcatatcttttattttgtagcgaagatctcccaaacaggcgctaaatgtagtggtatcagaggcagcagctatagagacaatccagcgatatcagcaggtcagcacccattattctgaattccaacaccaccagcaacacagagtacaaaagcagcagaccaaatcacagctcgcaccccagcagcaaaacagagtacagccgatacagacctatgcaattccaagatatcaatggcaccacaacatcaccagaaacattagaacagagcagacagccaacagcagcagagcaggccacagagaacaccagctgtaaatcctctgtaccttgtgccgagcagacagatgtcaaaggcagcagcagcagcaaacgaactcggtgaagaagacgaacctgcgcactggatgatcatatacgatcat

SEQ ID NO: 52248 - DNA, 377 bp, Zea mays
agcttgccaagccctcggacccggccaaacttcatcggaggcccgagatcgaccttaccggacttcggtcttccgccgccgcgcgtggaccgagctatccagtgagtctccgtccaatcccttgcgctcatatcttctctagcatcccatgaacctccctgacccatccaattgaactatctcgccatgaccaggccggattcctcgccgccgacgagcatccccgcctgcgcgcgtggaccgaccgactcatgccatctccgacggcgacccgcacaccgttgtgatccccgagacctccccttcgttctcgaccactttaccggagcaatctcgccgccggtaagccccttcgccctttctttcgccgcgggtac

SEQ ID NO: 52249 - DNA, 483 bp, Zea mays
  unsure (1)..(483): unsure at all n locations
tctaatgtatgcacgcactcaaaaacacataggaggtgtctgcctgttttaacagacactcgctatactattctaatgaggttgggtgtttagtatcattcacgattagcaaaataactagcagacataacatttttctgtccaatttgcttcttcgaccatacgactacgacactagctaaatacataccgattgaagttaaatcacctattagacctaaataaattattttacttgcttggtgagaagtgtatcaaattagggaacctaatcagacatcaacatctataatcagaccactaattaacattacaatcgtttggagcactagagctaccgacgtaacaatagctcgcacaatagtcacacttttcctatttataggatntaaatcacatgtttagaaaatactaattaagaggcaagtcgtatactntgtggctataacatgacattgnggactaccgttcgactcggcatta

SEQ ID NO: 52250 - DNA, 457 bp, Zea mays
agcttgcaccccggtatattggtccattctttatacttgagcaatgtggaccagtggcataccgacctcagttacccgaaactttgtctgctgtgcataatgtgttccacgtgtcataattgaagaagtgtcttcgggttcctgatcgaaccgttgaagtgacagatgttgtccttgaaccggacttgacatattctgagcaccctattcaagttttggatcaaaaggacaggattacccgaagaaaaactctcaagttttacaagatacagtggaacaagcattccgaagatgaggctacgtgggaaactcaagactttttagataagaatttactacgcttcttagcctcttgtattttgtaaagcatgtatagctgttgtaataaaggagtgactcccaaaccacccctgccttgtaccagaaataaggaaataaaagtatgtcgcgtttcttt

SEQ ID NO: 52251 - DNA, 470 bp, Zea mays
ttgccgagttcctcctagtgcactcggcaaaggaactaacataggggctgctagtgatccctttgtcgagtgctagtccggcgagcacttgacaaagagtgagcctttgccgagtgccacctaatacgctcggcaaaggaactgacaaaggagccacaggaatcttctttgtcgagtgttagtacagtaaacactcggcaaagagtgagcctttgccaagtgtcactgtggtactcggcatagtctgtgtcgccgtcacctggcaccgtgacgacgtcttttctttgccgagtaccgattggcactcagcaaagtctttgtcgagtgttcgacaaatagtactcggcaaagaagtctgtgtcgatgtacgattcaccgagacttctttgccgagtgtcacactcggcaaagccttcgtcgagtgttttccaggctctaccgagtgcttcagacacttctgcaagaaacta

SEQ ID NO: 52252 - DNA, 329 bp, Zea mays
tttcaacgtctacaacctttgctgatatgtaacttcatattgcaaccattgcgcacaatgtacgaccaatggttaaaatcaactaaaaaccagtcaaaacaacgtgggtcattacttaaaactcccttgctaccttcatgacttgaatgacactaatatcatttaattgtcgacaaaaaacctaaacctacgctcacgtacagttgcctagttctctaactcgagcacgtctatatgtgggcctttttaggcagctgagcttcactgatatgataacttttgttagctatgactcaaacagcccgtcatccgaaaggtgaagacctcct

SEQ ID NO: 52253 - DNA, 426 bp, Zea mays
  unsure (1)..(426): unsure at all n locations
tgccctcaacaaatgatatcactagaacgatattatattattctctgaaagataccacttgtagaccatgaaagataccatgtgtaggagttcctcaaaagattactccncctaaatgagtattctcctttagacagagtttttctcccccattatagatgaagaaatactccccctgacagagatcctctacttacgaagaggcatgtgaaaattatacgagcaagacatgatttgaaaagactaacttcccttatgcataggtaacagaatatgagttaaccacttatgcatttttagcaacaaggaagcatatgatatgaaatatagtctaatcaaatattgaagaagacatgtaaatgatactaaaagtagtctcaaaagataccaattgaagatcaatggcgagcttgagagacatgagag

SEQ ID NO: 52254 - DNA, 416 bp, Zea mays
agcttcgaaagattacgacttcggtctcttctttagtatgcgtaggcttctccctggcatctgccctcacaatagacatgtctcgaaaataccttcccttcatgctatcaagatgactctgcttgatgctcgattttccgaagactgtgtgacttggtcgccacggtcgatcttcggactcttcaccaccactatccgcatcaaaactgtcactagcaccagtatcttcagataaaccctccagaatctctttagtaatcttctctgtattagtctttgacattgattgaagaaagcccagatgcatttcctcagaaagacttagcttcgaatcaccaacggcttttttatcttcagacatccttgcaaatgctgagaaggtgctctcgaaaccgaagcttataaatctaaaaagc

SEQ ID NO: 52255 - DNA, 472 bp, Zea mays
  unsure (1)..(472): unsure at all n locations
tctaaagggagaacacgtgatagggactaactaatttcaatttgataaagatagaccttgtgcagcttgtcaagcacggaaacaggtgggaggctctcatcacaccaaaaatgtgatgacgacatcaagacccttggagatgctgcatatggacctttttggacccgtcgcctatctgagtataggaggaagtaagtatggtctactaattgttgatgacttttcccgcttcacttgggtgttctttttgcaggataagtctgaaacccaagggaccctcaagcgcttcctcaggagagctcacaatgagtttgagctcaagatgaagaagatgttccgacggccgctatacgaaccatggcgattggtgatgtgcgaccacaggaacaagaagagcaagatcaaccttcttcctcaactatggtgaatcccncaactcaagacgatgaacaggttcatcaacaggaggcgt

SEQ ID NO: 52256 - DNA, 447 bp, Zea mays
  unsure (1)..(447): unsure at all n locations
agctntatgctagttaagtctactctttgtgtgtttcgtttctataactaatttttagtcgttcgattttatttcattttagtatttaaattatcaaatatagaaactaaaactctatttattttagtttctatgtttaataatctaaagactaaagtagaataaaatgatggaactaaaatttagtccatataaatcaaatatctcctttatataaactatgcatttaatacttggttcatctcttcattctataaaatgaaattgtcttagacttggtgaccagcctactttcaggtgcctgctagtgagcagcttgtttttctttctcttcacatctctttcttccacgtcactattaatctgacatatcatacaatccccctatatcaccttattatacttgctctaagctcaattgagcgagacacacatcattatctatta

SEQ ID NO: 52257 - DNA, 483 bp, Zea mays
  unsure (1)..(483): unsure at all n locations
aactcacgcttaacatttaacattntctatgttgccttgtgcttatttcttagcatttgagaacaagtccccaacattggtgcccacctccggtgaactcacttccactttttgagttttgaacaccttcgacaagcgtcaccttcgtcatgccgccgaaaaaagcttccacgacaggagctgccactctgcagccgctggaccccaatcaagatgtcgtttctcttagggaggcccgaagccagaagaggaaagtcaccagtccaacgcctccggaggacgacttggatcaggaaatccaaaatttagagatgatcaatcaacaggtccaacggaagaaggagaagatggctcgtctagctgatcatcaaaggcagatagacgaagcctctgaagaacttcgacatctttctcaagagtcaagatgaccagaaccaaaggcccccgcgcagagagcttcatcaagagggcttctacaacgag

SEQ ID NO: 52258 - DNA, 321 bp, Zea mays
gtccctgatccgaaggtatctatatgcacagatatgctggatgaagaattgcttcgaaaacattgagtgttccgcgaccaatgataacattgtacggatattccatgtcgacaatgtctaacacgacttgctcagtccttgtattgttgacgaatccgaaggtcactggcatggtgatcttaccaagcgctacaatctgtcttcctccgaagccacaaagagggtgcgtagcatcatgaatcttgtcttccggctcttgcatttgtctgaaggccttatccaatataataatccgatgtactgtctgtatcaaccagaaca

SEQ ID NO: 52259 - DNA, 406 bp, Zea mays
  unsure (1)..(406): unsure at all n locations
agcttctgtaatatacatgaattattatattttacatagcctctgggcgaagaacagtaccacaataactttggctgctacagcttcgtctctcgctccggggcaagctgtcccgtaccaacctttctgaagagatggcccggggattggatgacacaatggttttatgtgaagaattacttatcagcccgagaagacatcaaaggtataattatgcgtcctatttggcaaagcttctgccttccgaggccgaaggttgaaatgaaccaagccgccgaagagtgccaaagagccttcggcgttgtctgctcttttataagaacaagggacttattacaagagcatattgccttcanggtgtggccgcttgcggagaaatgggaaatgccaccagaaatcgttaaaa

SEQ ID NO: 52260 - DNA, 449 bp, Zea mays
tgcccggtgggtccagagcctaaagaaggtaccgtctaatgctattatgaacaggtaatgggtgctcggaccctcagcaaagacatgttgtatatttgttaagttcgtgagtagcagagcattaatatttcacttgtatatgtatattataattctacattaaattaaattttaaaatgccttaattcctagcattgtacgatcgttaaatagcaggtacgtgtccggtgtccgccctgacagccctgtctgtgaagcgatcgaaggtcgaaacagagtcgggttgtagccaatggcaagttgctcatagtagtaataacggtgtggtatgaccgcacgagagcggggtgcaacgtgcaatgcatcggaccaagttgaacgtcgccgtcgcgtgtttactgcatgcatggggcggacccgaatgcatgcgcatgctcgcccaacgcgga

SEQ ID NO: 52261 - DNA, 422 bp, Zea mays
  unsure (1)..(422): unsure at all n locations
agcttaatgcccctaaaagattgtctattttgttatnggcaaggctcacatggcacaggataacgagggttacattatatatcctgctggctatcctgagcataaaataacgagaattcattctaggaagtctcattctgggtctcatcatgcttttatgtataagaatgaggcatctagctctaggcaatcaacccatgttaaattgcctaaaaggaaatctcctgttgcatcaaatgagcctaatgtttcatttaagacttttgatgcttcttatgtgttaactaacaaatcaagcaaagtagttgccaaatatgttgggggcaaacacaagggctccaagacttgtgtctgggtacccaaggtgctagtttctaatgtgaaaggacccaagaccgtttgggtacctaaaaacaangact

SEQ ID NO: 52262 - DNA, 419 bp, Zea mays
cgaagagagtaggttcttcaagttatataatgttgaagcctctaagtatctgttcggtgaagacaagtgtcctctaacctattatgttatattcacaggaaaacttacattcccgtacaacatgattcaacctaaggatttactagctttcttttatcttgttcttgttacctttttgggttgggctatgatgattagcttttatattagtgcttaaacttaattaatgtacatgatgagacatatttaagatataatgattctaagatcttgattatggatttgtgatatcaaggaggctcgggctgtgtcccgagtacttctttgtaaggatcggatcattggatgactacctggaaaaacaatgcacgcatgaaggtggtatggaacgtccttagctaattaattagatgaacatt

SEQ ID NO: 52263 - DNA, 406 bp, Zea mays
  unsure (1)..(406): unsure at all n locations
agctttaactctcgcgagaccttttcccatttctttctaaccatgcgcgagtcattatcgcatgtgatattctatgcatgttcactttatttgttcccttgtatggtgtactgtttgtttcctaatttgaatggatgaatgtatgtatgcttgcaatcgcatagagaacgatccggttgaagagcccgatgaactcgcaggagaagcccctgagcagcagtcgcgtggtggaggcaagtgtcccttgacctatctctgtcctattcattctttaatcacctcccgctttacacattatgcctaaggattgactagctntgttatccatgtccttgtttacctatttgggttggatattattgttagctttatgctattgctcaacctctaatcattgaacatgatg

SEQ ID NO: 52264 - DNA, 431 bp, Zea mays
  unsure (1)..(431): unsure at all n locations
nttctcgactaagtcggcgacagggcctcatggactggtgatagtacgcgtaagctgcaaggccgaccgagccgagggattcccacgcctctgggatacggatacctcactcgtcccttccgcgaaaagcagctctcgctcacacaaacatccctgttaccgacagagtccagatgctcgaaacaagaggaaaaaagacgcagcttcgcaagcgcggcgagggtgtgttcttctggcctcggcggccgcagaaagcacacgctacaagatgatctgatcctgcaggctcgagtcttcacgctgaagggagccgtagcaccctcggcatcgacgacgtcttcagcaaagcccgacccagcctcgggcggcgctgcggtccagggactcctccgggaatccggcccgagcaggcggctcaaccggttacccct

SEQ ID NO: 52265 - DNA, 379 bp, Zea mays
agcttctaaagggagagcacattttacgactatcttttgttttatttgagaaagacagggtttgtagcgcatgccaagcaggaaagcaagttggctctcatcatccacataagaacataatgacgatcgacaggccactggagctcctgcacatggatctattccgcccgattgcttacataagcaatcgcgggagtaagtactgtctagttattgcggatgattattctcgcttcacttgggtattctttttacaggaaaaatctcaaacccaagagaccttaaagggattcttgagaccggctcaaaatgagttcggcttaaggatcaagaaaattataagcgacaatgggacggagttcaagaactctcagattga

SEQ ID NO: 52266 - DNA, 477 bp, Zea mays
  unsure (1)..(477): unsure at all n locations
accttacatactcagcttgaaagaggaagggagcacacttaccaccatcagcttgttaaactcgaacaaatataacaatatgcaaacaagtataataagcattggaagctggcactgatatcatcttaaactaaagttcgaggatatcacatgtgaacgtggcattaaatgagttaatatgctcgcctccatgtttgtagctttagtttaccagtatagtaatatgggaaaacagacgccatgtaaattcctgcaacatgtccttgccaaatcanggataaatctttccttgccaaaatcaataactgatgtccttgccaaattcaatagttcaagaattaacagctaccactcaattactatctttacctgcgtgtgctaactccatattttaataaagcatcctggacttggaaagactgttacatggtcatgaagcctaagagaatggtaactaatcaatggcattctatgttt

SEQ ID NO: 52267 - DNA, 463 bp, Zea mays
ggatcttaagcacctgagctgcagcttcaaagaaatctgacttaagttaatttggttgatgagatatatgtactttaactttcttgcttgcactatggtgcaaaacatccaaatatactagtatcaccatatctctttattattttggatatatgctttaggccaaacaatgctctgcatgttctggtggaatgaaattaagatgggtaagtctagatatgactctttagagttccaaagatagaaataactacatttgcacccaacaacatatttctatttgatgtagttcaagtgggcttgtacttagagtttgtattacgcttaatcgaatgtaaattataactttatgataatatttcatgtaagcactctatatgtacctagaatcatcttaaaataagattgtacaagatatcaaagatatgctaggaatatcatgaatgtgccaagtcatgattta

SEQ ID NO: 52268 - DNA, 464 bp, Zea mays
  unsure (1)..(464): unsure at all n locations
ntatcatatggacgtgaaaagngccttcctcaatggacctatcattgaataggtctatgttgagcaacctcacggctcttaagacagtaagtatcctaaccatgtctataaactctctaatgcgctttatgggctcaagcaagccccaagagcatggtatgaatgccttacagatcctcttattacaaatggattccaagtcggaaaggtcgatcctacactctttactaaaactcttgaaaatgacttgtgtgtatgccaaaattatgttgatgatattatatttgggtctactaacgagtctacatgtgatgagtttagtangatcatgaccacatacagtctagatgtctatgattgcggagttgaagaacttcttgtgattcaagcgaagcaactccagaaggcaccttcattagccaaacgaagatacttaagacattctaacaagtctgcgatgaatg

SEQ ID NO: 52269 - DNA, 53 bp, Zea mays
  unsure (1)..(53): unsure at all n locations
ttttatccccccccagcggcncttgaactgtgaacctgaaaccncacccagaa

SEQ ID NO: 52270 - DNA, 454 bp, Zea mays
  unsure (1)..(454): unsure at all n locations
ntaaatgtgntgacatcaatcaccacaaaggcggagaatgtaagtgcattcatcccttctgtgagttttggtgaattggataacaacacatttaaaggtctaacaagtttgctaagtgntgaacaagaaattcaatatgatgaacatactcgaatagtgtataatgatcagtgaacacggttcaacacaacgtgaaataaccagtgagacactgcaaatggacataatatggcctctatattggttgaatatatggacaagttctgacaaatcactatgcataaatatgatcataataaacgttgaactgattaagacgattggtcaagcccaactgaataagatatgaggaatcgcgaattgccttgccatatactattagtccctatatgatatatgacactaactcaagcttgttgacttaacagtaatctaatgacattcacaacgtcac

SEQ ID NO: 52271 - DNA, 434 bp, Zea mays
agcttctaaagggagaacacgtgataggtcttacttatgttcatttcgaaaaagatagaccttgtgcagcttgtcaaacagggaaacaggtgggaggctctcatcacatcaaaaatgtgatgacaacatcaagacccctggagcttctacatatggacctcttcggacccgtcgcctatctgagcataggaggaagtaagtatggtctagttattgttgatgacttttcccgcttcacttgggtgttctttttgcaggataagtctgaaacccaaaggaccctcaagcgcttcctcaggagagctcaaaatgagtttgagctcaaggcgaaaaagataaggagcgataacgggtccgagttcaagaacctttaagtggaggagtttcttgaggaggaagggatcaagcaccaattctccgctccctacacacca

SEQ ID NO: 52272 - DNA, 487 bp, Zea mays
  unsure (1)..(487): unsure at all n locations
gacctataaaactcagctggtggggtcttggcgcatgatttctctatctctgcaagttccatgctcactctcatcagcattaacaacaagataagaagggcgtccatcagaaaccttgggcataaaggaccatttcagaccagagggaaaacctgcacctccacgaccccgaagacctgatttcttcatttcattaactatccagtctgcccccttaatcaccaaatccttggtcctataccagtcacctctcttcaccgcgcctttcagaaaagggtcatgcagaccatagaggttggtgaaaatgcgatcctcatctttgagaccaccaaagtgagtcttctctggagggggtggtggaggtggaggctgtggtgtgcttgacgtaatggcagcctgggtgctaaatgatctactagcaggacaaagaccagcaccatngagagaacaagcagactgtgcccttgagaaagaataanagtactca

SEQ ID NO: 52273 - DNA, 313 bp, Zea mays
ttttttctagatttgaagcccgagacatacaagctgggccacgatcaacgcgaggtctacaccaacgcttagaacatcgaacaactacatcgcttttacccttaaagaggttccaagcgttcatgtatctcgatccccttacatgcataaataaaaaagtctaaccgccaaaggaggatcgaccttgcctcacataaaaccgaacctccctcgggggctagaaggggggaaccccctctgcgtcaaaatctttctcggaaaaagttctcaccacaacaacttttgtgcctttcaactatatcgataacggaat

SEQ ID NO: 52274 - DNA, 442 bp, Zea mays
tgtgaacaatacaaattcataagggagaaagcagcttcattatatcagccgaagcccatgctcttatgtgaggatatagcagagcagaaggtgctgttgggctctcagttatccgaagaacaagagaaaaccttgataaggtttttgttcaacaacaaagatgtttttgcatggtcagccaatgatctctgcggagttaataaggatgttattgagcactcgctcaatgtcgatccatccttcagacccagaaagcaaaggctttggaaaatgtcagatgataaggccgaaggtgctcgcaacgaagtcaaaagactccttaatgcaggagttatcatagaagtaaagtacccagaatggctagctaacactgttatggtaaaaaaaggccaatggcaagtggcgaatgtgtatcgattttacagatcttaacaaggcttgt

SEQ ID NO: 52275 - DNA, 440 bp, Zea mays
  unsure (1)..(440): unsure at all n locations
atcttaagcacctgctgcatgctatcttatcacttaatccatctccgtctctttctgttgtgtatgaaaaangatgttgttcacgtgcaacaatgaaaatcggtgcacgaagttgatccgcgtgataatgaagcggtaagtatacccgcatacttgatcgtgtacgagaggccgttgcaacctcccgctttgacgcctatacgcagaaatggacgctgcctgaggctgaagatctgccggatctaaagtggcaccaacaacaaaatattaataaaaatcggccatacattatcatctacaagtaaatgccttcttgggaagctggttttggcttgcaactatgggtcgatttgggtttcaaagcacacacttcgtaccaggcaaacttgttggtattactgctctcatcgcgcttgtgagatgagtgagtgatcattaac

SEQ ID NO: 52276 - DNA, 500 bp, Zea mays
  unsure (1)..(500): unsure at all n locations
tcggctggaagggcttataatgtcatccgcgctaatataactatattactgtgctgaactacagcgctatggcatggttcgcaactcagcctatctatcaaaatggatcgtgagtccctccacagcactcagtcaaagggtgcagagaatacttgacggtccatttatagatttacgtcaaaaagcatttggtcttcacccgctgatccatctggacaacatcaatcactgatcgctcgcaggatgaaatctctcgctcaaatagaatactgccccaacctctagcaagagatgtgctttaatttcctggcgctttccaaggatatttcataacacctttctttggaagcacgaaactcaacaaggatcttttatgttcttgatctttcgatctcgcacatctcatgcttcactaccttaacttcaaagttttcggatgcttcagcaaccttgctttntagttcttccactatggctctatgagctatggctggtgcatc

SEQ ID NO: 52277 - DNA, 403 bp, Zea mays
  unsure (1)..(403): unsure at all n locations
agcttgtgccttgcctcaatatggcctgagttgtgactgnggcgccatcttaacacgcctgctgacgcgccacactaattcagcgcatctgtcgacgcacccgctgtcaatccgccttcagtcacgtcaactgccatatctgtccccgcggctgactgacccacggcccccatgtctggcggttntgtcgggccatgagcggggcgccttgttgccgccgccttggttaaagaatatccttccacagcggccctgaggtggcgcgcgatctattgctgcggttcccttcccgcgcgcggggttgcttttttctcactctaagaccggcacaccacctgcatgacttgtggacctgtgcccccgtgttctagacgacgctgcctgtgtgccaggtgcgcgtccg

SEQ ID NO: 52278 - DNA, 423 bp, Zea mays
tgtccacctcgggccagttggcgactcctgtcggtgcttctccagagatgttcgctcctacctctgaagcagacggcgggattggcgctccacccggacgccttggaggcgcggtgccttctgtgcgacaaaggtccgtcggcgcgtgatcgatcgagtgggggcctttccggtccttgccatctgacttctcatgtcttcataactcttgagttccttcaacttttcaacagtccccccaatgtgtggcctccatgctgtgcgcgtggaaggtgatttccaagatgaggaggatagtgcccaccgtcgaagagggcggtggtgccgtcgaggtcttccctgccaacgccttcacaggtccactctagggtcgagaccctatgttcgcttctcttgacacctccgagctacttgggcctttcg

SEQ ID NO: 52279 - DNA, 385 bp, Zea mays
  unsure (1)..(385): unsure at all n locations
gcatgcaagctagtgaagattcttcattccaatatgtgttagtcggngatgccacagccaacccatgttagtcttagcaattaagcaagcgtcgagttcagctctatcaaaatctactaagtatagcctgaccctctaacactcccttanatgctattgaatcatcacttcttctaaagacagcaacacatgtatccgtaaaaagacagctgtaacccattatgcataattgcgaaactgaaagccagctcgtatctaaagaatctacaagaaaaacattgggaatggaggggtcacgagatatagcaatttactcaatcctttgaccaaaccttgatttccatcccgaatgtgatagctcgtggggatcttgggtttctcgaag

SEQ ID NO: 52280 - DNA, 464 bp, Zea mays
  unsure (1)..(464): unsure at all n locations
agacacgtttacgcagacaagcttactagtagtggatccttatgccaaacttttacttcacaaattaagtattcttcctgaatttagatttgcctaatctagagcattcacttgtcctacactagcttcattttagcagctttagtttcacttgttatctacgatgcagggcagtgatccagtcttcatatccgagaagtaacggcgatccgaatcgattaatactcagctgaggatctccaaccacacgacatatgtagcacttaacccttgcatatgtcaactcgcccatgggtttctcaagaccagaacgggttcacgcgacctgagagcacagcactccaccgtccagtcattggcctggttggtacacgttactctcgccatggtgcccgccatggtttcaagagtacagcaccccaccttccagccgctggcctagttggacacgntactctcgccat

SEQ ID NO: 52281 - DNA, 401 bp, Zea mays
atgcaagcttgcataccacatgtggtgccattatgtttttgttaccctctaactcgtacacctctaacgagttccatttgctttttattcattgccatgattacgagggaaccaaaggatttaagcgtggaggcacaacctgcatggtggaaaagaggcggtggcatgccagtggtatatcatggagtgagaaagatacaatgtgggcacataagtctaggagcacgtctagggacgcaaggaacgccattaatgcttggtatagcgacaacaatggttatgaggggagtgagcctgtgatagaaagagggagagggcataatatgacgtggacgccatacaaatggtgtggagcatgatcatacggtgtccggaagagggagagtgcataagatggcatg

SEQ ID NO: 52282 - DNA, 481 bp, Zea mays
tgagaaggggacaaccgtagcatgcacaaaacctcttcttattataaccaagctttccaagaagggcatgagataaatccatggtgagaaaattaatgctcatatgagttgctctaataatgtacctatgtgcttcaacaaagaaagatcaaagagaagcgataggaggtgctatggatgcaaggagaagggccatgaaattgattcatgcccccacatgaagaatcaagaccttgcacgatcaagacagatgatcatcacaaaggatgaaagcaaaaggcaaatgcattgcaaggacaagcatcacatttgctacaattgccgtgaaaaaggtcatctattcaaggtttgtccaaagggtaaaactcctaagcctaactcgtcaatacattcaaatatgcttaggagacccaaatttgactcttgtgctataaaggtgatgaggtcatcacattctatgaccaacgctatttgggtgcct

SEQ ID NO: 52283 - DNA, 426 bp, Zea mays
agctttaaaggttaatcttcacctaaatatattattatgaatgctcaaggcaaaggtatggaacaaattgcttcaattggtagttgatcaatagtagttccttccaagtggcattatttcaattggtaataatatattctatggaaaggaatgtcaatatgaaggttaaattccttttggcttaaatttgtaaattagcgcatattgtgaattcactgctccatgtgcattaacttaaaaggaatttaatttatgcctttacgcctcataaatgatgatttgtttgccattcatatctaaagatcaccattcattaaatacttccttgtactactaatacctcttttcaaagtgttttatcgactagttttaaaaggaaaagagataacaaagaatgaagtctcacacatgatgaaaagaaaatac

SEQ ID NO: 52284 - DNA, 476 bp, Zea mays
  unsure (1)..(476): unsure at all n locations
tcagttccgccaactcattatggggcatgcggtactatcttctttagataggagtcgtaccgggctttagctcaattacgaattctacatctctttcagggggcagtccaggcaaatcttccggaaatacatctggaaactcacatactaccggaatgttcttgatctccggtacaatggcttcatagactctaccacaagcattggctggattggttactacgagagtcaaaagaatctcttcttggttatagctcaacctgacggttctgagttcagtgttgaggattgccttgtgttgggttaaccaattcatacccagaattacatctatatcctggcccttcagaacaatcatgttagcaggaaagatccgtccggccattgttactggcactccataggccacttctttagtataaatgtgtcccncacgtgaatgtattttaaatccctcctttgatcatggatgcaat

SEQ ID NO: 52285 - DNA, 391 bp, Zea mays
agcttttgagctaacatctttctttgggtttttcgcccgcgcatgcgcattcagcaggggctgtagcgccttgacaacaatgctcatgtttggccggaagtccgcttcgtactgaacacacagcgcggcaacagctgcaaactggttcatagacagttgcgcctaccttagaatggatcatcgctcaaggacacatgaactcaagagctaacacttgacagcaccagcagcaaaggatcaaagcttagcataacaaactgacactgaatgcaaattatctttcgaggagaacaatgttcagcagcaggtcagattctacgagcgcaacactagaattagacatttgaataacagaagacagcttactcttgtacaaccatcacaaccagat

SEQ ID NO: 52286 - DNA, 228 bp, Zea mays
tggctcacacattatacctgcacaaggtactcattcttcattggatacgatcatatgatggacgctactgcctcgctctttacgatgaatattgcgagactgggtctctgaacagactacaaatgagtaaagtgggatgtcctctcctaggaagttcgttttattgtgatgaattgtgtgatcagaggaaatcattcatcgacgaatagtagctacttgacctgctac

SEQ ID NO: 52287 - DNA, 396 bp, Zea mays
agcttcgaaaaatctggtatgaatctgcggttatatccagccagtccaaggaaacttctgacctgatgaacagtggtcgggagtttccactccaaaatgtccttgactttgctgggatctaccgcaatccccctggcagatagtacatgtcccaaaaattggatttcctccagccaaaacgcgcatttgctgaacttggcatataactgatgttctctcaagcgcgttaacacgatccataaatgttgggcgtgctcctcttcattcttggaatatatcacaatgtcatcaatgaagaccaccacaaacttgtccaactcgggcatgaatgccgagttcattaaatatgtgaagtgcgcacgagcatttgttaatcccaaagacattaccagatat

SEQ ID NO: 52288 - DNA, 467 bp, Zea mays
  unsure (1)..(467): unsure at all n locations
tcttctcgtcgtcgatgagcgacgccaactttagctccttctgctagtggtggttgttcagggtttccaagtaagaaacatgtattcatctttggcgttggtttatgaaaatgactcacaagtcagatccatggaaaaaatattacggagaataaatgtcacacatgcaaaaaaggaatttaagttgaaaacattattcaaacaaaagaaattgcatgcaaggctcttttataaatactactccctgcatccaaaaatataattcaagaatctcggtgatacttatctactactacacattgtgcacaggtagcaggtgggctttgggagagatgtagtagatgtttttactgtaatagatgtagacataaacacacatgtggtgtagtggtagctacgagcacatttgcttgaggggtcatgggttcanatccccttggagccatttgtgtttttaatttaattta

SEQ ID NO: 52289 - DNA, 459 bp, Zea mays
  unsure (1)..(459): unsure at all n locations
agctntctatgcccagctcccaccaccaccatcggtgcacttactctggtccagagccagcagctagaagggcatcaacacgctcagcagcagcgagattttagggaggagttcgaagctcgcacaatcaatagcactatgcccgagtccaagcacatctactaaagaatatcctactatggcgcatctttattatttccgccattttattttcttgtatgaaaaacaattcatgaaggattaagttccaatttgatgtaatgatattatggtcacatcatcgagtgggatgcatcccattaacaagatcccgaagttacaaaagtcatttctaagggagggcagagtaagttccgaagctacaaaagtcgttcctaagggagcgcagagtaagttccaaagctcanaagtcattcctaacggaatgcagagctaaaataccaccaaaatagaagttga

SEQ ID NO: 52290 - DNA, 335 bp, Zea mays
  unsure (1)..(335): unsure at all n locations
acacaaaagagagaaggctgcttctgcagatcagctgaagcctatgctnttatgtgaagatatagcagatcaaagggtactgctggggtctcagctatctgatgagcacgaaaaaactttgatcagaattttgttcaacaacatagatgtcttcgcttggacagccaatgatctccgtggtgtcaacagagatgtcatcgagcattcatttaatgtggatccatctttcaggacacagagcatagacttcggaagatgtctgatgataaagctgaaggtgctcacaacgaagtaaagagacttctcagtgctggtggttatagagaagtaacata

SEQ ID NO: 52291 - DNA, 446 bp, Zea mays
  unsure (1)..(446): unsure at all n locations
agcttgagcttaacagaaaaacagggagtctaccctaataaccctctagtccagttacagttgaagcgaatatggaatagtgtagttagggcatgcatgtctactatgacacacgaacataatggaatagtgtggttggcatgcacggttaggttcttaaacagcaaataaggctatgtttggtttcaattagtcttaggactaaactttagtcctaggactaaattttantccctacttgtttggttctagggactaaatagattctaaagtcattaaatatattgtccacaagacccaaatgcccttggaatacactcatgtgggcttttagtctcttttagcacctatgtgaaggactaaagactaaatcattctagtccatatcttagtcctagtggttggcaaanaagggactaaatgagactaataactagagactaatc

SEQ ID NO: 52292 - DNA, 491 bp, Zea mays
  unsure (1)..(491): unsure at all n locations
tcatgatgttggctntatgcactgctgtcactatctttcgattgttaaggaatgcatactcaaaagcatacttggcaattctttcagagcagaactttgttatcacctagcaaatcaacaaagtgatagtaaatagtgtactaaaagaacttgcaatacgttccactttcagtgaaaaagcgctcctgtaaagagaggtttattacattccaacttgtaaaaatgcagattttcaagatacctgacttttgagcaaagataaacccatagagagtatttgcagccaagtcagaacagggtaccacagtcataacaccagcgttacaaaatctaaagattaaaccaatacctggacttcaggcccaacattcatgacatcaaagagaaatgtaacagaacagactaaaaaatcaagttaatgaaaataggttggacaatactgtgatattttnggcaatttactaatattacatcagccangccataaattg

SEQ ID NO: 52293 - DNA, 448 bp, Zea mays
ttcacttggatggccttggcataagatgtttgttcatgttttgatgagcacactccagaaggtattacagaaagacatggctagacgattaaaggatgtggtgtttgaaaaagacaagccatgtagtgcatgtcaagctggaaagcaagttgctaatacacatcctactaaagctttcatgctaacatcaaggccactggaactaccttatatggatttatttggacctacaaattatgtaagtgccggtggcaacctctactgtctaaagattgttgatgacttctcaagatacacttgggtgttctttctccatgacaaatctgaagttgcatttatattcaagaagtttgccaagaaagcacaaaatgaatttgatcgccagatcaacaagattagaagtgataatggccaagaatttgaaacaccaacattcatgagtactgtg

SEQ ID NO: 52294 - DNA, 377 bp, Zea mays
  unsure (1)..(377): unsure at all n locations
tgtgatttattcaatttaanacaagcaccatgccttaacttatattttctatggataaactcaacacatgagatggcattatgtgatacccggtttgctaagaggagaagtggagattattctttatgttgtatattctcattcgggtgagacgctctgggaagttggaatttgtggaaaacattcacctgtaagacagtagaatttctttggttagttgtctgcgacggggtcgggaggtgtcacgtgggcgagttgggccttgaaccttgatccggcccattagtctcccctaaccctagctgacccccctcttccccttaggattttgcagccaccacctaatccttctctttctcttggactgcacccccctc

SEQ ID NO: 52295 - DNA, 426 bp, Zea mays
  unsure (1)..(426): unsure at all n locations
agctntcttcgtctactctcatgtgcatcaataattaatgacagaaaccaaacgaggcgtccagaaactgtcgagagagtttcgttctccattagaaatcctttctattcctctatttaagcaactagcagccaccaaagaacttgggtttttgtttgatgtaagtttagcctttgctacttccttgtaaatgcgtgtgtcggctagaccacccggatacttgaaacagaaccccaactctatcagatccgtgagcgtctgctttttatcttgttcttgcttgttctcgattgcttgcaggttcaaggctgttcttggcacggcaagagcagcaacaataggagccggtgtaactatcgctaacgcgcaccattcttgtggttgttgtagtcggatagcacaacgtcgacctccaccccaaatcgt

SEQ ID NO: 52296 - DNA, 301 bp, Zea mays
tataataggaggatagaggcaagagctcgaccatatgttataatataatgggaactatacaagcgtggggtctgttctccattactcaagtgtttatccagagccgaatgtatagaattgatgaaagaaatacacgcacgcctgtgtggatctcacattggatctaggcctttgcttgaaaaagtttttgtaaggattttattggccaaagcaacttttgatgcccggaaatagtccaaagtgcacgttgtcagaatgtcaagagataaaaacacctttcttttactcattatacacccac

SEQ ID NO: 52297 - DNA, 414 bp, Zea mays
  unsure (1)..(414): unsure at all n locations
actcaagctncagaaaacgaagccttcatgttccagaatttaattggagtaatatctatctaaagctganatagaagagcttagagagtatgctcaatcctgcggatacaaacctgcggcactcctcttcggaggcattgatgacgaaaacttatattgtattccagaacaaatatgagcccaagggatcaatactctgtccaacagtatcagctttccgaagctagaaacagacattagccgctaccgacgacaacatatcggcggtagtttatattactccaaccttcaagtgaactacatttaccttaactcttattggttctaataatgaagacatgtctgacgaacaatgttcctgtgcagagtatgttgttgagcaaaaccttgcaatgcagcangattttgaagata

SEQ ID NO: 52298 - DNA, 345 bp, Zea mays
  unsure (1)..(345): unsure at all n locations
aacttagcttggggantatgccgcacccaacacccgagccattttataggcggcagccacgagcccctcgttgttggtcgaccacgaccaaaacccagcataagacttccctatgtatatagccaagacctgagccatgatagctcgcatggtaacatcgtttctctgggtgggtcctccatgttccaattaatatgcaataatcttgtctaaccattgtgttaacaacaataatataaacctaccattgtggaacaataatatcataggcgggaatgactgcacaaaggtaagtcgcaacaatagtgtcggcgtatcgagaccggcgggcgcctaagcccacga

SEQ ID NO: 52299 - DNA, 450 bp, Zea mays
  unsure (1)..(450): unsure at all n locations
agcttgttgctcaatatgttggaccaatactctttaacacaaaatcttgtgtttaagtgccaaatgcgcttgtgactaacgtgagaggacccaatgaaagttgggtacctaagaacaaggcctaaacttattttgtaggtttatccatccggaggcacaagttgggtaattaatagcgtatgcacaaaccacacgacaggtgagaagaagatgttctcatcctatgaaaagaataaggactctcaagatgcaatcacatttggagatgaaagtcaatgaaaggtaaaaggtctagataaaattgttatcaccattgagcattctatttgcaatgtatttttggcggaatcaataggatatgacttgcttttcgtttctcaattatgtcaaactgggtataattgcttatttactgatgttgctgctacnggctttataagaagtgatgat

SEQ ID NO: 52300 - DNA, 471 bp, Zea mays
  unsure (1)..(471): unsure at all n locations
taatgttcattccattgtcccatacatcgagcatttcattatattattacaatgaagnctattcttctctgagaactttttccgcaacttcgtttaaaagattatcgataactntgtcaataatggagtttgccatgtttatagtgtccagcgcttccttcttttctggatcagctaggggatcgtacggttccggcggtggagatagtttacctgaagtaggtaaaattgattagtccgaagccacaaaacaagtaccaaagctaaaaaccaaaaaataatacctatacgcctttctcgttctgcagcctcttaagctcgttatgcttctgctcgggcgtcatgggtgtctttntcactctatnttataatctcatgggacacctcttggccccattcacccagacatcattataaaatttcccgccattaaagatgcttagctaaaggatccttcgatcatctacggag

SEQ ID NO: 52301 - DNA, 446 bp, Zea mays
aacttgtgtttacaagaagtaaagtttgagtctttttatatttctgatcttgtctgtggatgacatattattgattggaaatgacattcctatgctggagtccgctaaggcttcactgaaaaaaagtttttctatgaaggacttaggggaagcaacatatattttgggcataatgatctatatagataggtccaagaggcttatatgattaagtcaagatacgtacattgacaaggtgttgaaatggttaacatggaacagtccaagaaagggttcttacctgtgtcacatggtacacaccttagccagaagcaatgtcctgcgaccgcaaatgagcgggagcgcatgagtaaggtaccatacgcctcaacaattggatcaatcatgtatgccatgataaagacacgctcacatgtttcatacgctataagtgctacgagtacgta

SEQ ID NO: 52302 - DNA, 445 bp, Zea mays
tatattttgtatccgaggttcttagcttatcacagaaaattatacagaattggagaaggtactgtatgctgttttgatggcctccacgaagcttcggcactattttcaagcttacaacataattgttccttcttcacaacctctgaaggatattatgagaaaccgagaagctacttggaggattggaaaatgggctgcagagctcaatgaatcttgtattgattatgttcatagatcttcgattcagtcccaggcgttagcagacttcattgctgactggacgccacgggctcacgaggaagaaacaaataaagatgccgaagcatggacagtgttttgcaatgggtcttgtggaaccttccgagcaagagcggctgctgtgttggtttcaccttccaagttacaacttgttatgcggtaagacttgatatatttgcacaataac

SEQ ID NO: 52303 - DNA, 435 bp, Zea mays
  unsure (1)..(435): unsure at all n locations
agcttctaaagggagaacatgngttaagacttaccgatgtctgctctgagaaagacataccttgtgcagcatgtcaagcagggaaatatgtgggaagcactcatcacagcaagaatgtgatgaccacatcaagaccactggagcttcttcacatggacctcttcagactcgttgcctacctcagcatcggcggaagaaagtatgagcttgtaattgttgatgatatttcccgcttcacttgggtattctttttacaggataagtcagaaacccaagggaccctaaagcgcttcttaaggagagctcaaaatgagtttgagcttaaggtaaagaagataagaagcgacgatggatccgagttcaagaatctacaagttgaagagtttcttgacgaggaaggcatcaagcacgagttcttcgctccctacacaccat

SEQ ID NO: 52304 - DNA, 271 bp, Zea mays
tgcggccgtctgggtccattgctcacgaacggtagccatgctggcctgcatggaaacaacccggtgttttttgagaccgacccacgagcttcataactgaatcaacgaacttgccgcgaggactgcggatccaaaccttgatccacgctcggactctattcattattgggtataaaaaaaccagccgtaccccgttgtgagcaatacatcaaaccagcgggcgccatacagagaaaatcgtagatccttgtgggagagagagaaagcgggt

SEQ ID NO: 52305 - DNA, 449 bp, Zea mays
  unsure (1)..(449): unsure at all n locations
agcttaatatcactactggaggggntagtgtttttcttatccattnagaattaggtgtggccaaggtctgaaggttggattaatttagttcaccactaacctttaatgtattagtgaaaattttaacaacgtttttgctgaagttgttatggttaagatttatcatttctgttaattctctcttttccctttcctacttatgctntttagagtaggtatgaactacaacatagtttcaaaaatttccaaaaattctgtatagtggcttctcactggtgtatatattgcaggctcaaaaattgaggcctagaataagactggtttctctgcacaaaaatattaatatttagggcagagggggtgctttgaactacaactctcttctaggagtggattttatcttaagagttattttcgctggtatctacgtataatattatgaccttatg

SEQ ID NO: 52306 - DNA, 484 bp, Zea mays
  unsure (1)..(484): unsure at all n locations
cctatgaaactcagcttgacatgtctgcgaggttctgggaaccttagttttgtgctgctgctgncttaattgcaccttccaaggtcagaacatgctatgcagcaaggcttgatttcagctgtacaaataatattgttgaatacgaagctttacttttggggctttgaaagttaaaggcaatgggaataagaagggcagtccttaaaacagactctcaagtcatttctggtcatgttgacaagagttgcaaggcaagagatccgaagcttgagaaatatctggacacagtttgaaggcttgaagcttctttccaaggtttttctgttaagaatattccaagaggggaaaatgagcatgctgatctgctagccaagtcagcggcacaggggcttcctccacggtaactgtccatagtgaagattggaggactgagattatatctttcctccagggtaactgtctctcggatgatgaggtttataac

SEQ ID NO: 52307 - DNA, 382 bp, Zea mays
  unsure (1)..(382): unsure at all n locations
ctgcagcatgcaacttacattntaaagttgtctaattttttgaccaaatttagatgaactaaacagacgttatgaattattaaagtttctgttcaaatttaaatcaaatttaaataaaggctttctggaaaaacagattacaccgaggaccctgtgtttaaactaaatcaacccactcaaatctacccctgcgccactatttccctgagtcgctgacagttcataaagccccctgacctttccttcttcttcctcgaggtccttcccctaatgtaaacagcacccgcgggaaagaaaagggcggtgaggcttaccggcggcgagaggggtccggcgaggggcggcgttggctcggggaggctctggtggtcacaacgatgta

SEQ ID NO: 52308 - DNA, 474 bp, Zea mays
taatgttcattccattgtcccatacatcaagcattgttattattattacaataaaacatattcttctctaaggactctttccgcaacttcgttcaaaagtttatcgacgacttcgtcaatattggagtctgccatgcttataatatccagagcctccttcatttccgaatcagctaggggatcgtactgttccggcggcggggatagttcagctgaagtaggtaaattgattagttcaaaaccacaaaacaagtaccaaagttaaaaaaccaaaaaataatacctatatgcctttcgcgttctgcagcctcttcagctcgctttgcttctgctcgggcattgtgggtgtcttattcattcttttttataatctcgggggctagctctcggccaccattcacccagacatcgttataaaacttcccacctattaaaaatgcttcggctgaaggatcattcgtatcatctatggag

SEQ ID NO: 52309 - DNA, 397 bp, Zea mays
agcttgtgaagattctttatctcatcatgggttattcggcgatgccagagccaacccatattagtcttagtaattaagcaagtatcgagttcagctctattaaaatcaactaagtatagctgaccctcgagtactcccttaaatgctactgaatcatcacttcttctaaagacagtaacatttatattcgtaaaaagacggttgtaacccattttgtataattgacagcggcagaccgaaggttttaagggcccggggcaaatttaaaatagaggttcatcaaactattgttatataaaaatggtgccaatatataaagtcaagacacatctaaaattattcatatctagccacacataaatcaaaagatacatattataggattatcctaaagttc

SEQ ID NO: 52310 - DNA, 458 bp, Zea mays
  unsure (1)..(458): unsure at all n locations
agcttagctaaaatntaagtgtgttntgaatgctccatgaacttatctatgaaaatgtgatgtgaactgggtggagacaagatacaatattaggcttggtacaattcgatgacgacaatgaataccttcatgtagaagcaatgcccaaagaagcctcgtttgagagaagacatgtgtggcatgtttatatggtaaaatatcataatatacaccttcgaatgtgaatcattactatataaaaggaaggggtaaaatgtaattgcacacaaggtacaacttacaagctacattaatgctgtaatggcactaatgtaaggaactttatgtcctggtgattcctcagcatcactctttggtataaatgggccaatactcctttcaagggatcttacaaccttcggggcctttaaagggcgagctttggttatattaaatcactcaaggaccttcttactatt

SEQ ID NO: 52311 - DNA, 489 bp, Zea mays
  unsure (1)..(489): unsure at all n locations
ctaagcttnctatgtactacatcgcaatccgcataatcagaatacataccaatggagaaatgcactcgtaccatgtgtgttaccttaaccttgcctgagtcattgatccactgaatgtggtatggatgtggtcgaggaccgtgtgtcaagccaagcttcttgaccaaatctgaactcaccaaattattgcaacttccaccatcaataataacatgtgcaccccaattctctatggcgaacaaagtctggaacaaattatggtgatgctgcttctctgatgattcacgttgagaactaacaacacgctgcaccatgatgcttcgaaggttcactcgagcatcagcaccaagcatggcatcatcattagcagtcacatcacaggaatcatcatcgtcatgctcaccgtcggaagcactaatgtagccatcatctgtagcaatatatgttcgctgactcatgaaatacttcttcacgtgaccaatcccatga

SEQ ID NO: 52312 - DNA, 388 bp, Zea mays
agctttataggcgatagctctggcactgcttttgttatgatctgccgaaggtatttctttctttatgatcttcggctacgaagcatacccccaacatggtgtctcttgatttgattacaaatgcttgagaacaagaaatggggaagaagaaaagcgatccaagcgcaagagctcaaagaacacgggcaaaactctctcttctagtcacaaattgctttgagtggaattgggacttggagaggctttgattcaatctatttgtgtcttgtattgaattcactagctcttgtattgaatatgttggctaaaaaacttggatgccttgaagtgtggtggttggcggtattaacctcacctcctcccatattatcccttgctccctctcttc

SEQ ID NO: 52313 - DNA, 500 bp, Zea mays
  unsure (1)..(500): unsure at all n locations
gacctatgaaactcagcttctnagggagaacacattntgtgactaaacanatgttcattntgtgaaagacagggtttgtagcgcatgtcaagcagggaagcaagttggtgttcatcatccacacaagaacatcatgacgactgacaggccgcttgagctactccacatggatctattcggcctgatcgcttacataagcatcggcgggagtaagtattgtcttgtaattgtggatgattattctcgcttcacttgggtgttctttttgcaggaaaaatcacaaacccaagagaccttatagggattcttaagacgagctcaaaacgagttcggattaacgatcaagaagataagaagcgacaatggaacgaagttcaagaactctcacattgaaggctttcttgaggacgagggcatcaagcaagagttctcttctccctacacacctcaacaaaatggtgtagtggagaggaagaatagaactctacttgacatggcga

SEQ ID NO: 52314 - DNA, 462 bp, Zea mays
  unsure (1)..(462): unsure at all n locations
atcttaagngactgcagctgcaactgaactgacttggctatacatttttatcttgttgatagccncgcatataatagtctgaaggtgtgaaaattgtatatttggaaatttacaattcttgaatcattcttttattcttgtagtaatgcttttttcatatatggcttaatactaagcaatgctttgagagcgcacaagactgctgaagaccaaagttataatattgctttcaacaacctacgagcagaggttatcaagctgaggaacgaagctctataaaaagataaaattctgcttacactagtggataaaataaaggaagacgaagctacctctaaagctcaagctgaagcccaaaaacgcgaaattcaggatcttcaaaaacaactggtcacggctaaagaagaacgcctactacaagaaataaaacgagaacttagtgatcaatgggcaaatcatttg

SEQ ID NO: 52315 - DNA, 390 bp, Zea mays
  unsure (1)..(390): unsure at all n locations
ctnggggcagcaacaaagctatcttctgccgtcagctcctatgtgcttatgttccagggaatatggaggaaagctcgctgatcaacccatgaaaatttattgcttattctgtggtgaggacataggccatactacaaagatgtgccatgtcaccattcagaaacagaatgaaatagcagaagctgcacctcagcagaaccaaccgaaccaggtcatgcatactacctcatatcactcaccctacataccatagtatgtgggtaaccatcgtgcaacgtttggtgcttcagctagacagacatatgcattctggccacaggctacaccttcgtcaccactacaacctgcatattcacgtgggcaacagccataagggagtcaacagaccca

SEQ ID NO: 52316 - DNA, 337 bp, Zea mays
agcttcgtcatggccataatcttatatacttgttattcaattccgaagatacctgcttacacatttcacttggaaaacattgttaaatcatgtttttgaggaccttcggaagccgaaggcccccaacagtagcccctcgtaatattaattttgctgtactgaaaaattcatattgcgatatggacgaaggccttaagccgaaggtccgaaaaaacacctttcctttgctagaatagcaaccagtcattgacaagcgggaccctccagttttcgacataatgggtgtataaataggggctcgccacaatctatttggcacgctctcttgccatctgtt

SEQ ID NO: 52317 - DNA, 464 bp, Zea mays
ttgagagccatggtccatgtcttctcttccatttcttcactcttgtactaatttatgggacgctgatgcaggattggttgattctttttggacatgaggacataattgtagaaatcaatattcatcaaggtccagaccggttaccttcaaccccgatgtctcgactgcaaatggttggattcacaaaatgagcatcttgatagattgtcattccaccactagcacagaaatctgttggcacattactggtactcctacgagctttggccttgtgaagaaccagacctctaaccatatgagcatcatggggagatagagcaacaacatcatccttcctaccttcatcatcacttgtttgctcctaagcctacgggtttagtgttggacgaaggtgactggttgaagtgcgagttgtctgaccacgcccatcatgagacctcgaggcctctgcatcatttgaaatg

SEQ ID NO: 52318 - DNA, 385 bp, Zea mays
gcagcagcatttttttgttattaactgcagaccatacccgtgacatggccatttgcgtgctgggaactggacatgattggaccgttcaagaaagctcagggaggctacactcacgtgttggtcgccattgacaaattcaccaaatggatagaatacaaacccattgcctctctaacttcagccaaggtagtggaattcatacaagatataatattcaggtttgggataccgaatagcatcataaccgacctgtgatccaatttcactagctctgaattctttgatttctgcgaacaacggagcattcagaccaaatatgcatcagtagcacatccaagagtcaacggtcaagtggaaagggctaatggaatggtactggaagcac

SEQ ID NO: 52319 - DNA, 430 bp, Zea mays
tgagaacattcggacccgcgtttatccgcctgaaatatcatacgtttttgtgcacgtagcagatgatgaaggacagcatgggtcatcaactccctctgtgataaccaagactgcaagtctgaaacaagaactgcatcggcagtggatataccaagtggtgtggaggatagtcgacaatacctcaaaaggggatgtacctatggatgaatgacatgaggaattgtaccacaattctgcaagaggcagccacttgctccattggctcgggtgagaactgaccaagcaacgcaataatgtttcgaggcattgattgacttccttcgtcttaccgtctatttgtggatgggaagatgtgctcatgcgtaactcagtttcctgaagcttgaacactgcttgccaaaatgcactagtgaatatccggtcgcgatct

SEQ ID NO: 52320 - DNA, 419 bp, Zea mays
  unsure (1)..(419): unsure at all n locations
gatatgtatccgcggcggcaaaaacgaaccagagatgtttttggtgatggtggatctcgtggtgaccaaaacgtggtagaactcaaaactctaaaggaataaactaagaccagcaactcgacacaaccgatgcaaccaataactcaacaagccctaactaagtagtactagtaaatgctcaatggtttataggattgcggtaaaactaatctactatttttttggctttttctggactataggagataagaaaacagcgaagaanagtaaatctctcaccgataaaccttgctctgattaccaactgatgtgcacccgttgggtgattgcccgatctttcgatgagagggtgtggaataactccattggnggaggagacgacgttcacggcccgactacaagcttncaaagacgctgcg

SEQ ID NO: 52321 - DNA, 223 bp, Zea mays
  unsure (1)..(223): unsure at all n locations
ntccatggttgtgcttaacattccaacacgagccctcatttgtctgtggtgaccggcacaagatggcgtgccttctgaactactaaatcagcactgatctcaaccttatccctttcggtcttgcccctgagacctaggcaatacaagaggaacggttctccatggtcgatatattatggacatgagctcaagagtgtttttattcaattgatgagatgactaa

SEQ ID NO: 52322 - DNA, 399 bp, Zea mays
cggatcttaagtcacctgccgcatgcaagctcggcaaaactgaagacgaagccttattttagctttaaaggtggttataatgcgctttcctgcaaaaactcttggagaaactcttgttatatagatatggaatatcttatggaaatttgtacataccttgtaatatatcctgtctcccttatccggattcaatctgctttgctgtggacgaaacttctcttttgagccgaaggcgaaaaacacattcccttcttttcgtacacaacaaagcatagaaaatttttccttcgaagtttttcctcattgctgaagcacctgtcttttttgtgtagcatgatgatgattctatatatgtctaaatggatgtttatgaatgccaatgacatgatgatattgtgt

SEQ ID NO: 52323 - DNA, 474 bp, Zea mays
tgtgaagccaatcacaagtttattgaagagtgatattaatttcaattggtcttctaagtgtaaggaagcctttgagcaattgaagacactattgaccactgctccggtattggctcaaccggacatcactaagccttttgatgtatattgtgatgcatctggcagagggctcggctgtgtactgatgcaagagggccgagtgattgcgtatgctctaaggcagatgcgccgacatgaggagcattatccaactcatgatctggagctagctgctgtggttcatgccctaaagatttggcgtcactacctactgggaaatatctgtcacatatatacagatcataaaagtttgaagtacatcttcacccagccagagttaaatatgaggcaaagacgatggcttgagctcattaaagactatgaactggagatccattatcacccaggcaaggccaatgtggtggatatgcacta

SEQ ID NO: 52324 - DNA, 477 bp, Zea mays
taatcccgacaagggtgtcttcagcgtaccccgatgcatgctcttgtggttcatcctctccgagcggggcatcgaagccaacccggagaagatcgcggccatcaccagcatggggcccatcaaagacttgaaaggtgtgcagagaatcctgggatgtcttgcggctctgagcctgttgggaccctgcttcgttgccgaaggtcccgcataaagagacagcttccgctgaagccgctggtacgtgacgccgaaggcaccattcatgaagcttccgattacaacatgtccgaagatgaagggttgaacccacctaaagatagaatgaccttctagtccataaaggtctgagtcaatatttgaaacttttatgaggggtatgattgtaattcctcacagactgtgtcctgtgcctataaatagcgaacagtatatccttactgttcacgcacttcctgtattgcaattgcatcactcaga

SEQ ID NO: 52325 - DNA, 384 bp, Zea mays
cgaccggaacctaagcgacgcagcagcaactaaaccaggaagttctatgcatacaaaccaacgactcagcccactacgggtgcatagacaccacccaaaccaaaccttcgacacgagagaacccctaggccacaaaaccggcgtttgatcctcgacacgacaccaagcccatcttgctgggagacaaaacccacccggccccaacaacaatatggttaagacagggaacaagatgccatacctcattccctgtgaaagagtgagctcctctagcatagccaacacccaatcccaaacactaatgtgccacccaccctgtatggcgcaacggaagacacaacgagaagactcccaaaacgagcgcacgagaacgacggggacccc

SEQ ID NO: 52326 - DNA, 406 bp, Zea mays
  unsure (1)..(406): unsure at all n locations
cgaagggggcgantcggagcccctcgcctggtgtggtgttctgcttatcatatgatgccctgaatgctacgggtggtagctctagagtggatgtggcaccatgatccatgtttccaatgtgtttggaggcttatgatttgattactattcatgatccatgatccatgtttccaaggcggcttcatgaccacaataccttacaactctcacatgtgttgttcgctatgtctctcaagcacaaatcgatcaaatgctgctcatgaatagctttaaatgcttggagatattgcacttaatgtgtaagtaagttgggaacggtcttgtgtcttcaatgtgctggatgggggtatttatagccccaacaaccaaaagaatcattgtcgaacagctgcaaaaactgctctat

SEQ ID NO: 52327 - DNA, 448 bp, Zea mays
agcttatgaagattcttcattcctacatgggtaagtcggcgatgccagagccaacccatgttagtcttagcaattaagcaagtgtctagttcagctttgttatcattaaaatcaactaaatatagatgaccatctaacactaccttaaatgctattgaatcatcacttcttctaaagacagtaacacctacatcagtaaatagacagttgtagcccattgtgcataattgagaaacagaaagcaaatcgtagtctaaagaatttacaagaaaaacattggaaatagaatggtcagaagatatagctattttacccaaaccttgatttccatccatgaatgtaatagctctttggggatcttcatttttctcatatgaggagaacatccttctctctcctatcatgtggtttgtgcacccgctatcgattatccaacttgaaccacgga

SEQ ID NO: 52328 - DNA, 446 bp, Zea mays
  unsure (1)..(446): unsure at all n locations
tcagaaactcaactttctcagatgaatacacaatagtgctatcatgagcagctgccatggttacgtgctcgtgtgctgaggccacctcgtcngcttcgagctgtgggacagcgagcacgagagaggaaagcggagcagcggtgtttggaaaatgatgctacgaattagaggtaggggcgacagattgggaggaacttgctagaagaaagaatgcgacggtggagctaaagacagtggccaagacgagcttgaggagcgacgcgatggaggagtacggcttataaacgacctggagatggaaagcacgcgccggatgggtggatctccggctgggcgcgcaccggtgagctggaggaatcacggagcatgggaggatcgcgcggaggggacagggaagagcggctgggcacatggaagatggacgagcgcgcgtgcttgatggagac

SEQ ID NO: 52329 - DNA, 262 bp, Zea mays
ttctggcagctacttgactcccaagaacaacaatgggccctttggaccgaggtattttcatgcataccgatgctggatgaagtattgctttaaagccttaaatgtcccttcaccaatgattgcattatacgggtactccatgttaacaatgtcaaagacaaactgttcagccttgtgttatgaacaaagccaaaggtcactggcattgtgattttgtcgagtgctaccatttgcctttcttcgaaccccagagaaggtgtgt

SEQ ID NO: 52330 - DNA, 444 bp, Zea mays
  unsure (1)..(444): unsure at all n locations
tctctgccaatctgaacagtttgaacaagtatattatgatcttaatgcgaagcctgaagccgaagcccaacaaattttagatttgaaaaaattattggcgagccttctagacaaatgtttggagtttagttataaatgtattcaacgactgagaaaaattgtccactcagtctgggctagcagtgagaagttcaccccgtcaactgaagatttaccaaagaccttctaacatattgatggtgaaattgatgagctcgacgaaattatagccgggcacggtgacttctgtgcctgngtagctactcggggcactgctgcagcttttctgaaagctggctgcgaccatggaaatatcgttaatagacccaatttcactctatcaccatctcatttagatgatatttctgacctcgcccgaagcattctaatagatatgaaagatga

SEQ ID NO: 52331 - DNA, 422 bp, Zea mays
  unsure (1)..(422): unsure at all n locations
catgcaagcttgcctntttattaattggacattgtttctctccatgcaccccccagagcgcaagtatgaacgtgatggttttcctccaacccacttctcataaggggtgttctcttctttgcccataggaattctattcagaacatgacatgaagtcagggctgccctcccccaccatgccttatataaaccacaagtgtctaacatggcattcaccacgtcagtcaacgtacgggttttcctttcaacaatcccgtctgactcgggtgaataaggaggagtcctctcatgagtaatgccatggtctgcacaaaaatcatctaagactttgggaaagaactcgccaccacgatctgatctaagacgttcgatctttctctctagttggctttcaacctcacccttatagactttaaagtagt

SEQ ID NO: 52332 - DNA, 489 bp, Zea mays
  unsure (1)..(489): unsure at all n locations
tccttaatatagtggnnttgaggtgtaaaagcagaagaatcatgtatttgttaattaacaacccacaatttgaaaatgatcaactttcaatttttctgactccacatctcacatgcatctggcaaatttggccatgtcttcaccagcaagctttagtttcaaactcaatgcaggaaaataaagttcaccacaagtctcagctttgttctggagaatatgttcagaacatgagactntaatgtttaacaaattatcaacaaaagctggcaaaagatgtatgccatttaattagttaacttctagcagatagaagcaatttatacgagagatctacagaactgatgcacacgggcagaggctcatggaggggaaactgccaccacaccctcctctggaacaatagtaactctaatagcatacaatcctcatggatgctttataggatgcacctatagtcatgctttataagaacatgagcatgatgtatca

SEQ ID NO: 52333 - DNA, 450 bp, Zea mays
  unsure (1)..(450): unsure at all n locations
gaccttaaaactaagctttacgttttctatacttgggctaggttttacccctttttctctattttgncgtagcttcctatccagggtcctatttgctaaacattaaaacaatacaaccttgcttgatattttgcctagtgaatgcactctaggtgtgtcaaacatatgcaatgccaatgcttatgatgccatgctcaagttatagttacagtaacaccatgggtgttacaccgaccgccgccgccgatggtacatagcgatgccgacctcttcttcttctgctgccgctacaccgccggccgacacgtcgtctgaggagacgctgagcactgtggcggcggaggagtagcgcgctcgcgacacagtggaattcggcgcatcgcggatgtcctcgattcgcgtgcaagatatgcatcagcattggtattatggcggcggaagtgcacgtgt

SEQ ID NO: 52334 - DNA, 299 bp, Zea mays
agcttggctattattggcaccaactatatatttatctagtttatccatgtcggcttatgtacaactgtacattcacaagctacatttgtctgaaagaaccacgaagcaaaaaaaaaggaacaaaggctttgatttccctttaagcatgcaacaaccaaaatcttatcttctagctatatgcccacaggctgaacttgaattgattggccccaaagcacgagaggcagccctgcgtgtggaccttggggttcacgtcgccggcattcgacatgtggatcgccttcaccagggacaccacc

SEQ ID NO: 52335 - DNA, 491 bp, Zea mays
  unsure (1)..(491): unsure at all n locations
tatacaanactcaagcttggagggctaagcagtgtgcgtggaagatgatatatggtgtctgttagtatgggtacgagcagctacctgttctcttaaatgcaatgaaggcggtcaatccatgcatgcattatgagtacatccctaaaccaaatgcatggattgatgggagacagatattcttccgtgcgttctggtgctttccccagtgtgtggatgccttccggcattgtcgacctgtcttttcaatcgacggcacgtttcttttcggcaagtaccagggcactcttctaattgccatatccgttgatgcaaacaacaagctagttcccctagcatttgctctggtagagaaagagaacaaagacagatggggctggttcctgcgactggtccggatacatgtggttggcccaggacgggaagatggtgtaatatcagatcggcctcagtgaatactcatcgcggtccgtgagcagatcgatgggtaccct

SEQ ID NO: 52336 - DNA, 418 bp, Zea mays
agctgcactttgagtcagcgttgaatacttttatatacaaggtagggtgcatagagattttgttccctacatacataaatagaaatctggtcatttattatcgatatcctgactatagctgctgaatccaacggtggggatggacctatcatgatgacaattgatgacaatgtttggctatttgttctcacttgtctttagcatgatgacacagtggttgtctactaaatatctgagttgtagtttggctatttgttctcaattggtttttggcgtctgtggccttagtaacctatatttattactcttatcagatagtaattaatagattcttccaatttcttccctcatttctgctattatctatcaatcttttaaccattaggggtttagtgtagcttagtatttgatctggttc

SEQ ID NO: 52337 - DNA, 435 bp, Zea mays
tcttctcatcgtcgatgagcgacgccaacgcgagcgccttctgatttggtgtatgatcggggtttccaagtaagaaacatggatttatctttggcgttagtttataaaaatgactcacaagtcagatccatggacaaaatattacggagaataaatgtcacacatataaaaaagaaatttaagttgaaaacttattcaaacaaaagaagttgcatgcaaggctcttctttaaatactactctctccatccaaaaatataattcgggaatctcgttgataattatctactaatacacattgtgtaaggtagcaggtgggctttgggagagatgtagtagatatttttactgtaacaaatattaacataaacacacatgtggtatagtggtagctacgagcacatttacttgagaggtcgcgggttcgaatcccatt

SEQ ID NO: 52338 - DNA, 374 bp, Zea mays
agcttttatgatctgatttttgttatttattttcccaccagatagcgacaccaaatctttagggcatgaaccacagcagctagctccagatcatgagttgggtaatgctcctcatgtcggcgcaactgccttgaagcatatgcaattactcggcctctttgcattagcacacagccgagtccactgcctgatgcatcacaatatacatcaaagggcttggttatgtccgggtgagccaataccggagcagtggttaataacgtcttcaattgttcaaaagcttcatcacactttgaagaccaattgaacttaatatcattcttcaataaacttgtgattggcttcacaagcttcgaacaatcgggtatgaatct

SEQ ID NO: 52339 - DNA, 485 bp, Zea mays
  unsure (1)..(485): unsure at all n locations
acataaaactcagctaacgacatgagtgtgtctctcaactggaaagtttgttttatgcgcgccatgattgaagctttaaaaaataccacgactctgcggcgacatcctatgagcagcttgatcgacgagttgctgaacttgttacacgcatggacgtactggaggctcgtccnccaccaccaacttcagccccagctcactcttctgtggacgactacgactatgacgatgatgtttatgcaccgctgcaacaacgcctcacacgtaatctgacaaggtatgggaggtaatggtagacgttgtcatcataatcctgaaccagaccatgatctatttgctaagaataagttctctattccaccgttcatgggttcttatgatgctgaagcttacttatactgcgagatgaccgttgaacacaaatttagttcacatcttatctctgagccacatacgggtagacaagccactattgaatttagaga

SEQ ID NO: 52340 - DNA, 387 bp, Zea mays
tgctctatcaagctcctctgcgagcttccctagagcctagtgaaacccactgagcccctagcccgagctctacctcaccaaagaagccagtcccccctaactggacttcacccggccaccggcgcacgtggccaaggtaatccaacgagccgttttccaattgctcatgcgcacacacactctactatacctggtgaagctcctcgtacggcttaattgagcgataccaccatggctaggctggagcatgtgccgacaacgaccatcgtcgtctgctctcgtggctagggaaactctggctagcattgaaggcgagcaacacattgatgtgaccggtagagccttcgcaaccctcgccgacacctcgctggagccctaccgccacct

SEQ ID NO: 52341 - DNA, 471 bp, Zea mays
tctaaagggagaacacgtgatatgtctgactaactttgatattttaaaggatagaccttgcgcagcttgtcaagcatgtaaacaagtgggaggagcgcatcgcagcaagaatgtgatgaccacttcaagacccctggagctgctgcatatggatctcttcggacccgtcgcctatctgagcatatgagggagctagtatggtctagttattgttgatgactattcccgcttcacttgggtggtctttttgcaggataagcctgaaacccaagggaccctcaagcgctttctcatgagagctcacaatgagtttgagctcaaggtgaagaagataaggagcgacaacgggtccgagttcatgaaccttcaagtggaagagctccttgaggaggaagggatcaagcacgagttctccgctctctacacaccacaacaaaatggtgtggtagagaggaagaacaagacgctaat

SEQ ID NO: 52342 - DNA, 437 bp, Zea mays
  unsure (1)..(437): unsure at all n locations
agctttgataccaattgaaagtagcctagatgtggtgaataggctacacctgaaattnttcactaaaaactntgagataatgttaaattcaagttgcactggtgcaaactggttcagctgattttgtttacagctgaacaagtttgaacctgctcaacttagattagataaacagttaaacaagtgtgacaaagtaatgagagatttttgcttaagacttgccctagagaaaatccactcgaataggtgacagatcggtgtgaattgatttcacacgatttgcacacaatataatccaatatgaactaaccaacaatttaaagcacttatcaagaacacacaagaacacaggatttaacccgaggttcggcaaccaccacaaaggtgtcctactcctcgttgaggagcccacacagggctgggtcttttccaaccct

SEQ ID NO: 52343 - DNA, 445 bp, Zea mays
  unsure (1)..(445): unsure at all n locations
tctgtaatacgaatcanaantcatatcactaacatctccataattntctttattagtaccaccgattgtggatgttaaggagttagacattgcatagacttgcacttccaaaaggttttgcacatacactgaagaggataagtacatctggcaagaaaatattatgctatgctataagacgataaaacataaattaataccatctccaaatataaattaattccagtcaaatggaaaaaagtagatggatcagatgtggcagctgatgctacctcttgatctgcatggcagaagtcatgtagtccattacattcattcattaatattagatttgtctgtcctgaaaaatcccaaacatgaacttggataaagaaacattaagtaaacaacagtaattgaagtgcattnntcaaagtggaaatgtgagcagcaacatactggttga

SEQ ID NO: 52344 - DNA, 476 bp, Zea mays
ttgataaaatttagacctgattcaatctcgattgtttttttgaatgatcaaggttgctatagcaaaatcaaagttggattatagaccaacaactttgttacaggtggaataacaagttatataaaaatctgagatccaagcccagcaaatcggtctgtcaggcgctcagatgaagatctgatagtacaataactgaataagatctcacgttcagcccccatcgcctccggcgaccccgtgctctgattcgtgctggcaccgcgattcgtgcccggcggagtgcagataactacccggggtaagaaatatcgcgttgaggatgaacttaggccactgttccgccctgttgccatgcccctttgcccggcaacattgccgcgcgaccatcgccatcgtgccgcggttcctcgcggttatgccatgctgtctagccatttaccacgtcgcaattgatcacaatacacagcccatctatc

SEQ ID NO: 52345 - DNA, 438 bp, Zea mays
tagcttctgaagacacttatagttcatgttttcataacataggttgcgttcttctctgcgaatatgaagcgtgaacttggtgcacctcctgcgcgcaatagctcgttataactgaacgcacagaacaaatgttgcgagagaaacaggctctttctgttgtgctgtgtattccattatgagctcatttctctggagctatggactgacagtatgtcagagttctcattgctggagataacaccaatccaaccaagttgaatattgctgaaaattggctgttttggctagatatttccgatgatataagactattcagttttccataaaaaaagttgatggttctgttcctcatcctgaataatgacatgcttgagtttgggtaaatattcaagtcatgggtttctttaatcatgctcttggtgcaactttttattggac

SEQ ID NO: 52346 - DNA, 434 bp, Zea mays
cacgtacctctttttatttttgttctctaatgtcaaggattctacctcatgtttgtgtgacctatcggtgatgaatccgctctatattctacctaaaaaatcatcattcatcttttactcccttgtgctattaacatctctcttgagtattttcattaagcttggaaggaaaaaaagacaactattaatggaggacactctcatgacatacattaagtgaaacaacacctacttggacaataagattgtcaagagcctcaatggtgtggctgtgagcattctacatctttttcattgagagaatacactgcctaagtcgtttattgcacatcttatcagccttgatcaaagatatatagtgcttctccccacttgcccttaaaaataagtgcatcccaaatctttcatttatgatgcatactttaccgggagcc

SEQ ID NO: 52347 - DNA, 79 bp, Zea mays
atacaattgcttgagccgatagataagcaccctgacaccccacaccgctgagcaacccttgggtcgataaattaatttc

SEQ ID NO: 52348 - DNA, 403 bp, Zea mays
agcttctaaagggagaacatcttattgtttgactaatgtgcatttcgaaaaagatagaccttgtgcagctcgtcaagcaggtaaacaagtgggaggagcgcatcacagcacgaatgtgatgaccacttcaagacccctggagttactacatatggacctcttcggacccgtcgcctatctaagcataagaggaagtaagtattgtctagttattgttgatgacttttcccgcttcacttgggtattctttctgcaggataaatctgaaacccaagggaccctcaagcgcttcctaaggagagctcaaaatgagtttgagctcaacgtgaagaagataaggagcgacaacgggttcgagttcaagaacctttaagtggaggagttccttgaggaggaaaggatc

SEQ ID NO: 52349 - DNA, 462 bp, Zea mays
  unsure (1)..(462): unsure at all n locations
tgcatgaagtattgtatataatgaatatataatatcaatgttctaagcacattttattttgtaggatgagcataacaccatgactggatgtgaacatgcgttaacattaataacagctggtaaccaggtacatattaaaaaatattgttcattagtctataatgataatatatatttatgctgcatggaaatgttgatgtatttgggttgggctatataggaggacaacatgagaattccacctgagggtggtgatacaagttctccgtgtcacgtagcacaggaacaaatggaacatattgctgcattctcagaagctaaaaaggtgagcattgataaatgattctactgactggtataaagataatttatgtaaatatgtgtatactaaataataacttcttttatttacagaggntgaagtttaatgtggatgttataaatctgagtatgccggatcgt

SEQ ID NO: 52350 - DNA, 399 bp, Zea mays
gcaagcttgtgcaaagtccacttgaactggtcttcggagaaacccgccctcagtgccacatgttaccagagggtccgactcaaaaagcaatgtatgaattcaagataattgcagagaatatcagtacaagggacctggtccaggaattcttggctttcaaggtttttcctagtgtaaaagagtgggaaatgccgaagctgaagggggagaagaaaaaaggtgaacttgtacgtttgccttactacttcacatttaagaaatactttaaaactccttgccaagagtggctggatactattgaagtgatgtgcaacgagatactcggtaattattcaaaaaaggaagatcaattgatgaccgcagtcttcggcacccgtccgaaacgaaagctaaatcgag

SEQ ID NO: 52351 - DNA, 436 bp, Zea mays
ctaagcttctaagggagaacacgtgatacgtctaacaaatgttactttcttataagatagaccttgtgcagcttgtcaagcagggaaacaagtgggaagctctcatcaggccaaaaatgtgatgacaacatcaagaccctggagttgcttcatatggacctcttcggacccgtcgcctatctaagcataggaggaagtaagtatggtcttgttataattgatgattattcccgcttcacttgggtattctttttgtaggataaatctgaaacccaagggaccctcaagcgctttctaatgagagctcaaaacgagtttgagctcaaggtgaagaagataaggagcgacaatgggtccgaattcaagaatctttaagtggaggagtatcttgaggaggaaggaatcatgcacgagttcttcgcttcctacacaccac

SEQ ID NO: 52352 - DNA, 409 bp, Zea mays
ctagcaaccctgtcgactactaatagagaatatgtttctattttgagatgcctgatttaacatagaaagaaaagtcaatccaatgatttatgctgttaagcttctcgcttatattggatatcatacttctacatttatgagtctccatgttatgaattagacctattcccataatcttcaaagaacttactactgcttggccataagttgtaactaggcatacttcaaggaatcatctatatcatatcataaagcttccatgctttagtaatccctttttcattccttatcaaaatgattacaaaaaggggaactagtgcttgcgttgcttttaacatttctcttgagcctacttatgaaaatctacaagagagtaagtgctagggtaaagccacaaacctcaaagggt

SEQ ID NO: 52353 - DNA, 338 bp, Zea mays
  unsure (1)..(338): unsure at all n locations
cgcatctaaagggggaacacattctangtataatatccatgctcacctacgacaaacaggagtcgtaccgcatgccaagccggaaagcaagcaggcacccatcacccacacaaaaacatcaagatgaccgacaggccaatggagctcctacacatggacccatacggcccgaatgcgtacataagcatcggcgggagcaagaactgcctacgcaatggggatgaacaatctcgctccactagcgtaatcattttgcaggacaaatctcctacccacaacacctcacagggactctagagatcggctcaaaatgacgcccgcttcaagagcaagaaaat

SEQ ID NO: 52354 - DNA, 234 bp, Zea mays
ttgtaagaggttggaatgatgaaaacttggatgcatttaaggtggggtggatgggggtatttattgcttcaaccaccaaactagccgttaggtggggctgtcagtcgcatggtgcaacagacagtccggtgctgccagccacgtcaccaaagtacttgggttcccatcgttggaactctgacttctgggctcgcctggatgacctgtggcgcaccagacatgcactgtatagtg

SEQ ID NO: 52355 - DNA, 401 bp, Zea mays
tgcacgcatgcaagcttaagattaaagccatttatctgagttctttacagattagagacgctagcaggtcatgtggttaaattctaaaagcgatatgcactgtattacaaacaaaactcacaaagagactgttaaaaaacaaaagtcggatagtcttaatggaactataaaaagcaacagctgacacttccttgccaattttattaagctaaattatctttaatgaaaatgactccccttttgtatgtataaaggaaagttttattttttagtggaactattaatttctagagagagtttttttttggggtgggaatttgggcttaattccttatattttgttgataaaccccacaccttaaaaaaaaatatcgagggctttctcctagtccataactcaa

SEQ ID NO: 52356 - DNA, 453 bp, Zea mays
acagttatgcagcaaactgactgtacatatacttagcatatatgtatgtgcaaaactgcataactctgcgttgtgtaatgcataagatggttagcctgtgaaccatgactgtacaaaaaatgaccctgtttgcagtatataactctgataatgtatataataatgtattgacatatattgatgactattgtatcataagtttatggacaaacatgcataagactgtcaataattatatcgtaaacttcggtcaagaaacatgcatacttcgaggttattgacataacaatattgtacaggaacctggcagaatcaaatgcaagaaacacacattactttcaaacacagtttggaacaacattccagtttagaaaaagctgatcccaagttgtcattgacataactagaaacgtttaggactttcccatatatacacacataactgactgaagt

SEQ ID NO: 52357 - DNA, 357 bp, Zea mays
tgagcatcatcttgtgtaaacaaacatctcactccttttttcagaagagaatggtccccagtatccttgatgaacacccaaaaccactctggaaggaatccatgtggactttgcacgcaaaaagtaagcgtgcggcatctatgcttcttcaataaacttgcagccaaccgaaaactattaccctttagatgatcttgacaaccataatcacgctgcaaatagcaaccggaagctcctgaaaggccacattttggtgaaatatccatctcctcgaacagttgcaaagagaagatatgtatctgaagtaagctatacccacaaaccttctaatcccaatctcgtggacgagattccttt

SEQ ID NO: 52358 - DNA, 462 bp, Zea mays
tcagccactggggctgcagctctgcaaccgctggacccctattatgagactctctcccttcgggaggcgcgaagccacgaaaggaaggctgtcggcccgacaccgtcacaggatgagctagaccaagaaatcagggacatggagatgcttcatcaacaggtacagaggaagaaggaaaagatggccacgctagctgaactgcaaaggccgatagacgaagcctctgaagaagttcgtcatcttactcaggatgagcataaccgaatgcctcagcacaaagaccttcatcatgagggtttcctcaacgaagatgactggtatgacaatctccatcatggaaattttggctttgatgatgcttctcctctgtccgctgagctgcaggctacaccttggcctcacgcctacatgccgcctcagcttcccatattcgacggccattcagacccgaagcacgttttg

SEQ ID NO: 52359 - DNA, 370 bp, Zea mays
agcttcttgaccacctcaacgttcaccaagttgttgcagctaccactgccaatgatggtatgtacacggcagtccttgacgatgaggaacatgttgaagaggttgtggcgctgtctgttgtcatcgccactagccatggtactcaaagctcgttgcacaatcaaggccttataggtctcggtcgctgttgtaccaaaaacctcttcatcaccatcataagtctctgcaatgctagctcaaacagtatcttcatcttcagcatcagaagcactaacatactcaccatcaccagtagcaatgtatgcccgtttgctggggcaatctcgctgaatatggccaagtccctggcagtggtggcacttgatgttga

SEQ ID NO: 52360 - DNA, 400 bp, Zea mays
  unsure (1)..(400): unsure at all n locations
ntcttcgatggtatgacgaaggtcagtgcttgccgattgtttcttaaaggattcaccggaggtgggcggcaatgttggtgacttgttctcaaatgctatgaatcaagaacaaggcaacataaaatgttaaatattaacgcccttcgtccttcgaaacattatttcccttatgatataatgatcttcagacgaaggtcacgaaggacataccttctaatatcgaaggtaagatggtaatagaagaagcgttgtaaatacaaaagataacataaacaatcatatagcattataaattcatctccattatattatcatgagaaaataaaaacaatattgaattacatttgataccttcgacttgataagcagcaaaggtacgagcgtgatgcaaaagcaaatg

SEQ ID NO: 52361 - DNA, 304 bp, Zea mays
agctttgccaaaatcactgtgtttgatgacaccaaagcaaaacgaatcttgggctcactcttcacggagcatccggttttccatcttcaggaagcaaaattccttcgtctctcgctctcccatccccatatacccggatacctgttttgtctaaaaaaatcaatgccacataaagattgcttaacgatcaaggcgacaaagtgcaccaatgcaccaaggtagtaacaaggacgaacagcaatgttgtctgtactagccttatcagtagcacagctgctgccagccaaattctgcgtagcctttc

SEQ ID NO: 52362 - DNA, 446 bp, Zea mays
  unsure (1)..(446): unsure at all n locations
ngacaacaccatttgacattttacataaaatttctgagatttataatatttagttcattcctcaacatgcaaaagcgagtcttatcaagtggcttagtgaaaatatccgctaattgatcttccgacctcactccttctaaaatgatatctcctttagcaacatgatctctaaggaagtgatgacggatatcaatgtgcttggtgcgagagtgttgtacagggttattagcaattttaacagcactctcattatcacacaacaaaggtaccttttctagaactacgccatagtctagaagagtttgtttcatatataaaatttgtgtgcaacaagcacctgtggcaatgtatttcgcttctgcagttgacaaggcaacactattttgctttttggatgtccatgaaactagtgatctaccaagcagatggcatcccccagaagtact

SEQ ID NO: 52363 - DNA, 384 bp, Zea mays
  unsure (1)..(384): unsure at all n locations
agcttgtatctcatcaaggctttttctctgggtacgacactccacctaatcatatcatcttttaagaacacaaagtgtctcgtttccacaaacttagtgtttctgttaagacagtagattctatatccctttgatctttctggatagccaacaaaatggtatcttattgtgtcatcatcttctaagaacacaaagtgtctcgtttacacaaacttactatgtctattaggacaatagatactatatctctttgatctttctggaaagccaataaaatggcgaatctaacttttgatatttgggttgaatactttatattttgttgataaaccccacacatganaaaaaatatcgagggctttcttctagtccataactcaatat

SEQ ID NO: 52364 - DNA, 462 bp, Zea mays
  unsure (1)..(462): unsure at all n locations
cgagttattntattacagaccagactaaaagtgagtgcttattagtaatattatacaaaccatgggaggcacaaactcctcccgataagctataagcaaaagaacctaagtggaggaccgagtcctcccgcacttcagtcttgtttttcttcatttggtaccaccttggcacagaagcagcaaaagtctgctacttcctcacctaaaaacaacaaagggataaaccctgagtatggaatagtcagcaagtcttacccgactaaagaaaagactctcaagggtatgctggataaataggagtcaaggagaggctttagcaaaatcaacttatacttttgcagaagtagcttactaaagtgagtccttactttcaatcttttaacgccatattaagtattaatagactctattgcatctagtctaatttcacatcacatcaagacaacatcatttttatccata

SEQ ID NO: 52365 - DNA, 384 bp, Zea mays
agcttctccaaggtttgtggtgtttttcttgcaaaatattgcgtcattggtcctggtctgagtcccttgatcatggcttcaatgacaatctcattggtcactgtaggcgcctgagctctcagacgcaagaaccttcggacgtacgcctgcaagtactcctcatggtcctgcgtacactggaacagagcttgggcagtgactggctttgtctaaaagccttggaaactggtgactagcatatccttcagcttctaccacgaagtgattgttcctcgccgaaaagaaaaataccatggttgagccacacttctgactgccatgacgaaggacttcaccatgaccacagtgttgccccatatgaggatatggttgcttcgtagctca

SEQ ID NO: 52366 - DNA, 386 bp, Zea mays
ctatcaaagcaacaacagtgataggcgcattttctgttgaccatacctggaacatggccatatgcatgctaagggttaaacatgatcggacctttcaagaaagctcacggaggccatactctcgcgctggttgccattgacaagtttactaaatggatagagaacaaacctattgctattttaacctcaaccaaggcagcggagttcatacaatacataatatttatgtttgggataccgaacaacatcataaccgacctgcgatccaacttcactagctctgaatttcttgaattctgcgaaaaacggagtacccagatctagtatgcatcaatagcgcacccaagagccaatggtcatgtggaaagggccaatggaaagatact

SEQ ID NO: 52367 - DNA, 392 bp, Zea mays
agcttttttcatcacttattttttgaaatggaaaaggcaccatacatgaaaaggaagaaaaataaaaagcaggacactttcttttgtctacttcgccatgctgtttgtagtgaagagtaattattgcctttgttatgatcctgtcaccattttctcttttggctgtgttggtcctcaaatcatccgacgatagtacatttctcaactttcgtgaatatatgcaagatgctgctggttgttattatttgtgtgcatgcatgttgtactgatctcatatgattatgccaacgccttttgatattcgtgcaccctatataagaagaatgtgccgtacaatacaaatcaataaacagtgtaacgtgcttaccgcgaaagccatatgcactaatata

SEQ ID NO: 52368 - DNA, 367 bp, Zea mays
tcgcatctctgaactaactcggctgcgtcgatcttttctgttgccaatagaaccctgacctgaagaccttcccgactagtgttctggaggctgcatgtattccacattgccctgcatggacttccttcagaagttgattcccagtggacgggagaatacacttcatgagaacccctgatgcacctcttctgtataatatctccccaatgagtgtgtagtgagccgactgtctggcaatgcgctctgctgagatcttgtcgactggctcttcttcgttctttatgtacttaatgatcggccttctccagtcatcagattctgactcgggttgatctacgatgttgcactcttctgtttgatctattga

SEQ ID NO: 52369 - DNA, 400 bp, Zea mays
acctgcaagcatgctagctctaaatgttgtgcgatgtgttcatggagcacggtgatcaaagagctagcatgtttctaactagctacatatgcatgctggagaattgtacatctattcgagacagtttgcagacaggggatacttgttactcaatgattatacgggcacgtattgttgtgtgttttgtgggtgtatgcataatagtaacacaatgcattggtctactgcatataatctatctatcatggtgcattcagttgcacttgcacctatatatcatttggaaataaatgaataaagaaggtagttatgtccatcgcgcagcgcaccattgtatataggattcacacccatgccatgtatataacatatgtattctctcttggacccacaaaatatt

SEQ ID NO: 52370 - DNA, 344 bp, Zea mays
gtgggatgagcgcaatacacccagaatgtgatgaccacctcacgacccctggaactgctgcatatggacctcttcggacccgtcggctatctaaacataaggggaaggtactatggtctaaatattgttgaagactattcccgcttcacttgggtgttctttttgcacgataacactgaaacccaagggaccctcaagcgctttctcaggagggctcaaaatgatgttgagctcaaagtgaaaaagataaagagcgacaacgggtccgagttcaagaaactctcagtggaggagttccttgtagaagaagggatcaagcccgagttctccgctcctacacacca

SEQ ID NO: 52371 - DNA, 362 bp, Zea mays
  unsure (1)..(362): unsure at all n locations
agcttggacggtattctgcgattgttcttggggaaccttcggtgtaggagcagctgcggctctagtcgcaccttcaaatgtcaaaacgtgttttgcagtcaaattggatttcagttgcacaaataatattgctgagtatgaaacacttttattggggcttcggaagctaagggcaatgggaataagaagggccattttaaaaactgattctcaagttattgctggtcatgtggataaaagtagcaaggcacgagatccgaagcttaaaaaatatttggatgcagtccgaaggttggaagcttccttcgaaggttnttccgtcaaaaatattccaagaggtgaaaatgagcatgcagatttgc

SEQ ID NO: 52372 - DNA, 454 bp, Zea mays
aacctcgatacagagccgaacgtgttgagcaggaaagcttctgttaacagcaaagagtggaaccgacttaaagatgaaaaggctattcaaacctccatagactactatagagttattatcaaatgtaaagggcatgaatgtaattctgtaagggctgtgtcccgtgtctataaataggtgaacagtattcccgtactgttcacgttgacttggcattcgctttttgcatcacgctagtacaatcatttccttccgattgaaggtacacttgttgttcaataatatttttgtttatgctcaataataataaatgatagctcatgttttcctttatattcttcatatttcatccttcgtcattatttgattaatttatgaaggtatgtccttcataaccttcgtccgcacgtcattatgtcctaagggaaataatgcttctgaggacatatggcat

SEQ ID NO: 52373 - DNA, 399 bp, Zea mays
  unsure (1)..(399): unsure at all n locations
agcttcagcattcgggtccattccttggcttcgaagggcccaaatgaagacgtagagcctaacgatagcgctaggggtcagctgatgaagatagatatcataattatccaaaacttccccaatcatctcgttcaagggaaaccgcagttccgctctgaaaaggctcttgaaaaccactacgccatttttgggctctggagtggtttcttctccggcaaaacaaataaagttcttctcagcttcttcgaagtaacccagcttcatcatcatgagtacatcagccttagacacagtagaattttcaaagtccaagtggctgggttttgatggggtcagagtgttngagtcttcctctttttcatcagcattnttttcctccatgtcagcttggtcaacttc

SEQ ID NO: 52374 - DNA, 389 bp, Zea mays
cacaggacgcagcctgtgaaaattacattcatgcccttcatatttagtattaacttaagaacaatctgtcgaggactaaacagtcttttcctccttaagttggatcctttttcatctattgagccgaagcttccttgcgcacagcttcggcactgggtcaaccttcgttctgaccctgctttccatattgtggacagcttcataccatgtctgaaggttcctgcacatatattatgctttggcacacattgttagtcattgttttaggaccttctgaagacgaaggctcccaacagtagcccctcgcagtatcaatctggtataataacgaaatcagactgcaacgtgaacgaaggccttaatccgaacgtccgaaaaaacacctttcc

SEQ ID NO: 52375 - DNA, 411 bp, Zea mays
  unsure (1)..(411): unsure at all n locations
gcagcatgcaagcttgagcttctaaataaattctgcattttttagccccttgactaaggcatactttgatgagcctatctaattgcttcatacgaacatgtgacaaccttctatatatgccatagccaacccatccttgatttggagaatagacatgttgataaacaacagagcgatgcacaagatgcacacacatgtgacttgtccagtaagtaggatagaatagtagccaacaaccctgaataccgcacttgtttgctaaacacaccaaacaagtctgataagtgaagagaacntcatcaaaaaatggattcaaaagcccaaacatgacaaataatgagtgtagctcaacatggcacaaatattcacaaggcagacaaaacgaaatacagagaagtttggactatcaca

SEQ ID NO: 52376 - DNA, 439 bp, Zea mays
  unsure (1)..(439): unsure at all n locations
tctatagggagaacacattntatgactaataaatgttcatttttataaagacagggnttgtagcgcatgccaagcacgaaagcaagttggtgctcatcatccacacaagaacatcattacgaccgacaggccgcttgagctactccacatggatctattcggcccgattgcttacataagcatcggcgggagtaagtattgtcttgtaatagtggatgattattctcgcttcacttgggtattcttcttacaggaaaaatctcaaacccaagagaccttaaagggattcttgagacgggctcaaaatgagttcggcttaaggatcaagaaaataagaagcgacaacgggacggagttcaagaactctcatatgaaggcttccttgaggaggagggcatcaagcatgagttctcttctccctacacgccacaacaaaatg

SEQ ID NO: 52377 - DNA, 399 bp, Zea mays
agcttgtgaaggttcttcatccttacatgtgctaagcggcgatgccacagccagcccatgctagtcttagctattaagcatgcatctagaccggcctcctcttttgcaaaatcaactaagtaaagtttgccgtctaatacacccttaaaagctagtgaaccatcacttcttctaaagacagacacatctacattagtgaatagacaattatatcccatattgcataattgactaacagataataaattatatccaagagactcaactaaaaacacaatagagatagagtgctcatttgaaatagcaattttacctaatccttttaccttgccttgattcccatcaccgaatattattgaatcttgggaatccttgtttttgacgtaggaggtgaacatc

SEQ ID NO: 52378 - DNA, 415 bp, Zea mays
  unsure (1)..(415): unsure at all n locations
tatgtcatatatgctgatttgtagatccctctttgacataacatcgttntaaattagggatgtcacttaataaaaaacgttttaccaatgaattcgcgctgcttgttggaactggaaaacataagaaattaatggtgggacatagtagttaagtagcattttcataaacaaacatgatatctgactctttattaatgtgtttcttggtctcataccatggaaatgtggtgtagaccttgatctgtggtcttcttggcattcctccatctaatggagtactcccccagtctccgatgcatacaatgcaagaagcctagcggtcctcaagaggcaggttggtgttcagatgcatagatagatgtggtctgttatacaattaaatttgctcacatcttccctctctagctctctttca

SEQ ID NO: 52379 - DNA, 390 bp, Zea mays
agctttggccccacctgctggctcgcgtcttcccctaaggtgggtccgggggccactgtcggtaccctgaaactagggtaccccttactactctatgaagacgcagtacccacgcggctatctttagtcgcgtggtaaaggagctatacgtgggaccagaccatgactcgccccagcctcaggcgactactctggaccagcaacaacgcatgaccccaccacatgggtagctccagggccgccacgtggccagagaaagtgatatactccaaggcatcaacagtgagtccagacccccacgggaaagtgttggacccctggatatacagtccggacctccaagttggtccaggacccccacgtgtacggaccggacccctagaatgggat

SEQ ID NO: 52380 - DNA, 441 bp, Zea mays
ggatcatcttcatgcgacatggtaagaacaatccgagtgtcacgggcgtcatctcttccttgggctttacggtgttctttcggacacgcacttcctttagatatgctcactgcttgagcattgcgatgaacctcttgcgtcatttacggagtgatctcttctacttgggcgggcttatacatacctacattaaccatctcccggagactatgatgcacaccgattaaatgcgacttcatgttgtcggcccactcgtcatagttcaactcactaagagttggtgactttccaagaggggcggaagagaagatgggaatataatttctagagtaatcgaattgaactttgctaaatttgttacctttacttttggtagatgatccttcggtgttgagacttaccttgctcaataccttagacagccgaagatccactatatcg

SEQ ID NO: 52381 - DNA, 397 bp, Zea mays
agcttgaagaaggcaccaaccttatagtctttaggtctagccatgcataagagacttgggagctcattcctctctcatccacttgtatcccctactatgagcattgagcaacaaaggtgccagtagcgtgatatgtcaaagactggatgcagggacgctttgcccgaaccagtataaatcttgcgcccaccgagacaccatccggaccatggaacacacacatacaaatttacttggcggtgcaagttcgaaacaacaacatactaggagaatcacacttaaagagaattgttctcctatactgggtctccaagtttgctataaagattctagaccaaaaccccttggattaagtgctcaagagctccatagctgagtagataacactgaacagaaa

SEQ ID NO: 52382 - DNA, 451 bp, Zea mays
  unsure (1)..(451): unsure at all n locations
tctaaagggagaacatattntaggactaacaaatgttcattttgagaanaacaggatttgtagcgcatgtcaagcaggaaaacaagttggtgttcatcatccacacaagaacatcatgacgaccgacaggccgcttgagctacaccacatggatctattcgacccgatcgcttacataagcatcggcgggagtaagtattgtcttgttattatggatgattattctcgcttcacttgggtgttctttntgcaggataaatctcaaacccaagagaccttaaagggattcttgagacaggctcaaaatgagttcggcttaaggatcaaaaagattagaagcgacaatgggacggagttcaagaactcacaaatagaaggctttcatgaagatgagggcatcaagcatgagttctcttctccctacacaccacaacaaaatggtgtagtggag

SEQ ID NO: 52383 - DNA, 363 bp, Zea mays
agctgcacatttatggttgaattcatggcacgagggccgccaagaaatatggtcacctgatcaagatctgcctgatttcgtgcacacctctcctcagcattagaactccgccgagtcaaagctaaaaaataagcagtaacgatctgttatatgagcgaaaggtaacaagcacaagaagaactgtcagtccgctaaccggtgtttgaagcttttagatcatctatctgcttttgaagaaaaaagggttccactgtgataaagaagaaatttgctcatgaatagagcaccatatgatctcagctgagttgacaccaagtccagaacactttgcagacgcataaggtagcatagagaacatccact

SEQ ID NO: 52384 - DNA, 461 bp, Zea mays
  unsure (1)..(461): unsure at all n locations
tctggtagagtctatgaagccattgtaccggcgattatatctttccggtngtatgtgagtttccagatgtattttcggaagatttgcctggactaccccctgaaagagaggtagaatttgtgattgagctaaaacccggtacggctccgatatcccgaagatcgtaccgtatgccccctaatgaataggcagaattgaagagtcaattaccagacctgctgaataagggatttatccggccaagctcgtccccgtggggttgtcccgccatctttgtgaagaagaaggatcaaaccttgcgcatgtgcgtggactatcggcccctgaatgaggtcaccatcaagaataagtaccctcttccaagaatcgacatcttatttgatcaactaactggggcgagggtattttctaaaaatgatctcaggtcgggctatcatcaaatccgtattcggcccgaggat

SEQ ID NO: 52385 - DNA, 394 bp, Zea mays
agcttagtgtggtgtttgggattatattgggaggccaggggtgctcggaggactactggatactgccggatcgagctgttgcgaccaaatccatggaggcctcaccttccgccgggttttcctctcgcctctgttgtccgcaacagattctctcccaaatcgcgctatggtcgggaattgcaacctccgcggactctgccttcctggagcatataaacccaccgccaccatcaactccgtctgtggacgccaaacttgaccgcgcaacgccatggagtccagctctaatttctcgcccctctctgctctcagacccgattgcccctcgccatggctataaattccagcggcgacataccccgagagttccctatccatcaaacctcgagccatc

SEQ ID NO: 52386 - DNA, 323 bp, Zea mays
gggggtaactcgacggagatagactataaatattgacagcacctccacaacaaaaccggtccgggaaatcatagtccagcattcagaaagcttcggtacactacgacatcattctcttcgggatgcgggcaagtattttccacttcagccgccctcacaatggacaaatcaccgaaaaaccgtgctctcatattgaccagacgaatttctttgatagacgaattacacataaactgaatggcttggtcgcccgggacgatcatcggagacttcaccaccactggccacatcatagctgtcactgtcaccagtatccttagaca

SEQ ID NO: 52387 - DNA, 304 bp, Zea mays
agcttcacatctcttatttaacttggctgcgtcgatcttcgccgaaggcgggattctcgatgagggggatcttcttcacgcgcggtcggatcgtcgtcagagacggggggtgacccccctctcccgatgaagaggacgtcggggtaaaatggtgctgctgtccaggaaacttcccttccattctcctttgacgcccgaggaacggaaagaacgacttgcctttccctggtctccttcttcctcgcgaatcgggcacattccttcgtccgggaagaagacagcggagtcttccgggcaacgagct

SEQ ID NO: 52388 - DNA, 463 bp, Zea mays
  unsure (1)..(463): unsure at all n locations
ctattacggacctataaaactcagcttctnagggagaacacgtgataggtttgactaacgtacatttctaaaaagatagaccttgtgcaacttgtcaggtatgtaaacaggtgggaggagcgcatcacagcaagaatgtgatgaccacatcaagacccctggagctgctacatatggacctcttcggacccgtcgcctatctaagcataagaggaagtaagtatgggttagttattgttgatgacttttcccgcttcacttgggtgttctttttgcaggataagtctgaaacccaagggaccctcaagcgcttcctcaggagagctcanaatgagtttgagctcaaggtgaagaagttaaggagcgacaacgggtccgagttcaagaaccttcaagtggaggagttccttgaggangaanggatcaagcacgagttcttcgttcctacacaccacagcaaaat

SEQ ID NO: 52389 - DNA, 237 bp, Zea mays
agctttgatcttcctacttcttttgctggcgcggacactttaaaggtcaacgatcccagcgttgacgatctgctgcacgctgatgaaactaaagtcccactaagagtcgccttgggcatgagaattaattctcctctaaggctcaaggctgctctcaatattgcctccaccagtgtcttgtcattagaaggcacctcagcaccttcggctttgggatttcctttgttactttctaac

SEQ ID NO: 52390 - DNA, 386 bp, Zea mays
agcttgtactttgcctcaatattgcttgattggagattggctcgtcgtttcagcacgtctgctgacgcaccctctgtcaatcaacttcggtcacaccaactgccatatctatccccgcggctgactggcgcacgccccccatgcctggtggtttcgtcgggccacgcgcggggcgcctcgttattgctgcattggtttaaaaaatcaccttttgtcttctgcagcggtcccaagaatgcgcactaccgacgcgagcggtggttcgctcttttcgcacccaaaatccgacacaccaagtgtatgacttgtggacctgggccccgtgtcatagattgggctgttgtctcctgcggcggcaatgaagaggcgcgctacctcgtgcgggg

SEQ ID NO: 52391 - DNA, 364 bp, Zea mays
ggaccagcggcgtacccacttcagctacccgaaaccttgtctgctgtacataatgtgttccacgggtttcaattaaagaagtgtcttctggttcctgatcgaaccattgaagtaacagatgttttcttaaagccagacttgacatattcaaaacaccctatttgagccttggatcaaaaggacagaattactcgaagaagaactctcaagttttacaagatacagtggaaccagcgttcagaagatgaggctacatgggaaactcgagactttttagaaaagaatttcccacgctttctagcctcatgtaaattgtgatatggatataattgttggataaaggagagagcctcagaccacacct

SEQ ID NO: 52392 - DNA, 355 bp, Zea mays
agcttctaaagggagaacacgttatatgtttgactaacgcgcaattcgaaaaagatagaccttgtgcagcttgtcaagcaggtaaacaagtgggaggagcgcatcacaacaagaatgtgatgaccacatcaagacccctggagctgctgcatatggacctcttcggacccgttgcctatctgagtataggaggaagtaagtatggtctagttattgttgatgacttttcccgcttcacttgggtgttctttttgcaggataagtctgaaacccaagggaccctcaagcgcttcctcaagagatctcaaaatgagtttgagctcaaagtgaaaaagataaggagcgacaacgggac

SEQ ID NO: 52393 - DNA, 454 bp, Zea mays
  unsure (1)..(454): unsure at all n locations
cggtgccgatggagaagcagaagtctttgaaatcttggttgttttactgcttgccgntgtctaccgcgagttcggatggtactccgaagcggctaacaatattttgccagaagaatttctgggttgtcttcgatgtgatagtggatactgccctcgcttcaatccatttggtgaagtattcaacgacgacgaaggtgaacttgaggttcccctgagccgtgggcaggggcccgacaatgtctatggcccagcgctgaaggggccatgtgtgggcgatcagcttcgtgaactgcgcggggcgtcctgagcgtggggaaaatttctgacaggcttctcaggatctgacgacccgatttgtggcgcaaatgatggcgggccagtagaaaccttggcgaatcacctttgccgctagggtcctangccccgcgtgggagccacaggtccccttgtggac

SEQ ID NO: 52394 - DNA, 474 bp, Zea mays
  unsure (1)..(474): unsure at all n locations
catannaaactcaagctcgaattgtctgngaatgtangtgaactacaagaccgctggtagtttttgggntatngacagcggatgcacacaacatatgacaggcaacccacggatgttcacctcactagatgaanatgttgatggtcaagataaaatcacatttggagacaattcaaaaggaaaagtgcaaggacttggcaaggtggcaatctcaaatgatttatcaatatcaaatgttctcttagatgcacctttgagcttcaatttattatcagtgggtcaactctgtgatcttggacttcaatgcttattcactcccacagaggttattgtaacaaagatggatgatgaatcaatggtattcaagggatttagatacaaccacctctacttagtggatttcacttcagaagatgcagatttaagaactttgctcttcaccaaagcgtctcttggatggctctngcataggag

SEQ ID NO: 52395 - DNA, 391 bp, Zea mays
  unsure (1)..(391): unsure at all n locations
agcttcgggtacgatttgagtttattgtatcttgttngaacaccaaacccaaaaccacccccctgtcctatgaactcctttaccgactccggaaaccctaagttctcggagttccgtgaaggaaagttgtattcaagacatagataattagtttaaattatctttgcatcctcatgagcatcccatggcatccattcttatacttatgattggttatgattagaacgtgaagaagagatagaagtcaccgaagacaggacaccatcacctttggattcgtaagcagacaactgcttctacttctatatctgtggatccgaacccgaatcacctgtatacgaaggcaagccccggtgcatgcaacccctttacttgtgtgttttaatacttt

SEQ ID NO: 52396 - DNA, 434 bp, Zea mays
  unsure (1)..(434): unsure at all n locations
ctcaactngagaagggacaatcgnagcatgcacacaaccactctcaattaatatcaagctttccaagaagggcatgagccaaatctatggtgagaaaattaatgctcatatgatttgctctaacaatgtacctatgtgctncagcaacgaaagatcaaagagaagcgataggaggtgctatggatgccatgagaagggccatgaaattgattcatgcccccacatgaagaatcaagaccttgcacgatcaagaaagatgaccatcaaaaaggatgaaaacaaaaggcaaatgcattgcaaggataagcaccgccattgctacaattgccttgaaataggtcatctattcaagtttgtccaaagggtagaactcttaagcctaccatgtcaatttattcatattcacttangagacccaaaaatgacacttgtgc

SEQ ID NO: 52397 - DNA, 340 bp, Zea mays
agcttggaggcgtcgattggaatccggtttatactcactcttctcttgttctgtcgctttgaatgcgacgggttgtacctcgggtgtaaaggtggcgccttgctccaagttgatgatgtgcttggagtctttgatcataaggtcaaagctcacaaacttgcctatcacttcctcgggagacatctgtttatatctaggggctccacggattagttgcacttgagtgggattatgaaaaacaagtgatctaagaataaccttgaccatttcatggtcatcccacattggttcaccattgtcttttgccgattgacattgtttgcggctcttctctttgtga

SEQ ID NO: 52398 - DNA, 460 bp, Zea mays
  unsure (1)..(460): unsure at all n locations
ntccatgttgtgcttgaacattccaatccgagcccgcatctgatcgtggtgaccgtcacaagttggtgttcttctgcagtccgaatccagcatgttcaaatccttttccctttcggtcttctccctgattcctaagcaaaacaagagtgcacgggtctccatggtctaaatatgatggacatgaactcaagagtgtaatcacctgatggttgagttgacgagcacgagcgcgagtaatgggaccagaaattggtacttgtattggtatagatgcatcagtagtgtggatgtcttcatcagtgttgatgcgagaatccatcataacacagttgcattgtgatttctgactcaaggcatcagctacaacattggctttccccgggtggtagtgtacctctaggtcatagtccttgatcagatctagccatcttctctgcctcattttaagatcagcctgagt

SEQ ID NO: 52399 - DNA, 342 bp, Zea mays
agcttgaaccgaggacccgtgttatcggaatagcgaaaccgtgctcgccggagtttattcccccaccggcgcacgtggaccgggtaaattactgagccatcttccgattcaatgcacagatagcctctacatccccccaggaagctcaccgtgtcgttggattggactaggtcgccgtggtttggccggcacacccgccgccgacgaggacacccgcctgcgcgcgtggaccgagcgattccggccatccccgccggcgagccgtacgtcattgtgaccgctagaacctccccgagctaaccctaccccttgacggacttttctcgttgacgggaagccgcg

SEQ ID NO: 52400 - DNA, 454 bp, Zea mays
  unsure (1)..(454): unsure at all n locations
tggagcatcacctactatanaagccaatgtcacccattaattttccattgcttaataattaatactatactaccaactacacccatactccccactattatggatgaaaaatgacaaaatggatgaaagatctctttcctgatttcatttctatatttattggcggaaatgaggaatataattgtatatggaaacaaactaatactgacaaaaaattcaatggaaatgatcacaagctaggaattatagccacaatatcacacttatattgcttaccatgtcttcaataatcaattccttgctgagatgcatgtatgcattgcatttggcatgatcaaaggtttataagtgctagaagacccattattcgttgtttaattgtcttttactacatctagtagtgccaatagaagaactaacggcggaggatcatggcctcacaatatattgcttg

SEQ ID NO: 52401 - DNA, 391 bp, Zea mays
  unsure (1)..(391): unsure at all n locations
agcttgggagttatgattntcttaagtctagtcttggaatctgtccagattctgtacagatttcgaaactgaccttgtttgtctaagttaaacttcgaatcagttcttataaattataaagaagtggtagtactttccttaagctttccaacaaattttgggtcaccctttttggtgacctataagttaagctacaactgttttaagtggaatctttgaatctatccaaatttggacaacaaagcctttcttatgtcttttgatcttgatatgcattgaattaacctaatatgtttataaatgaaatatatacaattttactagctttctaaaaagtctaggagcgcctcaattggatgactgagactccaattatggatatttgaagtga

SEQ ID NO: 52402 - DNA, 391 bp, Zea mays
agcttgaggctgtgtatagattaccgccctcataatgcggtaactatcaagaacaagtatcctttgcctcatattgatgttctttttgaccaattggtcggggccaaggtgttttccaagatagaccttcgctctggctaccatcagatcaagatacgagcaagtgatattctgaagacgacattctcaaccagatatgggctatatgaattcttggtgatgtcattcgggctcacaaatgcaccagcatatttcatgtatctgatgaattcagttttcatgccggaattggacaagttcgtggtggtttttatcgatgatattctggtgtactcaaagaacgaagaagaacatgccgggcatttgcatgtagtgcttcaacgtctgcgag

SEQ ID NO: 52403 - DNA, 461 bp, Zea mays
tcacctccacgaaagtgtatgatgttggagttgcctattttacatcaaagtcagaacttaacatcctcacctcatgctaatacaggtcaaccttttggtgcgtccgcatcattgtcaacacctgctgcaacatctcatgaacaaggtgcaaatccagaagaaggaattaatttggatgaggatgatccttcaaagttgaagcaagcaaagaagtccacttcaaatgtttggtagtattttgagaagtatgaggttgtcgtagaggagaatggcaaatctgtgaagcaagtttgggccaaatgcaagtattcgggatgcaaaaacaagactagcaaagctagggctgaaagtagtagaggaacaactgcattttggtctcatttgaaaaattattataagattgtgaaggggcaacaagagctcaaggcagaaaccgatcatggtacacgtatatgcattgt

SEQ ID NO: 52404 - DNA, 394 bp, Zea mays
agcttactcctccctaggaatgttccttcatcatcgccaagattttgaagcccgggacatacaagctggccaacgatcaaggcgaggtctacaacaacgcttggaacatccaacaactacgtcgcttttacccttaaaatgtttcaagacgttcatgtatctcgctttctttacatacataaataaagtctaaccatcaaggaaggatcagccttgcctcggcaaagcccgaccctccctcgagggctagaaggggaaccccctctgcgtctaaattttcctcagaaaagtctttactagaacgtctttcgtgcttttcgactgtgtcgataacagaatcctaaaaacgagagagagagaccttgaacggcaaggccgaccgagccgagggact

SEQ ID NO: 52405 - DNA, 386 bp, Zea mays
agcttatccttagggtcattctattacttttaccctaaagtatttaaggtttcttaacttgagttaagttctacccctttaaccacttattagggataagtccattacccagggttctatttgcaaaacacttaaaacaatacaacttgtttgaaatttttgcctagtgaatgcactttacgtgtgtcaaacatatgcaatgccaatgctcatgatgccatgctcaagttttaattatagtaacaccaggggtgttacatccttccccccataaaagaatctcgtcccgagattaaaaatcctagggttagtaatggtaaaggaaacgcatcacatttttaatttcttatttttggcacaaagccagggtgatgtgggggttactt

SEQ ID NO: 52406 - DNA, 435 bp, Zea mays
  unsure (1)..(435): unsure at all n locations
tccaagcgtgctgcatatataanagagatacatgagttttatttcgaagcaattgagctcaaagcagtgcgcaaggctgcaagtatgaacaagcatacgaagaaagtgttatttgagccaggggacttggtttggattcacttgcgcacggagcgttttcctgatcagcgcaaatccaaattgatgccacgaggggatggtccattttgtgttcttgccaagatcaatgataatgcatacaagatagatcttccaccaagctatggcgtgagcaacacgttcaatgttgctgacctcttaccatatacaagcgaagacattttagagacgaggacgacttctttttcaagggaggacgatgatatgaccacgccattaagcaacatgttacaacccctcagtcatactacatcaactcaagtacactcaacatca

SEQ ID NO: 52407 - DNA, 391 bp, Zea mays
agcttatccaacaccggtcgtgtatcactcaaaatcctgattttggattagtaaaagaaatcaaagtaaaatgtccctgatgaatagttatactttataattcagcctttctaatttgtaaaactcaaaatcttatcttgggatttataaaagtttctataaaaagattcgggttaaattgtcttttaacgatgtatttcctttatttataaagtatacttccttaaaataaataagtagtgatattaaaagtttgatagctcaaaagttagaattaaaactagaggaaacattctcaaatgtttgactggtaagctattcttaaatagatattggtgtttagaaaccttctcttattaaaaaaatcgaataaatggtccttatgcaaact

SEQ ID NO: 52408 - DNA, 185 bp, Zea mays
agatgggataacgagacagcttgatcagcactcccatggccggtatgcaaagcaatgacgtaccactgggagattctcccccggcgcaccctctgtcatgtgctagataagcgaccccggctgacggacaaagggccgggagagccgctatacaacggctccagcggtctgactaaaaccaaaag

SEQ ID NO: 52409 - DNA, 389 bp, Zea mays
agcttgggcttggctacctcttttgaaagaaaagagggaaactagggaaccaaagggtagcagactctttcttctaatgttgattagctatccgcatgaccttcttagattccaacaaactcacttggtatggtcttgtcattttcatactcttaatccaacgtaactatcaaggtgactcttatttccaaaatattttcttccataaattcttcatcttccattgactaaggtaagattaggaattgcttcaatgggaaaagatagaaggaacaagatagaagagaaagaaagaataagagagaagagaaacccaactatctattccattatctttaaactttaactaaatgaaattgtggacaaactccacaaaatcattgcactcg

SEQ ID NO: 52410 - DNA, 381 bp, Zea mays
  unsure (1)..(381): unsure at all n locations
actcagcntgacacgagagcgcacgcaataggagaattttctttttaattggccaaggactcaccgacagacaccacgctggaggctccggccacaccgtgcggcccaggatgaagacctaccagaaaatgccggcgcgcaagctcccaatcgcgccaaccgaggccgagagcacgcaccggaggtcgcgtagaagcgccccaaccaacaatcccgaccgcaagggccgctacgatacgaaaccacagcggcggaaatcctcgagcctctctctctccgcttctctcaactggggccggtgcttgcgaccaaggaaccccgggcggcattcttatatgcggcaaaaggagtccgagggggcacggggccgttgaaccaact

SEQ ID NO: 52411 - DNA, 445 bp, Zea mays
  unsure (1)..(445): unsure at all n locations
ttagtattttatagntctgaagcaatactatagtaggagtattttatatgagtttagtattctaagttagggtctaagcttcagaactattagtattgcgtcagaactataaaaatactcctaccagaccctaatagtgtgtttggcttgaggattgaagtgattcatctccttctcactcctcacttttctatttggnttgcggaatagaatgagttgatccatcatcatctcattcctcataagctaataattagtatataaatgaggagtggattgattccaccaaaattgatggaatgaacttatgatgcatcatctcatgaggcatatagtgactctacanatcacacacatcataacttctttgctgaggcatgacaacatgcatgcttcagaaaaaataaataatattcttggatcatgctgtatatatatgacgatg

SEQ ID NO: 52412 - DNA, 328 bp, Zea mays
caagaatcagtactagcccaactataaactggaaaactgcgtgaatgggcactccctgtgggcataattgaactggaactacacacaattacatcaacgcaacaacctcaatatatctacatgctccagacaaataccaagcaccacggtactaaatgggaacaaatatccaacgtcagaacatgccacaactcacaaatatcaattgggccacagcaatacgctattgactgttatagtataccacttggtcacttggatgatatgatatcatactgcgagtaaactggcgaagttctctatggccaatcatttgggatttcacaaa

SEQ ID NO: 52413 - DNA, 214 bp, Zea mays
ccgcccgcgcacaacgacgagcctcggacacaaccaaagcaaaacccgacccaccctacggaccggacggaggaaaaacacggaccgcctaaaaacccgctcggacccgcacggccagacgcgcggaccgaccggaggcaaagacccgcaaaaccccgaagcgaccggcccggaagaacgaagcatagcggacccgcggaccggccggggagca

SEQ ID NO: 52414 - DNA, 463 bp, Zea mays
  unsure (1)..(463): unsure at all n locations
ggtatctgtagctggtagattattgcgcatctctaatataatggtctcttggccagcccatgtactggtgctatatatattcataagcctacccaacaagggttaggattttctcctcctaacatggtatcaagtcactctcttcttccctccttccctcccctaggcccagctgccacctccccaatccccatggctggcctccccccacactcgccagtaggggtgaaaacgggacggctacccgggtcgggtaccagatacgagtagtaaaagtatccgaatttttggatacagatacatgtatttntgttatcgggacgaatacgggtactacctgnataataaaaacccggatacgagtaggatatggagtcactgatacccggtaactacccgtacatctcgggtcggatacgggtacccgactgtcgggtacccgatggctggcgtctgggcgtat

SEQ ID NO: 52415 - DNA, 379 bp, Zea mays
agctctcttcagcattctcaagtccttcttgcatccgaaggtaacactatgtcccactaggggttatgaagctggtttttggatcatcctactatctttaaccacatttgatgaaagcctgaataacaatccagcaaactccatagttctgaatgaactgctgcatctactatacaatctattcttggcaatgggaactcatccttcggacacgccttattgagatcatcaaaatcgatgcacattcttcatttaccaatgggccttctttaccataaccagtgttagccaaccattctggggattttacttctctaataactccggcactaacgagtcgttaacttattccgacacctttgccttatcgtcaacattt

SEQ ID NO: 52416 - DNA, 378 bp, Zea mays
  unsure (1)..(378): unsure at all n locations
actaagcttcttagggcgaggcttcngntccccctgtacgatatgattattgtatttttgaagacatttgagatatatctccaccagctgaccccaaatgctattgttaggctcagtgtttacatatgggctcttctaagccaaggaagaagtgcaaatgccgaagggttctgccccatgcacgaactccattatcaaacgaaggccacagtcgatggtctacacaagaacttccggtgctataatattgcataccggaaggataccaatgcccccgcgatttggtaccgtactaaatggccaccgggtggactaatgaatggttttacatgaangctgaacagaagaagagagagaagctcatgactatggtaatga

SEQ ID NO: 52417 - DNA, 252 bp, Zea mays
acaatttcgggggacggaagctaccgatatccaagattgacccaaggttattataaaatgcgacaccctaaactcatatcatcttgagggaagatgcagatgctgcaagaaacaaagaattatcctatgccgaaaaggcaaagtctacaatatggaagaacgccacaggatggcaacatctatgctctaagcgcaagcggcttaacatatcattgcccaagcgacttgcgagccacacagaaaaaggaaaca

SEQ ID NO: 52418 - DNA, 236 bp, Zea mays
tgatatcccttgccatggaccacttctcactcacggaagcatcaatgaacgatttgaatgccaaccctcaaacacttatcaaatcaacctcttgtgctgaaactgttgcaaccttgttctagctgcaagattttgacaatcgctgcttgtagttgaacaccctagtcttccaattctcccaaacctacatgacgaattggctagtcctaatactccaattaagactacctcgagcg

SEQ ID NO: 52419 - DNA, 444 bp, Zea mays
  unsure (1)..(444): unsure at all n locations
actcagcttgccaaagggcgctaatataccttgaatcttctttactgcaggcattcttcacataaaaccattctgtattcagtcgccgggccacctctttcgaaaggttggcacgggacagcttgacccggaccgagaaacgaagctgtagcagccaaaattattgtgatactgttccttaccccaaggttatgtttcgtatgataattcgtgtatattgcagaaactttntgcatcaggcttcagaccttggcttctcacggcccacacgaagatattcagccttatgattgcctcaggggtaagttggtgaagatagactttgaatattttcagcacctctacaatgaagctgcacaggggaaatcttagtccagctttcaaaaagcttcggtacactacgacttcattctcttcagggtgtggacaagtcttctccccttg

SEQ ID NO: 52420 - DNA, 431 bp, Zea mays
tgccttcgcactcatctatcatccgcagtccaacggtgtcttgttacgcaccacagggaaaatcttcacagctgtctaaaagatgctccttgatgaacaaagggtacatggaccgatttgttacctgaggcagtctgggcactaaacacgactgagtgcagggcgacagggtttactcccttccgccttctatacggatcggaggccatgaccccgcaagaaataaagcatgggtcctcgcgaacagttccgtcagccgtccccgacgtggacgagccaacttcaaaggatctcattgacggagactgagtcttcgccctacaggccctaaacaaataccaagcccagaccaaagcatggcgcgaccacacagtcatcccgagggagattagcgaaggggacctcgtactcgtacggacagctcggacgga

SEQ ID NO: 52421 - DNA, 305 bp, Zea mays
gaaccccaagccaccggcgcagcaacaaggaagctttttctctacagccaaacgggagcacaagccgcccacgccgaactaccaataagcagcatcaaaccgaccttcctttagaaaacaactaaaaaaggtgccggcaaaacaccctaaaagccacagaaccctactacccgcagagacataccaccaacagaagcaacagacaattaaacccatattacaaattgacacaagatagcaaatatagccaagggaggaactcaaacacacagacacagagtgccactgaaacgcaaattgcccaa

SEQ ID NO: 52422 - DNA, 417 bp, Zea mays
ttgacaaaaatgtgtctaactaacccctctatcttatacctgaagatggcgttgggacgcgtgccctggacacgtcaaacccgagatcttctctcagtgttcggcagtgagacaaacctaacttcacccctccatatctcttgatccagttagcgaaacccacaagccttcacacacaaacgacaaaggaatatcatgggaagagatctctcaacgggatcatggccataatctcaaagatttggagccaatctacgcttgaacacgacctctctctgtgcttgctcgtgctcgacgccgtgcccagacgccagaacttgcactggcactcgcccgcgcacgccttgagtgcttgcagagccctcccttcggccgtgctcgccgcgcatttaaaacaaccccgggcgcgcctaactt

SEQ ID NO: 52423 - DNA, 439 bp, Zea mays
tcggcattacaaaccgacttaaagatagaatgactttttattccatatagggctgagtcaatgttgtaagttcttataaggggtatacttgtaattcctcacaggctgcgtcctgtgcctataaatagtgaacagtattccgttactgatcacgcattctggtacttgcaatcgcatctttcggattacaatctctgtcaaggcataggtatcattgtatttaatgattcaatatactgaataaatatgatataatgtatctgtgaatcatttatccattctataccttttactttgcactatcttacaatgttcattgaaagtttattacgaaggttcaacttcgtaataacacttttatcaaccttcgtccaaaatccattatcctcaaaggaataatgcttcacggacgaaggacaatatcatttaacattatatg

SEQ ID NO: 52424 - DNA, 404 bp, Zea mays
tagctctacaatatctctttaggctatttcgccctcgacaatattcctattcttcaaggctttgccaagaacagggcctgcaaaaagtcaaaaattaaaaacaactaagttttgtaataactcaattcaaagtatataaggaaaatcaatgtaaacattacctttagatgagtgtaggcaaagcaatctaaggaattcgtcgaggacatggttgataacatggtctctagttctagaaaaccaatgttgtctgctatatagcggcatacatcagtttccgagttatccgggcagcaatacaaatagtccgttggccctcccccaaagattgtagaccacgaagggtactcaagtttgtgagcaaaagccaatagctttagccagcttgctttgtgcccataatc

SEQ ID NO: 52425 - DNA, 413 bp, Zea mays
  unsure (1)..(413): unsure at all n locations
tgtcgccatggggttgtccagccatattcgtctagaagaatgatcaaactntacggatgtgtgtggattatcgacccctgaatgaggtcactatcaagaacaagtaccctcttccacggattgacattctatttgatcaacagactggagcgagggtattctccaagattgatctcagatcgggctatcatcagatccgtattcggcccgaggatataccaaagaccgcattcactacgcggtatggattatttgaatacctggtaatgtctttcggattgacaaatgctcctgcccacttcacttatctgatgaactcggtattcatgcccgagttggacaagtttgtggtggtcttcatagatgacattttaatatattccaagaatgaagaggagtatgcccaacactta

SEQ ID NO: 52426 - DNA, 398 bp, Zea mays
caacttgcgaagagagtacacatgttgatctgcgcatgcatgcgtgcgagcagatgataacgtatctatcgcatgggacacacagatgcaatgccgcgatctaccgtctcaaatgcttcctgacggcctattctgaagggaaagagtcgggcatcagcaactgcaaaacgccgaccaggtgcggctgcatgtatcgtcacagacaagatgccacccttatcgccggcgacgatggcaactaaaagggatattgatggcacacgtgtatttcttggtggaataatatatactgctagaattatatgggccccaacaacgaaatatccataatgtcattcttcagtggaacgcttccccatggtctggttagtatactaaatatctattattccccccca

SEQ ID NO: 52427 - DNA, 424 bp, Zea mays
  unsure (1)..(424): unsure at all n locations
agaacatgtgntaagactaaccgatgtctgtttttataaagacagaccttgtgcagcatgccaagcagggaagcatgtgggaagtacttcataaagcaagaatgtgatgacaacatcaagaccactggaactcctacacatgtatctcttcgaccccgttgcttatctcagcatcaggggaagtaagtatggtcttgttattgtaaatgatttttcccgcttcacttgggttttctttttgcaggaaaaatctgagacccaaggaaccctaaagcgcttcttaaggagagctcaaaacaaatttgagctaaaagtgaaaaagataagaagcgataatggatccgagttcaaaaatcttcaagtcgaagaatatcttgaggaggaagggcataagcatgagttctctgctccctacacaccacaa

SEQ ID NO: 52428 - DNA, 357 bp, Zea mays
tgcttttcagcggggtcatttggtattctgaaattcaaatttcttaatttcagcccttaagccaaagaccgagcgtgttcatcttgatccctagctcaaatcctaatgaccccattgacaaaaatgtgcctaactaacccctctacctcataccacacgatggcatcgggacgtgtgctctggacacgtcaaacccgggatcttctttctgtgcgcggtattgagacaaacccgatttctcccctctctatctcttgatccagtcagcaaaaccttgcaagcctccaccacaaacgatataggaatgttaagggaagagatctctcaccgggatcatggccataatctcaaagattt

SEQ ID NO: 52429 - DNA, 459 bp, Zea mays
  unsure (1)..(459): unsure at all n locations
ccgagtagaaggctaaaggaatcactccagatttttatatagactttgagaagagcgcggccaaagaggccgaatcccttacccctgaagcactctccgaagatcttgattatatcattctacatgcttcgagaaagagattatccgaagaagaatattttgaagctaaacactatgcccgagaactgaagtacccgaagggggccttaatgtttaacggtacggatgaatatgatatcttgtattgacttccggacaacaaagaattattcgtctgccgggagatggccagaagtatgggttttccgaagcttgaagctggcctttgtgccatgacgaaggacgatcttgcggatagtcttgcatacaacaagtctgaaggtacaacaaagttggtgaatnttgaagtttatggactctgttatggagactcttattcttttcgtaataatttattcc

SEQ ID NO: 52430 - DNA, 389 bp, Zea mays
agcttctaaagggagaacacgtgatatgtttttctaacgcgcaatttgaaaaagatagaccttgtgcagcttgtcaagcaggtaaacaagtgggaggagcacatcacagcaagaacgtgatgaccacttcaagacctctggagctgctgcatatggacctcttcagaccccgtgcctatctgagcataggaggaaagtaagttggtctacttattggtgatgacttttcccgctttacttgggtggtctttttgcaggataagtctgaaacccaagggaccctcaagcgctttctaatgagagcttataaagagtttgagctccatgtgataaaaataagaaacgacaattggttccaattcaaaacctttcagggaggagttccttga

SEQ ID NO: 52431 - DNA, 440 bp, Zea mays
  unsure (1)..(440): unsure at all n locations
tctaaagggagaacacattttaggattaacgaatgttcatttttataaagacaggatttgtagcgcatgtcaggcagggaagcaagttggagtccatcatccgcacaagaacatcatgacgaccgacaggccgcttgagctactccacatggatctattcggcccgattgcttacataagcatcggcgggagtaagtattgtcttgtaatagtggatgattattctcgcttcacttgggtattctttttacaggaaaaatctcaaacccaagagaccttaaagggattcttgagatgagctcaaaatgagttcggcttaaggatcaagaaaataagaagcgacaacgggacggagttcaagaactctcaaattgaaggctttcttgaggaggagggcatcaagcatgagttctcctctccctacacgccacaacanaatg

SEQ ID NO: 52432 - DNA, 324 bp, Zea mays
agcttctaaagggagaacactctatatttttaactaaagtgcatttcgaaaaagatataccttgtgcagcttgtcaagcaggctaacaattgggaagctctcattacaccaaaaatgtgatgaccacatttagacctttggagatgctctatatggacctcttctgactcgtcgcctatctaaatatatgaggaagtgagataccctttagggggggtgaataggtgatcctgtatcacttcaaaacttatcccacaaaacttggttaattgttagcgcaataattggccagtggctttataagaattctcttcaaatcacaat

SEQ ID NO: 52433 - DNA, 454 bp, Zea mays
  unsure (1)..(454): unsure at all n locations
ctaagctctncacaccttacctcatcagccatgtcaaagaanaactatgtttcttacaagtttttctgtccagcaccaccgccaccattccaaatgccaccaaaagaacatttcaggtgggtacatgcttcatccactttaagagatttcacaacatcattcttgcattttgaataacttgcaccacaaggtgaagctgaggcttcaaatgtttcagagccatatttatattgccctacacccacaaacccaatacaagtatgtgctctcagtaaaagatcaatagatgagttatgtcacaaagcacgcccacaaagcatggcatgtagaaagttcaattgtaaatccaacagggctcataatctcttatctgtgtatgtattcgntatgtatatatgagtacaatcataatcagcactataacaatatcttaatcatagacttagttcttatc

SEQ ID NO: 52434 - DNA, 200 bp, Zea mays
  unsure (1)..(200): unsure at all n locations
atactcanagtcagctgcagcatcaaacttgaccgagctttgtctatttgagaagcagattcacccttgtcggacttctgtctttcgacgccgcgtgtggaccgagctaaccagtgagatcttcgataattccttgccccacatcttccctatcattccgtgaagctctctgacccgttcaattgaactatcgcgccgtg

SEQ ID NO: 52435 - DNA, 365 bp, Zea mays
agcttgtgtaatctacttcattatcttcttgagacatcatcacttgaagtagtatacttaggggtatctcgagcgcttacctttttctcctttgccatgaggcaggtgtggcgctcgttggggaagagagatgacttgttgaaggccgaagcggtgagtccttcgtcttcggagtcggacgaatagcaatctgaatcccactctttgccaaggtgcgcctcgcccttcgccttcttgtaagccttcttcttttccctcttctcgatcttttcttgttcctggccattagcattatcgggacaatttgctatgaaatgaccagtcttaccacattaaaaacacgaccgctttccttttgcttgctc

SEQ ID NO: 52436 - DNA, 399 bp, Zea mays
  unsure (1)..(399): unsure at all n locations
caagaatgctggaggaagctttagcaggatgactacaanagtgctgagtacccaaattggtatgattgttttgacctatgttcatgacattatattcagaggtacgaagcaagaaaaacatatttacacttgcaagaaacatttgccaacttcagaaatgcacgtcttaagttaaatccagaaaaatgcatctttggggtgaagaagggaaaattccttagctgccatgtatcaactaagggaatcgaggctaacccaagcccgatagacgctatacttctgatggaaccgctaaagttcagaaagggggcccacaggttgacagggagacttgcattacttaattgattcaactcaaggtctgcagaaagaaacatgccattctttatagtgctaaag

SEQ ID NO: 52437 - DNA, 358 bp, Zea mays
agcttgtgaagactctttattctaacatgggctaatcggcgacgccagagccaacccatgttagtcttagcaattaagcaagtgtccagttcagctctatcaaaatctaacaagaatagctgaccctctaacactcccttaaacgctattgaatcatcactttttttaaagacgagtgacaccctacatcacgtgaatagacagttgtagcccatttgacataattgagatacggaaagcaaattgtaatctaaagaatcaacaagaaaaacattggaaatggaatggtcaagagatatagcaatttttcccatacctttgaccaaaccttgatttccatcccccaatgtgaacgctt

SEQ ID NO: 52438 - DNA, 162 bp, Zea mays
agcttcctccatcattcttgattctctcacgcatccgaagatagcaatatgtgccactgggggttatgaagctaagtttttggctcatcttcccttttcatccagatttggtggtagccagagtaacaatccagcagactcatgagaactgaagaagttgct

SEQ ID NO: 52439 - DNA, 432 bp, Zea mays
  unsure (1)..(432): unsure at all n locations
tgtttggcccactaaggtcaaactatctgtgcgctcttactacactcgacacanaaggagagagttaagttcacatttaatattactaagtgtgataaaatatttgatgagttacttaaatatggtaatattgaattgtcacttataattcctttggttgagaaattaaaagggcgtgtacattgtaaatggcatggctcttttcttgataacaccaatgattgtgttgtctttcgtcagcaaatacaatcggctataaacgaaggtcggttgaggtttcaaaaggaggtgatgattgacaggccacctgcccctgccacgacattagagccgacaagcaaaaaagtcatagttcggccttgtgcggccgattaaagtaaagataaaaatatcgtcattggtgatccccgcacaccaaatatgtcatgtaaa

SEQ ID NO: 52440 - DNA, 383 bp, Zea mays
ttcattgcctcagctactttttccatctccacttcacctatcacactcgaagccagcagccagaatggctccagcatgccctacaacagcgtgacttcatggagcagtctgaagctcgtacagtcaacagtattgtgccagagaccaatcatatatattaaggaatatcatactggtgatgtatttttgtcttttatgtcattttattttgctacgtgaaaaaaacaagtcatgaacttgatttcaatttcttgtaataatcgggcttatactagagtgaaatatatcttcctcatggatttacgaagctcgaaagacgtctataacgacaacaagtacactttaagctcaaaagtcgttctaaagggatgcagagccaaaat

SEQ ID NO: 52441 - DNA, 384 bp, Zea mays
cgcttcggccgaggggtccttcgtatcatcaatacagagggtcttttctgcctgagctaaggttataacatgctcacaacctgacttctccaaaatagctgcaattcccctcgcactagagaaggcgcagacgtccccacggtcactcaaaatttcttcaaaagcttcggcttcgctgctgatccactcaattgggccctcaggatcgcctcttatgaagttgtcttcactcgagtacgcggccacattggcgaagctagtctttatcttttttacacattccacagatttttcaaaacatctttctttcgatgagcgaagctctgcaactgttttctcccaataatttttctagtaattactggcatctcggccagcttcggc

SEQ ID NO: 52442 - DNA, 389 bp, Zea mays
  unsure (1)..(389): unsure at all n locations
agcttctaaagggagagcacattttgggtttattttatgcncattttgagaaagaaagggtttctagcgcatgtcaagcagggaagcaagttggtgtttatcatccacacaataacattatgacgaccgactagccgcttgagctactccacatcgttctattccgcctgaaagcttacataatctgagacaggagctagtactgactagctagtgtggattattattactgattcacttggaaggctcatgcgtacgaaaaatcacaaaccctagagacattgaggggagttttgagacaggctcacaatgagatcggattgagaatcaaaaagaatataattgacaatgggacggactttaaatactcacaatataaaggcttcttg

SEQ ID NO: 52443 - DNA, 460 bp, Zea mays
tctaaagggagaacacgtgataggtttgactaacgtgcaatttttaaaggatagaccttgtgcagcttgtcaaacaggtaaacaggtgggaggagcgcatcacagcaagaatgtgatgaccacctcaagacctctggagctgctgcatatagacctcttcggacccgtcgcctatctgagcataagagggagtaagtatggtctagttattgttgatgacttttcccgcttcacttgggtgttctttttgcaggataagtctgaaacccaagggaccctcaagcgcttcctcaggagagctcataatgagtttgagctcaaggtgaagaagataaggagcgacaacgggtccgagttcaagaaccttcaagtggaggagttccttgaagaggaagggatcaagcacgagttctccgctccctacacaccacagcaaaatggtgtggtagagaggaagaac

SEQ ID NO: 52444 - DNA, 179 bp, Zea mays
acttgttgtccggtagacaatataagaaaccatcttcattactgcccgtgaacactaaggaccccttccgtataatgtacactaacgggcgcacagtatggcttctaagatttattcttctagcaataactttcccctagcacgtacaacaatgaactcaacatcctcggctggagctt

SEQ ID NO: 52445 - DNA, 454 bp, Zea mays
  unsure (1)..(454): unsure at all n locations
tactaagctgcttaacccaaagagcttatagagctgaccattgtttgtcttttggggtcctcacaaccaggagggtgttccacgtacactagttcactaatcttaccatttaagaaggcactcttaacatccatttggtagagcttgatattatgagcacaagcataggttagaaggattcgaatggcttccaatcttgccatgggtgcaaatgtctcaccaaaatcaaatccttctacttgagtataaccttgtgccactagtcttgccttgtttcttaccaccaaaccatcttcattatgcttgttctgaaatacccatttggttccataaacattgtgattctttggtcttgcaacaagctcccacacttcattacangtaaagttatataattcctcatgcattgtattcatctaatcaacatcaagtagagcttcatctacatggttag

SEQ ID NO: 52446 - DNA, 276 bp, Zea mays
  unsure (1)..(276): unsure at all n locations
agcttctagatctngaatcttctttctttgaaaatacgttattagtgtctccgaagatgttcgaagataacaagactgctgctgagaccaaactgagccttgacgaatagaaaaatttggggtttcttatagcgatgtccaagaccaacacataaaaaatcaccacggagattctggaaggtttgtctgaggatactggtgacagtgacagctatgatgtggacagtggtggggaaaactccgaagattgtccctggcgaacaagccatctcagtt

SEQ ID NO: 52447 - DNA, 362 bp, Zea mays
cgcatgtcaagcaaggaagcaagttggtgttcatcatccacacaagaacatcatgacgactgacaggccactcgagctcctacacatggacctattcggcccgatagcttacataaacatcggcgggagtaagtactgtctagctattgtggatgactattctcgcattactcgggtgttctttttacacgataaatctcatacccaagagaccttacagggattcttgagacgggctcaaaatgagttcggcttgaggatcaagaagataagaagtgacaacggaacggagttcaagaactctcacattgaaggctctcttgaggaggagggcatcaagcatgagttctcttctccctaca

SEQ ID NO: 52448 - DNA, 360 bp, Zea mays
aacttaaggaggtagcacactttacaagttgttactttgcagaagaacataatgtatttgctcgaaagaaaaggtaccatgatgatgaacgagagatgccttcttgtagtgatcttttgattttttagacaaacggcaaaaccgttggtccacccaaggcatatcacctcattatggaagaacgaaagtctgctttactgtacatgttcacgaatatgcctgaggtggagaaatattttgtgtaagacttatttttttaaactgttcatatgtgaattagtttatgttatctagcggtggaagtagcggagttccttcttctgctttgtctggccttattggtctgcaagagctgtccat

SEQ ID NO: 52449 - DNA, 358 bp, Zea mays
agctttctcaatctatcttgttttttatcaaatatactttaacttatataattggctcaactcaaaattttaaacttttcattcccttttgcttattttcttgaattttgttcatggggttcacttaaggttcttaattagggttgcacattcttatcctttaagagactcaattgttttgatcatgacacttttaagcatatacttggtgaactctttcttacttaagttattttgatgctcatgcttactttggttcacataaaataatggttcttggtttggctttttaagagaaaccctatgtgacactggggtgtcacagccttctcctccttaaagaatctcgtcccgagat

SEQ ID NO: 52450 - DNA, 454 bp, Zea mays
acggacctataaaactcagcttctaagggagaacatgtgttaggtctaacaaatgtatctttcgaaaaaaatagaccttgtgcaacttgtcaagtaggtaaacaggtgggaagctctcatcatagcaaaaatatgatgaccacatcaagacctttggagctacttcacatggacctcttcggccccgtcgcctacctcaacatcgggggaagtaagtatggtcttgttattgttgatgatttttcccgcttcacttgggtattctttttgcaggataaaacagaaacccaagggacccttaagcgcttcctaaggagagctcaaaacgaatttgagcttaaggtgaaaaagataataagcgacaacgggtccgagttcaagaaccttcaagtggaggagtgccttgaggaggaaggaatcaagcacgagttcttcgctccctacacaccacagc

SEQ ID NO: 52451 - DNA, 365 bp, Zea mays
agctagccaagccctcagacctatttgactacaccggaggcccgagagcgacctcaccggactttggacttccgccgccgcgcgaggaccaagctattcaacgagtctccgcccaattactatcgctcatggtcttctctggcatcccgcggacctccctgacctaattaatagaactaactcgccgtgaccaggccggtctcctcgccgacgacaagcatccccgactgcgcgcgtggaccgaccaactccggccatttccgatggcgttccgcacaccagtgagaaccccacgacctccccttcaccctcgaacacttaaccggaacagtcccgccgccggtaagcccttcgccttttctccg

SEQ ID NO: 52452 - DNA, 434 bp, Zea mays
  unsure (1)..(434): unsure at all n locations
ccctgcgcatcgaaccgncctccgagcgagcaggcgctgtttccattcacgggaccatccctgagaagcgcgggcagcccctcgggcgactccacctcccaaaccgcttcgggacaccctccaacttccgaagggaggccctgacgttcgaagtggaccggctccgaggaacctaccacgccgtgctaaggaggccatgctccgcgaaaatcatggccgtacacaactacacctacctgaagctcaagatgccgggccccaacggggtcattactgtcgggcccacgtacaaacactcgttcgaatgcgacacggagtgcgtggagtacacccaggcccatgccgagacccaagccctcatcgccgacctggagaacctctacaaggaggttccaaacctgaaacgccatgccggcaacttatagctagcgaga

SEQ ID NO: 52453 - DNA, 390 bp, Zea mays
agctttggatttttaagactccttgatcgtgattctgatgaattttgatgtgtaatgcaaaatttcatattatgtgatgtattatttgatttattagctcacttaattttatggagctaatacatttaatgtttttctattgaacaggatgagtggtaggaataaaccaaagcgcactgctagggggtttctatatgcagctagcaggatactccctggtgcacgttcccttttccaagggagttcttctagccagagcatacaggaggcgttgctgagacacgctcggccagaactacgtgatacacctatcgctctacaacggagtaccgatgtaaatgtttatgtaattgatcttatgtgtcagccacttatgtaattgatcttatg

SEQ ID NO: 52454 - DNA, 305 bp, Zea mays
atctttaaagggagaatttttcttggactcacaaatgttcattgtgtgaaagatagggattgtcgcgcatgctaagcatgaaagcaagatggtgctcattttccacacaagaacatcatgacgaccgacaggcctgttgagctactccacatggatctattcggcccgattgcttacataagcatcggcgggagtaagtattgccttgtaataatggaagataattctcgctaacgtgggtattctacttgcaagaaatatctttgacccaagacaccttaagggatttttgagaccggctcaaa

SEQ ID NO: 52455 - DNA, 456 bp, Zea mays
  unsure (1)..(456): unsure at all n locations
cgagttatattattacagaccagcctaatagtgagtgcttatgagtaatattgtccaaaccaggggaggcacaagactcctcccgataagctaaaagcaaaagatcctaaccggaggaccgagtcctcccgcacttcaatcttgattttcttcttttgaaaccaccttggaacacaagcaacaaaagtctgctactttctcacctaaaaacaacgaagggataaaccctgagtatggaatactcagcatgtcttacccgactaaagaaaagactctcaagggtatgctggcttaagggtgtcaaggtaaggcttttcaataatcaaagactctgttttgcagaaatgcttactaaagtggatccttaaaatccaatgttatttgtcaagttaagtaaaattacctgccactagagntctttctaacctaggtcaatcactggtcctgcactagcca

SEQ ID NO: 52456 - DNA, 391 bp, Zea mays
agctttaaagaggatgaaaggtttgtttgcgatgggcccggatggtatcccaatagaggtgttgttggggacttgttctcaaatgctatgagttaagaacaaggcaacacagagaatgttaaacaataaagtccttcgtcctttgaagcattatttcccttaggatataacgatcttcggacgaaggtcatgaaggacgagccttcatcatcacagtatatattaatgaaagacgaagcatatgaaacataaaagatagcatgaacaatcatataatattattcatttaactttattatatcatcatagagaaataggaacaatatcaaattataaatgtaccttcggcttggaaggagatgataatacaaggatgacgccaaagcaaaat

SEQ ID NO: 52457 - DNA, 438 bp, Zea mays
  unsure (1)..(438): unsure at all n locations
tacggatacctatcaccccctctaggttttatttccacattcaccaagcatactcaccaggacgtagggtggtacgcatctctaagcggcccgaacctgttaaccctgtccactggtcctcgtgcaatcggcacgaaccattttgctacaggccgtcgacaccgtcctactcctaagaacacctcgaggggcaaccccaggtgtgcggtcgaacccaaaacaccgacaggaagcgaagctacacttgcacgtggagaaggcccgcaactctctatagaggtacttggtcatggggcttgcccctcacgggggtaccctttgcgatggcaccaacgaagattagtcaggaccctgcgcgggtcaagatacctcggtaaaaaaccaatgcccgccacgagagnttggattcctacccttgctcttagcttcacatttaca

SEQ ID NO: 52458 - DNA, 425 bp, Zea mays
catgggctagtcggcggtgttatattctacccatgttagccttagcaattaaacaagtgttgagttcagctctatcataatctactaagaatagctgaccctctaacactcccttaaatgctattgaatcatcacttcttctaaagacagtgacacctatatcagtgaatagacaggtgtagcccatttgacataattgagatacggaaaccaaattgtaatctaatgaatcaacaagaaaaacattggaaatggaatggccaggagatatagcaattctaccaagaccttcgactaaaccttgatttccatccccaaatgggatagctcggtggggatctttgttttctcaatgaggaaacatcttttctccctgtatgtgggtgggacccgctgcgagtatcactgagccccggagcaaaacc

SEQ ID NO: 52459 - DNA, 381 bp, Zea mays
  unsure (1)..(381): unsure at all n locations
agctngaacttggtctatctgctttgctctaatgatcaacntgcacacaaccttgcttataacagtttgaaggctcgcttatctttatttctggtattttgttaatttatgttaggaaggcttgtggatatacttaatattatttatttgtatgttcttcgtatgttagggtcttattcttagcaaggctttgaaggtccaaaaagatgttgaagatgaaggctcacgaatagccttcagaaatatgcgctcagaagtcatataacttcggaatgaagccctttaaaaagacaagatcctcctttctttattcaacatgctaaagactagtgaagctaagttggctatatttctgaagtggaacaaaaaatggagaaattt

SEQ ID NO: 52460 - DNA, 419 bp, Zea mays
  unsure (1)..(419): unsure at all n locations
acctataaatactnaagcttgtgcaaagcccgctggaactaatctatggagaaacccgatctctttgttacatgacacccgaaggtccaacacaacaagcaatgagtgaattcagaattattgtcgagcatatcagcacaagggacctggctcaagagattttagctttcaaagtttttcccagtttgaaagaatgggaaatgccgaagctacagggggaaaagaaagaacgtgaacttgtacgtttaccttactatttcaagtttaagaagtactttataacaccttgccaagaatggctagatacaattgaagtaatgtgcaatgaaatacttggcaattactccaaaaaagaagatcaatngatgaccgcagccttcggcactcgtccgaagcgaaggctaaatcgagtgttggac

SEQ ID NO: 52461 - DNA, 390 bp, Zea mays
agtcttctaaagggagagcacattttggtactaacaaatgtgcattatgagaaagacaggatttgtagcgcatgccaagcaaggaagcaagttggtgttcattatccacacaagaacattatgacgactgacaggccacttgagctcctccacatggacctatttggcccgatagcttacataagcatcggcgggagtaagtactgtctagttattgcggatgattattctcgctttacttgggtattctttctacaggaaaaatctcaaacccaagagactttgaaaggattcttgagatgggctcaaaatgagtttggcttgaagatcaagaaaattagaagcgacaatggaacggagttcaagaactcaccaatagaaggttttttg

SEQ ID NO: 52462 - DNA, 448 bp, Zea mays
ctgccaaatagggcgcataattataccattgatatcttctcgtattgtcagatcattcttcacataaaaccattctgtcatccagtcgccgggccatctcttccgaaaggttggcacgaggcagcttgacccggaccgagaaacgaaactgtagcagccaaaattattgtgatactgttccttaccccaagggtttgtctcgtatgataattcgtgtatattacagaagctttttgcatcaggcttcagaccttggcttctcacggcccacacgaagatattcagctttataattgcctcgggggtaagttgatggagatagatttcgaatattttcagcacctccacaacgaagctgctcaagggaaatcgcagtccagctttcaaaaagcttcggtacactacgacttcattctcttcgggatgtgggcaagttttttccccttcg

SEQ ID NO: 52463 - DNA, 412 bp, Zea mays
  unsure (1)..(412): unsure at all n locations
tcagatgggtagtctccagcaacctctccagcccgggacgatgctccgtttcgggagtctcgagttcatgtgcctcgacggcagctacgacatggtactcctttctccgccgcgcgacaacgacaatggcggccttcagcccgcccgtcggtggcggaatcgacgacgtcttccccgcgtggcggaagagcagcatccgggtctgtctcgtcacattccccgctgacggaggaggaggcggngcaaccatggccaagcagaaggcggcaccttgttggttgtcgagcgagtcgacgacgccggcgccccagcaggagacacgttgggcgttgacctcgcgtctgagacgaagacgagcgtcgtttttccgcaatacgccaacccctagcagacggacgacgccagcacgctc

SEQ ID NO: 52464 - DNA, 320 bp, Zea mays
gcccgggacctcaagcgacgcagctgcaagcagagaaatctttaccacatggctagtcgggatgccgaccaacccaggagactagccaaaacacgtgcgagacagcccgataaaatccctaagatagctgaccctctaacacaccctaaaggctatgaacaacaatcctcaaagacgcgcacctaatcagaaaagacagtgaccccattgacaaaatggaaacaaaagcagccgaatctaagaatcaacagacaacattgaaatgaacggcaggtgaaaaacatttaccaaccctgacacccttgatccaccccgatgga

SEQ ID NO: 52465 - DNA, 446 bp, Zea mays
  unsure (1)..(446): unsure at all n locations
gagaacatgtggtaggttagtctaacgtgcttttttaanaagatagaccttgtgcagcttgtcaaataggtaaacaagtgggaggagcgcatcacagcaagaatgtgatgaccacttcaagacctctggagctgctgcatatggacctcttcggacccgtcgcctatctaagcataggaggaagtaagtatggtttagttattgttgatgactnttccgcttcacttgggtgttctttttgcaggataagtctgaaacccaaggaaccctcaagcgcttcctcaggagagctcaaaatgagtttgagctcaaggtgaagaagataaggagcgacaacgggtccgaagtcaagaaccttcaagtggaggagttccttgaggaggaagggatcaagcacgagttcttcgcttcctacacaccacagcacaatggtgtggtagagagga

SEQ ID NO: 52466 - DNA, 395 bp, Zea mays
agctctgggaactatgcccgtatccaatctgcctgagccggaactataagagcttgccagatgcccccgttccggtcgaccacgaccaacacccaacataagacttccctagttatttagccaagaccagagccatgatagttctcatggtagcactgttttcccgggtggtcactccatgttccaattaatatgcaataatcttgtttaaccatcgggttaacaacaataatgtaaacttaccatttggaacattaatatcataacaggagtgactgcataaagttaagttgtagcaatagcatagctacttgattaaatcataatcccacgttaaacaaggagtaaggttggaaaggttatctaaataggtaacccgtcaagttatgcatata

SEQ ID NO: 52467 - DNA, 458 bp, Zea mays
  unsure (1)..(458): unsure at all n locations
catcgtccgaaggataattgccttgtaggaaggatactatctcattcctccaatcttcactatgcactggtgagattgtaagcaatgctcgctccatgagctcgactgaaggtgcttttattgtttcaaaaaatacttcctaaggtaatgggagcccctgtgccgctaacttagctaataggtctgcatgttcattttctcctcttgggatattctttatagagaaaccatcgaaagaggcttccattcttcgaactgtatcaagatatttctcaagcttcggatctctntgtttgctgcttttgtcgatgtggcctgtgataaattgtgaatcagattttagaagtgcccttcttattcccattgccttaagtttttgaagccccaagagaagggtttcgtactctatagnngtatntggggcaagtgactacaaccttgctgcataacatggtcta

SEQ ID NO: 52468 - DNA, 356 bp, Zea mays
agcttggatgaggtgaacgtataattgacccatgaataggtccatttatctttaacagttgtagaattatgaagatttctcatcagctctgggaaagccagatattcgtcaacagcctgaggagataagggattatggaaattgtgctccatatcaatgttggctaaaaattcttaaagtgagcattcctttttcttggcaaaggaaaagagacaagggaaagtgaatttgggggagatgttgttcctaacatcatgtcacaatagaattgtccttccatccttgtgcctgggcatagcatgccctctgaaatagtcaatcaacctgcaaacattcttccactaaaaagaaccggt

SEQ ID NO: 52469 - DNA, 450 bp, Zea mays
  unsure (1)..(450): unsure at all n locations
ctcacatcttggactaactcggctgcatcactctntgccatcggctagtaaaaaccagacatgaagaccttcccaaccagagttctggatgttgtgtgtatcccgcactgtccggcgtgaatctcatctagcagttgctttccagtaaacgaaggaatgcacttcatgaggactcctgttgcgccccttctatacagtgcgtcctctatgagggtgtagtgggctgactgccttgcgatgcgttccgttgtggctttatcatccggttcctcttcgntctttatatacctgatgataggcttcctccagtcattagagtctgactctggctagctcaaagcattgcactcttctgactgatttgagaaaatgctcgggcgtggcacctcctagacgaanactccaggtgggacctgagttcgactggatcctagttttgacaatgcgtct

SEQ ID NO: 52470 - DNA, 382 bp, Zea mays
agcttacagccatggttatgtttataggcaagttatatgcgaattgagtcaagcctagctacgggtgcctaggtatcaccgaaatccaaaccttccacttgtgaatatcctttggccacaagtcgggctttgttccttgtcaccacaccatgctcatcttgcctgttgcggaagacccacttggttcctacaacattttgattaggacgtgggactaaatgccataccacgttcctggtgaagttgttgagctcttcttgcatcgccaccacccaatccgaatcttggagtgcttcctctaccctgtgtggctcaatagaggaaaccaaagagtaatgctcacaaaaatgtgctacacgagaactaggggctacccccttat

SEQ ID NO: 52471 - DNA, 397 bp, Zea mays
  unsure (1)..(397): unsure at all n locations
tctnctggacaagcgccgcactcactgcagagtgcgaatctgtttatacagcancagaggagcccctggcactggtggagttagcgtcgttagatcgatcagatactgcttcagttcttcgaaggctttctgctgaactgatccccattgaaagacttcggtcgatttcagcatttcaaagaatggtaaatttctctctgctgatctggatataaatcgattcaaagatgccaaccttcctgtcagccactgagcccccttctttgtgcttggcggctccatccgaagaatggcttcaattttgtttggattagcttcgattccttttgttgaaactagacaaccaaggaagttgcccttcttacttcgagacacattttctggatcaacttcggcc

SEQ ID NO: 52472 - DNA, 293 bp, Zea mays
agcttctccttataaaatggacttccctcttcagacaatggagggttcattggcataatcccacaccaaagttgcttgaataaatgatgaactcctttgttaatcataaagcttctaacaagaaaggaagaattttgatgtgaggtgtggcacaaccacccgaattattccagcttaagtgcctaaaccactcctcaggggccgtaacacacttatattggaataacccgttcgtcccttacatctagtctgatagagccacttaaccaggatcaaatttcccactctcactc

SEQ ID NO: 52473 - DNA, 437 bp, Zea mays
  unsure (1)..(437): unsure at all n locations
tatatattaagagccctgagcttgcaataatagatgtgtttctgctagtcaatatgctcatttggggtgaaccagacctggtcaacagttttcagtcacggcgccgttacaccgttgcccacgtcagtcccagccacgatcccttgtttcccagtttctaaaaccgtcttcgcgcaaacagcccagggaaacccgcgttgataggaaggaaacaccactgaccgcgccgtcctttcttgcgtctgaggcgactcgccagcgatttccgccgctccaatccagcgccgttcgaatcgagctgagctccttcaatctccgagcattggagcccgattcaagagccaatgctttcccagaagttccaggtaatccaacttgaaatacatcgtggtttccattgattcttgaagcattnttcgttgattgacgcggatttg

SEQ ID NO: 52474 - DNA, 377 bp, Zea mays
agcttgaaggttttcttttgcttgagagcctccgaacggaaagacttgttcagtccacggacactttttatccaagcgcgagttacttatcgcataatgcgatgagtgaggtattcgtatcccggacgcgcacgagtccctcggctcggtcagccttggctgttaacgtgtactccgttgtttccaggatccgctttctcaatgtagtctagaatcactaaagagatcctgctaacaagagatcctttttcgaggaaataattcgcacagagggggtctcctcccttttagctcccgagggagggtcggtctttgccgaggtaggcctacccttctctgacactaacctttgcgtacggcgaggttatgaacaactg

SEQ ID NO: 52475 - DNA, 340 bp, Zea mays
tgagaaggggacaaccgtagcatgcacaaaacctcttattttaataccaagctttccaagaagggcatgagcaaaatccatggtgagaaaattaatgctcatatgatttgctctaacaatgtacctatgtgcttcaacaaagaaagatcaaagagaagcgataggagatgctatggatgcaaggagaagggccatgaaattgattcatgcccccacatgaagaaccaagaccttgcacaatcaagaaagatgatcatcaagaaagatgaaagcaaaaggcaaatgcattgcaaggacaagcaccgcatttgctacaattgccgtataaaaggtcatctat

SEQ ID NO: 52476 - DNA, 400 bp, Zea mays
agcttgtattgcataggagatgttgtacatatatatatatatagactcagaaccctaaccctaatgggccggcaactcaacagtggtgcaggcccacacacacagagaacacactgtctagcatcccccgcagtcgcaacggggacaccacacacgatgagaatggagtagaagccgaaggtaggaactgacgggttgaaatcccatcgcagtcgcagcgttgtgagggtgcaaatgttgcggctggaatagagaccggtgtgcactccaagaagacgaggaggccggcggcaacgcacgcgcctgcgtcgatcaaggtggtcgcgcccgcgacataataaaaggggtatcggcggatctggccaggaaggccacgacaacgacggatccaaccatgaag

SEQ ID NO: 52477 - DNA, 390 bp, Zea mays
  unsure (1)..(390): unsure at all n locations
atactgtacaacatatnttcttattctccgttctgactagaaaactctactgtatcggtcgtcgtcgtcgtcttcttctccattcagccatacgatcttttttcaacagcatggggaaaatcttcgattatcgctctgtgtatgcaggggtatcagctaatcagcctgccattccaataaaaaaaacacaaaaagggctctaaaaaaagggcggggcggcactcaaaaggggatggatatatgtgtgctggtcatcctcatcatgctactgtcattcgttgaccagagtcaaatgggcctcacaccaacaattcagctcgcatatgctactgtaaagcgctcaagtgagctgtgccgtgagaggtgtataaacatcatattatattattc

SEQ ID NO: 52478 - DNA, 368 bp, Zea mays
  unsure (1)..(368): unsure at all n locations
cangcacgcaagcttcaaaagggagaacacgttatttgtctaaccaaagcccaatccgacaaagatagaccctgtgcagcctgccaagcagggaaacaggtgggaggagcgcatcacagcaagaatgcgatgaccacttcaagacccctggagctgctgcataaggacctctacggacccgacgcctatctaagcatagggggaaggaagcatggttcagctaacgcagatgaaataccccgctccacacgggcgttcgttccgcacgataagtcagaaacccaagggaccctcaaacgcttcctcaggagagctcanaatgagttcgagctcaaagcgaaaaagataagaagcgacaacgggaccga

SEQ ID NO: 52479 - DNA, 311 bp, Zea mays
cccacttaaaaagaatgagggtggaactcttgaatcttggggatatgaactccttgaagtaccacataacaagggtgttatgggtccttctgctgctgtagctgcttgagctggctgcggagggatgactggcacagggtagattctgggggaaccttcttcttacttctctacgctatcttctattcactgacactttctttctctttgctcttccactggaggattctatcgatgagtattaccatcatacacaggaggagacctaagactatgaaccatgtgcaacagtcttcaacccaaaaatcacc

SEQ ID NO: 52480 - DNA, 380 bp, Zea mays
agctataccaaatggacgtgattagtgcttttctcaatggaccaatcaaggaagaggtctatgttgagcaacctcccggctttgaagacagtgagtatcctaaccatgtctataggctctctaaggcgctttatgggctcaagcaagcccgaagagcatggtatgaatgccttagagatatccttattactaatggctacaaagctggcgaggccgatcctactttattcactataactcttgacaatgattcgtttgtatgccaaatttacgttgatgatatcataattgggtctactatcgaatctacatgtgaagaatttagtatgatcatgacacataaactccagatgtctatgatgggggagttgaagtatttt

SEQ ID NO: 52481 - DNA, 459 bp, Zea mays
  unsure (1)..(459): unsure at all n locations
tcttgatgagagggaagcagatgtctctcgggaggcagctatttttctgaccaagtttgcgtgcacggataattacctgcacgttgaccacactaaagcgatcatcagtgcaggcggagcgaagcacctggttcagctcgtgtatttcagcgagcaggtggttcagatcgcatcactcacccttgcatgctacatcgcacacaatgtcccggacagcgaggagttggcacaggcggaaatcctcacggtgctcgaatgggcttccaagcaagcttacatggtgcaagacccagtaatagacaacttgttgccagaagcaaagatcagattggagctgtatcaatccagaggcgcaaaaggctattattagattacctgctgtgggaagggaatattaaggcgttcttcttggatcggccaagtactgtatatacatccaancgcttctatgtatactct

SEQ ID NO: 52482 - DNA, 362 bp, Zea mays
agcttgtgacgtaactttatcttcttcagggcgtacgcggcggtgccagagtctaccccagttagactctacctattaaccatgcgtcgagttcagctctatccaaatccactaagtctctggtgacccttctagcacaccctttaatgcttgtggatcatatcttcttctagagacggcgactccctcatcatgttagagataggtgtcacccactttgcttattgagatcaaaaagcaaatgtatctcatggattatccaaaaaattttggaatggaatggtctgggaatctggtttttactccatcattgaccaaacctgtatccatcccgaagtgatagtcgtgaggaacctgttttc

SEQ ID NO: 52483 - DNA, 312 bp, Zea mays
cacccgacacctcaaaggagcatttgcgctggatcaaattagcccatacaacgccctatcaaggttgcgcaacggcagagagaatatacacaggcgaatgactactatatcatctatgtagacttccaaaatgtctccaataactcgaggaaaataaaatcatatacccttgaaaaagaggcactgacactttagaatttaaatgtcatgatgacccactcgaataaaccaataaatccagaatatataaaggccattttggatatggccataaaaataagaatgtaaccgacatttccatcaagaaaacta

SEQ ID NO: 52484 - DNA, 376 bp, Zea mays
  unsure (1)..(376): unsure at all n locations
agctntaatgcacaacttctcttcttttgacatcaaacaccaaaaaccatactcaagcaagaacgtaggatgatgtcaagggacagcagggtgtttaaggaggaaaaacgactatcaaaacccccccttacttattgaacatatgcactatcacatatatgcaaaaagattaatacttccttttgtacctttaccatgttgtagtgtacttcccatcttgaaagtatttaatctctcgagagcttctccacacttgtgcctgattctttatcctaatttttttcttggtgctaagacaccaaacttagaacaagttatagtattgggcacaagaagaaacttctattttaatgattatcaaaagatgtcaattgaa

SEQ ID NO: 52485 - DNA, 406 bp, Zea mays
  unsure (1)..(406): unsure at all n locations
ntctcgactaagtcggggacagggcctcatggacgggtgatattactcgtaagcggcaaggccgaccgagccgagggattcccacgcctctgggatacggatacctcactcgtcccttccgtgagaagtaactctcgctcacacaaacatccctgttaccgacagagtccagatgctcgaaacaagaggaaaaaagacgcagcttcgcaagcacggcgagggtgtgttttctggcctcggcggccgcagaaggcacacgctaccagacgatctgatcctgcaggctcgggtcttcacgctgaagggagccgtagcaccctcggcatcgacgacgtcttcagctatgtccgacccagcctcggacggcggcgcggtccagggaccccttcaggaattcggcccgagc

SEQ ID NO: 52486 - DNA, 392 bp, Zea mays
agcttatgaagattctttattctaacatgggctagtcggcggggccagagccaacccatgttagtcttagcaattaagcatgtgtcgagttcagctctatcaaaatctactaagtatagctgaccctctaacacacccttaaatgctactgaatcatcacttcttctaaagacagtgacacctatatcagtgaagagacagttgtaacccattttgcataattgagatacagaaagcaaattgtaatctaatgaatctacaagaaaaacattggaaatagaatggtcaggagatatagcaattttaccaagtcctttgaccaaaccttgatttccatccccgaatgtgatagcttcgtggggatcttggtttttctcatatgaggagaacat

SEQ ID NO: 52487 - DNA, 454 bp, Zea mays
  unsure (1)..(454): unsure at all n locations
tgtaatttcaaacagaggaatacatgatttcatcatgctttgttcaagtgacagaatattatttctatcgtcctaacgcatcatgatatcctgggagctaaaacagagcctaaacagttgaagatccaaaagaaatgaaggaataaaacagtatagaataatttaaaagctagctaatatatgtacacctctgcatcggatcgttaacaaataagtaatgctgacaactacacaaagggcaggcttggtgtagtggtgagagctgtctcaccgagtcaccaggtcgggaaatcgatgcagcctctccacaattgagggggaggcctgcctcggtttatcccttctctacagtctagaccacactcatgtgggatcctccggcaccagctctgctctatttttgacaactacgcgaccggntggagacagtattgtcgggtatagctaattagta

SEQ ID NO: 52488 - DNA, 385 bp, Zea mays
agcttctaaagggagaacatgtgatttgtctaacaaatgtacatttcgaaaaagatagaccttgtgcagcttgtcaggcaggtaaacaggtgggaggagcgcatcacagcaagaatgtgatgaccacgtcaagacccctggagctactgcatatggacctcttcggacccgtcgcctatctaagcatagggggaagtaagtatggtctagttattgttgatgatttttcccgcttcacttgggtgttctttttgcaggataagtctgaaacccaagggaccctcaaacgcttcctcaggagagctcaaaatgagtttgagctcaaagtgaaaaagataagaagcgactacgggtccgagttcaagaaccttcaagtggaggagtt

SEQ ID NO: 52489 - DNA, 450 bp, Zea mays
  unsure (1)..(450): unsure at all n locations
tatcttggcgtgttgccgcattttggtttatggaagtatctgtaccactgccgtcctgggatggcgcgggggcaacatcaattggtcggaggtgccagtttagaaatgcgccgagggcagaagaccgagtatctcgagatacccctcaaagacagcattaaaggttggcgtctggagtggtttataacggataattatggaaattctctcccttcccgctcaggaagacagccagatgttcgtactccaagttggactgagtctcccacggaccaagaagtggccgaggcaggcgtgttgcttactgaagttggattactgaaagagagaggtctgactgccgaagctgtggtcacagattntgttttcaaaaacattcagccgctgaaagacagggcctatccggcatatctttaccgagggcttgccgactcaacccgangtaccaat

SEQ ID NO: 52490 - DNA, 317 bp, Zea mays
agcttcagctccatctatgttattgatcgcctctgagtctgaacaattttcttcagcccttctggcagcttcctgacttccatgaatagcaacgggcccttggtccgaaggtatattcatgcaaggatattctggaagaacaattgcctcaaacgcattgagagtaccacgaccaacgatcgcattgtaagggtattccatgccaacaatatcaaacacaacttgcttactccctgtgttgctgataaatctgaagggtactgggcttgtgaatttgtcaagggctacaatctgctttcttcgaagtcaaaaaggga

SEQ ID NO: 52491 - DNA, 185 bp, Zea mays
attgctaactgtcccgataatgatagtgatcatgaaaagggaaacaagagggaaaagaagaagcattacaagaaggcaaagggcgaggcgcatctatgcaaggagtgggactcggattgctcctcgtccgactccgacaatgaaggactcgccgccaccgccttcaacaaaataaacctttttcc

SEQ ID NO: 52492 - DNA, 392 bp, Zea mays
agcttcggattcctctctgaattcactttgctggtgagagtgctggcgcccttctagctgctggcttcgggaataagtaggttggagtggtggtggtggtgggagctgaggccaagaagcttgtgaatggcttgccaaagcaacagaagctgcaggatgattgcccacatattctggtatgtagggagagtgatacgaagcagtatgtaagacttgctttggctgattctaccgagcttctgcttcggcaatctccttttgcttcaaaatagtgatctggcaggttcttgtagtgtggcctttgtcctcaccatagaataagcaataaatttttctgggctgatccccatatcttcctccgaagcccctgccgcctctgccccttggagctg

SEQ ID NO: 52493 - DNA, 418 bp, Zea mays
  unsure (1)..(418): unsure at all n locations
gattcttcatcccaacatgggcaagtcgacgatgtcatagccaacccatattagtcttagcaattaagcaagtgtcaagttcagcttggttatcagtaaaaccaactaaatatagctgaccctctaacactcccttaaatgctattgaatcattacttcttctaaagacagtaacacctatatcagtaaaaagacagttgtatcccattttgcataattgagaaacagaaagcaaattctaatctaaagaatctataagaaaaaaattggaaatagaatagtcaggggatatatgcaatttacccaaacctttgaccaatccttgatttccatccccgaatgtgatagctcgttggggatcttcatttntctcataaaagaagaacattcttttcttcccagtcatgtggtttatgca

SEQ ID NO: 52494 - DNA, 404 bp, Zea mays
ctataagacgaccgcagcatgcaagctttcaagcgtgctttttttaaacaacatatcacatatcttggacatgttatcaataagcatggtgtggctactgatccaacaaaaatagaagcgatttattcttgaccagaacctgtgaattgcaggagcttagaggattcctatgcttggcagggtattacatgaaatttgttaagaactttggggtctgaaagggaattaggcttacaccttcttcctaattgaatttggtggttgaattgcccaacacaaataattggactaactagtttgctctagtccataaattctacaggtgccaaaaggttcacacataagtcaataaaaagaccaatacaggggccaaacaaagagagcaaagacatcccaaaggcacc

SEQ ID NO: 52495 - DNA, 405 bp, Zea mays
  unsure (1)..(405): unsure at all n locations
ntatctgccttacaactcaatgtatctcctgatgttctgcttgaagcaatgagtgcaaaatctgcagcagaactatggaagaaattcgaggagctatatatgaccaagattcttgctaataagctccgtcttaaagaacgtctttatactattcgtatggcggaaggtacatttattcaatcacatcttaatgaatttaattctatttgtgtcgaccttgagagtctggatgtgaagatagatgatgaagataagacaattttgttggtagtctcgttgccccctcttttaagcattttaaggaaattatgctttatgaaaacatcatacttcactaacatttgagaatgttaagtccaagttattatccaagaaaaattcgatgttgattcttgttttgagtct

SEQ ID NO: 52496 - DNA, 446 bp, Zea mays
  unsure (1)..(446): unsure at all n locations
tgtacttgactccagtacttatcatcatagtacccacgtgctntgaaatccttggcaacaatatcattgaacacttcattgtaatctttagatgaaagacgattaccatcgttgttcccttgcctttttttaaattcctcataagatgcagcctattgaaacaagtatataggaaggttaaggaactataagctgatttttagatcaagcataaatcatttataccagaaaatgtacgtaccatcagtgtctctgcttttttatgttgtgtatctaccattcttctttttatgagctgcctcccatagttctatcctatgaacctttcgttttgttctggtttcctgcataattgagttatttggctggcatttcaatcctcagatagatgatagtgaaatttaacaaatatggatgaatanttatcaccatctctnttttaatct

SEQ ID NO: 52497 - DNA, 451 bp, Zea mays
ctatgaacactcagcttgcaacaccatttggcatcttacataacatgtctgatatctagattatttagttcattcttcaacatgcaaaagcgggtcttatcaagaggcttagcgaaaatatccgctaattgatctttcgacctcactccttctaaaatgatatctcctttagcaacatgatctctaaggaagtgatgaccgatatcaatgtgcttggtgcaagagtgttgtacaggattattagcaattgtaacagcactcccattatcacacaacataggtaccttttctagaactacgccatagtctagaagagtttgtttcatatacaaaatttgtgtgcaacacgcacctgcggcaatgtattccgcttcggcagttgacaaggcaacactattttgctttttggatgtccatgaaactagtgatctaccaagcagatggcatcccc

SEQ ID NO: 52498 - DNA, 451 bp, Zea mays
  unsure (1)..(451): unsure at all n locations
ggacgacgaagaatgtcgtcagtctcccgctgacgccgtgtcccctcatgtacatcagcagaaatgttgcggcacatggagaaaaatgccgcaaacccatggaccaagcgagcacccatcccgcggccacgacctcgaccacgaccacgagcacgtggcatgggagatccgcggccaggagagggacgcgaggcancatcggggggagaggaggatggatgatggggaggctggcgaggtggctcaatggaggaggcagggcctccagaccgtgagggagcccgcttcgtatgagcagctgggttggaggaatcaacccagtatggtacgtagcgggagtgtttgacgggtttttcgaagngggtctgggtgaccacttcgatcattcttatgataaagggtgcatgaagacaccctctgtgaggagaccaggaagcacggacgatctctt

SEQ ID NO: 52499 - DNA, 266 bp, Zea mays
tatcttggacaagtgccgcacttaccgctgagtgcgaagctgccacatataacaacagaggagcccctagcgttggtggagttaacgtcgttaggtctatcaaatattgcttcagctctttgaaggctctctgcagaactggttcccattgaaaaacttcggctgacttcagcacttcgaagaatggtaaatttctctctgctgatctagatatgaatctgttgagagatgccaatcttccggtcaatcgttgagcccccttcttt

SEQ ID NO: 52500 - DNA, 417 bp, Zea mays
tggatgtgcatcgactacaccagcctgaataaggcatgtcccaatggcccgtatccacttccgcgtatagatcagatcgtggactctacctcggggtgcgaccttttgtccttcttggacgcctactctagtttccatcaaatctggatgtctaaggaggataggaggcataccgcttttgtgacaatggatgggctatactgttatgttgtaatgccctacggtctgagaaatgccttgccaacatttgttcgggcgatgagtaagactttcggggacctgattcgggacaaggtggagatctacgtcgatgacatcatggtcaagactagggaggggtcgactatagtggaagacctgaccctagttttcgcaagctacgggcaacccgcaccaagctaaacccggagaaatgca

SEQ ID NO: 52501 - DNA, 451 bp, Zea mays
  unsure (1)..(451): unsure at all n locations
tgtgatttatccaatatataacaagcaccatttcttattatagattntctatggataaactgaacacaagagatgacattagtagcacaagcactagtttcttatttagcaaccctttatatgtggaaggcaagcgagttgctaaaatagacaaacctcataatatggactaaatttcccttgagcccttatgcacaatatattataaatgacatggataatatgcatggttgttcaatgaagtctaaagggctgacttaatccatattatggtgagtgtgtaataaagaagaatcaaatccaaattaactagaaagagtacatcacatnagtttggattgttaaccatatgataagattcatttntcttccaattggactnttacttcataatcaacaattgatgtataccctcaagtgctccctctttcttaatggctgcacaagtcac

SEQ ID NO: 52502 - DNA, 461 bp, Zea mays
  unsure (1)..(461): unsure at all n locations
tagcaactacgagttcaagatcagcgaagtcctattcttgggtcatattataaaccaagatggattagctgtggatccaaagaaggtaacagtgattctggactggaaagcaccaaaggatgtccgaggaatcaagagtttcattggaatggctggttactatcggagtttcattgaggatttctccaagattgccaggccattgacagccttgctagcaaagaaggttgagttcaagtggaccttatcgtgtcaagaatcatttgagacattgaagacgttgaccacagcgccggtactgattctgccagatattcacaagccattctcagtatattgtaatgcttcgtacaccgaactangatgtgtgttaatgcangaagggaaagtagtggcatacttgtcccgacagctgaagactcatgagaagaaataccccactcatgatctagaagtagcag

SEQ ID NO: 52503 - DNA, 437 bp, Zea mays
  unsure (1)..(437): unsure at all n locations
tcggatgtggatggatcatcaagctcgntgatcttcctctagccttcgatcatgcactcaaaacttacaaaattcccgataacttcctcgggggtcattttagtatatctaggattaccacgaattaattgaacttgagtggggttaaggaaaatgagagatctttgaataaccttaaccatttcgtggtcgtcccacttcgtgctcccgaggttgcgcacttggttcaccaaagtcttgagccggttgtacatgtgttgtggctcctcccctttgcgaagtcggaaccgaccgagctccccctcgatcgtttcccgcttggtgattttggtgagctcatctccttcgtgcgcggttntgagcacataccanacttccttggcgctcttaacccttgaactttttatactcctctctacttaaagaggcgaggagta

SEQ ID NO: 52504 - DNA, 415 bp, Zea mays
tcgtcacaatagcatatggaaacggaggtgatcatcgttgggttgaggcgttcacgattatgtgtccaagatattttaggcagaagtcaatattgccctcacatcgttttgtgaatcatatgcataagtcttatgggcatatttgtaattgcatacgaagttgtacgattccctataaatagatgaacagtgccctgcataaagtatcttttatcgggctggatcattgcattgtgtaatctctctcccaaagcatcttcgttctaattcactttgtatgactgacggtacgattgtaaaattatcatacgaaaggaaaggaatgaaatattgaaatatccaagatgagtcatcatgttcaacttctttacattccttatacattcggttatatatggatatacgattcatttaa

SEQ ID NO: 52505 - DNA, 276 bp, Zea mays
  unsure (1)..(276): unsure at all n locations
tcagctccaattgtccatgtcagtgcttgttgacgctttttctgagcgtcaaatactcaagaagaaccggcggcggtgctctctggtcaggcgcggacggtccgcggcacagggccggacggtccgcgacctggcgcgaggcggcggtgctctctggtcaggcgcggacngtnctctgtctgtggccagacggtccgtgacctgatgcangagcctgggtcctctgcctgacggccggacggtccgcgcgtgcacaggggcggcggaagatcgccg

SEQ ID NO: 52506 - DNA, 380 bp, Zea mays
  unsure (1)..(380): unsure at all n locations
ggtgaaggttcttcatccncacatgttcattctgcgatgccacaaccagcccatgctagtcttagcaattaagcatgcatctagaccggcctcctcttttgcaaaatcaactaaataaagtttgctgtctagtacacccttaaaagctaatgaaccatcacttcttctaaagacagacacatctacatttgtgaataaacagttatatcccatattacaaagttgactcacagacaacaagttatatccaagcgactcaactaagaacacattagaaatagagtgctcggatgaaatagcaatttttcctaatcctttcaccttgccttggttcccatcaccgaatatgattgaatcttggggatccttgttcttgacgt

SEQ ID NO: 52507 - DNA, 383 bp, Zea mays
taactcgggtcaaacctgacaagtcttatgttttaagtttttagcacttaaattcttacttttcatgcaattattggttcttgaaatatgcatgaggtactgcacttaaggggagtattcaaaactcaaatccctcttgataacccctagtgcaaaccaaaatgcaaatttcaccatttgcctattttctctaaaaattatctagcctatggcaaaatattttgaaaagtatatgagggtgccaatacctgtcccaacaagtgttattttgtgtgattataagttgggatttggtttggttaggagttagatagaaaaattcacaattttccaaactcccctctgtctgggctcaccggacagtccggtgtgcaccggacact

SEQ ID NO: 52508 - DNA, 452 bp, Zea mays
  unsure (1)..(452): unsure at all n locations
tgagcaaggctcacggtctcaccaggaagctatctgggtgctngtatcgtacggagggggactggagaggggttggccacggcggtggctctatgtcggcactggcgggctgcggngaggtcgccggaggcaacggctggctcgggcgagtccggcgaggtacggaggaagcaatggggaaggcaaccgagcgctggggcgggttttataggcgcggacgcggccggggcgccgactcaaccgtttggcgcgacgcgggcacgcggggcgcgcgcgcgggcgtgctctggcgagctcagagcgcgtcgaacacgtggcgcgttgcttctgcccgtgttcttcgctctgctgagcggccaggcgtacgaatctcgccctaccgcctgtgggagatctcttccctgcacctagagctacctagntcatgtgagttccaagagtagatgtggtct

SEQ ID NO: 52509 - DNA, 427 bp, Zea mays
  unsure (1)..(427): unsure at all n locations
ngagggtgactcaccgaagcaacagatactgcacggtggttgcctatatattctgggatgtaaggcgaatgataccaagcagtgtgcatgatttgcttcggctgagcctgttgtgctgcagcttcggctatctccttttgcttctggatggtaacatggcacatcctggtggtatggcccttgttttcaccatagaacaagcaaaatattctccttggttgatctccaaaccttccgccgaagcccctggcgcctctgcctcttggagctggcggccggaaggagctttgttgttgccccgaagcctgtgaggagcactgtggcctttgctgctgacttcccttatcatcattttgagtagaagtgtgaattgacctaacatgcctcgggataaatcttcctccgaagcccctggtcatttcagaaa

SEQ ID NO: 52510 - DNA, 362 bp, Zea mays
ggtgaaaccaatcacaagtttattgaagaatgatactaattttaattggtcttcaagatgtaataaagcctttgagtagctgaaagtattattgaccactgctccggtattagctcaaccagacattgaaaagccctttgatgtgtattgtgacacatcatgcaatggtctaggctgtgttctaatgcaagaaggctgagtgatagcttatgcttcaaggcagttgcaccggcatgaggaacattatccaactcatgacctagagttagctgttgtggttcatgccctaaaaatatggcgtcattatctgctggggaatatctgtcatatttatacagatcataaacgcttgaagtatatct

SEQ ID NO: 52511 - DNA, 362 bp, Zea mays
  unsure (1)..(362): unsure at all n locations
ntgtccattntatgaaattagagtgtgggtttttgacttattgtttaaataaagataaccttttcgtccaactagaatagtttcgtattttatatgtactttatttaaatatatttctgctagaacgatgttgtgttgctctttgacgacagactaaatcgagatctaatgtgtgggcggaggaggcaaagaaatagtgggaggccggggacgctacgcgttggcctatggacatgagactgcctgacgctgaagcgtctgttgcgccgtatgtcggggacatcgaccgatacattaggtttttcgtcatttagctgctgctagctaggtaagtggacaatggttacactanggtgttgtgt

SEQ ID NO: 52512 - DNA, 460 bp, Zea mays
gcgatactatagacaactcaagcttgttcacctggctaggcgacgatgtgctaagaaaacctttctacttacgtttctgcgtagctctggataactataacccccaccaggataagcacgaggaaatagcttttgttgaagagatcgccagaacatcgccaattaagtacttgcaccggtacttattgcagaagggggttgtgcctcatgactacgaggacttcaagagaatgctgacatccctatggtttgatttgtatggaagaggtggcaactctagctgctctactgcctttgagcatgtgtttgttggtgagatcaaaggacggtgacaaggggagagtgaggtattaggcttccataactggatacagggcaagtctcgtgttggtaatgaaatctaatttcctcatttggacatatctaacaggtattctgtgacttatttgcagttttacct

SEQ ID NO: 52513 - DNA, 428 bp, Zea mays
  unsure (1)..(428): unsure at all n locations
ttagcaacttaccacgactcaagaacgtctgttatgattgtgggtggagggacagagtggtgggtcgacggagggggtgttcgcggcggcgcggagaactgatttgggggaaaacccgaatttgggcgctactgtggatgatgggaggcgagaagtggtgtgctgggcgcgtaacaagtaggcggaataggggtgcctccaatttatagactccggctgagcttatcacgaattttggattgggatcgaggttaccgcggctaggatatttttacggtggcttgctcaccgtggcgcgtgagagggaaatggttcanggatgataactggttgcttgccacgatctttatgacccgaaggatagatcgctgagtgtcctgtcgngaaacagtgagctcggtgatgccacatgactactactggggaca

SEQ ID NO: 52514 - DNA, 455 bp, Zea mays
ttgtgaagaagtagaaggttgcatacaagaagaggtagtttgcttatgaaccagaagtcaagtacgacctccaccaccacaggtaatcttcgctgcagagctggaagtaacataggacaatcgagatctcagcacatgtcacgatgagaatcaggaacacaaggaagaggaacccaaagatgtagtagaactggtgcagccagatggaagtaaggataaagaagagttcgatgaagacagcaccaaatggaaggatccctccgattagaatcgagaagattgggttcatgtaccaagcctgctcaaggatctgccttggaatttggttggcttcactggatcttcaatggtaggtttcttgaagccaagggaagctccaacacaaaccaaaggtactgaaataccgaaccaaaggaggacaagagcaaacatggtggtgaatggaacagcacctg

SEQ ID NO: 52515 - DNA, 270 bp, Zea mays
  unsure (1)..(270): unsure at all n locations
cgagaacaagaaactnagcaggaaccaccaaagaatcgcaaaggaagctttgatatgccccagacgcaaacagcccatgggctggtgaaaggattaccgaccaccgcaccgggagaagaacaaccagacatcgaaatgcccgtggaagtgatgagcgacccaaaccgacatccaattgcggagcgagaggacgcaagaaaaaagtgtgaggcctgagacgctacgcacgagcgcaccagcacaaaaaacgcgagaccacgcagaaccaca

SEQ ID NO: 52516 - DNA, 390 bp, Zea mays
  unsure (1)..(390): unsure at all n locations
tcgcaagagagggttgggccttgaagtgagttcgttgatttagtcccctctctccgcgtccgcgtccgcctccgttggggaggccttgggcatccccttttatagatacaaggggatggtccagttgtacatatgggggtgtagctatgtgctaacgtggtcggcggagaagtgctcgagccctatagaagcgtanctggcggtgtggccctgggtcctactgatgtttctttgccttcgtagagagctgagaacaatcgacgtcatggacgcatgcagggaaccatcattacctgttgccggagtaatctagatgtgacaccagtcttgttcctttgtagcctgaggtggctagctaggggtaaggtaatgatgtattccctgtagcgt

SEQ ID NO: 52517 - DNA, 362 bp, Zea mays
tgatgtagattggatggccacgattgtcaccacttcctcttcctcggagctagaactctcttcatcggaggtccattcttcacgcaatatgggctagaccatcttcttcttattgaagggtgcattggtcgtgcccccctattgaacttgaacgtttgtatagcttcttagcttcttgatccattttgctaggacaatccgctatgatatgaccagtttggccacattcataacaagcccttctctgacctttccttcggaacttgtgattattccttacataattattgcaagagttgataaacatatccgagtcttcatgactagagctaacttaatcacttgacgtttccatcactttc

SEQ ID NO: 52518 - DNA, 437 bp, Zea mays
  unsure (1)..(437): unsure at all n locations
tagctntactgatcgagtctgccgactaaccgtttaaaatagtaaaacctatccttcgcactacaattcaatcacggccatacaacgcatatatgttctactttttaatcacatgacgcatgagttgcacttcaatcgttgcttgactatacatcgcatattcgtctaccaccatattcttcgcctaaccagtacattgcatttcgcataaatagaacatatctagacatctatctcctccatgaattttaattcgcatacaacatattcacatacatatatatacgcgacaatgacaaatgtgcaagtaagtcaatcacatggattcaacctgaacgagtcgagacttagccgacggactgtccataaggctcggtgtttcgtcgaatgggcagggcgcgaagcgcgacgtcgaccgttagctgtgaaaacacaca

SEQ ID NO: 52519 - DNA, 426 bp, Zea mays
  unsure (1)..(426): unsure at all n locations
taagcagtccaagtgttgtnttggtcaagatacgttggaatttctgtgacatgttattagtgctgggggtatttccactgaccctgcgaaagtaacagtgatcaagaactggcctcccccagattgtgtgaaagcattgcgtagtttcctgggtatggcaggctattaccggagatttgtagcaggatttggtcttaccagtaaacccttaaccaatctgttaaagaagaatcaactgtttatttggactattgatgctcagaaggcgtttgaagctttgaaaacagcgctggtgcaggctccggtgttggctatccctgatttttctaaggtttttgtcatcgagactgatgctatcacggtgggcattggtgctgtattacatcaagagggtcatttcattgcgtacataagcaaacactttga

SEQ ID NO: 52520 - DNA, 394 bp, Zea mays
  unsure (1)..(394): unsure at all n locations
tagcccgagatacatnggaccgttcactatcttggccttgttgggcaatttggcttatcgcctgcaattgccggattccatggctggggtacacccagtatttcatgtctctatgttgaggaagttcttgcgggacctagatcatcagatcgaaatggaaccaattgctgtgcaacaggatctgactctggagtgtcgtccggtgcgtatcttggaatcctcggagcgtgttttgaggaagagatcaattaagtatgtcaaggtcttatggactaatcagtatgagcacgaggctacgtgggaacttgaggagctgatgcggcagaaaaatcccgaactttntgttgtgggtaagtgttggtgattcattatatttttcttttgtcgtgctgat

SEQ ID NO: 52521 - DNA, 454 bp, Zea mays
  unsure (1)..(454): unsure at all n locations
ggtgatntatccaatttaaaacaagcaccatctcttaacatagattttctatggataaactcaacacaagagatgacattagtagcacaagcactagtttcttatttagcaaccctttatatgtggaaggcaagcgagttgctaaaatagagaaacctcataatatggactaaatttcccttgagccctcatgcacaatatattttgaatgacatggataatatgcgtggttgttcaatgaagtctaaagggctcacttaatccatattatgttgagtgtctaataaagaagaatcaaatccaaattaactagatagagaatacgtcacatagttttggttgttcactatatgaaaatattcattcatcttccaattagacctttatttcataatcaacaactgatgtatatcctcaagtgcttctttntccttagtgtctacacaagtcacaa

SEQ ID NO: 52522 - DNA, 391 bp, Zea mays
  unsure (1)..(391): unsure at all n locations
ctcaagcttggacgcgtctatngggtgtcgacttggtgtagactcctccttcttttcttccgtcgccttgaatgcaacgggntgagcttcggatgtgtcgccaagctcgttgattttcctcgagccttctatcatgcactnaaaaattacaaaatgcccgataacttcctcgggggtcattttagtatatctaggattaccacgaatcaattgaacttgagtgggatttagaaaaatgagagatcttaaaataacatttaccacttcgtggtcatcccacttcttgctcccgagggtgcgcacttggttcaccaaagtattgaacccggtgtacatatgttgtggctccgtccctttatgaagccggaaccgaccgagctccccctcgatc

SEQ ID NO: 52523 - DNA, 417 bp, Zea mays
  unsure (1)..(417): unsure at all n locations
cgaacagatttatgttgttgtacaatatggctcattcttttctcatccttgagtttggtttcttaatttaccatatttattttccttgtccagcttgcaaagaagggagaacaattcattgatgtcccttatgttgtgaagagtatggatgtgtcatttagtggtatattgagctttattgaagctgcggcgattgaaaagcttaaaaataatgagtgcacacctgcggacctatgctactcattgcaggtacttgcatgctcttaaacttttcccccttgtggataataattggttatgctttcttgacagtgacactgatgaaagtcctaatttctcangaaactatctttgccatgcttgtcgaaattactgaaagtgccatggcacactgtgattcaaggacgtcttattgtg

SEQ ID NO: 52524 - DNA, 431 bp, Zea mays
  unsure (1)..(431): unsure at all n locations
tgccttcgccttagtatatcacccgcagtccaacggagttgtggtacgagccaatggaaaaattttcacaactgtcaaaaagatgctcctcgacgaaaaaaagggcaagtgggccgattttctacctgaggcggtctgggcgctaaacacgacagagtgcagggcgaccgggtttacccctttctgccttctatatggatcggaggccatgaccccacaagaaataaaacatgggtcccagcgaacagttccgtcagccgtccctgacgtggacgagcccacttcgaaggatctcatcgatggagaccgagtcttcgctctataggctctaaacaaataccaagcccagacaaaagcatggcgcgaccacgcagtcatcccgagagaanttagcgaagggggcctcgtactcgttcgacagcacggacaga

SEQ ID NO: 52525 - DNA, 440 bp, Zea mays
  unsure (1)..(440): unsure at all n locations
ntgctcatgaaagcatgcgacgcactataatctatanataatgacggcgggatgaatggccacagaaaacgtacccaccatcataggctctccttcatgtgtggtagccacttgagtatagtagacccgtccagttttcctttcacctttgcctgcctgagtgcttgccacatttcccttgccttgagatgtgcttccagaagccttttggaagtttgatttcttttgcttcggatagggacaatccttgatgaaatgcccagacttcccacggttgaagcagctattatatgaactgggtagggctaggaaacgagtaccacgggcactcggctgaatattttgagtanggatagctgttggacggatgaagactggttacttgaaaggatagacgggtggacgacgaatagagcgatttgggttaaagggatgaatca

SEQ ID NO: 52526 - DNA, 414 bp, Zea mays
tgtgatgggacatgcgctgggtggcgcttatgaatattctaatgcaaaagccgtgttgcgttggccacagatgggttcaatccctatggaatgagtgctgccccgtacacatgttggcccgtgtttgttatcccaatcaatctcccccctagtgtgtgctttcaaaggcagaatatattcgtgtcgttgataattcccggacactcggggaataaaatgggcgtgtacatggagcctttgattgatgaattgttacgtgcctgggaggaaggggtatggacgtatgaccaagctatgaagacaaacttcagaatgcatgtttggtaccagtactccatgcatgacttaccggcgtatgggctattctgcgcctggtgtgttcacggtaagttctcatgcccaatttgcaaggga

SEQ ID NO: 52527 - DNA, 428 bp, Zea mays
  unsure (1)..(428): unsure at all n locations
tgagacattattacttaatggtcatgtgtcgtccgattgtacacttgaggncatcatatagatgcaccaaagaaccatataaagccttaaatgtccatacaatctttgnaatggaccacactcatttctttgaaacaattcaaagaacttaaccaattcagatcagattttaagataagagggacttaaaatctcatttccgatgatactcatcaagtatccatcttatgggaaaaacatgacaaatagaattgttcataacttttcatttcatcccaacaatgggatgaccaattcaatcttacccaacatggtaagtatcatcacttgaaaagttataacatatgcaacaccttgtatgggaggatgtatgtagaatacacgccataagaactgtttctgagaacatatgcaaatgcatactatac

SEQ ID NO: 52528 - DNA, 367 bp, Zea mays
  unsure (1)..(367): unsure at all n locations
ntctaatagatgtgctctttcgacataaccccatgtcatgttcgaattttctgatccgactctgaagtttacatccttttgatctcaaaatttctggacatcttaactctcttgtgaaggtgtatgtaaaacttcagcttaatcgaagtccgtttggatcgattttgtattctaaaactaaaattccagatgctaaaatagtctacgttatcaagactgctttgggttgtttgggacatttcgatgtatgttttgcgacatagttgggttcattctttttgcaggttctcccgataacttttctacatctcttatgtngtgattgaattatggatgttatggtataaaatggagaagacagctagag

SEQ ID NO: 52529 - DNA, 375 bp, Zea mays
  unsure (1)..(375): unsure at all n locations
ntatcaaatggacatgaagagngcctttctcaatggaccaatcaaagaagaggtctatgttgagcaacctcccggctttgaagatagtgagtaccctaaccatgtttataaactctctaaggcgctttatgggcttaagcaagccccaagagcatggtatgaatgccttagagatttccttatagataatggcttcaaagtcggaaaggccgatcctactctattcactaaaactcttgacaaatatttgtttgtgtgctaaatttacgttgatgatattatattgaggtctactaacgaatctacatgtgaggaatntagtaggatcatgacacagaaattcgagatgtccatgattggggagttgaagtactt

SEQ ID NO: 52530 - DNA, 457 bp, Zea mays
  unsure (1)..(457): unsure at all n locations
ggaaacggtgtattntgcatagcggcaagatagagcgacccgttttgacaaattcctcgttccgtcgcaggggcgcacctccaaaaggaaggatggagacggcgtcgcgagaaaaacgatgaccggagcaattccagctcttatctaaacgactttctaaatcaataatttagatagttgatacaaagatttatctccaacagttctctaaataaactttctaaatttagcaacttcttatttgacttcattttctctctatatttggcaactatttagcaactcgctaaacaaaaaaattgactgcattatgtagataataaatgtaattgatgatatttataacttattttttaaatatggatagatacaaaataaaactacaacctatatntagagaactnatggagaactcatattttttattctcagagctatntagccacttcttaaatct

SEQ ID NO: 52531 - DNA, 338 bp, Zea mays
tgttgtttcatgtggttgggattcagcagcaaaatcaatggcaggtgcaacagcagtgcacccagacaaagaattatccacagactccgaatgattcagacaaggcctctctgtaatgttgacctccacgacctgtatcaactgtccttcctgaattggggcgtgtttgcttcggaatctgcttctcgagtagactctcaggggggccacagcattagatgaaccacctggtaggggcgaattcgcaccagcctgttccagcgacccagcaacagcaacagtcctgtgtcgctggggcgaaacggggaggacagaattcagcgattccacaacagcag

SEQ ID NO: 52532 - DNA, 434 bp, Zea mays
  unsure (1)..(434): unsure at all n locations
tctanagggagagcacattntatgattaacaaatgttctttttgagaaagacaggatttgtagcgcatgccaagcagggaagcaagttggtgctcatcatccacacaagaacatcatgacgactgacaggccactggagctcctacacatggacctattcggcccgatagcttatataagcatcggcgggagtaagtactatctagttattgtggatgattattctcgcttcatttgggtattctttttgcaagaaaaatctcatacccaagaaaccttaaagtgattcttgagacgagctcaaaatgagttcggcttaaggatcaagaaaattagaagcgacaacgggacggagttcaagaactctcaaattgaaggctttcttgaggaggatggcatcaagcatgagttctcttctccctacacgccacaac

SEQ ID NO: 52533 - DNA, 450 bp, Zea mays
tcggccttcggaggccgaaggttgaaatgaatgaagctttcgattattgccagagggccttcggcgttatctgttcttttattggaacgagagatttagtacaagagcatattgccttccgggtatggccgctcgcggagaaatgagaaatgccgcaagaaaccataaaagaggccgacgaaggtggacttgtcagactgaagtacaccttcaagttcggagataaatttgttgagccagatgatgactggttaaaaagcattgaaaatttaagtgatgagctgcttggggcttattcgaaggccgaagatactgcgatgtcagcagccttcggaggccgaaaaaagaagaggctgaatcgggtatttgatgcaattgggtttgtctaccctgactattgctatcccattcgaaggcagaagagaaaaaacacaacctctgcaaaagaag

SEQ ID NO: 52534 - DNA, 405 bp, Zea mays
tctcagttcagcaaagagatagagattcgtcacaacactctttgccaaacgcacacgagcacatcgcctgtacgacagcctccgcttcggtctcaatggtcacatgccccacgtcagcgtcgaccaacacatgagcttcatatcttcttctttcatcgccaaaactggctcaacgacatctcttgcattgcagatcctttctccgacagcaaggccttctcctggctcaggttcaaaaggctccgcatcttctccatgacttcagacttgaaaaataagcgtgcaccatgttcattaaaacgtttgcatgtaacgcacctggtaggtgtcaaggttcacggttcatgcagagaggatgtctgttgtagctgagcctccgtaaacatgccttgtattcacatctgg

SEQ ID NO: 52535 - DNA, 433 bp, Zea mays
ttgcaggagagagagatgatatgaagccttgtggtgcttgagaaagttaattcaatttaactcaagctatcaatcttcaatgatccatatatccaagattgacccaaagttatttcaaattgttatatctaaaactcatatcatctcgaggaagatattgatgttgtaggaaataaagaattatcttgtgcggaaaagtcaaggcctacaacatggaggaaagccgaaggatggtaacacttgtgtttttaagtgcaagtatcttaaattatgatttctcatgtgtcttgtatagtcgcatagaaaaagaagcacttcaaatatctctaaatttatattaccattctctgaagaatatcctctcatatggtagattgcgtactcattaattccatactatggcaatctacatgttttaaattggtgaaagtat

SEQ ID NO: 52536 - DNA, 476 bp, Zea mays
  unsure (1)..(476): unsure at all n locations
ctattcggaccttgaaactcagcttatgtcattgtcttacagtaaggacccctatcaccactctatgtcaagaaatggaaaagttaaatatggggatgatacaacatggaactttgacataattaaagcgtgagtcagttcttctacagagaattattgatgcccaaagaactgacaaggtatgaaagcatattcttagaaaatagaagccgacaaagaaaattgcttcaagaaagatgaccaaggaataatatggtttaatgatcgcatagttgtgcctaaagatgctgaagtccgccaacaaattttgaatgaagctcatcttagtcgctattccattcatcctggaagtactaagatgtatcaagacttanagcaacattattggtggacaaaaaatgaagattgagaatgcacgctacgtggcaacatgtgacacctgtagacgtgtcaaagccatacatatgaagaacgct

SEQ ID NO: 52537 - DNA, 475 bp, Zea mays
tattacggacactatgaaactaagcttacactgatgatgtctcctggcacaaggatatccgattcctcctcggtccaccggccatttctgagaacctttatcacggcaaaaccgaaatcagtatagcctccaggcaaacaacacaacttcgcaaccacacagcaaaacaggatcctgtcagtaccttggccttgggggcgaggcgtgccatgagagcggcagcggcattgccagcattgttctcctcaatgaagctgattgtggagttgataatgagcagagtgatgatccccacgaagtcctgccaatcgggcggcttgttctgaagacaaaaatcagcaaaaacacatatgaaaacctctgacgccagtctccagaacgcccgctctgagggctgaaggccatgtccacacggtgtgaataataagatgcggcagaacttacttcctcattcgcgagcgcgatggccatgatg

SEQ ID NO: 52538 - DNA, 428 bp, Zea mays
  unsure (1)..(428): unsure at all n locations
tgccaacagtcaaggcgaggtctacagcaactctnggttcatctgacagctacgtcgcttctacccttaagatgctttcaagtcattcgtacacctcgttcacacacaaagtctaaccatcaaggaagggtcagccttgcctcggcaaagcccgaccctccctcgggggctagaaggggggaaccccctctgcgtcaaaattttcctcacaaaaagtcttccatcaaaaaggctttcgcgtctcccggctatgtcagtaacaggaccccaagaaacgaataagggtgcgtgtaagtggcaaggccgaccgagccgagggactcctatgcctctgggatacggatacctcactcgtcgactaccacgacatatgactcttacttgggcaagctaccttgctactgacgaaccggtccggattcacataa

SEQ ID NO: 52539 - DNA, 441 bp, Zea mays
tgacaatgagaagatgtcgctcatcatcaatatcttctttcatattctcaaacaaaggaaggggaaggactacaagccccgttccaaaagggtgtgctacaagtgtagtaagcccagtcattttattgctaaatgtccattatctagtgatagtgacaggggcgacgacaagaagggaaagaggaaggagaagaagagatactacaagaagaagggcggtgatgcccacgtgtgtcgggaatgggactccgatgagagctccaccgactcttcctctgacgaggacgccgccaacatcgccgtcaacaagggtcttctcttcctcaaagtcggccacaaatgggtttaggggttcttaatgggctggatcgggctggaatgggcttggcccaaaacacgttatcgggctgcgctaatttattttctggaataaaaatgctc

SEQ ID NO: 52540 - DNA, 374 bp, Zea mays
  unsure (1)..(374): unsure at all n locations
tctaaagggagaacacattntgngactaacaaatgtcctatttgagaaagacaggattcgtagcgcatgtcaggcagggaagcaagttggtgttcatcatccacacaagaacatcatgacgactgacaggccactcgagctcctacacatggacctattcgacccgatagcttacataagcatcggcgggagtaagtactgtctagttattgtggatgactattctcgcttcacttgggtgttctttttgtaggaaaaatctcatacccaagagaccttatatggattcttgagacgggctcaaaatgagttcggcttagggatcaagaagattataagcgacaacgggacggagttcaagaactcttatatcg

SEQ ID NO: 52541 - DNA, 441 bp, Zea mays
  unsure (1)..(441): unsure at all n locations
tcgcacctctgaactaactcggctgtatctgntcttcgttgtcggccaatagaatcttgacctgaaaaccttcccgactagtgttctggatgctgcatgtattccacattgccctgcatggacctcctccagaagttgcttcccagaggacgggagaacgcacttcatgaggatgcctgatgcgccccttctgtacaatatctccccaatgagtgtatagtgagccgactgcctgacaatgcgctctgccgagttcttgtcgtctggttcttcttcattctttatatacttaataatcagccttctctagtcatcagagtctgactcgggttgatctatgatgttgcactcttctgtttgatccattgagatactcggctgcagaanttcttgcacgaagactccgggtgggacctgagttcgactggatccgagcttgga

SEQ ID NO: 52542 - DNA, 448 bp, Zea mays
  unsure (1)..(448): unsure at all n locations
ntggccgctgggcagttacagcctcccgccgagatctgttctgactactgccgcttgaccaccatggccgggctccgaacggtagctggcccggcaactgctagtctgcatggatgtgcttcaagctccaagctcccagataaatactggcagaccgactccacccatagccctcatgtcagccccctcctttccatcttcctgtccgcaccactgattcatgggacgcgtctctcaggtccgtctctccgatgccattgcaacagaaacgcagactacctcaccggggatctcgttcctcgtgcccatgctcggtcttcgctgctggggtataaatcgggcgtcttggtcttctcgtnctccccgcagaccccacgcccttccaccttgccgcatccncagcgctgccatggctgcgcctctagaccgccgtcgccgtctgatgcct

SEQ ID NO: 52543 - DNA, 429 bp, Zea mays
  unsure (1)..(429): unsure at all n locations
tagaaaacttaagaaaccaagcaagcgttggtgtgcattatctatttatngagcaagcaagagcagatggcaaaaaaacgtgccaaatgagcacgtggtgtgcttatatgcctagtgcgttgcaagttggagggtcacgcttgtcattgactattgctattctagcaaagggaaggtgttttttcggaccttcggcttagggccttcgtccatatcgcaatatgaatttatcgttctagcaaattaatattgcgaggggctactgttgggggccttcggcttctgaaggtcctcaaaaacatgatttaacaatgtttctggagtataatacatgaacaggtacattcggactcggattagaaccatggtgtgaagaagcacaaggaatacgaagattggcgcanagccaaagctatgtgctggaaagct

SEQ ID NO: 52544 - DNA, 462 bp, Zea mays
  unsure (1)..(462): unsure at all n locations
ctatagacaactcacgcttggctntatgcacagtcggttcttcatattattccatttttattttattattgtaatgataatggtggtttgctacataggctggatatatgtcaagatgcctcccaaatggttcaatttatgtgtgcaacctacctcctagaactgatgaaactacattggctgaatattttggcaccatagggttgctaaaggtatgggtcttatcaggtgcatttttgcaaccactatcatatttgtcaagatcccttttatgccttattcaaattccatttgatgatattttctttgtcttatttgttgtcaaaccacatagaaggacaaaaagactgaatatgtatactctctgtagcaggtcattgcaaaggaaataagttctcttaccaattctatctgtgaatggccttatgcacgcgcttgcagtgttgtaagttagactatgac

SEQ ID NO: 52545 - DNA, 419 bp, Zea mays
  unsure (1)..(419): unsure at all n locations
ctagtgctaagtgagagtgattagcttgagctcttttgtgctcttgcgcttggattgctttctttctcattctttcttgagatcaaactcacttgtaattgaggcaagagacaccaatcgtgtggtgatccttgtgggaactttgtgttccaagtgattgagaagaaaagctcactcggtccgatggactgtttgagagagggaaaggggtgaaagagacccggtctttgtgaccacctcaacggggagtaggtttgcaagaaccgaacctcggtaaaacaaatccgcatgtcacactctttattcgcttgcgatttgttttgcaccctctcttacggactcgattatatttctaacgctaacccggcttgtagttgtgattaattntgtgaatttcagtttcgccctattcacccccc

SEQ ID NO: 52546 - DNA, 435 bp, Zea mays
  unsure (1)..(435): unsure at all n locations
ttgaaactaagctttatcccttttctttgttatgnncgggangctnttatttacatttcttttaaatctcaattgtgaatgaaatttcaaatgcaaatttaaactcctttgaactacgcatattggtcatacccaattatgagggtgttatttaattataatattattttatattggatattatttctttgtttttcctctaatcttcttctcagtattattttatttttgttcatattactattgttttaaatgcacaaacaaaaatacaggattatgcaatggattacttttgtcttggtggagttttactctttttttaatcacgatcaggcacatgtgatgatagatagagatgcacacacatacatgattgtaatttctcttttttttattttctctacaagtgggtattacaaatcctaacccccttaa

SEQ ID NO: 52547 - DNA, 329 bp, Zea mays
ttatcttctaatgagttccataaatcccatgtttatttatatatatatacactaggtatatgctcgtgcgcttctacggaattaatatgataaaatatattgatatgcaaaagcactaattgttattctatagtcttattagcatgttaaggatgttttcatcgagaggtgattcattatcaacctctgcatgctcgtcaacttgtacttcgtttttctccttcgaagaatccattttggcaccattgtaatattgaattcctacgttaatgaatttgttacaataaaagcaatatttttttgaactattcccaatacatgatgaaaca

SEQ ID NO: 52548 - DNA, 401 bp, Zea mays
  unsure (1)..(401): unsure at all n locations
tgccaatacttgtcaaaacaacaacancaatcatccttatttgtagaccataccagtaacttggcccttcacatgctgtggactggatatgattggacctttcaagaaagctcaaggaggatacactcatatattggtagcaatcgacaaattcactaagtggatagagttcaagcccattgcttctttaacctcagctaaggccgtggaattcatacaagacataatattcagattcgggataccaaatagcatcataactgacctaggatccaacttcacaagttcagagttcttcgacttctgcgagcaaaaaagcattcagatcaagtatgcttcggtagcacatccaagagccaacgggcaggttgagcgagccaacgggatgatactggaggcac

SEQ ID NO: 52549 - DNA, 444 bp, Zea mays
  unsure (1)..(444): unsure at all n locations
tctgtgccgagatcacagagagctaagggtttgttatttagctgngatattccaatgtttaatgccaaaaaggcacttcccactaccttgttatttgaaaaatgtcaaacagcagatttcatatttttcctatgttctctataacaaaagattaactatcccaaaggttggggtgttttcaccttggggttatttttgtagggtttttctaagttttccttgttttcttaaaataaaaggtatcctatttattttatactaaaccagggtataatcaatttttctagtaaactatactgaataagtatactaacaaaaatatgggggctccctggttctttatttaaatcacctttcctattttctttaaccttaagcataatgtaaaataaatggcaaactctaccttaatgaggtgtacagaggggtttagcatttttaaat

SEQ ID NO: 52550 - DNA, 434 bp, Zea mays
  unsure (1)..(434): unsure at all n locations
tggttggtggaaaattnttcaccgacatttgttaatatggtgttcgggagatggctcaagaaaatataaggaanagtgaaaaaggtattcacgatgctagagaaatagcagaggccgctgagaaaagtgcggatctcgagaggcgaacatgtattgattaataacttctgactttatgttataattttatgacttcgaacttatttatgctttgcatcacagccgcactatctcctcccccagagcccgtcgagccattgggggaccccaaagcaaatgaggatgatgagattataaaaatggcgaagctattatggataaagttgttgatcaactattaaacgaagctgcagaagtagtcttgaaagaagatatactgtattgaaagatattggaatgtatatttgtggacatgtgtgtatattttataactt

SEQ ID NO: 52551 - DNA, 376 bp, Zea mays
ggtgaagattcatcatcccaacatgggctagtcggcgatgccttagccaacccatgttagttttagcaattaagcaagtatcaagttcagctctgttaaaatcaactaagtatagctgaccctctaatactcctttaaattctactgaatcatcacttcttctaaagacagtaacacctacatgcgtaaaaagacagttgtaacccattttgcataattgagaaacggaaagcaaattgtaatctaaagaatctacaagaaaaacattggttacccccattcgctattcaatattggccttatattaacttacaattatatactgagaaatatatgtgataatggtattggtcacaatggttcttatgctttacat

SEQ ID NO: 52552 - DNA, 448 bp, Zea mays
  unsure (1)..(448): unsure at all n locations
tgccaatacttgtcagagcaacagtttatgttttctcatctactacagancatacgagngacctggcctttctcatgctggggactggatatgattggacctttcaagaaagctcaagggggatatactcatgtattggtggagattgacaaattcactaaatggatagagatcaagcccattgcttctttaacctctgctaaggccgtggaattcatacaagacataatattcaggttcggaataccaaatagcatcatcactgacttatgatccaacttcaccagttcagaattcttcgacttctgcgagcaaaagagcattcagatcaagtacgcatctgtagcacatccaagagccaacgggcatgttgagcgagccaacggaatgatattggaggcactcangaaaaaggtctttgataagaatgaataattctcaggaaagt

SEQ ID NO: 52553 - DNA, 311 bp, Zea mays
  unsure (1)..(311): unsure at all n locations
tatcaagttagctntccaacgcattttatctcacaccatttgaagattcctaggagaagttattatcaaaatactgaaggctacgcagaagtcaaacagccacgcggaatccagctctagacatctcccgaagagaccccttcacattagcacgttaaaatactttcttttcgtgtttatacctatctaaggctggttgtaactagtataaatacccccttatgtctatgatgtaagacaacttttgataaccttttgatgacttgataatccaagtgattaacgcagccgagctgctgagtgtttactct

SEQ ID NO: 52554 - DNA, 441 bp, Zea mays
tgaagctggactctgcggtatgacgaaggacgatcttgtttgactttcttgcatataatagtctgaaggtgtgagaattgtatatttggaaatttacaatttttgaatcattcttttattcttatagtaattcttttttcatatagggtttaatactaagcaacgctttgagagcgcaaaagaatgctgaagacgaaagttataatattgctttcaacaacctacgagcagaggttatcaagctgaggaacgaagctttggaaaaagataaaattctgcttacattagtagataaaataaaggaagacgaagctacctccaaggctcaagctgaagcccaaaaacgcgaaattcaggatcttcagaaacaactggccagggctaaagaagaacgcatactagaagaaacaaaacgagaactaagtgatcaatgggcaaatc

SEQ ID NO: 52555 - DNA, 442 bp, Zea mays
  unsure (1)..(442): unsure at all n locations
aaactcagcttctaagggagaacacgtgataggtttaactaatgtgcttttcgtataagatagaccttgtgcagcttgtcaagcaggcaaacaggtgggaagctctcatcacaccaaaaatgtgatgaccacatcaaggcctttggagatgcttcacatggacctcttcggacccgtcgcctatctaagtataggaggaagtaagtatggtcttgttatagttgatgacttttcccgcttcacttgggtattctttttgcaggataaatctgaaacccaagggaccctcaagcgcttcctaaggagagctcanaacgagtttgagctcaaggtgaaaagataaggagcgataatgggtccgagttcaagaaccttcaagtggaagagtaccttgaggaggaagggatcaagcacgagttctccgctccctacacaccacagc

SEQ ID NO: 52556 - DNA, 412 bp, Zea mays
tgccttcgcctagtataccacccgcaatccaacggagttgtgtttctctcatatggcaaaatgaaagggaattaggcttacatctatttcctaattgattttggtggttgaattgcccaacacaactaattggactaactagtttgctctagtctataagttctacaggtgccaaaggttcacaataagccaataaaaagaccaagaaaagggttcaaacaaagagagcaagggacaaccgaagtgtgccctggtctggcacaccggactgtccggtgtgccaccggacagtgtccggtgcaccaggggacttcaagctgaactcctcaccttcgggaattttcagaggcgcttcgctataattcaccggactgtccggtgtaccaccggacagtgtccggtgccccaaggg

SEQ ID NO: 52557 - DNA, 464 bp, Zea mays
  unsure (1)..(464): unsure at all n locations
tattacggacctatgaatactaagcttctnagggggaacatgtgttaggtctaaccaatgtatttttcgattaagatagaccttgtgtagcttgtcaaaagcaggtaaacaagtgggaagtactcatcacaacaagaacgtgatgaccatgacaagacctctagagctacttcatatggacctcttcggacccgtcgcctacctcagcatcgggggaagtaagtatggtcttgttattattgatgatttccccacttcacttgggtattcttcttgcaggataaatcggaaacccaagggacccttaagcgcttcctaaggagagctcaaaacgaatttgagcttaaggttaaaaagataagaagcgagaacgggtccgagttcaagaaccttcaagtggaggagtaccttgaggaggaaggaatcaagcacgagttctccgctcctacacaccacaacaaaac

SEQ ID NO: 52558 - DNA, 425 bp, Zea mays
  unsure (1)..(425): unsure at all n locations
ntaccgcattgaagcatgatcgctttcccttggtctttttcttgcttggctgtccctttcgaccttctagcgccgtcttgaatctcttgatgatgagagccatctcttcatcattgagcccggccgcctcaacttgcgccaccttgctaggtagcgactccttgctcctcgttgcctttagagcaatgggttgaggctcgtggagtggaccgttcaacgcgtcgtcgacgtatcttgcctccttgatcatcatccgcccgctcacgaattttccaagtacttcctcgggcgtcatcatcgtgtacctgggattctcacgaatattgttcacgagatgaggatcaagaacgggtaaggacctgagcattaagcggacgacgtcatgatccgtccaacgcgtgctttcgtagcttcttaattttgtg

SEQ ID NO: 52559 - DNA, 441 bp, Zea mays
  unsure (1)..(441): unsure at all n locations
tctcctgtccggaataatctacggtattctttatcttttatttagaatagntgtagatgaacttatgcacctatgaaatgatcaactaggcatattggttagtccacaaggtttgtgatggtcgtcaaacaccaaaatcgattataggaaatattgagactatttccctttcattccgggagagcgtctgggaagtctcgatggaggtgtccaaatcccgccggagctctagaggataattgttacactgagccagggctgacaaaaaccaaatagacaaagaggaggaagcaacgcgtacctcccatttgggccttcaggccttgggcctcagatcgcttcggcctccaattccttgcaaggaagtcggctcgggaggaggcctgngtggcctancggcgagactcatctcattcgccagtcaccaccagccagtcacca

SEQ ID NO: 52560 - DNA, 405 bp, Zea mays
  unsure (1)..(405): unsure at all n locations
tgaaatgtgtnttcctccatcattatgtgatatgcaattacactctaatcatacatctcgtggatcagataaaaatattatggccactatatttacatcatatgtttcagttggagcgatacctgcgagtattaaaaggttatgtgcgaaatcgcgctcacccagagggttcaatcatggagggatacactacagaagaagtgattgagagctgtatagattacatcagtgacagaataatgataggtgtgcctgtacctaaacatgagggtaaactatgtgggagagggagaatgggcaagacaactnttcgtgttgaggattacaagctagtacattgtgctcatggtagtgtactacaacatctcacgatagccgagccctacatagaggaacacctggatg

SEQ ID NO: 52561 - DNA, 168 bp, Zea mays
ccgacgaagttcactccgcctgctcgccgtgtgaccgatcgcattccgggcacccatcgtcgtcgagtcctacctccgctgtgaccgccaggacctcccgaagccaacccctgccctcgccggacctatatcgccgacgggagccacgccgaccatattctttccgtg

SEQ ID NO: 52562 - DNA, 373 bp, Zea mays
tctcctgtccggagttaacagcactcgagtatttcgttttataattgacatatatggacttatgcacctgagaattaatcaattaaacaaactagttagtccataagatttgtgatgatcgtcaagcaccaaaatcaataatagaaaatggttaagaccaagtccctttaaatctctccctttgtggtgattgatgccaacacaaaccaaaacaaatataaagtgtacaattggtgctagtttgcatttctacagatgtgtataagttactctgaattgaaagcagttctaagtatatatgaatgttttgatataggtaaaattttggaccacattagcaccacttagcttgattttgccaatcttttgaaaa

SEQ ID NO: 52563 - DNA, 335 bp, Zea mays
  unsure (1)..(335): unsure at all n locations
cgcttgaacaaccacggggggtcggggttcctactactggctatggttctgtnnatgacatagagacatatacatacatatatatatatatatatatatatatatatatggacatagatatagagggacatagaatgcgtaagccccttttcaatagaccaggaaatctaacatatgttgagagagacgggcatggctctctctcgggggctgcggggaacaatttacccaccatggcccctgacctaggtgcaaacacgctttggacaagctgtgtggggggctacatacaggcgcatgttttgcctgggtaccacggaacacgagcctacgct

SEQ ID NO: 52564 - DNA, 432 bp, Zea mays
tcatgacaaccaattgtatgcaaagttctcatagtgtgttatttggccgaaggaagtcacattcccgggacatattatcacagatggaggaataaaggtagacctaggtaaaataagtcaaatgttaaattggaagcaaccgaaagatgtgtcaaagattaggagttttcttcgattagcaggatattatagaagatttattgaaggcttctctaagctagtgaaacctcttacttcgctactagagaaaggtaaagagtttaagtgggatgaagcttgccagaaatgttttgaagaactaaaagaaaagctaactactgctctagtcttggtaatgccagatattcacaaaggatttgatgtatactgtgacacctcacatctaggtctttgatgtgtgttaatacaggaaggaaaagtaataactcatgc

SEQ ID NO: 52565 - DNA, 431 bp, Zea mays
  unsure (1)..(431): unsure at all n locations
tctaaagggagaacacatgatgggtattactaatgtatctttcgaaaaagatagaccttgtgcagcttgtcaagtaggtaaacaggtgggaagctctcatcatgccaaaaatgtgatgacaacatcaagacccctggagttacttcatatggacctcttcggacccgtcgcctatctaagcataggaggaagtaagtatggtcttgttatagttgatgattttcccgcttcacttgggtattctttttgcaggataaatctgaaacccaagggaccctcaagcgcttcctaaggatagctcaaaatgagtttgagctcaaggtgaagaagaatangagcgacaacgggtctgagttcaagaaccttcaagtggatgagtaccttgaggangaagggatcaagcacgagtcttcgctcctacacacacaaca

SEQ ID NO: 52566 - DNA, 455 bp, Zea mays
  unsure (1)..(455): unsure at all n locations
gtatcaaatggacgtgaagagtgccttcctcaaggctttataatgaagatgtatangnngagcaacctcccggctttgaagatagtgagtaccctaaccaagtctataagctctcaaaggcgctttatgggctcaagcaagccccaagagcatggtatgaatgcctgagagattttcttatcagtaatggcttcaaagctggtaaagttgatcctaccctcttcactaaaacaattgctaaagacttatttatatgccaaatttatgctgatgatattatatttgagtctactaacgagtcaacctgtgaagagtttagtaggatcatgatacaaaaattcgagatgtctatgataggggagttgaagtatttccttggatttcaaatcaagcaactccaagatggcaccttcatcagccaaaccatgtacattcaagatatacttatgtcacac

SEQ ID NO: 52567 - DNA, 442 bp, Zea mays
  unsure (1)..(442): unsure at all n locations
ggccgcactagatgaggcataactgcaggagcacgtgctctatgtttgcgacatcgatgtaggtccagagcgcggtgacagcagaagcgaggccgacgtccatgtagaaacagggcttaaaagaccacatgagcatgagccgatgagaacattatttgtaaacacctgctcaatataaatgagtcacgagatattttgaattggaaaaacaaatttaccagcaaacagatagaaaattatttgcaaaagtaggaatggaaagtatatataaaatgagaatataaatgattcacgagataattagaaccgganaaacaaatttacaagcaaacaactagaagactatttccgactgccaaagcactacagtaaaacagaccatttctgatggtcaaaaccgtcgaacataagccctaaaccgtcggacataaagctattccga

SEQ ID NO: 52568 - DNA, 443 bp, Zea mays
gagagcacattggaagatcaacagatgttctatttgagaaagacaggatttgtagcgcatgccaagcaggaaagcaagttggtgttcatcattcacatatgaacatgatgacgactgacaggccactggagctcctacacatggacctattcggcccgatagcttacataagcatcgacgggagtaagtactgtctagttattgtggatgattattctcgcttcacttggttattctttttgcaggaaaaatctcatacccaagaaaccataaaaggattcttgagacaggctcaaaacgagttcggcttaaggatcaagaaaattagaagcgacaacgggacggagttcaagaactcacaaatcgaaggcttccttgaggaggagggcatcaagcatgagttctcttctccctacaccccacaacaaaatggtgtagtggag

SEQ ID NO: 52569 - DNA, 452 bp, Zea mays
tcatctttttgcccttcggctcggctgtgatagccgattcggtattctttccagaagcagcaatctttctttttaccccttgccctcgcagcgggtaacaatagtcagggtatacgaagccaatagcatcgaataccatgttcaaccttttctattcggacccccgaaggctgcggacaaggcattgtcctcagttttggagtacgccccaagtaactcatcgctagtagcttcaatacacttcggccaatcatcatttggttcatcaaacttatcctcaaacctgaatgtatacttcagccagaccaaaccaccttcgctagagttagtgatggtctccttcggcatttcctagttttccacaagcgaccatactctgaatgctatatggttttgaattaaatctcttgtgccaatgaaggagcaaacagtactgaaggccttctaacacg

SEQ ID NO: 52570 - DNA, 334 bp, Zea mays
ttactagagccttggatcatgcactcaactcttacatatttttctgtaacttactcgggggtcattatagatatatctaggattaccacgaattaattgaacttgagtggggttaaggaaaataagagatcttaaaataaccttaaccacctcgtggtcatcccactatttgctcccaaggttgcgcacttggttcaccaaagtcttgaaccggttgtacatgtgttgtggctcctcccctttgcgaagccggaagcgaccgagctccccttcgatcgtttaccgcttggcgatctttgtgagctcatctccctcgtgcgcggttttgagcaca

SEQ ID NO: 52571 - DNA, 451 bp, Zea mays
  unsure (1)..(451): unsure at all n locations
ntctaaagctctntatgggcttaagcaagctctacgctctgtggtatgaaaggcttanggatttcttgctttccaaagacttcaaaattgggaaggttgatactactctattcactaaaataattggcaaagacttatttgtttgtcaaatctatgttgatgatattatttttggatctactaatgaattattttgtgaggaattcggaaaaatgatgtcaaaagaatttgaaatgtctatgataggagaattgagcttctttcttggccttcaaattaaacaattgaaagatggaatttttataagtcaatcaaaatatttgaaggacatgctcaagaagtttggtttagagaatgcaaagcctatcaagactccaatggcaacaaatggtcatctagacttatatgaangangtactnatggtgacaaaaactttatcngtcataattg

SEQ ID NO: 52572 - DNA, 335 bp, Zea mays
cgacacatagctcatacgaataccgtcgattatatatcatatatatgcgacgactaatgagctttcaagtttatttcaaaccaagacataggtgtattgaaagggaatgggagacttcggctaagaccaaggcttgcactccgaaactcatacgtcgccaacactccgagcaactgtctattatctgggggagaaatgagcctcgcagaaaagaactccatccctacggaagagagttaaagctccaaagcctctctctctggtataatcttaacgcacttattctatgaccacaggggaagatatctcttacagggctctaatgacttccgttt

SEQ ID NO: 52573 - DNA, 417 bp, Zea mays
tcggcagataagagtagcagtcttttatgttttgttatgttttgaaaagcttcggcagataagagtagcagtcttttatgttttgttatgtaaggaaaggcttcggcaaaaagaggaagcggccttttatgcttcgttgtgtacgaaaagaagggaaggtgttttttcgccttcggctcaaaaaactgatttcgtccacatcaaagcacctcaatcgaagggtaagaatatattacaaggtatgtacaaagttccttgaagaacagtttaattctatttacaagagttgttacaaaattatcctgagtttttctaaagcacacttctgctagtcttcattaagcttcagcttcgacgacaacttcggcgacatatcctatgcatcatcttcaccttcgtcatcctacatgagtcaag

SEQ ID NO: 52574 - DNA, 442 bp, Zea mays
tcagctccatctatgttatggattggctttgagtcagttcagtttccttcggcccttctggcagcttcctgacttccatgaatagcgatgggtccttgatccgaaggtatcttcatgcaaagataagcagggtgaagaattgcttcaaaagcattgagggtgccacgaccaataattgcattgtaagggtattccatgtcaacaatgtcaaacacaacttgctcagttctagtgttgttgatgaacccgaaggtcactgacatggtgatcttgcccaatgctacaatttgtcttcctccgaagccacagagaggatgtgtagcatcatgaatcctatcttctggctcttgcatttgtctgaaggccttatcaaatatgatatcagctgcactgcctgtttcaaccaagacattatggaccagaaattctttaataacacaag

SEQ ID NO: 52575 - DNA, 378 bp, Zea mays
  unsure (1)..(378): unsure at all n locations
nttcgcgagcgcgctggcgtcgnccgcttgctcgggattggcgtgtcgcggggagacagcgctcgtcttcgtctcaagcgcgaagtcgatacccggtgcgccccccgttggggtgccggtgctgtcgactcgctcgacagccgacgaggcgctgcctcctgcttggccttggttgccctgccttcccctccgtcggcggggaagagggcgggatgagctcgaaggttgtccttccaccacgcggggaagacgtcgtcgattccgccgccggcgggcgggctgtcggccaccattgtcgttgtcgcgcggcggtggaaggagtatcatgtcgtagctgtcgtcgagggacatgaactcaagactcccgaaacggagcgt

SEQ ID NO: 52576 - DNA, 414 bp, Zea mays
  unsure (1)..(414): unsure at all n locations
ngtgaaggttcttcatccccacatgttctaagcggcgtatccacagccagcccatgctagtcttagcaaataagcatgcatctagaccggcctcctcttttgcaaaatcaactaagtaaagtttgccgtctaatacacccttaaaagctagtgaaccatcacttcttctaaagacagacacatctacatttgtaaatagacagttataccccatgttgcataattgactgacagatagcaaattatatccaagactctctactaaaaatacattagagatagaatgctcattagaaatcgcaattttacctaacccttttaccttgccttgattcccatcactgaatatgaatgaatcttgggaatccttattcttgacgtatgaagtgaacattttcttcttccccgtcatat

SEQ ID NO: 52577 - DNA, 372 bp, Zea mays
  unsure (1)..(372): unsure at all n locations
gtgctntggcaggtctgtggttttcatcaccatctttttttctgttcagtaaagattcattattacacaatataacacatgtatatatagcaacattagggctgattaacccaaccttttcaggttcatttcccgaacgattaaagccacctgtcctatgatgataaataatggcttgctccaaggagaaccggaggtagcagaaaccattcaccagtaaggacagtcttctcaaaacagccgtttaattatctccttatcaaatgcaagtcaaatatttttttgttggctttggcaagtaatagaaaaatgctatgtagcttagcaatattattaattngattcatcatataacaaatatttctagtatgt

SEQ ID NO: 52578 - DNA, 382 bp, Zea mays
  unsure (1)..(382): unsure at all n locations
tctgcaatatacacgaattatcatacgaaacanaaccttttggtattgaacagtatcacaataattttggctgctacagtttcgtttctcggtccgggtcaagctgccccgtgccaacctttcggaagaaatggtccggcgactggatgacagagtggttttatgtgaagaatgatctgacagtacgagaagatatcaaaggtataattatgcgccctatttggcaaagcttcggccttcggaggccgaagattgaaatgaatgaagctgccgaagaatgccagagggccttcggcgttatctgttcttttattggaacgagggacttagtacaagagcatatcgccttcagagtatggccgctcgcggagaaatgggaaat

SEQ ID NO: 52579 - DNA, 399 bp, Zea mays
  unsure (1)..(399): unsure at all n locations
tcgcatctataacactaagctagcanatcgtagtgcacattagctaaaaantgagtaatctagagcagtctttcataaagcatgtcaaatgagtttgcggcatgcccgcatttatacgccaaaagcgttgaaaattcaaagaccccgcttgtcaggtattgttgctattctagcaaaaggaaggtgttttttaggaccttcggcgaatagccttcggtcgcgtcgcaatttaaattcattattttaaacaaattaatattgcgaggggctactgttggggaccttccgcatccgaaggtactcaaaaacaggatttaacagtatttctggaagtataatgagtgagcaggtaccttcgaactcaagtcgtcatcacgccaggggaagaccangataata

SEQ ID NO: 52580 - DNA, 403 bp, Zea mays
  unsure (1)..(403): unsure at all n locations
ntntgatgcttagctntgctttagaataacaaaaggttttgttntttctatatatgatgcggcaaaagtgggtgggaagtttttcaaaaataaaacttgatgatggatctatcaaaggccttgataggttcaacatcggaaaagatgtacctctgccaggtaccaactttgggtttgaaatgattaagctgagaccgggcgggtgacttgcacgagaagagagtctcggtgtagtgtctccgtctgagtcgattaaggaccgtctcgatgtatgcttgttgatcgaggaccctttagctggtcacatgcctcgtcatgggtaagccttgcctcgggcagactaaggccggaataagacaacacgatatgggcgtggagcggtggcgaaagtaacgtgtaccct

SEQ ID NO: 52581 - DNA, 328 bp, Zea mays
tcgaatgcagcagaactagtccgaatatgtgaatgctgtcttaaatgtgcaagagaccagaagcaaccttcatctctcactcagttaatatagcccacttggccattgcaaaggtgggccctcgatttgctaagcccacttccaccagcacaaggaaatctaaaatatgttgaggtggcggtagagtatttttccaagtggattgaggcaaagcatttatccacaataacttccgtcaccgtctagaaatatttctggcaaaacattgtttgtcgcttctgagtgccgaaagctattactgtatacaaccgaacacagttcgatgctg

SEQ ID NO: 52582 - DNA, 441 bp, Zea mays
  unsure (1)..(441): unsure at all n locations
ntatcaaatggacgtgacaagtgccttccttatggtttcttcaggagaggnctatgttgagcaacctctctgctctgaagatagcgagtatcctaaccatgtgtataaactctcaaaggcactttatgggctcaagcaagccccaagagcatggnatgaatgcctaagagattttcttatcactaatggcttcaaagtcagaaaagccgatcctacactctttactaaaactattgcaaaatatttgtttgtatgccaattttatgttgatgatatcatatttgggtctactaacaaatctacttgtgaagagtttagtaggatcatgatacaaaaattcgagatgtctatgatgggggagttgaagtatttcctacgatttcaagtctagcaactacaagatggcaccttcattagccaacaaagtacattcagacatac

SEQ ID NO: 52583 - DNA, 435 bp, Zea mays
tggatgaagattcatcatcatcatcattcgttcattcattcatttaccattccactagatatgctgtgtcatccttcttcttctgatagaatttcttcttcttcttgccccctccatccttgttctttttcttcttacttgggcaattcattgcaatgtgaccgggttccccacaatcaaagcactttctatcattgaaagcattccttcttgatgattgacctcttctaaattgaccctttttcttcttcatgagcttgttcaacttcttcacaaagagagccaattcttcatcgctctcattcagttttcttcatcatcactttcttcctttattattgccttagaggctttagccttgagagctattgattcacttttcactttctttatcaaacttatgacctcagcttgagacttcttgaatatgtcttg

SEQ ID NO: 52584 - DNA, 365 bp, Zea mays
taacgcgacgtacacatatagagagatctgttgttactatgtgaaccaagcaaagccaccaagcgcttgcttatcctgttccggcacatacaaatccgtgcaccacgtgtgtatgctctccacaaacgcgagggcgatccgttgttaaatatgggtagtatatacgctacaggctaaaaccgaactacataaaacagaatcatataatatatactatcttgtagtgacgggcctaaaaaatttcaagagcatatggtcaaagattaaaaatagatagaccttgttcaattgttgtccacctcaaactatattttactcgtgaattacgtatatgtagcagtgatttatggcataagaagcccgta

SEQ ID NO: 52585 - DNA, 396 bp, Zea mays
  unsure (1)..(396): unsure at all n locations
ctattacggacctataaaactcagcttaaacaatntatgcgcacatacaaaactcttatatgttttcttaagtgtaattttatttatcatcccttttagcaaatgttctcaacatacaagccatgaaatttatttttttttggaaaaataaattctaatgtgtaaccttcattaaaagaagattttacttaccctccttaagaatgtccctcaaccatattaggaaaaaaaatctaattcataggaagatcttttcactttctttaatttcttcatttatttattttctatttgcataaactaatgccattagttaagtatgaaagaagggaatcaaggaatccctaaaacacctgattttaaatttatttatttaattggttttttattattatt

SEQ ID NO: 52586 - DNA, 341 bp, Zea mays
  unsure (1)..(341): unsure at all n locations
tggtcttggcttgtcatcccttttcattaagatttgatgatagcctgagtagcaatccaataagctcatgagttccgaagtagctacttcatctacaagggaatctattcttggcaatgggaattcatcattcggatatgccttgttgagatctataaagtcaatacacatttgaaagggaaatgtgcctttgggccatttctaagtattttggtgattgagtgcaaacacaagtgcttaaatgtgaaaatatgcccaaggatgaacaaagtgcaaatcacaagataaggtatgtttctaagccttagtacattggntttgtgtacctaatatattgtcta

SEQ ID NO: 52587 - DNA, 336 bp, Zea mays
tgaggctgatataagaggctaccggcagcaacatatcttcttctatctcgtttactccaatttcaaggtaaaattattttgcctagatttttgttatctttgtgatgaatcaaaattttctgatgtcagcttattttcacagagtatgctgctaagtaaagctttaagaatgcaacaagaacttgaagacaagaaaaatgaagtcataattgaaggcttggagagcaaaatcaaagattgcgaagcttcccttgagaagaagggcttcctgcttcaagcaacgaagggttcccttgcggaacttcaagctgaaaatgctcgactgagcgaggagct

SEQ ID NO: 52588 - DNA, 349 bp, Zea mays
aagcgaccttgtatgctttgttgtgtactaaaagaacgaaaagtgatggttcgccttcggctcaaaataatgatgttccccacaacaaagcgcctcaagccaagagggagaatatattacaaggtatgtacaaagttactagaagataggctaactgcgatgacaagaattgtgacaaaaatattctgagtgactctacagtacacttctaatgatcttgcttaaaattcagcttctacgacataattgaggcaatatatgaaccttcggaatcctacataaactaacagctgatgagttaaaatcaacagcacagataaaggtgactaccgagtatcatttcttactg

SEQ ID NO: 52589 - DNA, 291 bp, Zea mays
agcttcgcacctctgaactaactccgctagatcattctgtgttgatggccaatacaatcctgacatgaagaccttcccgacttgagttctggacgctgcatgcattccacattgcccagcatggacctcctccataacttgctatccagcggactggagaatgcacttcatgacgacgcctgatgcaccccttctgtacaatggctcctcaatgagtgtatattgagccgactgtctgaccatgcgctctgccgagttcttggcgaccggttcttcttcattctatatata

SEQ ID NO: 52590 - DNA, 154 bp, Zea mays
  unsure (1)..(154): unsure at all n locations
aagaggaaaaaattgtattatattagaagctgctcncngtgaaattaccacaatgaagtgtagttagaaaagcacatccctgttgggggaaaaaaacccggtggtgagttagaaatttttaaaaaccccccctctatgaagctggtccaaaaat

SEQ ID NO: 52591 - DNA, 437 bp, Zea mays
  unsure (1)..(437): unsure at all n locations
agcttatgggctggcccgtaatgtcccataattattatgtattgagatggcccgtaaaggagacatggcgaaccattttatgcttggggtaggtcaggccgactagcccgaatgtacacatataatttctgtagttcaaaaaaaatccaagtgatcagataaacattcaatggttagagtatgtgctttacgaagtgcttacgatagtattatctctgttatatcatctagtttatgttaatatctaattattaaaagtgatattagacaccgtcaacttcttggtggttgtctgcatgttgtattgtagcgagtggggcttatagactagcgatattacaccaattgtgttatggtgtggccaacaccgtataccggagagaacaagacccgtgacatttcaatcgaaagctngatagtagagaaggcggtctgca

SEQ ID NO: 52592 - DNA, 471 bp, Zea mays
  unsure (1)..(471): unsure at all n locations
agctngaatgttcaaaataaagaacttcaagtgcaacttgaaaattgcaagaacatcaatgcctcatctttagtgattgaatctaagtctagctcctcaaacaataccttttgcaaacattgtgccaaatatcatgcttcttgttgtctaactaaccatgcaaggaagaatagcccacaggtgaaggtcaaagaaatattgaaaagatgctttagcaatgatgggttaaagaaagttgaacccaagtacaagtccctaaagcccaacaatggaagaagggggcttgggttcaactcatccaaggaaaaccctagcacagtgcataaggggtggagatcccccaagttcatagagggaaccactctatatgatgccttggggaggattcactcctcanatgacaagtcaactcaagtaaaggtaaacttgagttccacaaagagtaagatgaaggaagtgggatcctcaagt

SEQ ID NO: 52593 - DNA, 465 bp, Zea mays
  unsure (1)..(465): unsure at all n locations
agcttgtggaactntgtaaaggcctcctagtggatccctagccattcacctcagaagtgtctaagggtctagctaaccctggctagacaggatacataacttgtgggtaaagagcgcaacctctgtagagtgtaaaactggtatatcagtcatactcgcggtcatgagcagctcaggactctcgcatgattaatttatggaactaaacttaatttgtcatgtgcattgcattgtgggtgttattatcaattttgatctcttacttaattgggttggtatctacttatacttagtaactgctaataaacttttgacaaactttaaaagcaatgctcagatttaaccatctccttcggtaagccttacacttcgactactacagaacatgttatatgagacggttaattntcaattattaagacacttatgaagtgtccaaanttgatggagtcgcaaaagatgtct

SEQ ID NO: 52594 - DNA, 480 bp, Zea mays
agcttgtcaaacgaagtttgcctcgctcctcttatgttatttgaagcttttctgattgatgaagctcctgtaatattcagtagtatgctacaagtaaatggttagttgtgttttttgaggacctttggaagaggaaggccccctatatcggagcacaaactcaaagtgtatcctcaagcgaggccgatccggcaaaagctacgtcgtttcacgcctgataaaagagatgctatacaggtggaattagctcgcctggtgtgtacaggttttattatggacgtactgcacccttactggctagtgatcatgttcttgtactaaaaaagaataaagatgattggcgcatgtgtgtcgactataccgatttcaacaaacactgtccaaaggatcctttctgactctctagaatagatcaggtagtcgattcactcgctggctgctctatgctcttctttctagattgtactctggatttaccat

SEQ ID NO: 52595 - DNA, 93 bp, Zea mays
attccgcccaattgcttacataagcatcggcgggagtaaatattgtcttgttattggggatgaatattctcgcttcaattgggtattattttt

SEQ ID NO: 52596 - DNA, 444 bp, Zea mays
  unsure (1)..(444): unsure at all n locations
agcttggccaaaataactcaaataataccccttatcaagcttctcatgtggggacttaatgggaattctgaatttcagaattctgaaattcagacctaagaaattcaaaccccaaatcaaccccaaatccccgggtgcgcatcacttcaccccgcgctcaccttcaccggccagccacctctccttagctccggcgagctcaattccgcccgccattgccgccagagtttcggccaccgtggccagcccactccagccacccccaagtcgagccagtgcttcggctagctccgccagtggcccgtgaagctttccaagccctcggaccaggccggacttcaccggaggcccgagatcgacctcaccagactntggtctttcaccgccgcgcgtggacagagctaaccggtgagtccccgtccaattccttgcacccatatcttc

SEQ ID NO: 52597 - DNA, 472 bp, Zea mays
  unsure (1)..(472): unsure at all n locations
agcttcctcgcgcgcagctttagagctggttctaccttcgtcccaatcatgcttttcatattgtgaatagcttcatcccaagtacgagggttcctgtacatatattatacttgggaaacattgttaatcatgtttttgaggaccttcggaagacgaaggcccccaacaggtcccatgtcaggtactntgccgagtgctntgtatggcactcggcaaagtgtgcttctttgccgagtgtcagagccactacattcggcaaagaacctatatcggtgcctaggtcttggttctttgccgagtgctatggttctgacactcggcaaagcacctctttgccgagtgttacactcgtcaaagtgaccggtacacaccattttattatgttttcctattctatccaaacaaacaaaagatatttcacagatatcacatatatacatcatagatcatcacanacatatatagccaacac

SEQ ID NO: 52598 - DNA, 460 bp, Zea mays
  unsure (1)..(460): unsure at all n locations
agcttgtacacgtggttaggtcttttgtggtcctcanaaccgggaggttgttcaacataaactagttcactaatctcaccgtttagaaaggcactctttacatccatttggtagagcttgatattatgagcacaagcataagcaagaaggatccggattgcttccaatcttgccacgggagcaaatgtctcaccaaaatccaatccctctatttgagtatacccttgtgccactaatcttgcctcgtttcttactactaatccatcttcattgtgcttgttgcgaaacacccatttggtaccaataacattgtggttcattggtctctcaacaagctcccaaacttcatttcgggtgaagttatttaattcctcatgcattgcattcacccaatcaacatcaagtagagcttcatctacacggttagggttcatacaagatacanaagagaaatgttcac

SEQ ID NO: 52599 - DNA, 52 bp, Zea mays
ttaggacccaatacagcttaaaggaacacacggacaaccagtttttgagaaa

SEQ ID NO: 52600 - DNA, 461 bp, Zea mays
agcttatcagtctcgatctcatggttggttcgttctcatatcaaatctcgtgctaatatctgatctgataatctccatgttgatcatcaaatgggtctctgggttaaagaaaattctcatgtgatgctcttttgtcagcaatctctgcttcaactccgatcacattcttattttctgagccatactctcatgggctccatctatattgctaatgggatttcattggttacggttggtaatggtgtcatgactaacgactgatggtgccgcgacgagaccgatagcctactatggtgcacacatggttgagctactcggcacgcgctggtatcatggttaatagttgtgatccattaccagacaatatcgttgtgcgatcttttgtgaacagtctctcagagtgatcgctgcatttgtctaacatgccgcgatttctatccaatctatcttcttatcttatc

SEQ ID NO: 52601 - DNA, 436 bp, Zea mays
  unsure (1)..(436): unsure at all n locations
agcttganaatattttctttgggtttattcaatctaatgcaacatccgcttaatcattttccatacaaagctaaagtaggtggtcttgtctagtatagatggatgtatcacatcaaaaggacactaaaaaagctccatacacaacaggaacaagaaccattttcggcagccacgactaatttcggcggctaggcaacgatcgctgaaaatagcaaggtaattttggcaaccaaccttatttttggtggccaggggcgggccgccaaaaatagtcccttacttttggcgacttgtttatacaggcgaaaactgctacaattttccgccgccgagtagggatgccgaanataagcggcttattatagcgacccaactcttctctctcattctatctcacgtcgcgcagcccaaagctgccatgccgccgtcgcattcc

SEQ ID NO: 52602 - DNA, 416 bp, Zea mays
  unsure (1)..(416): unsure at all n locations
gcttaaccttgtaacgaggataagctacctttgttccaaaggtggatggtccttaagtctctttgaaatccttaaaggaaaatgcttaaaatgtttgcaacatgctttcataagtgcataaactgtcttgagcatcactcatatactatgacacaatgcacttcactttctctatgatatagacttgttctcattaacctaattatgtgcacttggcatttaaggccaaaatatgtattcctctcaaggcacatatttagggggagaaatctatattatatagaactatgatcatgcttaattgacatatctcttgaacatatctctttcattttggtacaaatgcatatatcctattattcccgtaccatgactacgactaatatgtntccaagtatattactatgctaagtcgt

SEQ ID NO: 52603 - DNA, 411 bp, Zea mays
  unsure (1)..(411): unsure at all n locations
agcttaatgatccaaaatcaagaactccaggtgcaacttgaaaaatgcaagaactcctccaccacactcttagtggtacattctaatgctagctcctccaacactaacacatgtaaacattatgtaaaatatcatgctacatgtttgactaaccatgataggaaagttgattcaaagactgaggttaagcatgtgttgagaagaagctctagcaatgatgggttaaagaaagttgaacccaagtataaacccttgagacacaacaatgggaaaaagggacttgggtacaacacatataaggtgaaccctagcattgagcataaggggtggagatccnctaagttcatagaaggcactaccttgtatgataccttagtgaggattccactctncanggatgaaacaacacca

SEQ ID NO: 52604 - DNA, 431 bp, Zea mays
  unsure (1)..(431): unsure at all n locations
agctnnttatcaaagtgggggttntatatgggccatgaggagccaagtgttagagccagacgccaggtgtttctgtaatatcagacgaaagcgactgggaaagaacaataccacaacttcggctgctacagcttcgtgccccgctctgaggccagttatcccgtgctaatgttttggaaaaggtggccatgctcttggatgcaggaatggttttatgtgaagaatgacctgagtaagagggaggatgtgaaagggattaatcagtgccctatatggtcttgctttggcattaggaagccactcattgcacttgagaatgacgtgcaagcatgtcagatagctttcaacatagtgtgcacctatatcggcacgagagacttggccaagagcatattgttacagtgtgtggccccttgaagtggatgggaaat

SEQ ID NO: 52605 - DNA, 418 bp, Zea mays
  unsure (1)..(418): unsure at all n locations
agcttgtggaggttcttcatccccacatgtgcttagcggttatgccacagccagcccatgcaagtcttagccattaagcatgcatctagaccggcctcttcttttgcaaaatcaactaaataaagtttgccgtctaatacacccttaaaagctagtgaaccatcacttcttctaaagacagacacatctacatntgtaaataaacaattatatcccatttgacataattgactgacagatagcaaattatatccaagactctccactaagaatacatttgatatagaatgctcattagaaatggcaattttacctagcccttttaccttgccttgattcccatcaccgaatataattgaatcttgggaatccttatntttgacgtaggaggtgaacatcttcttctcccccgtcatat

SEQ ID NO: 52606 - DNA, 466 bp, Zea mays
agcttgccttcgcctcagtataccacccgcatttcaacggagttgtggaacgcgcaaatggcaaaattttcatagctgtcaagatgatgctcctcgacgataaaaagggcaagtgggccaatttgttacctgaagcggtctgggcactaaacacaactatgtgcagggcgactgggttcacccctttccgccttctatatggatcggaggccatgaccccgcacgaaataaaacatgggtccccacggacagtctcgtcagttgtccccgacgtggacgagcctacttcgaaggatctcatccatggagaccacgtgttcgccctataggctctaaacaaagacgaagcccaaacaaaagcatggcatgaccacgcactcttctcgagggaatgaagcgaacgagacctcatactcgtccggacatctatgacagagtcccggggcaagctggagcccaagtggga

SEQ ID NO: 52607 - DNA, 474 bp, Zea mays
  unsure (1)..(474): unsure at all n locations
agctttcacttagtgtcgctnttcaccctcagactgatggtcagtcggagcgaacgatccaaatcttggaagatatgttgcatgcttgtgttctgtcatggaagggtagctgggaggatcatcttgcattggcagagtttgcttataacaacagctacgaggctagcatcaagatggcaccatttgaggctttatatggcaggtggtgtatctcccctctgtgctgggagactntgggagagagatccttggttggtcctaattgggttcagcagacttctgagaaggttcgggaaattncgcagactattttggtcgctcagagctgtcagaagagttatgctgatgtgaggaggcgggatttggaatctgcagtgggtgaccaagtccttctcagagtatcacctactaaaggggttgttcggttcggtgtctccggacagcttagcccgagatacatcggaccgttcacta

SEQ ID NO: 52608 - DNA, 152 bp, Zea mays
ccgcataggacctaataccgctacgccccatggacttctaggctgatcgacgagaggcggaaggtcgcccgggtgccccgcgttgcgtccgagtcccggacttggcaaccgggattggctggacaagagcacggaactaccacacgggaggc

SEQ ID NO: 52609 - DNA, 471 bp, Zea mays
  unsure (1)..(471): unsure at all n locations
agcttgttgcgtaggagctggagtccgctcatcttgctattaagaccttggagaacaactgtgtcgtcctgaaggctcagcgcgacagggctatggacaaagtcgttcgcgctgggcggatcctaatgagaagacccggcgtcgtggtgcccaatgatattgtcactgatgtcaaggccacgcctgatgccacaagctgtccatcctcttctgttgcctctgcgaaggatgctgtctgcaaggatacttcaacgtagtgatttcctgtaaaacacttatttatcgagttagcatctctttagagaanagatgtaatatgaatttttcacgtgtgcaacagttatgttagaacttgattattccatgggcagggtgctggaaaacgcccgtggcacttgtaagtgagatatttcttttatcgaagtactcttaatctgagctggttattccgctactagggtacagtggcac

SEQ ID NO: 52610 - DNA, 474 bp, Zea mays
  unsure (1)..(474): unsure at all n locations
agcttatgatcaatatctggaattgcttgtggtttatgagcacaatgccatcagtaacacacacgaccggtggagatacatttggggctctgacaactactcatctcaaaaagcttacaggcattttatgggccagactctggttcaccctatctacagacacctttggaagagcaaatgtcagctgaagcatagagctttctactggttgtggcttaagaacagactaaataccagagacatgctaagaatgagaaacatgactctggaatttcactcgtgtgagaattgtttatggcaaagagatgagactctctatcatctgatcctcagatgcaattttgcaaaggcatgttggaactctattggaataaccncccctagaattactaatctagaggaggcctcagcaaacctttatatacacactaacgtttctttttctatggagggtactattctcatgacatggag

SEQ ID NO: 52611 - DNA, 339 bp, Zea mays
agcttcgcgggagagggtttggtcttggagtgtgccatctgatttatcctcccttgcctccgccctcgccccacttgtgaaggccctgtgcatccccttttatagatacaaggggatggtccagctggacatatgggggtgtagctatgtgctaatgtggccgacggagaagtgcttgagccctatagaagcgtagctggcggtgcagccctgggtcctgctgacgtttctttgccttcgtagagagctgagaacaatcgacgtcatggacgcatgcagggaaccatcattacctattgccggagtaatctagatgcgacatcggtcttgttccttcat

SEQ ID NO: 52612 - DNA, 477 bp, Zea mays
  unsure (1)..(477): unsure at all n locations
agcttaagtgggccgaatgtgaggttgttggtctatataaggtttttattctttttctttttcttttctatttccttttctccattttcaaatcccatttgaatttcaagtttgagttcaaacttttgtgaataacttgtcctcagtttgaaaggtataatttaataatataagtgtgagggaggtttattctgatttttttattttattttatgtattatttttcttagttcttcccttctcttatttcaaaccctaattccaattcaaattaaatttcaacttgtggcaaatttattttcagattaatagtaaaatttggacatacttaaaagtgtgatgaatttataactctgttctggtntgcataatatttctttctttctttcctaatctccaatcaaatcaaaccaagtttcagattctagatttcaaactttatgcacaagttaaactttcacatgatgcanaattact

SEQ ID NO: 52613 - DNA, 218 bp, Zea mays
  unsure (1)..(218): unsure at all n locations
gaaccgagacccgcgtcaccggaatagtgaaaccgtgtctcgctggagtttttaccccccgccgtcgcaagtggtacgcggtaattcatcaatccattttcgattcatgncacagatagcctctacttcaccccaggagctcaccgtgccgttggattggaataggtcgccgtggtttggccggtacacccgccgccgacgaagacaccccgctgcgc

SEQ ID NO: 52614 - DNA, 381 bp, Zea mays
  unsure (1)..(381): unsure at all n locations
gctttaccaaatggacgtgataagtgccttcctcaatggaccaattaaagaagaggtctatgttgagcaacctctcggctttgaagacagtgagtaccgtaaccatgtctataaactctctaaggcgctttatgggctcaagcaagccccaagagcatggtatgaatgcctaagagattttcttatcgctaatggcttcaaagtcggaaaatttgatcatactctctttactaaaactattaaaaatgatntgtttgtatgccaaatttatgttgatgatatcatatttgggtctactaacaaatcaacttgtgaagagtttagtaggattatggttcanaaattcgagatgtctatgatgggggagttgaagtattttct

SEQ ID NO: 52615 - DNA, 343 bp, Zea mays
  unsure (1)..(343): unsure at all n locations
agctctaccaaatggacgtgaagagtgcctttctcaatggaccgatcaaggaagaggtctatgttgagcaacctcccggctntgaagatagtgagtaccctaaccatgtctataaactctctaaggcgctttatgggctcaagcaagccccaagagcatggtatgaatgccttagagatttccttatcactaatggattcaaagtcggaaaggccgatcctacactctntaccaaaacacttgaaaatgatttgtttgtataccaaatttatgttgatgatattatatttgggtctactaacgaatctacatgtgaagacgttagtatgatcatgacacaaaa

SEQ ID NO: 52616 - DNA, 449 bp, Zea mays
agcttcagcagaatgatagccagagtccttcattctcaaataggcaggaatgtgctgacctatgttgatgatattatagttaaaatcacaaagcaagaaaatcacattgctgatttgcaagagacattttgtcacacccggttttagaaggtaaaccgagtgtgaaccatgtacgtgccaggatcagcaattcacgtacacagcagttacataacatggacatcatcacatagtgcttaaatagtattaaaaagggaaatagtagtcgattacatcataagtctgagacatccacatagtctttacaataatcaaagtgcgaaaacgaaacgtagataaacgcggccttcacaggtagccgactggggggttgccactaacccacgcctagaactcatcgtaatcttggaactcctggtggtctccttccacagcttcatcttctcttg

SEQ ID NO: 52617 - DNA, 480 bp, Zea mays
agcttgccttcgcctccgtgtaccacccacagtccaacggagttgtggagcgcgacaacggcaaaattttcacagctgtcaagaaaatgctccttgacgacaaaaaaggcaagtggcccgacctgttacccgaagtggtctgggcactgaatacaaccgagtgcagggcgactgggtttaccccccttccgcctattatacggatcggaggccatgaccccgcaagaaataaagcatgggtcgcctcggacagccacgtcggccgtctcagacgtagatgagccaacttcgaaggatctcatcgacggagaccgcgtcttcgccctgcaggctctggacaaataccaagcccagacaaaagcatggcgcgaccaggcagtcatccaaagggaattcagcgaaggggacctcgtcctcatccggacagctcgaacggagtccagaggcaagctggagcccatgtgggagggcccttacatt

SEQ ID NO: 52618 - DNA, 481 bp, Zea mays
  unsure (1)..(481): unsure at all n locations
agcttgcctttgcctcagtatatcacccacaatctaacggtgtcgnggagctcgccaacgacaagattttcactaccatcaagaaaatgcttctcaacgacaagaagggaaaatgggccgacctgctacctgaagcagtctgggcactgaacacgaccgagtgccgggcgactggattcactccctttcgcctgctatacggatcgggggacatgaccccgcaggaaataaaacatgggtcaccgcggaccagcgcttccgccatccccgacgtagacgaaccaacctccaaagacctcatcgacggagaccgtgtcttcgccctgcaggccctcaacaaataccaagctcaaacgaaggtctggcgcgaccacgcagtcgtcccaagagaattcgacgaaggggacttcgtactcgtccgaacaactcggacagagtcacggggcaagctggagccaaagtgggagggtccattcatcgt

SEQ ID NO: 52619 - DNA, 457 bp, Zea mays
  unsure (1)..(457): unsure at all n locations
agcttcggcaacagaaagtcccgcaaagctgataaaacgaagaattatccaagtggccgatgtcattcatcagacaccgccatcgacatcggcgtcaaaaattgtcactaccgaaaccacagtcaccggagccgaaaccaccagagccgaaacaaccggagccgaagctaccggagcaaccactgaagtcgaagccaccggagccgaaaccgagatcaccgaagatcctaatctagctagagactacacttggtgatattgacaatatacttctgagaatggctgaagaagaagctgctgcggttgcggtgaacacgacaattgaaaaaggaaaagagcaaattgaagacactntggaagaagaaaattntaattttcaagatatacttggacaagagttaacagacactgaanaagaagagctaaagaaatatgctatatcctgcggatacaaacc

SEQ ID NO: 52620 - DNA, 465 bp, Zea mays
agcttcgatattataacgtatccgaagacgaatgatcgaaccgacttatagatggaatgactgtgtagtccataagggtctgagtcataattgtaatcttttgtaaggggtatgattgtaattgcttacaggatgcgtcctatgcctataaatagtgaacagtactcctttactgctcacgcaattttctaattggtgaagcattactctgaaattattgtttcctgccaaagcgaaggtacaaacgtacttaaatattatgttttaatatctcagttcacattataaaatgagtgaataatgttacttattcttgatgttatataacgttttatatcttgtatttcatttcacattgttttatctttgatcacgaacgtgtgaccttcgtgatatattattataaccttcgtcgaagctcataaatccttgggaaatatgttcagcggcgaatggcttaacatt

SEQ ID NO: 52621 - DNA, 227 bp, Zea mays
  unsure (1)..(227): unsure at all n locations
cttatgttttcttgacatagatcaacattctggatttntcagtggagacctttntctggtaaaaaantcgtagtgttnancctgggtcttattgaaaatggtnncttgcatggncaattttagcaccaaaaatggattgtgtggccattgatcattgaccagaagctcattcaccttgccccacatatgtttacttgccatagatcacattcttggatttctggtgg

SEQ ID NO: 52622 - DNA, 413 bp, Zea mays
cgagctggacttgtgtgtagccgatggtgcgcccactgtctgatgaggcccttgggcgatgcgtgaatacgcacgggactattgttcctgcccgaggctcggctcaggcgtgatgagatcgcgtgcctgaagctgtaactttgaaccgcgcttaccggtctacacggtctgttctgaacatgctctgcggccgcgttaaggagccatgggggtacccctaattacggtacccgacatatatatatatatatgagggttgcgatgaaaatattattcgcgctatcaagctttgtgttggttttgatgtcaactcgctgattctgcaaccgtgattacttttggagcttcggcgtttcgtttcaaccaacgctgagatggtcgaagattagagaagcgaggaccccacactagct

SEQ ID NO: 52623 - DNA, 467 bp, Zea mays
  unsure (1)..(467): unsure at all n locations
agctntcacaaagtcttggatcactctntttggtgatctgaagattaagttatggatgtttaaagtctgaagactgaatctgtccaattctggacagcaaagccttctagtgtcttttgtccttagttaaacattgaatcaccttaagatgtttataaatgatatgtagaaaatttaattagctttccagaaagtctaggatcactttgtttggatgtctgaatctgtggttgtgaatttttgaagttgcaagtctgaatctgtccaaatctggacagagctactgtgtttgcataatttgaccttgctaagtgtttaatcatgttgtgatgacaataccaaagttgttgagaaccttttaagctntccagaaagttctagtttgatatttttggattaatatttgaagagttatgattaaaacaagtaactactctagtgttgtcctataaatctgcaagtgcgta

SEQ ID NO: 52624 - DNA, 398 bp, Zea mays
agcttggcatatagctgacaatcttgtagcctctgaagtactttcctcaaatgctcctgatgctccagctcattctgggaatatataagaatgtcatcaatgaacactactacgaacttgtcgaggtagtccatgaacacactgttcatcaagtacatgaagtaagctggcgcatttgtcaaaccgaatgacatgactgtaaactcatatagtccatacttggtgatgaatgctgtcttcggtatatccgaaggttggattctgagcttatggtagcctgacctcagatctatcttcgagaacacacttgctcctctcaactgatcgaataagtcttcaattctgggcaaggggtacttattcttgatagtaacctcattcaaggatctataggcaat

SEQ ID NO: 52625 - DNA, 466 bp, Zea mays
  unsure (1)..(466): unsure at all n locations
cctgaggcatgcaagctntaattgggtcaaagctccatgttgtatcattccaaggtttaacttctccatttcttgacataatgtgatgtcaggggtcctcactgtaagacaatggcaggaagccttgcgactcaatgcatctgccaccacattggcctttcctgngtgataatggatttctaaatcataatccttaatcagctcaagccatcttctctgcctcatgttcagttctgaccgggtaaaaatatatttcagacttttatgatctgtatataaatggcagatatttcctaacagataatgacgccatatcttgagggcatgaacaactgcagctaattccaagtcatgagttggatagagcatctcatgccggcgtaacttccttgaagcatatgctatgactcggcccttctgcattaagacacatctgagaccactgcctgatgcgtcacagtataca

SEQ ID NO: 52626 - DNA, 402 bp, Zea mays
  unsure (1)..(402): unsure at all n locations
agcttgccacctcgaacctcaataactcggttctgtagttttccggagttccgaaggtgaccgacatgtagatgtgtccgagtggatattctccttcagtcggcacgatgctgaagaaaggagtgtttgactcatggagctatttgagtgcgactcccaagccttgaagtgtccgggggaaggtgacnttgatgctgcttnctccgtccactaacaccttctttaccctgctctctcggatcaccggatcgacgaggagtgggtacttgctcggatgatccaagttgagccactgatctcgccgagtgaaggtgatcgggtgttctgaccatccataccgggcgggaggacccggggccgctacactatttgacgggctgtgagcttctgttgcctttactt

SEQ ID NO: 52627 - DNA, 252 bp, Zea mays
  unsure (1)..(252): unsure at all n locations
cccactattaggaccttaatactcgctctaaggaaaccggatagttgacaacttcattncaaaaagataacctgtgcaactgtcagcagtaaacaagggagagcactaatcaagatgtgatgaccacttcagaccccggagccgctgcatatggacctcttcggacccgtcgcctatctgagcatangagggagtaagtatggtctagttattgtagatgatttttctcgcttcacttgggtgttntttttg

SEQ ID NO: 52628 - DNA, 359 bp, Zea mays
  unsure (1)..(359): unsure at all n locations
accctaatccttgcacacttactacattggagaagaggggagaagaaccctanacctctcttaaaccctatctcccanaacccttgatgagagggaaaagagagtgaacaagtgtgcaaagcatgagtaacatttacccaaaccttaagtaaccttataaccagcacttagggtagggaaatattgcaaaaagaccccaggagaaaccctaaatcaaatctccaagtggagagagagctagagctctctatttctctctaagtccaatttttaaccctaatctaaagatcaaccgtgttcactttaaagatggcaccgaaaccacttaggatctataccaaaaatgtggcataccacct

SEQ ID NO: 52629 - DNA, 306 bp, Zea mays
  unsure (1)..(306): unsure at all n locations
agcttaaacagaaaagttagataggttatgacttcttangcagcaaaccaaacgacccttagtgataggagacttatctatcttaactcttttgacacgggcggattggatcgtttatcctatgaaattgatttagttaaatataaagtcatcacaactaataaaaagttagacaggtgctggattntatgctacgtcgagactaagctcaatagtcttgagcaaaaatgtgttggtaaatttagcgaagccaaaccatacacttgtcttctaaaaaagcccacacatctttctatcagaagttca

SEQ ID NO: 52630 - DNA, 483 bp, Zea mays
  unsure (1)..(483): unsure at all n locations
agctggcaataggtgaggtgaagccacaagataaggacgatgatgaagggagaanttggatgacaaacagggttgttgatgggagtgctagagtggttggtgaaaatccttccatccaagcaaacccatcatcctcaagacatccaatccttgaagaagagcttccaccacaagatatgccaaccattgtggaaaatgagcaagaagaagttgctagtgaagaagaagaagccattgaacaagatgaacaagatgatcaaattcaaatacattctctggtgcctcaccctcgggtgcaccagggcattcagagagatcatcctatggacaacatcctgggtagcatcaggagaggggtaacaactcgatctcatttaacaaattnttatgaaatttactcgtttgtctcctctcttgaaccccttaaggtaaagaaagcactaagtgatccagactggatcattgctatgcaagaagagctta

SEQ ID NO: 52631 - DNA, 482 bp, Zea mays
  unsure (1)..(482): unsure at all n locations
agcttctcgctcatgctttcaagactaaaaaataccatttatagaggcacgatattntttatgtccaatcaatcaccattatcataacttaacttatatattccatacaatacacacattagtgacaataatttagtattgtagcttagacgcttgataccagatcttatcaccgactagtgttttttatggtctttaaagttttgtttagcgagagtgtttacaattgtaattttctttgttgtctttntattgtgatcttcaaacttcgacaagcaatgaacgatcgtccaaagaagacgatgatttggtcttcaatgaacttccactataagaccgctttctgttttgttatcaattctgtgtctactgatttttaattatttaatataccagctgtgagatactctnttaagtctttctattaaaaataaaaaagaaaagatacctaagaagagtgataaacatgaggtcgttggtcg

SEQ ID NO: 52632 - DNA, 480 bp, Zea mays
  unsure (1)..(480): unsure at all n locations
agctntgaggtaaaaccatggtattggagaatatcatcgcattgtaaaaaaactctgttttgaatatttaaaactccactccaatcaaaagcatttttttgtttatgactacactttcacatgtatactaaataccttgtctccaaacatattaagagtaatgtaaaaaatactataattatattatgatattttaaaaccgtagtattctaaaatcatgattttgaaatactttttatttccaaacacgtccttaagttcatttggacggacgtaggtttcatagttgaggcggataatgcgtgacaatattgcgctgcccaccaagtatctagaggacccacaatgcatgatcacaacttcacaagcacatctcactgctagcgtcaggatcgcgcggctagtcggtctctgcggcggctgctccagtcgtctttagactnnttgttctgcanattaataatttatacggactattat

SEQ ID NO: 52633 - DNA, 482 bp, Zea mays
  unsure (1)..(482): unsure at all n locations
agcttctaaagggagatgcacatttgngactatccaatgttcattctgagaaagacagggtctgtagcgcatgtcaagcaggatagcaagttggaacccgccatccacacaagaacatcatgacaacggacaggccactggaactactccacatggatctattcggcccgattgcttacataagcatcggcgggagtaagtactgtctagtaattgtggatgattattctcgcttcacttgggtgttctttttgcaggaaaaatcacaaacccaagagactntaaagggattcttgagacaggctcaaaataagttcggatttagaatcaagaagataagaagcgacaacgggataaagttcaagaactcacaaatcgaaggctctcttgaggatgagggcatcaagcatgagttctcttctccctacacgcctcaacanaatggtgtagtggagaggaagaatagaactctactggacatg

SEQ ID NO: 52634 - DNA, 301 bp, Zea mays
aaactagagtgagatgattgaattatgacgtggtagtgcaatttgaatagctagaagtgtgaatgaactcaaacaccccattattgtacaccagatttcaagattttctgaatttttggtttttacaaattttttgaaattcaaaatggtgcaacccaataagaaagtgtcacgtgacaatagacggttggtactgactatgtctctaattggtgggttggtactgactggtgtggttataatgtgcgtggtaccaaatgtccgatcgatagcctaaccaaccgcttgctcagctgaccga

SEQ ID NO: 52635 - DNA, 458 bp, Zea mays
agcttggtgccaatggagaagcatatatccttgaagtcttggctgtcaaactgcttgccgttgtcaactgttagttcggacggtactccgaagcggcaaacaatgttttgccaaaagaatttctatgcagtctttgatgttattgtggaaacagccctcgcctcgatccatttggtaaagtattcgacagcgacgaaggcgaacttaaggttcccctaagccgtgggcaggggcccaacgatgtccaggccccagcgctggagaggccatgtgtgggcgatcagttttgtgaattgcgaggggctgcctgatcgaggagaaaacttctggcaggcttcgcaggaccttgcaacccggtttgcggcgcagatcattgcgggccagtagaaaccttggcggatcacctttgcggctagggcccttggccctgcatgagagccgcaagtaccactgtggac

SEQ ID NO: 52636 - DNA, 466 bp, Zea mays
  unsure (1)..(466): unsure at all n locations
agcttgtgaagattcttcattccatcatgggctagtcggcggtgccagagccaacccaagttagtcttagtaaccaagcaagtgtcgagttcagctctatcaaaatctaccaagtatagctgaccctctaacactcccttaaatgctattgaatcatcacttcttctaaagacagtaacacctatatcagtaaatagacagctgtagcccatttgacataattgggatacggaaagcaaattgtaatctaatgaatcaacaagaaaaacattggaaatagtatggtcaggtgatatagcaattttacccaatcctttgaccaaaccttgatttccatccncgaatgtgatagctcattggggatcttggtttttctcatatgaggagaacatcttcttctcccctgtcatgtggtttgtgcacacgctgtcgagtaccaacttgagccctcggatgataaacctac

SEQ ID NO: 52637 - DNA, 53 bp, Zea mays
ttttttttaaaaaaaattaagtatatggatttatgtattagaaagccagtaga

SEQ ID NO: 52638 - DNA, 450 bp, Zea mays
  unsure (1)..(450): unsure at all n locations
agcttgagattaatgttatatcattaacttcatgtttatctcgagttaaagtgagttgtaggaataaaggactcaaatggtgaatcaagaaaagaacatacaacatgcaaatgttccaaaggacgatacatctataatctctagtgcatctctttcaattggtatatcccgtgttcttgagtagtcacgtatgaaattttttatgcacttgagtaggtgatatcttgctttgccttggagtgattntgctagttattgattgcatatgttgtatctaattccttttagcaatctatttctttcaattggagaatcatgcttattttgctcatgactatgtgtgtaatggattctatctgttgatcaatcaagtnggcatatttcatttagtatatctatttgccatgggttntctctcatatngtngtatatggctaaacctatgttcta

SEQ ID NO: 52639 - DNA, 430 bp, Zea mays
  unsure (1)..(430): unsure at all n locations
agcttattagaaaaggtgaaggtggtgtaactctgttacaatctcattatgtggaaaaagtattgagtcgctttggttctagtgactgtgatcctgctccaacaccttatgaccctagcatgctattgagaaagaatcggagaatagcaagggatcaattgacatactcccagatcattggctcgctcatgtaccttgcaagtgcaacaagaccggacatctcatatgctgtgagtaagctgagtcggtttgtgtcaaaaccaagagatgatcactggcgtgctcttgagagagtgttgcagtatttgaaaggtactatgacatacggtattcattatactgaaaacccaaaagtgttggaaggctatngtgatgccaactggatttctgatgctgatgagctttatgccacaagcggatatgtgtttct

SEQ ID NO: 52640 - DNA, 259 bp, Zea mays
  unsure (1)..(259): unsure at all n locations
atgagaaatgctataagggtttctggaagaccagttagcaccgaggaccctgcggntttcctaaaccaactcttagacttatgcccctgcgccactattcactcgagtctctgaccattcaaaaactcccttgacttgttttccttctttcccgatgtccctcccacctattgaacagtatcccgcggaagtaaataaggcggtgcagcttatcagctgcgagggaggtcctgcgaaaggccgggctggctccaggaag

SEQ ID NO: 52641 - DNA, 318 bp, Zea mays
  unsure (1)..(318): unsure at all n locations
agcttggaggcgtctattggttgtcgacttggtgtagactcctccttcttttcttccgtcgccttgaatgcaacgggttgagcttcggatggatcgccaagctcgttgattttcctcgagccttctatcatgcactcaaaacttacaaaatgcccgataacttcctcgggggtcattttagtatatctaggattaccacgaatcaatngaacttgagtgggatttagaaaaatgagagatcttaaaataacatttaccacttcgtggtcgtcccacttcttgctcccgaggttgcgcacttggtttaccaaagtcttg

SEQ ID NO: 52642 - DNA, 459 bp, Zea mays
  unsure (1)..(459): unsure at all n locations
agcttctctgcacgcgtgtctgcggttgaattcatcccgcaggtctcctggtccctctagagggacccacacatctccttctgcgtgtctgcagttgagcttcgttcgcagatctccagtcggggcagtcctcaccgagggcgtgcgctccggggcagatgctttgtgccggcgccaggacgatcgaggcctgngcctgaccgagccagtgtgtgccacgccaaggaggcggtctatgttgtcgcgccactgcctcatagcccctggagaagctgtggggctgggcaagtggcgcaacaattctctggccgcagagagctctctggcggnggtatcccctgacagagtccaggacgtccaccctggtgtgcgccgccgtacagggcgcatggctgcagcaccaagcgtcgtatggctagagctctgtagcgtagaagatgcagcttcctcctccatgga

SEQ ID NO: 52643 - DNA, 480 bp, Zea mays
  unsure (1)..(480): unsure at all n locations
agcttatccctaagggtcatagtaaagtaatattgagaacaagagttctagttgatatacttctcataattcaatgagctcatttggtaaatacgaacgcaacaagaggcgaatatccattatacaaatatagagaattgtaccatttttcattttttagtaatgtgaaaattaataaatagcagaaaatagtgcatcattttttgtgattacctactattatatcatagagactatattttgataatgaaccttgtgtcattcaaaatagtagcaggaattttgtcgcctatgaatggtaatccaatatcaagattcaccttgataccaaaattgacatcaatatttttatgctatacattattgactcatgtaggacgtgactaatacttccaagatgaaatattntttctccaaaacttacattggatgggacttattatcccgtggtgagggctaatacccaatacccaatccaag

SEQ ID NO: 52644 - DNA, 126 bp, Zea mays
atgtttttattttgaaagtgccaactaagaacgcagctgctcctgcactgaaagataacccaaaaaaatagccaaaaaatgtcccagattcgccatatttggttgtaatatctccatgaaaaaatg

SEQ ID NO: 52645 - DNA, 482 bp, Zea mays
  unsure (1)..(482): unsure at all n locations
agctngagcacattagcctccacactactgaatttaccaaatgtgcttacaatgatgattgtttgtcttggtattcagaatgatatccataaaggatatgatgaatctgtgatagattcgaaaaatttcagatcattaatgaccatcaacaatgaattgtcatttccaactggttatggttggagtcaggaattcggcacgctcctgacttgtgattaactgcatgtactgcatgtacaagttcccctattgtttttagtacgtgggaatccaagaaagatttcccatgcgtacattgggtatgttcccaatctcaccaccgcagcgtacatatatgggcacatagaaaactggngatctatgtgagaattcattctccgtcgatcattaagttttagaatctcttcatgagaatctatttatggcccgtacgcttgcttgaatcatgagcttttccaggcattatggggagacttcaagta

SEQ ID NO: 52646 - DNA, 421 bp, Zea mays
  unsure (1)..(421): unsure at all n locations
agcttgcaggagaaagagatgatatgaagtcttgggtgattgaggaagtcaagacaattcttgttaactcaagctatcaatcttcanagatcgatatccatgattgacccaagtgccgaanaatcaagacctacaacatggaggaaagccaaaggatggtaacatttatgcntttgagtgcaaagtatcttaaaatatcatntcttatgtgtcttgtgtggtcacataggaaaaagaaagcacttcaaatgttnttaaattatgtcaccattctttgaagaaattcctcccatatggtagattgacactcatcatttctataccatagcaatctacatgctntannatgttgaaagttacccatggcatggtttacactaattatcttattattgccatgaatctagatatagagggatat

SEQ ID NO: 52647 - DNA, 483 bp, Zea mays
  unsure (1)..(483): unsure at all n locations
agcttgagcagtgaccggcttcgtttgaaactcttggaagctggttgtcagcatgtccttcagctnttgccatgaggtgattgttcctggccgaagagaggagtaccaggtttgtgcaacactcttgacagccatgacgaaagactttgtcatgactgtagtattgccaccatacgaagatatggttgcttcataactcatcaagaattgctttgggtctaaatggtcgtcgtacatggcgagctggggtggtttgtaagactggggctaaggtgtagcctgcagttctgttgacagaggagaagtatcatcaaaagcaaaatttccatgatggaaatcttcataccagtcgtcctcgntgtagaagccttcttgatgaagctctctgtgcggaggccttcggttctggtcatcttgagcaagatgacgaacttcttcagaggcttcgtctatctgcctttgcaagtcagctagacgagccat

SEQ ID NO: 52648 - DNA, 468 bp, Zea mays
agcttatgtggatgacgtggtgttttatatatatatactcaggaaatctaattgaggatttacagctggtcttcaacagtctgcggtgatatcgatggaagcttaatcctgaaaagtgtgactttggaataccagcagggaaattgctcgggtttatcgtcagccaccggggaattgaggctaatccagaaaagatcgaggctatcatgagaatggaggcaccacgatcacagaagaaagtacaaaggcttactggatgcatggcatccctaagcatgttcatatcaaggctgggagaaaagggcctaccgttctacaagttgctcaagaaggtagacaagttccagtggacttcagaggcttaggaagctctagacgcactgaagatattcctgacgacaccaccagtgttataaccatctcgccgagccacgccgagtcacccggctgaagatctgttgttgtaca

SEQ ID NO: 52649 - DNA, 383 bp, Zea mays
atcggtgtgcaattcatcttccagcacaccattgttcttccgggtcatgtgggcattggggaaggcatcgcgataggtgtcgaacttggccataatgctgatccttgatcctggcgcgaccggttggtcggcatcacgatcagctaagccgtcgagcgcggaagcggacgacggcgtgtggcgataaggcttatgccggctgagaatagacctcgtcgagtgcggcttcgacgaagcttgcgaatgcgcgggctttcgcgctcgccatgcgccccgccgggaataccgcccagagatcgatctgcggcagcgaccagtcggtcagcacacgcacgatccggccgtcggccagttcgggaccgaacattcagtccgagccgatc

SEQ ID NO: 52650 - DNA, 476 bp, Zea mays
  unsure (1)..(476): unsure at all n locations
tcgccggatcttaatcactgggctgcagctgctacttggaagatgactcttgcgctcttcacgggtttaccggagaggacgttagatttattggaactcatacatactgatgtgtgcggaccaatgagtacgacagctaggggaggattccaatacttcataaccttcactgatgattttagtagatatgggtatgtctacttaatgaaacacaagtctgaatccttagaaaagttcaaagagtttcagaatgaagtagaaaatcagcgtggcaagataattaaagcactgcgatcagatcgtggtggtgaatatttgagtcatgagtttagcaatcatctaaagagttgtggaattgttccacagcttacgccgtctggaacgcctcagacgaatggcgtgtctgagcgacgtaatcggactctattggattatggtcgatcaatgatgaaccagtcngacctacctttgtcgtt

SEQ ID NO: 52651 - DNA, 84 bp, Zea mays
gggaatcgcattccgctttcaaaaagccttcgtacaccacaacttcattttcttcagggtgtggacaaatcttttccccttcgt

SEQ ID NO: 52652 - DNA, 132 bp, Zea mays
tggcgaaatattttggtccttgtttcttttctttttcgaagcatttccctaatggggggtttctggccaatacaatcccagttccggtcccaaaacctgttatggtcctatgagctttcttgggccctgggg

SEQ ID NO: 52653 - DNA, 466 bp, Zea mays
  unsure (1)..(466): unsure at all n locations
agcttgtgaaggttcttcatccccacatgtgctaagcggcgatgccacagccagcccatgctagtcttagctattaagcatgcatctagaccggcctcttcttttgcaaaatctactaaataaagtttgccgtctaatacacccttaaaagctagtgaaccatcacttcttctaaagacagacacatctacatttgtaaatagacagttatatcccatattgcataattgactcacagatagcagattatatccaagagactcaactaaaaacacattagatatggagtgctcattagaaattgcaattttacctaaaccttttaccttgccttgattcccatcaccgaatataattgaatcttgagaatctttattcttgacgtaggaggtgaacatcttctcccccgtcacatggtttgtgcatccgctgtcgataatccagcttgaacncncggatgcataaa

SEQ ID NO: 52654 - DNA, 280 bp, Zea mays
  unsure (1)..(280): unsure at all n locations
ccacttttagtgacacttaatactaagctagcaaaaaattctgaatcaaatattgagctatgcctaatncggtaaaaatgttctcaatggctggtaaagttncggctattgatctaatattnaatggtaagaaaatncnncgatatcccccttttgttggtgatcccctaaaaaatgataccgaatggctatgtgcttattgcggctatgctcgacgggattgtcggccattttaattgcactctcattatcaacataacaaaggaacttggttaatttg

SEQ ID NO: 52655 - DNA, 324 bp, Zea mays
  unsure (1)..(324): unsure at all n locations
agcttgcttnctctgcttcggtgcagcccggtctctctgtaaggaactgctcccagaacttgtcgttcaccaccacctggggacctgtatgttcttcagggggagcttggctgccccgatgcggactacccgttgcatctgctgcggccccagcgtgacctgaagcctccttctggttctgggtagcatcatggcatctgtcaggcatgccgacgtccttctccatggtgggtgtggacacctccggtgggccatccttctcatccacagtgttcacgtatgcataggggatttggctattgaccacatccattggacatgatg

SEQ ID NO: 52656 - DNA, 405 bp, Zea mays
  unsure (1)..(405): unsure at all n locations
agctgcagaacctttcagatttgctgctgctctgaangcagtctatacaaaatgtaacatcaacaattgcattatcgcctattntgtgatgtaccggagaattttgaggcacggtgcggaacaaaaaattggccccattacaagctgaggaaaaaatggatgttattctcatagcatcatgccttgccaaaagcaaatattggagctcttgaaatattgactacaatgatacattagcttttacctaaaatgatatccttctgcaatgggatggcagttaatttcttggaaaanaaattcctcccaatctgtgtggtgattgttgattgaaattaaagccggagtgagggagatgcctgcttttgactctatggtgggtattaattgaggtagggataatgcatg

SEQ ID NO: 52657 - DNA, 483 bp, Zea mays
  unsure (1)..(483): unsure at all n locations
agcttctaaagggagaacacgtgataggtctaactaatgtaactttcanaaaagatagaccttgtgcagcttgtcatgcaggtaaacaggtgggaagctctcatcatgccaaaaatgtgatgacaacatcaagacccctagagttacttcatatggatctcttcggaccagtcgcctatctaagcataggaggaagtaagtatggtcttgttatagttgatgatttttcccgcttcacttgggtattctttttgcaggataaatctaaaacccaagggaccctcaagcgcttcctaaggagagcccaaaacgagtttgagctcaaggtgaagaagataaggagcgacaatgggtccgagttcaagaaccttcaagtggaggagtatcttgaggaggaaggaatcaagcacgagttctccgctccctacacaccacagcanaatggtgtggtagagaggaagaacaggacgctactagacatgg

SEQ ID NO: 52658 - DNA, 483 bp, Zea mays
  unsure (1)..(483): unsure at all n locations
agcttctaaaggaagagcacattntaggattaacaaatgttcattntgagaaagacaggatttgtagcgcatgccaagcagggaagcaagttggtgcccatcatccacataagaacatcatgacgactgacaggctactagagctcctacacatggatctattcggcccgattgcttacataagcatcggcgggagtaagtactgtctagttattgtggatgattattctcgcttcacttgggtattctttttgtaggaaaaatctcatacccaagagacattaaaaggattcttgagacgggctcaaaatgagttcggcttaaggatcaaaaagattagaagcgataacgggacggagttcaagaactctcanattgaaggcttccttgaggaggagggcatcaagcatgagttctcttctccctacaccccacaacaaaatggtatagtggagaggaagaatagaactctattggacatgg

SEQ ID NO: 52659 - DNA, 486 bp, Zea mays
  unsure (1)..(486): unsure at all n locations
catgcaagctttaagaagttgggtatataatcttatgttaatactatgaaacgtcttattcatcactactttgcttttagaagatggcagagatagagaaaataacttggagtatggtatgaaaaaggttcagcaaacttatacatgcaacactcaaatttgtcaagtaaattaattacatgggttgacatgagtcctaatattggaagatgtatgtaacaacgttgaaaatcctagagccaaaaatctatacttacattttttttcctaaaccttacttggtaagtgagcatactaggaaccccaccctagatgcactagtataaccctatttagacttgtggacatgtgcattaaagaatatgtgtttgccacttatttggttatcatgaaatgtcgataaataagtaactaactcttatcaatacacttgttcgagtgtgtgtgccanaggccttagcatggctagacctctaatgatggtct

SEQ ID NO: 52660 - DNA, 477 bp, Zea mays
  unsure (1)..(477): unsure at all n locations
agcttgcaggggcttaaggaactgtttatttaatcttctgtgagcacgaacatccatagaagaactatctgaactgaagctaaagatttgcatgaaatggtaatttgtacacattaagtgcatcatgcaaacagaacgagtacacagtgaaacgatacagacctcccgagtcagatttgccattcagtatggtaatgggctttgacaatgtcaaatctctgacttcttgggctaaattccgaatctaatatcaagcacgagcatgcaaagttaagtagaaatgaataattttaccgagatggaaagaagcaagagaaacttctaagcagatgctgacactgagatagtgagatgtaagatgtattccatatgaagaagagcatacctgagcttgaataagtgcaatgtcatagggacccgaagcagttccttgatttacacccttcataatctncttagaaacacaaaggtacagca

SEQ ID NO: 52661 - DNA, 191 bp, Zea mays
aatacaagctggggcacaacgatcttagagaatatgaaccttttttcttttaaaaagaccaggcccgtttgtggtcaaggttttatcacacaagagagatatattgatatcctttttccgtgggcccttgcccctatttccgtgctttatccttggcgtttgcttataaacttcttgtccttaaatggacg

SEQ ID NO: 52662 - DNA, 444 bp, Zea mays
  unsure (1)..(444): unsure at all n locations
agcttctcctgtccggaataatctacggtattccagactgtctatttagaatagttgtagatgaacctttggcacctgtagaacatataatctagagcaaactagttagtccaattatttgtgttgggcaattcaaccaccaaaattatttaggaaaaggtttgagcctatttccctttcaatctccccctttntggtgattgatgccaacacaaaccaaagcaaatatacaagtgcagattgaactagtttgcataaggtaagtgcaaaggttacttggaattagacaaatttgcatttcataagatatgcatgaattgctttcttcatatnctaacatttggaccacgcttgcaccacttgttttgtttctgcacatgtttnttgaaattctttntcaaagtctttttgcaaatagtcaaagtatatgaataagaatgaaag

SEQ ID NO: 52663 - DNA, 418 bp, Zea mays
catgcaagctataacacaatatatagatatttatcgttacatgcaatcattatcatgcttgtgagagcaagaattcaaacttacgagtactgtacttctaccatatgggagaagcccccaagctatgaatgacatctaagaaacaatccattcaaaggtcttcaatttcatgcttttgagattatcatttgcactctaaagtacctggcattattgagagcaccaaaggctgtatgatctatgacaccggctagaggggggtgaatagacgattacgactaagagtaaaaacactagagaaatttactcaatatggcacgatgtataaattctctagagacaacaagtaagcaatctatgagacacaactatggtaattgtatacaagagagacaatacacgaaatactgattacttg

SEQ ID NO: 52664 - DNA, 438 bp, Zea mays
  unsure (1)..(438): unsure at all n locations
agcttannaaaatctggtatgaatctgcgattatatccagcttatccaagaaaactccggacttggtgaacagttgttgggggtttccattccagaatatctttgatcttgctaggatctaccgcaattcctttagctgataacacgtgccccaaaaattgaatttctttcagccagaacgcgcacttactgaacttggcatataactggtgttccctcaggcgcgtcaatacaatccgtagatgctgagcatggtcctcttcattcttagaatatatcaagatatcgtcgatgaagactaccacgaatttgtccaactcgggcatgaacaccgagttcatcaagtaggtgaaatgggcaggagcatttgtaagcccgaaagacattactaagtattcaaacaatccataccgcgtagtaaacgcggtcttcggtata

SEQ ID NO: 52665 - DNA, 400 bp, Zea mays
  unsure (1)..(400): unsure at all n locations
acctgaggcatgcaagcttntaaaaggagatcatgtgttaggactaaccaatgtctgttttgagaaagacagaccttgtgtagcatgtcaagcagggaaacaggtgggaagcactcatcacggcaagaatgtgatgacaacatcaagaccaccggagcttcttcacatggacctctttggacctgttgcctaccttagcatcggaggaaataagaatggtcttgtaattgttgatgatttttcccgcttcacttgggtgttctttttgcaggatacatcagaaacccaagggaccctaaagcgctttctaaggagggctcataacgaatttgagctaaaggtgaacaagattatgagcgaccacgggtccgagttcaagactctgtcagttgaggagtat

SEQ ID NO: 52666 - DNA, 101 bp, Zea mays
ggacactaatactaactgctgccgcagtcactctaagatccccgttccatctcattaccccatatgaggctttacattaacggccgcgtttaaacgctgac

SEQ ID NO: 52667 - DNA, 381 bp, Zea mays
  unsure (1)..(381): unsure at all n locations
agcttctggataagttttattacgaacatatgactntagctttcctaagtacctacaacacaaacaaaataactaaattattagattgaacaaccaaaatatttgtataacgaatattgttactatagctcattagtacctctcagtataatacatccatcgataattgactggtccagcaatcttacattcagccacaagatgaactattaaatgaaccatcaccgtgaaaaaaccaggaggaaaaaccatctccattttgcatagagtaataataatagatttttccaaatggtccaactcatcgacacggagaacttttgaacatatccctcgaanaaatgcagacaactcanacagtagtgctgtaatatcatctgg

SEQ ID NO: 52668 - DNA, 341 bp, Zea mays
  unsure (1)..(341): unsure at all n locations
agcttagtattagtttctattgagttagaactgataacgaanatatcagtatcggttctaattgctgagactctaagaggagtattagtgcatgtacaactacatttaatatgggatatcttgaggagtttataagaggctaagtgaaaaaatacaagagacagtctctttgcgaagagcccgtctcttcacgactttntatacacgttgtctcttatttgtattgatgatccaaggtctcagggttgtaccttgcaatttcttagtctcttatacttggaaaaccaaactgatgtctcagaagtgtacatgcncttagtatcggttggttctctaacagg

SEQ ID NO: 52669 - DNA, 184 bp, Zea mays
  unsure (1)..(184): unsure at all n locations
ccccattttggtttcccccggtcccgttattccagacgcgcccggtttnacttatttaatttaaaatnacactaaacatataaaatcgcaacatttggntcagtgggtgtgtttaaatatctccgtacatgtggttaccgtgttcaagcccccataactacatatatagcggcacatgggctcg

SEQ ID NO: 52670 - DNA, 474 bp, Zea mays
  unsure (1)..(474): unsure at all n locations
agctntaagtgggacatggactcccataggtaatacatgcgtacagaagaagcgactacttgagcccttgaacctttacgaacaacaggcacgacttgtctgagatccccaccgaagacaatggttttaccaccgaatggcagtccagagccgacccattatatcgcgcatgctatgtaatgcccaaaatgtgtataaaaaataagaatagccaatgacgttatgaaatagtacatccagatatctcaaattacatatgagtgtggaaatttgagaactccattgtggaaaccaagaaatattttagaaaagaagtaatagaaaagattcctattcaactaaataattatgcatatcatcaaatgatgcatcataagcctttatttacatgaataataaattnggaagtaacctttacttcctatttcacaagcataatactatntttctacaaagaagganaacaatatgagt

SEQ ID NO: 52671 - DNA, 483 bp, Zea mays
  unsure (1)..(483): unsure at all n locations
agcttctaaagggagacacattntaagactaaccaatgttcattntgagaaagacagggtttgtagcgcatgccaagcaggaaagcaagttggtgcccatcatccacacaagaacatcatgacgaccgataggccactggaactcctacacatggacctattcggcccgatcgcttacataagcatcggcgggagtaagtactgtctagttattgtggatgattattctcgcttcacttgggtgttctttttgcaggaaaaatctcatacccaagaaacattaaagggattcttgagaagggctcaaaatgacttcggcttaaggatcaagaaaattagaagcgacaacgggatggagttcaagaactcacaaattgaaggcttccttgaggaggagggcatcaagcatgaattctcttctccctacaccccacaacanaatggtgtagtggagaggaagaatagaactctattggacatggg

SEQ ID NO: 52672 - DNA, 503 bp, Zea mays
  unsure (1)..(503): unsure at all n locations
ctctaagcacctgcggcatgcaagcttatagtcgctagggcttacaataaaaatgtttggctaaatcattctaggttggagatttggtgtggaagtcaatcctaccattgaagactaaggatcacaagtttgacaaatgatcttcaagttgggaagggtcttataaggttgtccaggttatttccggtaatgcatacatattagaaatattgcttggagagaagatacataaatcattgaatggtcgtttcctaaaacagtacagaatgcctaaaaagttgttgttgtaacctcatgttatatttctagaaaatatgtaaggaactaggtggttttggctcgctaaactccaccaaaaggtaggtgcaagtattgagcaccanatctggtacctagacaacaacacggtctgtgatcagattaattcaggctggagtccttatctcttgtgaggttatcctaatatatcgcaagatnttgtaggttctgcctangaacggatc

SEQ ID NO: 52673 - DNA, 411 bp, Zea mays
  unsure (1)..(411): unsure at all n locations
gagctngagacggtaacaaccgcggcatgcactattaccctttaagaaaatgtcaaggacacgaggattaccaagaggaggaagcatacgaagaaaatgaatgcctcttccaaaagcctcaaccatacctgcataaaaggtaacatccaaggtaataatcaagtcacacttcatacaaataagaagtgtagtgaatgctttgaaaaggggcacttgattagatcatgtccctatattaaaaatggcttgattattgtcggcgtttcgagaccgggggtccctggaccgacgagtaaattgtcgccgcgtgccccagcccagatgggtcggcgcgagacggagcgcgaagggggaaggcaaccggatggagaccggcgtgagaggtggaaatcccgcgcgcttcgtgtttgt

SEQ ID NO: 52674 - DNA, 231 bp, Zea mays
  unsure (1)..(231): unsure at all n locations
tgcatgtttaaatttnctggattgcatctanggcttgttctatactcattgtaaataaaccgcgcaacaaagtctgtgaataagactnaccgcgttcaaccgacagtactaattntaagcttttaacacttaaatctctacttttatgccaatgttggttcttgaaatatgcatgaggtactgcactctagggggtattcaaaactcaaatcactcatgaaaaaccttggt

SEQ ID NO: 52675 - DNA, 447 bp, Zea mays
  unsure (1)..(447): unsure at all n locations
ggatccttaagcacctgacgctgcagcttgatcataattcacaattgatagaatgagcattgatgacccacgtcttcatcgttaaacaaaaggaagctcctgtctaatgtttgcaggatgaattttacatgattctgaattctagatgacaccacgcaatgatatatagcataaacttgtacaaaaaaagcttttgagcatataatactgaaattattaaattaggagaggacaccgaacaattgatgcattagtgaagaaaattccctgccacctttaatcgttaccgtatagtatgttcatccctgttgaagtaccatcaatacatcatcaattntcaacttgttgtaatgcataaacaaaaaaaaaacatagccaccatcaaggctaaatgtctatgagaaaacaaggaacataaggcgccagtctaggtcanaaggcaatctc

SEQ ID NO: 52676 - DNA, 472 bp, Zea mays
agcttctgcttttaaaaacagtattttatcgcttccgaagatgtctgaagctgctaagaaggctgctgctgagatgaagctgagtcttgatgaagagaagaacctacggtttcttatagcgatgtcgaagtccaacacagaaaagattaccaaggaaattctggaggggctgtctgaagatactggtgacagtgaaagttatgatatggacagtagtggcgaagactccgaagatcgcccctggcgaccaagccattcagtttatggtaaatcaactatcaaagagaatcatcttgttaatatgagaggaaggtatttccgggatctgtccattgtgagggcggacgaaggggaaaaaactcgtccacaccctgaagataatgaagttgtggtgtaccgaagctttttgaaagctggattgcgactccccttgagcagcttcgtcgtggaggtgttgaaatcttcgagtcta

SEQ ID NO: 52677 - DNA, 475 bp, Zea mays
agcttcggaatactacaacttcatttttctcatgagtcgggcagggtttctctccttcgtcgaccctcacaatggataaatcccggaagtatcttcccctcatgttgacaagatgattttctttgatacctgatttgccaaaaactgaatggcttggtcgccaggggcgatcttcggagtcttcaccaccactatccacatcataactatcgctgtcatcagtatcttcagacaaaccttctaaaatctctttggtaattctttctgtgttggtcttcgacatcgctataagaaaccccaagttcttctcttcgtcaagactcagcttcatctcagcagcagccttcttatcttcagacatcttcggaaacactaaagaacttcggaaacactataaaactggtgtcaaagccgaagcttcaaaacttaaagctaggcaatcttgtgtgcaagagctataaatcgagtgatcggg

SEQ ID NO: 52678 - DNA, 371 bp, Zea mays
  unsure (1)..(371): unsure at all n locations
agcttctaaagggagaacacgtgattngcctatccatgttactttcaaaaaagatagaccttgtgcagctagtcaagcatgaaaacaagtgggaggagcgcatcacagcgataatgtgatgaccacatcaagacctctggagctgctacatatggaccttttcggacccgtcgcctatctaagcatatgaggaagccagtatggactacttattgatgatgacttttcccgcttcactcgggtattctttttgcaagacaaatntgaaacccaagggaccctaaagcgcttcctaatgagagctcataacgagtttgagctctatgtgaacaagataangagcgacaatgggtccgacttcaagaatcctc

SEQ ID NO: 52679 - DNA, 349 bp, Zea mays
  unsure (1)..(349): unsure at all n locations
agcttcnggcgagacgctgacgcggccgccgcggatgaaggtaggctgggtgaagtgagtgggcatgcgcaccctggctgatccgtcacgcgggagcagaggcggaggcgaaaggtcgaggtcgtcggtgtcgtcgagtctagctcgcttagaggcgctagggtggcgagcgctctcgatctctgcctcggaatcgtcggcgtgggtgcgaagggcggcgtcngacttcttggaggaggaaggagtggagtcgagctttggcttggaggatcggcccttgagcttggtatgagcggccgaggctgagacagtgtgggtcctttgagcggtgctgtctgggctctggctg

SEQ ID NO: 52680 - DNA, 335 bp, Zea mays
agcttgaagtatatcttcacccagtcagagttgaacatgagacaaaggcgatggcttgagcttattaaggactatgaattggaaattcattatcacccaggcaaggccaatgtggtagcagatgcactcagccataaggcttcctgtcattgtcttacgatgaagacttctgatactacgttatgccaggagatggagaagttaaacctacgaataattcagcatggaatttcaaatcaactaaagcttgagtcagtccttttgcaaggataattgatgctcaaaaggataatgagggtatgaagcacatctatgaaaagatagaggccggaaaa

SEQ ID NO: 52681 - DNA, 441 bp, Zea mays
agcttcgagtcagagacgcgaatgcgagatgtctttgcgacggaaggatttcggatggatgagtgctggcacatgaattcgtccggttctttgtgattggtccgcttcgtccgaatgcattgcgtgcacaagatttcacagcgattgtgcatagaattaattgtacacatcaaggagacttttgaatatttggtgacgatgctgatcaattttcattgtacgcttcggccagtcaaattggctactatgagctgctgcctgtgtatcgcctcggctgaatatcatctgaggactatgctctcgtcgcctagagaggaagtaacgagcagtccatgtgctcggcttcagcctcggtggcattggggcactttcacttcgagacctcgcatattccatgcctgtggaacagtactggcatcgcggtagcactgatggccacag

SEQ ID NO: 52682 - DNA, 460 bp, Zea mays
  unsure (1)..(460): unsure at all n locations
agcttctccgccagtctgagcagttcgaacgtatataacaatatcttaatgcaaaacttgaagccgaagctcaacaaaattcagatttgagaaaactactgacaagtcttcaagaaaaatgcttggaatttagcaacaactgcattcaacgattaagaaagattttttactcagttggagccagcagtgaaaaattcatcccctcagctgaagatctaccgaaaaccttcgaacatattgagggggagattgacgagctcgacgaagtcatagctgggcatggtgacttctgtgcctgngtggcttctcgagggactgctgcagctttcctgaaggctggctgcgaccatggaaagaatgtcaacaggccanatttcactttatcaccatcaatcctggatgacatccctgatctcgcccgaagtatctcgaatcgatttgtaaanatgatatggacaaa

SEQ ID NO: 52683 - DNA, 462 bp, Zea mays
  unsure (1)..(462): unsure at all n locations
agcttctttttgtcctcctttgagggcgaatgctctataagagcagcttggcgggcctctatcccgtgtgcttcttttttcctcgtaatttgtgtccattcttccgtggatgaggtggacatcggggttcttcgagtaaacgaattatttgctcctggcttgcaggaggtagtcttcgcccggggcgctggaggttgcgctatttgctgcctcattccggctttttcggagatttcgaggaaggcttcttctccggtgaatccgctatacgatgcagaattctttcttcgtctgccacagatgagatggtcccaaagtagaacatggatccagggcggagagcaatcttgtgctggaaagtgatggccattgagctagcttggaccagcgacacaccctctacctagcgcgccagatgtcggtgtttgggacccgacctcgcacccganggtacccctcgag

SEQ ID NO: 52684 - DNA, 457 bp, Zea mays
  unsure (1)..(457): unsure at all n locations
agctntaccaaatggacgtgaagagtgccttcctcaacggaccgatcaaggaggaggtctatgttgagcaacctcccggctttgaagatagtgagtaccctaaccatgtctataggctctctaaggcgctttatgggctcaagcaagccccaagagcatggtatgaatgccttagagatttccttattgctaatggcttcaaagtcggcaaggccaatcctactttgttcactaaaactcttgacaatgatttgttcgtttgccaaatttatgttgatgatatcatatttgggtctactaacgaatctacatgtgaagaatttagtaggatcatgacacanaaattcgagatgtctatgatggnggagttgaagtattttctaggattccaagtcaagcaactccaagagggcaccttcactagccaaacgaagtatactcaagacanttctaagca

SEQ ID NO: 52685 - DNA, 271 bp, Zea mays
gcatcacagggctcatgacggatgatcgacagcggatgcacacaccatctgacggtggagaagaacacgttcacctcctacgtcacgagaaatgagttccaccacttactcatattcagcgatgggaaccaacgcaaggtgaaaggtttaggcaacaacgcaatatccaatgagcactctctctctaatgtgagtttagttgagactcttggatataattaactctcctgcacccaactatgtaatatgggatacaattgtcctattacaa

SEQ ID NO: 52686 - DNA, 404 bp, Zea mays
  unsure (1)..(404): unsure at all n locations
agcttgaaactcgaaataccggagcctatattcgtttagcccaaagcccggtacctagcggataacgaaattaaatactcgattntaatttagacctaatcggataatacttgtggtacctaaactacccattaaaaccagagataattaaacccacacacctaaatgttgtttggttctatacctatggagatatcagttgaaaatttgatagcgtctctggatgttgaggaaaaagctcgggctaaggacacgggatctaaaggaggcgagggccactccagcgccaacatggttcagaggaaccacaacaagggcaaaggaaagccaaaatctaacaagcccaacaaaactaccaacttcaagaagaagaagaacaagactgaattgacatgtttcgcatg

SEQ ID NO: 52687 - DNA, 57 bp, Zea mays
attgttttccacttaggacctaaaataatcttaggaaaccgaagtgacacgcttcaa

SEQ ID NO: 52688 - DNA, 406 bp, Zea mays
agcttgacgatgactcacgtgtcttgattgcttattaggttcaacacaacgctaaggagaccaggaagtaagaagggaaggatgctgaccatgccaagcctaagaaggtaccattgctttgtttccctgtcttgttactcttgttaacgttgttttcttggctgcgtcatctgatcagaaacatggtttcaggttgtcatccccatgaaagatctcttctttcagccgccaaggcgcgcttttctactggaagatggcacttccaacggtggtggcctccgccctcgtggccgcttcaatgaccgcggacttcagtcccgcagccgcgacaacagcaccgacttccgggttcgtgctggccgtggtggcgccaatggcatggcgttcacaacgaggatgacactgc

SEQ ID NO: 52689 - DNA, 183 bp, Zea mays
aaacataatgtgcaccaagaaaatacatcggcctcgatttctcgtttgtcccagggttacatgatgacaccaatggcttccctgaaactgctgttacccaattttcaaatccttcgtcaacaagccaaatggaagcacggtctgaaatccctgaagatgctggtacacaattcagtttttata

SEQ ID NO: 52690 - DNA, 118 bp, Zea mays
actggatatatttcgccccattgcttacataaacatcggcgggagtaagtattgttttgtaataatggatgattattttcgcttcattgggtattctttttgcacgaaaaaatccaaa

SEQ ID NO: 52691 - DNA, 341 bp, Zea mays
agcttacaacataattgttccttcttcgcaacctctgaaagatattatgagaaactgagaagctactggaaggattggataatgggctgcagagctcaatgaattttgtattgattatgtccatagatcttcgattcagtcccaagcgttggcagacttcattgctgactggacgccaggggctcaggaggaagaaacgaataaagatgccgaagcatggacagtgttttgtgatgggtcttggggaaccttctgagcaagagcggctgctgtgttggtttcaccatccaaagttaatacttgttatgcggcaagacttgattttattgcacaaataatat

SEQ ID NO: 52692 - DNA, 332 bp, Zea mays
tcgacccggatctctaatcacctgcagctgaagcttaagcttttgaaagagaacacttatctattttagcaagatgcaataatgcatgagtgaaatttaagagttaactatgttgaacagggataatgcaaggactgcttctcttcttttatacaaaatgcaagagtgtatatagaggaaatttacgtcatatgtaatgaaggaataagtttacccgttgaccttacttgagacgcttcttattggctttgcctatcttgttgctaaacctatgctcatgaaatgtggaaatatttgacaaagaagttttaaactaggatcttttagcatgt

SEQ ID NO: 52693 - DNA, 152 bp, Zea mays
tttttgaaaactagcactcgaaacaatatactggagcttgctttttagtttgtccttcaagcttgtcctggacaagtgctgcacttactgcagagtgcgaagctgccacatacaacaatacaagaccccctgcacttttggagttagcgtcg

SEQ ID NO: 52694 - DNA, 75 bp, Zea mays
tattggaaacggatgtggaattggaaacgagtaaaatacgtttctggtcgtgtatcttaggggatgtttaattag

SEQ ID NO: 52695 - DNA, 307 bp, Zea mays
aacatataccttgtgcagctcgtcaagcaggtaaacaagtgggaggagcgcatcacagcatgaatgtgatgaccacatctagacccctggagctgttacatatatacctcttcggacccgtcgcctgtctaagcatatgaggaagtaagtatggtctagttattgttgatgacttttcacgcgtcacttgtgtgttcttttggcagataagtctgatacccaagggaccctcatgcgcttcctaatgagagctaaaaatgagtttgagctcttggtgaagaagatatggagcgacaacgggtccgag

SEQ ID NO: 52696 - DNA, 247 bp, Zea mays
gagcagagatatgaatcgacctgacgtgcctcggatgaaatcttcctccgaagcccctggccttttcagagaacctgaatgcttcctctcttctttggcggaaatcaattagcagctcgaatatactccgccatcttctggagcaactactacaaaggttgtggtggcttcctggcaaagattgcgctgaaagcccgggcgaaacgccttaaacatggccttatgacaaattaattgtgcactgttg

SEQ ID NO: 52697 - DNA, 448 bp, Zea mays
  unsure (1)..(448): unsure at all n locations
gaaaagcaaacttctcgttttactcgctcgtattttaccgaagtatctagaaccgcacaaggttctaactaattctcattggtgcccctatgcaatggatacccacatgatggccaagcacccggtccagttactccgtatagagacgcggtgccttctccatgcgcaagtgtgtctccgcttctggcctcctctcggatgcaccacggcatcttcaatatctagcttcctgccaaacatcatggacctcgttccctctggtacacggngtccacaccacaaactcggttggtgtgctctcgcaagactctcgccccactcggtactatattacaacagctcacccaagagatgaggggtgtggtggggttttttaaaactcactcaacttactcataacaacccatggcaagcgcataagagatctaactatcctatgcacttcgca

SEQ ID NO: 52698 - DNA, 266 bp, Zea mays
agaccacacggaatccaaccatacaatccaacatgataccgttcacatatatcgccttcatctgaaactaaaagactaaagataacctggagaaacaaaaatgctactggtaatttcattctcttcccccaataaaggtcgataatatccaatctacaaaagggagatccgacagccaaactgaaacatatgctataacatctgcagctcggttcaaaagtcaatttgtactattgcagaagcgaatatgtacacatgtctatcaa

SEQ ID NO: 52699 - DNA, 393 bp, Zea mays
ctgcagcatgcagcttcgttatctggtacgcccagcttactattttctttttttttctcatacatgaccttacgaatctaccctctaaaaagaagaaggtaatctcttgaacttggtgattagacctacttaagtacctcctaaccaggttggtacagggcacttctctagattagtgctgctagaacatgctgcgtatagatgacatgacacagtggttgattattgggagaaccctcttcttaactgctattcaatacgtttatttctctcttcaatgatcctgactatatctttgctctgtccactggaggattctatcatagtatttacacccatacacatgaggataccatagatgttgaccatatacacagtcgtcaaccaaaatta

SEQ ID NO: 52700 - DNA, 283 bp, Zea mays
tcgcatgccatgcgggaaagcaatgtggagtccatcatccacacaaaaacatcatgacgaccgacatgccgcttgagctactccacatggatctattcggcccgattgcttacataagcatcggcgggagtaagttttgtcttgtaataagtggatgattatatctcgcttcacttgggtattctttttacaggaaaaatctcaaacccaagagaccttataaggattcttgagacgggctcaaaatgagtttggcttaatgatcaagaaaataagaagcgac

SEQ ID NO: 52701 - DNA, 364 bp, Zea mays
  unsure (1)..(364): unsure at all n locations
tcaaagatgttcctanaggagcgcagagtaagttccgaatcttcaaagtcgttcctaacggaatgcagagctaaagataccacctaaatccaacgtgaagaagctcaaaagtcattcctaaaggaatgtagagcttaaatgccacctaagtaaaaggtgaagaagctccaaagtcgttcctaaagggatgcanagctganataccacctaagtaaaaggtgaagagactccaaagtcattcctaatgggatgcacaatctatgtgtgtattcgctgggtttttaccttcggcataaacatcattttgcatcatatcatcatatcataatcgatagcatcccatcctacatcattttgcaatacc

SEQ ID NO: 52702 - DNA, 302 bp, Zea mays
  unsure (1)..(302): unsure at all n locations
acactactagaaactcaagctnggatagtgtatatgctgctgtgttacgatccctttccacatgatgaaattccataccctcgaacttatcttccagctttcgaacggcagcgcaatattttcccattgaatcacttgaacaatcccattctttgtttatctggctaatgactaccagagagtcttcatataccatcaatctcttgacgcccaatgatatggcgatgtttaatccgtgtaacaaggcttcatactcggccgcgttgttagaggccgggaatagcagctggagagcatacttg

SEQ ID NO: 52703 - DNA, 381 bp, Zea mays
ggatccttaagtcacctgctgcatgcaatcttgtgcacacgccgtgaggctccacttcgttgttttggagattccttcgccggagaagccattccacccacgccggatcacttaccctcgccggagttcgtggaccgtgttatccactcatccattcttcgattccttgcgcacacatgtcgctacgtgaccccgtgaagctcaccgtgccgtctgattgaaccagatcgccgtcgtttggccggtatactcgccgtcgacgatgatacccgcctgcgctcgtggaccatgcgattccggtcacctccgacgactagccgtacctcgacgtgaccgtcatagcctccccgagccgaccccacccttcgacggacctccctc

SEQ ID NO: 52704 - DNA, 329 bp, Zea mays
  unsure (1)..(329): unsure at all n locations
caaccaagcaagtgtcgagttcaactctatcaatatctaccaagtatagctgaccctctaacactcccttaaatgctattgaatcatcacttcttctaaagacagtgacacctacatcagtaaagagacaattgtgacccatgtgacataattgagatacggaaagcaaatcgttatctaaagactctacaagaataacattggaaatagtatggtcaggtgatatatcaattgtacccaatccttngaccaaaccttgatttccatccacgaatgtgataactcgttggtgatcttggttttctatatgaagagaacatctcttctcc

SEQ ID NO: 52705 - DNA, 311 bp, Zea mays
gcatgtcaagccgggaagccagttggcactcatcatccacaccagaacattttgacgagtgacaggccactggagctcctacacatggatgtattccggccgatcacttacattaacattggcgggaagaagtattgtctacttattgcggatgattattctcgcttcacttgggtattctttttacaggaaaaatctcatacccaacagaccttcaaaggattcttgagacgagctcaaaatgagttccgcttaaagatcacaaaaattaaaagcgacatctggactgaggtcaagaactctcaaattga

SEQ ID NO: 52706 - DNA, 347 bp, Zea mays
tactcactttgaactcatactccagccatctccgctacatttattctttgttgcagggagacaattatgaagcatcttcgattgcccattgaacactaggcccccttcggaattttaattctctggatagcgattagcttcgtaatctcttcttaggaaatttcttcctcgaagcatgtcgcacaatgtaatcgcgtatgttggaaagtgctttcggggcaacagtggtcaatttcttcaacccgaattggctctgacattttattttttcgggtttcaaagctgctttagaactttagttcttcgattccaaagttgttcttggaggctctgaggcccaacttcac

SEQ ID NO: 52707 - DNA, 435 bp, Zea mays
  unsure (1)..(435): unsure at all n locations
aactctgtagtgtatgactattgattggactntnttaggatcctaaatatccattcttataatagagtgatgataaaacaagtttatcttatgggcggattgttttgtggtggaggtggggatttgaggtacagtgactacgacctgatgtcatgggtttaaaatatgtttntattttaatatatatggacactgaatctcgtgatttctataagataaaaatattagaggcggttcatagtagagcggctctataaatttattgttatatacctgaccttgctagagtaaaaatatgttatttttctattttgaaactgactatgtgatctcctattatactatatagaggtgtcncgtcataatagagtgactataaatctatttttagatgtgatacctattccatactgcttgtatatataataattgtaa

SEQ ID NO: 52708 - DNA, 401 bp, Zea mays
  unsure (1)..(401): unsure at all n locations
ctcttgggtcttcggaagttaaaggcaatgggaattttatnggcggttcttattactgattcctagggtatttctggtcatattgacaagagttgtaaagcaagagacccgaagcttgagaaatatttagacacggtccgaaggattgaggcttcctttgaagggttttctgtcaaaaatattcctcgaggagaaaatgaacatgctgatttgctagccaagtcagcagcacaggggctgcccttaccttcggaagtatttttcgaaacaataaaagcaccttcggttgaacttcttgaaagagcagtcctcaacatatctnctgtttatagtgaagactggagaactgagatcatctcttttcttcatggtaacattctttcagatgacgaagcttataa

SEQ ID NO: 52709 - DNA, 368 bp, Zea mays
  unsure (1)..(368): unsure at all n locations
ntcttatgttatacaccgatagtctcaaggcctactctcttcttctctactcatgtcaacctctgctgagcgcgctgtcatgctcaatgccaatggaaccagcgaatgatagctgggcgacttctccatcaaggctgcacgcctgaatgctgcagaggaagcatcggcgctggcagtccatgcagcgaagcaagcagcggctgcatcagatgcagcggcaatgacggcgcatgagctgcgtgacgaaatcgccgccgagaagggagaacaagaggaggactgggaggaggaagaggagatagagaggaacatgcggatgacgactccaccgcgagataggatgcgctcgcattcaccactacaggacc

SEQ ID NO: 52710 - DNA, 331 bp, Zea mays
tacacggcagatcctccatcagatacttctctcttaacaatctatactactgaagcacatgcactgtaccctgtgaaggatcacaaccagatggattttgtacaactgatcagggctatgcgcttaagagatccatttcttatggaatcggtctgatctacgatagcctctctctttaatacatcaggttggccatagaaaacaaaacaacgagataatgttcggttcgtctttcgcctcccttcttccatatgaggatgacgataatccagtgttactcgatctcagtttacatgtacaattagataatacacgcttactttgttgagct

SEQ ID NO: 52711 - DNA, 445 bp, Zea mays
atcctcttagtcacctgatgctgcaacttataaatggacgcaagagtgccttcctcattggaccaatcaaggaagaggtctatgttgagcaacctcccggctgtgaagatagtgagtatcctaaccacgtgtataaactctctaatgcgctttatgggctcaagcaagccccaagagcatggtatgaatgcctaagagaatttcttatcactaatggattcaaagtcggtaaaaccgatcctactttattcactaaaaccattgaatatgatttgtttgatgccaaattatgtcaagaatcatattgggtctactaaaaattattgtgaagagttataggacatgatcaaaattcagatgtctatatggggagttgaagattctatgatttaagcaacaactcaaagggaccttcttaccaaaaagatattaaaatttactagtt

SEQ ID NO: 52712 - DNA, 316 bp, Zea mays
  unsure (1)..(316): unsure at all n locations
ctttaaaataacaatttcatctttctccggctntggagtagtctcttctcctccgaagcgtagtagcttcttttgattttcagtaaaatagcctgactttaccatcttggacaagtcagccttcgaaacagtagatttcccgaagtccaaatggctgggtttgcttggtgtggcaaggtgataatcatcttcggagtctgtttcctcagcttcttctccttctgcttcagcgattgcttgttctgcatcatcaataagaatctttttcgaaatcaccagcccggaccgttgcatggcttcggagatagggacggtc

SEQ ID NO: 52713 - DNA, 397 bp, Zea mays
  unsure (1)..(397): unsure at all n locations
atcttccatatacaatcgcgacctatccatctctctactgtcttctgatccagagctcccatcatgcacccttcgttgcaagcaaccagtcgccaacaaacgcctgttggactgcggggaccccagtcacttcaagaacaactgcccccatttgaatgcaccaggaccaacctactccatctcggtgaatggccccatgattccatcagcacctacacccaatgcgtctccttgcaccatccaacagatcaaggctcagtaccagggcagggcccgggtcaaccacttcgactctcatgaagcccatcatgccccgggagtagtgctcggtgagttactcgttgaatttactcccgcttctgtgacttntgattcaagagcataccattcatgtata

SEQ ID NO: 52714 - DNA, 323 bp, Zea mays
gcttggggcgccctctggcgttctgccgcagccatagtaccttttctcccacctggtatcctcggggccgaacccctcgggcgtggtagcgtcgtatagactgctgataccgcgccgagtgtaataaggccacgtcccgagcctcttacagctggtccagcgagtcttctcggctggcctgcgtggcttccgtgtcgtacgactttgtactcggggaaccgtattttaagtctgcgggtaagatagcctctgccacatagactaaaaacccgtggctccgctcggcgtcgggcttagactccaaaacaccgaaggtagcttct

SEQ ID NO: 52715 - DNA, 327 bp, Zea mays
ttcaatgtttataactggcctatgccatgattttatatctctcatgtgtcttttaccctctttcttcaattctacttaattagctcacttatggttggtattatggtttcaacatttctccctttttgaaaactttattggcttggaacatgattctttatacatacacttggtagatcttttattcttaagttaatttggtgctcatgccttatctggctaacatgaaatgttaattcttgggtagcactgagagaaaccctatgtacactggggtgcacacacatggttatcgataccgttggtatctacacattaaccatgcta

SEQ ID NO: 52716 - DNA, 381 bp, Zea mays
  unsure (1)..(381): unsure at all n locations
tctttgctgcgcgccgcggtggaactgaggacacaaatactgaccgcgacattcgtcttcctgacgatgtgtgtgtgccttacagcgggagtgacactgatcttgaccacctaatagacttttcctatcccaaatcttaatgaacatatgtctgattccccccacactcacttaaaggcgatactgtcaacacgtcatgactgggtggatatgatacatgctaacatgactgatcggtntcaacgagagcatatggcggtccatattctcgatagcgccacggatgatccccatactactacccacctgatttctaaacacattgacccctaatgagctgccccttatgttttgagctcaagatggaagcctgtttattgc

SEQ ID NO: 52717 - DNA, 404 bp, Zea mays
ctttgcactaccacctatccaacacttaactctcctgtcagtcctttaattggggtgtcatccataccaccaaatcgcacaagggagctttcagcgtgtataacatatattacgatactaactatcccattcatttgtgcaataacaaaattcactagctaattccgcttggccatcctaaacttaaggttacaaattatttgtttcaactatgaaataattcaaagcattcatgttgtacatttgtataagtaatggatttgcacccatcctttagtgtgtttaactatgttcatgacacataactcaagccattatcatataagtgtacccaaacagatgtttcatcattgtgttctattaatcattcacctgaattatggtgcaacatgtcattcttcttc

SEQ ID NO: 52718 - DNA, 398 bp, Zea mays
tcatctgcggatgaaagagcatctcccatcttttctctttactataaatgccagatgagatgatgcgtgatgcatcatgatgcgatgatatgatgtaaaggcgcttggattaatatgatgatagaaaaaatatcataataagactctgcatccccttatgaatgacttttgagtctattcacctttactaggtgggagtttagctctacatccccttaggaacgactgtggagcttcttcacctttactaggtggtattttgagctctaaatccccgtaggaacgactttgaagcctcttcacctttactaggtggtattttgagctctgcatacccgtgggaataacttggagctttctggcactttgtacactctatgtgaacctcagattataca

SEQ ID NO: 52719 - DNA, 441 bp, Zea mays
  unsure (1)..(441): unsure at all n locations
tgcttctggatggcgagcacatcttgngactaacctttgttcattttgagaaagacagggtttgtagtgcatgtcaagtatggaagcaagttggtgttcatcatccacacaagaacatcatggcgaccgacaggccacttgagctactccacatgtgacctattcggcccgatagcttatataagcatcgacgagagtaagtactgtctagctattgtggatgattattctcgcttcacttggatgtgtcttttgcatggaaaatcacaaacccaacagaccttaaagggattcttgagacgggctcataatgagttcgatttaaggatcaaaaagattagaagcgacaatgggacagagttcatgaactcacaaatagaatgctntcttgaggacgaaggcatcaatcatgagttctcttctctctacacacctcaacaa

SEQ ID NO: 52720 - DNA, 408 bp, Zea mays
  unsure (1)..(408): unsure at all n locations
tgtgagagcatattaattctaaattaattattntctgtggatgcatgaccatattaagttttcttaggctactataatattatgcaaggacagtggaacaccattttccattnttacattcatatattatctatgaaccatttaaaactacttaatatgcattaaacatgttaaatcaccaactcagtgatacattgaccatatagcatgaaatattgaccagtcactaagcatcacacataaggtgtactgtaaacatttcaatccatttggagaactggagctacagaatccaaaataacacgaaaaacaatcatctttttttctatttaacatgggttaattaacacaccacaaaaacagggaacaacctatatggttaattatttcttaactagagatgacaac

SEQ ID NO: 52721 - DNA, 143 bp, Zea mays
aactaacttatcatggactgataggccttcttatgacctaccatgaaagctatgtgtcactcccgcttgaaaaggattacctacctgtttaacttaaagcgctttgccaacaacacaaagctggttgaatgctgaagaattct

SEQ ID NO: 52722 - DNA, 413 bp, Zea mays
gtcacctgctgcatgcatcttcacgtgcgcacgcgagctgacttcctgggcgcgctcatagcacgcctgtgcgcgaaccctcgcgcgcccgcggtcgtccgtgaccactcccgcgccacgactataaagcccgccccattgcttggctgccttacccgttgcctcctccgtacctcgcctgacttacccgatccatccattagctccggcgacctccccgtgacccgcctgtgccgcccgatagcaaccaccgtggccagcccctcttccgtcctcctgcgttcgatccaagccctcagatagcttcctggtgaggctgtgagacttgctcaagctcgacccgtggacccgcgtcaccggactatctcaatcgtgctcaccggagtttaagaacccgccggcgcacgtggacc

SEQ ID NO: 52723 - DNA, 304 bp, Zea mays
tgactagtggccaacgagtattcacaagttttatgttttgattatggtgaaacctatgcacccgtagctaggctcgagtcaattcgcatattacttgcctatgctacttaccatggctttaagctctatcaaatggacccgaaaagtgccttcctcaatggaccaatcaaagaggaggtctatgttgagcaacctcccggctttgaagatagtgagtattctaaccacgtatataaattctctaaagcgctttatgggctcaagcaagccccaagagcatggtatgaatgccttagagaatttc

SEQ ID NO: 52724 - DNA, 367 bp, Zea mays
  unsure (1)..(367): unsure at all n locations
ttaccctgtagtctggactatttgttggttacggtaggtgtgccttatgcagagtagaccattttcagcatttgcgtaatgaggactctaaggagaagccctcgtattgaaaccctggccattcaacctggaagtgaatactggtctagctaacccgggctaaaagggaatcgcgactcatggtgtaagatgtgccacctctgcagagtgaaaactgatatatcatccgcgctcacgggtatgagcaacctgcactcctcacatgataattgaactngaacatggagataaatccagatccgatgatctgctaatggtctgcttaagtgaatttcacttacgtgctttgaaaactcttgtaccttgc

SEQ ID NO: 52725 - DNA, 279 bp, Zea mays
acacgtatgaggagcgcatcacagcatgaatgtgatgactacttcaagacccctggagctgctgcatatggatctcctcggacccagctgctatctgagcataagaggaagtaagtatggtctaggtattgatgatgacttttcccgcttcacttgggtgttcatcttgcatgataagcctgaaacccaagggaccctcaagcgcctcctcatgagagctcacaatgagtgtgagctcaaggtgaagaagatgaggagcgacaacggctccgaggtcaa

SEQ ID NO: 52726 - DNA, 276 bp, Zea mays
tctacagggagaacacattctatgattaacaaacgttcattttgagaaagacaggatttgtagcgcatgccatgcatgaaagcaagctggcactcatcatccgcatatcaacattatgacgaccgattggccactggagctcctacacatggatctattcggcccgatcgcttacataagcatctgccggaagcagtactgcctaactattgtggatgattattctcgctttacctgtgtatttcttttacaggaaaaatctccaacccagaaacc

SEQ ID NO: 52727 - DNA, 256 bp, Zea mays
taaaaacaaagacgggggcaaaaaaagaaagcccgccaagcgaagagcaggcagggccaaccgggaggcccagaagcagcgacagcaggacccgggggcaacaccccccccaggggcgaaggacgcccgccgagaaccagaaaggccgaagaaacgcaaaagaggagcacgaaaaagggggaccaagaaagaaaggcaacgaaggcgacggggggggaaaccagcaaaaaaagaggaaaaaagccagaggcggcga

SEQ ID NO: 52728 - DNA, 457 bp, Zea mays
  unsure (1)..(457): unsure at all n locations
agctagactcccgatacaggcggttcatgctcagagccagttctttagaagcagaagaaggacgcacagagaagggtacaacacgtctgggtgcaaggacccttcatcaagtcaagatggtctcacattcctattaccttctcccaagaggatcttcaactcaaggattacccacacaacgatgctatggntatctcttgtgttatcaaaggatttctggtccacaatgttttggttgatacaggcagtgcaactgatatcatatttgctaaggccttcagacagatgcaagagcctgaagataaaattcttgatgccacacatcccctttgcggcttcggaggaaggcagattgtcgcactctgcaaaatttcaatgccagtgaccttcggaattatcaacaacacaaggactgaacaagttgtgtttgatattgtgacatggaaataccttacaa

SEQ ID NO: 52729 - DNA, 332 bp, Zea mays
cttgcctttccatgctggggactggatatatggacctttaagacactaagggggatacactatgtatggtataatcacaaattactaaatggataaattaagcccatgcttcttaacctctgctaaggccgtggattcatcaatacataatattcacatcgggataccaacagcattataactgacttagatccaactcacaagtcagagttttcgacttctgcgacaaagacattataacaagatgcttgtgcacatcaagccaacggatgtgacgaccaccgatatactgagcattagaaaagtcttgacaaataaattcctgaagggat

SEQ ID NO: 52730 - DNA, 173 bp, Zea mays
cagaaaggaagcatcttcggcagtccaccatataccaagaccctcaggggtattcagatccgcggcataaagcggcaccgtagcaatctgcgcctctgataatggccgtcccaaagcatgccgaacgatatagaccaagacaccctggaaggtgcttcgggagcaggcaccga

SEQ ID NO: 52731 - DNA, 406 bp, Zea mays
  unsure (1)..(406): unsure at all n locations
acactacannaaactcaagcctccgcagaaaatggaccagtacattagagtcgacaatgactttccgcttataaaggaagacgcctacatatactccgagatgaccacgggcttcggacggagactccaccctatgcatgtcacgacaatccataatcccaactcaagcaacgataggggaaatcacactcaatgccaccagcaaagctcccaatcatcagggacgcaacaaagttcctacaggccaccagctccaagatgtagaggaggaaaaagcttccgtggaagattcaactctcaaccaagaaggttgtgttgtctattctgtggagaagataanggacagggacatgccaagtcacgaaccacaagcaaaaagaaacagctgaagctgaacatgacaaat

SEQ ID NO: 52732 - DNA, 329 bp, Zea mays
  unsure (1)..(329): unsure at all n locations
acactatcagaaactcaagcccctanaaggagaacacatcttaggactaaccaatgccattttgagatatacaggtgtttgtagcgcaagccaatcaagacaacaagatggaactcatcatccacacaagaacatcatgactactgatatgccactggaccgcctacccatggatctatatcacccgattgctcacatataccctagccggaggtaatatcggctcatcgtcatggatgattattcttcgctcacttgggcatttcttattcaagaaaaatctccaacccaatagaccttataaggagtcttgagacacggcccaaatg

SEQ ID NO: 52733 - DNA, 276 bp, Zea mays
  unsure (1)..(276): unsure at all n locations
aaaggaggngagacttctagtgccaagatggcacaaaataagaactcccacgcatcacataataataataagaagaacaagcgacagaatgccacgaagcccaagcaggcgagcctcgttcaaaaagaagaacaaatgagctggttgctttgtgtgcgggagtactgatcatagggcaagcgcttggccagaccgcaaatgtaagcaagagaaataaccagcccaagagaagaaaacagtaaacatggttggtagcgagactgcagaataaacatc

SEQ ID NO: 52734 - DNA, 354 bp, Zea mays
  unsure (1)..(354): unsure at all n locations
ccttcttcttttctccatatctttaacctttgtggaacactaccccacttaaaaagaatgagggtagaactcttgaatcctggggatttgaactccttgaagtacctcataacaagggctgtataaagccttcttctgctgttgctgcttgaacaagctgcagagagatgactgacatacggttgaatctgggacaaccttcttgctatcttctcttcactatcttatnntntcttctcactttttacttttcactgcctctttatttctctattctctatccactggaggattctatcaaagagtcttacactatacattggacgaaaccaaagactatgaaccatgtacaac

SEQ ID NO: 52735 - DNA, 195 bp, Zea mays
tacttaacctccactctagtctcctacctagaaattgcatctgtgactgattatctaatgcagaattcccctctagtgtgtccctagacaccacttgtccgatcttctttggccgtagaaatcgctgcttctgtttccatgggtatttgtgctaaatcggaatattgctatatctattatttgtgcatctactgg

SEQ ID NO: 52736 - DNA, 344 bp, Zea mays
  unsure (1)..(344): unsure at all n locations
ttctaccagatctgcccttttcggactttcttctntacgaagcatgaanagaatggaacgtgtcttttcgccgaacgctcaaaaagaggtatgtgtgtatgtntcatgcatcgcacagaaataaattacaactgcttacatatttgattcaatgatacatacatcaaatgtttcataaatttgttacaaaagaagtctaatcttccttcaattgtttcatacatcaagcatttcaaaatgtcattacaatanaatctattcttatctaaagactttttctgcgactccgttcattcagttatcgatgacttcgcccgatatggagttcgtcatgcttatgatat

SEQ ID NO: 52737 - DNA, 344 bp, Zea mays
  unsure (1)..(344): unsure at all n locations
ctcaacttcttcagataatggatgaatacattaaaccctgcaacgatctttcgcacataagggaacaagcccacagatactctangatgaccacgggcttcacaggaagactccaccctatgcatgtcaggacgatccataacccagctcaagcgacgataggggaaaacatacccataggcaacaacatagctcttaatcatcaggagcataacacaagtcttttaagccaccatcttccatatgctgatggggcaaaacctccaaagaagatatggtattcagccaggggactggtcttgccattctgtggcaagataaggacctgcccaaaaggactgcca

SEQ ID NO: 52738 - DNA, 200 bp, Zea mays
acatgactacaagcagaggtgttctcaacatcaacatcaagatcaatgcctgcaccgcctgacactataccactataatatgggggtgttcgggtacccatagattttgaacacttgcatactgcacaaataccaacacaaatcttattatcaaactattgtgggattgcgagattttggcacaaaacccaatgccaaac

SEQ ID NO: 52739 - DNA, 328 bp, Zea mays
caaggaattctctgaaattctattataagaacaatctccttatatttattgcattaatgcttccatcaaagcaaagatatcttgcaccttttaactcataaaaatggcacataagtacctgtcgacgggatattttgtttgcctttccttctttactcaaatcgatatcaacatgtacttcttctgtttctctcccaagacttacctgcattaaatagtcaagtatggttacaagtataaagtaatgatattattataaaaaatgtgatctctaactaagttggttagataagctatatagccagctgtgtgagcaaatttaatctat

SEQ ID NO: 52740 - DNA, 316 bp, Zea mays
  unsure (1)..(316): unsure at all n locations
tctgatgttaatatanaaccggatttaacttattccgattattctgttaagattgtagatcaacaagaaagggttacccgcagaataacaatcaaattctacaaagtgcaatggaataagcattctgaagacgaagctacatgggaatctgaagagtttctaaatagtcacgctcctaagtttttaaaatcctgtaaggcttaaattcggtataatctatatctaatgcaaaccacccggggcccccacaccccttccttgttacagaaattaggaaatgagatcttgatgtgtttccttttccactacttatcca

SEQ ID NO: 52741 - DNA, 472 bp, Zea mays
  unsure (1)..(472): unsure at all n locations
atggtttttatgtataaaaatatatccagaatgtatttaattcatagaaattccatttttactcctttttaacccattccagttgcaataatcttatattaatattgtatatcaactagtaacactgtttagccatgaaactataattaaaattgttcattaggattaatctattctaagcactaaataatttcggaaattcataacttaataatcttaattccgattgtagtggttcttatttctacgatctcgttacgcagcgtagaatattattccacagtttattcttatgtttggtgtgatgttaattctgcctataccatgttngtttgtattgctacgactagcgtgaggtcatgagtcatctgaagatcatcctggtacctggaatctcaagtnccaagcatgttgtgcccttggtcaacttctttacccactcatgttctaattaatcataatgatctgcata

SEQ ID NO: 52742 - DNA, 321 bp, Zea mays
acaactagcgcaagcgtgagccgtcttctccatcggatgagtttggtgaatcaaagtactcggaggaggagttctccttccagcccgaagggtctccggctcccgtctcttccccggcgtcgtccgatgactcggacgactcccacgggatatccgcggatgtctggacatacattcgggccgtcgagcgcgcctggctccaaagctccgatgagtcggaatactcctcggatgacgacgactcggaccggggccaacacggtgaatactaccactactactaccatgatgacgacgaccgcgactgcacctgcaaagccg

SEQ ID NO: 52743 - DNA, 159 bp, Zea mays
taagtctctttgaaatcttcaagggtaaatgctcaaaatgtttgcaacatgctttgataagtgcataaactgtcatgagcatcacacttatactatgacacaatgcacttcacattctgtatgatatagatatgttctcattaacctaaatatgtgcaa

SEQ ID NO: 52744 - DNA, 426 bp, Zea mays
  unsure (1)..(426): unsure at all n locations
ttcgcctatacaccacccacaatccttctgtttcttggatctcgccaacggcaaaattttcacagccgtcaagaaaatgctcctcaacgacaaataatgcaagtggccctacctgttanacgaagtggtctgggcgctgaacactactgattgcatggcgactgggttcaccccttttcgccttctatacggatcagatgctatgactccgcaagaaataaaacatgggtcaccacgaacagtcgcatcggtcgtccccgacgtatacgatcctacttcgaatgacctcatctactgagaccgtgtcttcgcctacatgctctgaacaataccattctcatacaataacatggcgcgaccacacagtcatcccgatggaattcaacaaaggagacctcgtactcgtccggacagctcggacatatt

SEQ ID NO: 52745 - DNA, 411 bp, Zea mays
  unsure (1)..(411): unsure at all n locations
acctcaccctataatctttcaagcaacttcacacatctcgtcanttaaccaaccctaaatcaaaacttcttaacattaccaacattgtcatcaccataactatctcctcctagaacaaattctgtgtctatatcaacatcactttccgcatcttgtataagacggacattaaaccttaatacattcttcctttcctttaatctcattttatctaattgatttttcttgcttacaacacaggcaagagcgactgacagcatgagcgccttgttagcctgatacactatgatcttgatccattataataaacactggtaaaatgggaatgccacatacaagacggcactaacacatggtacagaactcataaccaaaattgcttataaactactaataccactaatgccgcta

SEQ ID NO: 52746 - DNA, 429 bp, Zea mays
  unsure (1)..(429): unsure at all n locations
tcgaattcatcaactcttcccacatgaacaatanacgtctgttactgatctttgattaacttgcgatcatcaaaagagaaatcctccaaatatatctccgtaagactagtaagcttattcacatcaaacttgctgaatgaatctctcggatcaagacaagcaaaacaagtaagcaattcggaggatacctcatagaattgatgatccaactctgatataacagagtcaatagcagcatataagatatcaacacgataaaaatgatctcgagtgatattatttcttcctcctcttcttgactgaccaaatcttggtattggaccatccatatctggtataataataccagcttccacacataaagctttgacttcttcaaacaatggaatcccaccttcacntctcaaatcattctaaccaattcttaca

SEQ ID NO: 52747 - DNA, 248 bp, Zea mays
  unsure (1)..(248): unsure at all n locations
tctgaaaattatgctgccaaagatacgagtagcatccaagaagattcaaatgatgacgtgacctctcgaacaaatgaagtgcatgtatactgcctgtatgtcaatgattaaatatcatcagctacaatataataatattcaagctcctgctaatggctngtagaacatggttcatgtcgagcaacagcaacaacaatctggccatagaagtcttggacgaactcaagtccatacatctgcaccacatg

SEQ ID NO: 52748 - DNA, 435 bp, Zea mays
  unsure (1)..(435): unsure at all n locations
agtctttgatgaacgaaccatctcctcattgtctagcttttatgcgtcgatggggagcctacttgacgtatactcttctttcttctcctccgtcgctttgaatgcgatgggttgcacctcatgtgtggaggtggcgcctctctcaatgatttgtttggagcctttgatcatcaattcaaagatcacaaactttcctatcacttcctcgggagacattagtttatatctatgatcaccacgaattaattgaacttgagtaggaataagaaaaacgagtgatcttagaataaccttgaccatttcatggtcatcccattttgtgctcccgaggttgcgcacttggttcaccaatgtcttgagccggatgtacatagctngtggctcctctccttggttgagcataaatcgaccgatctcaccctcgatcgtctctcg

SEQ ID NO: 52749 - DNA, 129 bp, Zea mays
  unsure (1)..(129): unsure at all n locations
tggncgcaagactcccaccactgtgagcgatctgatggtcatcgcttctcaattcagctctggccacgacgccggcgaagccatctttctgatagacaaacaaccttatggccgccatcccgatgacac

SEQ ID NO: 52750 - DNA, 356 bp, Zea mays
ttaagtctctctgaaatccataaaggaaaatgctcacaatatttgcaacatgctttcataagtgcataaactgtcttgagcatcactcatatactatgacacattgcacttcacattctgtataatatagatatgttctcattaacactaatatgtgcaattggcatctaaggccataatatgtgttcctctccatgcacatacgtatggtgagaaatctatattatatagaactatgatcatgctgaattgacatatctcttgatcatatctctttcattttggtacaaatgcatatatactattattcccgcaccatgactacgactaataagtttccaagtatattactatgc

SEQ ID NO: 52751 - DNA, 313 bp, Zea mays
  unsure (1)..(313): unsure at all n locations
caatagaatcctgacctgaagaccttcccgactagtgtctttgtcgctgcgtgtattccacattgcccatcatggacctcgtccagaattcgcttcccagtagatgagagaatgcacttcatgaggacgcctgatgcacctcgtctgtttatgtctccccaatgattgggtantgagcctactgtctggcgatacgctctgctgcattnttgtcatctggttcctcttcactctttatatacctgatgaatggccttctccagtcatcagagtctgactctggttgattcacgatattactcttctgcttgat

SEQ ID NO: 52752 - DNA, 456 bp, Zea mays
  unsure (1)..(456): unsure at all n locations
atcctttagtcacctgcngctgcagcttctaagggagacccgtgataggtttgacttacgtgcaattcgaaaaagatagaccatgtgcagcttgtcaagcatgtaaacaagtgggtggagcgcatcacatcatgaatgtgatgaccacttctagacccctggatctactacatatggacctcttcggacccgtcgcatatctaagcataagaggaagtaagtatggtttagttattgttgatgacttttcccgcttcacttgtgtgttctntttgcaggataaatctgaaacccaatggaccctcaagcgcttcctcatgagagctcataatgagtttgagctcaaggtgaagaagataaggagcgacaacgggtccgagttcaagaaccttcaagtggaggagttccttgaagaggaagggatcaagcacgagttctccgctccctacacaccac

SEQ ID NO: 52753 - DNA, 476 bp, Zea mays
  unsure (1)..(476): unsure at all n locations
ttagctatacaactctagttctcaaatgcttgagttgctatcgctgttggaaatgaatagtggatcatgaatagatcgattgtgagagcacttggtgataataatacatggcctaagagcaagtatgaaaggatgtaaatctcaaaaacacaagtgttgtgacttgtatattaattatggttattatcaagagaacaaacataggtagaatgtacagaggagagaaatgcaaggatcaaataaatatgcaacgtggctttgtgatatttagcaaatgaactgtntatttgtgtgatatacaaaagaaatatatttntttgttttggtaaatcaaatcacgctgatgtgatctttcgtaattatttatgaattggttattacttatgtctggcatcgccataatagttgtattgcttctagcatcttgacatgtcatttaagattatgcaacactagagttattatcatgtacatat

SEQ ID NO: 52754 - DNA, 341 bp, Zea mays
tcacatgtgctaaatggcgatttctcagccagcccatgctagtcttagcaattaagcatgcatctagacggcctcctcttttgcaaagtcaactaaataaagtttgtcgtctagtacacccttaaaagctaatgaaccatcacttcttttaaagacagacacatctacatttctgaataaacagttatatcccatattacagagttgactcacagacaacaagttatatccaagcgactcaactaagaagacattagaaatagagtgctcggatgaaatagcaattctttctaaccctttcaccttgccttggttcccatcaccgaatattattgaatctt

SEQ ID NO: 52755 - DNA, 410 bp, Zea mays
ttatatctacctgctgcatgcaagcttattataacgatacacgatggaacgctcatgggtgattatttgacttttaaacgttaaacattggtgaaacgtgagtttaaacaacatatgaaaaatatcaatatatcataattccagacaataatatgaaggtaaataccagaacagagcgtgtagtggcttaccaaaacttcacccatgagctggattgtaccccaaaagttactaataaaccatgcccataatatagctaatggtcttaaatgcataaaacactgtgttttactgtttagaacaccacaacactaaaacgtgagttcaacctctaattagagttgtgacgtttaaacgtaatttaaacatcgattgaacgtatgtttaataacactgattctaatcatgtg

SEQ ID NO: 52756 - DNA, 390 bp, Zea mays
gatggggtacctaatcattttgagatggacagtgcatttctttattcatactaaacagcggcttagatatattgagcatgcacgccagccgccatgtgcagagcacgccggcagaacatacacatggattaggtcgtgaatataacattactaaagaaaagcaccgaactgtcgccattccaaaatcggagagcccgcattgttgtacgatctccggggctaacagttaggtgccaaccccttgcttgctcattcagcattccttgtttggtaggcagctttccttaagccggctatacctgcccacgactgccagaaacagagctgatcaatggatatgcatatatatatgcccatggtccgtcccttatactatagctatgttcgtgt

SEQ ID NO: 52757 - DNA, 438 bp, Zea mays
  unsure (1)..(438): unsure at all n locations
tgctgcatgcagctgtaaatcgactggtgtcactttttttattgtcaaagctttaccctagtacaatttaacatgttctacacaagaattggatgtgtttgctacttctaatttagcatttaaatcattgttgacacctttcatagtagaaatggtttcatgacaagtagatagttcaaaagaaagcatttcatttctcttaacttctaaagcataagatttttgtgcctcaacaaatttatcatgctcttcatataacanatcctcttgcttttctaaaagtatattcttttcattcaaggcatcaattaattcattaattttgtctatcttagatctatctaagcccttgacaaacatgaataatctacttcatcctcatcactagattctgcctcacttgaagaacataggtagagttgcgagtacataccttct

SEQ ID NO: 52758 - DNA, 319 bp, Zea mays
  unsure (1)..(319): unsure at all n locations
tactaagctttaagggaacacggataggcaattttgttcattctgaaaaagatagaccctgtgcagctcgtcaagcagggaaacatgtgggaggctctcatcacaccaagaatgtgatgacaacatcaagacccctggagctgctacatatggacctcttcggacccgtcgcctatctgagcataggaggcaagaagtatggtctagttatcattgatgacttttcccgcttcacttgggtgttctntttgcaggataatgttgatacccaagggactctcaagcgctttctaaggagagctcacaatgagtttgagct

SEQ ID NO: 52759 - DNA, 369 bp, Zea mays
ttaatcacctgcagcatgctagcttctataggcgaacacgtgatatgtttgacttatgtgcaattcgaaaaagatagaccttgtgcagctggtcaagcaaggaaacatgcgggatgctctcatcacaccaaaatagtgatgacaacatcaagacccctggagctgctacatatggacctcttcggaccacgcgcctatctgagcataagaggaagtaagtatggtctatgtatcgttgatgacatttcccgcttcaatggggtgtgctttttgcatgataaatctgatacccaagggaccctcaagcgcttcctcaagagagctcataatgatgttgagcttaaagtgaagaatataatgagcgacaac

SEQ ID NO: 52760 - DNA, 184 bp, Zea mays
aaagattattatattgtccacacattcttctctatgtgcatgacacccacattatatcacaacttcaagcccttccaatatggaacagagaaccaaataagcctccttttcaaaaagacaatggtgtgccatccttgccgtgacgatccttaatggcgtatcctgatagctccgttgccataaa

SEQ ID NO: 52761 - DNA, 323 bp, Zea mays
  unsure (1)..(323): unsure at all n locations
atcctctnagtcacctgatgcattgcaagctgacattgcgacctgttggaagccaatgccttccttaatgccaaggtatctcccattatataacatgcttctagacaaattataattttcattttctatctcatgctcattatatttactagttagttgtgctatgtgatcattttgttgttaattaaagctaggtgatcatggatagcatcaacatttacatctgtcatctagtacatatagagacatgatcaacagttgatgtagatgggtttgtagcattcaatttctcaatactagcatgtaaaatagcattctcattt

SEQ ID NO: 52762 - DNA, 372 bp, Zea mays
  unsure (1)..(372): unsure at all n locations
tgccttcgcctcagtataccactcgcagtccaactgagttgtggaacgcgcaaatggcaaaattttcacagctgccaagaagatgctcctcgacaattaatagggaaagtgggccgatttgttacctgaagtggtctgggcactaaacacgactgagtgcatggcgactgggttcacccctttccgccttctatatggatcggaggccatgaccccgcaagatataaaacatgggtccccacggacagtctcgtcagctgtccccgacgtggacgagcccacttcgaaggatctcatcgatggataccgcgtcttctccctacangctctaaataaatactataccctaacaaaagcatggcgtgaccacgc

SEQ ID NO: 52763 - DNA, 421 bp, Zea mays
  unsure (1)..(421): unsure at all n locations
ttaagtcacctgangcatgcaagcttcctgcacctcaaacgtgccanattaatttctgtttggcaatgaaccagaattccagaaaggcattatacataacatatatatactgatgagccaaatgtacaacattatgaggcaaaattacctggttatagtttgttagcggctggtccaaaattggaggcgacggtgtaatgaacttggggcaagcatacgagaatatctcatcataagcagcgtatgcttcatcatcatacctctgcatctttgtcatcattgcattatacttttctttcagctgggtgctaacattntcatcaatgagctcgttctgttggcacaaagatatgcaaattgccaacaatgcatacatcttgctcattttcttcagtatctgatcatactgaggggaattctg

SEQ ID NO: 52764 - DNA, 362 bp, Zea mays
  unsure (1)..(362): unsure at all n locations
tgaaaatacctatacacagtccgaaggattgaagctttcttcgtatgatnttctgataagaatatccctcgagggcaaaatgaacatgctgatttgttagccaggtcttgctcacatgggctgtcgctaccttccgatgtattcttcgaaacaataaaggcaccttcagtagagttacttgaaagagcagctcttactatttctcctgtgtacagtgaagattggagaactgaaataatttcttaccttcagggcaacttcctatcagatgacgaagcttatataaaagaatagaggcagagctcgcccgatatcattatgaaagagagctatcaacatggagtttggcccgctgtcaatgc

SEQ ID NO: 52765 - DNA, 360 bp, Zea mays
tgggtagcaaactttttctggaaagtcttatcaatgtggcggtattttcacgaattgcagctatcatatccgatcatattttggaagtgggagaaacgaattctatctctaccatatgacatttgttttgttgtttttaatttcgtgcctaaatgaacatacactgttttcattagttcatagttagagaaacaagtcgtattttatttttgtgcacctaaattgtgctatgatggttttctcaaggctagatataagaaactgatactgataaaggcttgtttactcagctcaaactcccttttataccaggatggccatatcttctgcatacgtgcctgtattgtctatatcctttaa

SEQ ID NO: 52766 - DNA, 329 bp, Zea mays
aaaactcagcttactaacatccttaagaaatgtcactatgcttcagaaacttagataatacaattggggtcatttatattatatgtgccaaagccctgactataaataacttgcccctcttgatatcaaatcatagtgcatggctcctacaagtatttaaaacttatatgcacacattcacgggggagggtactctataatctaacactttgagactaatatcttttcaaagactatttcatgtaataatctcattgtaaggaaaatgaagtcccggagaaagacaacaaacttgcactgccaaatctccaaaaactttcatgtctcac

SEQ ID NO: 52767 - DNA, 528 bp, Zea mays
  unsure (1)..(528): unsure at all n locations
gatcttatatcacctgatgcatgcaagctnggatgttcttaccagtatggatattttatctattcatggatctttntctttacgaagcatgaaaagaagggaatgtgntttttcaccgaaggctcaaaaacgatatgtatataaaagtttcatgcatcgcaaataagtgaattacaaataatttacatattagattcaaagatatacacatcgaataatacagtcttgttacaacatagctacattgaccatctaaaaatgtttttacaataagtactagtcctatttcatgatcttctccgcaacttcatttagcaatttgttaacaacttcgtcaacaatagattcggccatattaatgatctctaatgcttccttcgtttctggatcggccagatgatctaacggttccggtggcggagacagttcaactacagtggataaatataattagtctgatgccacaataaacaaatgccgaagctagatgccgcgaaataatacctatacgtctctcgcgctcttgaa

SEQ ID NO: 52768 - DNA, 408 bp, Zea mays
gggctgtcggaatcaaacgatactccagtttgaagccttgtttcgtcatataaaactttcggaagaagaaagcattaaatttccacacattcataattaaatggccagagtgcgttccattcgtatggttgagcgtgaggggggcgaaactgaagcttcggagaccgttcccatctccgaagccatgcaacgatcggggctggtgacttggaaaagacctctagtgatgatgcagaacaagcaatcgctgaaacagaagaagatattgaggaaactgatcccgaagatgattatcgcattgtcattgccagcaagcttagccactttgacttcgggatatctaatgttctgaagctgatctgttcaacatggaaaatctggcttttttactggacataaaaaaagctt

SEQ ID NO: 52769 - DNA, 335 bp, Zea mays
ttcggtaagctccggcgtatctgccgcttggacactgtccatggcggctgcaccgcgctgtccatcttcaaatatgggacctcatgggcgtcgccaacgccggcgactctcggtgtgttctgggcaccgcatccgacaacgacgtcgtcacaccgtccagctcatcatccacctgaagctcaacctcccacgtaagtcactactgatcgtgcatgaattcttgtgcgctgggacgacggtcgttgctgatgttgtgtgagtgtcctcgaacaagatttatgtagaggagtatcacatccggtggtgcaacagctatgtgtactacctcgctgatg

SEQ ID NO: 52770 - DNA, 311 bp, Zea mays
acacatcttgagactaacactgtttatccgagaattacaggatttgtagcgcatgtcaagcacggaagctcacttggcggtcatcattcacacaagaacattattattattgtcctgctccttgagctcctacccatggacctattccccccgattgctctacataagcatccgccgcagcaagaaatgtctagttatttgcggatgactatcctcgcttcactcgggccgtctttttgcacgagaaactctatacccaagaaaccttaaagggattctcgagacgagcttcaaacgaggcccgcttaagg

SEQ ID NO: 52771 - DNA, 309 bp, Zea mays
gcatattcttcaagtatttggttcactccctcattctagccactggtatgacgaagataagtcgaactgcggagcaatttggtacccaatgatttatgaaatgctttccaaaacttggctacaaattgaggtacacgatccgacactatggtttttggaacaccatgcccactaatagtaccaacaatgtacaattcggcatacacagcaaccgggtgatctgtcttgatggaataaaatgagcaattttcctcaaccgataattataacccaaaagaaacatagcttttgtagcctgggtaatccata

SEQ ID NO: 52772 - DNA, 395 bp, Zea mays
tacacaagtctaaatctctaaagttctccttttatttattttattaaataaataaaacatacatctacattagttcatattcaatcctaaaaattagagggtgcaatcagtaagtgaacctattttatctaaatagagaataattctatgaacattttgcaatttgaatcactaaatttggagttcatatgcaaaagttatgaaataaacaagtctgggaattcaaaatatgaaattagggccaattctgtgaatatttaaaagtccagggctaaatctgcaagaatacaggggcctgcgcgcaaaaaccatcgacggcaggttgatctccagtaaccgatggtctctttaaaaaactaccgcgcgaaggggtatcgggtgaatctaaccgtctg

SEQ ID NO: 52773 - DNA, 291 bp, Zea mays
tcgtttgatgagtctatgcatgaacagctacggcgtgaggacgtggacttcatctacgagtgtatatggcatgtggtgatccgaaatgcacgatacaactaagcgctcatgcgctaccatcaacggttcatgcatagtatggagctcatggtcggtgacctattcctaatgcgagtactgaaccgagaatggctccacaaactctcccgcagttgggatggaccctctatggtgacgaatgtatgacgacccgtgtgtgtccgccttgccacaaatgaatgagtgcctctt

SEQ ID NO: 52774 - DNA, 380 bp, Zea mays
  unsure (1)..(380): unsure at all n locations
agtcacctgatgcatgcaagcttctaaaggcgagcacatttcgggctatactatgttcattatgagaaagacaggattngaagtgcatgtcaatcaggatagcaagttggtgttcatcatccacacaataacatcatgacgaccgacatgccgcttgagttactccacatggagctattcggcccgatagcttacatatccatcgacgagagtaagtattgtctggttattgtggatgattattctcgcttcacttgggtgttctctttgcaggatatatctcatacccaagaaaccttatagggattctggagacgggctcacaatgagttcggcttaaggatcaacaagaatagaagcgacaactggatggagttcaa

SEQ ID NO: 52775 - DNA, 428 bp, Zea mays
  unsure (1)..(428): unsure at all n locations
ctcaagcttcggctcggncggcgggtagctctcctcggtggagatattgcacgtacggagtctgccacgttcgattaggcgtgacctcactccgctccttctcgacgcgcagtgcctcacccttgggggccgagggtacctcgggctaagccgaggatgcctcgggctgagccaacggtgcctcgggctgggccgacgccttctcgggctcgggcgtgtcgtcggtcttgacggagggttgatgcatgtctcaagagaatacatccgggggaaccgtcgttcgcctcgaggctattttagccagctcgtctgcagtctcgttgtagcgtcgggcgatgtggttgagctcgagcccgtagaacttgtcttncacgcgccgaaccttattcgcagaggctttcatcttcgggtcgctgcagtgggagttc

SEQ ID NO: 52776 - DNA, 411 bp, Zea mays
tgtgaacagtacacattcacaagggagaattcatcttcatcagatcagccgaagcctatgctcttatgtgaggacatagcagagcagaaggtgctgttaggctctcaattatccgaagagcaggagaaaaccttgataaggtttttgttcaacaacaaagatgtttttgcatggtcagctaatgatctttgcggagtaaatagggatgttattgaacactcgcttaatgttgatctatccttcagagccagaaagcagaggcttcggaaaatgtcagatgataaggccgaaggtgctcgtaacgaagttaaaagactcctcagtgcaggagtcatcagagaagtaaagtacccagaatggctcgcttacactgttatggtaaaaaacgccaatggcaaatggcgaatgtgt

SEQ ID NO: 52777 - DNA, 321 bp, Zea mays
  unsure (1)..(321): unsure at all n locations
aactataaatctaagcttgcctaacgccgggttaccgttagaattaattcacagtgcgaaatattgtttctctcgctatgagtggctcacattgatgcggataacttcgggagcaaactctaatcaatattagcaaagaaactttagagagaggaaagatgaatacaaatcatgtggaaatcaacacaagtgaacacagtgatttgttttaccgagcttcggtgtcaaagaacctattccccgttaaggaggccacanaggccgggtttatttcaaccctttcctctctcatacggtcacttacaccggatgagccttctt

SEQ ID NO: 52778 - DNA, 443 bp, Zea mays
caacttaactaaagtcatctaagagtccgcttactagagaaaaatatatgtccgcatacaatacacgcgtccggtagtctattattatcgaaatcttagacacaacatgcatttgacaatcgcttaacgaaatcgactcctacttaacatgagttggttaatcgcagttttggacttagcgaaccattttagacatcacaactcaaaaacatggggtggagcaaattaatcagcctttcctaatcattgctcaactcaaagttgttactacacacgtcacttaatatggcacatttttgggatctaacataaaagcaattacacatggcgtaaaactccataagatacatttgctctggcattaacatacccaccgacctatattcaccatacgaacgcagtacacgccgcctactgttcttaaataatcctatataagctcg

SEQ ID NO: 52779 - DNA, 352 bp, Zea mays
catattcttcttccatgaaatattacggcattcgccgtttgtctgcataactcttctgacgagcttgagctttctacatattatgaataattttctgaaccttatcctcggcctccttcaccatatcaagcctaaagaagcacctgtctccaagttcataccaatttagcggagtacgacatcgtcgtgcatataaagcttcaaagggtgccatcttgatactgtcttgatagctattattatatgaaaactccgccaagggcaatcattcatcccatgtctgtgagaagtccagaacacatgcccagatcatatcatcaagtatctggatcactctctcagactgtccact

SEQ ID NO: 52780 - DNA, 337 bp, Zea mays
  unsure (1)..(337): unsure at all n locations
accaaatggacgtgaaaagtgtcttcctctatggacctttcaaagaagaggtctatgttgagcaaactcccgactttgaagatattgagtaccctaaccatgtgtattaactctcttaggccctttatgggctcaagcaagccccaagagcatggtatgaatgcttaagagaattccttatcactaatggcttcaaagtcggaaaagccgatcctacactctttactaaaaccattgccaatgaattgttngtatgccacaattatgttgatgatatcatatttcggtctactaacaaaactacttgtgaagaggttagtatgaacatggtacaaaa

SEQ ID NO: 52781 - DNA, 297 bp, Zea mays
tcgcacctctagactaactcggttgcatcactctttgtttttcgccagcagaaaccggacctgaagaccttcccaaccagagtcctggatgttgcgtgtatcccgcattggccagcgaggacctcatttagcagttgcttcccagtaaccgaaataatgcatttcatgaggactcctatcgtgccccttctgtatagtgtttccccaatgagagtgtagtgagttgactgtcttgcgatgcgctctgctacatttttgctattcggcgtcctctcattctttatgtatctgatgatt

SEQ ID NO: 52782 - DNA, 374 bp, Zea mays
  unsure (1)..(374): unsure at all n locations
ttcgacggggatgaacgatcatcatgaactcttcttatcacgatgaatactctgaatttgtggtagtacgcatatatagtttattttatctttgtattaaatatctanttatatacctaggcctcttgatgctaaaaaagaaaataaaaaataaattaaaacacgctcgaaagagtatctttctaaagcgaattcaaactatatatatagcanaattcaagattatatggcttatttgcaggtatagtatagatagtagcgtgaccattgattgcatgatggagcgtggtgaatgcgtatgcatgagtgtgggagtagctaagtaccccgtccgttgttaacgttgttaatgtaaagtgtattagcactacagt

SEQ ID NO: 52783 - DNA, 419 bp, Zea mays
tcgagcggccatgtgcggcggctgcggcggcggcggatgtcttgttatggtctcgtcggtgtagagaggaaaggaagagatcagaatacgtgaagaagaagaatagtgtggcgacgaatgaaaactttgcataaggtgggtgactaaccagtaactcgattttattttattttagttcctaaattataaaatacaaaatctaaaatagttttcgtattttacaatttacggactcgtcgtggtttagaaaccagagataatagaatttatgttcggtggggattagcgcgaactcactccaaatgatgaatcatagagactccaacgtgtatttgagacgataggtttatactgattcagtcttgcgctctagtctaatgtagtgctgatcgtgatatcgttcttagcgtattaacgat

SEQ ID NO: 52784 - DNA, 217 bp, Zea mays
  unsure (1)..(217): unsure at all n locations
gagaaagacaggatctgtagcgcatgcctagcanggaatcaagttggagtccatcatccacacaagatcgtcatgacgaccgacaggccgcttgagctactccacatggatctattcggcccgaatgcttacttatacatctgcggggagaagtatttgcttgtaatagtggaaattattctcgcttcacttgggattctttgtaccgaaaatccca

SEQ ID NO: 52785 - DNA, 426 bp, Zea mays
  unsure (1)..(426): unsure at all n locations
tatcgaaactcaagctggggaagggtcttcatccacacatgtgctaagcggcgatgtctcagcctgtccatgctagtcttagctattaagcatgcatctataccggcctcttctttngcaaaatcaactaaataaagtttgccgtctaatacacccttaaaagctaatgaaccatcggttcttctaaagacagacacatctacatttgtaaatagacagttatatcccatatgacataatngactaacagatagcagattatatccaagactctctactaaaaatacattagagatagaatgctcactagaaattgcaattttacctaacccctttaccttgcccttgattccatcaccgaatattattgaatcctggaattcttattcttgacgtacgaaggaacaacttcttcttcccgtcata

SEQ ID NO: 52786 - DNA, 180 bp, Zea mays
aatgtaagcaaaggaagagcaaaaaacgctcttagtgtgagcaacacaggaaaagcaggaaggaacgaaggacgcaacgagggacgggagcaaacggaggcgagaaagaaggaaaagagaggagggcgaagcaaagaggggaaccaggagacgaccacaaaagacagggagggaaaagaa

SEQ ID NO: 52787 - DNA, 326 bp, Zea mays
  unsure (1)..(326): unsure at all n locations
gtctggaaccnttggaaacttttgatctgtatgtccttcaacttctgccatgatgtgattgctcctggccgaacagaggagtaccatgtttgtgcaacattcttgactgccatgacgaacgatttcgccatgactgcagtattgcccccatatgaaaataatggtgcttcgatactcatcaaaaactgcttccgatctgagcgcccatcatacatggcgagttggggtggcttgtatgatgggggccatggagtggcctgcagttctgctgacagacgagaagcatcatcaaaagccaaatttccatgatggaaatcatcatacca

SEQ ID NO: 52788 - DNA, 327 bp, Zea mays
gttctgaaaaattaccaggttgaccttcatcaaatgactcccgaagcaatcataagaatggtgatcttcgtctgggccgtgaggagccaaagctcggatccatatgcaaaaagtttctgcagcttgcacgaactgttatatgatacaatagctttgggtaaagaacagtatcacaatattttggctgtatatcttcgttggccgctctggtcaatctgtccctgccaacttttctgaaatgtggcctgagactggataaagatggttctacgaaaaaacgatttgaggctcgatagaattaagggatattatgcccctatctggaat

SEQ ID NO: 52789 - DNA, 315 bp, Zea mays
gcaattcttatagcgccgctctaatgtgctaactataatattacagcccctacacgcaaagaacgagatggatcaatatatataacaaatagacttatatccaaacttcattatatttccaatagtcacaatatttcggcccttcacactcgacggatgcgaggctatccacgatagcgctcttcgacactgttcaaaagcacacttcgagctttggaaaccccatacttctggccatctcccggtagacagatgattctctgttgtctgtgacgcaatataagaagtcctgctccgctgtgccattaaacacta

SEQ ID NO: 52790 - DNA, 372 bp, Zea mays
tccttcgccggagaagccagtccacgctcgtcggagctctcaccctcgtcggagtacgtggaccgggtaaaccactccaccacctttcaattccttgtgcacacagtcgctgcgtgaccccgtgatgctcaccgtgccctcggattgcaccagttcgccgtattttggccggtatactctgccgcgacgatgacacccgcctgcacgcgtggaccgggcgattccggccacctccaacgccgagccgtacctcgacgtgaccgccaaagtcttctcgagccaaccccaccctttgtcggacctccctcgccgacggtatgccgcgccgcccttttctttcccacggttactgtttcagtgatgggaatgact

SEQ ID NO: 52791 - DNA, 456 bp, Zea mays
cttcaaaatcccatatttatggccatctctcttcatacgtatatttccttgtatctacgagacagtataggaaatcatgttcgtctgtgccattgtacaccaaggcctctttcgggtattttagttcccgggcgtagtgttcggcttccatgatctcttcttcaaataacttttttctcgaagcatgtcgaataatacagtcaagatcttccgacggtgcttcgggaagaggagatttagcttttttgggtgcattcttcttctccagagccatgcctgtatctgaagattctctgtcagctctctgctcaatttcagcaggctctacctcaacgggcactgagggcccagctttcaatttagcgcgggctgttacatccttcgcaaccctcctcacaggggtaggcgttaatgccctcgctcgcttcatcacaagcgtcaacatgcttgccattc

SEQ ID NO: 52792 - DNA, 413 bp, Zea mays
atataagtattattatacagaccagggaggcacatactcctcccgagaagtcaaaagcaaaagatcctaagtggaggaccgagtcctcccgcacttcagtcttctttttcttcttttggaaccaccttggcacataagcagcaaaagtctgctacttcctcacctaaaaacaacgaatggataaaccctgagtatggaatactcagcaagtcttacccgactaaagaaaagactctcaagggtatgttggttatatgggagtcaaggtatagcttttcaatattcaaagactctgttttgcagaaatgcttactaaagtggatcacttaaaatccagttttaatttgtcaagttaagtaaaattacctgcactagagttctttctaccctatttcaatcactggtcctgcact

SEQ ID NO: 52793 - DNA, 378 bp, Zea mays
  unsure (1)..(378): unsure at all n locations
tgtgaagggtcttcatccccacatgtgctaatcggcgatgccacagtcagcccatgctagtcttagcaattaagcatgcatctagaccggactcctctnttgcaaaatcaactagaataaagttgtcgtctagtatacccttaaaagcttatgaatcatcacttcttctaaagacagacacatctacatttgtgaataaacagctatatcccatattacacagttggcttacagacaacaagttatatccaagcgactcaactaagaacacattagaaatagagtgctcggacgaaatagcacattttcctaacccttttaccttgccttgggttccatcaccgaatatgattgaatcttggggatcccttgtcttga

SEQ ID NO: 52794 - DNA, 312 bp, Zea mays
  unsure (1)..(312): unsure at all n locations
gcgcatgccattcatggaatcaagttggtgttcatcatccacataataacatcatgacgactgacatgccacttggactcctacacatggacctattctgcccgattgcttacataagcatcggcgggagtaagtactgtctaantattaaggatgattattctcgcttcacttgtgtattctgtttggaggaaaaatctcatacccaagataccttaagggattcttgatacggctcataacgagttcagcttatgatcaagaaaattgtagcgactacggacggattcataactctcaattgaagcttcc

SEQ ID NO: 52795 - DNA, 354 bp, Zea mays
  unsure (1)..(354): unsure at all n locations
tcgtcagtatccatggagcttcgtctatttattcttcattcttagcctcagcttcgncattctgtacgtattaaagtattataagcaaaattcaagtccgaaggaaaaagtaagcacaaagtatgattctgttaccggcttaagatgactccgagcttcatcaccagctttgcttcgtccaccttttgtccatacttattctataaatgtattggctatgcttcgggcaaggttgggaatgttatccaaatctgctggtgataacctgaagctgggtctattgataatctctccgtgttcgtagccacacttcataaaggcaacatctgtgccccgagaagctatccaggcaca

SEQ ID NO: 52796 - DNA, 355 bp, Zea mays
tgatatggtgatagaggcccacgaacaggctcagaaaattattcataatatgaagaaaacacaagctcgtcagaatgtgtatgcatacaaaccacgaatgcccttatattttcatgaaggagactatgtctacctaaaagtgtcacccatgaagggagtatcgcgtttcagggttaaagggatgcttgcacccatggacattggtccattcctggtgcttgagcaatgtggaccattggcataccgactccaactacccgatacattgtctgctgtgcataatgtgttccacgtgtcacaattgaagatgtgtcttcgggttcctgatcgaaccgttgaattaacatatgttgtc

SEQ ID NO: 52797 - DNA, 438 bp, Zea mays
  unsure (1)..(438): unsure at all n locations
agctgacgataagatgttagtgcaatagaacctagtggctatagagcgagctcttgcgaatcacaattatcacagagaatgacaacacatgagacacagtggttttatctcgtggttcggccaagtataacacttgcctacttccacgttgtggcgtcccaatggacgatggttgcaatcaacccctttcaagtgatccaatgatcaacttgaataccacggtgttcttatagttntcttcccgtttgtgaggaatctccacaagttagagcctctcacccttacaagattattcacaaagaaagcatggagtaagattgggaagagcaatgcacactataattaaatccacaccgcatacacgcacacaagtgagaagatgagcacacataacacgcgcaatgagtttacaactcataaagtgctccaatctcaaga

SEQ ID NO: 52798 - DNA, 353 bp, Zea mays
  unsure (1)..(353): unsure at all n locations
ntagcgaggcgcttgccaagtgcttggtgaatcgcctctttcggatatgggtgtcgatctcgcggagtcgagtcgagtttactcatggtaagtcgatccattgttctcgttagtcggatgaatgattatttgtgtggatatataaggcttgtgctattaaattgatttgtgttgcgtgaatgaaattattttcatgagtatgtatgtctcgtattatgaaacttattaaagatattcatggtgtttgtaggtggattatgcctatagtattttggtaaagatatttctcaagtatagatgaattggttattcgatattgaatggatgataaagtaataatgtaaaacaaccgt

SEQ ID NO: 52799 - DNA, 404 bp, Zea mays
  unsure (1)..(404): unsure at all n locations
ctcaccatatcagtgtttgccaaccactctgggtatttacctctctaataactccgacactgatgagtcttttcacttcattccgagcaccttctgccttgtcatcatacatcttacgaagcctctgcttcctaggtctgaatgatggatcaacattgagcgagtgctcaataacatccctgttaactccacaaagatcattatctgaccaagcataaacatatttattgttgaacaataaccttatcaatgttctctcctgctcttcagacaatngagatcccaatagcaccttctgctctgctatatcctcacataagagcatgggtttcggctggtcaaccgaagcaactgtttcccttctgaaactgattgctcacaagcttcgagttcatctattatat

SEQ ID NO: 52800 - DNA, 389 bp, Zea mays
  unsure (1)..(389): unsure at all n locations
tcagctccatctatattatggatttgctttgagtcagtttatcttccctcggcctttctggcaacttgctgactttcatgaatagcaatgggtccttgatccgaatgtatcttcatgcanaggtaagcacgatgaagaattgcttcgaaagcattgagggtgccacgaccaataattgcattataagggtattccatgtcaacaatgtcaaacacaacttgctcagttctggtgttgttgatgaatccgatggtcacccgcatggtgatcttgcccaatgctacaatctgtcttcctccgaacccacagagagggtgtgtagcatcatgaatcttatcttttggttcttgcattcgtctgacagccttagcaaatataatatcagctgc

SEQ ID NO: 52801 - DNA, 314 bp, Zea mays
cacttcaatgcgactctacgaagctcccataccagatatcgttcctcgattgcggctgccggagggctccatggtggcggcccgctcggattctctctcctctatttctctcgcgacggaggtggctacgcttacgtcgctcgagtatggcttgattcaaggaatccaaggacacgggaggggaagctttatatcccaagttggcatatgtcatcccacccccacgatatttggagcggacgcgtagatctcgcaacctccatgcgagggcaacggacttggttgcgtgaagctgggggaaagagctggccaac

SEQ ID NO: 52802 - DNA, 495 bp, Zea mays
  unsure (1)..(495): unsure at all n locations
gatcttaagtcacctgagctgcagctgtgaaattcttacgtncacatgtgctagtctgcgatgccatagcctgcccatgttagtcttagcaattaagcaagtgtcgagttcagctctatcaaaatctaccaagtatagctgaccctctaacactcccttaaatgctattgaatcatcacttcttctaaagacagtaacacctgtatccgtatagagacagttgtaacccattttgcataattgcgaaactgaaagcaagttgtaatataaagaatctacaagaaaaacattggaaatggagtggtcatgagatataacaatnttacccaatcctgtgaccaaaccttgatttccatccccgaatgtgatagctacgtggggatcttggtttttctcgtaggaggagaacatcttcttctcccctgtcatatgtgttgtgcacccgctatcgatgatccaacttgatcccccggatgcataaacctacaaaacaag

SEQ ID NO: 52803 - DNA, 361 bp, Zea mays
  unsure (1)..(361): unsure at all n locations
tattgaaagggaaataggcttacaccttntcctaattgattttggtggttgaattgcccaacacaaacaattgaactaactagtttgctctagattataagttttacaggtgccaaaggttcacaattgaccaataaaatgaccaagaaagggttcaaacaaagagagcaaaagacaaccgaagcgtgccctggtctggcgtaccggactgtccggtgtgccaccggacaatgtccggtgtaccagggaactcagctccaaactcgtcaccttcgggaaaatcagagggcgctccgctataattcaccagactgtccggtgaggcaccggacagtgttcggtgtgccagcggagcaacagc

SEQ ID NO: 52804 - DNA, 303 bp, Zea mays
  unsure (1)..(303): unsure at all n locations
tataatcctgacctgaagaccttcccgactagtgttctggaggctgcatgtattccacattgcccagcatagaacctctccataagttgcttcccagtggactggagaatgcacttcatgatgacgcctgatgcaccccttctgtacaatgtctccccaatgattgtatagtgagccgactgtctggcaatgcgctctgccgagttcttgtcgtctggttctcttcattcttatatacttgatgaatggcctttccaatcatcagagtctgactcgggtngatctataatgttgcactcttct

SEQ ID NO: 52805 - DNA, 210 bp, Zea mays
caactacgggcatagttcatcaatccaaccttgacttggaatacctttggcacaagcgtcttgttactgcacccaccatgctatattgctgtgtggatacccattggacctaaacattttattagacgtggactaatgccatactcatcctcgggaagtggtgacccctcttgatagcagcatcaatcggatctctatgcatactcacct

SEQ ID NO: 52806 - DNA, 461 bp, Zea mays
  unsure (1)..(461): unsure at all n locations
cacacatanctcattcgaataccttcgatcatatctcttttatatgctatgactaatgagcttccaagctcatctcacaccaagtcctaggcatattgaaagggaattggagtcttccgcgaagacaaaggcttccactccgtaactcatacttcgccaccactccgacaactccttcttctttggtggagaaatgagcatctaggaaaatgacttcatccttgggggagagagtaaaagctcaaacgcaaaaagacttcgtctttggtataatcttaactcacttatttatgaccaaaggggaagactgcacttctagggctctaatgattccgcttctggcgattattgccaaccagggggagatatgagccctaagcacaatgaccgcacccccacaccaaattaaaaacttacggcttccaaaatctttatcatttcattctattgtgtccaaaggg

SEQ ID NO: 52807 - DNA, 414 bp, Zea mays
ccgatatgattggtctttttgttagtcacttcaatcactctttgatcggcttatggtgttggcaacaaaataagaatgcttgtgagtgataattggagtgactccaaggttactatactaataaaaggataaaagtctagcaagaatgataatggaccgtgatgactatgatgaaatgacacctcaccaactatttgctaagattcaacaacatgagttcgaagaagccccaatcatgactagagacaatcatgccttgatctaaaatgaacaagattcctccaagaagaacaaatatcacaagacaaaggaagtggtcaaaatatcaagtgatgaagatagttcaagtgatgaagacacgactatgttcatcaaaaccttcaagaagtgtgtaagataaatgataatatcaac

SEQ ID NO: 52808 - DNA, 351 bp, Zea mays
  unsure (1)..(351): unsure at all n locations
tctanagggagaacatgtgatacgtttgactaacgcgctattcgaatttgatagaccctgngcagcttgtcaagcaggtcaacaagtgggaggagcgcatcacagcaagaatgtgatgaccacttcaagacctctggagctgttgcatatggacctcttcggacccgtctcctatctgagcataggaaggagtaagcatggtctagttattgtagatgatttttcccgctttacttgggtgttctttttgcatgataagtctgaaacccaagggaccctcaagcgctttctcacgagagctcaaaatgaggttgagctcaacgtgaaaaaaaataggagcgacaaccggtc

SEQ ID NO: 52809 - DNA, 217 bp, Zea mays
  unsure (1)..(217): unsure at all n locations
atatcggaaaggagtgggattcggaatgctcctcctccgactctgacaatgaatgacttgccgtcacctgctttacaagntatccctcttacccatcgatcgtcacacttgtctcatggctatggagaatatagtaagcactcataatactattacttatgcttcttcaagtgaggatgaggtcaatgatgatgatgatatacattatccatgcttg

SEQ ID NO: 52810 - DNA, 285 bp, Zea mays
aggagaacacgcgatatgttcgactaacgtattattctaaaaagacagaccctgtgcaacttggtaggcatgtaaacacgcgggacgagctcattacaacaagaatgtgatgaccacactaagacccccggagctgctacctatggtactattttgacccgacggctatcttaatctaggaggaagttaatatgcgtaaattattgatgatgacttattcccgcctcacttgggtgttctttttgcaagataatgttgaaaccccaaggaccctccagcgcttcc

SEQ ID NO: 52811 - DNA, 370 bp, Zea mays
gatgcatgtttaatagctaacactaatatgagttggctctggcactgccgtctatcacaatgtggaatgaagaatcttcataagcttcttaagggagaacgtgtgttaatgaaagggaaatgtgcccttgggccatttctataaatgttgtagtgatgagattcccaacacatattgttctagttgatatgtgctaaagtgtaaagagatgcaaatcaagaatcaatgtatgtctctagccttagagaattgttttggtactaacatattcctctaagtgctaggaatcttggcaaatcaaatgagattggattggagaaggttgtcaatgcctagcacatattgcaccatcctgcgggtgcactggact

SEQ ID NO: 52812 - DNA, 434 bp, Zea mays
  unsure (1)..(434): unsure at all n locations
agcttctaaagggcaacacgtgatangtttgacttacgttcaattcgaaaaagatagaacttgtgcagctggtcaagcatgtatacaagtgggaggagcacatcacagcaagaatgtgatgaccacttcaagacccctggagctgctgcatatggacctcttctgacccgtcgcctatctgaacataggaggaagtatgtatggtctagttattgtagatgatttttcccgcttcacttgggtgttctttgtgcatgataagtctgaaacccaagggaccctcaagcgcttcctcatgagggctcaaaatgaagttgagctcaatgtgaagaagataaggagcgacaacgggtccgaggtcaagaaccttcaagtggatgaaattcctgaggatgaagggatcaagcatgagttctncgctccctacacaccac

SEQ ID NO: 52813 - DNA, 367 bp, Zea mays
  unsure (1)..(367): unsure at all n locations
ntagggtccctngagtttctgatttatcctgcaaaaagaacacccaagtgaagcgggaaaattcatcaataattacaagaccatacttacttcccccgatgctaaggtaggctatgggtcctaagaggtccatgtgaagaagctccactggtcttgatgttatcatcacattcttgctgtgatgagtgcttcccaccgtttccctgcctgacaagctgcacaaggtctatctttctcgaaacaaacattggttagtcctaacacatgttcttcctttagaagtttatgaaggttcttcatcccaacatgtgctagacggcgatgccacagccagctcatactaatcttagctaataaacatgcatct

SEQ ID NO: 52814 - DNA, 395 bp, Zea mays
taaaaataatcatgtacaaaagataacccaccatatcttccaacaccatcatctatatcgttgatcatcaagcaactcatttttccctgtatcacccaatatcttatgaaaatcaagtggtttcttgtgtaaaaagtaaatcaacaaaattcacagcatgtttagtctggtacatctccagtgagcaaaacaattatgaactatcaacagcaccaaattttggtatgtcatgaacactgtcaccatgtcaacattgtattagcaattgacagaatcagaaaagggtttcttgggcgtggtcgataagatgctatatgaagacattgtctcgtggcctaaggaagattgtgtataccccttgagctcgaaggactgggtatcttcagagctaggat

SEQ ID NO: 52815 - DNA, 450 bp, Zea mays
actcaacttaaaatatatatggacagtctaggagttatgaccttcatgcatgcatcatgcggctccactaacatatatatatataacacatgcagctaccggatagcgtcggacgctctgactatctgagcgcatggcgatggttgtatatgactcatcgtgggccaatacaatggcacacttgagcactactaaggtctcttctatgaatatcgcataccattccgcgtctacgctaataaaatcggtccaaaccatacaatttctaccatggtccaggtctagcacggcccacttaattgtgggactgggccggcacgacctaatatgtgggtcgagattgggcgttaagtcaacccacgggcagtctgcacaaccattaacaatgcccatcaggccactaacattcactactttaaccatggccgcaagcccatagaccatcacact

SEQ ID NO: 52816 - DNA, 244 bp, Zea mays
tgcagtgagccatgctattgccgaagctgggccttcaaagcctgccgataaaaaaccctctgaaattgaagagaatgcagtagatgaagaggctatataacagactttgcctgacaaagctgacgctcctactcccgaagctttaaaataaagtatcgaatatatcatctgtcatgcttcaagaaaaagactctctatagaagaagaacgagaagctcaacactatgcccagaatctgaaatat

SEQ ID NO: 52817 - DNA, 429 bp, Zea mays
taccctatcccatatccagggcatgtggccagttaagatattccttgatcatacaggcctacatacgcatccaatccttaattaacctaggtggagcatcacctgttcctatcccaagtctcaagctaagtacttccacccttaggattgttttgtgttcctaaggatgaaaagagcattatagggaactttgtagtaagatcccaccatgctcccaatgaaaatattcttgcaggtacaagtcattcttccttaggataacccttgagctacgcattattgcaaaagacaacctctatccacaagatctaagcagggctaagcatttctttatactcatatttgatactttatcacagtatctatagaggcatggatatcaaggtagtcaatgcatcaaatagtttccaagcaattcctataaactta

SEQ ID NO: 52818 - DNA, 393 bp, Zea mays
  unsure (1)..(393): unsure at all n locations
acatgtgctattcggtgatgccacagccagcccatgctagtcttatctatttagcatgcatctagaccggcctcttcttttgcaaaatcaactaaataaagtttgccgtctaatacacccttataagctagtgaaccattacttcttctaaagacagacacatctacatttgtgaatagacagttataccccatattgcataattgactgacagatagtaaattatatcctagagactctactanaaacacattagagatagagtgctcattagaaattgcaatttacctaaccctgttaccttgccttgattcccatcaccgaatatgattgaatcttgggaatccttattcttgacgtaagaggtgaacatcttcttctcccacgtcatat

SEQ ID NO: 52819 - DNA, 349 bp, Zea mays
tgattatgaagagatggcgctcgtcatcaagagctctctcctaatcctcaaacaaaggagggggaaagactacaagttccgctccaagaaggtttgctacaagtgtggtaagcccggtcactttattgctaaatgtccattatcaagtgatagtgacaggggcgacgacaagaaggggagaagaaaggagaagaagagatactacaagaagataggcggcgatgcccatgtttgtccggagtgggattccgacgagagctcaagcgacttctccgacgacgaggacgccgtcaacatctccatcacccaaggacttttctttcccaacgtccgccacaagtgtcttatg

SEQ ID NO: 52820 - DNA, 296 bp, Zea mays
tcatgcctaagtctggttaaagattgttcatcaagtggcttggtaaagatatcggctaattgatctttagtataatgtaagaaatctcgatatccccctttttgtggtgatccctaagaaaatgataccgaatggctatgtgcttattgcgactatgctcgacgggattgtcggccattttaattgcactctcattatcacatagcatatggactttgtgtaatttgtaaccgtattcccgcatggtttgcctcatacaaagcaattgcgcgcaacattgtcctgcggaatgtact

SEQ ID NO: 52821 - DNA, 287 bp, Zea mays
ctcatgatgactcacatctttgctgatatacaattgcacatatacatcctaaaagtatactcgaactggaaaacagagcacttaggctcaccgctagtgtgaccatattattttcactaggcgaatacccgggcgttgcaaccggaaaaattgtacaacactctatactatctattaacgctgtaaggggtaggctgccttctctggttctgccttcaaggaatcttgaccgttcgattgcttcagtaaatttacaccgtccggccacccacgtccacgtttgtacc

SEQ ID NO: 52822 - DNA, 249 bp, Zea mays
agattgaaagctctcttctgggttttggtggtttggatgacaacccaattaaaggactaacaagtgtgctaagtgttgaacaggtgcttaatgcaaagctaacagggttcaacacaagcgaacaagtgtgatggtccaaagactggattatctagagataatggacatcacaagtaagatggacattgcttaagtgagactcggtgtgcgtaactcagagacaatcgatcaagccaaggatggaggcaa

SEQ ID NO: 52823 - DNA, 303 bp, Zea mays
  unsure (1)..(303): unsure at all n locations
atgctagtcttaactattaagcatgcatctagaccggcctcttctttttgcaaatccactaaatagaagttgccggctaacacacccttaaaaggctagtgaaccattactttttttaaagacagacacatctacatttgtaaatagacagttataccccatatgacataattgactaacagatagcanattatatccaagactctctactaaaaatacattagatatggagtgctcattagaaattgcaattatacctaaaccttttaccttgccttgattccatcaccgatatgaatgaat

SEQ ID NO: 52824 - DNA, 195 bp, Zea mays
taagtcgcacgccgcacactagaaactcttccaccaagtctctaccactgcaggtacgtgtatcaattctgaaggcatgatccctccgacccctgtcatcaacagtaaagcgagggaaggcctcgaactcaaacggagacatcgtactaggtcgaggccagccttcgccttccgtgcaacgcacatagaaccact

SEQ ID NO: 52825 - DNA, 289 bp, Zea mays
  unsure (1)..(289): unsure at all n locations
ggacccaaggnactgagctgcagcttactgatcaagtccctgtggatttcctttttttcttctcaatctgacaaaaggtcttcgagtttcaccatagacagggccaaagcttccgtcaatgctttgccgccattggctttgctggggaaatggacttatgtataactttaatagctcagccatcggttggctatattaatttgacggtgaaatgacttcaactttatatctgatataggacagaatttccaccatatgacccaattttagggataaccaacagctactc

SEQ ID NO: 52826 - DNA, 346 bp, Zea mays
caatacttgtcaaagcaacagcacatgctatcacagcggctacagaccataccagtaacctggcctttcgcatgctggggactggatatgattggacctttcaagaaagctcaagggggatatacccatgtattggtggcgattgacaaattcactaaatggatagagttcaagcccattgcttctttaacttctgctaaagcccgggaattcatacaaggcataatattcagattcgggataccaaacagtatcatcactgacttgggatccaacttcaccagttcagaattctttgacttctgcgagcaaaagagcattcagatcaagtacgcatctgtagcac

SEQ ID NO: 52827 - DNA, 324 bp, Zea mays
gtccagaattcgatcgatcgagtctccaatgtactattcctgcactccatgcgactactgcatctgaaacgtaactgttgagcacagaaaaagtccttgcggactatccacggtccaaactgtccagacccctcctttatatagataagatccaattaaatctatttatcgtttttatcttatgtattaggagtagctctagtttagccttactttagccttcctctaccttaaattttcatctctcttcggctctacatcgactagaggagtcttgtgtggcctacggacgccaagacacaccctacgatctctccttcccga

SEQ ID NO: 52828 - DNA, 432 bp, Zea mays
  unsure (1)..(432): unsure at all n locations
agcttctaaagggagaacacgtgatatgtctttctaatgtaactttcaaaaaagatagaccttgtgcagcttgtcaagcaggtaaacaggtgggaagctctcatcatgccaaaaatgtgatgacaacatcaagacccctggagttactttatatggacctattcggacccgtcgcctatctaagtatatgaggaagtaagtatggtcttgttatagttgatgactattcccacttcacttgggtattctttttgcacgataaatctgacacccaatggaccctcaagcgctttctaaggagagctcanaatgagtttgagctcaaggtgaanaatataacgagcgacaacgggtccgaatcaagaaccctcaagtggacgagtatcttgaggaggaatgaatcagcacaagttcttcgcttcctcacaccac

SEQ ID NO: 52829 - DNA, 91 bp, Zea mays
caacacgcgcgacgacagcgaggatattacaacccaaggcggcgcaaaccccaaaaccctccagggaacagcccgaccacggccactaaaa

SEQ ID NO: 52830 - DNA, 356 bp, Zea mays
  unsure (1)..(356): unsure at all n locations
agcttatatatatatcttgtacataccttattatgacatgnaantgnattggcatcttccatcccatcgccagcattattgttattcaactcttcttcctggtacaaaataacatgttactatgcataatttatgttacaaatagtataacactataacatctgcaatattattaccttgtcttcctcattatcactaacatttgttgactcattacatccaatatctggctccaatcggcttaaaacgacatcgagctcatccaacacatccattgccttatcgtaccctgcttttgacatacacgcctggcgaactactttcatatgtttcgtaacaacattttctgtctgtat

SEQ ID NO: 52831 - DNA, 342 bp, Zea mays
  unsure (1)..(342): unsure at all n locations
agcttcggcttcatctatattatggatagccttcgaatccgcccaaaaccctttagcccttctggcagcttcttgactcccgtgaacaacaataggcccttggtccgaaggtatcttcatacacaaatatgttggatgaagtattgctttgaaggcattaagcgtccttcgaccaatgattgcattgtatggatactccatatcaacaatgtcaaagacaacctgttcagttcttgtgttatggacatagctgaaggtaactgacattgntatcttgccaagtgccacaatcttgtcttcttcanaaccacatagggggtgtgttgcatcatgtatcttatc

SEQ ID NO: 52832 - DNA, 389 bp, Zea mays
  unsure (1)..(389): unsure at all n locations
gtgatatttgataccttgtgtgaaagatattgtacaaagaatgtcagcaattcaaccaatgatatttatntagaatggtctcttcttgatgttcttaattgaatacgaagacgaacacataattcactgcaagttccaaccaatttttcttatcctcgcgaaatctatagtactaagcttgtctgttttagacagcttgcaagctcaccctgttntaccctttggagttgataaccatgtggttcgaccaattacccaaccacaaaaatgtctacatacacgtgtgtattaaagatacacccacctaggaaaaaggaaccatttatgcactgtgtttccttgtactactactgtcatggaggcccaaatgaaggcatggacactgttca

SEQ ID NO: 52833 - DNA, 332 bp, Zea mays
  unsure (1)..(332): unsure at all n locations
gatatgattcataggcgaatgaagctcaaatattggacctcgaacatcaaanaagtttattattggggtattgagtacaaaatgctcttatattgacttattgagtacaacccattctcataatatatacaccatatttcttagaaaaaggtaatactttcatagataatggaagaggtaacatatactaatatctattatgactaacgaacattagatggtctaatcattaactatatatgatagacgactatgtattaataaaatgtggtagcagattatcattccatatgtgaagaaaccaaacanatgatactgtcagttgattttgt

SEQ ID NO: 52834 - DNA, 228 bp, Zea mays
attttttggaagaaagactatatttcctgcgtagctaaaaaactcaacatttgtgtgatgtaatatgcattcaagataaacattgtatatctatgtgtaatacaatgcaaaatatttatctgcgatgccatgaatttgcggacataccatatttgagcctctggcgaaaaaacacctttccttcttgtcatgcttcagaaagaacaaagcccttctacaccaagctgt

SEQ ID NO: 52835 - DNA, 445 bp, Zea mays
tcggaccttaagtcactgggctgcagcttggatccttagttggataagtgttattattttgctagagtggcagccatacacatctatgaaccaaacatgaaggttgaccctgctatgaatgtgatgatcattctttcactgaaatcccctacctatcaccgacactggtgatgtgtctcgaacaacaagtatattgtgagggtacctggagtatgatagacgggcttcaacataaggcagaatatacgtacatctagttaggcatgttgccttttgttggattgctagttatgatgtacttgatcgtgtttgtttgtgtggtttaaaggggtactctgcctctattatatagttagagggtaggtgataagttgagtctactcccaaagtagagagctctatcctatataaaagtcttccttttgacaggtgaagccttgcttgc

SEQ ID NO: 52836 - DNA, 191 bp, Zea mays
  unsure (1)..(191): unsure at all n locations
tcatcaagtggcttggtaaagatatcggctaattgatctttagtattaaatgaagaaatctcgatatcccccttttgttggtgatccctaagaaaatgataccgaatggctatgtgcttagtgccgctatgctcgacgggattgtcggccattntgattgcactctcattatcacatagcanagggacttt

SEQ ID NO: 52837 - DNA, 319 bp, Zea mays
  unsure (1)..(319): unsure at all n locations
agaaagacaggatttgtagcgcatgttatgcacggaagcatgttggtattcatcatccacaaaagaacataatgacgactaacagaccactcgagcttctacacatggatctattcggcctgattgttacataagcatcagcgggagtaagtactgtctagttattgtggatgattattctcgcttcactcgggtgttctttttgtaggaaaaatctcatacctaagagaccttaaagggattcctgagacaggctcnaaatgagttcggcttaagaataaataagattagaagcgacaacgggacggagttcaagaac

SEQ ID NO: 52838 - DNA, 377 bp, Zea mays
  unsure (1)..(377): unsure at all n locations
gcagcttacttctgccttgcacactttcattttactaagcattctncaaagatcgacttcgtattcaattcatgtcattgatgcaatatgatgtatgatgtgatgttatgcgaagtgatgtgatgatatgatgcaaaatgatgaggatgtcgaagacacatacccacatgcccacactgaaacacacaagctctgcattcccttaggaacgactntggagccttcttcaccatttatttttcggtgttcaccgtttatttttttgtgtaagtttctgcatcccttaggaacgtcttttgaacttcttcgccttctatttcggtggtatataatctgcatccccttaggaacgactttggaacttttttcgcttatat

SEQ ID NO: 52839 - DNA, 385 bp, Zea mays
  unsure (1)..(385): unsure at all n locations
tgttataatagaaggggaactatacaagcgtggggtctgttctccgctactcaagtggttatctaaagccgaatgtatagaattgatgaaggaaatacacgcaggcttatgtggatctcacattggatctaggcctttgcttggaaaagttttccgtcaaggaatttattggccaaaggcagcttcggatgcagcggaattagtccaaaagtgcgaaggttgtcagaaatgtgcaagagatcaaaaacaaccttcgtctttaactcagttaatacaacccacttggccgttgcaaaggtggngctcttgattggtangtccgttaccaccagcacaaggcaacttaagatatgttgtagtggcagtggaatatttttctaagtgg

SEQ ID NO: 52840 - DNA, 347 bp, Zea mays
  unsure (1)..(347): unsure at all n locations
agcttaatagagcatgctctaaatgttgaccttatcaccacgccacgaaagcagaagcttcagaagatgtctgtggataaggcaaaggtgcaaacaccgaagttaaaagattgcttagtgctggagtcataagagaagttgcatatccagaatggttggccaacacagtcatggataagaaatccaatggcaagtggaggatgtgcattgacttcacagacctcaacanagcatgcccgaaggatgaattctcactgccaagaattgattctctagtggatgcagctgccactttggagctcatgagttngttggattgctattcanggtatcatcaaatctggatg

SEQ ID NO: 52841 - DNA, 291 bp, Zea mays
gaagctatacagtagctagctccgtaatgctttccaacatcatcttttacaaaagcacgatacataacaggaaggagtctttccattattatgtggcagtcatgactcttcaacccagaaaacttgcccgtcttcaaattcacagaccttctaaagcccgcggcgtaaccatctgggaactttaagttcttcaaccatttgatcaattgtttctttcttgtaggtttaatactgacaggagcacgtggcttcttctgattctctcctatctccatagttggtcttctatag

SEQ ID NO: 52842 - DNA, 405 bp, Zea mays
agcttatcgatttgtatgaacgatgcactggtctgtgttcttcggcgccgcagccgcatttaagcgggaataatcgccttttctattaaattttttaactctcctcttttagatcatattcaaataggacttttataagtataaccttatttatactattgtaatgtccgtacgtcgcatcgtcgcaaccctgcccacaaaaaatatccccatgataagtaaatttccactgtggttataacctttttcgaacgccaacagtattaagcatatattattagattaatcacattacattatttatagtaaacctagctggagataaaaaaatgttggttgtattttctttaaacctagttaaatttgaaattagttggttcctcgaaacatgggggcgtcatttat

SEQ ID NO: 52843 - DNA, 205 bp, Zea mays
acatacatgagctattgtacgagacgaaacccctgggtaaagagcagtatcacaacaattttggctgctacagcttcggcgcccggtctgggtcaagctgtcccgtgccaacctttcgaaagaggtggcccggcgactggatgacggaatgtgtttatgtgaagaatgacttgaaatcacgggaagatataaaggtattattatg

SEQ ID NO: 52844 - DNA, 314 bp, Zea mays
cgatgccacaaccagcccatgctagtcttagctatgaagcatgcatctagaccggcctcttcttttgcaaaatcaactaaataaagtttggcgactaatacacccttaaaagctagtgaaccatcacttcttttaaagacagacacatctaaatcttgaaatagacagttatatcccatatgacataattgactaacagatagtaagctatatccaagactctctactaaaaatacattagagatagaatgctcattagaaattgcaagtttacctaaatcctttaccttggcttgattcccatcaccgaatat

SEQ ID NO: 52845 - DNA, 467 bp, Zea mays
  unsure (1)..(467): unsure at all n locations
gatccttaagcactgagcatgaagctttttaagctggttaagaattcctttttataagatgactgctgatgttatgaagaagtttgtgatctatcttcatcaactaactcctaacgctatagtaagcttagcgtttatatctgggctctccgaagccaaggggtggaaccatttgccgaaggcttctgccgagtgcacgagcttcattatcagaccaatgctagagaagatgggctgcatgaaaactttggctgctcacaatttgcctatcgcaagagtacaaaatttccagtgatcagctatcgtagcaagtggccagcacgctggaagtctgagttggtttacgtcaaagttgacgaagaaaggagaagttggtccacaatccgctagaattaatcttcngagagaccagactccagtgcaacatgacaccagtgagtccaagccacattgctctggctgaattt

SEQ ID NO: 52846 - DNA, 324 bp, Zea mays
  unsure (1)..(324): unsure at all n locations
tgcaacttataaaaaagacagaggcaagagctctaccgtataccaanagagaacgggagctataccagcacggagtttgtgcaccgccgctcaagtgccaggccagagccgaaggaataaaattgatgaacgagatacacgccaggctctggggaacccacatcggaaccaggccggaacatggaaaagtgttccgtcaaggaatctatcggccgaaggcaactatcgacgcagctgacctagcaaaaaagtgcgaaagctgccagaaatgcgcaagagatcaaaaacaaccttcgtatctgacacagctaatacaacccatct

SEQ ID NO: 52847 - DNA, 304 bp, Zea mays
  unsure (1)..(304): unsure at all n locations
gtgcatgtcaggcggggaagcaagttggagtccatcatccacacaagaacatcatgacgaccgacaggccacttgagctactccacatggatctattcggcccgattgcttacataagcatcggcgggagtaagtattgtcttgttattgtggatgattattctcgcttcacttgggtattctttntacaggaaaaatctcaaacccaagagaccttanagggattcttgagacgagctcaaaatgagttcggcttaaggatcaagaaaataagaagcgacaacgggacggagttcaagaactc

SEQ ID NO: 52848 - DNA, 178 bp, Zea mays
ggaacttaatgccatacctcagttctagtgaagttggtgagctcctatagcatcgccaccacccaatgcgaatcttgtaatgctttctctaccctgtgtggctcagtagaggaaacaaacagagtaatgctcacaataatgtgcaacacaagatctagtgttacccacttataatgtc

SEQ ID NO: 52849 - DNA, 224 bp, Zea mays
  unsure (1)..(224): unsure at all n locations
cacccgcttgggcttcgtgggcgggggaccgcgaggacaaacagtaaactctgcaggggggaccgctgcgtgctgggaaaataaaatcgttctcggcaacgagctcagggaagggtgtttttggaccttcngctccccgaagcttaagaagactttttcacggatcaagctcgttacgaaaaacgatctagcacccgcgaaaggggctactatngggtctatgc

SEQ ID NO: 52850 - DNA, 142 bp, Zea mays
tatgccgtcgtcgtgtcgtgggatggagctacaattctgcgagtgttattgtttatcggaagttttgtgagctatagctagagagttcttcgtcgtcatcagcttacgtgatcgatcgatcaagccgcgagtggatcagtct

SEQ ID NO: 52851 - DNA, 458 bp, Zea mays
  unsure (1)..(458): unsure at all n locations
tcttgaccatattcctgtattctttttgtccaaattcgaagataacctgtcacatattttacttggaaaacattgtcaaatcatatttttgaggaccttcggaagccgaaggcccccaacaataagctctctaaggcgctttatgggctcaagcaagccccaagagcatggtatgaatgcctaagagatttcttatagctaatggcttcaaagtcggaaaggccgatcctactntatntactaaaactcttgacaatgatttgtttgtatgccaaatttatgttgatgatatcatatgtgggtctactaacgaatctacatgtgaagaatttagtacgatcatgacacaaaatattcgagatgtcaatgatggcggagttgaagtatttcttatgatttcaagtgaagcaactacagaggcaccttcttagccaacgaatatacttagacattcaaac

SEQ ID NO: 52852 - DNA, 359 bp, Zea mays
  unsure (1)..(359): unsure at all n locations
ctgaacctggagaaagatacttctttagaccagatatggtgaaagaggttgaagaaaaggttcagaggattatccataatatgaagaaagctcaagcacggcaaaagagttatgcagacaaacggcgaatgcccttatattttcttgaaggagactatgtctacttgaaggtctcaccaatgaagggcgtatcgcgtttcggagataaaggaaaacttgcaccacgatatattggtccttttcttattctggaaagatatgggccagtggcgtaccgactccaactccccgaaacattgtctactgtgcacaatgntgtccacgtgtcacaactgaagaagtgtctcnggttcctgatc

SEQ ID NO: 52853 - DNA, 407 bp, Zea mays
  unsure (1)..(407): unsure at all n locations
cttgcagctcgcgcgtgcccctggtctgtctgggtctctctcatcctctccctgcgtgcctgctcgggtcctgcgctcgccggccggaaactttctactgcgcgtggagcccctcgagccgcgtctcctcagttcgtgtgcccagctcggccgcccggctcctattcctcatctctgcacgcatgaagttttccctgcgtcggcctcctgcgcgcaaagatcttctctggtcgcacgcacgaatccttgctcgccgcgcccnccagctcacctccccagctcggtctttgtttctctgcagcgtcgtacacggcaagtcatcgctgctccccatcacgccaagtcatcgcttgctcccatcacgccgtcgattccgcttgagccccttcgcgttcgtcgatgccccc

SEQ ID NO: 52854 - DNA, 259 bp, Zea mays
agcttgaaaataatgccgaagctttctggatttcttcaaaacagcatataacaccttctctaattctgtgtagtttttctttgatatactgagaacttcagatacaaaatatactgggacctgtttcctggcttggccatcaagcttctcctggacaagtgctgcacttaccgctgagtgcgaagctgccacatataataataaaggagcccctggctcaggtggaagtaatgctgttaaatctattaaatactgcttc

SEQ ID NO: 52855 - DNA, 433 bp, Zea mays
  unsure (1)..(433): unsure at all n locations
agcttttagacctaaaaagttggttgatataatataaccttacaaaagccacaaattaaggttcagcatgtcaatagttggttttcattcgctaccgctaaggttaagacttcttttaccacatctttttatatcaactttagccttctcctatctctctttgcattaacattgcgccttataatcccattacacactgtgtctctggaggtctcttggacacgtccaaaccatctcaatcagtgttggataggatttaattaattggtgatacctctagtcaatcatgtatatcatctttctagattccagactcantctcttgtgaggctatanattcaacacaacatacagtatttttgcaacacttatttgctaaacatgacgattctcttgttgccaatattctgcactatacaacatagcaagtcta

SEQ ID NO: 52856 - DNA, 365 bp, Zea mays
ttgagaaagatgttcctaatgctataagtgaagcaatcaacaagagacaagaaaaaggtaatgattcaattagtcctgttatttgcactaataatctctctatgtcatccaaaagcaaaaagagaagaggaaacaggaggtgcttcaagtgcaagagattaggtcacctcattgcttcttgtccatacaaagacaaggacgaagggataaggagatgttttggatgcaatgaaaaggaccacatgatcacctcatgtccggtcataaagaatcaaggacatgcaccctccaagatgaccctcaccaaggaacatgataaacagcaagcgtcatgtcgggttgagcaacgtttctgctatatgtgt

SEQ ID NO: 52857 - DNA, 303 bp, Zea mays
agcttgaagccatggtaagtagcatatgcttatttattcgaattgactcaagcctagctacgggtgcataagttttaccgaaatccaaaccttcgacttgggagtatcccttggccacaagtcgagctttgttccttgtcaccacaccatgctcatttttgttgtgcggaagacccatttggttcttacaaccatttgattaggacgtggaactaaatggcatacctcattcctagtgaagttgttgagcttctcttgcattgccaccacccaatccgaatcttgaagggctttctctaccct

SEQ ID NO: 52858 - DNA, 270 bp, Zea mays
  unsure (1)..(270): unsure at all n locations
tacactcatgtactggtagcaatcgacaaattcactaaatggatagagttcaaacccattgcttctttaacctcagctaaggctgtggaattcatacaagacataatattcagattcggaataccgaacagtatcataactgacctgngatccaacttcacaagttcagagttcttcgatttctgtgagcaaaagaacattcagatcaagtacgcttcggtagcacacccaagagccaacgggcaggttgaacgagctaacgggatgatc

SEQ ID NO: 52859 - DNA, 171 bp, Zea mays
  unsure (1)..(171): unsure at all n locations
caaaaaaaatcgtgttcacactctcaatagcctatttcgctcattaatcataccgagaaattacttgcctgccatcgaattcgcacatgtgtacaagtgatgcactttanatgaattaagctaagaaaaagatgaatntatcatcgagctagtataacttatnaatattta

SEQ ID NO: 52860 - DNA, 218 bp, Zea mays
  unsure (1)..(218): unsure at all n locations
atgatctttgagtagccagaatcagtgttgcaatcgcaaccagatgcccttcaagccagattttgtgaagctctatctnctcaagagtttgcaagtgaagatatgagctgaagtaagctatcccataccctttaaccaaattcgagacagattcttttagtggggagattgtaccatccaaatcacatctgaatttctcaactcctctaatcaaatga

SEQ ID NO: 52861 - DNA, 290 bp, Zea mays
cctagaacttgccgaagggcggaagtaattattctggacaactttgataaggtactaaaagatataaatgcattagccaaatttaaagacttacatcaagatatgggaaatgtacattattaaaatctcccaagcatatgtatataccaatccattttgcgcgccaagaatgtgaatttcatagaccaccattatgcttcttttgaaagattagggatatagttcgtgaatcatactcacgagaaaaactcaacttatactcgtactcataaacgttcgtgagtatggat

SEQ ID NO: 52862 - DNA, 340 bp, Zea mays
agctatatatgcgctaagcagtggtctattttcgtctaacgcctagcgcttaatataaccttggaagaaaggcagactgcccatacttccgttctgcacttaacttagctcaacaacttggtgatggagtaccaattccacgtgggaaagaaatagatggtccattattggatatgaattatgcagacgtggaggctcacatggataaattcacagaggattggaaggattatggaggtacaatatgtgtgattcttggacaggtaaacacttgtttagctagctaaccctactttatgtggttattcataaatgaccttacttttgtgtttctatgtca

SEQ ID NO: 52863 - DNA, 454 bp, Zea mays
tgcagcatgcacttatgctaagacaattcctctttttgagttgctctggtttggagatgcccagcataatgtagagctttaaacataactctttgggtgcacaacacgaaactctcccatcaactaccttggtattccaatccatttcagaacactaagaaattgtgattgggttaaagttgacgagcattttgagaagagacttagtagctggaaatggagacatctttctatcggaggtcgcctgactctgattaatctggtgcttaaatactttccgatgtatatgatggcctttttctctatacccaaaagagtgctaaagagattgattacttccgctcaatatttttggtatgagacaatacatgaagaaaacatgcttgtatatggtcattctggtcaccaaagaccaatatgccttggtatctgatctaacctaaaatgagcctac

SEQ ID NO: 52864 - DNA, 356 bp, Zea mays
agcttggtaatctgttggaacagagctggttatatttcatattataatgcgatggcttttctagatacatagcttattacgcacttagatatacgattatacattataccaagatagatagttgaagtaatttatctagaaaaaccacaacgccttataatttaaaacggatggagtactaacctcatcctcatatgtttattattagatgaacttgctagcagaggtattaagccctcttgtttaggaagatacttaagaacagttggcttctgtctacatttttagcccctcgtgacggatgtatatgataggatatgcttgtgaaagaaaaagcacggaatatagtaaaccat

SEQ ID NO: 52865 - DNA, 382 bp, Zea mays
  unsure (1)..(382): unsure at all n locations
agctntccagattgtatttaaacttccaaatctgatatgatatgtatccgcggtggcaaaaacgaaccagagatgtntttggtgatggtggatctcgtggtgaccaaaacgtggtagaactcaaaactctataggaatatactaagaccagcaactcgacacaaccgatgcaaccaanaactcaacaagccctaactaagtagtactagtaaatgctcaatggtttataggattgcggtaaaactaatctactatnntttggctntttctggactataggagataagaaaacagcgaagaaaagtaaatctctcaccgataaaccttgctctgattaccaactgatgtgcacccgttgggtgattgcccgatctttcgatga

SEQ ID NO: 52866 - DNA, 400 bp, Zea mays
  unsure (1)..(400): unsure at all n locations
gcttaccacaacacacttnatttggaatgtgtatataagggtgggttacgtccattangatataactcacacatcaaccatgagatgggagggatttatagggtcttgatgttccttagtgtctaggattgtagtctttttatcacctatgcgttatcaattgatgattatccagaggacataaggtcttatatacactgtgactcagacctctataaaaatctatgtgccaaggctctaacatcatgactttgtatacatactctatggtgctagtacttacaccatgatccccttgttattaagctagtgtgaccaatgatagtcatctcctagatgactttgatgcggcgaagaatcgttgagtggctttggtgaatggttgtggttctaatcatca

SEQ ID NO: 52867 - DNA, 436 bp, Zea mays
  unsure (1)..(436): unsure at all n locations
agctntgaattaaataagagaactgctatatatttaatattagaaggaaaaatagaagtattgtttgactacggttaacaaaatttggagaagaatatatctacctactgactcaattaaaaatgctaaacttctctgtccaccccattaagctaggttttaccctttgtttacaataggcttaagttaagacaaatagaaaatgtgaattatataatgaaccagagggtacccctaattttgttaggatacttattcaaggtagttcactggaaaaatatatcataccctatcttagtataaaataagtaggatatcctttattttaataaaacaagggaaacttagaanaaccctacaaaaataaccccaagtgacaacaccccacccttgggataaaaatgtctgctataaaacttaaaaaatataaatctgt

SEQ ID NO: 52868 - DNA, 343 bp, Zea mays
  unsure (1)..(343): unsure at all n locations
aagtctatggtgagcaaccttccggctttgaagacagtgagtattctaaccatgtctataaagctctctaaggcgctttattggctcaagcaagccccaagaacatggtatgaatgccttagagatttccttattgcaaatggctttaaaatcggcaaggccgatcctactttattcacttaaactcttgacaatgatttgtttgtatgccanatttatgttgatgatatcatatttgggtctactaacgaatctacatgtggagaatttagtaggatcatgacacacgaaatccagatgtctatgatggcggagttgaagtactttctaggattccaagtca

SEQ ID NO: 52869 - DNA, 325 bp, Zea mays
  unsure (1)..(325): unsure at all n locations
gagggaagtggagtgctattgaatggtaaagagattaatgtgcttaagttaaaggaggatacttaatttggaataatctggttaaacccactttcctattacccattcttaactaatggttttaagggtcatgaatcagtatattccctttcacttttaattaatcaccttccccccccttttttgtgctgatttgttgcaatgcatgcatgcttgaatgaacgtnctctcatcaatcataggggtgccctagggcatcccttctatcatagngttcacctatatggcctacttatatagccagctatctaccccactattatta

SEQ ID NO: 52870 - DNA, 225 bp, Zea mays
tagctgaccctctaacacctctcttaaatgcctatgaaacatcacttcttccatagacagtgacacctatatcagcacatagacagtcgtagcccatttcgcattatagacaaacagaaagcaaattggaatctaatgaatctacagaaaaacatagcaaaagaatggtcagagataagcaatgtacccaatcctttgacaaaccttgataccatccccgaagcg

SEQ ID NO: 52871 - DNA, 379 bp, Zea mays
  unsure (1)..(379): unsure at all n locations
tgcagcttctaagggagaacacgtgattggtttattaacgtacaattcgaaaaagatagaccttgtgcagctgtcaagcaggtaaacaggtgggaggagcgcatcacagcaagaatgtgatgaccacttcaagacccttggagctgctgcatatggacctcttcggacccgtcgcctatctgagcatagggggaagtaagtatggtctagttattggtgatgacttttcccgcttcacttgggtgttctttntgcaggataagtctgaaacccaagggaccctcaagcgcttnctaaggagagctcaaaatgagnttgagctcaaggtgaagaagaataggagcgacaacgggtccgagttcaagaaccttcaagtgga

SEQ ID NO: 52872 - DNA, 394 bp, Zea mays
  unsure (1)..(394): unsure at all n locations
tgtattgcacaacaatttagactaaaggaggtagcacacttcacatgttggtactttgcagaagaacataatgtatttgctcgaaagaaaaggtaccatgatgatgaacgagagatgcctccgcgtagtgatctttcgatttttcagaccaacggcaaagacgttggtccacccaagtcatatcacctcagtatggaagaacggaagtctggcttactgtacatgttcacgaatatgcctgaggtggagaaatactntgtgtaagacttgttctcttanactggtcatatgtgaattagttatgttatcacatatctcatgtcatacaataatattcgacagcgagtttgatgaacaanacatgaggtgtctcggtaggtcaacagtgagagac

SEQ ID NO: 52873 - DNA, 352 bp, Zea mays
  unsure (1)..(352): unsure at all n locations
ctgcagcttaaagtcgttcctaagggaatgcagatttacagcgaaaataaacgctgattccaccgaaaggtaaaggcgaataagctccaaagtcgttcctaagggaatgcagagcttacagcgaaaagtcaacgctgattccgctgaagtaaaaagcgaagaagctcctaagggaggcttacaacgaaaagtcagcgcttgatatgtgatcgtttctaacgaaataacggttgtgattatggcttcngatatgtgcttgaacattcatttgcacaccacattacatcataacattggcattcataaacattcatctaggcatatgtaggataaccgtcatcatagcataagt

SEQ ID NO: 52874 - DNA, 316 bp, Zea mays
  unsure (1)..(316): unsure at all n locations
tgagcttaacatcttatattctataactttaattgaaaccatgcttctttatataccggtgatcatgtctctttcatttgggacaaatgcatatttcttattcttcttatgccaaagctaaaaactatgtgcttccatgagtatttctgtgattagttgtgagaaaacacgtgacgcctagaggagggtgattangactttaanactttactaactaggccgaaataaatcctagagcaaacctatgcaataataaactaaatgtgcaactaggtttgctagtgttgtatttatcgaatggctagttcatctactc

SEQ ID NO: 52875 - DNA, 350 bp, Zea mays
  unsure (1)..(350): unsure at all n locations
agcttcgggttctaaagctccagaacaagattctgaagccgaagctgggccctcaaagccctcaagggcanagaccttggaaagtgaggcagaaaaaataacaaagccaacttttgctgaaggaactggtgttgttacccncgaagcatccaaaattcgtgattatattnttcgtcatgcttcggggaaaaaattaacagaaaaagaagaacaagaggcccaacactatgcccaaaagttgaaatatccaaagggggcgttgatatttaatggcagcggagaagaagatttcttgtattgcctccccgacagcaaggaaatttctgtctgtcgggagatgagcagaagct

SEQ ID NO: 52876 - DNA, 284 bp, Zea mays
  unsure (1)..(284): unsure at all n locations
agcttgaagccgaagttcaaagaagtttggatcttatagaatctttggaaaatcttcagaataagtgtctggagttcaacactcgatgtattccacaggtgaggcaggtgttccattttgttggagccaatagtgaagagtttactccttccgctgaagacctgcctggtgccttcgagcatattgaaggtgaaattaatgatcttgacgaagntaaagctgggcatggcgacttctgtaccctggcagcttctcggggcacaactggtgcctttttgaagtct

SEQ ID NO: 52877 - DNA, 237 bp, Zea mays
aaagaagtactacaagaagaaaggcggcgatgcccactgttgtcgggagtgggattccgacgagagctcaagcgactccttcgacgacgaggacgccgccaacatcgtcgtcaccaaaggacttctcttcccaaacgtcggccacaagtgcctcatggcaaaggacggcaaacggaagaaggttaaaatctactcctccaataaatatgagtcgtctagtgatgataataatagtga

SEQ ID NO: 52878 - DNA, 263 bp, Zea mays
  unsure (1)..(263): unsure at all n locations
acaactgggctgaaagtatcatcataatcaatcccataaacgtgtctaaatccctttgctactagactggctttgtatctatccaaactcccatcagatntctgtttgactttatatacccacttgtagtcaatgacattgatacctctctttggggaataaggctaagttattataatcaagcattatatctgatcatagctcattcatcttactattcaagcttatcaaggactgcgtcacagagctggaacatctactga

SEQ ID NO: 52879 - DNA, 179 bp, Zea mays
  unsure (1)..(179): unsure at all n locations
acttatgattctgtaggtatccgcaaaccataaggaaacttgatacctttgaggaccttgcaaactcgactttctgatccttccccaacacatatggagcaggtggagccctgangccgagttgcatcttgttgcagtgcagctaggtctatgccatatatacaatctaacctgcttat

SEQ ID NO: 52880 - DNA, 248 bp, Zea mays
  unsure (1)..(248): unsure at all n locations
ccactctagaatatccttgaccttgctgggatcaaccgcaaccccctntgcagacaataacgtgtactaagaaattggatttcctctagccaaaacacgcacttgctgaatttagcatataattgatgttcccttaagcgtgttaatacgatccgtagatgctgagcatgctcctcttcattcttggaataaatcaagatatcatcaatgaataccaccacaaatatgttcaactcgggcataaatac

SEQ ID NO: 52881 - DNA, 281 bp, Zea mays
gggtggaatacctattgcctgtgacgaaaactactttgaaattgcttcaattacttacacttcaatctactcaatatcagttagggtcaagtccagattggaggacgtggtgtgggacttaacggctgtttatggcccccaccaggagaatgaaaaaattatctttctatctgaactgtgtaccatctctaacctgatgagacctgaatggttgattttatgagacttcaacatgataaggagagcgagggaaaaacacacgggagcaatcaacaaaagag

SEQ ID NO: 52882 - DNA, 355 bp, Zea mays
  unsure (1)..(355): unsure at all n locations
agcttctaaagggagaacacgtgataggtctattcttgttcatttcgaaaaagatagaccttgtgcagcttgtcaagcagggaaacaggtgggaggctctcatcacaccaaaaatgtgatgacaacatcaagacccctggagctgctacacatggacctcttcggacccgtcgcctatctgagcataggaggaagtaagtatggtctagttattggtgatgacttttcccgcttcacttgngtgttctttttgcaggataagtctgaaacccaagggaccctcaagcgcttcctcaggagagctcaaaatgagtttgagctcaaagtgaagaagataaggagcgacaacgggtcg

SEQ ID NO: 52883 - DNA, 394 bp, Zea mays
  unsure (1)..(394): unsure at all n locations
agcttanggtccgatgctatcagattatgcctcatggactagccatttaaatgttatcgtcatcacctaacatctatctcagcatatggttcaacgcccttaattcgatatcggaccaatgaagccaaagtttgacacctcaaacaaaacacagaccagagagtgtgaccaatggtgttaatctagtctgacaccctccaaccctcgtcagaccaaaaagtgtcctatcgtgtggcccaaacgactctttcgggcttccgaagtcaacgacgaactcctactctatgtagtggaaaagtagctcgttatggccatgaacgaggtgcgggcttcacaagtcgtcgacgagctcctgctctgtgtagtggaaatgcagctcgttatggccatgaac

SEQ ID NO: 52884 - DNA, 372 bp, Zea mays
  unsure (1)..(372): unsure at all n locations
tgttcaacatacactatttcactaatcttaccatttaggaaggcactctttacatccatttggtagagcttgatattgcgtgcacaagcataagcaagtaagatccggattgcttctaatcttgctatgggagcaaatgtctccccaaaatccaatccctcaatttgagtatatccttgtgcaactaatcttgccttgtttcttactaccacaccatcttcattgtgcttattgcgaaacacccattttgtaccaataacattgtggttctttggtctcttcaacaactcccaaacttcatttcgagcaaagntatttaattcttcatgcattgcattcacccattcaacatcaagtagagcttcatctaca

SEQ ID NO: 52885 - DNA, 329 bp, Zea mays
  unsure (1)..(329): unsure at all n locations
aataatcaactgctgtgctgcaagcccaaacatgttgaatgtgattgattgctctactctgntgtactgttttgagtcgactgctttgcttgattggtcttggctgaacaagtaataatgattgcaactaatataattgagcctaaatatataagttactagtacacatcccactaaattagtgtactaatttggttaacgtaatataatatgtaatttgttcacaaagtgaataatgaactctctctttaactttctgctagtcctagatactggctagtaattaacctcattaaagtagtataatatgtaattatgaataaactatc

SEQ ID NO: 52886 - DNA, 350 bp, Zea mays
  unsure (1)..(350): unsure at all n locations
atgtctcaattaatttataattcatcaacccgcataccatgaacaacctaaggatngactagctttgtaattacctttgcccttgattaccttttgagttattattggttaactttatgctattgctcaactctaatcaatgaacatgatgagatttatcaatgatacgctgttttgccctcttttattatgatgttatacttgtggtcttcaagggggctcgagcggttctcgaatgcctttcgtaagacctgtcattggatgacgtncggaaacagtgcaccatgaggttgaatggatgccttagctaatattaaagactgggtgtattcgttcccgtctgcgttatg

SEQ ID NO: 52887 - DNA, 232 bp, Zea mays
  unsure (1)..(232): unsure at all n locations
agcttcatgagccggagcttctgtattatctattatcatgattgccgaaggtgtttcttactgcagaaccttctgcgacgaagcatggtcccaacagtagccccttcgcggcgctagatcgnttttcgtaacgagcttgatccgagaaataatctcttatgcttcgggaagccgaaggtccgaaaaacaccttctctgagctcgttgcgcggaaacgaatcaattttcgagc

SEQ ID NO: 52888 - DNA, 470 bp, Zea mays
agctttaatcaatggacgtgaaaagtgtctttcttatcggaccaatcaaagaagaggtctatgttgagcaacctcccggctttgaagatagtgagtactgagagcacctagagggggggtgaataggtgatcctgtaaaatcaaacactaagtagccacaaaacttagtttaaagtgttagttcgactaagtagctttgaagcgagttcttgtgaacacaataatcacagagaaagcaacacaagagacacacaatttttatcccgtggttcaaccaagtaacacttgcctacttccacgttgtggcgtcccaatggacgagggttgcactcaaaccctttcaagtgatccgatgatcaacttgaataccacgttcttttcctttagtatcttttcctatgtgcgaagaatctccacagtttggagtttctcgcccttacaatagagatcacaaagaacgcacatagtac

SEQ ID NO: 52889 - DNA, 372 bp, Zea mays
  unsure (1)..(372): unsure at all n locations
ctaccacgtcgtctctagccacaccaactcaccggtggccgccgtagcttcttaaccggtgatcaccggaggaagcgccacgatgttcgccacctatcgcacgcaccagtgaactctctcccctccggccgccagcacaacctgctcgaattgaccgtcgccgctggcgctccctataaatngagccccccaccagttccgtaaagtcataagctaaccagccacctcgaattagccccgaccgttcgctgagatccgcgaattcggagtccccccccaaatcgatctccgccaccgtanaacccaccccaccgcggccagaccattccggtaaggctctgcgcatctcaactatgggtctagcagctatat

SEQ ID NO: 52890 - DNA, 316 bp, Zea mays
  unsure (1)..(316): unsure at all n locations
agcttgaagccatggtaagtagcatatgcttatttatgcgaattgactcagtctagctacaggtgcataggtttcaccgaaatccanaccttctacttgtgaataccccttggccatgagtcgagcttttgtccttgtcaccacaccatgctcgtctttgttggtgcggaagacccacttggttcctacaacattttggttatgacgtggaactaagtgtcataacctcgtccttgtgaaaattgtgagctcctcttgcatcgtcatcacccaatccggatcttggagtgctttctctaccctgtgtggctcaata

SEQ ID NO: 52891 - DNA, 331 bp, Zea mays
  unsure (1)..(331): unsure at all n locations
agctntcaaggaattctgtgaacaaattagcacttaagattcattttgcatcggtcagacatccggagtcaaatggacttgttgaaagagccaatggcattataatgacaggaataatgaagttaatcttcaatcagcccaaaggaaagtggccagatgaattgatcaaagtggtgtggagccgcaatacaacaatatcaaggtcaacaggttttacaccattcaaactattgtttggtgacgaagcaatcaccccagaaaagctaaggcaggaccaataagaacagtagcttcggcagaaaacgaagctgactattctgtggcaaaagat

SEQ ID NO: 52892 - DNA, 227 bp, Zea mays
acgtgagggaaacgaagccgaaggttcagacactgtgcccatctccgaagcaatgcagcgttccggtctactgactacagaagaaatgcctgctgctgaagcatgcccaacaactgtcgaaggaaaagacaacattgaagggacttgactccaagagactatcaccttgctacgcccagcaagcccagtcacctggattttgggaaatcaacttgttcaaaagctga

SEQ ID NO: 52893 - DNA, 417 bp, Zea mays
agcttcataagacatcactggactggtatgttgtttcaggacagaaacaacggcaatgcgagtcaatgcaactttaacactcgcattctccaccatgatgtggtcaagcatgcctgaagaacaaattatttttaccattagccagagaaactgcactctttaacaaaaagacagatacgaatattataggcaggcacgagtataagcctccaacgtgaagctcttgcacgctgtagattgctcaactctcgtgacagtgtgaacactacaacgagtcaacgtccatttgtgcagtggcatctgttacgaacaaccttgacccatatttttaaaaagcaacgccaaaatttactattatcaacctggttattctaagaactcaaaatatgtgaatgctcatgcacactgtttaaaaaa

SEQ ID NO: 52894 - DNA, 342 bp, Zea mays
  unsure (1)..(342): unsure at all n locations
agcttcatatgaactaaaatgtttggactcatttaatntacttttaattctagtccaaatatcatgtgcatcatgaatatgttcatcatatctaattatgaaggcctggatatcttctttgctaagagaattacctaggatgtcaaaagcaagatagtttaagcgtatacatctttgatcttcctcggaagcattttccttatcataattagaaggtataatactcttatctaaaatttgttccaatcgtgagtctatggttctaaaagcatttactactctagtagaccatgaagcataattagaacaatcggaaagtaatatctcaagagttacttattg

SEQ ID NO: 52895 - DNA, 468 bp, Zea mays
ccgaggatatgcagatctcggatgtcagggtacttgtatgattgccccagcagcgaacatatgtagctccaagcgctatattcattatgtctctgggcccacatatcagggtttagtacctttgtgcatgccccccttcagctataaaatgggaggcatacgacgttacaagacagatccaatcttatgctcactcagacgctcacaagttcatacaagctctcaagcaatacatcacacagtggagtagggtgttacgctccggtggcccaaaccactctaaatgcttgtgtgttcttgtgtttcctcccagcttccaactaacaagcacaacgcttaggcccctcctcatcttatgaattaaggtgggtgcactccgccacccggtcgaagatttcctctgcgatacacatgtaacacataagaatgtcaaacatgatgtaacatcgataaattgtttacattctc

SEQ ID NO: 52896 - DNA, 440 bp, Zea mays
  unsure (1)..(440): unsure at all n locations
ttgccgagtgcggctctcggcagagccgtctttgccgagtgctctatataatgcactcggcaaagcgtccggcactcggcaaaggctctgattccggtagtgcatgtatgcatgccaaagatataccctcctatatatttgtaggagtcaatatatccaaggtcatttgtgactagctaaaaagcagacaaattcccctcgcgtgcacaatgttggaatttttttttctgaaaggaacgtacggcacatgatagtgcacattactattaaattacaagagtttgaataaggtttcctagggtgcaccccaaagaagggcaagcacatttggctaaatatttacaaatttctggatctcatgagttntcggttacatggtcggcaggcagtggcagatttaggatattgttagagtatgctgaactaatatgttcatatac

SEQ ID NO: 52897 - DNA, 448 bp, Zea mays
  unsure (1)..(448): unsure at all n locations
acttgagattctatacattgaaagagcacaatctctacttatgaatgtccacgatatatcctaaaagagattggatgagtcacacacgcaatagtttcctatttagcaacctgtagtatatgaatgacaagaaggttactaaaacatggacacctcatgatgtgaactaaattacccttacaagcatcatgcataacatcaattgtgaaaaagatgaaagtagtatgattatttaattaagtttttcatggctagtttaattcatagcatggtgagtgattaatgtagaagactcaataccaatttatacaagaatgaatacatcacatagtattgcgtcgatcttctttgaatgtggaatggcacactccatttgggaaacacattctcatgttgngagactacataaacacttggataaaacattattctcacaactctatttata

SEQ ID NO: 52898 - DNA, 500 bp, Zea mays
  unsure (1)..(500): unsure at all n locations
tcttctgattntcagtgaaaaagcccgattttaccatcttggacagatcagccttcgaaaccagagatgttccgaagtccaagtggctcggcttgcttggcatggcaatgcgataatcatcttctgaatcagcttcctcaatatcttcttcctctgcttcagcgattgcttgttctgcttgttctgcatcatcatgagggatcttctccgaagtcactatacccgatccgtgcatggcttctgagatggngagagtctccgaagcttcattttcctcccgctcgcgctcaaccctggcggtagagcggactctggtcattcaattatgaacttgtgaaactttaatattntctctctccgaagcaggtttcaaactggagcttcgttcgattctaacagacacgcttcggtgatggttaaaaattntggcaggagaacagtgcatatagcaatgaatgctgtggtaacttcacacctactcgtctgttatatagtgctgc

SEQ ID NO: 52899 - DNA, 462 bp, Zea mays
  unsure (1)..(462): unsure at all n locations
tcggaacactacgacttcgttntcttcaggagtcgggcaagttttctctccttcgtcgatcctcacagtggataaatcccggaagtatcttcccctcatgttgacaagatgaatttctttgatacctgatttcccaaaaactgaatggcttggtcgccaggggcgatcttcagagtcttcaccaccactatccacatcataactgtcgctgtcatcagtatcttcagacaaaccttctaaaatctctttcgtaattttttctgtgttggtcttcgacattgctatcaggaatcccaggttcttctcttcatcgagactcagcttcatctcggtagcagccttcttatcttcagacatcttcagaagcactaaataactgttttcaatgccgaagcttcaaaacttaatagctaagcaaatcttggtgcgcaagaagctaaaattgagtgagcgggagcagat

SEQ ID NO: 52900 - DNA, 428 bp, Zea mays
  unsure (1)..(428): unsure at all n locations
ggtgatgaagctggtttttggctcatcttcttcatccagatttgatgaaagcctgaataacaatttactatactcatgagctctcacgaagctgctgcagctactagagaatctatccttggcaatggaaattcatccttcggacaaaccttattgagatcagtgaaatcaaggcacattctccatttaccattggccttcttcaccataacagtgatagccagccattctgggtattgtacttctctgatgactccagcgctgagaagtcttttgacctcgctccgagcaccttctgctttgtcggtagacattgttcgacgcctctgctntctggnggtgaaggatggatcaacattgagcgaatgttcaataacatccttgtgacaccacanagatcattagctgaccatgcgaggacatctttg

SEQ ID NO: 52901 - DNA, 410 bp, Zea mays
  unsure (1)..(410): unsure at all n locations
actaagcttgtcttcacctgatgaggaagactgtcatgcacttctgtaaccgcattatatttatttcgcacatcaggaatacctttatcaagaaatacgaagagtctgcggcaacaagacagtcaccgaggatcacctgccagagttaccgtacttgaacgcggtgttccatgagaccctaaggcggcactctccagttccgctggtgcctccaagacttgtccatgagagtaccaacttggctggctacgaagttccagccgggacacaggtgagcacacaacgatgtaacagtgtagctaacggctgctggctagtggctaacgcagttcacaaattgaaatgctagatgatcataaatctgtacggatgcaacatgaacaagagcgactgggacgcgcnctatgaat

SEQ ID NO: 52902 - DNA, 410 bp, Zea mays
ctgcaagcctacatcggtacggtccttaatcgactcagacgaaggcactacaccaagacttccttctcatgcaagccacccgcctagtctcgtatttatcattttcaatcccaaagttcggtacctggcagaggtacatcttttccgatgttgaacccatcatggccatgatggatccagcatcaaatctttgtcttttgaaaactccccttcccacatgaagcatcatctttgcttaaaacaaatcattttgttttctaatgcaaaactaagcatcagaaaacttttaagcaaaacaggtatcaaggaagggtaaacagttccaaggaaggagatgcagcaatagtttatcactcaactcctatcacctaatggcatcatttcagtgataaagagtgtataacaacaag

SEQ ID NO: 52903 - DNA, 477 bp, Zea mays
tgtcagtagcatatccttgagcttctgccatgaagtaatttctctgtcccaagagaagaataccatgtttgggccacattccgaactgccatgatgaaagatttggccatgacagctgcattgcctccatatgaagatatggtggcttcataactcatcaaaaactgcttcggatccgaatgcccatcatacatagggagctgatgtggcttgtatgatggaggccatgggatagcctgcagttctgctgccaaaggaaaagcatcatcaaaggtgaaggtatcatgattaaaatcatcataccatccatcctcattgaataggccttcttgatgaagctccatgtgttgaggccttcgatcttgttcgtcttgagcaagatggcatacttcttcagtggcttcgtcaatctgcctttgaagatcagccagtcgggccatcttctccttcttcctttgtacttgctggtggattatc

SEQ ID NO: 52904 - DNA, 388 bp, Zea mays
ggctctcaacaacacttatttttatagcacatatctcaaaaggtgagcttcgtcgaaactgcaaagagaatcatcaacttcataaaaaccacaaacaaatccatcagatagccagagtgcgttcaactgcaagggtgactcgtgaagtataggagaccgaggccaccgagatagctcccattttcgaagttatgagacagtcaggtctaattgtgacagaaggagctactgacgaaggtgctcctgttgccgaagttgagcacaccgttgctgaagaagaagatgctgaatgagatgaagaatattatattattttgatcccatcataaccaacccatctagattttgagaaatctactgtgtctgaagtcgatgtgtctatgatgat

SEQ ID NO: 52905 - DNA, 445 bp, Zea mays
  unsure (1)..(445): unsure at all n locations
tngacaatattatgtgtaatttgttggaatctttgttcatctttcctatggcacccttttcctttccaaagagggagaaaggatttaatgggccatagttngtaatttttcatttcttatttagctccacgagagcaaatcccccaaaagaatgtaaaatgtaaaatctgagcacgcaccatcgagtgcagaaaaaatagaataaaagcagggagaagctcaaaagtcgtccctacagggatgcagagcacgacgaagctacaaaaagtcgttcctataggagcgcagcgtaagttttctgctcagaagacggtcttaacggaatgcagagccagataccaccgaaatataatgcgataaagttcaagagacgttcctaaggggatgcagaacttataccgtcgtaatataatgcgaagaagttcctgagtcattcctaacggga

SEQ ID NO: 52906 - DNA, 488 bp, Zea mays
  unsure (1)..(488): unsure at all n locations
aagcttttccttatcgtcatcaaccttgacatagaaccactccgattttcaccctgctgcccatttgcttcggtagctgatcacaggaaacttcgtagtttttcgataagcaaaattatagcaaccaaaattgtcatgttatccatcctttctagccttcgtctgatagtgcagttcgtgaactcggcaaaagctgtccgcaaacggttccactgcttggcttcggagtgcccagatataaacactaagcctaacgatagcgttaggggtcagctggtgaaaatagataccgaaccttttcagtacctctgcaataatcccatgtagggggaatcttaatccagcctttacgaagctcttgaaaataacaatttcatccttcttcggctntgggggagtctcttctcccacgaagcgtaatagcttcttctggtcttcagtaaaaaagcctgactctaccatctgggacaaatcatccttcgaaacag

SEQ ID NO: 52907 - DNA, 484 bp, Zea mays
  unsure (1)..(484): unsure at all n locations
cattacggacctatgatactcaagcttaaggctntcagacgaagccggtcacaactcatgccctgtttctatgcacgcaagaccatgaggagtatcttcaggcgtacgcccgatggttcttgcgtctcagagcacaggcgcctacagtgcccaatgaaattgtcattgaggccatgatcaaggggcttcgtccaggacctactgcccagtattntgccaggaagcctccacagactccggagaagctgctccaaaagatggatgagtacatcagggctgacaatgacttccgccaaagaagggaggaagcttacaggttctctgagatgaccacgggcttctgaggaagaattcacccaaggcatgtcatgtcaattcataactccactcacaatgatgacagaggaagtcagctgcagagggcgcagtattcttcacaatcttctgngcagcaacaaagctcctttcgccaccagctcatagc

SEQ ID NO: 52908 - DNA, 473 bp, Zea mays
tcagctccatctatgttatggatcgcctttgaatctgtccaactcgctttagccctcctgacagcttcttgactcccgtgaacagaaatgggcccttgtttcgaaggtatcttcacgcataagtacgctggatgaactatagcttcgaaggcattaagcatccctcgaccaatgattgcattgtatgggtattccatgtcaacgatgtcaaagacaacttgttccgaccttgtgttgtggacgtaaccgaaggtaactaacattgtcattttgccaagtgccacaatctgtcttcctccgaagccacaaagagggtgtgtagcatcatgaatcttgtcttctggttcttgcatctgtctgaaagcctttgcaaatatgatgtccgctgcactgcctgtgtcaaccagaacattgtggaccagaaatcccttgatgacacacgatataaccatggcatcattgtgaggatagtc

SEQ ID NO: 52909 - DNA, 475 bp, Zea mays
  unsure (1)..(475): unsure at all n locations
aagcttggtaacacagagtattctgaaaggggaacctgtgcacgttcttcgatgtccaattatcattacccataagaagaaaggacagtttgagccaaaatgggaaggaccatttattattgaacaagtttatgatggtggtgcatatcaactggtggatcatcaaggttgtcgtacaatgcctccgattaattggagatacctcaagatatactctgcataaccaagtgtcgatgcaattttctatcctttgttattttggtatttatttatttattattattattggtggtggattattatcttttaagaaaagtttttttatggactcatagtcctacatcaaaggctntcctccaactttcatcaggtatgccagcaaactggttgtcattataggatgtgaccctatacagggaatgtccaaccaataaactttgtctgaaggactcacacagtcctggttgacaataat

SEQ ID NO: 52910 - DNA, 449 bp, Zea mays
  unsure (1)..(449): unsure at all n locations
tctcagcttgtacacgatttacttgcatatactgggtgtattatactgatggtgtaccgagattctctggtagtcatcagtcaaataaacaacgaatgggattgctcatgtgattcaatgggaagatactgcgccgccgttcgaaagctagaatataaattcgaatgtctggagtttcatcatatagaaagagatcggaacacggcggctgatgtactgtgcaagctcggatccggtcggactcaagttccgcccggggtcttcgtgcaagatatccttcagccgagcatctcgacggatcanatataagagtgcaacatcatagaccaacccgagtcatactctgatgactggaggcaaccgattattatgtatataaagaatgaagaagaaccagatgcccagaactcggcagagcgcgttgccagacaatcagctcattattcact

SEQ ID NO: 52911 - DNA, 458 bp, Zea mays
  unsure (1)..(458): unsure at all n locations
ctagcctggacttgttcagntcttataatgtcttgatcaaaggactatgatacaagatctgccatctgctagtgtgcttctgaaggatctgtttttagagaaactcattaacagggtgttagtgttcttatattcctattcaaatggttttgaaaaacagcacgatggtccaggtcttgtttgtgacaattggtcacacaaatagtttgaaaggttttaggtaagccattgtttgaccctacactacataaacaaatgtgtttgccccatggacaaacaactattntctccacaatccatatttacactctgcattaccagaaagcgtcgacacttatgcacatccaaaaatgcattcaatgatgaacagttgattgatgaaccctattacacagtaatttatcctaacctgctaattatgagcgccaatcaacaggaacacccatcgagtgtcaact

SEQ ID NO: 52912 - DNA, 332 bp, Zea mays
tggtttgtccttacggccctctgacatgcgtcaaggagaatgctaaaatgcgcttactacatgcgttcatacacgcataaatactcatgagcatctcacttatactatgacacaatgcactttacaatctatatgatatacaattggtctccttcacctaattatgtgcactccagaatatgagttcttctccatgcgcatactcaaggggagcactctatgttatatagagctatcaacatgcttaatctgatatatactcctgatcataggtgttttatatgctaagactaatgtgcctgcacgtgaatctgccaccaagtcattggtac

SEQ ID NO: 52913 - DNA, 470 bp, Zea mays
  unsure (1)..(470): unsure at all n locations
tcttanatcctgctctcacatgggtgggataaagatgataatattagggtttcccagcttcattccgacatgtgggccacaacatgtcattatgtcagctttgttcccgtgaggctcgtgtgtgggtgctggagcgtgagcagcgcatgccatgtccaggctcagccatcggggtgcaagcggcgcagccgctggggcgtgtctgagctcggccaccaagttgcgagtggcacggtcggcgtggtgcgggcaggctcgaagggagtttggggtgagaagagagaaggccgagaggataaggaagaatgctgttatactaattttttgcctactatggccaaacaggtctccaaaataactttagctttaccgagaagctgctcatgaagcttgaaacccccaaaacaacttcattactgaagctgagctgtgtcaaaaggggccatataccagctgagttggcgtcgtat

SEQ ID NO: 52914 - DNA, 462 bp, Zea mays
  unsure (1)..(462): unsure at all n locations
ataatatgcgaattgactcaagcctagctacgggtgcataggtttcaccaaaatccaaaccttcgacttgtgaataccccttggccacgagtcgagctttgttccttgtcaccacaccatgctcatcttgcttgttgcggaagacccatttggttcctacaacattttggttaggacgtggaactaaatgccatacctcgttcctcgtgaaattgttgagctcctcttgcattgtcaccacccaatccgaatcttgaagtgcttcctctatcctgtgtggctcaatagaggaaacgaaagagtaatgttcacaaaaatgtgcaacacgagatcgagtggtacccncttatgaatgtcgccaggatggtgtcgacggcgtgatctcgttggattgcttggtggactcttgggtgtggcggnccctggtctttctcatcctncttttcttgatcatttgcatct

SEQ ID NO: 52915 - DNA, 489 bp, Zea mays
  unsure (1)..(489): unsure at all n locations
cttattatctcttattgtctctattntaaaagttggcttcttgtggggagaagtgttgattatgggaaaaagggggagttcttgaaatctttgatcaatctcttttggaatgactctctttatacttcaacatgtgtgtttgacttagagatagagatttgagtttgatttgcaaaaacaaaccaagtggtggcaaaggatgatccatatatgccaaaattgaataaaaccaatttgagtttttatttaaagtgattttgcacttgttccacttgctttatgttgtgttggcataaatcaccaaaaagggggagattgaaagggaagtgtgcccttgggccatttctatngaatttggtgattgagtgccaacacatgtgcttaattgggaatttatgtacatggatgaacaaggtgaanatcatgaagtanaggtatgtttctaagccttagtacattgggtntaagtactaatatatttgtctaagt

SEQ ID NO: 52916 - DNA, 468 bp, Zea mays
  unsure (1)..(468): unsure at all n locations
tcatgtgatgacttgattcaagaagagcttactagtctacatgctgaattgactgaaaaagttgaagtcctgactttagacaaccaaaaattgaagaattacttgactgatgcaactactataggaaaagttgctattgagaacaatgatttcaacaatgagttggcagtggataatcaaaggcttaagaatgaggtcaagaaactaaaaagtgaaaatgaacatcttgcaacaagtgtgcaaaagttcaacaagggtcaatacctccaaaatgagctgcttatgaacactgttatgaaaaataacaagagtggtattggatacaatgcttttgtgcaaaagaaagctatcactcaatacaagccatagcagactcacaagcctatcaaatgctntgagtgtggaaatgaaggtcatattgcccacaactgcatagctaaaccaccaactcccttgcctaagcactca

SEQ ID NO: 52917 - DNA, 486 bp, Zea mays
  unsure (1)..(486): unsure at all n locations
aagcttggctaaagaaanacttatgatgctntntcttatctatctatcattggaaattaacattaaactgtatttgtgtatttatttgctttgattgatatgccatggaatggaatcagctatatggatgttaccggatataggaaaaggcagttatattcttgtcatcacgtactgcaggcatgacttataaaatatagaaacatttcttggatgtcagcatcatttcgatagtacggctgcatgtaatacaaagcacttgataaaccangcaacacttgatttatcacgcatacatagtttaacaaatacatatatagacaatataatagtatcacatttcagattatattaaaccgtatgctgattcagagatagaataangcatgttgtatgaaatcaatacacagagcttcatcacgcagaccgccggccagcttctcgtaagccatccatccaccatgatgggagacctgattcaatata

SEQ ID NO: 52918 - DNA, 291 bp, Zea mays
gcttgacgtcatagccgtctaatagcttgccattgtccatggtgaggtcgaacggtactccgaatcagaagacaatgttttgccataataattgatgggcagtcttcgatgttattgtggatacatccctcacctcgatccattatggaaagaactcgacagctatgaacgtgaactagagggtcccctgcctcgagggcagagggcccgacaatgttcatgctccagcgctgaagaggccatgtgtgggcgattatctatgctaactgcgaagggcttacccatcgtgga

SEQ ID NO: 52919 - DNA, 363 bp, Zea mays
  unsure (1)..(363): unsure at all n locations
ctagaaaaccgacactcttcgatagagtgccgattaccttcttcccggtacggtcacgaacacatcccaaggcctcttcatcgattccaccaaagagcatggttcttgctgggagccataagaaatgccatattcctgtagctccttctctacctcagagagttcttaacaaaccaggttccgaagatcgaaacctttttcttccgaagcagcatctgcaattcctttccctttgtcaagaactgaggccatgacctgttctgcagctacagatgtctcttctgtaggcatacccagtatcattntatcaatcgcagataaggtggcctccaggttggcagcttcggtggcagctgcagcttc

SEQ ID NO: 52920 - DNA, 220 bp, Zea mays
ggtctgaaaaaatacaacaactctttttggaatgactgtctggaagacacgacatgagggcaagacgcaacaggatacgatgaccacaagagtggctagcacctgaaacgaccaaggaagaggagatgcgtacatgaccaaagcgattagaaacatgatgtggtcaaccccaacgagacatagcactcggtccagtgactagagagcgagctggctttca

SEQ ID NO: 52921 - DNA, 343 bp, Zea mays
  unsure (1)..(343): unsure at all n locations
cttctgtagatcagccgaagcccatgctcttatgtgaggacatatcagagcagaacgcgctgttgggctcccaattatccgaagaacaggagaaaaccttgataatgtttttgttcaacaacaaagatgttantgcatggtcagccaatgatctttgcggagttaacaaggatgttattgaacactcgctcaatgttgacccatccttcagacccagaaagcagaggcttctgaatatgtctgaagacaacgccgaatgagctctgaatgaagtcaaaagactcctcagtgcgggagctatcatagaagtcaagtacccacaatggctagctaacactgttat

SEQ ID NO: 52922 - DNA, 444 bp, Zea mays
  unsure (1)..(444): unsure at all n locations
aactcagcttaagcacaaattttccctttgcatagaccttatattatattaatcagcacatangatgatgccatggacaacagaggttactagggaaaatgaacacactaactttactcccccttacacattaaacataagcaacacaagcattggaggacaagtaatatactaatacgctaaaggtcaatacctccttgtgcacctttagcatgtcatggtgtactttccatctaagtaggcggagttccttatgccatcgcattaagattcccatcttcgaaaggtttattactaaggagctccttcacacttgtgcctgagtctttatcctgacctgttctcgtggcttagacaccacacttagaacaacgcataatattgtggctcaagatgaagctcttattctactgatctcccacagatatcttctgatgcacacta

SEQ ID NO: 52923 - DNA, 372 bp, Zea mays
acatgtgctaagcggcgatgctattttcctcccatgctagtcttagcgattaagcatgcctctatactggcctcctcttttgcaaaatcaactaaataaagatagtcgtctaatacacccttaaaagctaatgaaccatcacttcttctaaagacagacacatctacatttgtgaatagacagttatatcccatattacagagttgactcacagacaacaagatgtatcctagcgaatctactaaacacacatttgacatagagtgctcggatgaaatagctatttttactaaccctttcaccatgccttggtgtccatcaccgaatattattgaatcttggagatccttggtcttgacgtaggaagagaac

SEQ ID NO: 52924 - DNA, 347 bp, Zea mays
  unsure (1)..(347): unsure at all n locations
cgattgggtgtctacttggtgtagactccttcttcttcttctccgatgccttgaatgcaacgggttgagctttcgatgtggaggcatcgtcaagctcggtggatcttccttgagccttcgatcatgcactcaaaacttacaaaattcccgataacttcctcgggggtcattntagtatatctaggattaccacggattaattgaacttgagtagggttaaggaaaataagagatcttagaataaccttaaccatctcgtggtcatcccactttacgctcctgaggttgcgcacttgattcaccaaggtcttgagccgcgtatacatgtgttgtggctcctccccttt

SEQ ID NO: 52925 - DNA, 397 bp, Zea mays
  unsure (1)..(397): unsure at all n locations
tgcagagaagacagaatcgctagcagntgcagaacctgctgaacttaacttcactggaatgaagaagaaaaagaagaagcaggtacggcagatacaatacaatacaatataaaatgcacggaatgattgatattttgccactcaaaacacactcggagttagaccggagtactggacaacgtttacgaaccagaaaactaatcgagacttatccactcctcaaattttaagaaccgatcgatgaattgaggaggctgtacatttgttcattccgcaaaatttcaggtggatcttgattcatctattgatgaccttggagatggngaggacactcaaggtgcatttcatttgttctgaatctaatccttgctcttgttgagtacttntgcactatctg

SEQ ID NO: 52926 - DNA, 396 bp, Zea mays
cttcatcccaacatgggctagtcggcggtgccatagccaacccatgttagtcttagcaattaagcatgtgtcgagttcacctcttttaaaatctactaagtatagctgaccctctaacacacccttaaatgctattgaatcatcacttcttctaaagacagtgacacctacatcagtgaaaagacagttgtagcccatttgacataattgtgaaactgaaagcaagatgtaatctaaagaatctacaagaaaaacattggaaatagaatggtcaggagatatagctattttaccaagatctttgaccaaaccttgatttccatacccgaatgtgatagctcgttggggatcttggtttttctcgtacgaggagaacatccttttctcccctgtcat

SEQ ID NO: 52927 - DNA, 486 bp, Zea mays
cttaaaactaagcttcgcttatctatttataatagccttcgaatccgaccaactcccttcagccctcctggcagcttcttgactcccgtgtatagcaatggccccttgttccgaaggtatcttcatgcaaagatatgctggatgaagtattgcttcgaaggcattaagcgttcctcgaccaatgattgcattgtatggatactccatgtcaataatgtcaaagataacctgttttgttcttgtgttgtgaacatagccgaagataaccggcattgttatcttgccaagtgccacaatctacgtgcctccgaagccacaaagagggtgtgttgcgtcatgtatcttatcctctagctcttgcatttgcctgaaagcctttgcaaagatgatatcggcagcactgcctgtgttcaccaggacattgtggaccagagatccctcgatgacccaagaaatgaccattgcattgttgtgaggataatcctt

SEQ ID NO: 52928 - DNA, 404 bp, Zea mays
gcttaactctcgcgagacctgtaccatatcttctatccacggtttggtcattatagtatgtgatattctatgcatatctacttcatgtgctctctcgtgatggagtactggttgttctctaattggactggctggatgcatgtatgcttgcaatcgcatacagaacgatccgcttggacagccccatgaactctggcgagaaacccctgatgcacactcggctggaggaggcaagtgtcctttgacctatatctgtactattcattctatactactcctcccgccttacacatctatacctaacgattgactacctatagttatccatgtccttgtctacctatccgggtgggactattattgtgtagctttatgctatcgctcacctataatcaatgaacatg

SEQ ID NO: 52929 - DNA, 432 bp, Zea mays
  unsure (1)..(432): unsure at all n locations
tcctatccagggtcctagttgtataacattaaaacaatacaacttgtttgatatntttgcctagtgaatgcactctaggtgtgtcaaacatatgcaatgccaatgcttatgatgtcatgctcaagttttagttacagtaacaccaggggtgttacacctggggcacgtcagtggaggctttgcccgtgacgcttgaggatgcgagtggggagagccgcctttaaaaaggggtcgatcctccgggcagtagccatgccttcgcactcccctcatgcattgcacccttccatcttccgagcccccagatggngcgcatctgtgttgccctcctcttgccgatgttggaggagcgcgacctcgcggnggttggcgctcttcagatatcgctcggcttcaaggattatcatcacgcagccctgttgcagtcccccg

SEQ ID NO: 52930 - DNA, 497 bp, Zea mays
  unsure (1)..(497): unsure at all n locations
tcaccctttaactcttttgtggagattagntaaagggtgaatatgagagacatgtgagagcacctagaggggggtgaataggtgatcctataaaaacttgaaacttaatgccacaaaacttgattaggagttagcacaataaagccaagtggctagagaggagttcttgcaagacacgataaccacaagaggatcaacacagatagacacagtggattatcccgtggttcggccaagtccaacacttgcctactccacgttgtggcgtcccaacggacgagggttgcaatcaacccctctcaagcggtccaaagacccacttgaataccacggggttttgctatgtttcactatatcccgcttgcgaggaatctccacaacttgtagcctctcgcccttacaatttgatgttcacaaaanagcacggaagtaaggctgggatgagcaacgcacacaagacacataatcggagcacacacacgcacacaagtcacaac

SEQ ID NO: 52931 - DNA, 385 bp, Zea mays
tagacggctgtgccttagccagcccatattagtcttagcgattaggcatgcatctagatcggcattctctcttgagaaatcaactacgtagagctctgcatctaatacacccttaaaagctaatgaaccatcacttcttctaaagacagatacatcaatatttgtgaataagcaattataacccatatgacataattggctatagacaacaaattgtacccaagcgattctactagaaacacatttgaaaccgaatgctcgattgtgatggctattttgcctaatcccttaaccttgcctttggtcccatctccaaagatgatagtgtcttgagaatccctgatcttgacgtaggagctgaacattttcttcttcaccatcatat

SEQ ID NO: 52932 - DNA, 378 bp, Zea mays
  unsure (1)..(378): unsure at all n locations
gtgggaagctctcctcatgccaaaaatgtgatgacaacatcaagacccctggagttacttcatatggacctcatcacacccgacgcctatctaatcataagaagaagtacagatggccttgccataaacgatgattgtctccgcttcactagcgtattcctcttgcaggataaatctgaaacccaatggaccctcaagcgcattctaacgagagcccagnacgagtgtgagctcaacgtgaagaatatactgagcgactatgggtctgagttcacgaacctttaagtggaagagtatcttgaggaggaatgaatcagcacgagttctccgtacctatcaccacagccgaagatgtggttagaggaagacacgcactac

SEQ ID NO: 52933 - DNA, 367 bp, Zea mays
atgctcattcttgccttgttgtggatctttggagaagagcacaatgttggatcctgaataggtgataaccgtgtggaggcaataattgatagattagattttctgtcagaaccgaggtcttcattagcatttgtattgttagatacttcattttgctcttcctgttgtggaccttcaaaatcatctatgattacttgatcatcttcacttcttcccacagaacaaggagtgctttcgtctccactttctgcatccataaagtcatccaatgtatcttcagatgaagagtgaatcttgctaatttgatcacgcagatcttgcacatcttcttcatcaacatccatttcttcctctgaatcacatctat

SEQ ID NO: 52934 - DNA, 442 bp, Zea mays
  unsure (1)..(442): unsure at all n locations
aactcagctnggttagaccgagtaaaagtagtacgcgaagtctttgtccaattaatgatcaagccaactatcaatgagtaggatgcagatccaactaacacaccaatgcttaatagacaacttatggtgattgtgccaaacggacacaatgtctcacccagatttaatgacaaatctaaacgcatcttatatgtgtgccaggataaagtttcatacatatgacgactcaatgtatataaaaaccaatgtaacgatatttattacatagtgaaatgtctttaaaaaatatcttaataaaatacaccgagctaatataacttctccatagngtgcggtgactcagtgatgacggtctagatctcatcgcacttgtcatagtattcttcctctgatggtatctgttcttggcctgcgtagtgatgataacaagggtgagatctca

SEQ ID NO: 52935 - DNA, 346 bp, Zea mays
  unsure (1)..(346): unsure at all n locations
tcaacacaaaccaatacatagtacaagaaatggttcatatatatatgagcatcacctaacagaggctgtcctggtctggcgcaccggacagtgtacaatgcaccagagagatacactctgaactgctcaaattctggtttatggggagccactccgctataattcaccggactgtccggtgtaacaaccgactgttcagtgtgccaagcggagcaacggtcgccaccgcaacagtcgagttcaacggtcggctgacacagctttattgcactgacagcgcgcacacagtcaaagcatcgctagaagcacatctgacagtgaaccatgactgtccggntcttcatca

SEQ ID NO: 52936 - DNA, 498 bp, Zea mays
  unsure (1)..(498): unsure at all n locations
tcccaagtcctcggacccggcanagcctcaccggagaccccatatcaccctcgccggacttcggtcacccgccgccgcgcgtgaatcaagctaaccagtaagccattntccaattccttgcacccatgtcatccctagcatctggtgaagctatctgacccattcaattgaactatcgcgccgagagcaggccagattcctcgccgccgacgagctcgcccgcctgcgcacgtggaccgacctactccgaccaccaccgctgacgatccgcacctcgacgtgatcaccagaggcccccggacctcgcccgacccttcaccggagcaacctcgccaccggtaagcccctccgcccttttctttcgccgcagtcattgttctattangggaaggactgcaggtgcgatatatcagaacccaacggggttttctgcatagtcatagactcagatgaatagtaaaccgatgacctgtctgtaagacacttagaacctttcac

SEQ ID NO: 52937 - DNA, 477 bp, Zea mays
  unsure (1)..(477): unsure at all n locations
acactataaacactcaagcttgctntgactccgaaccttctaactcctctgataggcgatatattcttgtagactaaatctctcacttcaaaactcaactctcttattcttgtgtgagagcacctagaggggggtgaataggtgatcctgtgaaatcaaaacactatatagccacaaacttgattataaaagtgttagtgtgagttaatcaagttgctatgaagcgagttcttgcaaacaaaacaatcacagaggaaagcagcacaagagacacggtgttttatcccgtggttcggccaagtataacacttgcctacttccacgttgtggcgtcctaatggacgagggttgcactcaacccctttcaagtgatccaatgatcaacttgcataccatggtctgtttggttgggtttcttctcccgtttgcgaggaatctccacaagtggagtctctcgcccttaccatatagatcaca

SEQ ID NO: 52938 - DNA, 519 bp, Zea mays
  unsure (1)..(519): unsure at all n locations
cacttaaacactaagcttcgggcaacaacgaagctcttatctgccgccagctccaagatttataggcgccaggggcttcagaggaagggttgcggatcagcctaggaaaacttactgcttattctgtggtgaggacaagggccatactacaatgatgtgccatgtcaccattcagaaacagaatgaaatagcagaagccgcagctcaacagaaccagccgaagcaggtcatgcacactgcttcgtatcactcactctacataccagagtatgtgggtaaccatcctgcagcttctgttgcttcagctagccagccacaggcatcttggcaacagcctacacctccaccaccactacaacctgcatattcacgaggccagcagccagaagtgagccagcatacccatcagcagcgagatntcagggaggagttcgaagctcacacagtcaacagtactgtgctagaatctatacatatctattgagagatactctacgcgctcaaacagtcttatattca

SEQ ID NO: 52939 - DNA, 434 bp, Zea mays
tcggcagcaagctggagtcgatagcaatctcaccagagagcgtgtattttctcaagctgattaccctcagcagtggacaactttacagggaagcgggcaactcaccgtccagcctattggtggccaagtttacggactctagcctgctcatctctgcaaagacatcagggatggagcctgtgaacttgttataggacaagtcaagttgcatgatctgagagaggttaccaaggtcactgccgaggttgccagtgaacagattatcatgtaagctcactctcctcaggatgggcaacgtgtacaggtcgtcgggatcccggtgaaatagttgtcgtcgagggagagctctgtgagcaccctgcaccgacatcagagatgcaggatgtacatcggtacatgtgtgttggctatatgtttaaccctctttataatat

SEQ ID NO: 52940 - DNA, 504 bp, Zea mays
tactaagcttacacgacctcgtgactcgatttgcggcgcagattatagtgtgccatttatatccttgacagatcaccttggcagcgagggccctgtgccctgagtgggagccacaagttccgctgtggacttcgcgtaggatctgaatgccttcggtttcggtgatgcatttcagcatgggttgactgatccccttcttgtatagttggtccccgactagtacgaagtcccagctttggtgcttgaggcgcttggcctcgttgacgtcacttgggtggtagtatccttgcagaaacagtgttattgcggcccgccaatcttcagtcataatgaggttgacgatgtgatggccttcagcgtcattggttacttgtaatccctctgggttgcatacggctggtgtgccaatgacgtggtagaacacgtcggagggcaaggtctcgcctctggccgctgccttagtcaacacgtcggcctcttcgttgctggcgcggtccacatgct

SEQ ID NO: 52941 - DNA, 405 bp, Zea mays
  unsure (1)..(405): unsure at all n locations
tggtgccgatggagaagcagatatccttgaagtcttggctgtctatctgcttgctgttgtcaactgtgagttcggacggtactccgaagcggcaaacaatgttttgccaaaagaatttctgtgcagtctttgatgttattgtggaaacagccctcgcctcgatccatttggtaaagtactcgacaacgacgaaggtgaacttaaggttcccctgatccgtgggcagggacccgacgatgtccaggccccagcgctggagaggccatgtgtgggcgatcagatttgtgaattgcgaggggctgcctgatcgangagaaaacttctggcaggcttcgcaggaccttgtgactcgatatgcggcgcagatcattgcgggccagtagaaacttggcggatcacctttgc

SEQ ID NO: 52942 - DNA, 425 bp, Zea mays
actaagcttgacagcgagagatgacatggacaacatctagggaaatatagttgtgtgccataccttaatgtatgtcaggatggactaaatgttgtcattcttagaacatgtagaatctggcatggctttgctaacctgggtgtgcttcatcttgcatgtagtgcattatagcaatatggaataaaatttgtaattgcaagcttaaaaggcatactttgctctcattttataaccaatgtatttgcatacataccttttgcgtggtgatgacaattcattattggttggccggtctgtatactcatcaacattctgagattaaaagacaaagtgtcagctaactcatatggtcgaatagaatgaggatgtacagctgatattcggagagctggcgttctttatactcacactgatgtgataatgac

SEQ ID NO: 52943 - DNA, 490 bp, Zea mays
  unsure (1)..(490): unsure at all n locations
tactggtttactagtggttcgacaaagnttaagttttccattgtgtattactagtgcttcctgcggatccatgtttctataaagacaaagcttgacattgtgtttccatagacactcaaattcacatattntagtaattcctgatgagcaattatgatcttggatggatctggtgcgctttacactggcaattttttattcaggaaacactagtaatgttatctattaaacattgtagcaatttttatttttaattgtgctgtcttggatcttggtccaccattgctctgagttttaaggtgtatttggtttagattctgaagcgaatctggaatctcaaccaattgagtacatcagaatatatttntgaaaatatatgtatttatctagttcaatttagaattaccttcgatcgatgacttgtgttagcaagatatgcagtatagttatgtacgatcaaacgtcgaagtctcatatatccatgatccat

SEQ ID NO: 52944 - DNA, 439 bp, Zea mays
actcagcttctaacggagaacacgtgatatgttaactaacgcgtctttttcatcagattgaccttgcgcagcttgtcacgcacgtaaacaagtgggaggagcgcatcacggcaagaacgtgatgaccacgttaagacctctggagctgctgcatatggacctatttggacctgtcgcctatctgagcatatgagggagtaagtatggcttagttatcggtgatgagttttctcgcttcacttgggtgttgtttttgcacgataagtctgaaacccaacggaccctcaagcgcttcctcaggagagctcataatgagtttgagctcaaggtgaagaacataaggagcgacaacgggtccgaattcaagaaccttcaagtggaggaatgtcttgaggaggagcggatcgagcactagatcttcgctctctacacacctcag

SEQ ID NO: 52945 - DNA, 479 bp, Zea mays
ctggccactgcggcgccgccgccccgacgacggcgttgcggtttgttttgccgccgccgccactgcaaccgaacgcgccgtacatgccttggaggcgcatgtggagctggatccgctctatagccgacgcgcttaaggtttgcgtggccgtcgcggcgctgttgccaccgctggtgctgcacatgttgccgcctcccgcagcgaggtagggatcctggtttgccctcgcgcgccgggatggcgcgcgcttgccgaggagctatttcttcaacttggtgttccagtagttcttgatgtcgttgtccgttcgccccggcaactgcgctgcaatgatggaccacctgaacaatgaacagcatgagatgctcctcttcttctgtgcacatgccgacatgcgatgcagtttgcaaatggtgtgcactgatttcttattacctgcttccaatgctaatgtagaggctgcaaatgatatgctcctc

SEQ ID NO: 52946 - DNA, 461 bp, Zea mays
ctctcgcgagacctttccccgcctctttctaaccatggtacattcattattgtatgtgatattttatgcatgtttaatctacttgtactcttgtatggtgtattgttggtttcctaatttcaatggatggatgtatgtatgtgtgcactcgcatagagaacgatccggttgaagagcccgaggaactcgcaggagaagcccctgagcagcagtcggctggtggaggcaagtgtcctttgacctatatctgtcctattcattatttaattcacctcccgctttacacatttatgcctaaggattgactagcttttgttatccatgtccttgattacctatttgggttggattattattgtttagcgttatgctattgctcaaactctaatcaatgaacatgatgagaatatctatgatacgttgttttcccttctcttattatgatgttatacttgtggtct

SEQ ID NO: 52947 - DNA, 419 bp, Zea mays
cagtccaacacatattacattaatatcttggcaatatctttacaatatctattcttcttctctcaaaactatgtctgcagcttcggccagaaattgagtaacgacttcgtacataatggtttcaaccatgctaataatttctaatgagtcttttgcctctgctttggccactggctctaagggctccaagggaggagatagtttggccatgctaaataagttcgaattctgaaaaataaaaaattaaagttaaaagctattaagcaatacctatccgtctttcgagttctgcagatgtttcaactgccttcgttgcttccctagcatcatgagaatctttatctctcttctctattatctcgtgagccatccctcggccaccattatcacatatgttagtaaagaattttccaccaact

SEQ ID NO: 52948 - DNA, 444 bp, Zea mays
tcggatatcatatgttgtccatcatttctcaacagatatttatctctttgttgtccggcagacagtaaaggaagtcatcttcgtcatttcctccgtataccaaggaccctcaggggtattttaggtccttggcaaagtgttgcacttctgcaatctgctcttttgatagccgctttcccaaagcatgtcaaacaatatagtccaaatcactctgggtagatgcctcggaaacaggtgatgtgggcttttctggaaggctttccttcaccagctctgctggcatagctcctgaaggtcccgcttcaatatgaatagaagaagcgcttgcagcggccacttcctttacatcttcaattttctcgttagaagcttcggcagaagtaaaagttggtgtcttcgtggatttcaaaacaacatccaaaacgctggccatcctcctttctt

SEQ ID NO: 52949 - DNA, 415 bp, Zea mays
  unsure (1)..(415): unsure at all n locations
tccaccaacagatattatcatatgctgcatccganactaacattatgtgtcactacgtgcgatgacactagacattggctctctgacacacccggtgtagaagtccaccgatgtggctatgtacgtgccacgatgagagattcacatgacatcgattatattactgaacattttcacacatgggttagataattacgcagcgaggtattacgtgattacatcgtgacgtccgagacatatccatagtcgtcaacatactatacaagtgtgaatacgaatgcgaatagaacacagtcttcagatgcagtcgactggtgattaatcggtagcccacagctataacgcggcatagaccttgaactcctagaaatcctccgctgcacgcctaatattctctgaggcatgggccgcaata

SEQ ID NO: 52950 - DNA, 459 bp, Zea mays
  unsure (1)..(459): unsure at all n locations
gatgttgccacttacttgatgctaacaagacattatcttcactcatagccatcttcaacacttcgcccataaaaagatcaattctctctttcaattgcctgtctgcaagacaagtgataattgcaatatgtaacatgatatgaattgaatcttccaccggtgacgcccaacataattactgcatacaatgatggaatcgatgtagccattctagaaagtgatcttccttgaggcagtatgaatatgaattggagaaagctgttggctgtatttaatattatccaaagcaagtgatgaagaaatcaattttgaatcataggagggcacagggtcacggggaataaaagtagcactcatcatgtggatgaaactaattgaatggatatacagaccttataaaggtgcaggcnacctgagtacctcagctgcattattagaggataagaagtatataaacag

SEQ ID NO: 52951 - DNA, 334 bp, Zea mays
acgtctctgcggagctgccgaacactggctgggctttagggtggctggagtgggctggccactagcggtcgaagctctggcggtaatgtctggcggaattaagctcgcctgaccttaagaaccgtggctggtcggtgagggtgagtgcggagcgaagtggggcgcgcttggtgaggctctatatgcacggcgcggtgcacgggcggtcgtggaccggctagtgcgcacgggctggcactgggaatgcgcggtgcgctaacggtcgagaaccaatggtgatagccgctgtcgaacacatgttcccattgactctcaccttgttgttgctccgatc

SEQ ID NO: 52952 - DNA, 471 bp, Zea mays
  unsure (1)..(471): unsure at all n locations
aagcttcgcgtactgctcgancaatgaggtggtggatggcctgaatcattgtttgggatgagatcaggagatgggaaaccctccacttatttgactccgttgtcggcacaagcttgccctccgcggcttcggttgtgtcactcgatcccggcagaccgcctgcgagggattcggtaccctcctgcatccctgtggtgaggcatcctcttactcgcctgacctccaccccactcgtcggtgccagaggaggggaggcagaacgggatcaccatgtcgatgctccggctgcattgccagggaactacgatggcctatcacaacgctagatctgtgagcattgagagcagacaactcgcatcagtgcgagcttggtcgcgtcaaatgactgactgacggtgacacaggaggctacagttngcgtgaagaggagcgatagcgttatgaggtgcctatgaagatgcagtgggaggg

SEQ ID NO: 52953 - DNA, 369 bp, Zea mays
ttttgagaaacgatgtggcaaattgatgtgtggcgtattacttgagtggaaataaacaccttttaagtatgacttgaatagaggagattataggaaatctgtcatcacaaaaggacattagctagcccactaacgtcttcatccactagttgtactctaataccctctcatgcgaatacaatgccctcaagatgatagaaacactatctttagtttcaaaggcgatctattgctttgaattattatattccaacttttagcaactgtattgtggaaaaaagtgccttacaccttaacctatgttgacatatctttacatattcggctaatttccatggcttatttatttgaaaacgatgggatatgatg

SEQ ID NO: 52954 - DNA, 344 bp, Zea mays
gtacccgactgacatgtctctgttcgcacacacagatacgcacctctctgctggatgaccctaacgctgtctgcctccgaatctgacaagacgcagtttatgcttatagggcacgtcatccctaagtgtggtggcacgcagtgcgttctattgaaacggaaatgtgcacttgaggcatttctaacgttattggtgattgagtgccaacacaaaatgcttaaatgtgaatatatgctcatggatggacaatgcgcacatgaagagcaaaggtatgtatctctagccttatcacattgttctgatgactaccgcactgagtctaagtgcttgaaactagataaatc

SEQ ID NO: 52955 - DNA, 133 bp, Zea mays
ataaaactcagctcgagctatgtgtttcttcagcgatgttgctgcacacctgtcatcaccggattttacgggtccaacaccctggggtaacataaacaccaggtatgctgggaccacagctcaaacatatgat

SEQ ID NO: 52956 - DNA, 486 bp, Zea mays
  unsure (1)..(486): unsure at all n locations
tcggatgtgtgtgtgtntgggcattcatttgcacgatacattacatcatacattgcatacataaacatgcatttagacatacatagggtcatcatcatcataacatacagacacaggcagatgcttcggctaacaagataaggcttcagcaaaaaagaaaaagaagtagtttcatgcttcgttgtgtacgaaaagaagggaaggtgtttatcgccttcggctcaaaaatactagtttcgttcacatcaaagcagttcatacaaggacgaaaaggtaaaaatatattacaaggtatgtacaaatttacagaattagtatttgagtcttaaattacaaatggttttacaacaatattgcaagattttctctagaactttggtcagcggggcttcagctttgacatcattgagcttcggatcacctgtcaagcttcggctcattgttcctcatcatcgccgtcctgtacatattataacggtatgagag

SEQ ID NO: 52957 - DNA, 408 bp, Zea mays
ttaattgggcagaccatgtatcttttgaaatataaaaatctttgtgtgtgtataacacatctgcaatactataatgaatataaaaatatattcataataagtacatattgcatcaaactgggattttgtcttctgcatttgaaatgcgatattcaaatcaaacttcaactttgaatatgaaaagttgaaaaataggagaactaattattcttttatagtatgctctataaaatcattaaataataataataataaataaataaagttatataattgcttacatgttggagtttctgatgtatacttgaagttaacaatggtttgaattgaaagcacatatgaaaaagaaaacagaaaaatagatgagatataaaaagagacgtgtaaacagtcactatgctcgctcag

SEQ ID NO: 52958 - DNA, 450 bp, Zea mays
  unsure (1)..(450): unsure at all n locations
tgtgagataagaatttctccttgtatgttttgacctctattcagtatatcatatcaacatacaccaaaaaagtgataaacaagctaacgacaaccaaataatatgtgcatcatgctgggttttaattatgtgtgcatatgacaacaataaaggttattagaaagacataaatggttaaaaaggaagttagacttaaaagtggaattttagaatttggagaaaaagaagtataaatattaggcaaagcaaaataaataagtatatgaatagataatatttcatccacattagtatgttcaaattgtgtatttaaatttaataccaatcttggatttaaatctataaatcanagaaatagagaagagataagaaaagaacaagaanatggcatctgggcctagttccccaatttagcccatcccaccttactcccctttgcgtcggccacta

SEQ ID NO: 52959 - DNA, 435 bp, Zea mays
  unsure (1)..(435): unsure at all n locations
tactaagcttccatcgataccgcctcagactgttaattaccaggtgtgagtcttctatgattgtttccgagttctccgctttgattaccacatcatctacgtaggcctccacacgcttgccccagtgatcggctaagcatgtttgaatagctctctgataagatgctccagcgtttttgagaccgaacgacatggaggtatgacatacagcaccaaacagagtgatgaacgcgggttnttccttgtctttctttgcctaactattatgatggtatccggaatagcaatccaggaaagacagcatagaacatccagcggtggagtccaccacctggtctatccttcggagctcgaaaggatcctctggacaatgttggatgagatcagtataatcaacgcacatgcgccaatccactctattctntttgagtacaa

SEQ ID NO: 52960 - DNA, 472 bp, Zea mays
ggtcaagcaggtaaacaagtgggaggagcacatcacagcaagaatgtgatgaccacttcaagacctctggagctgatgcatatggacctcttcggacccgtcgcctatctgagaataggaggaagtaagtatggtctagttattgttgatgacttttcccgtttcacttgggtgttctttttgcaggataagtctgaaacccaagggaccctcaagcgctttctaaggagagctcataatgagtttgagctcaaagtgaagaagataagaagcgacaacgggtccgaattcaagaatcttccagtggaggagtttcttgaggaggaggggatcaagcacgagttctccgctccctacacacctcaacaaaatggtgtggtagagaggaagaacatgacactcattgatatggcgaggactatgcttggagagttcaagaccctcgagtcgttttggtcggaagccgtgaaca

SEQ ID NO: 52961 - DNA, 449 bp, Zea mays
  unsure (1)..(449): unsure at all n locations
ggactcttgcattcaaactaagctccagtttagtctctgccttgtatcttaagagcttcggaaaaaaggttatcaattccgaacgtaatttcaagaattccaaaatcaatatggccaaagtgcgctccactactagagttgatcgtgatggagatgaggccgaagctgctgaaactgttccgatttctgaagcaatgacgcgctctgggctggtttcatcagaggacacacctgctgtcgaatcaacacaagctgatgttgaagaagatggttctgacgatgagttcagctgcggggtaccaagtaaacctagtcatttgaactntggaaagtccaccatttctcgagctgaccttccataaatggtgaagctgggctacttcagcgaagcaaaaaagaagctggttcatttggcggagaggacactacttcgaagccggttaagaatg

SEQ ID NO: 52962 - DNA, 200 bp, Zea mays
acagactaagcgcggaccgttcgggcccttgcggcggaccttccgctacaccaggatgatcctcggacagaaccaatgcaaaaacacatatctctactacggaccgtccgatgaaaaagcaagctccgtctgaggccaagcgcggaccgtccggcctcaggcgcggaccgtccggcctcaggcccggacctcccggccgt

SEQ ID NO: 52963 - DNA, 476 bp, Zea mays
  unsure (1)..(476): unsure at all n locations
tcggcatctctacttgcttctgtttctggagcccctggcgtattatatcgatgaagtctgctaacgcctgtgactgaatcgaggatctatgcacataatccatgctgaattcgttgagttccgcagcccactttacaatccttccagtagcttctatgttcctcattatatccttcaaaggctgtgatgaaggaacaattatatggtatgcttgaaagtagtgtcgaagcttcctggaggccattaagacagcatatagcaccttctccaattctgtatagtatttctttaataaactgagaacttcggagacaaagtatactggggcttgctttntagtttggccttcaagtttctcctggacaagtgccgcactcactgcagagtgcgaagctgctacgtacaacagcagaggagcccctggcgcgggtggagtcagcgtcgttagatctatcagatactaattgagctcttcg

SEQ ID NO: 52964 - DNA, 417 bp, Zea mays
  unsure (1)..(417): unsure at all n locations
taccgcatntgaagcatgatcgctttccctcggtcttagtcttgcttggctgtccctttcgaccctgtagcgccgtcttgaatcttttgatgatgagggccatctcttcatcattaagtccggccgcctgaaactgtgccaccttgctaggtagcgcctccttgcttcgcgttgctttgagagcaaggggttgcggctcgctgatcggaccattcaaggcgtcgtccacgtaccttgcctgcttaatcattattcgcccactaacgaattttccaagaacttctttgggtgacatcttggtgtacctgcgattttcacgtatattgttcaccaaatgaggatcaagaacgggtaatgaccttaacattatgcggacgacagtcgggtctcgtcatcgcgtgctctcgtagctcctta

SEQ ID NO: 52965 - DNA, 406 bp, Zea mays
  unsure (1)..(406): unsure at all n locations
ncatcagcaatatcttcttctttcttagacgctgcggtttcatcttcttctgtagcagaggcagcttcctctgcacccatgactatcagcatttggccaatatgttcaattgtgctatcctaaatcacatcttcagctgaggtaacatcaacggctgcggcctccgaaggtgcaaattcaatatctgcctcctctgctactgctcgtgtattttgggccgaagctctcggcggcgcgttgccaattacctctgtcacagcaatgaatctttggccgttcctttgattggagtcctcaattactcaggctccttgaccttctgaagaaacttagtcagttgaagacccagtgcacttagctccggacgtgaggattcagacattaccttcagaatctcttcaacaac

SEQ ID NO: 52966 - DNA, 435 bp, Zea mays
  unsure (1)..(435): unsure at all n locations
tgtgaagagtactgtggcctgtgctgctgactccctctatcatcagtttgagtagagttatgaattgacctaacgtgccttgggtggaatcttcctccgaagcccctagtcatttcagagaacctgaatgcttcctcccttctttggcggaagtcgttatcggctcgaatgtattcgtccatcttctggagcagcttctccaacgtttgtggtggcttcctggcaaagtactgcgctgaaggtcccggccgaagccccttaatcatggcctcaatgacaatttcattgggcactgttggcgcttgtgccctcagcccaagataccttcggacgtacgcctgaaggtactcttcatgatcctgtgtacactggaagagagcctgagtggtaactggctttgtctganatccttggaagctggttatcaatataacc

SEQ ID NO: 52967 - DNA, 234 bp, Zea mays
gcgagcgacactcgcatccttatcaacaaagcctaaccttcgtccgccagttgcgctcttgaactgactgaccatcatgcccaactgggactcactgcacgacacctaactcaagacagatcgaaagtatgtgttttcttcctcaatacttgtcttgtcgtgtctgcacgactcaagggcagacttgtaaccctcacaaagtgcacactgcacaggtgcagggacactcactga

SEQ ID NO: 52968 - DNA, 401 bp, Zea mays
  unsure (1)..(401): unsure at all n locations
tgtcaaaagagntacgcacgacagcgacgacaacccttgtactttctagntggagaatatgtctacctaaaagtttcaccaatgaagggtgtatcacatttcggggtaaaggggatcttgcacctcgatacattggtccttttcctatccttgaaagatatggaccagtggcataccgacttcagttacccgaaaccttgtctgcagtacataatgtgttccacgtgtctcaattgaagaagtgtcttcgggttcccgatcgaaccattgaagtaacggatgttgccttagaaccagacttgacgtattcagaactccctattcgagtcttggatcaaaaggacaggattacccgaagaaaaactctcaagttttacaagatacagtggaaccaacataca

SEQ ID NO: 52969 - DNA, 336 bp, Zea mays
acgagcgagtcactcccactttcttcgctttattatagcgacggcttgacatttcttgactatattttgagcacgaatcttccgccctactttggttggagaacctgtagattgactacctctttctgacgtggtcaccatggtctcatacttctctggacgagatctagggaacttatgacagacgatccgcgtgtggtacctgaataccacgtgccttgaggtccttcgctatctcacttaaccgagggaccatatggcatactctttgatcctcgttcgtaatggagcgctcaaactttccttcgacacacatacctctgtagtctctcctct

SEQ ID NO: 52970 - DNA, 420 bp, Zea mays
  unsure (1)..(420): unsure at all n locations
ctcagcttggaaggttcttcatccncacatgtgctaagcggcgatgccacagccagcccatgctagtcttagcaattaagcatgcatctagaccgacctcctcttttgcaaaatcaactaaatagagtttgccgtctaatacacccttaaaagctaatgaaccatcacttcttctaaagacagacacatatacatttgtaaatagacaattatatcccatattacataattgactaacagatagttaattatatccaagagactcaactaaaaacacattagagatagagtgttcatttgatattgcaatcttgcctaagcctttcaccttgccttggttcccatcaccgaatatgattgaagcttgcgaatccttattcttgacgtaggaggtgaacatcttcttctcccgcgtcatat

SEQ ID NO: 52971 - DNA, 470 bp, Zea mays
  unsure (1)..(470): unsure at all n locations
tcgcccttcgtccgaatcgtaggatgttgatccaacggtggcgattagtgcagggagtacctttcgggtgtgcagatatgggcagttggatgtcgatcggagggctcagggtggatctcgggtatttaaaatctgagccgtagatctagcatcgggtggctgttaatgaataccggttcgcgagtgtggaaatctaatccgagcccctgattttagatcggacggctganaacacaagataccccttcgggtggcaacactttaaaagagaccctggactatttaggatntaacccgtcgtccacctctgcagtgttatgagtctcggttacatttacgcctgggcccctgacttctctggaaattgaggcccgatccagaactgtgttaaatcgattaaatgaattagaaattggattntaatatgaaataaaccctagaacttgtataatcatagaaatccattttag

SEQ ID NO: 52972 - DNA, 467 bp, Zea mays
  unsure (1)..(467): unsure at all n locations
tcaagtgatttgaagttccatgctgaatcattcccaggttcaacttctccatttcttggcatanagtaatgtcagaagtcttcatggtaagacaatgacagaaagccttacgacttaacgcatctgctactacattagctntgtctgggtgatagtgaatctctaattcataatccttgatcagctcaagccacctcctttgtctcatattaagctctgactgggtaaagatgtacttcaagctcttatgatctgtataaatgtgacagacattccccagcagataatgacgccatatttttaggacatgaaccaccgcagctaactccaggtcatgagttggataatgttcctcatgccggcgcaactgccttgaagcataagctattactcggccctcttgcatcagaacacagccgagaccactgcctgatgcatcacaatacacatcanagggcttttcaata

SEQ ID NO: 52973 - DNA, 498 bp, Zea mays
  unsure (1)..(498): unsure at all n locations
ntatcaaatggacgtganaagtgccttcctcaacggaccaatcatggtagaggtctatgttgagcaatctcccgactttgaagatagtgagtatcctaaccatgtctataggctctctaaggcgctttatgggctcaagcaagccccacgagcatggtatgaatgcctaagagatttccttattactaatggcttcaaagtcggcaaggccgatcctactttatttactaaaactcttgcaaatgatttgttcgtatgccaaatttatgttgatgatattatatttgggtctactaacgaatctacatgtgaggaatttagtaggatcatgacacacaaattcgagatgtctatgatgggggagttgaggttttttctaggattccaagtcaagcaactccaagagggcaccttcattagccaaaccaagtacattcaagacattctaaacaagtttgggatgaaggacgccaagctcatcaagacacccatgggaac

SEQ ID NO: 52974 - DNA, 434 bp, Zea mays
  unsure (1)..(434): unsure at all n locations
gactcagccgctactagccttgaaatcatatcactatttcccgatgcgtctcttagtttcaattggcgtgttgaaactgtcatagcctgcatgactcaaaaaacaactctccccatttattactgaaacacaagagaaaggatatatagtatgcctaagtgactacacagtacagagcaataactaacatgctctgcgaacaaaatgggaaacaaagctggctgagcaataattctatcacaagtgtaccaaacaaaagaaagttgatgatgatgtgtctggaacgatagaaatagctctctattaatggcttatgttacttgacctgagattgaatngcatatggtagtgcccanagaccacataaaaagcaatgccgcactcatgcatcanggatgacactagcaaatattaattataagcctgattctaat

SEQ ID NO: 52975 - DNA, 464 bp, Zea mays
  unsure (1)..(464): unsure at all n locations
tcagacanaatcttatgccaatgtttaggattatcagctatcttctttnttatcaaattaatcaatgtcctattactagactcggcctgtccattggcctgagcataatatggagatgaattaagcagcttaattctatataattcagcaaattcacgtacctcctttgacataaaagaagtcccttgatctgtagtcaagatctggggaatgtcgaatctatgaatgatatgctcagttatgaactcaattacctccttgtgtgtcatgttcttcagagcaacggtttcagtccatttggtaaagtagtcagtggcaactaacacgaactgatgcccttntgatgatgaaggatgaatntctccaataaagtccaatccccatcctctgaaaggccaaggcttgatgataggatgtaattcgactgcanggaaccaatgtaagtcgccgaatttttgacacac

SEQ ID NO: 52976 - DNA, 366 bp, Zea mays
gaaactcagcttagtcttagcgtagtctcgtctagtaggttatttatacgggtagttcctatatcctgacatttatgtttgcatgatgaattatgtttggtttggatctttgtaatgattgtcaccatagtgtgggtatcccctgcattttggtttgcatactatgtcaataaagctagttatatagttgggaaacccattattctcctttcctctgtatctgagaagctgtgtggtctgtgttggagatcagtgaagatgctcatctgttcagtgctgttggagaattctatactcttttcttatgctgcaagctttgccagatcagttctgatgtgtggttgcgttctgcagatgtcaaagaac

SEQ ID NO: 52977 - DNA, 412 bp, Zea mays
  unsure (1)..(412): unsure at all n locations
tgtgaggttcttcatccctacatgtgctaagcggtgatgcctcagccagcccatgctagtcttagctattaagcatgcatctagaccggcctcttcttttgcaaaatcaactaagtagagtttgccgtctaatacacccttaaaagctagtgaaccatcacttcttctaaagacagacacatctacatttgtaaatagacagttatatcccatattgcataattgactaaccgatagcaaattatatccaagagactctactataaacacattagagatagagtgctcattagaaattgcaattgtacctaacccttttaccttgccttgattcccatcaccgaatataattgaatcttgggaatccttattcttgacgtaagaggtgaacattntcttctccaccgcatat

SEQ ID NO: 52978 - DNA, 394 bp, Zea mays
atgtgaagctgagaccgcgcgggtgacttgtacgataagagagtctcggtgtacagtctccgtctgagtcgactaaggaccccgtctatgtaagcttgctgaccgacgaccctctaactggtcacatgcctcggcatgggtaaaccttgcctcgggcagactaacgccagaataatataacacgcactgggccgggagcggtggcgagagtaatgtgtaccctccgcggcaagaggctggacggaggagtatctgtgctctctgctgacgtgaacctgagctggtcttaagaaccccggtggcgggtgacttatgcgagggttaaagagctcgtatgtcgtgtgatcggagaacctcatctgagaacaatcgatgtggatcaccgcaccttcgc

SEQ ID NO: 52979 - DNA, 435 bp, Zea mays
  unsure (1)..(435): unsure at all n locations
ctcagctttcctatagtcttggatcactctctntggagatctgaatattaagttatggatgtttaaagtctgaatactgaatctgtctaattctggacatcaaagccttctagtgtcttttgtccttagttaaatattgaatcaccttgagatgattataaatgatatgtagacaattttattacctttccagaaagtctatgatcaatttgtttggatgtctgaacctgtagttgtgaatttttgaagtcgcaagtctgaatctggccaacctggacagacctgttattnttgcacagttcgactgtgctaagagtctagtcatattgagacgataataccaaagttgtagagcgtgtcccaagatttgccaaaaatatttagtcactattttttagataaatattgaagagttatgactgaaacaagcaactg

SEQ ID NO: 52980 - DNA, 387 bp, Zea mays
tgcgataggtgaggtgaagccacacgcaaaggacgatgatttatggataattcggatgacaaatatggctgttgattggagtgctatagcggatggtgaaaattctttcatacaagcaaacccatcaagctcaagtcattcaattcttgaagaagagcttttacctcaagatatgccaaccattgtggaaaatgcgctagaagaagctgctagtgaggaagaagaagccattgaacaagatgatcaaattcaaagacattctctggtgcctcacccttgagtgcactacggcgttcagagagatcatactgtggacaacattctgtgtagcgtcaggagaggggtaacaactcgagtctcgttaacaaatttatgtgaattttactc

SEQ ID NO: 52981 - DNA, 452 bp, Zea mays
  unsure (1)..(452): unsure at all n locations
ntcaccctttntgtgtccaatccacccgtgattgatagcaatttgggtcttagagtgcgaccttctgctgaagaggtccgtactttggttgcttcgctcggggagatacctgatgatgaacggcagatttattttgaagtacccctgaaccctagtgatgcagacataaatgacatgcttgatctgctagctgaggattcatctgatgctgctcctgatggtacgttggcagtggcgccccttccagaggttgatacaaccttggaagtcccgaaacctgtcagtactcgcccgaggcgccctagtcgaactagtcatcctgagccttctgcttatgagcagaagaagaagagaagacgcctccggcgagtatccagctttgacggngatgccagtaccttagctcctgctgctgaagaaatgactgcaactggtcttgctgatattgatcc

SEQ ID NO: 52982 - DNA, 455 bp, Zea mays
  unsure (1)..(455): unsure at all n locations
aagcttctaagggagaacacattntacgactaacaaatgctcatttttttaaagacaggatttgtagcgcatgccaagccgggaagcaagttgtcactcatcatccacacatgaacatcatgactagtgacaggccactggagctcctacacatggacctattcggcccgatcacttacataagcatcagcgggagtaagtactgtctagctattgaggatgatgatgctcggttcacatgcgtgatctttttgcatgaaaaatcccatacccaagagaccttaaagggattcttgagacgggctcaaaatgagttcggcttaaggatcaagaaaattagaagcgacaacgggacggagttcaagaactctcaaatcgagggcttccttgaggaggagggcatcaagcatgagttctcttctccctacacgccacaacanaatggtgtagtggag

SEQ ID NO: 52983 - DNA, 450 bp, Zea mays
  unsure (1)..(450): unsure at all n locations
cgggaatnataccaattaaaacaagcaccatctcttaacatattatttctattgataaactcaacacaagagatggcattagtagcacaagcactagtttcttatttagcaaccctttatatgtggaaggcaagctagttgctcaaatcagaaaaacctcataatatggactaaatttcccttgagcccttaagcacaatatattttgaatgatatggataatatgcatggttattcaataaagtctaaagggctgacttaatccatattatggtgagtgtctaatatagaagaatcaaatccaaattaactagagagagtacatcacatagttctggatttgttgaccatatgataatattcatttatcttccaattagacctttatttcataatcaataactgatgtatatcctcaagtgcttctttatccttaagggctacacaagt

SEQ ID NO: 52984 - DNA, 447 bp, Zea mays
  unsure (1)..(447): unsure at all n locations
ntatcaaatggacgtgaaaagtgccttcctcaatggaccaatctatgaagaggtctatgttgagcaacctcccggctntgaagacagtgagtatcctaatcatgtctataagctctctaaggcgctttatgggctcaagcaagccccaagagcatggtatgaatgccttaaagattttcttattgcaaatggattcaaagtcggaaaggccgatcctacactctntactaaaactcttgaaaatgacttatttgtatgccaaatttatgttgatgatattatatttgggtctactaacgagtctacatgtgaagagtttagtaggatcatgactcagaaattcgagatgtcaatgatgggggagttgaagtattttctatgattccaagtcaaacaactccaagaaggcaccttcatcagccaaacgaagtacactcaagacattct

SEQ ID NO: 52985 - DNA, 440 bp, Zea mays
  unsure (1)..(440): unsure at all n locations
tcggcattganaatagttttttagtgtttccgaagatgtctgtagacaatgaagctgttactgaggcgaaactgtctcttgatgaggagaaaaacctgcggtttcttatagcgatgtcgaagacaaacacagaaaaaatcaccaaggaaattctggaaggcttgtctgaagatactagtgacagtgacagttttgatgtagatagtggcggtgaagactccgaagaccgcccctggcgaccaagtcatgcggttttcggcaaatcagctatcaaagaaaaccatcttgccaatatgagaggaaggtatttccgggatctgtccattgtgagggcggacgaaggggaaaagacttgtccacaccctgaagaaaatgaagttgtggtgtaccgaagctttttgaaagccggattgcgattccccttgagcagcttcgtcgcg

SEQ ID NO: 52986 - DNA, 446 bp, Zea mays
ttagacgactacgccaagctcttcaagaatactctttcttgtattcatgtgcacgctcttgctgccctttttgggtggtctgtcctagataatttagaatatataactgggactggggatattaccgcagcaagctttttttagctggcgatgttgctgttattgtttgtcgatttacctctcattgtttctacatggatccggaaaaaataattgtttggaatgttagaggtcttaattctctagctcgacagaattctgttcgtgagctccttaattgttatggagcggatataatctgtcttcaagacactaagatggcacaaccttctccgcgtgctctcctctctatgttggggtctgattataccggttcattggccctgccttctaatggttcgaggggtggaatccttattgcttgcagacgacacttgtggataact

SEQ ID NO: 52987 - DNA, 434 bp, Zea mays
  unsure (1)..(434): unsure at all n locations
tagaaaaatctggtatgaatctgcgataatacccagcttgttcaagaaaactccggacttggtgaacagttgttgggggtttncactccagaatatctttgaccttgctaggatctaccgcaattcctttaactgataacacgtgccccaaaaattgaatttcttccagccagaacgcgcacttgctgaacttggcatatagctgatgttccctgaggcgccgtaatacaatccgtaaatgctgagcatggtcctcttcattcttagaatatatcaagatatcgtcgatgaagactaccacgaacttatccaactcgggcatgaacaccgagttcatcaaataagtgaaatgggcaggagcatttgtgagcccgaaagacattaccaggtattcgaacaatccataccgcgtagtaaacgcggtcttcggtata

SEQ ID NO: 52988 - DNA, 444 bp, Zea mays
  unsure (1)..(444): unsure at all n locations
ctaacccctgcgagaccttttnccgcttctctctaactattatgaatgcgacatccaatgtcatacttgatgcatattcactctatctgttcccttgtatgatgcactgcttgtttcccaattcgaatggatgaatgtatgtatgcttgcaatcgcataaagaacgatccggtccaaaagccccaggagctcgcacgagaagcccctgagcaccactcggttggtggaggcaagtgtcctttgacctatctctgtcctattcattctttaattcaccccccgcattacacctttatacctaacgattgactagcttttgctatccatgtccttgcttacctatttgggttggattattatctgttagctttatgctattgctcaactctaatcaatgaacatgacgagattatctatgatacgctgctctcccttctcttatta

SEQ ID NO: 52989 - DNA, 448 bp, Zea mays
ctatggatgtaatttggtacatgtaaatcttgtcttggcttatagtaaacatttccaaatctgctgtatatatttctagcttaactgccatctgcaggtgaaaaaaaatcaatagtcagtatgaattacattagcataaacacaacagagcttttagaggttgtttggtttactgtttaacttgtcacagtttgccacgtctaatgttagacaagtttgatcaaattagacatgtgtttggtttgaagctacaattgtggtaagattgttctcctgctacgtaggtcttactcatcaataacggataaaagtgtggcaagatttccttagacgtgacaaactgtggtggagaatttgagcatctaaccttagacaaatgtggcataaaattgtgtgacaacttttggcattataggtatagaaccacacagccctaattccaccttct

SEQ ID NO: 52990 - DNA, 347 bp, Zea mays
gctctctaggcccgaaagacgggatgacaaagaatgaatgctcaatgacgcctctgctgacaccacacacatcattggccgaccaagcaaaaacaaccttggtggcgaacaaaaaccctaacaaagatcgtccccgctcctcaaacagttgagaccccaacagtaacctctgctctggcacgactccacatagaaacatgggctccggctgaacaaccgaagcaaccctcactccacaggacatgtactgcgcacaaacttcggctccacctatatcgaggagcgcctataaatccgcccaacttccatcggcctatctgggagctacttaacctccatgaataaca

SEQ ID NO: 52991 - DNA, 233 bp, Zea mays
ccgacccaaggtcggactctggctcatcctccgaagacaactaacttcgcctcgtccgattcatgggtttgactcgggctcggccccagaagacgacgaactccgcctcgcccgaccctagggcttggactcgggctcggccccggaagacgacgaactccgcctcgcccgaccctagggctcggactcgggctcagccccggaagacgatgaactctgcctcgcccgatcta

SEQ ID NO: 52992 - DNA, 444 bp, Zea mays
tgaagaccaagtcaagaggcaggccccaatatattttgtatccgacgctcttagcttatcaaagaaaaattatacagaggtggagaaggtactgtatgctgtcttgatggcctccaggaagcttcggcattattttcaagcttacaacataattattccttcttcacaacctctgaaggatattatgaggaaccgagaagctactggaaggattgaaaaatgggctgcagagctcaatgaattttgtattgattacgttcatagatcttcgattcagtcccaggcgttagcagacttcattgctgactggacgccaggggctcatgaggaagaaacaaataaagacgccgaagcatggacagtgttttgcgatgggtcttggggaaccttccgagcgggagcggctgctgtgttggtttcacctttcaaagttaaaacttgtta

SEQ ID NO: 52993 - DNA, 357 bp, Zea mays
acttttccttcttgaccatcagtcaccatatttgactccttatctcttggacatccacatgcatactcaaggcattcacgccattcactatggctagcataggcaaaaccaccaatagcatcgctttcccaccctgcgttcgaatcctctgtgtgtacctcataattatttaccaccgaggctcgctaacttgtgtctaccttatcataatactccacctgtcttcccttctctggctctacctcaacatcaacatatcccacctgtctaccctgctgtctttaccgcaacttcagactctctctaaaacattaaattgcatgggcaacaaatatcatattaataatttagttataa

SEQ ID NO: 52994 - DNA, 385 bp, Zea mays
agcttggcctcaggcgccataagttactctgcctcgcccgacccagggctcggactcgggctcagccccggaagacgacgaactccgcctcgcccgatccagggctcggactcgggctcggccccagaagacgacgaactccgcctcgcccgaccctagggcttggactcgggctcggccccggaagacgacgaactccgcctcgcccgaccctagggctcggactcgggctcagccccggaagacgatgaactctgcctcgcccgatctagggctcggactcgggctcggccccggaagacgacgaactccgcctcgcccgaccccaaggctcggactcgggctcagccccggaagatgacgaactccgcctcgcccgacccca

SEQ ID NO: 52995 - DNA, 451 bp, Zea mays
tgtgaaggttcttcatcgctacatgtgctaagcggcgatgccacagccagcccatgctagtcttagctattaagcatgcatctagaccggcctcctcttttgcaaaatcaactaaataaagtttgtcgtctagtacacccttaaaagctagtgaaccatcacttcttctaaagacagacacatctacatttgtaaaaagacaattataacccatattgcataattgactaacagatagcaaattatatccaagagactctactaaaaacacattagagatagagtgctcatttgagattgcaattttacctaacccttttaccttgccttgattcccatcaccgtaaataattgaatcttgggaatccttattcttgacgtaggaggtgaacatcttcttctcccccgtcatatggtttgtgcatccgctgtcgataatccagcttgaacc

SEQ ID NO: 52996 - DNA, 383 bp, Zea mays
ttaagcaccgcggctgcaacttatgcagcgtgggaatggtagactcgaagctaaggtgtatgtatggcttgagtgaagggcaaggtggaacggagggaaaacgggaggaagcgcgcggccaccggcggcatggctgttcggccttgcgtctgggctgaaaacgaggtgttcgccatggcgcacgggccgaaaacggaggctcgggcacgaactcgaaaataagctaagttcaagcatgtggaaagacaccgaacatacagtgtatgtctttggtgaagggcacactggaacggaaggaaaacgacacggaggcacgcggcgacaggcggcatggctgttccgccttgcgtttgggctgaaaacgaggcgttcgccatgtctcg

SEQ ID NO: 52997 - DNA, 446 bp, Zea mays
  unsure (1)..(446): unsure at all n locations
gctttccttacataacanaacataaaagactgctactcttatctgtcgaagcttttccttacataacaaaacataaaaaactgctactcttatacacaacgattcataaaaaaccacctcttcgaaacttttcttttacataacgaatcataacaaaccatttatccgaaacttttctctgtgccgaagcaaccatttaggaacacaaatgctatgaatgaatgcttatgcatgcaaatgccatgatgtaatgtgcaaatgaatgtccgaagcgtatgtccgaagccacactcatccatcattttcttaggagcaaacacacgtcagctctgcattcccttaggaacgactttggagcatctttgccttttacttaggcagtatcagcggtgacttttcgctgtgagctctgcatccccttagggacgtctntggagcttcttctc

SEQ ID NO: 52998 - DNA, 376 bp, Zea mays
agcttcagcagctgcaaagtactgtatgttcatattcaaagaactatggattggataaaaagaaagacagcaacggcaaggttactgccaaccaatcactggtatgttgcatctgttcaataggagcaaataagctttactattctacattactcgctcagaagtctcatgcacaccggttttaaccaccaactgtggctgaaagatgtggccctttcttgttttgcagatacaaaagattgtcccccatctttggtgtgacaactgtactctttagaatcacataaaccacaacatcttctggtatgtaatttaattatcttattctcttatggcagaccaacctttttggagcctccaaacgcgtccctaacac

SEQ ID NO: 52999 - DNA, 442 bp, Zea mays
  unsure (1)..(442): unsure at all n locations
tcaccaaaacagtcaagaatgagttngacacagtttagatctttcttcctgggctcgacaaacagcactacatcatctgcataaagagataatctaaacttcacaatggcactgtccaaactggccaataattctttttcttctgccactttgaaaaggctgctgaggacatccatcaccaggacaaagagcattgcggagagggggttcccttgcctcaagcctctacgatgcctgatctgttcccctggaaacccatttaataaaatctgagttgtagaagtggccagaaggttggagacaagattcctccacttaataccgaagccaaggtgggtcaacacctcaagaaggaaagcccaggaaacagaatcaaatgccttttgtaaatctaattncagaaaaaggctggccacttttttcctgcgcacggttttaattg

SEQ ID NO: 53000 - DNA, 386 bp, Zea mays
  unsure (1)..(386): unsure at all n locations
agcttggaagttccttgcaggatgatcttggggttgagacaattggtgatctcctaagttttacagaggaaaaattacaagagcagtatggagtaaatactgggtaattatgttcatgctttattaatgtgttattatttggtttaccttgattacttggcttcttcaatattatcaaatctggccatatgaatgtaatgtatgttctccagggcagaaagttgcacattaggtaggttgtcagttcttgcttcaggaactattttgtttttatttttcttaccataacatgctttaagatttttgctgctgaaaccatctcaagtttgaccatataatatatatccctactactatataagcatggngtgtaatggtaagtaatc

SEQ ID NO: 53001 - DNA, 445 bp, Zea mays
  unsure (1)..(445): unsure at all n locations
ttgngttaanaagattaagctgagaccgggcgggtgacttgcacgagaaagagagtctcggtgtagtgtctccgtctgagtcgattaaggaccgtctcgatgtaggcctgctgaccgaggaccctttaactggtcacatgcctcgtcatgggtaagccttgcctcgggcagactaaggccggaataagataccacgaaatgggagtggagcggtggcgagagtagcgtgtaccctccgtggcaagaggctggacggtggtgtatctgtgctctcggtttgcgtgaacctgatccggtcttaagaaccccggtggcgggttgacatatgcaagggttaagtgctacatatgtcgtgtgattggagatcctcagctgagtataatcgattcggatcgccgtaccttcgcggntatggagacttggccactgacttacacgtagcatt

SEQ ID NO: 53002 - DNA, 383 bp, Zea mays
agcttcaatcttcaacccatgattcttatttgtcggtaggcgagacaagacgttggaccaccgcctggacgactaggcgaagcctaagtcgagcaagacgacgccttatcaatctaagaaccagcaagacagtagcatggagaggaagaaaaagaagggatagggtagcaggcccagcccaccatctagcccatatatcccccttgtttccctcctgccgatggagccacccccacccccgaaggagccgccagcgcctccgattcgggccgctgccgcgctgattcaacgcatccccttccccttctccctccctcttgctggttcttcactgggtgacagggacgcctagctacttttgggcgcctggacgcctaggcgac

SEQ ID NO: 53003 - DNA, 437 bp, Zea mays
  unsure (1)..(437): unsure at all n locations
ntatcaaatggacgtgaagagtgccttcctcaatggaccaatcaatgaggaggtgtatgttgagcaacctcccgactttgaagatagtgagtaccctaaccatgtctataggctctctaaggcgctttatgggctcaagcaagccccaagagcatggtatgaatgccttagagatttccttattactaatggcttcaaaatcggcaaagccgatcctactttattcaccaaaacacttgacaatgatttgtttgtatgccaaatttatgttgatgatattatatttgggtctactaacaaatctacatgtgaagaatttagtaggatcatgacacagaaattcgagatgtctatgatgggggagttgaagtattttctaggatttcaagtcaagcaactccaagagagcactttcattagccaaacaaagtatactc

SEQ ID NO: 53004 - DNA, 361 bp, Zea mays
  unsure (1)..(361): unsure at all n locations
cgcctacaatcttcgcggcgccagagatactttactgctgcganggcgaatctagggaaaggattctcaccgggatcctcggcatcgaatccactgcccacaaaaagagaagcaatcttgtgggggtgatgccttgccgatggtgaacttctcccgacagaatggctcccactggccaccaacgcgatgccccagaagcacaggatcacgtatagcaccgatgacgcgtgacgcggaccagtcgttccccctcgtcgctctcgatgtatgaagctccgacggcgaaactctctcttccctctagaagactccctttctctctctacatcgaggttcctctggtggcggcacacggtggttg

SEQ ID NO: 53005 - DNA, 325 bp, Zea mays
gaagacacgccgagagcccgcgcgaagcaagatcaacccggatgggacaagcgacagccccacgcacaggcgacctatgacaacagataccaggccacggtaaagacgccaccactccaagcgctctatggaaggagctgcacaactccgcagcaatgggatcagcctggagacaagcaagcgacagggccacacacacagcacgaagcccaagacaacaccacgacggtacgagagaatccgaagagagcgcactcgaggcagcgaacctatgcacacacacgaagaagacagccgagttacgaagtcagagacgtctgccatc

SEQ ID NO: 53006 - DNA, 388 bp, Zea mays
agcttaccgcatttgaagcatgttctctttcccttggtcttagtcttgcttggctgtcccttgcgaccctttagtgccgtcttgaatcttttgatgatgagggccatctcttcatcattaagaccggccgcctcaatttgcgccaccttgctgggtagcgcctccttgctccttgttgcctttagagcaatgggttgaggctcatggattgggccattcaacgcgtcgtccacgtacctcgcctccttgatcatcattcgcccgcttacaaattttccaagaatttcttcgggcgacatcttgatgtacctaggattttcacgaatattgcttaccaagtgaggatcaagaacggtaaatgaccttagcattaggcggacgacgtcgt

SEQ ID NO: 53007 - DNA, 457 bp, Zea mays
  unsure (1)..(457): unsure at all n locations
ctcagcttagggatctattcaactaaagtaagatgaagctgataagatgccaatgtatgaaaacttcctctncttcagttgctttagtattctatccttagggggatgtaccatagtataggttaaaatccttgccatataaaatgttcaatagtgcatataactttgacatcaactatatgtgtgcactaatttaagggaatttagtctatcattttgggtttcaataatgatgattcatttgtcatccacatataaggatcatcatttgtgaaaccctcccttgtgtttctaatgctctcttttctaagtgtttcaacaaggccctcccaagttctttgaagatgaattcaaaatctacaaatataagagtcttggttgtttcaatcattgagcttcaattgatctcatatcaagtatgatcgaatcaagaaaatatgaaagagttcatgatcac

SEQ ID NO: 53008 - DNA, 386 bp, Zea mays
  unsure (1)..(386): unsure at all n locations
agcttttagctttgaagcttttgttttgaaaacagtnttttagtgtttctgaagatgtccgaggataagaagactgttgctgagacgaagctgagcctcgacgaagagaaaaacttggggtttcttatagcgatgtcgaagaccaacacggaaaagattaccaaggagattctggaaggtttgtccgaagatactggtgacagcgacagctatgatgtggacagtggtggcgaggactccgaagatcgtccatggcgaccaagtcattcagtttatggtaaatcaactatcaaagagaatcatcttgtcaacatgagagggaggtatttccgggatttgttcattgtgagggccgaccaaggggaaaaaacttgcccacaccctga

SEQ ID NO: 53009 - DNA, 443 bp, Zea mays
  unsure (1)..(443): unsure at all n locations
tgacagaatggtntgctcatcagattgcgagcagctgttttcttattgccttctgcagagtgctagcaccgatggttcggatcattggcctttgctccttgggctccaggttttaacacatggtcgcagcagatttcactttgaatctcactggacaaaattgcctgattttattacaacagtggaggctgcttggaattctgttccctcctccccttgcccttctggaaccctctccaagaagtttggagccaccgtcaggcgtctccaaagctggtcccaaaaaagggtgggtcatatctcctctcagcttgggatggcacgagaaattatgcacaagctgcagtctgctcaagatctcagacccttgtcagggctggaaaattggctgttgaagcagcttgatggtcatgttgtggccctttcaaccttgcaacgttcta

SEQ ID NO: 53010 - DNA, 379 bp, Zea mays
ctataacaagagaatataggcaacagctcgaccatatgtttttatattatgtgagttatacaaatacggagcttgctctccattgcttaaatgttcgtctacagctgaaggtatagaattgatgaatgaaatacacgcaggtctgcgtggatctcacatcgcatctaagcccttgctgacgaaagtttctccccaaggattttattggccgaaggcagcttccgatgcaccagaattagtccaaaagtgtgaaggctgtcaaaaatgtgccagagatcaaaaacaaccttcatctctgactcagttaatacagcccacttggccgatgcaaaggtggggcctctatttgctatgcccactttcaccagcacaacgaaat

SEQ ID NO: 53011 - DNA, 388 bp, Zea mays
  unsure (1)..(388): unsure at all n locations
cagctggtggcgatcgattgcttgtaatccggggccataaaggacctcgnggcgaggtaatattgctgcattcctggtgccctgaaggaggggaagatggtgctgactgggaggtactcttggtgaaggaacgtgcaggcgtcttcgtttacaactgcgcaataatggggtgttggtgtgcgaccggatgtcatcacgtacatgacgctcatggctgctttctataagcgtggcccacgccaggttggggatggtttgtggaatctcatgaggacgaggggtcgtgtgccgacacttgctacctacaatgtgaagatccaactcctggctaacaggggaagggggtggcaggcaaaagacatggcaccgcaaatgtttgtggcgggga

SEQ ID NO: 53012 - DNA, 425 bp, Zea mays
actcagctgagccaggcattgcctcaccggagaggcgggttcaccctcgccggacttcggtcttccgccgccgcgcatggaccgagctaaccagtgagtctttttccaattccttgcacccacatcttccctagaatcccgtgaagctctatgacccgttcaattgatctattgcgccgtgagtaggcccgattcctcgccaccgacgagcatctccgcctgcacacgtggaccggctgactccgaccatccccgacggcgacccgcacatcgccgtgatcctcgagacctcccctacgtgctcgaccacctcaccggagcattctcgccgctgttaagcccctccgcctctttcttctccgcagccactgttccattagggagggaccgcgggtttgatttccagaaaccctatggggttttct

SEQ ID NO: 53013 - DNA, 321 bp, Zea mays
cctggacaaagagatgagagcaaggggctataaacgcaacgcctgctacctcagtaccacaatggacgcgtttgcatgttgcattcgctcgctgcggaggaggaagatgttaatggtgcctgactctctcaaccatgcagacaccaaggtactgggtgacacaaacctgccgatgttgaagcgctcggactgaaacggcgcttcaattgaaaggagcaacgcttcaatgacctcgacagagggtgctagatccagctaccttgctatgctttccccaacctgtcagaatgctgcatagacagacaaaagagaacacggtgt

SEQ ID NO: 53014 - DNA, 431 bp, Zea mays
gagaacacatgttgcgactaacaaatgttcattttgagaaagacaggatttgtagcgcatgtcaagcagggaagcaagttggtgtccatcatccacacaagaacatcatgacgaccgacatgccgcttgaactactccacatggatctattcggcccgatagcttacataagcaccggcgggagtaagtattgtcttgtaattgtggatgattattctcgcttcacttgggtgttctttttgtaggataaatctcaaacccaagaaaccttaaagggattcttgagacgggctcaaaacgagttcggcttaaggatcaaaaagattagaagcgacaacaggatggagttcaagaactctcaaatagaaggctttcttgaggacgatggcatcaagcatgagttctcttctccctacacaccacaacaaaat

SEQ ID NO: 53015 - DNA, 380 bp, Zea mays
agctaggtaaactatttttttttttggaagcaaaggcacaggcaaaaggtgttctctctgttggcacttgtacttgtgcttgttattagcgccaagcaggaacgcatgatcttgcttcctctaacttgggttctaatttcatgggcacgagcctggatgatgtgaaaatgaatattgacgttctcaagaactgtgctacagtcctgttcctggtattttcacaccttctgtttccccttgaattatcccatctcactaaggctactaactcgaacagcttataccatcttcaacagcttacctttacatatactcatattcaaactacactcaataaacagctcaatatacaatgtaaaacaacgcaaaacgatgttttt

SEQ ID NO: 53016 - DNA, 415 bp, Zea mays
  unsure (1)..(415): unsure at all n locations
tggacacattgaacctttcagtcctagcctgagtctggaacatatccttgagcgccacgatcatatcgtacacctcatggtttgtctcaaactgcatctggagctcaggctccatgcaagcaagcattaggcaactcacttcaagattagcatccattgctttcttgtaagcggttttagctgcagcagttgcattttcaccaggatcctctggcagtggggtgtctagaacgtcttcctttttttcagccctgagaacaattctcaggttacggatccaatccgtatagtttgttccatttaacttatccttttcaagaattgatcgcaaagtaaatgttggtgtgctangtgccatctacaacaaaataatgcaaaatactaagacaaaaatatccatgacagagtaaagcat

SEQ ID NO: 53017 - DNA, 389 bp, Zea mays
agcttgagttatttttattacattttcttactaaaagtgagtgcaaagaagtaatattatacaaaccagggaggcacaaactcctcccgagaagctaaaagcaaaagatcttaagtggaggaccgagtcctcccgcacttcagtcttgattttcttcttttggaaccaccttggcacagaagcagcaaaagtctgctacttcctcacctaaaaacaacgaagggataaaccctgagtatggaatactcagcaagtcttacccgactaaagaaaagactctcaagggtatgctggttatatgggagtcaaggtaaggcttttcaatattcaaagactctgttttgcagaaatgcttactaaagtggatccttaaaaatccagttttaatt

SEQ ID NO: 53018 - DNA, 451 bp, Zea mays
tgataggcggaaaatttttcactgacatctgggaaaatggttgtctatggatggctcacgaaataataaagaaaagcgaaaaagatactcgtgacactagagaagcaacaaaagcagctgaaaaggctgcggagcttgagagacgaataggtatacttaatgatttttaactttgttgtttacttttgtgacttcaaactgatttacgtttactaccgcagctgaactatctcctcccccagagcccttcgagtcactggccgaagcagaggcaaaggaatcatcagaaattattaacatggttgaaactattatagacgaagtcgttacccaactgctgaccgaggctgcagataaagttttgaaagaagaagaatagctattgtaaaaacattgctggattattaatgtaacatttgctggactatgcttgtaatatttggtgctcatg

SEQ ID NO: 53019 - DNA, 333 bp, Zea mays
atccaccccccccggagtggcacatcccgccggcgagcgcggccacaactaaccggtaagccattgcccaaatacgcgtgcctaaatcccccgagacctctgctgaagctctcggaccactccaagggaactctaccaccctggttaggctggacgcctcaacgccgacgagctcgccccccggctcacatggaccgacctactctgaccagtaccggagacgacccgcacatcgacgggaccgggaagaccacccctacgcccatcgacaccttcgcggagcaaactcaccgccggaagcccctacggcccgggtaccgattattcgggcga

SEQ ID NO: 53020 - DNA, 362 bp, Zea mays
tataaaactaagcttagacatgaattttgaaccaggctttaccaaagttttggcactcatcttaataatcatctcagcgaaggccttcctaagcgcatcttgatcaaacctccaagtagaaacaccttccccttgtattgcttgtaaatatccttgctttccatctttttcaaaattgttaggattgtgattgcaactttgaaggtgtctcttcaaggcagatgtaccatgtcccttggagtctgctttcatgttgcgatggcaatacttgcattttgcagctatcataatgcctttatcatctttgatcttgctgaaatggttccacacatctgatcttggtgccatcttcttcctttcct

SEQ ID NO: 53021 - DNA, 386 bp, Zea mays
agctttccttttacaccgaaacgtttctcaccctctattgcggatactttcaagtacacataatatttgactttaacgtacaaaggttggcgtcgtttgtctgcataactcttttgtcgagcttgtgcctctttcaagttatgtatgattcgttgaaccttttctttcatttctttaaccagggcaggcctgaaaaaccacctttttcctggttcagaccaatacaagggggtacgcgcacctcgtccatacaatgacttaaatggtggcatcttacaactttgcggatatctcttgggaatagaaaacctttgtaatggtaaacattcatcccattttttggggaattccaaaacacattgccccaacatgtccttcagtatttg

SEQ ID NO: 53022 - DNA, 264 bp, Zea mays
ctataaaactaagcttatagtgatccctgccattacctacgcagtgttatgggttcgatcaacccacgctagatgggatacacgacttgtgcactacaagaaattggttaaagaacgtgggtgacaaaccgtcgaacttaatgtaataagccgtcgaacttaccgtaagaacgtgggtttaccgacgaatatagccgacgacgatttttggacgaacttagagaagtaagttcgacggccccgtcgaacttgacattaagaacg

SEQ ID NO: 53023 - DNA, 320 bp, Zea mays
gcaagctcttggatccatgaagattttttctttctccaatcctacagcggcgggcaaatttcaaagaatgcactacgtcatctatttccaaatcatgtgtaggataattccttagtcatgcttcatcaattgtcttgaggcaaaagcaataactattcctttttgcattaacacacattcgagtgctaggtgtgaagcatcgccatacacatcatatccttgggaatgttagcactacaatattggcgtggaagaaacctttttagagttcttcaaaacttcctggcatgcttcatcccacttaaacctttacctttctt

SEQ ID NO: 53024 - DNA, 360 bp, Zea mays
  unsure (1)..(360): unsure at all n locations
tatcaaactaagctgacaggttgcgaggtttgggagcctcgtttttatcanctgcggttctaatggcaccttcaaaagtcaaaacatgttatgcagtcaaactagatttcagttgcacaaataatattgctgagtacaaagcacttctattggggcttcggacactaagggcaatgggaataagaaaggccatcctaaatactgattctcaagtcattgctggccatgtggacaaaagcancaaggcacgagatacaaagcttgaaagatatctggatacagttcgaaggttggaagctttcttccaaggttaataaaggttaaacattccaagatgtgaaaataagacatggtatttgc

SEQ ID NO: 53025 - DNA, 271 bp, Zea mays
aatgccacttcttatttttacagacccccaggcacaagtgtcgagtcattgtgccacctttcatacgggcatgattgaatctctaccggctgtgtcttatccctataacaaggaacagtatctctttaccgttcacgcatctctgttattgcaatcccatcacctcggaattatcccttgccacagcaaaggcataaatgtatccaacattgtattcaaatacccctagtctatacaatatgaaaataatgcactttcgcccatacgttac

SEQ ID NO: 53026 - DNA, 268 bp, Zea mays
aacggaccaatcaaggaagatgtttatgttgagcaacctcccggctttgaagacagcgagtatcctaatcatgcctataagctctctaaggcgctttatgggctcaagcaagccccaagagcatggcatgaatgccttacagaattccttattgctaatggcttcaaagccggtaaagccgatcctactttattcaccaaaacacttgcaaacgatttgtccgtatgccaaatttatgtcgatgatattatatttgggtctactaacg

SEQ ID NO: 53027 - DNA, 232 bp, Zea mays
ccacaacctggcaaagccacttatctaacccacaaaaccccaccgcgcggcaacacgacaccagacgggccaaccccacaagccggcgaggaacacaaacacacccaaagcacaccacacaacggaccagatcaggcccacacggcgccaaagcgcccgccgataacaaaaagaaaggcacacgccaaaacccgcgggggccaaaaaagaaagacaatcaaggcgactacca

SEQ ID NO: 53028 - DNA, 307 bp, Zea mays
aaccaaaaccgctgaagagccgaaacatactgccgaagctgaatgaaaggcagccgagaaacccgaccgagaggaaacgggaggaccaccggagccagaaatgccgaatgcggcaaaaaaccctggaataactcccaagaggaggaggatggaaagcgtgctggacgttgccatggagacgataaaggtatgaactcctacccctacgaagaaatttgtcgaagctgcaacagggtccgccgaaaccgacactgggcccccagtgcccggtgagacaaaggctgctacaactaggcaaggacctgaa

SEQ ID NO: 53029 - DNA, 423 bp, Zea mays
  unsure (1)..(423): unsure at all n locations
gtcgcgtcttatntgtttcttcttcctgagcgcctgttatataatcttcaatgaagtctgctgacgcctgggactgaattgaggatctatgtacatagtccataccgaattctgtaagctccgcagcccatatttcaatccttctagtagccttgtctgttcctcattatgtccttcagaggctgtgatgaatgaacaattatgtgatatgcttgaaaataatgtcgaagctttctggaggccgttaacacagtatacaacacatgctgcaattttggctagttattctttgatcaacttacaacttcgaagatgaagtatactggggccctgcgtccgatttggctatctagcttcttctgtacaagcgccgcactaactgcagagtgagaagctgctacatacaggagttatggagcccct

SEQ ID NO: 53030 - DNA, 383 bp, Zea mays
agcttctatatgagaagactccttttttgctacgtagtgagctaaatgtcttacatttgcggaacgtggattgatttacaacatacatgtgtttacgcctttgatcatgttccttatgcattttgccgcttagtaatggtgcccaagttgtacaaacactccctggacctcacaagttcgctgcaaagtgatgcacatgtttaggggggatgtgttacaacttgaccctttgagactaactatgtgcttgagtttgcttgtttagtctcgaaggaggttagaaagggaaaaggtggacttgtgacatgaaagacttccactgcactccgatgagagggtaacttattccaagttcatctcatgtactcttattgcctttgtat

SEQ ID NO: 53031 - DNA, 429 bp, Zea mays
  unsure (1)..(429): unsure at all n locations
tcggggagccgaaagtccaaaaaacaccttccctgatcttgttgtcgagaaacgattcactctccctgcgcgtagcggncccaccttgcagaattactgttcggtctctgtggtccaccgttcagcgagtgcgagcgggtgcccgcctggtgtaaaacttctggcgcttcgccttcttacctgcggcactatataaacagacgactaggtgtgaagttaccacagcatttactgctatttgcactgttttgctgccaaaattcttaaccatcgccgaagcttgtttgtcagaattgaacgaagctccatcttgaagcctgcttcggagaaaaaagtattaaagtttcacaagttcatagttaaatggccagagtccgttctaccgctatggttgaacgtgagggggaccaaactgatgctttcgagact

SEQ ID NO: 53032 - DNA, 323 bp, Zea mays
ttatgtaagacaaccccttaaaacccgattgagggctaagcacaccaaccacggcgtcatttgcaaaaacactaaaacaatacaactcgggccgaaactatggcctagcgaaagcaccccaggtgtggcaaacatatgcaatgccaacgcctaagatgccaagctcaagagtcagtgaaagaaacaccaggggggggacacccctccccccataaaagaagccgcggcccgagacaaaaaatcctacggcagggaatggtaaaggaaacacaccacaatggcaatccccaaaacaggacaaggcaggggcaacgcgggggcca

SEQ ID NO: 53033 - DNA, 296 bp, Zea mays
tgtggtgtgcgcaagatttatactggttcgcgcacaatgtccctacttccaatgattggtggcttgcgctaccatcaccactgatgatcaaaactcatagtaagggttacaagtatgcgaaagagggaagacaggctcccaagtctctttatcaaggcggaagtggagcttacaagctacagagtggagtgctagctaagtcttggcttggcggcggggctcctgcctcctggtcctcttcacaactcctactcctgttcgtctcgttgtctagggttcatccttgtgggtgcgtg

SEQ ID NO: 53034 - DNA, 310 bp, Zea mays
cagtccagaaaagctaatggcaacccactgtaatttctacagacattttaaaatatattaaaccaccgtcgcagatcaaacctacactagagaccataagctgaaattcaagaaaggaaaatgaataatggcaattacttgcctcctaacaccgttgggacttggccactgaaagggttaaagacaatacaaactccactatgtatcctcaaaaaaacctaaaccttaaaagtaacaagtacctaccgctggtagccccccgttactaagaaaccctcaataattgttgacttaagttctttagcattac

SEQ ID NO: 53035 - DNA, 440 bp, Zea mays
actacagctgttacgaaaatgatctagtaccgcgaaggggctactgtttgtggtatgcttcgcagccgaagatcctgagggaagaaacaccttcgacagatcttctctaaagcagtaccgaagctatcacccataaagcttcggcaaagtgacatgtctcaagacgaaggagtgaaccgacttaaagatgaaatgaccattagacccatgatagtttatgtcatgactgtaatcgattgtaaagggtataaatgtaatttcgcacaggctgcgccctgtgcctataaatagatgaacagtacccccacactgttcacgctatcttgtaattgctcgcacgcaacacttggatttttaccttccatcaagccgaaggtataaatgtaatcaaatatcatatttaaatatccaagctgatataatgataatatatgaatgat

SEQ ID NO: 53036 - DNA, 385 bp, Zea mays
agcttggcggctagggttacaaacttgtatacaagagagattgagagagaaaccgactgatcgcgcgagactcagagggcgagaggtatagagtcgtacgtaggctgttcgcttggagctggcctgggtcctgggccgcttggcggccttgctagttgctgctgatgcgttgacggctgacctcgcgaagtagtgattcagtgaacaagtacaagccccaaggaggctggacgctggctgttgggacctaggatgcgtccactatttgggtccacatgtcatatgtccatcgggtgacggatatggatagccgatatccatacccgcgaaattattacccgtggatatcatatagtatccatacccgtacccacggatatgaaac

SEQ ID NO: 53037 - DNA, 462 bp, Zea mays
actcagctttaatgacctgtgctagtatgtcgggtatcatgcagacacatactagaagaagagagacaggttcaggagggggctcagcactaagctccgtgaccgtctcaacaccgtcagggccaacagctataatgagttggtcaacatggccatctcccaggaggattgtatcatagctcgtcaggcagaaaagaaaaggaagacccctgtggcaggaccttcagctcatccacaacgcttcaggattgtgtctgacactcagaacaggggacctcagcagcagcaagggcgatgggtgatccgaccacagcagcagcagcagcaacaggcacccaaccgcactcagtttccagctcagaggaacaatcaacagcagcagcagtatcgccaggcaaatgacaacaggtgtttcacatgcggcaacaccggacattatgccaagaattgccctagaaacca

SEQ ID NO: 53038 - DNA, 383 bp, Zea mays
agcttcctaaaaacattcttcattgttattcttcagagatcaatattgtttctccttgttacttggcatgatttgccctttttcaaagcgtttttccgaagattaatatcatatttccttatgccacatgcagtatgatgtatgatgcttatgttatgcaaagatgatgtgatgatgctatgctatgtaaggcgatattccgaagatacacgcatatttgcgcgataaaacacaatctttttgtgaatcagcattgacttttcgctataagcctcccttaggagcttcttcgccttttacttcaacgggaatcagctgtgacttttctctgtaagctctgcattcccttatgaacgtctttggagcttctttgccttttactt

SEQ ID NO: 53039 - DNA, 452 bp, Zea mays
tcatgaagaggaaccttcggtcatcacatgcggacagctttattctaagctgtttctccccacaagaccttcggcgacgaagcatagtcccaacagctgtcgtctcccagtcaactatggttgctggatcgttgtcttcgtatgatgtaattatctatctattttgtatagaactccattatatataaatgatgtgacattcgtttctgtaccatgagtcatcatatgtgtgtgacttgatcctagcacacttggtgattattcgcgcccgggtttggtgcccctaaaacccgggtgtgacattcgacttgagaagtttcctagcacttagataaacatagttagcaactaaaacaatttactaagtgctagaatcataacttgtttctttaatgtaataggatttgcaatatacaccaaatgcacttttcctatgtttctcgatttgcttt

SEQ ID NO: 53040 - DNA, 341 bp, Zea mays
  unsure (1)..(341): unsure at all n locations
agctngcattgcatatttaaattctttgtattgcatctagggcttgtctaacctagttgagataaccgccaacaaagcgagtgaaaaagcttaactcgggtcaaacctgacaagtcttagttttaagcttttaacacttaaattcttactttctatgcaatttttgggtcttgaaatatgcatgaggtactgcacttagggggagtattcaaaactcaaatcactcatgaaaatccctagtgcaaaccaaaatgcaaaatttcaccatttgcctattttctctaaaaattatctagcctatggcaaaatatattgaaaagtatatgagggtgccaatacct

SEQ ID NO: 53041 - DNA, 442 bp, Zea mays
  unsure (1)..(442): unsure at all n locations
tcggctccatctatgttatggatcgcctttgaatccgtccttcttccttcagccctcctggcaactttntgactcccatgaacagcaatgggcccttgtttcgaaggtatcttcatgcataagtatgttgtatggagtattgcttcaaaggcattaagcgtccctcgaccaatgattgcgttgtatgggtactccatgtcaacaatgtcaaagacaacttgtttagttcttgtgttgtggatgtaactgaaggtaactaacattgttattttgccaagtgccacaatttgtctttctccgaagccacaaagagggtgggttgcatcatgtatcttgtcttctggttcttgcatctgtctgaaagcctttgcaaagatgatgtacgctgcactgcctgtgtcaaccagaacattgtggacccagaaatccttgatgacacaag

SEQ ID NO: 53042 - DNA, 389 bp, Zea mays
agcttctaaagggagaacacatttttttgttaacgaatgttcattttgagaaagaaaggatttgtagcgcatgccaggcaggaaagcaagttggagcccatcatccacacaagaacatcatgacgaccgacaggccgcttgagctactccacatggatctattcgacccgattgcttacataagcatcggcgggagtaagtattgtcttgtaatagtggatgattattctcgcttcacttgggtattctttttacaggaaaaatctcaaacccaagagaccttaaagggattcttgagacgggctcaaaatgagttcggcttaaggatcaagaaaattagaagcgacaacgggacggagttcaagaactctcaaatcgaaggcttcctt

SEQ ID NO: 53043 - DNA, 447 bp, Zea mays
tgatgtgttaatctcgatagtagctgattggaggccattatgttatgaagacagaaagaagcggcaaaggaaaagctagcataattaaaatattgggttgcagacatgctcgatcacaaaaccaaccaaaccatcagtcattaaacaacatatatagctagtacatcatcatagagagaaaacctccgtacatgttcaaagttatgttttccacgacaaatgtttccgagacaccgggtagcatgaggaaacaatattaacagctttgtaactatataaaaattcctaacaaactaaaatacaataaatttaagacaactttggttgcatagacatataaaattaaattagaaaggaacatttggatagaatacggagaaaatatccctgaaggcgcatagccaaagaatagatcaaccaaactactgcaaatttatgactaaaaga

SEQ ID NO: 53044 - DNA, 316 bp, Zea mays
agcttcgggaaccccatactcctatctgttttctggcagacagataattctttggtgtctgggaggcggtataaaaaatcatcttcggctatgccatcgaacactaaggcccccttgcggatgatgcagcgctcaggcataaggctgtaacacaaacacctctctttgaaactattgtacctctaacacgcgttttacgaactaaggcaagaccttctaagatggacgcgcagtaaaatgacccttttgaggagagggcgtttgcaccttttttttgttcgctttctttatttacaagatttctcttgcgggctgc

SEQ ID NO: 53045 - DNA, 429 bp, Zea mays
tcgcacctctgaactaactcggctgcatcactcttcgccgttggccaatagaatcctgacctgaagactttcctgactagtgttctggatgcagcatgtattccacattgcccagcatggacctcctccataagtcgcttcccagtagatgggagaatgcacttcatgaggacgcctgatgcaccccttctgtacaatgtcttctcaatgagtgtgtagtgagccgactgtctggcaatgcgctcggctgaattcttgtcatctggttcctcttcattctttatatacctgatgattggccttctccagtcatcagagtctgactcggattgatctataatattacactcttctgcttgatccattgagatgctcggctgtagtatttcttgcacaaagagtccaagtgggacctgagttcgactggat

SEQ ID NO: 53046 - DNA, 380 bp, Zea mays
  unsure (1)..(380): unsure at all n locations
agcttgtctttttcaagnatttttctatccggcaccaacattattaggttatcttcttgtcatcactgcaccaaccacgcttatctattatgcatataaactctgagctcatcaattattgtatatatatacgggcatttacacaaattaaacgttaacagatgttggtcctgttatcctgtatatgcttaagtagcaaaatctggattggtaataaaatcccaatcagaaaatgccatggacgatggatgcaaacgcatgcactatgcctgttgttggaacggagcatccagcagcagcccaacaggccatttatctttaaacccccacatggcacattagcacgtgaaaatgtggtagagcgtaccaatcaaagcatg

SEQ ID NO: 53047 - DNA, 427 bp, Zea mays
tcttgtagctgctgccataaatgagatgtgaactgcgtttctctatctgacactatcttcttcggcacaccatgaaggcagactatccgtgacatgtataactcagctaacgttgctccggtgtatgttgtcttcacgggtatgaaatgggccacctttgttaagcggtccacaaccacccagatggaatcgtagccggcccgggtacgaggtaggccaactatgaaatccatcccgatctcatcccacttccactaacgaagacgcaatggctgcaacaatccggcaggcctttgatgctctgctttggttctctgacagctatcacagatggcgacatattctgcgatctctcttttcataccataccaccaaaaccttctttctaaatcctggtacatcttctcacttccagggtgtatggagt

SEQ ID NO: 53048 - DNA, 388 bp, Zea mays
agcttagttcaacctcactaagtttctgcgcaaaggattccctctcctgttcagttgagacagtcaaaatatctatgctttcttccaactgtgatatattaaatggcagcaagcagtcaatattatagaagtaagatgtgtaataaagagtaatcattgcaatcaaactttgttacattgtcaagtttatctagataacaagattatcagggtagcattgagtttcagtgaaaaaacaacaatctaaaaataaatgtacatatacaaaatagtagagggatcacccattatctggggtacaatgacaaaaatgcatgatatatattactgtcaaattaccaaaacaactatagcttacctgcaataatttcttgaacattaccctcat

SEQ ID NO: 53049 - DNA, 449 bp, Zea mays
tgctcaccaggtcgcggcaagtggtaccggcgaggaacgcgccgatgacatctgagtcggtgatgttgggcagctcggtgcgctgcttcgaaaatcgccggatgtagtcccgcagggattctcccggctgctggcgacagcttcggagatcccaggagttcagcgcacgtatgtgccctagaagttgccggcgaaggctttgaccaggtcgtcctagttggagatcttcgcaggaggcagatgctccagccaggctcgggcggcgtcggggttcggaaccgggtcgggaacggcgcccgtcgtatggcccggctgaaagcttgcagaccgggtggttcgggtgaggggctccgatcctccccgctgtcgtatagtcccccacgcctggggtggtagcctaggcgcaccttatcgtcgaggtgggcttgacggtcgcggcagtggtgctc

SEQ ID NO: 53050 - DNA, 347 bp, Zea mays
acaacatattgtcggcagcttgttctattttaattccaaggtaaacattttgcatctaactcttattattcgtagcacgaagatattttctaacgaaggctatttgtccacagagcatacttttgagcaaggcattaaaaatgccgcaagacttagaggataaaaggcacgaccttataattgaaaatctacaaaacaaaataaaggagcaatctgctgccatcgagaagaaagacctctagctacaaacagccgaaggcttactagtggatgctgaagcaaaaataacagaattaaattcgaagcttctttcccaaacagaaaattttgaacaacaaaaactgaag

SEQ ID NO: 53051 - DNA, 408 bp, Zea mays
tcggaatactacgacttcatttttctcacgagttggatttttcttctttccttcgtcggccctcacaacggacaagccccggaaatatcttcccctcatattgacaagatgattttctttaatacttgatttgccgaaaaccgcatggcttggtcgccaaggtcgatcttcggagtcttcaccaccactatccacatcatagctgtcgctgtcaccagtatcttcagataaaccttccaaaatgtctttagtaatcttctctgtattagtcttcgacatagattgaagaaaacccagatgcatttccttagaaagactcagcttcgaatcaccaacaactttgttatcttcagacatccttgcaaacgctgagaaagtgctctcaatgccgaagccttaaaattcaaa

SEQ ID NO: 53052 - DNA, 384 bp, Zea mays
agcttactcccacagcacacattgttgtttctaaaaatacaaaggttgcatcatgaacctgcagttcacagctgtataaacgcacaaggttttttcatttcgtcatgtgtcgaaaccaaaaaataaaaggggcatacgctcaaatttcatatcgtccagaactggtttactgaaagtaaactttagaaccgaagattgtgctcaacagcgacaagttaaacaggaatgcaagtcgaatcaagttttgcagcaaagcaagagtacaagaagacgtctgcacgaacagcgaagagttatactaccaagataaaagtttaaaacttgcctgatctagtactttgtggtgtcttttctacgtcggaacaacgtaagcattcacatcgt

SEQ ID NO: 53053 - DNA, 437 bp, Zea mays
  unsure (1)..(437): unsure at all n locations
ggtctacgaagatttcaaaccatataggcagtttattacttgtctttacaaaatagcatatcgtcgtctcaccgcgctatatatttttagcctggtgtgttgcgtggaaagagaacagcatgacctgtaaacccccaatattccatatatcggactcagttgtttggcaaaataagccagtacggtttgcaaacttcatattcttcgtttcttaaaacagaaacacaggtgttcaccatgccatatgccttccgttccaaagtcatctagcttgtattaagtgccaggcatacagaatgttccacggccaaaagtgtttcctctatcacacgcanatcagcttcaattcttataacggccggttatatatgtaacaaaataactctaatggtagctgcaatttaaactgaggacgccttatttcattaccagatgcc

SEQ ID NO: 53054 - DNA, 389 bp, Zea mays
agcttctcgtcgtctaaatattgtgattatacattcaatacatttggaaaataacaaatgaacaacacaccaaacatgtacaaacaatggaacacatctcaaaaggaaaagtataaactcaaaagggagtttaagttataaggtgaactaatcacattcagttgtttgttattctctaagtgttgtctatctccatgattacataatctgattctactcattttaatgagacataaaagttaaactagggataaattcatatactacatattattaatctcacaagattaagtatccatttaccactagggtttcctttttatacatcttattaaacaaatgaattaacacataaactaacctatagcttagacataaaattagggcac

SEQ ID NO: 53055 - DNA, 436 bp, Zea mays
  unsure (1)..(436): unsure at all n locations
tagacggagggactacaatatagcaaagtagatatatgtaagcttagaaacattntattataaatgggaacctagctagctagcctatgcacaagagtctttggcacacatatggtacacatgaactaacaaattttacaaaaaaattctgaaaaaaattcatacatattttttccatcctactactcctattatatacaaaattttaagttcaaattcattaaattttagtagtaataaaaaagagaacatttagccaattttctaatttaaacttgtcacaaattctatttttttcattacacctaaaatataataaatttaaacttgaaattttatatataattggagtaagatggaaacaatatatataatttttttcagaattttttgtcaactntgctagtttatgtacactatatatgcaccaaagagt

SEQ ID NO: 53056 - DNA, 303 bp, Zea mays
agaggagcaaagaaccgacgccaacgcgccacgggggaaaactccccccaacacgcggcatcacaagaaccccacagctgcctcccctctatggcggaagacaacggcagcgcgaatataccagggcagccacaggagcagcacatccaaaggtcgtggaggctcaccggcaaagcaccgcgctgaagggcccggccgaagccccaaaaacatgggcgcaaagacaatttcagagggccactgaggcgcccgcgcccccagacgcagaaaccttcagacatacgcctgaaggtagccctggag

SEQ ID NO: 53057 - DNA, 412 bp, Zea mays
  unsure (1)..(412): unsure at all n locations
gccccgggaacncaaaaacgacccgcagcaagcaagccggccaaccacagtcttgtctggaaccggaggcgctccacgcgataaaaccctaccgagcgggccaaacggcagcgttccgactaagggtcctaaccaaccagtaaaaaatgtcgcgcgcccacaacccaaaaggcgggcgagtagacacaagcagtctatcccgcgtcgggcaaagcaaagccctacttccagcagagggggataaggcgcatatcacccgcacccgggggcctgtagtagggagcacaagccccacgggacaggggaagcccccaagaccctcgaaccaatagaggaaagcgccaatatccaaagactcagtagaaaaccacggagtgggcgcctacccttggaagaaccccaccgccctaaa

SEQ ID NO: 53058 - DNA, 277 bp, Zea mays
tttgtggattcgggagaggatctgatcacttgtttgtgtcttgtattgaatgcctacctcttgtaagtggttggaagtgtgaaaacttggatgacttgaatgtggggtggctgggggtatttataaccccaaccaccaaactagccgtttggtggaggctgtctgtcgcttggtgcaccggacagtccggtgcacaccggacagtgcccggtgtgccaaccacgtcaccaggccgctggggctcccaccgctggaactctgactgctgtgcccgcct

SEQ ID NO: 53059 - DNA, 391 bp, Zea mays
agcttctaaagggagagcacattttatgattaacaaatgttcattttgagaaagacaggatttgtagcgcatgtcaagcggggaagcaagttggtgctcaccatccacacaagaacatcatgacgaccgacaggccactggagctcctacacatggatctattcggcccgatcgcttacataagcatcggcgggagtaagtattgtctagttattgtggatgattattctcgcttcacttgggtgttctttttgcaggaaaaatctcatacccaagaaaccttaaagggattcttgagacgggctcaaaatgagttcagcttaaggatcaagaaaataagaagcgacaacgagacggagttcaagaactcacaaatagaaggcttccttga

SEQ ID NO: 53060 - DNA, 454 bp, Zea mays
tgagaaaatatttccacctgccttctttgatgtcatggtgttcttgagtgtccatcttcccgatgaggcaatgcttagaggacctgttcagtatggatggatgtacccaatagaaaggcgactaggcactttgaaaaattttgtaaggaacagggctaggccggaaggatcaattgctgaggcatatatggcaagtgataccttaacattttgttctaggtacatgaaggatgttgacactagatttaaccaggatgatgatagtggtacagagatgccattgcctaatgacatgtctgtttttaagcatggtgctactcttgttggaggtactaagactgagtacattgatgatgctaccatgaataagttagtttggtatgtgctacataatgctgatgaagtacaggaatatttgacgtaagttagtttggtatgtgctacataatttatg

SEQ ID NO: 53061 - DNA, 368 bp, Zea mays
agcttgctaacttatatgatcattatcttcagctggcgaccatgtaatgttaagagagcaactcgagacatatattgttcatgtgagaaggcatgctgcttttagcacttgtgaagatattgcatctctctctattaagatggttcagactacaaagcatgttgtgtttcctttagtctacaaggtaattgagttagccctattattacctaagtcaacagcaagtgttgaaagaacatcttgggatatgaatataattaatagagaattgcgtaacaagattgaagaccattggttgaatgatttaatggtttgctacattgacaaagagatcttcaaaccatgacaatgagattattattcgacga

SEQ ID NO: 53062 - DNA, 451 bp, Zea mays
  unsure (1)..(451): unsure at all n locations
actaagcttcttgaagctggactacantccctaagcagcttgttgttttgtgctgaagaatntgaaatctaccttcaccaacttacccccgaagcaattataaggatgaatatcttcctgtgggccgtgagaagccaaggcttggaacctgatgcgaaaagcttctgcaacatacatgagttgctgtacgaaacaaaaccctggggtaaggaacagtatcacaacaattttggctgctacagcttcggctcccggtctgggtcaagctgccccgtgccgacctttcgaaagagatggcctggcgactggatgacaaaatggttttacgtgaagaatgacttgaaatcacgagaagatataaagaagatcattatgcgtcccatctggcaacgcttcggcctgcggaggccgaaggtggaaatgaatgaagcatncgaagaatgccagagag

SEQ ID NO: 53063 - DNA, 390 bp, Zea mays
agcttcccaaccttagcaattaaattgttattttcatttctaaggttgagaatagtgtcatggaaaatacttagctcactagttaatttttcatttttctctacctcttgagcataagcatttttagtcttaacatgctttttgttttctttgataaggaagtcctcttggctatccaagagatcatccttctcatgaatgacactaatcaattcatttaacttctctttttggtgcatgttaagattggcaaaaagagtaaacaaatcatcctcatcatcactagaattagcctcatcactagatgttgcatacttagtggaggatttggattttaccttcttcttcttgtccgcctttgccatgaggcatttgtggccgacgtttggg

SEQ ID NO: 53064 - DNA, 439 bp, Zea mays
  unsure (1)..(439): unsure at all n locations
tcatgttatagcgtatccgaagatgaaggatcgaaccgacttttatatagaatgaccttttagtccataagggtctgagtcattgttgtagacttttataaggggtatgattgtaactccttacaggctgtgtcctgtgcctataaatagtgaacagtattcctttactgttcacgcaatcctgtaactgctaacgcattactctggaattattgttctttgtcaaggcaaaggtataaatgtaatcaaacatcatgttttaatatctcagtttatattgtaaaatgagtaaatgatgttatccattctcaatattctttaacgttntatacttcatattttatttcgcattattctacttctgactacgaaggtaagaccttcgtagtttatcatctatgaccttcgtccgaagctcatgaaatcctcagggaaataa

SEQ ID NO: 53065 - DNA, 312 bp, Zea mays
agcttcttacagtacatgcgctttttttttctttgtgcgcgacctcttctcacataaaaactaaggataccctgtcgactaaataagtaacgtttattacatctattatacattgattataactttctatagacttaagtttgactgcctcccttacatggatttccgcttactttagtgctttataaatattgttaaatgccctcttccggaacacatataatactgcttaaagagactcccctcttatgccatcatgtacctcccttcgttgcttatgtgattacattagaagatttctacaattttgcg

SEQ ID NO: 53066 - DNA, 158 bp, Zea mays
cttggatacacggataagggcctccgctcttatctcaattagaatctaatatcatgacatatccaaaacgcctaggcgctactcacgtgggagatagaatgctcataggacatagaaacatgatctaacacttgtacctggagttgatacccgaacac

SEQ ID NO: 53067 - DNA, 384 bp, Zea mays
  unsure (1)..(384): unsure at all n locations
agctngtgaagatgcttcatccttactcgtgctaagcggcgatgccatagccagcccatgctagtcttagcgattaagcatgcatctagaccggcctcctcttttgcaaaatcaactaaataaagtttgctgtctagtacacccttaaatgctagtgaaccatcacttcttctaaagacagacacatccacatttgtaaatagacaattatatcccatattgcataattgactaacagatagtaaattatatcccagagactcaactaaaaacacattagaaatagagggctcatttgagattgcaatcttacctaacccttttaccttgccttggttccattaccgaacattattgaatcttgggaattcttattcttgacgt

SEQ ID NO: 53068 - DNA, 426 bp, Zea mays
tactaagcttggcatagtgacatgtcccaagacgaaggagtgaaccgtcttattatatgaaatgaccaatagacccatgatagtttgtgtcatgattgtaatcgattgtaaagggtataaatgtaatttcacacacgccgcgccctgtgcctataaatagatgaacagtacccttgtactgttcacgcaatcttgtaatcacctgcacgcaacacttggattattgccttctgtcaagatgaaggtataaatgtgattaaatgttaggttttaatatttaactctgtataatgaaatatatgaataagtttatgtgttttgatatattattccttcatgtgtcaatatttatatttcatctttcactatttcacaactctagccacaaaggtatgaccttcgtgattttggctcatgaccttcgtc

SEQ ID NO: 53069 - DNA, 442 bp, Zea mays
taatggccctaagagattgtccaatcatgttaagggttattctctcatggcacacgataacgaggggtacattttatattctgctggttatcctgagcataaaattaggagaattcattataggaagtctcattctggttctcatcatgcttttatgtataagaatgagacatctagttctaggcattccacccatgttaaaatgcctaaaaagaaatctctcgttgcatcaaatgagtctaatgtttcatttaagacctttgatgcttattatgttttaactaacaaatcaggcaaagtagttgccaaatatgttgggggcaaacacaagggctctaagacttgtgcttgggtacccaacggtgcttgttctaatgtgaaaggacccaagaccgcttgggtacctaagaacaaggcctaaacttcgtttaaggtatatgca

SEQ ID NO: 53070 - DNA, 398 bp, Zea mays
gaccgcagcatgcaagcttcccctacacgccgagtttcgtttatctcgggtgccagggcacaagaagattgccccggcagcaaacatttgtggctccaagcgctatattctttatgcccctgggcccacatgtcggggcccggtacctttgtgcatgccccccttcagctataaaaggggaggcatgcgacgttacacacaagctcaattgtctagacccaatcttggtctcacaagttcatacaagctctcaaacaatacatcacacagtggagtagggtgttacgctccggcgacccgaaccactctaaatccttgtgttcttcccacttttccaactaacaagcaaaacgcttaggcccctcctcgtcttaggacttacggcgggtgcattccgc

SEQ ID NO: 53071 - DNA, 445 bp, Zea mays
  unsure (1)..(445): unsure at all n locations
tattctnctgtgtcttcgctccacgaaagcaatgtttgttattcctatgataatcaatctattaagcattatgtggatttacaaagggattagttagaacatcacatggtggaatagaacaaacactcaagaaactacacttgcatttgaaacaactattatccccagttttccatcccataaggccacagtagaggtgaccccgctagatgcatcagcaataaatgggcctccacagtcccaaccattatatggtatgtcgataaactcatactcaaggcaaccgttgcccccacaacccttatacgatatgccagcgcccctagccatagccaaataatctaagtataatcttggaccgttcgaacctagaccggaccatctgttgacccaccacggaccatccgacaccctgtcgaaccgtctgacatcctgttggaccata

SEQ ID NO: 53072 - DNA, 335 bp, Zea mays
tgcttgagaaaaagagattttgtctttctttgccgcgggcatatgtcactcacgacccgggagtttctccaagcctttagcgccatcactacggtgcacatatatgggtcagtaaaggccttcacgcgggctaagcaaaaaaataaccaatgacgaaatagaaatcccacatacaaattatgcgatgctttactaagacaaaataaataatctacgggaaggaaaatgttcttctattaattaatgtcaaatggcaataaagagataaagcggaccacaagactattgcttctctgacccgcttgtaggtcacacactcaagcagaataaggctt

SEQ ID NO: 53073 - DNA, 380 bp, Zea mays
  unsure (1)..(380): unsure at all n locations
cccnnctngacgnnancaactctgacatagaaccactttattctccagcctgctgcccatctgctgcgggaactaactacaggaaacttactagctctccgataggcgaagctataacaaccaaaatggtcgcgcagtccatcccttctagcctctcgtcgataatgcaactcgtgaacccggcaaaagctgcccgcaaatggttccactgcttggcttccgagtgcccagatataaacaataagtctaacaataccgttgggggtcagctggtgaaaataaataccgaacctcttcagcacctctgcaataatcccatgtagagggaaccctaatccagcctctacaaagctcttgaaaataacaacttcatctttctc

SEQ ID NO: 53074 - DNA, 299 bp, Zea mays
aacaaccgctaataagccctcgggtgctgcagctcgaagcctatttttttcatagcaactgacagctctcttatcttgttctctaagctctcaataataacctcgtgcgttatatcctctaagtcccactgcatcttcaaagccttgctcaacagcatactccgcggacaaacaaccttcgttaggaaacatttatgcgaatacaaacaataaaggttagacaaaagctgcttaccttaaaatcggaataaaataaactaccgacaatgtgttggccgccgaagacactgatatctgct

SEQ ID NO: 53075 - DNA, 414 bp, Zea mays
  unsure (1)..(414): unsure at all n locations
cttaaaactcagcttagttttnacacgctcgaaccactactacggcattttattatcttgtggtactagaagccaaaatgtgtntggatggttcaagctcactgcgatcttaaataccatggtgtacccaaaagcgtggtatttttggagctctggaaactccacttaggcgcctcaggactacttctattcctctgaactgcatcactttgattccttctactggaacctaaccaatctagaattagtaaggtatttcaaaactacactattttaaaattgcaataccaaacatgccctaacctatacgcaactagaactgagagggtgagaaacatggtgttggcntccgatcgggcagccatcactggagatgaaccaccttgaactgtcttcgcgagagcgaggacgttc

SEQ ID NO: 53076 - DNA, 134 bp, Zea mays
agcttcaacggtcagaatccttctgttatggtgacgtggcagaggcaccggactgttcggtgtgcaccggactgtccggtgcgccatcgaacagaggctgccagcaacggtcacttttggtggttgtcatcata

SEQ ID NO: 53077 - DNA, 432 bp, Zea mays
  unsure (1)..(432): unsure at all n locations
ggtgaagagtattgtggcctctgctgctggttccctcgatcatcactttgagtggagttatgaattgacctgacatgcctcggatgaaatcttcctccgaagcccctggtcatctcagagaacctgaatgcctcctcccttctctggcggaaatcattgtcaacttggatgtactcgtccattttttggagcagcttctccaaagtttgtggtggcttcctggcaaagtattgtgctgagggtcccggccgaagtcccttaatcatggtctcaatgacaatntcattgggcactgttggcgtctgtgccctcagacgcaaaaaccttcggacatacgcctgaaggtattcttcatggtcctgggtacactggaagagagcctgagcggtgactggctttatctgaaatccttggaagctggctatcaacata

SEQ ID NO: 53078 - DNA, 367 bp, Zea mays
agcttgcagacaactgttctggtctgcagggattcttggtgttcaatgctgatggtggtggtactggctctggacttggttcactgctgttggagcgcctttcagttgattatggcaagaagtctaagcttggtttcaccatttatccttccccacaggtatgaccttatgacagaaccttacattagcaacctagtttctgtggatgtcacacaaaaatgtattcatataattattctttccaaaaggagtttggcttaagtatatgagaattgtaaaacatacatgaagtattaagtcgggaatttatatttatacacccaacatgaaattgttttatatgtaaattaatctacggattatgcaa

SEQ ID NO: 53079 - DNA, 409 bp, Zea mays
tatgaagattcttcatcccaacgtgggctattctgcggtgttctagccaacccatgttagtcgtagcaattaagcacgtgtcgagtccagctctatcaaaatctactaagtatagctgaccctctaacacacccttaaatgctattgaatcatcacttcttctaaagacagtgacacctacatcagtaaaaagacagttgtagcccatttgacataattgggaaacagaaagcaagttgtagtctaatgaatcaacaagaaaaacattggaaatagaatggtcaggagatatagcaattctaccaagacctttgaccaaaccttgatatccatccccgaatgtgatagctcgttggggatcttggtttttctcatatgaggagaacattcttttctccccggtcatgtg

SEQ ID NO: 53080 - DNA, 366 bp, Zea mays
agcttgagggtctcggtttatattatgttgaggcagctgcccccatccatcaggaccttggtgagcctgacattgctgacaacggggtcgacgacgagcgggtatttccccgggctcggcacatgggcggggtggtcggcctggtcgaaagtgatgggcttgtcggaccactctatgtagactggcgccgccacctttaccgagcagaccttccggcgctcttgcttgcgatgccgagccgagggattcgccgtatgccctccatagatcatgaagcagtcgcggacctcggggaactctcctgctgggtgatcatcgatcttgtcgcgcgtgcgggccctgccaccctccgcgggtgggccggcc

SEQ ID NO: 53081 - DNA, 308 bp, Zea mays
ggcacggtcgccttctctacaggggtggtcccctcttgaaatcatcgctgcacgcgacgtccatattatcggcgagtgacatggacagccttccatctgccccgaacatttattagggatttagtttctctgttcaacacccacatccctcatttttaactcctgaacaacacacttcctacttgaatacaatttgaacaattgcctgttgctatccacaccctcactcgtataaaaggcgggatcaattccatatatatatctatctgtacacatatatactatgccatcatatatatacatatatc

SEQ ID NO: 53082 - DNA, 387 bp, Zea mays
  unsure (1)..(387): unsure at all n locations
agcttcggccttcggaggccgtatgntgtaatgaatgaagctgccgaagaatgccagagagccttcggcgttatctgttcttttattggaacgagagatttagtacaagagcatattgccttcagggtatggccgctcgcggagaaatgggaaatgccgcaagaaaccataaaagaggccgacgaaggtggacttatcaggctgaagtacacttttaagttcggagataaattcgtcgagccagatgatgactggttaaaaagcattgaaaatttaagtgatgaactgcttggggcttattcgaaggccgaagatactgcactgtcagcagccttcggaggtcgaaaaaagaagaggctgaatcgggtatttgatgcaatcgggttc

SEQ ID NO: 53083 - DNA, 452 bp, Zea mays
  unsure (1)..(452): unsure at all n locations
ngagacggaaacaaccgtggcatgcactacatcccttgaattaatatgtaatgatttgaggattgccataaggaggaaacaaaagatgaaattcaacacctcctccaaaagcctcaaccacgcctccacaaaaggtaacatccaaggtaatgatcaagccacacttcacattaagaggtgtagtgaatgctttgaagtggggcacttgattaggtcatgtccctatattaatggcttgattattaacaaggatgatagactttgttttaaatgctctaagaagggacacttgcttagatcttgtccccatttaaaacaaaaaggcatagggttagaaaagaaagtttttactaaccatgtagcaggcaacaagcaaggaaagaagaaaacttcaaaacttgaaaaacgcctatgctacacatgccgaagaaagggacatcaatgcaaggatt

SEQ ID NO: 53084 - DNA, 384 bp, Zea mays
agcttgggatccgtaggtttcattcttgtgtggccaagttgcgtgtccggacccccttgggtcgcggttctagatactaagacacttgtcgcagggcggtggagcgtgcaggcccatggtacgggaccaggctgggcgagtgcaggggctccggaccaccccaggagactaatgtccattctctagcctggtcccgaggttgtcggacccgcaggacttatagccccaaatactaggtacccatcacggagtgatggagcgtgcaggcccacggtacgggactaggctgagcggctatacgggctccggaccaccccatggaacggggttccgttctctagagccgcccccaggctgtcggacctcccaactttcgtatcaggg

SEQ ID NO: 53085 - DNA, 439 bp, Zea mays
agtcataaaatgaccccaaaaagtaacttgtatttcatttatgcccctgggataccagaaaccctaattggaaccctagaaaaccctaaaaccaaaccctaggggcctatgtgcaaaaactgtgcacatttgaaccaaagtgtaaaaactactatgtttaaacatattaaatcatttgggtcacaaatatgtggatttgcaagttaaaccctaagttttggacttaagtgcaaaagagccacactcgactctttttagcctaagtctgaaaacagggttataggcccaactttggggctgtgtagctttcaaaatagtaagaattcatgttaggtgatcacatcaaagttgaaaaccaatcataggagaacaactttgtttaagggagtgagcaaagttgttaagagaatattggagataattaagcctgaatattggc

SEQ ID NO: 53086 - DNA, 386 bp, Zea mays
agcttaaccttgtgacgaggatattttgcttttgttccaaaggtggatggaccttaagtctctttgaaatccttaacggtaaatgcttaagatgtttataacatgctttcataagtgcataaactgtcatgagcatcacacttatactatgacacaatgcactacacattctgtataatatagatatgttttcattaacctaattatgtgcaattggcatttaaggccaaaatatgtgttcatctccatgcacatatttagggggagcaatctatgttatatagaactatgatcatgcttaatttgacatatcccttgatcatatctcttctatggctatgactaatgtgttttcaagtgtgttctcatgcttagtcatacaattg

SEQ ID NO: 53087 - DNA, 455 bp, Zea mays
acactatacaatacacaacctcgaagccatggtaagtagcatacgcaagtaatatacgaattgattcttgtctggctaccggtgcataggtttcaccgaaatccaaaccttcgacttgtgaataacccttggccacaagtcgggctttgttccttgtcatcacaccatgctcatcttgcttggtgcggaagacccacttagttcctacaacattttggttaggacgtggaactaaatgtcatacctcattcctcgtgaagttgttgagctcctcttgcattgccaccacccaatctgaatcccttaatgcatcttctaccctgtatggctcaatagaagatacaaaggagtaatgttcacaaaaatgagcaacacgagatcgagtagctaccccttatgaatatcgccgaggatgaagttcaccgggtgatcttgtcgattgcttggggactctc

SEQ ID NO: 53088 - DNA, 385 bp, Zea mays
agctttaattgttatgtgcttcatattagttggagttatctagatgacgatgtcattaggcgaaacaaatgtactggtttaatttacaccataagcctaattaagtctaccatttcttttgctgtcatcagagaactgaacaagttttatgtgtcttataaatgtaagtctgactagcgagcatccatggagtgttttgtaccatcttttattctgttttataaatgtaatggtttcatggaaactccccgtccactcgaccactcatgtatcgacggtacttactcatggcagcactttctatctctaaccgaaggaagaatgtgctgcaagcccattgaggaaggcgtagtcgcagcggacgacaacggcgtcgaagctccct

SEQ ID NO: 53089 - DNA, 439 bp, Zea mays
  unsure (1)..(439): unsure at all n locations
tcctccaacattcttgagccactcaggcatccgaagatagcaatatgtgccgctgggagttatgaagctagtctttggctcatcttccttcttcatccagatttgatgatagcctgaataacaatccaatagactcatgagctctgaagaagctgctgcatctacaagagagtctattcttggaagcgggaattcgtcttttgggcatgccttgttaagatctgtgaagtcaatgcacattctccatttgccattggccttcttcaccatgacagtattggctaaccactctgggtattttacctatctcatgacaccagcactgagaagccttttcacttcattccgagcaccttcggctttatcatcagacattntccgaagcctttgctttcttggcctgaaggatgggtccacattgagtgaatgttcaatgaca

SEQ ID NO: 53090 - DNA, 386 bp, Zea mays
agcttgtgaaggttcttcatccttactatgtgctaagcggcgatgccacagccagcccatgctagtcttagcgattaagcatgcatctagaccggcctcctcttttgcaaaatcaactaaataaagtttgccatctagtacacccttaaatgctagtgaaccatcacttcttctaaagacagacacatctacatttgtaaatagacaattatatcccatattacataattgactgacagatagtaaattatatccaagagactcaactaaaaacacattagagatagagtgctcattggatattgcaatcttgcctaaacctttcaccttgccttggttcccatcaccgaatatgattgaatcttgggaatccttattcttgacgt

SEQ ID NO: 53091 - DNA, 444 bp, Zea mays
aggacctataaaactaagcttagcactgggctgtagctctgcaaccgctagacccctatatgagactctctcccttcgggaggcacgaagccagaagaggaaggctgtcagcccgacaccgccagaggatgagctagaccaagaaatcagagacatggagatgcttcatcaacaggtgcagaggaagaaggaaaagatggcctgtctagctgaactgcccaggcagatagacgaagcctctgaagaagttcctcatcttactcaggatgagcagaaccgaaggcctcagaataaagaccttcataggagggtttgctcaacgaagatgactggtatgagaattttcaccatggaaattttgcttttgatgatgcttctcctctgtccgctgagatgtaggctacaccttggcctccgttctacaagccgcctcagcttcccata

SEQ ID NO: 53092 - DNA, 195 bp, Zea mays
ctctggatacgtgggcctataggtgcatcacgaagaccacacgtttgggccgccacagaacacccaggaaaactcatcgagtaccgccggccaaccaacgtcgtaaacgtgatgaatgatgtatacgacagagggcctatggggcagttagaaaggccacctataaataaccctggcgactgtgctgtgaggagg

SEQ ID NO: 53093 - DNA, 383 bp, Zea mays
  unsure (1)..(383): unsure at all n locations
agctcaantgcctggcagagatgactactcgtgaattagctgaccaacatccatattgccacttgtagagatcatgaatggtccctggagttggcctggttcacgctccattctcgctgattgcagcgcgttttctggcatcgttcttcaagcaagctgcgagctggctcctcatttcaatgagctcgcggatcgcgtgagcttacatggcgagtccttgcaagctgctttgcctacgcaagtcctgaattctatacactggattcttgtggtaccaatgtggtatatatctttgttcagagcatacagtgagcagatgagattatcaactgattttctcatcacaagattgtcgccttgaagctcgaggagaatataactcc

SEQ ID NO: 53094 - DNA, 440 bp, Zea mays
  unsure (1)..(440): unsure at all n locations
ctagcttattagttgatttgcaaaaaggaggccgatctatatttatgcttaatagctaagactagcatggactggctgtggcaccgccgcttcacacatgtaaggatgaagaaccttcacaagcttctaaagggagaacacgtgataggattaactaatgtgcaattcgaaaaagatagaccttgtgcagcttgtcaggcaggtaaacaagtgggaggagcacatcacagcaagaatgtgatgaccacatcaagaaccctggagctgctacatatggacctcttcggacccgtcgcctatctaagcatagggggaagtaagtatggtttagttattgtggatgactcttctcgcttcacttgggtatttttttgcaggataagtctgaaacccaagggaccctcaaacgctntctaaggagagctcataacgagtttgag

SEQ ID NO: 53095 - DNA, 373 bp, Zea mays
atatgaagagtcttcatttttacatgagcaagtcggcggtgccagagccaacccatgttagtcttagcaaataagcaagtgtcgagttcatctctatcaaaaactaccaagtatagctgaccctctaacactcccttaaaggctattgaatcatcacttcttctaaagacagcgacaccaatatcagtaaaaagacacgcgtagcccatctgacataatcgggaaacagaaagcaaattgtaacctaaagaatctacaagaaaaacatttgaaatggaatggtcaagagatatagcaaatttacccaatcccttgaccaaacactgaattccatccccgaatgagaacgctctatggggacctcggcgtttct

SEQ ID NO: 53096 - DNA, 382 bp, Zea mays
tgcgcagcttgccaagcacggaaacacgtcggaagctctcatcacaccaaacatgtggcgacaacatcaagacctctggagctgctgcatatggacctcttcggacccagcgcctatctgagcatagtaggaagtaagtatgggctagttattgctgatgacttttcccgcttcacttgggtgttctttttgcaggataagcctgaaacccaagggacccctaagcgctttctaaggagagctcaaaatgagtttgagctcaaggtgaagaagataaagagcgacaacgggtccgaatccaagaaccttcaagtggaggagttccctgagaaggaggggatcaaacacgagttctccgctccctacacacctcagcacaacg

SEQ ID NO: 53097 - DNA, 379 bp, Zea mays
  unsure (1)..(379): unsure at all n locations
agctnaaccctcgcaccacattttatgattatggagaggctacactagcgcaaaacaaaatttctgaccccataaaactagaaacgactacggcgatagaacatggaattaccactagacgcgcagggcagcgaaagaacgcctgatgtacatgaacgcgtcgagcactgacgagcagtcatcagcgaccttcacatcaccacgcggtccctcctaaggctgcagatgcagcacctccgaggtatccacatgtatagggagaaagcgtcgtgtacccaactgctaagctcgcgaccgctgctaagcaaaggcgaggggcgggccggcgctcacttactggcggcggatcaggggtaaggatacagcaccgcctgccccc

SEQ ID NO: 53098 - DNA, 446 bp, Zea mays
  unsure (1)..(446): unsure at all n locations
acaccatannaaanncaagcttccgacattgccactctttcatagctggagaaaccctgtttgttcataattcctgcactaaatctctagagccaatatgttctgcaataattttgaattcgcccagtgcagcccaagttggaccttctacttccattctgcatcgggggcttgtttctccgaaagttagttcaagagggctctgaacaccgttcctctttggcttcgccaactttgacataaaaccattctgatttccagcctgtcggccatttgcttcggcagctgatcatgggaaacttcgtggttttccgataagcaatattatagcaaccaaaattttcatgcaatccatcttttctggccttaagttggtaatgcagctcatgaactcgacagaagctgtcggctaaccgctccaccgtttggctttgagagcccgatat

SEQ ID NO: 53099 - DNA, 383 bp, Zea mays
agcttgtcaattcctgacattgtgctcacaagattagcagcttcagcagcggcttcagcttcggcagtggcttcaacttcggcacttgcagcaggcaccattctggatgtcgaggctagaggcggtgttcgctcaatagtttgcatgacattgacaattctttgtctcttttgaccttcagtcttctcctttacgaccgaaggttgatccttcttctgtaaaagtttcatcagttccggtcccagaagacttagcagcttgatgggcaaggattcattcattacctttaaaatttctgctatttcagcagcagggggtgttgaaagagcttcttctcttgcatcagctaccttcggctcagcagtgagagtcatgttaagctt

SEQ ID NO: 53100 - DNA, 431 bp, Zea mays
  unsure (1)..(431): unsure at all n locations
ggacattgtttccctgttggataccaatgccatccttaatgttctatgcgtctcccactatagagcatgcttctagcaaatntaaaattttcattttcaatttcaatttcatgctcattaattttagcagataatagagctctatcactgattgtgagtatcactaaagcaaggtgatcatttatagcatcaatattaacgtctctacatctagtacaaattgtaacatgatcaacagtagatgtagagggtttgcaaacatttaattcatctttcttatcatgtaatatgggattctcatttctaagacaagaaatagaatcatttgcaacatttaattctttaaccttgaaaattaaactagcattttcagttctaaggctagaaattgattcattcaatttattaatcttagcatttaaactagcatt

SEQ ID NO: 53101 - DNA, 380 bp, Zea mays
caagcttctatgttctgttttttatatgagtcgtaacaaaaaatcaacattgacccaaggttctacagcagcagcaggtaaatattttcttcatatatatttgtgtataagtgtagagatggattaaaaactgagtgaatggtactattgcataactgtgcatctgaatcaatctctgattttgtagacaattcttgtctctaatatgtaattgtttgcaatggatcataattgtttgcttggatgtttggctcttctgctggtgctttaggaaacctcctaggtggcattgctctcagctatttttctcccaaagtcttgtttctgtttttcacaatccttctccagctcttcagtacatcacttcagctcagttctgt

SEQ ID NO: 53102 - DNA, 439 bp, Zea mays
  unsure (1)..(439): unsure at all n locations
tgctaaaagtattttcatccaggggcttggtgaatatatcttctaattggntgtgtgtgctaacataagcaatttcgatatccccttttgttggtgacctctcaaaaagtgataccggatgtctatgcgcttagtgcggttgtgttcaacgagattatcggccatgcggattgcactcccattatcacatagtgtaatacctaatttgtaaaagataatataagaggagaaacgctatttcctttatttttatgtgtgtgttgaatctacttatcatcacatgtgaacaccatatttaaaaacaaataattaataaaaatatatgctactaaatcattgcatcatgctgagatttctttttgtgtgcatgttgtgacaatataaaaataatgtgacaagaaatatattaaagtccaaaacagagaatttagaacaagac

SEQ ID NO: 53103 - DNA, 408 bp, Zea mays
atatctaagtcacctgcagcatgcaagcttggtgactccttttttttacactggctcagcaagttaatggggtttgatttctcggtggaatacaaaccaggacgggctaatgtggtcgcggatgcgctgtctcgcatccatgacccactgggcacatgtgccgctatttcatcccctactgtgctgtcaagggaggtatgggaatcagaactgaggaaggatccgaccattcagcagcgtgctgctcaacttctcaccacagaccggggtcttgagggagtgcccaatggtagtctttggtcaacccatgggggtcttgtctttcgcaaagatcggttggttattccagcaacatcacctcttcggccccaagtggtggctgcttatcatgatgtgactcatgagggg

SEQ ID NO: 53104 - DNA, 428 bp, Zea mays
tgtgtttacaagaaggaaagtgggagcgctgttgtatttctgatcttgtatgtggatgacatattattgattgggaatgacattcctatgctggagtccgtcaaggcttcactgaaaaagagtttttctatgaaggacttacgggaagcagcatatattttgggcataaggatctatagagataggtcgaagaggcttataggattaagtcaagatacgtacattgacaaggttttgaaacggttcaacatggaacagtccaagaaaggtttcatacctatgtcacatggtaaacaccttagccagatgcaatgtcctgcgacggctaatgagcgggagcgcatgagtaaggtaccatacgcctcagcgattggatcaatcatgtatgccatgataagtacacgcccagatgtttcatacgctataag

SEQ ID NO: 53105 - DNA, 391 bp, Zea mays
agcttgtgaagccaatcacaagtttattgtagaatgacattaagttcaattggtcttctaagtgtaatgaagcctttgagcaattgaagatactattgaccactgctccggtattggctcaaccggacatcaccaagccttttgatgtatattgtgatgcatctggcagtggactcggctgtgtattaatgcaagagggccgagtaattgcatatgcttcaaggcagttgcgccgacatgaggagcattacccaactcatgatctggagctagctgctgtggttcatgccctaaaaatttggcgtcactatctggtgggaaatatctgtcacatatatacagatcataaaagtttgaagtatattttcacccagtcagaattaaatatgag

SEQ ID NO: 53106 - DNA, 441 bp, Zea mays
  unsure (1)..(441): unsure at all n locations
tgccttggtcactnttctttcccggcccgatcttgctcgcgttgtcttccctctccttgctttacatgtattattacagtaatataacttgctgccatttcgtcaccttccttccggatttgattcctctgtgtgctgattaattcgattcagctgttttcttctttcggtgtttgctatacgctnggcgcgatcacattcgtatcgctgttctttctggtcagatcggtaatcgatttgtaaaaatagccgcgcgcaatttgattcagatcgggggattcttagttagctactagctactgtgtgggtggatcggtggacacatgcatgcatacatgtagcggcataattgagaaagaggctcttgttactcgctccctgtgcttcaggtcctccatgttcttttctagggcagtagggcagggctaccattgtttcctg

SEQ ID NO: 53107 - DNA, 380 bp, Zea mays
agctggtacagttctaatgagcttatttctgtcatgacaaaggaaatctagaagtttatgaagttgcagtgctccagcaagcagccggtaggttgttgaccatttacaaagacacaaactcggtattccatcccctgaaatgaagtgtagaacatcccagttggtaatctatgctgttccagtaggatacaatgagatgatcatttctaccaagtatccgacatttatttcctatcctttagggtcaattcagttataagtttgagggttgggcttatctgagaggtgcctcagttagcctggcatgccactcaatgttcagttagctaccccaatcagcaggtgtcaaatgatcacactagaacgccggcagtaaatag

SEQ ID NO: 53108 - DNA, 450 bp, Zea mays
  unsure (1)..(450): unsure at all n locations
tctaaagggagagcacattntaggattaacaaatgttcattttgagaaagacaggatttgtagcgcatgccaggcgggaaagcaagttggagtccatcatccacacaagaacatcatgacgaccgacaggccgcttgagctactccacatggatctattcggcccgattgcttacataagcatcggcgggagtaagtattgtcttgtaatagtggatgattattctcgcttcacttgggtattctttttgcaggaaaaatctcaaacccaagagaccttaaagggattcttgagacgggctcaaaatgagttcggcttgagaatcaagaaaattagaagcgacaacgggacggagttcaagaactctcaaattgaaggcttccttgaggaggagggcatcaagcatgagttctcttctccctacacaccacaacaaaacggtgtagtgga

SEQ ID NO: 53109 - DNA, 389 bp, Zea mays
  unsure (1)..(389): unsure at all n locations
agctttatctccctttcattnttgtttttatttcctagcaatcaccttcttatcctttctacaaattgcaaaggaagcattgcaagtatgataaattgtagaagattcattaactattttcctaggaacatgaataacatttcttctaggcataacacttttcttagccaaatttctatcatgcataatggaagaacttgaagcaaacatggcatttgaatcataagcattacaactcctatcataatgaatatttctagaatatctcttatcacgataaatgaaagcatgattcttttgactattgttagtcataggagccttccctttctcctttgcgggaatgggagccttatgactcgttaagttcttggcttctctcttaaagc

SEQ ID NO: 53110 - DNA, 437 bp, Zea mays
tgtccacttcatcataaggttcttgaatgacaactttcttcgtctgatcaaaaggggcaagctatgggggaagaaaaaacatagatacacaaacaactgggggacataactttaaatccaaaccacaactcgcaagctcaactctagctggaaccgcattgaatcagaggaagcaaccgaacaacactggaattaacaaaaacactatcatgtgtcgctagctcctcgacaagtctgtaggttgcagctacaatcctgttggttctcatgctggctgccagactggatcaacgtgaaggagctgcagtgctacacgaagaggatctagaatctcttgggagcttaccatcactctgtcatctgtatccagtggtggatctagaatcaagataaagcacatttgtcgaaggcgtcagcggatgcgataaccgtcttgg

SEQ ID NO: 53111 - DNA, 316 bp, Zea mays
tgcttctaaagggagaacacattttatgactaacaaatgttcattttgagaaagacatgatttgtagcgcatgtcttgcacgaaagcacgttggagctcatcattcacacatgaacatgctgacgaccgattggccgcttgagctacttcacatggatctattttggccgattgctaacataagcatcggcgggagcaagcattggcttgtcatagtggatgaaaattctcgcttcactcgggtattcttgatacaggaaatatctcggacccgagagaccttttagggatttttgagacgggctctcaatgagat

SEQ ID NO: 53112 - DNA, 436 bp, Zea mays
  unsure (1)..(436): unsure at all n locations
tactaagctaanataaatacacatagactggatcaagtccttctagttattattcacatgcctgaatagctccaagtgcgaaggtgtccaagtcactgtccttcatacctgaagaccttttattgttaaattaaaatctaaaccaactacgccagcactgttgtagacaaacacaaaaacgtggtgctcatatgctatcgtcaataatataaacagctaagtgccgtctttcatcaaagtatgagaatgataaaccatgttaccacttataagggtgtacagttattagcttttctgaacctggtataatgcattaggaacaataagttcactttatcccagttcgctgttttgatatttgcaagccaatacactgttncgaagtatcaattagatattccctcgattctgaactataagacgttcttgcttttct

SEQ ID NO: 53113 - DNA, 282 bp, Zea mays
  unsure (1)..(282): unsure at all n locations
actccttcgtacctcgctccaggagaccccatgcataaagcactctatcctgttgaggagaccagagatgttcattgcatggacaactggacaagtaaaaaaacccattgaaaagaggaaaaaacccggactcaaccagggctggttattaaacgctcaacaagacctacaccatgtgctcgaagcttacgtaatgtatacatcgtaaaggggtgcctactctacgacgtggnattccgcccatcccttaacggcacctttcaatacgcgctcgcgtatgcc

SEQ ID NO: 53114 - DNA, 430 bp, Zea mays
  unsure (1)..(430): unsure at all n locations
tagaaactcaagctncggagaaacantatctaaacccaagagactctttatatatcaaaattaaatggccagagtgcgctctactgctagagttgagcgcgagggaaaccaagctgaatgtgcagagactgttcctatctccgaagcaatgcagcgacccggattggtgacctcgggaagaatccccactgccgaaacagaacaagctgctgccgaaccggaacaagaagatattgaggaagctgattctgacggcgatcaccatatcgcaccaccgagcaagcctagccatttggacttcggaaagccgactatctccaaggctgattattccaaaatggtgaagtccggctatcctagcgaagatgagaagaagctgattcgctctgggggagaggaaactaccccgaagccagaaaaggacgaaata

SEQ ID NO: 53115 - DNA, 379 bp, Zea mays
agcttggacttagcttattttcttgttttgcccgagcctccgttttcggcccgtgcgccatggcgaacacctcgttttcagcccagacgcaaggccgaacagccatgccgcacgcctccgtgtcgttttccctcagttccaacgtgcccttcactcaagccatacatacaccttagcttcgttgtctttccattccacacgcttggacttagcttattttcggggtcgtgcccgaaccttacttttcgccccctacgccatgggcgaacccctcgttttcggtccaaacgcaaggccgaacagccatgccgcccgacgtcgcgcgcctccgtggtgttttgcctccgtttcaccgtgcccttcactcaagacttacaca

SEQ ID NO: 53116 - DNA, 448 bp, Zea mays
ctagcaatcttagaatatccttcaataaatctgcaatatatgttctgcaagttccaagaaactttctgccctccgtaaccgtagtgggtatgctccataccactatctccttgactttggcaggatccactgctattcctccattagaaatgatatgtccaagaaatggcacctcgccaatccaaaactcgcacttgctaaacctagcatagagttgattatctcgtaacttctgtagcaccaaccttagatgttcttcctggtcactctcattcttagaatagataaggatatcgtcgatgaactccacgacgaatctgtccaaatactccaaaaacatcttattcatcaaatccataagataagctggtgcattagttaatccaaacgacataacgatgaactcatataatccatatcgagtcgagaaagccgtcttacgaatatc

SEQ ID NO: 53117 - DNA, 349 bp, Zea mays
cccgaccactataggacctgctaccttatggctgctatagcaactaattacgatatgcttaactatttaatacttcgagctgcagttataggcttttttggaattgaacctaaaggatctgcacacatatgccccgacgccatatgattctctgatggatgaaatatttgtgttcaacgtattaatatgatattttggtcgtgatgcgcaatattccatgatgatatgaactcataccatgcgtttcttttgacgaccattatatctactccaaatgcttcgccatatcacttgccacgctagcggccactggctctcaatttatgaagaaactcctcgtcacaacaat

SEQ ID NO: 53118 - DNA, 353 bp, Zea mays
agagcaagaacacaaaggggatccactgctagtgctagtgccgatgaccaaagggacaatgggcacaacacccccaaggagagttcaaacaaagtccaactagcgagcactcagaaactaaatgcaaaccacatggctgccaagattctgcagcttcgaatgaaaggcaagcatcaacaagctgaaccactctcggcgagtctttcaactactcttcttgtggcaaccctgtcacttttttgaccgaatctatgaatcattagacatcaatttatattataatgcaacaatgggaatatgcagagcacccctaacacatatgtgtctgatgtaacacccgacacatgccagcc

SEQ ID NO: 53119 - DNA, 390 bp, Zea mays
atccttaagtcacctgccgcatcaagcttatatatgaacttttctttttttttatggcacgtaattgtattgtcatcttccatcccatcgtcagcatcatttttattcaattctacttcctggtacacataactgaaagggaaatgtgcccttgggccatttctaagtattttggtgatttagtgtccaacacaagtgcctaagtgtaaaatggtggacaaagtacaaatcgaggataaaggtatgtttctcacacttagtacattgttctaaggactaatgtattgtgtctaagtgctggaaacacgaaaaatccaattggaaatgagatggctttgttcatccaaagtctgctcagtttgggagcaccggactgtcccgcggtgcacc

SEQ ID NO: 53120 - DNA, 412 bp, Zea mays
  unsure (1)..(412): unsure at all n locations
cgtcatgctcttgaagatacttgctgtgcggcaactactttatcacatacaacaattaacagcagcctggctgacaagtcattagaatcctaattcaatatcacaaaaacattgccatagaaatcatagagaatcaccttgctggaaagttttgaactttatagcaacttcaatcttggtagtttaattggaccaaacctttccatcagaccaatcaatactgctggagcccaaaaggtttgtttcacgcatcacatgcttcattggcaagtttaagtgaaacggaactttaaaatctagctacagttggcttatgtattctngtttgggggcacgtttacgctgcagctagggcagaagcatgtcaaatggcttaatggtgatgatgaccatgtcaatgagaagattctac

SEQ ID NO: 53121 - DNA, 386 bp, Zea mays
  unsure (1)..(386): unsure at all n locations
agcttcagctaaaggggtatctgntctcctgagccattggatccgcagcagacggccaatattagacttaacataacatccaaacggtacgcaatcctgaccgcaagatcccaatccatggtcacaattaaatcgctctaatcccaaccagtacactactctaatcgttcgattccggatcgatggccatatctttatgaagcaggactcattttcaaccctcggatccaatttcaatggtcgacgcttcatcaaggtgaaggggtaactctttctaattccccggccctggctatctctcaacgcccaacccggccaggcacacagggagtggaacgagtcgaacctccatagctcccttgcacagcacgaccgagcccacgatt

SEQ ID NO: 53122 - DNA, 418 bp, Zea mays
  unsure (1)..(418): unsure at all n locations
tcgcnaggtgaacgacaatagagatttggagaatggagttatggttcaagtgagccacgttgatgtgataaaaatcaaggatgccacggaaaaaaggatatattggaaggccgacgccgcgaagaatgaaaggagtgtaaaccactgactcgtgggtatcttcggtggggacagtagtcccgtggcaagcaccccaagaacagagttcccgtggagggagaaccccgatggaaacaaggcggagaagctcaacttcagaaatcacagacatatggttacctgcgaagggtaactgactgttggggtcgatggcggggatcactgcggcagacgagttcgcggtctttctcttgggcgccatcttgcttctcgctggcgaaacagagcacgaggcgagtagcagagaagactcagatgc

SEQ ID NO: 53123 - DNA, 371 bp, Zea mays
  unsure (1)..(371): unsure at all n locations
agcttctcacacgcatttttagttacaccgcanaggctgacttccctgaacgtgccactgagtgcccacgtgcatctttgaatctcactgaaaacgactagtgtggctacattacacgtataactcaggatcgcagctggcgaagggtgtttttttaacccaggcctgcctaaaattcactctcacagggaaacgaacctaggacctggcatgctacttaagccctgctaatcagtcaggtagcaggactattcgcttcacaagaaatgttctgtattccttataaaactttacattagaaacagagggatgattcctaacatgtatgtgatttccaaagcttatggaattacaggtataaaactacaagc

SEQ ID NO: 53124 - DNA, 408 bp, Zea mays
tttgatatgcaagttcttctaatcatacatctcgtggatcagataaaaatattagggccactatatttacatcatatgtttcagttggagcgatacctgggagtattaaaaggttatgtgcgaaatcgcgctcacccagagggttcaatcatggagggatacactacagaagaagtgattgagagctgtatagattacatcagtgacggaacaatgataggtgtgcctgtacctaaacatgagggtaaactatgtgggagagggagaatgggcaacaaaacttttcgcgttgaggattacaagctagtacattatgctcatggtagtgtactactacatctcacgatagccgagtcttacatagaggaacacctgaatgagcttcgtaaagaaaatcagaaccgcaca

SEQ ID NO: 53125 - DNA, 291 bp, Zea mays
agctttgtgtggagttgtttttattatttgatctctttggtgtgtcttgtattgaatgctccctcttgtaacgacgtcaacactggaaaacttggatgactcgaatgtgggggtggcctcacttcctcccccccactcctccactccctcccccttcccttccactctcccccttccttcccccctcttccccctccttcccccccccctcttcctcacccgctcccacccccctctcacccctctccccccccctccccccctccctctccctccttctcctctcccccc

SEQ ID NO: 53126 - DNA, 425 bp, Zea mays
tcggcattcggcattactacttctatgtagagtcttcgtcttgaggacctttggcagagaagaaggcccccaacattgtgaagataataatatgtgatgtatgaacttatctctggtttaaatttgatatcacattaaaataagtagagttagattatgtaatcatggacaacaactaaagaataatcaactactaaatgagattagttcactctataatttaaattcccttttgagtttaaacttttccttttgagatgtgttccaatgcttgtacatgattgatgtgctatttatttgtcatttaccaaatgtattgaatgcatgatttctttatttaaacaccgagcagcccgtggtttctgagtgtgttgccaaagatgtccctgagcaacaacctggtgaaggcaagtgtcctttgacct

SEQ ID NO: 53127 - DNA, 389 bp, Zea mays
agcttgtggtgccctcgggcgttctgttttagccgaagtaccaagtctcccacctagaagccttggggccaaacccctcgggcgtggtagcatcgcagggactgctgataccgcaccgagtgtagcaaggccatgtctcgagcctcttcgagctggtccagtgagtcttctcggctggcctggttgcttcggtcgtcgtacgcctttgtcctcggggaaccgtattcttagtctgtgggtaagatagcctcggccccatagactagaaagaacggcgagaaacccgtagctcggcttggcgtcttcctcagactccagaccaccgagggtagcactttcatccaccgcttgccaaacttgttgaggtcgttgtagatctttggtttaag

SEQ ID NO: 53128 - DNA, 449 bp, Zea mays
  unsure (1)..(449): unsure at all n locations
ctgtgatgagtgatgcctgatgacagctatactcctncctaatctgatattgatgcttggcttgctgggtgaagctggctggttgcatcacactgcacttataatatttatgattagtcacctcgctccctgcagttcaagctttggattcccggatcccacaccaccggtctctctcggggagtgtaatccagcgagcgttgagttgaaagccgcgcaagtggagatgagtactctgaagaaatccgacaagaaggctgccctcgacttcgcagcatggagtttcaatgtcaccacatcggttggactcatcatggtcaacaaggccttgatggctacgtatgggttcagtttcggtatgcctgtgctctgctcgtccagggaattatttaccatacctncgactttcaccttcggtctctacttcttgcgcttctgactgcttagcg

SEQ ID NO: 53129 - DNA, 390 bp, Zea mays
  unsure (1)..(390): unsure at all n locations
agcttatcacaacttttcctccgttattcaccatagntgntgtattttatgctatctatacagcaatacttgaaacttggcctccaatggatgctaggttttttatgattgatcacttaacgtcttcaatttatcattgctttcataatactgtttcaagaatgaagaatgtgcttttctcttttgctttacaattcattttcaaaaagatcagtagtcaaagtttcattaccttcagttatatgggaatgtacctgtagtatgatagtatccaagatgtacaaaatgcatgtatacatatacttatttatttgtttatttggtgttcatggttgcatcatgtgttaaaggtacacatgaaaaaaatatctgctgaaactataacaattg

SEQ ID NO: 53130 - DNA, 446 bp, Zea mays
  unsure (1)..(446): unsure at all n locations
tattacacacgagtgctacctagggtacccccgaactctttctctaagtgtccccaaattccaagagaaggtcatcaagactggccagggacatgtcctcggggtcggactggttcctgngagggttctcttcctgctgctcagtctgacatccttggcttttggtcttcttgcgggtttttcttgcgggggcgagcttcttcagtttcttgtcgtagtccaatttgagggtgcggtaagcttcacgggtattggcctcttcgccttcagctagcgagaggctctcttgaagggacgctttttcttctgaaagttccctgactttctgctccaggctttccacctgggaggttaaggaggtgcactggagggcgaggtcatcatattggttatcaagggtatgaaggtatcctgccatgtagacaatggtgggatcattctcaata

SEQ ID NO: 53131 - DNA, 384 bp, Zea mays
gcttgaagccatggaagcatctttttcttattatatacgaattgactcaagcctatctactggtgcatacgtatcaccgaaatccaaaccttagacttgggagcatcccttatccagaagtcgagccttgtcccttgacaccacaccatgctcatcctgcttgtagcggaacacccatttggtccctacaacatatcggttatgacgtggaaccaaatgccataccttatttctagtgaagctattgagctcctcttgcatcgccaccacccaatctgaatcttgtagtgcttcctctaccctatgtggttcaatagaggaaacaacagagtaccgctcacaaaaatgtgcaacaccaaatctatcagttacccccttatgaat

SEQ ID NO: 53132 - DNA, 429 bp, Zea mays
  unsure (1)..(429): unsure at all n locations
cttggattngatacagcttgcaaggcatctaagtcttgagtgtttactatgtatgaagncccagtctaagggtttaattagctacaatggtgacgggctaattgctcaccgcacacctgctcgagcattctctcaatntgaaattaaggcattctacacagatgcattcgaaaacccatcatgaatatattatgaccaggaatcatatttttcagatatactctgaaatgattggcaatgttatgactgatgcgacatccactggaaaatactaccactgtaagtctatcagcagcaacaaaataggttgtcatctaatagttatggactagtaagtcggttcctctattgaaaaatcatacacaccatgtgatgccatggagcatttgcttgacattataaagcagcgctaccgcgtagccatgaata

SEQ ID NO: 53133 - DNA, 388 bp, Zea mays
agctgagagagccagaaatacaatgttcagcagaagataaagtagcccaagccactggcagaactaggtgcagacatagccccctcaatcaagcatagcagaaaagaagtcttcagctgctgaaaaacataaataaatctaggtgaatacactaggtattccgcaagcccatcccgctcccgtaaagagaaagggacctatatcatacatgctttatatggtggagttgaagtcactcttctttttctcagagaaaggtagtacttttagggtttttcccaaagaaatagaaataacacattactcaaccaccactgagcttcccgctcccgtggcatcgttttcatttccaaaaacaaactcacacacatttccctgctcacggagg

SEQ ID NO: 53134 - DNA, 442 bp, Zea mays
  unsure (1)..(442): unsure at all n locations
cctatgatactcagcttaacccccccccccccgcgaaccctttcccgttttttttttcataatgaatgcgatatcgaatgtcatacttgatgcatatttactttatttgttcccttgtgtgatgaactgtttgtttcccaatttgaatggatgaatgtatgtatgcttgcaatcgcatagagaacgatccggtcgaagagcccgaggaactcgcaggagaagcccctgagcagcagtcggttggtggaggcaagtgtcccttgacctatctctgtcctattcattatttaattcacctcccgctctacacatttatgcctaaggattgactagcttttgttacccatgtccttgtctacctatctgggttgtattattattgtttagctntatgctattgcttaactctaatcaatgaacatgatgagattatctatgatac

SEQ ID NO: 53135 - DNA, 401 bp, Zea mays
attctatacaacctgcctgcatgcatgcttgctcataacatgacagttgtgtcttacatcgattagcacccttctgcagcggcttcaccttcggcagtggcttcaacttctgcacttgcagcatgcaccattctggatgtctaggctagatgcagcgctcgctcaatagtctgcatgacattgaccattctttgtctcttttgacctctaaactctctcctttacgaccgagggatgatccttattctgtaagaggctcatcaattccagtcccaaatgacttaccagcttgatgggctacgatacattcattacctttaaaatttctgctatttcagcagactggggcgttgaaggagctacttctttgcatcactaccttcagatcacagagcagtcat

SEQ ID NO: 53136 - DNA, 399 bp, Zea mays
cgggaagatactctataccaacacgagctttttgttggtgtctataccaacccatgttagtgttagcaagtaagcaagagtcgagatcagctctatcaaaatccaccaagtatagctgaccctctaacactcccttaaatgctattgaatgatcacttctattaaagacagtgacccccacctcgacaaatagaccagtgtgcgcccagttgacataatttgagaaacggaaagcaaaatgtgatggcaagaatctacaagaaaaacattagaaatagaatggtcaggagatatagctattttacccaggactttgaacaaatgcgagggttcgatcctcgaatgtgaggaatcgaagtggaaccttgtttttttcaggcgaagagaacatcttcttct

SEQ ID NO: 53137 - DNA, 365 bp, Zea mays
aaagggagaactctctaattgtctaactaacggccaatccgggaaatatagaccttgtgcagcttcgcaagcagggaaacaggggggaggctctcataacaccaaacatgtgatgacgacatcaacacccttggaaacgctgcgtatggaccataatggacccgccttttatttgtgcattagaaggaattagtatggataacttattgcagatgattattaccgcttcacttgggggatctttccggaggatatgttagaaacccacaggaccctcatgcgctttctcaagagagctctaaatgagtatgagctgaaagtgaagaaataaggagctacagcggatccgagatcaataacctcca

SEQ ID NO: 53138 - DNA, 416 bp, Zea mays
  unsure (1)..(416): unsure at all n locations
gtagctgactcanggntccttggtggacgattcctattcttatctcttccatctcctgacataaggtatgggtagaggtcttcaccgtatgacaatgacaggaaatcttacagctcagtgaatctgccacaacattggctttgcctgtgtgataatgaatttctagttcataatccttaataagctcaagccatcgcctttgtctcatatttaactctgactgggtgaagatatacttcaagcttttatgatctgtataaatatgacagatatttcccagcagatagtgacgccaaatcttcagggcatgaaccacaacagctagctccagatcatgagttgggtaatgctcctcatgtcggcgcacctgccttgaagcatatgcaattactcagccttcttgattaatacacagc

SEQ ID NO: 53139 - DNA, 378 bp, Zea mays
agcttcccctgcacgacgaggtttttaatatcttgggcgtcaggacacaagaagattgctccagcagcacacatttgtggctccaagcgctatattctttatgtccctgggcccacatgtcggggcccagtacctttgtgcataccccccttcaactataaaaggggaggcatgcgacgttacacacaagctcaatctttcagacccaaccgtagtctcacaagttcatacaaattctcaggcaatacatcacatagtggagtagggtgttacgctccggtggcccgaaccactctaaatccttgtgtgtttttgagttcttcccacttttccgactaacaagcaaaacgcttaggcccctcctcatcttaggattta

SEQ ID NO: 53140 - DNA, 423 bp, Zea mays
cttgccctggaattaaatcaatcttgtgctcaatgcctctcacaggttgttatccagggggtatctcggagggaaacacattcatatactcttgcaaaaggttagcaatagcatgtggcaagacaatagatgtatcatcaatggaatagaaagcatttttgcacactaaggcatagcaaagtccaagagaggcatgtaactcatcaagatcagatttagtggctagcaaagtaggagtttttaacttaataggttgctgattttcagagttcaaaacacctttttgcttagcattagtctttttctcatgttcaaagtggacaatctcagtgggagtcataggaagcaacacaatcttctttcccttgtgcataaaagtatatttattagatctaccatggtgaatagcatcagtatcaaact

SEQ ID NO: 53141 - DNA, 385 bp, Zea mays
agcttcataacccctagtgggatctactgctacctttgaatgcccgaggggctcaagaatgctggaggaagcttcagtaggacgactgctaaagtcctttgctctcagattggcaggaatgttctaacatatgtcgatgatatcatagtgaaaagtatcaagcaagaaaatcacatcactgatttacaagaaacatttgccaattttaaaaaggatagcctcaagctcaacccagaggaatgtgtcttcggattgaagaaggggaaatttcttgggtgtcttgtgtgaacaaaaggaattgaggctaacccaaataagatagaagccgtagttcggaaggaaccaccaaagtcaagaaaaggtgatcaaagatagataggggttg

SEQ ID NO: 53142 - DNA, 432 bp, Zea mays
  unsure (1)..(432): unsure at all n locations
gggtgccaatggagaagcaganatccttgaaatcttggctgtctaattgcttgccattgtcaactgtgagctcgaacgggactccgaagtggcaaacaatgttttgccaggagaatttctgggcagtcttcaatgttatcgtggatacagccctcgcctcgatccatttggtaaaatactcgacggcgacgaaggtgaacttgaggttcccctgggccgtgggtaggggcccgacaatgtccaagccccagcgctgaagaggccatgtgcgggcgattagctttgtgaattgcgaagggcttcccgagcgtggagaaaacttctggcaggcttcgcaggaccttgtgactcgattagcggcgcagatcatggcgggccagtagaaaccttgacggatcacctttgcggctagggccctaggccctgcgtgag

SEQ ID NO: 53143 - DNA, 396 bp, Zea mays
gcatgcatgcaagcttcttagacaaatttctctatttttctacttctagagcataaggatttttcaacttaacaaaatttttattttctttaacaagcaagtcatcttgacatcccaagagatcatccttctcgttagtggtttcaattaattcattcaattttttcttttggtacatgttaaggttggcaaagagagaaattaaatcgtcttcattatcgctagagctacccaaaatgattcaacccaaataggtgaacaaggacaggataaacagaatggtagtcaatccttacgtataaattgtgtaaatgcgggaagtgaattataaaatgagtcggacataaataggtcagagtacacttgccttcaccaaccagttgctgctcacggtct

SEQ ID NO: 53144 - DNA, 430 bp, Zea mays
  unsure (1)..(430): unsure at all n locations
cctcgtacataagactctcttttaatatgaacctcatgtgaatactattcctatcgnatcaccataagaaagatcacgctaagacttatttggcaaagttaaatccatggcttattaaaaagaaacgttgaagactaaatgtatggaagtttcaagagcacactggtgatctaagttctccagaggttcagagcattagtgctttgaacatgatgaacatacaaactagtagcaccatcaacttttgaaatttaagcctgatatttcaagctatntagcacctcctcccccaccttcaccccccaaaaaaaggttttagcactaggttttcatcatgaggacatggtttccacttcaaataaatttagaaagaatgtagggccaacattggttacggaatatgggcatgtctagcttctccacaaaaaca

SEQ ID NO: 53145 - DNA, 441 bp, Zea mays
  unsure (1)..(441): unsure at all n locations
ctgtggtgatgtgggatttcatagntatttgtctactcttctcacttctgggagatcggaggtagataatggtaagcatgccaaagggtggaattcagtgtagttcggctacataaactccaggtatgtgtccattcaggaccgacctttaccatttagtttacagtgtataccaaacttgtcaaaggactatccaaggtcaattcagtcactataagtatttacaattccgagagttgtatgcgacacaagcatagaggttctagatagaacgagtaaagtggttcgacgggaacacactatgttttttttgcacaccatcataatgaaatttttctcagagtaacctttcgatgtactcgcaacttcgtgttgctagggtactagccatttatctcaaagttcgcttcatgtcgttcaacgacaaagggagcaatatgt

SEQ ID NO: 53146 - DNA, 310 bp, Zea mays
gcagcaaccatagcattatcttttgtttacggccacgatacacacacgacaacatactactgaactgaaggtagcaaaagctcaccacggcttctctctgctcaacgcgttcgaatagaaaactatttgtggagcataccatgcatcactatactacctagctcaaggaacattcaataattttgccagatctagcaggcaaataaacaagcactgaacaaacaaataagaataacatacatcagaatatctgaaaggtccctttgacccgggaacaagatctggatgtcgcctaaaggggggggggtga

SEQ ID NO: 53147 - DNA, 410 bp, Zea mays
tctaaagggagaacacgtgataggtttgactattgtacatttcgaaaaagatagaccttgtgcagcttgtcaagcatgtaaacaggtgggaggagcgcatcacagcaagaatgtgatgaccacttcaagacccctggagctgctgcatatggacctcttcggacccgtcgcctatctgagcatatggggaagtaagtatggtcttgttattgctgatgacttttcccgcttcacttgggtgttctttttgcaggataagtctgaaacccaagggaccctcaagcgcttcctaaggagagctcaaaatgagtttgagctcaaggtgaagaagataaggagcgacaacgggtccgagttcaagaatcttcaagtggaggagttccttgaggaggaagggatcaagcacgagt

SEQ ID NO: 53148 - DNA, 375 bp, Zea mays
  unsure (1)..(375): unsure at all n locations
cgcagtgtccagaagagtagtgtatatcctattcattatggtgaagtngagatggcaaccctccaagagcatcttccatgtgaactctcctcaatcatcattcccctataagtatttgggcatgtctttgtccttgaaaagaataaccagaaatcaaatgcaacccatcatcgatagaattgttgatcataacctggatcanaagtagacttaatggcaagggttggacgaagagtacatatctagtttgtgctaactaggatcctctnttatcttaccatggcagtggatttacctccaaacacacttaaggctattggtaatacttgaaaatggtttctctagtgaggaaggaaaaatgtcagagatggtcat

SEQ ID NO: 53149 - DNA, 475 bp, Zea mays
  unsure (1)..(475): unsure at all n locations
tgtcttcaagttngatatttacaaagaatgatcaacccaccgttctctcctggctggtataacaagtaatttaagagttcgatcttgcttgtgggatcttgtttccttttcatttcccctccttttcttttttgatctatntcctttctagtacgagatcatagtgggtggtggtaagttgtaatttgtaagtaaactttctaccattattaatataaatatactatggggacctcctccatagttttccaataaaaaatataactatcactctcactagaggatgagactttagtttaatgtcctgccataaggcatacatgagccaagcgtgataatgaatacttgtggtcatatatcatgtgttgggattcgtcttcacctgatgaatcatcccatgttttggattttaagaccttcggcatgcatctcttgtgaaacattccactactgatgcactataccatacagtacc

SEQ ID NO: 53150 - DNA, 404 bp, Zea mays
  unsure (1)..(404): unsure at all n locations
atgtccggngctcttgtgtctactggttataaacaataaatgctatgatggagctaaaggtgatctgtggacatgtggagtgattttctttgtcctcatggcggggtacctcccatttaaagattcaaacctgatgtcgctttacaagaaagttgtcagtctctaccatgacaacaactcaagaagcacttaattgtccttccccttttaatggttgcttgacacatcctgttttttcatgcagatcttcaaagcggatttcaagtgcccatcctcggttctcacaagtgcaaagaagctcatcaagaagatacttgatcctaatgctaacactatgagttctgttgtttggagccatcatttaactcattntgttcaacatctgcagaggtaataactgtgta

SEQ ID NO: 53151 - DNA, 484 bp, Zea mays
  unsure (1)..(484): unsure at all n locations
agaacacgtgataggtctaaccaaggctactttcttaaaagatagactcttttcagcttgtcaagcaggtaaacaagtgggaggagcgcatcacagcaagaatgtgatgaccacgtcaagacctctggagctgctacatatggacctcttctgacccgtcgcctatctaagcataggaggaagtaagtatggactagttattgttgatgactnttctccgcttcactttgggtattncttttgcaggataaatctgaaacacaagggaccctcaagcgcttcctaaggagagctcaaaacgagtttgagctcaacgtgaaaaagataatgagcgacaatgggttcgagttcaaaaaccttcaagtggaggagtacctcgaggaggaanggatcaagcatgagttctctcgctcctacacaccacaacanaatggtgtggtagagaggaagaacatgacacttatagacatcgcgaagatgatgc

SEQ ID NO: 53152 - DNA, 279 bp, Zea mays
tatgacgagaatctggctatggagagaatcttacctcctatagattactgcggaggaagatgaaagagttcatacggtttaagacgtataaagcgactgtttcctactttcgcaacgacttggccgactctatgtgcccgggaccataattaggggtacccttcagactcctaattctcagctggttaccctcatcaccataaggctgcataagcctgatgcgtgcgattaaactagggatcagttcattcgagcgagtctacacgcctcctccgacct

SEQ ID NO: 53153 - DNA, 388 bp, Zea mays
  unsure (1)..(388): unsure at all n locations
gcgcatgccaagcagggaagcaaattggtgcccatcattcacacaagaacatcatgacgactgacaggccaatggagctcctacacatggatctattcggaccgattgcttacataagcatcggcgggagtaagtactgtctagttattgtggatgattattctcgcttcacttgggtgttctttttgcaggaaaaatctcatacccaagatactttaaagggattcttaagacgagctcaaaacgagttcggcttaaggatcaagaaaattagaagcgacaacgagacggagttcaaaaactctcaaattgaaggcttccttgaggaggagggcatcaagcatgagttctcttcttcctacactccacaacanaatggtgtagtgga

SEQ ID NO: 53154 - DNA, 452 bp, Zea mays
  unsure (1)..(452): unsure at all n locations
aactctcgtgagaacctttcccatttctttctaaccgnagttanattattattatatgngananncnangngtatactttatttgttctcctgtatggcgtattgattgtttcctaatttgaatgtatggatgtgtgtatgcttgcaatcacataaagaacgatccggttgaagagcccgatgaactcgcacgagaagtccctgagcagcaatcngttggtggaggcaagtgtcccttgacctatctctgtcctattcattatttaattcacctcccgctttacacatttatgcctaaggattgactagctnttgttatccatgtccttgtttacctatttgggttggattattatatgttagctatatgctattgctcaaactctaatcaatgaacatgatgagattatctatgatacacttgtttcccctctctttgtatgatgtattac

SEQ ID NO: 53155 - DNA, 401 bp, Zea mays
  unsure (1)..(401): unsure at all n locations
cataagagcttccgaacgtgaagacttttttgtccacggagtcgctttatccgaacgcgagttacttatcgcagaaggtgatgagtgaggtatccgtatcccggaggcgtaggagtccctcggctcggtcagccttggctgcttacgtgtactccgtcgtttccaggatccgcttttcgaagtagtcaaaaagcacgaaagaaattctgctaaaaagagatctttnttcgagggaaaaattcgacgcagagggggtctccccccttttagccctcgagggagggtcgggctttgccgaggcgaggccgacccttccttgatgactaaacttttgcgtgggtgcgaggtatatgaacaacttgaaaacatcttangggtagaagcgaacgtagctgttgatg

SEQ ID NO: 53156 - DNA, 473 bp, Zea mays
  unsure (1)..(473): unsure at all n locations
tcgaagcaacaatttgaaactgaagctgggccttcatagcccattctttgtaaaccttnggaagccgaagaaacaaaaattgcaaaggcagtcgaaaaaataaaaatgtcagagccaattttggttgaagaaattgacactgctgcccccgaagcaccttccaaaatatacgattatattgtgcgacacgcttcggggaagaaattatccgaagaagagattnttgaagttaatcactatgccagagaattgaaatatccgaagggggcactagtgttcaatgggacagacgaagatgacttcctatactgccttccagacaacaaagaattatctgtctgctgggagatggctagaagcatggggtttccgaagcttgaagctggactctgcgctatgacgaaggacgatcttgcggatagccttgcatataatagtctgaaggtgtgagaattgtatatttggaaatttac

SEQ ID NO: 53157 - DNA, 365 bp, Zea mays
  unsure (1)..(365): unsure at all n locations
acagcgtgcggctctctccagctcgctcagttctaccatggcgagctcgctggggatgctcttgccaccaccgacctacctgcttcttatgccctggacggagatcctctctctctcctcatctctgtggccggagctacctcatccggtcatcccctcctctcggcatcttctccctgctgtgctcgacggctacctgcgcgcaacttggccgcgaggctctctggatctcgcccctggctcggatttccttccccaggcgagatccctccctgttcgtctctgctccagcgacacgtcaagctcaccatggtgctgtcgccctcaagctccnccatgctctctctgctctctctgacgcgcgt

SEQ ID NO: 53158 - DNA, 417 bp, Zea mays
  unsure (1)..(417): unsure at all n locations
tttcttatgcatctgagaaatgatcaaccacgcaaactagttagtcgataaggtttgtgatggtcgtcaaacaccaaaatcgtttataggaaatgttgaggccatttccctatccggtattatggcattacttatggatattgtggcatgccccacatttgatttgggacatatcgtggtgatatgaatgcatattgatatggcacangtgggtatggcggtggaggtgtccttgtacgtacattatgtcttaatcgacattatgacaagctgactaatagtcgccttaagggggtgaataggtgaaaccctaaaattataaattttgaacacgcactatgctccgtgttagtgttacaaataactcacagtgtggaagatagttctcttgctatgagtgctcaatcatgctgtaac

SEQ ID NO: 53159 - DNA, 234 bp, Zea mays
gagagcctgaggctcgatgagctaccgcctatgcgcaccacccgtatgagcgcgggactgtctctctgtgactcactggttgcatgtgcggcgatcaccggagtcactgtcactgtgcaagatagactttttccacccactgagcgtggattccatctccgaccgtctgctacgatcggccgaaggattcatcgaccctcgatgcgcctaaaaattgcatgtgccaccaactcc

SEQ ID NO: 53160 - DNA, 124 bp, Zea mays
gtcctaaacaggaccctctatgataaaccatccctccgtatttatacgggatggaactgggggggcagcggactgctaccttgtgatattgggcacacacactcacccacacgtgatgtcgggc

SEQ ID NO: 53161 - DNA, 435 bp, Zea mays
  unsure (1)..(435): unsure at all n locations
tctacgtatatatntcgtattaattacaagatccaactctaattatcttggttctagatttatcttggtcttgcagtcggggttgccataagactggtgtccacgccgaggtgagcggtacgggtgctgagtcccgacgggagcgggggaaccaccatccaggtgacgacgttccgcgcgctcagcccgcagcagggcgatctcagcacgagccctactcagctcgtctaatgcatggtccagctccgtgtttagcacggcggctaggttgactgtgctgctcaacctangattgccctcaccgacaggtgagacaatcacgcctacggtgctgccagatggacggcgggggtaatacttcaggtcaagaccgtcagctaccccaccgaanatcgagcagtagtgcgaaagcgcacgccgtgcagcatcttgcat

SEQ ID NO: 53162 - DNA, 424 bp, Zea mays
tccccttgacaactcgctgcatttatctttctggtgtcctatagaattctgacctgaataccttcccgactagtgttctggatgctgcatgtattccacattgcccagcatggaccttctccagaagtcgcttcccaacagatgagataatgcactttatgaggacgcccgatgcacctcttctgtacaatgtctccccaatgagtgtgtaatgagccgactgtctggcaatgcgctcggctgaaatcttgttatctggttcctcttcattctttatatacttgataattggccttctccagtcatcaaagtctgacttaagttgatctataatgttgcactcttctcgttgatccattgagaagctccgctgtagtatttctttgccaaagactacgggtgggacctgaaatcgactggatcc

SEQ ID NO: 53163 - DNA, 350 bp, Zea mays
  unsure (1)..(350): unsure at all n locations
tcttctttttcgcaactttatgcccatttttactntaggccaaactcatgttgggggtggttcgcgcaattcttgccgcacgtacccattcaaaacgggtgtggggtgctaaagcacgagttttgccccggaccatttcttttttttttaacgaacatgcccatcactattttgtcaaactcattttgggtggttcgccaattttttgcgccgttaccattccaaaacagggtcgggtgatacatcacaatttttgtacccgaccattcttttttttacacaaatgccattcactacttatgccaaaatcatgttgggggtttccaatttctgcgacgcacccatccaaa

SEQ ID NO: 53164 - DNA, 342 bp, Zea mays
ttgaggctgaacgacatggaggtatatcacaaagctccgaatggagtgatgaatgttgttttttcctcgtcttcttttgccaggctaatctgatgatacccagagtagcaatgcaagaaggacaacatagaacatctagcggtggaatctaccacctaatctatcctatgaagcccgaagggatcctttggacagtgtttgttgagatccgtatagtcgacgcacatgcgccaatccactttattctttttgagtacaagaacaaggttggctaaccacttgggatgttacacctctctaataaatccaaccgcgaccaagtgagctagctcagcgcggatg

SEQ ID NO: 53165 - DNA, 453 bp, Zea mays
  unsure (1)..(453): unsure at all n locations
atgagatcttcatcaacggggctagttgtgatgcttattcaacacagtgagcttaacaataagcaagtgtcgagttcagctctatcacaatctaccaagtatagctgaccctctaatactcccttaaatgctattgaatcatcacttcttctaaagacagtgacacctacatcagtaaatagacagttgtagcccattagacataactgagatacagaaagcatattgtaatctaaagaatctacaagacaaacattggaaatagtatggtcaggtgatatggcaattatacccaatcctttgaccaaaccttgatttccatcctcgaatgtgatagctcgttggggatcttgcgtnttctcatatgaggagatcatcttcttctcctctgtcatgtgatttgtgcacccgctgtcgagtatccaacttgagcccccggatgcataaacctac

SEQ ID NO: 53166 - DNA, 469 bp, Zea mays
  unsure (1)..(469): unsure at all n locations
cgtgaagggtcttcattctcacatgtgctaagcttgtgatgctatattcagcccatgctagncttagctattaagcatgcatctagaccggcctcttcttttgcaaaatcaactaaataaagtntgtcgtctaatacacccttaaaagctagtgaaccatcacttcttctaaagacagacacatctacatttgtaaatagacagttataccccatatgacataattgactaacagatagcaaattatatccaagactctctactaaaaatacattatagatagaatgctcattanaaatngcaattntacctaacccttttaccttgcctttgattccatcgccgaatataattgaatcttgggaatccttattcttgacgtaggaggtgaacatcttcttctcccccgtcatatggtttgtgcatccgctgtcgataatccagcttgaacccccggatgcataaacct

SEQ ID NO: 53167 - DNA, 463 bp, Zea mays
gtaatatacgaattgattcaagcctagctattgtgtgcaagtattaccacaatccaaaccttcgacttgtgaatattctttagccacaagtccggctttgctccttgtcaccacaccatgctcatcttgcttgttgcggaatacccatttggtacctacaacattttgattatgacgtgcaacatgatgccatacctcattcctcgtgaagttgttgagctcctcgtgctttgccagcacccaatccgagtctcttagtgcatactccaccctgtatggctcaatagaggacacaaaacagtaatgttcacaaaaatgagtgactcgagatctagtggttaccccccttatgaatgtcaccgaaatagagttcacggcgtgatctctttgaatcgcttggtggactcttgtgtgtggcggtctatgaccctgatcatcttacttatcttgaacaacttcatct

SEQ ID NO: 53168 - DNA, 254 bp, Zea mays
atcactcacatacgagaagcacataatagcccactcaatgatgcatatgatccagtattggtaggactacaaaatgaaccatttactcgatactatgcggcaatatcgattatcgagttatgcaatgtctataacataacttgttgaacaaatacctcacagagaaatacaaccatttttgaaatcattattggacaactagtactttataaattcgacctgctactctatgtgatgcatgagataaatacata

SEQ ID NO: 53169 - DNA, 456 bp, Zea mays
  unsure (1)..(456): unsure at all n locations
tatgcatctaaggtacctggtctttgcctcgtggaggacctcgctgacgtagtagaccgtcttctgaatggtccgaacccctgtagccagtcccgagccctcaggttcctggtcttcttgtgacgtcctctcggctccccaagctctggggctaccagcattggtagggacaccaggtgctgctttaactcttggaaggcttgttctgcctcttcgttccaagagaatggaccggactttcgcaacagcttgaagaagggcagcgccctctcagccagcctcgaaatgaagcggctaagggcgggtaatgaccctngcagcttctggacgtccttgatacaggtcggggcccgcattgcttcaatcgccttgattntctccgggtttgcctcaatgccccggtacgaaaccaggaaccccagcaacttccctacagagacaccaaagacgcacttg

SEQ ID NO: 53170 - DNA, 418 bp, Zea mays
  unsure (1)..(418): unsure at all n locations
aagttgaagtggtgaagcatgagatatgcgagatcgaaagattaagagcgcacaagaatgctgatgagcttcgtgctgctaaagaaaaatgttagaagtatccttggattgtgctaagagtttaaagaacaactttgcttaagttggagcctattcttctaagcgaagatttatctgtggaccccaatggagttatccagtggatcagcggtgatgccgaagcttttatagaaattcttagtgatcaaggagatttctgtgcctttgctggtgcccgngggcacgtctatcttggagaaggctagttgcaatcatactaaggttgtagcctgcaactctgctgctagaggagaagcatcatctaaagcaaagttgccatgatgaaagtcatcataccattcatcatcattaattgggc

SEQ ID NO: 53171 - DNA, 364 bp, Zea mays
  unsure (1)..(364): unsure at all n locations
gcttttgacgaacgcttaacccgatgcatgtgagatcaattcacaattctacacaaaatgatgacagaggaagccaacagctaaggccacaatgctcctcacacgcttcttggtaacagtcaagctcctatcggccaccagctcctataggcagatgcgccacaggcttctgacgaagatatggcgatcaaccgagaagaatctttngcttattctgcggtgagaacaaaggccatactaccaggatgtgccatgttactatacagaagcaaaatgaaatagctgaagcagcagcacaaccagcccagccgaagcacgacatgcatacagcttcgtatcatctcctctacattccagaatatgt

SEQ ID NO: 53172 - DNA, 436 bp, Zea mays
  unsure (1)..(436): unsure at all n locations
tgagtttanaaattacacacattttatttttgcatggtggtttctattgtcatgcaaccatagttattatttgatgttttaactttagtagaactatattgctttgatcctcttctagaatgtgccacgactattttagattctcttattgctgctgtaggtcatggaaactgttttttgaattttttgacatttgttanggagatatgcgtacggatggtgacataatgctgatnatccagtcgatacgtgccatagagttataattaaaattcacagtacagtagtaggataggagagtagtacagcttaccttcgagatgtaccatatccatcaaggtagaggatgaggggagatgagaggagcangatatgagaggtggtcggcgttcctaagcaatcccaccctcgttatcgccgacatcgacattctcat

SEQ ID NO: 53173 - DNA, 302 bp, Zea mays
tctatcccaatctactaagtatagctgaccctctaacactcccttaaatgctattgaatcatcactccttctaaagacagcgacacctacatctgttaaaagacagttgtaacccattttgcataattgcgaaactgaaagcaagttgtaatctaaagagtccacaagacaaacattggaaatgggaatggtcaggtgatatagctattatacccaattctttgaccaaaccttgaattccatccccgaatgtgatagctcgctggggatactggcttttctcatacgaggagaacatcttc

SEQ ID NO: 53174 - DNA, 332 bp, Zea mays
agactccactgacaacttgcggcatctggcttggtatttgtcacggttcttggccacttagcgctaatgatgcatggtgagccgaatctaggcactatgctgctcttatacgagagatgatgtcgtgccagctttattttggatactttatgtaggatcattagacaactatcaagctttggtggtcatgttactacatgtcataatatgttggacaagcccatggcaccctgttctcatcattactgcaagattttatctgtcaaacctgttgctgcaccttattaaacaacaataaatttcacagtccacacgtttaacctactcacttc

SEQ ID NO: 53175 - DNA, 455 bp, Zea mays
  unsure (1)..(455): unsure at all n locations
atgcctcttctaccttatgaatccatggttgtggacatacctgaagaggacctggagataagcttcacaagagctggaggtaaaggaggccataacgtgaacaaggtggaaacggctgttcgcatggttcatattccaactggaattgcagatcgctgctcaggtataatttcacaccagtttgcatttgcattgtggtgaacaacacatactcagtcttctctatgtacattggatcttangcaatcgattacaaaaaaagcaaaaaaaagtagtaaatgaattggtggtaagcaaaagatgtgaaaaactaattgatgccctcctgaaagtaccagaacttcctacccctgaatcgtgaccatacgtgataggtaaaatcttagcttttaccaatgctggattgccactctcgcagaanagctatttacaactttgtgtagccaggatgtctg

SEQ ID NO: 53176 - DNA, 421 bp, Zea mays
  unsure (1)..(421): unsure at all n locations
tcgtgttcagntctgctattattgcttcggctttcgccaataaatcttacggtgcctggagctcaaagttctttttctcgatagcatctgattgctcctttattttgctttccaaactatcaattataacttcgtgcttcttgtcttcaaaatcttgttgcatcttcaaggctatgctcaacagcatactctgcacgaaaacaaccttcgttagacatgttttcattattataaacaataaaagttaaaggaaaagtagttcaccttgaaatttgaataaaataaactaccaacgatatgttgtcgtcggtagcggctaatgtccatttctagcttcggaaaaccgatactctttgacagagtaccgataactttggctccagttnggtttcggatacaatctaatntctcatcatcaata

SEQ ID NO: 53177 - DNA, 415 bp, Zea mays
  unsure (1)..(415): unsure at all n locations
tgaatgtgttttcctccatcattattcgatatgcacgtacacctattcatatatcttgttgatcagataacaatattanggccactatatttacatcatatgtttcagttggagcgatacctatgagtattaaaaggttatgtgcgaaatcgcgctcacccagagggttcaatcatggagaaatacactacagaagaagtgattgagagctgtatagattacatcantgacggaacaatgatatgtgtgcctgtacctaaacatgagggtaaactatgtgggagagggagaatgggcaataaaacttttcgcgttgaggagtacaagctagtacattgtgctcatggtagtgtactacaacatctcacgatagccgagccttacatagaggaacacctgaatgcgccttcgtaag

SEQ ID NO: 53178 - DNA, 494 bp, Zea mays
  unsure (1)..(494): unsure at all n locations
gagcacattntaggattaacaaatgttcacttctgttattatacaggatatgtatcgcttgtctttcagggaagcaagttggtgcccatcattcacacaagaatatcatgacgactaacaggccactggagctcctacacatggatctattccgcccgatagcttatataagcatcggcgggcgtaagtactgtctacctattgtggatgattattctctcttcacttgggcggtctttttgcaggaaaaaactcatacccaagagaccttatagggaatcttgagacgggctcaaaatgagttcggcttaacgatcaagaaaattagaagcgactacgggacggagttcaagaactctcaaattgaatgtttccttgaggaggagggcatcatgcatgagttctcctttccctacacgacacaacacaatggcgtatcggataagaagaatagaacatatttggacatcgcatgaaccatgcttgatgagtgc

SEQ ID NO: 53179 - DNA, 466 bp, Zea mays
  unsure (1)..(466): unsure at all n locations
agaagagtgggatgagtagtcttctattatgtaatgtaatgctatgaagaagatgttacttttgtggtcgaacagatgaatatttatactccatattcaaacgggtatgttatgggtgacattgtcgccctgaaagggggcactgcagccctagccaaatcaagagatagcagataacaatttggtggctgatttggctaagtgtagtgatgtcaatcatggatattgaccatnttgttcaacaaatgactaactattcttgagttccccttaatagtacattttttcctaaacgtaagatacaacacagaaaaaaaatttaaaaccattgagtcaacaaaaccatctttagtaattagggggtacttcgacctgtataacatcattccttttcgattccctacttgtcatctcgataaatcttaatagttctctaattcagtggtcatcaataccaaaaccctca

SEQ ID NO: 53180 - DNA, 304 bp, Zea mays
aacaccttatgaccccacggtgctattaagaaagaattcgagaatagcaagggatcaattgacatactcccagatcattgtgctgcatcatgtcaccttgcaacgtgcatacaaggacactacatcttcttatgcctgtgagtaacgtatattcggctcgtgtccacaccaccatatgatcactggcgcctcttgacagacgctgtgtattcgagagtccttgacatactgattcattataccggaacccaaatggttggaggctattggacgcaactgattctgatgtgtgagcttatcccaa

SEQ ID NO: 53181 - DNA, 401 bp, Zea mays
  unsure (1)..(401): unsure at all n locations
ccatctcttgacacaacgngttgncagaggtcttcaccataagacagtggcaggaagccttacggctcagtgcatctgccaccacattggctttgcctgcgtgataatggatctctagttcatagtccttaataagctcaagccatcgtctttgcctcatatttaattctgactgtgtgaaaatgtacttcaaactgttatgatctgtatatatgtgacagatatttcccaccagatagtgacgccaaatatttatggcatgaaccacagcagctagctccagatcatgagttgggtaatgctcctcatgtctgcgcaactgccgtgaagcatatgcaattactcggccctcttgcattaatacacagccgagtccactgccagatgcatcacaatataca

SEQ ID NO: 53182 - DNA, 429 bp, Zea mays
ctcaacttctaacggagaacacgtgataggacaattcaatgttcaattctattaagatataccttgtgcacctcggtcagcaggttaacatgtgggaggagtacatcacagcaagaatgtgatgaccacgtctagacctctggagctgctgcatatggacctcttccgacccgtcgcctatctgagcatatgaggaagtaagtatggtctagttattgtcgatgactttcccgctcacttggggttcttttgcacgtaagtctaaacccagggaccctaagcgcttctaagagagctaaaatgagtttgactcagggaagaaatatgacgacaccgtccgaatcagaatttagtggagagtcgtgagaaaggatcagcacagtctcgtcctaaccttacaaatgggggttaaggagacagacctattat

SEQ ID NO: 53183 - DNA, 468 bp, Zea mays
  unsure (1)..(468): unsure at all n locations
actcaatcttaaaaaacttgatcctcccaaggcgctttgtgtgcaagtccgttatctgatcttttgtggtgangtaacgtgccttgatgctcccttcacagatgaagaactacctcacccggatgtgttttctacgttcatggaacacagagttcttggtcaacgccagggcggactggctgtccacctgtagttccactgctccaatgtctctcccgaggagatcaccaaagatgctagcacaccacaacgcctgagttgaagcggtggaggccgctatgtattctgccacgcagctggacatggtcaccacctgcttcttgaccgagtgccagctgatggggcacttgtcgaggaagaagacgatctctcttgcacacccgggcttaatgaacaaaaccagtgcatctcaacatgcgccccagaaacaacacatttataacagaggtatagagaaaatgtctaata

SEQ ID NO: 53184 - DNA, 462 bp, Zea mays
  unsure (1)..(462): unsure at all n locations
ttcatgtcaacatcatttctactggaactacttcatatggatttatttggacctacaaattatgtcagtgccggcggcaacctctactgtntagtgattgctgatgatttctcaagatacacttgggtgttctttctccatgacaaatctgaagttgcatctatattcaaaaagtttgccaagaaagctcaaaatgaatttgattgctagattaagaagattataagtgacaatggcaaagaatttgacaacaccaacattcatgagtactgtgatgaaattgggatcaagcatgaagtatctgccacatatacacctcaacaaaatggagttgttgaaaggaaaaataggaccttgatcactcttgcaagaacaatgattgatgagtataacacaccggagaggttttgggccgaagctgtcaacactgcttgctatgcatcanacaggctatttcctcac

SEQ ID NO: 53185 - DNA, 389 bp, Zea mays
tctcggcgtcagcacctctatctggtgtgctctgtgggatttcttatttggaccagctagaggtaaccaatgagccaaccaagacggaggcgccggagcccatgtcacgagagctcatacttctcagcgttggctgctgcatcttctcccgctgcgcaagggccgagagcaacctggagctcatcggagacatcggctcatgtacaaccgtggaccgaggagacagcaagctctgctgctgctggaactggttcagcatggcggccttacgcgtcggcgagaaagcagagccgccctggtctgcgtaccgaggagagtgagatgccgcggcgcccgccatcttcgccgagaacagatcgtcaagaatggacggcacgagcgtctttccc

SEQ ID NO: 53186 - DNA, 469 bp, Zea mays
  unsure (1)..(469): unsure at all n locations
gagaacacatttggactacaaacggcattnttagatatacaggatttgtagcgcatgtaaagcagggaagcaagatggtgttcatcatccacacaagaacatcatgacgactgacaggccactcgagctactccacatggacctattcggcccgatagcttacataagcatcgacgggagtaagtactgtctagttattgtggatgaatattctagcttcacttgggtgttctttttgaacgagaaatcacaaacccaagagaccttaaagggattcttgagacgggctcacaatgagatcggcttaacgatcaagaagataagaaacgacaatggaatggagtcaataactcacaaattgaaggcttacttgaggaggagggcatcaagcatgagttctcctctccctacacgccacaacaaaatggtgtagtggagaggaagaatagaactctacttgacatggcga

SEQ ID NO: 53187 - DNA, 438 bp, Zea mays
  unsure (1)..(438): unsure at all n locations
agagacaagactacttcagcagattaatttaagcccatgctntcgngngaagacatagccgagaagaatgtgctgttgggatcctaattattcgatgaacaggagaanacttcgttgagattcatgttcaacaacaaggatgttttcatttggttagccaatgatctttgtggtgtcaatagagatgtcattgagcactcactcaatgtagacccagccatcacgccaagaaagcagaagcttcggaaaatgtctgatgataaaaccgaaggtgcacganacaaagtcaaaagggttctgagtgccggtgttatcagagaagtaacatacccagaatggttggccaatactgtgatggtgaagaaagctaactaanaatggagaatgtccattgacttcacagatctcaataaggcatgcccgaacgatgaattccca

SEQ ID NO: 53188 - DNA, 447 bp, Zea mays
  unsure (1)..(447): unsure at all n locations
ctgcacatcatatattatattgacatatttgtattgtttgagaagctagagatacatcatactccctctgtttttatttacatatcgtattagctctgtcctaagtcaaggaccactcaaatttaaaaatttatataagttcatgagataagattcgtgtttcaagattcactatgagaaatactttcgtaatctacaattcatatgttgtgaaactataacgattttttgaaatgggtggtccaagatgttaatattcaaagctaatatgatatgtaaaaacaaagggagtataaacttggaatactaactattggtgttctgatctgttctctcatcagctagagaagcttcaacatcatttgaactgggaatcacaacataagacctccccattatgactnctgttaagtgctaacacatgtngtcatttaatntacaaaatat

SEQ ID NO: 53189 - DNA, 397 bp, Zea mays
  unsure (1)..(397): unsure at all n locations
tgacccattattcctatntactttataattcattgtctcgcattacttaattgaaacctaaggattgactagctttgtatttaccttgtctttgattaccttttgggttattatggttagtttcatgctattgctttaccttaatcaacaaacatgatgagaacatctatgatacgatgatgctatttattatgatgatgaacttgtgatactttatgagactcaggctgttttctgagtacctctctgtaaggacctgttcgttgagagaccactcacgaaaatagtgcaaccatgacgttggtatgggacgctcttggccaagtaattaacgaagtcctatgttgaatgcttgttttgatccgtggggatggacgcatctgttatggctcctata

SEQ ID NO: 53190 - DNA, 476 bp, Zea mays
  unsure (1)..(476): unsure at all n locations
tcaccgtatgaccggaacatcctacactgtatctatgcctagcgtatatgacggtcgcctgaacgctgaatagatttagaggcctaagaaccggcctgagccgactactggaacaatccctaccccaaaccgatgctagccgctcggcacatcaccgaaacatccaattaccatgcatggcctagccaggcgaatattaaacagatctttcataaaccaaagactatccatgacggaccaaatccgctacgtggggacgcaacgggacgccaccctcgcactagtggacctcacgcgacagaggcaaaacactcgcagtcggcaaacaaaacacgtgtgataacaatcatgttgatgcaatcatctaattcctacgataactagtccatctcgccatannaacgcttcaatacgagaaagaaccaagatttaacgaataagaacaacaccgccctgatcgcgaagcacaatcaggg

SEQ ID NO: 53191 - DNA, 324 bp, Zea mays
atgatataacgaagttccaatttatagttattcaataattaatttacttatattgatgcatattcgtgtcattcaaggtgctacatattttccaacaatgatcggtgatctcgaggtgctagactcttattactgctgcaacaaatcatgagaatcatatggatgaggtatttaaagattattatttacttcgtgcatgggctattaatttgatattattcactactgttttgatgcatgggctgtttgctgtccccttgctttgatgcatgcgccttgctgctatctaccagccgtgttatactccctgcatggctgctagct

SEQ ID NO: 53192 - DNA, 366 bp, Zea mays
  unsure (1)..(366): unsure at all n locations
agtcttatcgttaggctcggcataattttcttagcactttgtttgcttgttatatcctgngcatttatggttgtcatgatgaactatgttaggtttggatcattgtaatgatatgcaccagagcgtgggtaccccctgcattttgcgttatctattatgttaatggaggtagttatatagttgggaaaccttttattccactctcgtcttcatctgacaacctgtgttgtctgtgcttgagaacagcgaagatgctcatatgttcagtgctgttgaagacttctattctcttaccttatgctgcaagatttgcagatcaattctgatgtgtggatgcattctgcagatgtcagagaacacgcgcac

SEQ ID NO: 53193 - DNA, 441 bp, Zea mays
  unsure (1)..(441): unsure at all n locations
tccttcgaagggttntctgtcaagaatatccctcgaggacaatatgatcatgctgatctgctagctaagtcagcagcacaggggctgcctttaccttcggatgtgttctttgaaacaataaaagcaccttcggtggaactccttgaaagagcagttcttaatatatctcctgtttttagtgaagattggagaactgagatcatctcttaccttcagggtaaatntctttcagatgacgaagcttataacaagagaatggaggcaagaactcgcccatatgtcatgatagaaggggagttgtacaaacatggagtttgtgctccgttgctcaaatgcttatccagaaccgaaggtatagagttaatgaaagaaatacatgcaggcctgtgtggatctcacatcggatccaggcccgtatttggaaaaattttccgtcaagga

SEQ ID NO: 53194 - DNA, 447 bp, Zea mays
  unsure (1)..(447): unsure at all n locations
tggcagctacacgcgcctcgcagccagccactttcttgntcttgtacaccaacggggtcttgccgatcaactgaaacaaaaaagaaaaaaatgcaatgcatgttacttgatcaattcagatggacaggacagatacgggttaatgcctgcaaaccgagctagagcattcgtttacgcacttgggtgacatcttccgcgatctttggaccctgatctttcgcggtctttgagccctcatcctggacggtctcggtcgtggagcttgaactgcatccacccatggtgatgcacganagctcttggccgggaagcaaattaaattttacgcaacatgcagcggttttatatacagtgtgcgtccaagcatatatatgcggtatatgtgattggtgaagtcgaagctattttttgtgttctcgatcggtgctggatcgtgatcttttatgc

SEQ ID NO: 53195 - DNA, 350 bp, Zea mays
tcctctccatcgtcctttacacccccttctcttgagaatgccctgtgtattcccttatatagatacaaggggatggtccagctgtacatatggcggtgtagctatgtgctaacgtggtcggtgcagaagtgcttcgatccctgtataagcataactggcagtgcaaacctgtgtactgctgacgtatctttgctttcgtacagagcttgagaacacattacatcatggactcatgcacggaaccatcattaccttacctgctgtcagagtaatctagatgtgacaccggtcttgttccttcgagcttgatgcggtaactagaggtacggtaatgatgatcccctgtacgt

SEQ ID NO: 53196 - DNA, 340 bp, Zea mays
cttcacacatgaacatcatgacgactgacatgccactacagctcctacacatggatctattcggcccgatagtttacataagcatctggccggagtaagcactgactagacaattgaggatgataattctttgctacacttgggtgctcttttcgcaggattaatctcatacccaagagaccttaatgggattcttgagacgggctcaaaatgagttcggcttatcgatcaacaatattagaagcgacaacggcaccgacttcaagaactctcatatagaacgctctcttgacgaggagggcatcaagcatgagttctcttcttcctttaccccacaaca

SEQ ID NO: 53197 - DNA, 353 bp, Zea mays
atgaggccacagtatatctcaaagctgtgtccggcctataaataatgaacagtattcccttactgatcccgcacttctcgaattgcaattacgtcattcgggaatctatctttgccaacggaaaggtataatctgatctaataccagaatacattaccttgataagatatgaacgtaatcgccgccatttataacttatctatacttgatgctctatattccatattaccttacataatctactacagatcaattacgaagaattaaccctcataattgtagtgtttcttacttcggccgacgtcattcataccttaaaggaataatgccttattggacgaacggcattaaca

SEQ ID NO: 53198 - DNA, 107 bp, Zea mays
gaatgcactctacgcggatcagacatatgcaatgccgatgcttatgatgtcatgctcaagttttagttatagtaacaccacgggtgttacaccaattggcagaactc

SEQ ID NO: 53199 - DNA, 473 bp, Zea mays
tcacgtctttcgccttgagacatcggattgtcacttcaaggttatataggaggtctgaggctttcctcgtcttgactacgatgtcatcgacgtaggtcttgaccgtccggccaatgtgtatgccgaacacatggttcatgcaccgttggtacgtcgcacccgcattcctcaagccgaacggcatggtgacatagcaatacatgccgaacggtgtgatgaaagaagtcgcgagctggtcggactctttcatcctgatttggtgatatcctgagtaggcatcgagaaacgacagggtttcacacccagcagtggagtccacaatttggtcgatgcgaggcagagggtatggaaccttctggcatgctttgtttagaccagtgtagtctacacacatccgtcattatcctctttctttctcacaagcacagggttggcatgccattctggatggaataccctcttgatgaaccctg

SEQ ID NO: 53200 - DNA, 478 bp, Zea mays
  unsure (1)..(478): unsure at all n locations
actcagctttaagggaagccatttagactaacaatgtcattngggatagacagggttggtagagcatgtcaagcagaanagcaagttggtgttcatcatccacacaagaacatcatgacgaccgacaggccgcttgagcttgtccacatggacctatttggcccgatagcttacataagcattggcgggagtaagtattgtcttgtaattgtggatgattattctcgcttcacttgggtgttctttttacaggataaatctcanacccaagagaccttatagggattcttgagacaggctcaaaatgagttcggcttaaggatcaaaaaaattataagcgacaacgggacgaagttcaagaactcacaaatagaaggcttcattgaggatgagggcatcaagcatgaaagtctattctcctacacgccacaacaaaatggtgtactggagaggaagaatagaactctacttgacatgg

SEQ ID NO: 53201 - DNA, 404 bp, Zea mays
cactatacaaaactcaagcttcctcagcattcttgagccactcacgcatctcgaaggcaacaatatgatccactatgggttatgaagctggatgttggctcatccttctctctcatccaacattgatgatagcctgaataaccatcacagactcataaccttgatgaagctggtgcatcaactaaggaatcttatcttggaatggaaactcgtccttctgacaggccttgttgagatcaagtaaatcaattctcaatctccattaccattggcttttttaccatacagcgttacccacccattctggtgattttacctctctgaaaactccggcactgaggagtcttttcactacattcccacctctttcgccttaatatacaacatttccgaaccctcttctt

SEQ ID NO: 53202 - DNA, 417 bp, Zea mays
  unsure (1)..(417): unsure at all n locations
atgttgagcaaccacccggctatcgagatagngagttccctaaccatgtttataaactctctaaggcgctttatgggctcaagcaagctccaagagcatggtatgaatgccttacagatttccttatcactaatggattcgaagtcagagaagccgatcctacactcctcactaaaactcttgagaatgactcgtctgtatgccacatttatgttgatgatattatatattgggtctactaacgagtctacatgttaagaaattaccatgatcatgacacagaaatactagatgtctatgatgggggagtttgaagtcttcctacgatattaagtgaagcaacttctagaaggcatcttcctaagccaaacacagtatactcatgatattctaagcacgtttgcgatgaacgatgcc

SEQ ID NO: 53203 - DNA, 475 bp, Zea mays
  unsure (1)..(475): unsure at all n locations
aaactcaagctataacaggagaatctagtaattatgctactctaataatgaatgttgctatccttgataaaagtgatacttctttaccaaattggattgagttgtagtagcatactttatgagaaacttattctcatacttgaaactacataagattactaagagaaagtgttagctcaacataatcaagatatagaaatgggctccccctaaagatgtgcatcaagtatttggatgacttggttagattcactttcctttanagacaattgggggaatgcattgcacatcttgatcaaggtatataaaatttgtaataatcaacttatgcctggtattctcaaaatgaaaaaggtttagaatacttacaaccacaccattgatntaattgaagatcttattgtctaagtaggtgttggtgttcttgaccgcttctttttcatttgagcgcnnctcctttatnagtggctctttt

SEQ ID NO: 53204 - DNA, 439 bp, Zea mays
  unsure (1)..(439): unsure at all n locations
cctataaaactcagcttcgcaccaaggcttctatttgcactacggtttattccgatatttctttggagtggcgcttgaagactatattgtctccaatacatccagtacgttaaccattcttttcctcttgcgggtcgtcatcggcattggcattggcacctcaattcttgctgaaggacttagaatttctgatgtctttgtttcttcaaccatcggttcttctattttttctatcgctggcactntggctggaccttcaatattcggcacgagagatggctccttggcttcggtggccgaagaggtctcaccgacaaactcangcactgtggccggttcaatataatgcggccggtgtgtgagaaccttcatctttttcctcttcggcgctggctcactatgagcggctgaagctacttccttcgcagaagatgcattc

SEQ ID NO: 53205 - DNA, 469 bp, Zea mays
  unsure (1)..(469): unsure at all n locations
cgaaagatatctggatacaattcgaagggctgtattgcttcttctataggttttctgtcaagaatattccacgaggtgaacatgagcatgtagatatgctagccaaatcagcggctcaggggctccccctaccctcggaagtantttttgaaacaataatagcaccttcggttgagctcatggaaagagcagtgcttactatttctccactacacagtgaagaatggagaactgaaataatatctttccttcaaggcaattgtctttcatgtgatgaagcttataacaagagaatggaggcaagaacaagaccatatgtgataatagaaggggagatgtataaacatggagtttgttcaccactcttcaagtgtttatcaagaactacacgtatggaattaatgaaagagatacatgcaggtctgtgtggatctcacattggatctaagcccttgttgggaaaaagttt

SEQ ID NO: 53206 - DNA, 413 bp, Zea mays
  unsure (1)..(413): unsure at all n locations
gtctttgggtaccagcacgaaagcactatgattattgttttcatctgttaattgacactaatccagataagactgatgctatcttgaacatatatgcaccacgatcacaacagaaagtttagcgacttaccggatgtatggcacgcctgagcagattcatatccagactaggagacaaaggcttaccattttacaagctgctcaagagagtggatatagttcagcggacttcataagcacacgaagccctaggggtactgaaaaaattcttgacaacaccaccactgctgaagccgccgcggcgagccacgttaactcaaccagctaaagacttgctgatgtatatctctttgccgactcacgtggtgagcaccgngttggtagacgagcgagcctacgaatgacatgtctac

SEQ ID NO: 53207 - DNA, 363 bp, Zea mays
  unsure (1)..(363): unsure at all n locations
caatccacactagaacattatgacgactgacagtccactgtagcctctacacatggatctattacgcccgactgcttacataatcatctgccgggagtaaacactgtctataaattgtggacgactaatctcgcttctcttgtgtgttctttatgcaggagaaaactatacctgaaagggaaatgtgcccttgtgccctttctatgtatttcggtgattgagagccaatacatgtgcttaattgggaatttatgtacatggacgaacaacgcgaacaatangaattaaaggtatgtttctataccttagacattgggtttaagactaataaattgcgaactgtctaacagatcgatactatac

SEQ ID NO: 53208 - DNA, 228 bp, Zea mays
agcatatgaccaattgtatccaggcaatctgtggctaaacacaactgagtgcaggcgattgggatactcctttccccttctatacggatcggaggccatgaccacgtcagaaacaaagcatgggtcccgcgaacagatccgtaagacgtctactacgtggacgagccaacttcaaagattttattgacggagaccgcgtctacccctacaggccctaaacaaatacca

SEQ ID NO: 53209 - DNA, 430 bp, Zea mays
agggagagcacactctaggactaacaaatgttcattttgatgtagacaggatttgtatcgcatgtcacgcacgacagtacgttggagttcatcatccacacaagaacatcatgacgactgacatgccacttgagctactccacatggatctattcggtccgatcgcttacataagcatcggcgtgattaagtattgtctagttatcgcggatgactattctcgcttcacttgggtattctttttgcaggagaaatctcaaacccaagagaccctaaagagattcttaagatgggctcaaaataagcttggattaaggataaaaagataagaagcgataatgggatggagttcaagaactcttaaattgaagaatctctgaggaggagggatcaagcatgggttctcttctccctcacacctcaacaaatg

SEQ ID NO: 53210 - DNA, 467 bp, Zea mays
  unsure (1)..(467): unsure at all n locations
tgtgaagggtcttcatccncacatgtgctaagcggcgatgcctttatcagcccatgcaagtcttagccattaagcatgcatctagaccggcctcttcttttgcaaaatcgactaaataaagtttgccgtctagtacacccttaanagctagtgaactatcacatcttctaaagacagacacatctacatttgtaaatagacaattatatcccatattgcataattgactgacagatagtacattatatctcagagactcaactaaaaacacattagagatagagtgctcatttgatattgcaatcttgcctaaacctttcaccttgccttggttcccatcaccgaatatgattgaatcttgtgaatccttattcttgacgtacgaggtgaacatcttcttctcccccgtcatatgatatgtgcatccgctgtcgataatccagcttgaacccccggatgcataaacc

SEQ ID NO: 53211 - DNA, 435 bp, Zea mays
  unsure (1)..(435): unsure at all n locations
gaaaatatggaatatatcatcctgtatgcattcggaatattactctcttcagaagaagaacaagaagcttcacactatgcccagaagctgaaatatccgaacggggcactattgttcaattgcatcggagaagaggatattttcgtactgtctcctgtacaacacagagatatctgtctgccaagagatgagcagaagcttcggattcccaacattataagatgcgctttcaatactgtccaacgatgaatnggccgacagtttaccatataatagtataaaggtgtgtaaatcaattcttgtacttataaacgaatcttttcatttgtttatacttaatactatgctccttttgcagggcttgatccttancaatgccctcagggcacagaacaatatcgaagacgaacgatgcacaatagctctgaacaatct

SEQ ID NO: 53212 - DNA, 350 bp, Zea mays
tcaagatctagctctacagcacagacaattgcacaacatagcatgctacagtacacaatcatcagaatcaaaattaagtgagccgggcatggattgatcttggtcctacacatgcatgcagggcatgaattgagattagttttccaaggacataatgaaatgtagcatgtggataacatcacaaatgtcattccttagacacgcgatgaatcccactatctcgattatcataacccacagatccatttttacaggaattatgctactgcagaagtaatgaataacaccagacaagcttctcggcacattatgagaagcacatggccgtaattttactaatttgccaccca

SEQ ID NO: 53213 - DNA, 388 bp, Zea mays
  unsure (1)..(388): unsure at all n locations
ctacccttatgctcgtccattctcgaagatatgtattgaatatttacattcgatcattcatattcgcttaacttgagcctggagtagccttaatctaaatattaattgcggctaatcttgactggtagatacagaatctgagtacgaattaaagttcatcagtcattacactgtcacagtattgttctactgcctttgcagttctttaaataaatattcccttgaacctaagttattgcctacattatacgaagaatctttgtttctgtactaccctttaagacacttttgttattaccccttatggtacttgtgctcttgctcggacgatattngaaaatgtgtatgatcaccaacatttgccaacatatattttagttatatgttg

SEQ ID NO: 53214 - DNA, 324 bp, Zea mays
ttaacacataatctgctataaataattgtttataatgtgatctgctacactcatcaccagtacatgttttaagcggcggcggggaaccccgcgcggaaaaaaatcccaagcggtgaccgggatggggaaattactcccccgtcgaagctaaccgtgacggtgacggcgatattcttacccccgcgggacgggtatgggaagataacctccgacggggaaatccccattgccatctctagtccatcacattactactcagaagcagccggctaaaacactcagcgtaccaagccgttccttgtccaacacccattggtgggggac

SEQ ID NO: 53215 - DNA, 280 bp, Zea mays
  unsure (1)..(280): unsure at all n locations
tacccatgatgaggcatgtggccagttacagggttctagatctttatgtcaacaatcggaacggtccttaagcgacacagacgggcgacctttcctgctcaacgtctggtctcattntagttaaaccatttcccaatccttggtaccttacagaagtactttttctggatgttgaatccatcatggccatatggattcaccatcccaatttctttttcacaacaatattccatatcccgtgaacacatcatcttttttaaaaaacaacttttaattatct

SEQ ID NO: 53216 - DNA, 418 bp, Zea mays
  unsure (1)..(418): unsure at all n locations
tatacatgtattccacaagtgggttcattccactatcggtatcttatatatttcttctctagagtttgattagacctatattacatatcttatgcttcccatgctgcgaaatgcatatgttgttaaaatatattttttacctatgcatacgggtagtgaaagtcgcctagaggggggtgaataaggcgaatctgaaagttctaaacttaagcacaactacaagtccggttagcgttagaaatatgaacgagtctgagagagagagggtgaatagcatatcgcacgcaaataaagagtgagacacaacgatttgtnttaccgaggttcggttcttgcaaacctacttcccgttgacgtggtcacacagatcgagtctctttaacccttgcctctctcaacggcacttatacgagtgagc

SEQ ID NO: 53217 - DNA, 364 bp, Zea mays
cacacacgagcacgacgaatacacttatgcttacgttctaaagattcttccgctccggactaaggcgccactatgtacaagagtacatactttcataagcaatattaaggggcttcttacgggacctgcaactcagtacatctcctataaactccattacctactagaagctactaccatagatggatgatcatatcatgacacacaatgattttcccaaatgagggaagaagcatagtgatatgcacagacatctacggcattataagttattctcctctatcaaatagccattttacactttctaagtctctctttctatctgtcccagacctgaatgactcaaatgcgccctttatcttct

SEQ ID NO: 53218 - DNA, 469 bp, Zea mays
  unsure (1)..(469): unsure at all n locations
tacttatcataacagcagcatttaccagcacagcaattgtatatatacccgttacatggccatttgcatgctgaggactggacatgattggacccttcaagaaagctcaaggaggatacactcatgtactagtttctattgacaaattcactaaatggatagagtacaaacccattgcttctctgactttagctaaggcagtggaattcatacaagacataatattcaggttcggaatatcgaatagcaacataactaacctgagatccaatttcactagttcagagttctttgatttctacgaacaaagaagcatccagatcacatatgcatcagtagcacacccaagagccaacgggcaggtagaaagagctaatggaatgatattggaagcactcagaaagaaagtcttcgacaagaatganaagttcgcacgaaaatggatcagagaatcgtcgtatgtggtctg

SEQ ID NO: 53219 - DNA, 394 bp, Zea mays
  unsure (1)..(394): unsure at all n locations
gacaacaactttgtcttccttaggcttcaacactaaatcatcgcctcctagttatacccactcaatgttntctatataaccaaatcaattaagtacctaaatatgaccttctttggtctttggtttgccaaagtccacatgactcgactttgttggacggatgatggtgttatcttcctcgatatcgatatcatcactatccttagaaggatccatgacatcaactttggcctagcaagcggtggcatctgtggcctcagtcaaatcttcaagccttgcctctggcacatctgacaaaggtgggacagattgctctccgaccatcttaaatgaanaagtttgtgcttcgcaactgacttaagctggttcacaggcagtgaanagcatttgaagc

SEQ ID NO: 53220 - DNA, 418 bp, Zea mays
agatactacgatatcatcaacgaatagaaccaccaatgggtcaacgtattccatgaatactatattcatcaagctcataacatatggtggcgcattacttagtccatatgacatgaccgagaactcatatagtctgtatcttgtggtaaacgctgtcttgcgcacatattcagctcgaatgctttagtgatgatatactgatcttatatctattctcgagaatatcttagcttctctcatctgatcaaacaaaacttgaatatgtggtacagggtatatgttcttaatggtcagttaatttaagcttatgaaatgaacacacattcttctcgaaccatctttcttattcactaatagaactacggcttcccatggggacgagcttggacaaataaaacctctatctaataattattct

SEQ ID NO: 53221 - DNA, 420 bp, Zea mays
  unsure (1)..(420): unsure at all n locations
tggacatganaagtgcctttcttaactgaccaatcttataaagaggtctatgttgagcaacctctccgctatgaagatagtgagtaccctaactatgtatataaactctctaaggcgctttatgggctcaagcaagccccaagagcatggtatgaatgcctaagagattttcttatcactaatggcttcaaagtcggaaaggtcgatcctactttatttataaaaactcttgaaaatgattttgttgtatgccaaatttatgttgatgatattatatttggctctactaatgaatctacatgtgaggaatttagtaggatcatgacacataaattctagatgtctatgatgggggagttgaagtacttcttgggaattcaagtgaagcaactccacgagggcaccttcattagccaaacg

SEQ ID NO: 53222 - DNA, 358 bp, Zea mays
  unsure (1)..(358): unsure at all n locations
tcttatcatagtccatctttacggtcgatatgctncacgggttttggccttctcgccttccgctatgacgagacactcttggagagatgctgagatgacttcaggctctttgacttgcttctctaggctttccacccgggagtataagcgggtgcagcgggaggagagatcatcgtagtgggtatccagggtgtggaggtatccggtcatgtaaacaatggtggggtcatcctcggtggtgtctcgtcttgacagagcctgaagtcttttctttcaggcgggggtatttttgttgctgggtgggaaataacgaacggggcttcaaagatctctctgctgtacatttggcatagctgtt

SEQ ID NO: 53223 - DNA, 99 bp, Zea mays
tcagccttcagaataaatgtttagaattcagcaatcgatgcgttcaatggctgaagcaggtgttctattttgttggagccagcagcgagaagtttactc

SEQ ID NO: 53224 - DNA, 369 bp, Zea mays
  unsure (1)..(369): unsure at all n locations
atcaaaatctaccaagcatagctgaccctctaatactcccttacatgctaatgaatcatcacttcttctaaagacagngacacctacatcagtaaatagacagttgtagcccatatgacataactgagatacagaaagcaaattggtatctaaagaatctacacgaaacacattggaaatagtatggtcaggtgatatggcacatttacccaatcctttgaccaaaccttgatttccattcccgaatgtgatagctcggtggggatcttggtttttctcatatgaggagatcatcttcttcttccctgtcatgtgatatgtgcacccgctgtcgaagatccaacttgagcccccggatgcatagaccta

SEQ ID NO: 53225 - DNA, 417 bp, Zea mays
  unsure (1)..(417): unsure at all n locations
tattgtctatatccagtgactccattatcctttctatgagactactacatataacagacttgaaaacaggtattagtctcaaagacagattatagagtaacctccccctgaaagtgtgcatacaagttntgaatacttgtagcagacatgcactttgatttgatattaagacgggcaaattatttataatccgagctttggcacatataggttaaatgataccaagacataattgaagtattataccacttatagtatatgtcatatgaaaatatcaattgatgtatcatattcttagaaatgttaaataagctatgtgtcgtgcttaattagacaatttagaccatgtaggtttgctcaagacaataaattgaaagcgagcaaccctaccatatgatttaccttgtatgcatgcat

SEQ ID NO: 53226 - DNA, 382 bp, Zea mays
agcttctcttatttactgctcttcgaatgttatcctctttgcaacttcagaaggaagcccttcttaagttaaatccacaacttagactatccttgttatcaagtttttcgtataattggattcaaagggcaggtgggggtggggttttgggggttacataccgactcctttgggtagaaagtcggggaagcgagagcgtaaaaaatcctcagtctcccatgtagcttcttctgctgaatggtgactccactgaaccttatacattctgaccgaccttgcccgagttgatctttccttctgatctaataccttgacggggtactcttggtaagacaagtctggttctatctcaatgtctggttctggtagcacttcagtgggt

SEQ ID NO: 53227 - DNA, 307 bp, Zea mays
tcacacgaaaatccaaaaccttcgacttgtgaatagccttgccacaagtcaagctttgttccttgtcaccacaccatgctcatcttgcttgttgcggaatacccacttggtacctacaacatttggattatgacgtggaactaaatgccatacctcattccttatgaaaatgttgagttcctcttgcattgccaacacccaatccgaatctcttaatgcatcttccaccctcgttggctcaatagaagacaccaaagaattatgttcacaaaaatgagcgactcaagatcaagttgttaccccctta

SEQ ID NO: 53228 - DNA, 380 bp, Zea mays
agcttgttgatcaagctcttgccccattaattatttatgatggagatgggttcaattacatcaaagaatcttttgaaaatggtactcttcaccttattgagtgttgaatgatggtggtgtccactcccgcattgaccaactacaggtttgctaataatatttcttcaatttatattaattaagttacaagcgtaccacaatatttacttttatttgctctatacagttacttctgaaaggtgttagtgagagaggagcaaaaaaaattcgtgtgcacatccttaccgatgggcgtgacgttttggatggaagcagtgttggtttcgtggagaccctagagaatgatcttttggagcttcgaggcaagggtattgatgcac

SEQ ID NO: 53229 - DNA, 375 bp, Zea mays
  unsure (1)..(375): unsure at all n locations
ctcttcaccatgtgatcacagatatcttgacaaagggggtcttgttcttcccttttagttgagtcaagctcatctttagcctcggattctcttctttgagcttatgatcgatcatcttttgttcctacaagatctagctcaaaagaaaatatgcttgttgactggcaacacgcattaccacctggttgtatagcctcaatttgaatacatgtgcatgagtgaggacggtgggattttaagatttctataccaacctcatgagcaatgatgaatatgagatgatcatctctgagactttcatgagagcatacgagcatatcatatttttcttgaaaagccatattttgaacctttagctcttctacttggngctta

SEQ ID NO: 53230 - DNA, 393 bp, Zea mays
agctttaacccctccgagaccttccctcgtttctttctaaccatggtaaatgcaatatcgcatgtcatattctatgcatgtttaatctacttgttcttgatggcgtatggttggtttcctaattacaatggatggatgtatgtatgtttgcactcgtatagaaaacgatccggttgaagagccggaagaactcacaagagaagcccctgagcagcagtccgttggtggaggcaagtgtcccttgacctatctctgtcctattcattctttaattcacctcccgcattacacatttatgcctaaggatgtactagctttgttatccatgtccttgtttacctatttgggttggattattattgtttagctttatgctattgctcaactctaatc

SEQ ID NO: 53231 - DNA, 406 bp, Zea mays
tcggctatgggtaaaaattttggcagcaaaacagggccatttcaatgaatgttggggtaacttcacacctacccgtctgtttatatagtgctgcaagtaataatgcgatcgtcaggatttttacaccaggcaaacaactgcttacacccgctgcgcggtggaccgcaaagaccaaataataaccctgcagggtgggaccgctacacgctcggaaactgaatcgtttctcgacaacgagctcatggaaagtgtttttcggaccttcggcttcctgaagcctaagagacttttttcacgggtcaagctcgttacgaaaaacgatctatcaccgcgaaggggctactattgggaccatgcttcgtcgccgaaggtcctgcaagaagaaacagcttcagctgaagctgtc

SEQ ID NO: 53232 - DNA, 386 bp, Zea mays
agcttgaagccatggtaagtagcatatgcttataatatacgaattgactcaagcctagctacgggtgcataggtttcaccgaaatccaaaccttcgacttggaatatcccttggccacaagtcgggctttgttccttgtcaccacaccatgctcgtcttgtttgttgcgaaaaacccacttggttcctacaacattttgattaggacatggaaccaaatgccataccttgttcctagtgaagttgttgagctcctcttgcatcgccaccacccaatccgaatcttgaagtgcttcctctaccctgtgtggctcaatagaggaaacaaaagagtaatgctcacaaaaatgtgcaacacgagatctagtggttacccccttatgaatg

SEQ ID NO: 53233 - DNA, 400 bp, Zea mays
  unsure (1)..(400): unsure at all n locations
tgtggcgccctcangcgtcttgtcggagccgaagtaccaagtctcccacctggaagcctcggggccaaacccttcgggcgtggtagcgtcgcagagactgctgataccggccgagtgtagtagggccacgtcccgagcctcttcaagctggtccaatgagccttcttggctgatctggttgctttggtcgtcgtacgcctttgtccttggggaatcgtattataagtccgtgggtaagatagcctcggccccatagactagaaagaacggcgagaaacccgtggaccggctcgatgtcgtcctcagactccagaccaccgagggtagctctttcatccatcgcttgccaaactttgtgaggtcgttgtagatcctcgagttaagtccctgcagaatcata

SEQ ID NO: 53234 - DNA, 367 bp, Zea mays
agctttattccagtgcacccaggatcttgtttaataccttcaggcgtatgtctgaaggttcttatgattgagggcacaggcgccaatggtgcccaatgattgtcattgaggccatgatcaaggggcttcggccaggacctacagcccaatacttcgccgggaaaccccctcagactctggagaaactgcttcagaagatggatgaatacatccgagctgataatgattttcgacagagaagggaggaagcttacagattctccgaaatgaccaggggctttggagggagagtccaccctaggcatgtcagatcaattcatttcactcagaatgacgacaggggaagtcagcaacagaggccgcaata

SEQ ID NO: 53235 - DNA, 125 bp, Zea mays
tgacacttagatactcagctggactgcatttcagctccggcgccacctatcgtgcgcagcttattcttttcccactttgaggggaaagcgtttttcctcatcttttagctttttgatgaacaaaa

SEQ ID NO: 53236 - DNA, 378 bp, Zea mays
taccaagtgcatttattattgtaaggaggctgaggaacccaaagccaagggtgaagaagaaggcttgcaaagtcaagggtaatcgattgagaacagctacggcacatcaaggatcactacataaggacgtgacttacaaccaatgaggtaacagctacaattatgtggtgtaagtcataaggctcaagaccaagctctaagaaggagatcaaggtcactagaaggagaacaagtgtcaaaaccagaactggaagcagcccacaagagctaagttcaccttaatctttagtttgagttgttcctatgcttggagatgttctatgtgacctttgcaagatgttggagctaagaaatgtcaatctagatcaagtcaagctg

SEQ ID NO: 53237 - DNA, 353 bp, Zea mays
gtacttcacccccccagctcatcgacggttggatagcctactcgccgataagctaccgccgatgcgcaccacgtgtctcagcgcgggacttcctcgcagtgactcactggttgcatgtcccgcgaacatccgagttgtaacaaccggattttaagggtccaaaacccgggggtaacataaacaccatgtatgctgggaccaagtctcacacatatgatgtatagtggcacaggatcgaatgtcacaacattatatatcacaggagttctatacaaaataagataattacattataaggagacaacggtccagcaacccacagttgactgggagacgacgacctagacctctca

SEQ ID NO: 53238 - DNA, 378 bp, Zea mays
agcttctcttggatggcccaggtatttttgttttgcacatgggggatgagcacactcaagaaggtattaaagaaagacatggttagaggattaagatgtggtgttggaaaaagacaagccatgcagtgcatgtcaagctggaaagcaagttgctaatacacatcctactaaagctttcatgtcaacatcaaggccactcgaactacttcatatggatttatttggacctacaaattatgtaagtgctggtggcaacctctactgtctagtgattattgatgacttctcaagatacacttgggtgttctttctccatgacaaatcagaagttgcatctatattcaagaagtttgccaagaaagcacaaaatgaatttga

SEQ ID NO: 53239 - DNA, 370 bp, Zea mays
  unsure (1)..(370): unsure at all n locations
aggacactattaaactcaancctctgtgataactgagagatattcgaagcggcttttgatcttttgctcttagctggcgcaatcttatcattagtcttgcgatcacttcaagagctaacgaaggagagacaccaagtgtgtgcgaggtgctatgctggaaagaagagatgctaattgactgaaaacaagaaacatcatatggccgaaggaccgttagataaatggaaaggcttgaaagaggaccgggcgatgtgaacacctctaccgcgagcacgtgagcaaggaccgaacctacgtgaaacaaattcacatgttcaagtcattgttcgatcgcgatatattttgcaccatctgtaacagactcaactat

SEQ ID NO: 53240 - DNA, 389 bp, Zea mays
  unsure (1)..(389): unsure at all n locations
agcttatgaaaattcttcatccttcttgggcaagtcggtgatgccacaaccaacccgtgttggttttagttatcaaacaagtgttaagtaaagatgatcgtttgaaaaatctactagatagagctttccctttaacactcccttaaaagcaattcattcatcacttcttttaaaatgataacaccaacatccgtaaataaataattgtaaccaattgaacataattcagatatagaaagcaaattatagtctagggaatccacaaaaaagacatttgaaatggaatgctcggtggtgatagcgattttaccaatacctcttaccttgccttgactctcatccccaaatgtaatagcatcttgggagtctttaattntctcgtaagatga

SEQ ID NO: 53241 - DNA, 365 bp, Zea mays
agcttcggaaaccccatgcttctggttatttccgggcaaacagataattctttgttgtctgggaggcagtataaaaagtcatcttcgtctgtcccatgaacactagtgcccccttcggatatttcaattctctggcatagtgattagcttcaaaaatctcttcttcggataatttctttcccgaagcgtgtcgcacaatataatcgtacatttttgaaggtgcttcgggggcagcagtgtcggtttcttcaaccaaaattggctctgataattttattttttcgactgcctcaacaatgttcggttcttcggtttcaaaaggttttaccttggttagctctgaaggcccagcttcagtttcaaat

SEQ ID NO: 53242 - DNA, 142 bp, Zea mays
cctttgaacttggggaattgaattctaagagcgtgggtacgatatccgtggcgccgtatactacaataaacggcgagaaacccgtggaccggctcgatgtcgaactgagactccaaaccaccgagggtagctatttcattca

SEQ ID NO: 53243 - DNA, 387 bp, Zea mays
agcttgagtcaatcattttgcctttgtttattgatgctcaaaaggataatatgggtatgaagcacatacgagagaagataagggctggagtaccaatgtttcaaggaagacgatcaaggtgtgctatggtttaataaccgcataatagtgccaaagaatgaagaactccgccagcaaatcttaaatgaagcgcatcttagtcggtattctattcatccgggaagcactaagatgtatcatgatctaaagcaacactactggtggacgaagatgaaaattgaaattgcacgttatgtggctaaatgtgacacttgtagacgtgtcaaggccatacacatgaaaactgctggtccattacaatctttgctgatcccaacatggaaatgg

SEQ ID NO: 53244 - DNA, 394 bp, Zea mays
tctgactcctcccgcaagacgcgctgctgctgagcatggcgttgcccttctggctgctgactgtgacccaaaacaagtgctatcgaaggtggtgggggaacaagcccacgaagcttgagaatggcttgccgaagcgacagaatccgtatgctgttggttacccacatactccgggacataaggagaatagcacgaagcagtggggaggacttgcttcagctgactctgccacgctttagctttagcaatttccttcttcttctgaatggtaacatggcatgtccttgttgtgtggcccttgtactcgccacaaaaaggcagtataacttttgaggctgattgcccaaccttccaccactaaaacttcttcctcctctacctctcacagatgatg

SEQ ID NO: 53245 - DNA, 381 bp, Zea mays
acccggatctctaagtcactgcagcatgcaagctttctgagtttttttttgttataaaaatggtccaaaattctataaaccaacccttaatagaattgcaaaaacccctctttgttcccaaggggtattcctaaagaaatgggtcctcttgtggttggataaacatgggatgcattccggttcttgcggattaaattgtgactgggaaatttgtcttcttgtttcaacacactttaaagctctgtattatcttgtgtaatagcccttcgcacagagatctactcaacgtcccgtactctgtttggagactggaggaatatggtaaggaacttgaaggatggaagaatctaaagattagtcttgaattgagtcatggataca

SEQ ID NO: 53246 - DNA, 308 bp, Zea mays
gcctttctaatgtctatatcttgcgaatgtgtatattaccactctaagcgggcgcacgtactccggaggtgggctccattgttgtgacgtgatcttcagctctctatcaccacctgcgacatatacaaagggtcacacgttcttgtcctgtttccattggaacatcatgcttcctacgctatataaagaccaaagacgactgacttcatagacgtaccggcccctatcctgtacactcctgcgagggcttcatctgattctgacccctcacacttcagagtctaatgcttcctattttattaaccccc

SEQ ID NO: 53247 - DNA, 366 bp, Zea mays
acttttataggcctcagccatttttttcattgagtggagcatttgtgccggtgttgtggcacaaatgggcgttctgtactacatggtgggaggagccaattctgggaactcgttcaagggtgcagttgccaagtctaaggcccttggtgagaggaagtccacatttttcgcattctgttgaaccagatggggctagcttgtgtgtagctgttcaaaatagaccacgttgcatatttgtttgaagaggcaaaggcggttctggagcaagagtgtggcacttctcatcctaatactcttggtgtgtacaacaaccttgctgcaatctataatgccatggggagggatatgtcatattttgttcttctg

SEQ ID NO: 53248 - DNA, 394 bp, Zea mays
ctttcttcggcgccatagcgaaggtctatagcttccgaatgtgttcacgaagactcgaaggggaagtgagttcaccggaggtgggcgccaatgttggtgacttgtctcaaatgcttcgaattaaaaacaaggcaacataaaaagtgttacacattaaggtccttcgtccttcgaaacattatgtcccttcgggaaataatgatttatgacgaaggttatcatagacataccttcgggaatataataagtaatgccgaaggattcatataaagcatgaaatataaacatcaacataaaatcatttctattttattaacatggagaaatagaaatgattttaaattacaaatgtacctttggtcctgagagaagggtaaaagtacaagcgtgatgc

SEQ ID NO: 53249 - DNA, 377 bp, Zea mays
  unsure (1)..(377): unsure at all n locations
agcttctaaagggagagcacattntattatttccaatgctcattnggagaaagacagggtttgtagcgcatgccaagcaggaaagcaagttggtacccatatccacacaagaacatcatgacgaccgacaggccactggagctcctacacatggatctattcggcccgatcgcttacataagcatcggcgggagtaagtactgtctcgtaattgtggatgattattctcgcttcacttgggtgttctttttgcaagaaaaatctcatacccaagaaaccttaaagggattcttgagacgggctcaaaatgaattcggcttaaggaacaagaaaattagaagcgacaacgggaccgagttcaagaactcaccaattga

SEQ ID NO: 53250 - DNA, 368 bp, Zea mays
atggccctgtaatgctagcaaaaaaatgtgttttcttagttacctgttttattttgtatggaccctcccagcttggcaaccatttcccaaactttacggctttatttcttaaaagcaagatgatctttcacaccaagacccctacctaaaatgacttaactctgaccgtcttattgtggaccttggctaccatgattatgtccttctctatttctcctacagttgtcaccatcttgtcggttacctcatcaatattgaccatcattgaattataacattcaccgacggctagatcattttgttaggcgaacctgagagcacttaaacttattttcacaggcaacactgcttcctgcccttaaacgaac

SEQ ID NO: 53251 - DNA, 389 bp, Zea mays
agcttcggatctcttgctttgcaacttttgttaacatggccagaaatgacttgggaatcagttttgagaaccgcccttcttatccccattgccttaactccgaagccccaaaagcaaagtttcgtattcagcaatattattcgtgcaactaaaatcaagcttgactgcgtagcatgttctgactttggaaggtgcaattaaaacggcagctgcacctgccccaaaggttccccaggaaccatcacagaatattgtccaagctacggtatctttacttgcttcttcctcctgagcccctggcatccaatcagcgatgaagtctgctagcgcctgtgactgaatcgaagatctatgcacataatcaatgttgaactcgttgagttccgcag

SEQ ID NO: 53252 - DNA, 384 bp, Zea mays
tgatgggtctaactgatgtggcgttccaaaaagatttaccttgtgcagcttgtcgagcacgtgaataactgggaagctctctcatgcccatgtgatgacacattatacccctggagttacttcatatagatatcttttgacccgtctcctatctgagcataagatgaagtaaatatggacttgttatagctgatgatttttcccgcttcacttgggtattctttttgcgggataaatctgaaacccaagggaccctcaagcgcttcctaagaagagcctcaaacgagtttgagctcaaagtgaacaagatgaggagcgacaatgggtctgagttcgagaaccttcaagtggaggagtatcttgaggaggaatgaatcaagcacg

SEQ ID NO: 53253 - DNA, 182 bp, Zea mays
  unsure (1)..(182): unsure at all n locations
agcttgtgaagattcttcatctttcttgggctagncggcggggccaaagccaacccatgttagccttagcaattaagcaagggtcaagttcagcttatcaaaatctaccaagtatagctgaccctaaaacactccttaaagcgctttagacataattttttttaaaaacagtgacaccccta

SEQ ID NO: 53254 - DNA, 380 bp, Zea mays
ttacacgttaatcttcacctaaacaaaagattatgaatgctcaaagccaaagtgtggaactaattgcttcaattgggactcgatcaatagtaactcctttcaaggcatactttcaattacgaataatctattttatgaaaagaaatgtcgatatgaaggctaaattccttttggattaaatttgtaaattggagcatattgttaagtcactcatacatgtgcattgacttaaaaggaatttaatttatgcctttatgcctcatcaatgatgatttatttgacattcatatatacatatcatcattccttaaatatttcattgtgctactaatatctcttttcaaagtgggtttttttactaggtttaaaaggaaaagaga

SEQ ID NO: 53255 - DNA, 393 bp, Zea mays
agcttgtcagtacttatcaaaacttctttatctaccagcacatcaattgcaaaccatacctgtaacctggtcgttcgcgtgctggggactggatatattggaacctttcaagaaagctcaaggaggatacactcatgtactggttgctatcgacaaattcactaagtggatagagttcaaacccattgtttctctaactttagctaaggcagtggaattcatacaggacataatattcaggttcgggatatcgaatagcatcataaccgacctgggatccaatttcacaagctcagagttcttcgatttctgtgaacaaaaaagcattcagatcaaatacgcattggtggcgcacccaagagccaacgggcaagtagaaagagccaacgggat

SEQ ID NO: 53256 - DNA, 400 bp, Zea mays
tatagcaccttgtgtcttgagtgggaacataaatataggttgtggttgggcttttagatctcatagtacttccatttgatatgcacaccatgtagaacacaacaatatcttcactcacatctgcttagttgatattgcatttgggtgagcttgaagttcatctagtagcactagaggtatgtgttactatagattctttttattactcttggtggttgtcatgacctggatagcttaaagtagtgttgaccccataaaacattgaagttcttgagtcaatttctattggcaaggcaaagagcaacttcaggttagacacgataggaacaaatgtggtcacatcatgttagacacgatgcagtagtgtagcatagcattaggcctaaggttagcatataat

SEQ ID NO: 53257 - DNA, 394 bp, Zea mays
agctttatcaaatggacgtgaagtaatctctttctcaatggaccaatcaaggaagaggtctatgttgagcaacctcccggctttgaagatagtgagattctaaccatgtttataaactctctaaggcgctttatgggctcaagcaagccccaagagcatggtatgaatgccttagagatttccttatagataatggcttcaaagttggaaaggccgatcctacactctttaccaaaacacttgaaaatgatttgtttgtatgccaaatttatgttgatgatattatatttgggtctactaacgaatctacatgtgaagagtttagtaggatcatgacacacaaatttgagatgtcaatgatgggggagttgaagtatttcttacgatttcaagt

SEQ ID NO: 53258 - DNA, 395 bp, Zea mays
ggagaacacaatttcaagacatactttatttttttatgaaagatgccaagcccatcaagacacccatgggaacaaatgggcctctcgacctcgacacgggaagtaagtccgtatatccaaaggtatatcggtcgatgataagatctttactctatttatgtgcatctcgaccgaatattatgctttcgtatgcatgtgtgcaaggttccaagccgatcctaaggaagttcaccttatggtcgtgaaaagagtcatgagatatttagtttatactcctaagattggtctttggtaccccaagggatccacttttgatttaataagatattcagatgttgattgggccgggtgtaaaattgatatgaagagcacatcagggacttgtcagtttctgg

SEQ ID NO: 53259 - DNA, 391 bp, Zea mays
agctttgataatacaacatattctattgtgaatggacgaaccgacttaaatatagaatgaccttttagtccataaaggtctgagtcaatgttgaacttttatgaggggcatgattgtaattcctcacaggctgtgtcctgtgcctataaatagtgaacagtattcctttactattcacacattcctgcaattgcaatcgcatcactcggaaattattctttaccaaggcagaggtataaatgtatctaacatttgaatacatcaagtttgtataatatgaaaatgatgttgtttatttataatttacttgtcgttaatgtttcatatctcgaattattttatacaatctctgagagttcaattacgaagattcaaccttcgtaattgtacc

SEQ ID NO: 53260 - DNA, 413 bp, Zea mays
actaagcttcgcacttgagagacaaaagccttggaggaaagaaattattttatttctccaggcttcactgtgtgctaaagaaatagtaagcactggtctctccatgagccgacagaaagtgcttttattgtttcaaaaaaatacttgcgacggtagaaggagcccctgtgccgctgatttggctagcaaatctgcatgttcattttcacctcttggaatattattgacagaaaaaccttcgaaggaagcttccaaccttcgaactgcatccaaatatctttcaagcttcggatctcatgccttgttacttttgtccacgtggccagcaataacttgaaaatcagtctttaggatggcccttcttattcccattgcccttagtttccgaagccccaatagaagtgcttcatact

SEQ ID NO: 53261 - DNA, 376 bp, Zea mays
agcttctaaaaggagaacacattttgttacttacaaatgttcattttgagaaagataggatttgtagcgcatgtcaagcatggaagcaagttggtgtcatcatccacacaagaacatcatgacgaccgacaggccactcgagctcctacacatggacctattcagcccgatagcttacataagcatcggcgggagtaagtactgtctaattattggggatgactattctcgcttcacttgggtgttctttttgcaggaaaaatctcatacccaagagaccttaaagggattcttgagacgggctcaaaatgagttgggcttaagggtcaagaaaattagaagcgacaacggaacggagttcaagaactctcaaata

SEQ ID NO: 53262 - DNA, 379 bp, Zea mays
  unsure (1)..(379): unsure at all n locations
acaatattaatactccagcctctaaagggagaacacattttatgactaaccattgttcttttngagaaagacaagatatgtcgcgcatgtcaagcacggaatcaagttggcactcattatcaccaaaaacataatgacgactgacaagccactggagctcctacacatggatctattcggcccgatcgcttacataaacatcggcgggagtaagcactcgctaattattatggatgattattctcgcttcacttgggtagttcttttacaagaaacatctcagacccaagagactttaaaaggattcttgagaagagctcaaaatgagttcgcttaatgatcaagaaaataagaagcgacaatgggaccgatttcaaga

SEQ ID NO: 53263 - DNA, 384 bp, Zea mays
  unsure (1)..(384): unsure at all n locations
agcttcaactcttcgaaccatatccttatattnnccaagcttcggatctttagccttgcaactcttgtcaatatgacccgaaacaacctggaatcagttttaagtatggcccttctgattcccattgcttttagcttccgaagacccaaaagcagggcttcgtactcggcaatgttatttgtgcaactaaaatcaagttttgccgcatagcaagttttaactttggaaggtgaaaccaacacagcagccgctcccgctccgaaggttccccaagacccatcgcaaaacactgtccatgcttcggcgtctttatttgtttcttcctcctgagcccctggcgttcagtcagcaatgaagtctgctaacgcctgggactgaatcgaa

SEQ ID NO: 53264 - DNA, 283 bp, Zea mays
  unsure (1)..(283): unsure at all n locations
ctttggggagcctttggtcggtgtgggctgctccctttgtttagatgacttgaatgccttgtgttgcgcctttggtgtggaggcggcagcttgctctangttgacgatgtgtgtcgagatttaaaccatatgtacaaagctaccaacttgtgagtcactactagggagacatttgcttatacctaagactgtcagagatcaactgcacttgagtgggattacttagacgagagatcttagactaccttgaccatatgtggtcatccacttcgtgcgtctacag

SEQ ID NO: 53265 - DNA, 335 bp, Zea mays
ctcctactgtgaatccgactcgagtccgaaagtacctgttccacattatgctccagaaatactgttaaatcctgtttttgaggaccttcctaagccgaaagcccccaacagtatcccctctcaatattaatttgttttaaaataataaatctagattgcgacatggacgaacgatttaagccgaaggtccgaaaaaacaccttccctttgctagaatagcaacattcactgacaggcggggtctttcaattcttaacgcactgggcgtataaataagagcataccgcgagctcatttggcacgccctcttgccatctgttctcgctcactcaatt

SEQ ID NO: 53266 - DNA, 389 bp, Zea mays
agcttttagattttctcaacttgggttaagttttacccctttaaccactatttagggttaagcctaataaccagggttctattttgcaaaaacattaaaacatacaacttgtttgaaatttttgcctagtgaatgcactctaggtgtgtcacacatatgcaatgccaatgcttatgatgtcatgctcaagttttagttatagtaacaccaggggtgttacatccttccccccataaaagaatctcgtcccgagattaaaaattctagggtaggtaatggtaaaggaaacacatcacatttttatttccgtaattttggtacaaggcaggggtaatgtgggggttacttttttttattacaacaactatacaggctttacaatttacatg

SEQ ID NO: 53267 - DNA, 411 bp, Zea mays
tgacaacgaggagatggcgctcatcatcaagagctttcgccaaatcctcaagcaaaggagggggaaggactacaagccccgctccaagaaagtttgctacaagtgtggagcccggtcatttcattgctaaatgtccattatcaagtgatagtgacaggggcgacgacaagaaggggagaagaaaggagaagaagaagtattacaagaagaagggcggcgatgcccatgtttgccgggtgtgggactccgatgagagctccaccgactcctcctccgacgaggacgccgcaaacatcgccgtcaacaagggccttcttttccccaacatcggccacaagtgcctcatggcaaaggacgacaagaagaagaaggtaaaatcaaaatcctccactaagtatgcaacctctagtg

SEQ ID NO: 53268 - DNA, 395 bp, Zea mays
agcttcttatcccttttatgcctcaccaaatacagcagaagcgcagccatgagacccagtgctacggcagcaccaaccacactgacggcaatcttccacctttgagcttcccttggtatttcctccagtggtcggaatcgacggggctatcgcgccaggtggaggtggagcaagagcaatcccactggagttcaccactatcgagacatgcccttggcgatacgtcgagcacatatcggttgcctccaggtcccggaactgcggcacgccatccaaatcgaacaccacgcaccttggcgctgcactgcctgccggaaccgccctgacattaccgccgaagcgcaccgaaattgggccgcccgacgcgatgacgttgagctcctgcagccccgcgg

SEQ ID NO: 53269 - DNA, 404 bp, Zea mays
tccacacgcttgccccagtgatcggctaagcatgtttgaatagctctctgataagtcgctccagcgtttttgaggccgaacggcatagaggtatagcagaaagctcaacggggtgataaatgccgttttttcctcgtcttcttttgccagactaatctgatgatacccagagtagcaatctaagaaagatagcatagagcatccggcgattgagtccaccacctggtcgatcctagggagcccgaagagatccttcggacagtgtttgttgagatccgtataatcaacgcacatgcgccaatccactttattctttttgagtacaagaatagggttggccaaccattcaggatgtaacacttctctaatgaatccggtcgcgaccaagtgagccagctcaacac

SEQ ID NO: 53270 - DNA, 388 bp, Zea mays
agcttaagaacaacgctcaataggtacaccttctgcgtgcccacaccagagtggaaatcaagtcacagaatcacgagctagacctaaattttggactgtattttaaaatcaactcaaaaattgggggcttgggggggacaaatatcccccaggttcactaaaagtcaaaaaagcctcgcgaaaggttttgggcctattatctcgcaaggccatcccttcgtgggccaggggagaaccgctggtggaatgggccgacgcgaggaagaagcaaactcgggcccgagcggcttgttgtatttaagcgctatccactgcgccgatccgacttccccgcgtaggacaacaaagaaatatccatttgccgggagatagctaaaagtatgggatt

SEQ ID NO: 53271 - DNA, 395 bp, Zea mays
taccctgtagtctggactataaattggttacggcaggtgtgccttatgcagtttgaccatttccagcatttgcataatgaggactctaggagaagcctcgtatgaaccctggccattcacctcggaagtgaatacgggtctagctaacccgggctaaaagggaatcgcgactcatgggtaaagatgcgccacctctgcagagtgtaaaactgatatatcagccgtgctcacggttatgagcggcctggactcctcacatgataattgaacttgaagatgaaaataaatcgagatccgatgatctgccaatggtttgcttaagtggtttcacttaagtgtttttgatatactcctgtacctttggttaatgggaatacttgggattcacacttatt

SEQ ID NO: 53272 - DNA, 389 bp, Zea mays
agcttatgaagattcttcattccaacatgggttagtcggcggtgccagagccaacccatgttagtcttaacaattaagcaagtgtcgagttcagctcttaaaatctactaagtatagctgaccctctaacactcccttaaatgctattgaatcatcacttcttctaaagacagtgacacctacatcagtgaatagacagttgtagcccatttgacataattgggatacggaaagcaaattgtaatctaatgaatcaacaagaaaaacattggaaatagtatggtcaggtgatatagcaattttacccaatcctttgaccaaaccttgatttccatccctgaatgtgatcgctcgttggggatcttggggtttctcatatgaagagaaca

SEQ ID NO: 53273 - DNA, 410 bp, Zea mays
tggaaaaatctggtatgaatctgcgataatacccagctagtccaagaaaactccggacttggtgaacagttgtttggggggtttccacttccagaatatctttgaccttgctggatctaccgcaattcctttatctgataacacgtgccccaaaaattgaatttcttccagccagaatgcgcacttgctgaacttggcataaagctgatgttccctcaggcgcgtcaatacaatccgtagatgctgagcatggtcctcttcattcttagaatatatcaagatatcgtcgatgaagactaccacgaacttgtccaattcgggcatgaacaccgagttcattaagtaagtgaagtgggcaggagcatttgtgagcccgaaagacattaccaagtattcaaataatccatacc

SEQ ID NO: 53274 - DNA, 235 bp, Zea mays
  unsure (1)..(235): unsure at all n locations
agcttgcacacataattnagtcgaatttctttgatcatatctcctcgataagctctgactaatgtgtgaacaagtctatctctcaccattctacgaatcgaaacggaatcgtaatctttggcgaatacaaaggcttacaattcagaactcatgcattgacatcactgcgatcaactttctatttcttgggagaaaagatcatccgccacctaaaatgactctatccttgacggaa

SEQ ID NO: 53275 - DNA, 394 bp, Zea mays
agcttttatttacttcctacatgcttttaatgtcttctgtaacacccggattttaagggtccaaaacccgggcgctaacataaacaccaggtatgctgggaccaagtctcccacatatgatgtaaagtggcacaggatcgaatgtcacatctttatatataacaggagttctatacaaaataaataattacattataaggagacaacggtccagcaacccaaagttgactgggagacgacgacctagaccactcacgaactcatcgcagcatcctccatgagcatcatcctgcagtacctggtcttgacctgtggtgtatgtgagacagcaagagtgagctcacatacgttcatcgctcaacaagttgtggggaataatgtgcatgaactcgcc

SEQ ID NO: 53276 - DNA, 407 bp, Zea mays
ctccagccttatgggaataggcataacatggtcccgcgaatgaacttgattcacacttatacccctgagatatctaaaaaccccatttgaaccctataaaacccttagtcaaccttatgggcctatgtgcaaaaattgtgcacatttggactaaagggttgaaactattatgttgaatcatactattcggatgcccgtgcgttgcgacgggttacaacaatacccacgtgaactatccatgagaaaaatttcaagactttttattgattggctccactctttgtataatatatttttttatttgactaactgatgttattggttactccatgcaaatatgtcttggtacaacatgaccaataaagtgaacgattagaagagagttcacaacgattgactgaatgaac

SEQ ID NO: 53277 - DNA, 386 bp, Zea mays
agctttgcaccaggtaagtacttatctatatcatgccgcctcatgcgattggctatcttaggaggcgcgaacttacactttactatatcgtgaccggacgaaccgggtaaaccaagcttgattaatatcagagcagcgatacacattcgactggtttatacactgtcgtggaaggacaagacattgaatgggcccactgtcgctttttacctacacacacatgtgcatcccactcgatatgctctcgatagtcacaaatcgcaagaacctactaagaccaccactctgggccgctctccaagaacatatcacactacctcgactaggattcggtgattgtactctcgcggatctcctgcgccccctagagagcggactgagatgac

SEQ ID NO: 53278 - DNA, 149 bp, Zea mays
tcttgccttggtaattgggcccgcaccaaagggctctccgttgagagccgacggtgcttcacgccgtcccatctgtatatattgtacctcaccgcacacggggatcatgatgtgggctctctcctgaactccactgcccacaccctatg

SEQ ID NO: 53279 - DNA, 393 bp, Zea mays
agcttgtggctcctctccttggttgttgacgaaaagaccgagctccccatcgaccgtctcccgtttggtgatcttggtcacctcatctccctcgaggcggtcttgagcacgttccaaatctccttggcgcttttcaacccttgcactttattatactcctctcgacatagagaggcaaggagcacagtagtggcttgggagttgaagtgccggatttgggcgacctcgtccgagtcgtagccctcgtcccatatgataggtacctgcgctccaaactcaacaatatcccatatgctaacgtcgagtgaggttaggtgatgcctcattttattactccacatgcaataatcctcaccataaaaaaatggtggtttgcctaatggaactgaaagt

SEQ ID NO: 53280 - DNA, 371 bp, Zea mays
acttcttctggctgctgcccaggactaccaagatatctgcgggagccgacaactctgccgagcaatgctcccaatgcgaaagattgagtccctggtaactgtgcaacatataagcatcttttcaaagaaaaagctacattttggcgatactaacaacatacttcgctcaggcagacctcctatatcatcactcagacgcttagtttttgtcttcaatgcggctaacctccacgacataatccctcatgagctatgtattggcctcatcaacaatctgtacacagcggaagacaaccgagcataacataatgcgacacttcacaatgttggttttttctaaaagattactggatgtgatctgtcttttggag

SEQ ID NO: 53281 - DNA, 380 bp, Zea mays
agcttgtgagcaatacaagttcatattgtaaaaagctgcttcggctgaccagccgaaacccatgctcttatgtgaggatatagcagagcagaagtgtattgggatctcaattgtccgaagagcaggagaaaaccttgataaggtttttgttcaacaacaaaaatgtttttgcttggtccgctaatgatctttgcggagttaacagggatgttattgagcattcgctcaatgttgatccatccttcagacctaagaaacagaggcttcggaagatgtctgatgacaaggccgaaggtgctcggaatgaagtaaaaagactcctcagtgctggagttattagagaggtaaaatacccagaatggttggctaacactgttatg

SEQ ID NO: 53282 - DNA, 406 bp, Zea mays
  unsure (1)..(406): unsure at all n locations
tggtgccgatagaaaaacaaaaatccttgaaatcttggctgtcaaactgcttgccgntgtcaactgttatttcggacggtactccgaagcggcagacaatgtttgccagaagaatttttgagcagtctttgatgctattgtagaaacagccctcgcctcgatccatttggcgaagtattcgacggctactaaagcgaacttaaggttcccctgagcggtgggcaggggcccgacaatgtccaggccccaacgctggagaggccatgtatgggcaatcagctttgtatactgcgaggggctgcctgaccgaggagaaaacttctggcaggcttcgcaggaccttgtgacccgatttgcggcgcagatcattgcgggccaataaaaccctttgcggatcacctttgca

SEQ ID NO: 53283 - DNA, 397 bp, Zea mays
agcttctaaagggagaacacattttatgattaacaaatgttcattttgagaaagacagggtttgtagcgcatgccaggcgggaaagcaaattggacccatcatccacacaagaacatcatgacgaccgacaggccacttgagctactccacatggatctattcggcccgattgcttacataagcatcggcgggagtaagtattgtcttgtaatagtggatgattattctcgcttcacttgggtgttctttttgcaggacaaatctcatacccaagagaccttaaagggattcttgagacgggctcaaaatgagttcggcttaaggatcaagaaaattagaagcgacaatgggacggagttcaagaactctcaaattgaaggctttcttgaggaggag

SEQ ID NO: 53284 - DNA, 391 bp, Zea mays
  unsure (1)..(391): unsure at all n locations
tatctttatttttgaaaaggggagaaataattaacaaaatggggaatcataagaaaaacataagatgtagaaagttgatgagtgcatactatgtcatgagcatacatttattttatgacacactacaccctatgaatagtatgatataagttgtcttcatacttcgacccaaatatgtgcttttgggatttgagtacaaaattggtattttttgaaatgcatatatttagggggaggaaactatatcatacgatttaaaatcttatttattaaatcttatgtaagctttaaatgtgtttgcatcaatcaaccaaaagggggagattgaaagtgcattcatcccttttgtgagntttggtgatttgggatacaacacattttaaagtctaac

SEQ ID NO: 53285 - DNA, 387 bp, Zea mays
agcttttaggttttcttaatttgggttatgtcttacccctttaatccctatttagggttgagtttcccattccagggtcttgtttgcaaacaccaaaacagtacaacttgtttgaaatttttgcctagtgaatgcactctaggtgtatcaaacatatgcaatgccaatgcttatgatgccatgctcaagttttagttacagtaacaccaggggtgttacaatttgcaaaagaactttgaaaagaatttacaaaagaatttgcaaaaacaaaacatgtggtgcaagcgtggtccaaaatgttaaaaataaagaaacaattcatgcatatcttatgagtatttatattggctcaattctaagtaacctttgcacttacaattatgcaaa

SEQ ID NO: 53286 - DNA, 201 bp, Zea mays
agcttgctcacttggccgatgaccaggcgccctttcctgatttccgcagaggacgctacacgtattggaactcatacataccgatgtgtgcggaccatgagtacgactggtaggtgaagattccactacttgatacccttcactgatgattctagtagatatgggtgtgtctacttactgaacaacatgtctgaatccttg

SEQ ID NO: 53287 - DNA, 313 bp, Zea mays
aactattaagcatgcgctctgaacgggctcttcttttgcaaaatcaaccaaataaaggttggcggctaatacacccctaaaagctagggaaccatcacttcttctaaaaacagacacatctacaattggaaacagacaggtatatcccatattgcacaattgactaacagatagtaaaatatatcctaatgactctactaaaaacacaatagaaatagagggctcattaaaaattgcaaatttaactaacccttttaccttggcttgaatcccatcaccgaatacaattgaatcttgggaatccttaattttg

SEQ ID NO: 53288 - DNA, 389 bp, Zea mays
agcttagcaaaagtactacataacgtttattattaccaagaagtggttccaggtttaatcaaatcaaacattacagttttcgaaatctgttctgacagggcagaatacaacaaccagtttgtaaaattcataactcctaatctgtcaggcctatggttatgaaattttaacataagcaggataagaaaagcatctacaactttcttataacgaccatgaacagattgtaacattaaattaggcaaacaatgcagtttctgaaatctgtacagaatttgggcagattcagttactgaaattgtgaaaagcataactcctaaacgatcagacttatggctatcaaattttaacacaaggaagataataaagttatctacaactttcttgtg

SEQ ID NO: 53289 - DNA, 408 bp, Zea mays
tatgaaccgagggtcacaccaagaccccttacagcaattaaagatgcatgatctcatctgttgatgcagtcgtcagctacctggcatcacgctggttgaaatagtatatcactccgtatggacgatggaaacaaaacaggttgatgtgataaataggcggtcaagttgatgcagaggtactcagctccttcgcaaaatgctgaaacaaatggcgtcagcaggttgattaattgcttgttgcgggcttgtgcctatggattatataagaagcgttactggatgtgtggattcctgcctcccccatctatcgatctgtgaaccatcgaagaagcctgacagagctagtagctagccaagggctgggaataatggcgagcggtaagaagatgtcagtggtcgtcatcatgt

SEQ ID NO: 53290 - DNA, 385 bp, Zea mays
agcttgatggtcaagttaaaaggcatgctcttatatattttgtatccgaggttcttaatttatcaaagaaaaattatacagagttggagaagtctgatgtggcttgatggcctccaagaaacttcggcactattttcaagcttacaacataattgttccttcttcacaacctctgaaggatattatgaggaaccgagaagctactggaaggattggaaaatgggctgcagagctcaatgaattttgtattgaatatgttcataaatcttcgattcagtcccagacgttggcagatttcattgctgactggacgccaggggctcaggaggaagaaacaaataaagacgccgaagcatggacagtgttttgtgatggatcttgggga

SEQ ID NO: 53291 - DNA, 400 bp, Zea mays
tcagcttaagtgggaaggcccctttttggtggtatctttgtctatacctggatcttataggctgaaagacatggatggcaatgacatatcaaggtctaggaaagcggtagcttcgaaggtattacgtgtaaactatgaaattttcttattttttcctatggcacccttttcctttcaagaggggagaaaggtttttaatggggccataggttgtaattttcattttttgtatagccttgggcaatacaagggccaaattctcccacatgtaaaatgtaaaatctgggactacaccgtcgagtttaaaagccgtgaagaagctcaaaagtcgttcctaaagggacgcaaactaagttacgaagctccaaagtcgttcctaaagggacgcacagtaagtatg

SEQ ID NO: 53292 - DNA, 397 bp, Zea mays
  unsure (1)..(397): unsure at all n locations
aactttgggaactatgcccgtatccattctttctgagccgtaactataagagcttgccagatgcccccgttcctgtcgaccacgaccagcacccaacatagacttccctagttatttaacccaaaccaaagccatgatagttctcatggtagcactgtttttccgggtggtcactccatgttccaattaatatgcaataatcttgtttaaccatcgggttaacaacaataatgtaaacttaccattttggaacattaatatcataagcgggagtgactgcataaagttaagttgtagcaatagcatagctacgaaagtaaagtataatacccaggtttgatcaaggaataaggttgaanaggttaggtgtatccgaataggtaacccatcaaattat

SEQ ID NO: 53293 - DNA, 370 bp, Zea mays
tctaaagggagaacacattttacgattaacaaatgctctttttgtgaaaaacaggatttgtagcgcatgccaagcagggaagcaagttggcactcatcattcgcataaaacataatgacgaccgacaggccactggagctcctacacatggatctattctgcccgatcgcttacataagcatcggcgggagtaagtaccgtctagttagtgaggatgattattctcgcttcacttgggtattctttttacaagaaaaatctcaaacccaagaaaccttaaagggattcttgagacgggctcaaaatgagttcggcttaaggatcaagaaaattataagcgacaaccggacggagttcaagaactctcaaa

SEQ ID NO: 53294 - DNA, 394 bp, Zea mays
agcttcagctaaggctttgtcttcagttttgtcaaacttcagcattgtcaatcttcagcttcgtcatcctgtatatatcaaacaacacagtagaaaaacaaatttcaaaggagaaggtaaaagtaacaaacataagttttttaccggcttaagatggcttcgagcttcgtcgcctgccattttccgcccgccacttacccagatctgggtcatgaatctattcccgatgcttctggctaagcttgggatatctaacaaatctgaagctgacaagctgaagtttggtctgttcacaatgtttccatgtgtgcagccagccttcaaaaaagcagcagctgtgccccgagaagctaccagggcacagaagtcagcgtgcccaccaataacttcgtca

SEQ ID NO: 53295 - DNA, 392 bp, Zea mays
tgtacccagggacccgcgtcaccggcaataatgcccagtccgtgcgtctctcgtgagttcaaagaacaccgctcgcgtcgcacgataagacacgggtaaagcccctgcaccgttttccaattcttggcgtacggcctctgttttaccccgtgaagctcctcgtgcaccctaattgatctatgccgccgtggtttggcttgagcaagagccgccgacgacccccgccgcctgtgctcgtggccaaggtaacttcgaccacctccgacaccgacccgcacattggcgtgaccgttgcgacctcccggacgttactgaccaccccgccggagctctactgccgccggtaagccccgccgccgtaaaatgtaccgcgggcactgtttaaaccggtc

SEQ ID NO: 53296 - DNA, 390 bp, Zea mays
  unsure (1)..(390): unsure at all n locations
agcttctaaagggagagcacgttttatgattaacaaatgttcattttgagaaagacaggatttgtagcgcttgccaagcagggaagcaagttggcactatcatccacacacagaaacataatgaccgaccgacanaaccacttggagcttcctacacatagagatctattcgggcccgattagcttacataaggcatcnggcgtgagtaagtactcgtctagttattgtggatgattattctcgcttcacttgggtgttctttttgcaggaaaaatctcatacccaagaaacattaaagggattcttaagatgagctcaaaatagttcggcttaaggatcaagaaaattagaagcgacaacgggacggagttcaagaactcacaaattga

SEQ ID NO: 53297 - DNA, 338 bp, Zea mays
tgggcggcttgtcgatttcttgatagccgtaggccgcacttgttgcacagggtggcagacccgtcggaccccgtgcgccacagcggcgtctcgtgctgccgcagtgtgcacactctctgaactcgctgcctgttcgttggcggcggccgcggccgcacctgcaggctctccaactgccggcgggctcctgtactgccgccgccgctgctgctgctaaggttgctattacccgccgcgtgaggtgtaaggatgcctggcgtcgtgcccagcgagcacgggcgcttaatgctgccgcgcatgacgacgggccttctgtcccgttttctcgtgggcacaac

SEQ ID NO: 53298 - DNA, 390 bp, Zea mays
agctttgactgcgaaagaaaatttgtttctatggttaactcggaagatgctgctggctcgagtggagaagctttgtatgtccgtggccgcactgacaaaaaaagtccaactcacgtggcaaaggaaaggggaagaaccagaggggtcgctccaagtcaagggggccatccgatgaattaatttgcaaatactgcaagaagacgaaccatgtaattgagaactgttacaaactgcagaacaaggagaagaggaacaaggagaagggtaagactggaggtactgtctctgttgcatccgaaaataattctgataatggtgatgttcttattgcctttgctggttgtgctgctgatgatgcccaatggttcctcgattctgcttgctcatatc

SEQ ID NO: 53299 - DNA, 357 bp, Zea mays
tcctccctctggtagaactaggaccatcttagccctaaccaggataaaacttgtgttcatcttgcatgaattactgcgggcagggacacaccacatataattcactagtccgctctgttgagggtcccctgggtcccaagcaccgacaacataattgtgtggtcgattgatcaataagtgttttatgcgatttgagcaaggagctcataatccacgatcaaaatatgttggaggatggtgatccgaatcttatggaagatagggatggagattcatccctggtggatgatggcaggcaagacatagcgggaaacttggaacacactggaaagggcctttcctcggcccaaatatttg

SEQ ID NO: 53300 - DNA, 389 bp, Zea mays
agcttgtctttggctcatcctctttcttcatccaaatctggtgatagcctgagtagcggtccaatagactcatgagttccgaagaagctgctacattacaagggagtctattcttggtaacgggaactcatccttcgggcatgccttgttgagatctgtgaaatcaatacacattctccatttcccattagccttcttcaccataacagtgttggctagccactctggatatgttacttctctaataacaccaggttgagaagtctctttacttcattccgagcaccttcggctttatcctcagacatcttccgaagtctttgcctccttggcctgaaagatggatccacattgagtgaatgttcaatgacatctctgttaacaccaca

SEQ ID NO: 53301 - DNA, 381 bp, Zea mays
tcatttgggatctactattctttcgcggtaatttacttgacactttggtgcatccctcgatacatgtggattgtgtgacctttgtacttaacttaccgaaggaaatcctacagcatttttatttcaaaaaagggatttaccggggttagttttacaatgcttgtaaccacgttctaatgtcttgtgctaactgatctctcattctatatgcgataaggagcaactccttttttgacatatatttccataactgtgttgttggagcaataccctcaaagatccagacatttttgcactttcagatatatcatgccatggtgattaacagttccacacttccagatatatcaagccacggtgattaacagtttcacggaccac

SEQ ID NO: 53302 - DNA, 392 bp, Zea mays
agcttcgtaacaaaaaggagcttttgtttaactaaaaaattttcaacttcgtcaaaagacaagaaattcaatcatcaaatggtagggtacgctcaagctagagttactcgcgacggagaggaagccgaaggtgccgaaaccgctccaatttctgaagtgatgaaacggtcagggttggtagtatcggaggatgcacctgccgctgaagctgaacaggttgatgctgaggaaattgaatctgaagatgattacagcgccgtgccatctaaacccagccacctggagtttgggaaatctaccattaccaaagctgatatgtctaagctgatgaagttaggctatttcagtgaagcaaaaaaggaactggttcgttttggcggagaggaaattac

SEQ ID NO: 53303 - DNA, 393 bp, Zea mays
aaccgaatcaagtcccattggtctgatattttaacaacaatttcctcatatgacaagtaatacattccattggtaaacaccaccaaaatatgatcctttaacttcaatttcacaaaatcatagaactataggtgaagaacaaaataagagaaactttaaatttatggtgtccgagtgacccattgattaagaaatcattatctcaccttgtggtagaagcaagtcgatctggaaaatgaatttttttctcaccttgaggtcctcgtcttgctaccctttttcctcctttgatgcgaccgccacagcctcagctttctgattcaaagctatcataatctttgatagcttctactcagatacatcttcggcgggtcggtccgccttcactgcccc

SEQ ID NO: 53304 - DNA, 387 bp, Zea mays
agcttgacatcactaaagcctttgattctgtatcttggccttgactgcttgaagtcctccagcaattgggttttgggcagatttggagagatacctgtgtggccttttagcaactgcctccacacaggttctactcaatggagtttcggggcacaccatccaccacttgagaggactgcggcaaggggatcccctctcccctatgctttttattttagtaatggacatccttggatgtatggtggctaaagcggatgaagagggacagcttcagcctctctcctccaaaccactacaccacagaatttcgctttatgctgatgacgcacttctattcttccacccaagggagagtgaaatccatactgttctaggtattctgaatct

SEQ ID NO: 53305 - DNA, 390 bp, Zea mays
agcttttcgaacgaaggattcctatgctttcttcttcctgaatccatagcgggttttctcgaactaatggaactttggaaaggcctcgtagtgctacctgtcttgtctcctcggtagagatgaatgggaattctatgcccttggaaaattggtaacacggcctgtgggtaaacttgtgcaacttctgtagagtgtaaaactggtatataagtcgttctcacggtcaagggcggctcggacactcacatgagtaacttatggaattaaacttaatttgtcatttgcattgcactatgggatttattattaaatgtgatctcttaattatttgggttggtatacacttataattattaaatgtgaactaggtatcgtctcacagtcagtaat

SEQ ID NO: 53306 - DNA, 352 bp, Zea mays
tcagctccatctatgttatggattgcttttgagtcaatccagtttccttcggcccttctggcagcttcctgacttccatgaatagcgatgggtccttgatccaaggtatattcatgcgaagataagcaagatgaaaaattgcttcgaaagcattgagggtgccacgaccaataattgcattgtaagggtattccatgtcaacaattgtcaacacaacttgctcagttctaatgttgttgatgaacccgaaggtcactgacatggtgatcttgcccaatgctacaatctgtcttcctccgaagccacagagaggatgtgtagcatcatgaatcttatcttctggctcttgcat

SEQ ID NO: 53307 - DNA, 376 bp, Zea mays
agcttgcgaagggctctccggatactcagatcctgggcgacggtgcgccacatgatcgggtctgtaacgaacatgactcggctccaagcctatactctctatgtgccggggcacctatgtcggggcccagctactttgtgcatgccccggatggcgataaagagagatgcttgcgatggtcatacacctaccatataacggacacaccatatacttggcagttctacaaactctcctgcgatacatctgacacctgtgtacggtatgactctccggctgactgaaccactctagatgctcgaggattgttgagttcttcgcgacctccgagacagaaatcctttatcctcactccgtgcgtaattgaggattgacg

SEQ ID NO: 53308 - DNA, 265 bp, Zea mays
aacagataattctttggtatctgggagacaatataacaagtcatcttcgctgtgccattgaatactaaagcctcctttggatactttagttctccagcatagtgattagcttccaaaatctcttcttcagataatctttttcccgaagcatgtcgtacaatataatccaggactttggaagatgctttcggggcaatagtgccaatttcttcaaccaaaattggctctgccatttttgcttcttcggcttccaaggattttacct

SEQ ID NO: 53309 - DNA, 365 bp, Zea mays
agcttggatgcatgaattgggagccttttggttggtgtaggctcttctttctttttttccattgccttgaatgcaacgggttgcacctctgatgtggagtgcaccttgctccaagttgatagtgtgtttggagtcttttaccataagtttaaagctcacaaagttgccaatcacctcctcaagagacatttgcttatacctacgattatcatgaattaattgcacttgactgggattatgaaaacaatagatcttagaataaccttgaccatttcatggtcatcccacttggtgctcccgaggttgcggacttggttcaccattgtcttaagccggttgtacatggcttgtggctcttctccttt

SEQ ID NO: 53310 - DNA, 408 bp, Zea mays
tgtggcgccctcgggcgtcttgttgtagtcgaagcaccaaatctcccacttgaaagcctcggggccggatccttcgggcgtggtatcgtccagggactgctgataccgcccgagtgtagcaaggtcacgtcctgagcctcttccagctggtctaatgaaccttctcggctggcctggttgctttggtcgtcgtaagcctttgccctcggggaaccgtattccaagtccgtgggtaagatggcctcggccctgtagacaaggaaaaatggcgagaagcccgtggctcggctcggcgtcgtcctcagactccaaaccaccgagggtagctcttttatccaccgcttgccaaacttgttgaggtcattgtagatcctcggctgtagtccctgcaaaatcatgccattggcg

SEQ ID NO: 53311 - DNA, 395 bp, Zea mays
cagcttcatttatttgtgcatgtaggtttattacaagaccggtgggtgccattgggtaattgacagtggatgcactcaacatatgactgggaacccacatatttcacctcactaaatgaagatgttgatgaacaagataaaatcactttcggggacaattcataagaaaagttcaagggcttggcaaggtggcaattttaaatggtctttcaatttcaaatgttctcttggttgcaccattaagcttcaaattgctatcagttggtcaactatgtgatcttggccttcaatgtttattcactcctacagaatttgttgtgtctaaaatggatgatgtgtcagtgatattcaaaggatttagatataacaacctatatttagtggatttctcttct

SEQ ID NO: 53312 - DNA, 398 bp, Zea mays
  unsure (1)..(398): unsure at all n locations
tgtcgnctagtacacccttaaaagctagtgaaccatcattatcttcttaagacagacacatctatatttgtaaacaaacagttatatcccatattgcataattgactaacagatagcaaattatatccaagagactctactaaaaacacattagagatagagtgctcatttgagattgcaattttacctaacccttttaccttgccttgattcccatcaccgaatattattgaatcttgggaatctttgtttttgacgtaggaggtgaacatcttcttcttccccgtcatatggtttgtgcatccgctgtcaataatccagcttgaacccccggatgcataaacctgcaaggcaaatttaagcttgggtcttatgtacccaactcatgttgggtcctg

SEQ ID NO: 53313 - DNA, 401 bp, Zea mays
agcttgagacgggaacaaccgatgcatgcactaactcccttgaagaaaatgtcaaggacttgaggattgccaagaggaaggaacaaagaaaggaaatcaccctcctcgaaaaacctcaaccatgcctccataaaaggtaacatccaaggtaatgatcaagccacacttcacactaagaaaaataagaagtgtagtgaatgccttgaagaaggacacttgattaggtcatgtccttacataaaaaatggcttgattattagcaaggatgatagactttgttttaaatgctcaaagaagggacacttaatcaaatcttgtccctatttgaaacaaaaaggcatagggttagaaaagaaaatattaactgaccatgtagcaagcaagaaacaaggaaagaagaa

SEQ ID NO: 53314 - DNA, 417 bp, Zea mays
tctacatccacaactttagaactgattcatcgatcttccagatcgtgcctcataccatgcacacacttcgatctcaaaagccaataactgtcctatgacagtatatcatacgacattgaagaaatatatatattgatctcaaacttgtagtatacatggtcctaaccataattaattacaagacaagtttataatctaaggagctattattctgccttgtgcatcatggcggacccagggcaacattttacgtgggatgcttcgctcaacgttccttatcttggttggatggtctatgaaaagagacatgtcattgaattggttaaaatcctccatatcagatacaccatcaactcctatagcttgttggtttcctggaaaaactacatgcttcaatttgtctgtgcttttcttctc

SEQ ID NO: 53315 - DNA, 393 bp, Zea mays
agcttccataatctttgttgttgcttatttattatactttaatgtttataattggcccaagccatgattctatattcttcatactcttttgcccctttttgaattttgtttataaggctcaattagggtttttattggggttgcacattttgcctttttgaaaaacccatttgttttgaacatgatacttttaagtataagcttagtggatcctttattcttaagtcaatttgatgttcatgctcaattttggttcacataagatgatggttcttgggttagcacttgagagaaaccctaagtgacactggggtgtcacatcaatcgtccccatcgattccccgttcgcggccagggctcaccgccttggcatacaatgctccactgaccccg

SEQ ID NO: 53316 - DNA, 348 bp, Zea mays
tcagacaaaatcttatgccaatgtttaagattatcagaatccttcttctttatcaaaataatcaatgtcctattactagactcggcctgtccattggcctgagcataattggagacgaattaagcagcttaattctgtataattcagcaaattcacgtacctcctttgacataaaagaaataccttgatctgtagtcaaagtctggggaatgccgaatctatgaataatatgctcagttataaactcaattacctccttgtgcgtcatgttttttagagcaacggcttcagtccatatggtgaaatagtcagtggcaactaacacaaaccgatgcccctttgatgatg

SEQ ID NO: 53317 - DNA, 347 bp, Zea mays
  unsure (1)..(347): unsure at all n locations
agcttgaaactcttgtggctgtgtggacagtttctttagggtctgaaggttcctgtctgggcgagaagctattgacaacttactaattccattttggagaactaaattcatccaaatacgttgtcaagaaaagcagggtagcccatcgaaataccattgtgcttaccaagactaaaaatccatttccaggatcactcaagtaaaccaattgtcgactgagcatggcccaaaccataatgcgtgccagatctggtgaagaagcattaanaggtctaactgatagaaaacacagacagttaaaccacaatcccggccaaacaaaagaagacggaaaaaaacgaggattt

SEQ ID NO: 53318 - DNA, 78 bp, Zea mays
tgatgcccttagaatggttgcctgtattttcccaattaaacaaaatggccacccggtgcattggaaaggaatgtgtcc

SEQ ID NO: 53319 - DNA, 389 bp, Zea mays
agcttttgaacgtactaagcacttgttttgataaatggtaaccggtaaacctattacctgagtgaagccgggcgcggactttatccctcatgcgactgagacagggtctcccatgctagctatggtgggtacaagtgcggtcactgcacggcggcagccggggtcagtggagcattgtatgccaaggcggtgaggcctggacgcgaacggggaatcgatggggacggctgtcatgtgtggggtcggagtaccctgacttgacgtgtgtttaggtttaccttgcaaggttaaaactcgattcgaatcgtctgcttctcgcagctaatgagactgcttgattccttgtactgcatcgagtaagaagtgaaatgtggattacatgagataac

SEQ ID NO: 53320 - DNA, 420 bp, Zea mays
acacgagacactatctaatactgaagctcgcataatatgagaatgatgttgcctatttattatttacttggcggtaatgcttcatatctcgattattttatacaatctctgagagttcaattacgaagactcaccttcgtaattgtgccgactttaaccttcgttcgaagttgattaaatacttatagaaataatgcttcatcggacgaacggcattaacatttaacattttatgtcgccttgttcttaattcatagcatatgagaacgagtccccaacactgggtatacaaaaccaatgacatcgaaaaccctattcagcctcttcttgcctcgacctctgaaggctgcagtcatagcatcatcttcggccttgagtaagcaccaagtaattcatcgcatgttgcttcgatgacatcta

SEQ ID NO: 53321 - DNA, 392 bp, Zea mays
agctttgggcacgaatttgaagttcatctcatcttatcacccatagacagatggtcaaactgagagaaccaaccagattcttgaggatatgttgaagtttgtgccttacaagacaagataggttgggacaagagactaccatatgcagaattctcttacaacaacagttaccaagccagtctgaagatgtcaccatttgaagcgctctatgggaggaattgcaaaactccattgcattgggatcaacctggtgaaagacaggtgttcggtccagatattttgcttgaagccaaagaaaatatccgaatggtccgagagaatttaaaggcagcacagtccagacagcgaagctatgctgacaccagaagaagagaactcagttttgaagtggg

SEQ ID NO: 53322 - DNA, 349 bp, Zea mays
gcctagctacgggtgcatacgtttcaccgatatcccatacttctacttggaaaccccttggccatgattccagctttgtttcttgtcaccacaccatgctcgtattgcttgttgcggaagacccacttggctcctacaacattctggctatggcgtggaaccaaatgtcatacctcgttcctagtgaaattattgagcgcctcttgcatcgacatcacccaatccgaatcttgaagggctgtctctatcctgtgcggcttaatagaggaaacaaaagagtcatgctcacaaaaatgtgcaacacgagatctattggtgacccccttatgaatgtcagccatgattgtgt

SEQ ID NO: 53323 - DNA, 398 bp, Zea mays
agcttctccagaagaaggatgaatacatccgagctgacaatgattttcgacaaaaaagggacgaagcatataggtattctgagatgactaggggcttagaggaagagtccaccctatgcacgttagaacaatcctacaatcccaatacaaatgatgacaggaccaaccatactcagagcagccagcacaactagcaatcttcgggaacgcaacaagcttcctactagccccgaaaggcagagggggagaagctctgggggaaggtatggtaatcaacccaaaaaactgttctacctattctgtggtgaggacaagggacacaccacaaggacgtgttgtaacacccctggtgttactaaaactgaaatctggcataacatcatgtgcattagcatatc

SEQ ID NO: 53324 - DNA, 266 bp, Zea mays
actcatgtactggtaaccattcgcacattcccccattggatagaattcaaacccattgcttatttaacctcgactagaccgtggaatttttacaagacataatattcagattccggataccaaacagcatcataactgacctatgatccaacttcgccagttcagaattcttcgatttctgcgagcaaataagcattcagatcaagtatgcttctgtagccacccaagagcccacgggcaggttgagcgagcctcgggatgatact

SEQ ID NO: 53325 - DNA, 397 bp, Zea mays
agcttggcaaaagcactacataatttttataatcaccaaggagtgattccaggtttaatcaaatcaaacattacagttttcaaaatctgttctgacagaggacagaacacagcaaccagtttgtaaaattcataactcttgaactatcaggcctatggttatgaaattttaacacaagcaagatcagaaaaaagcatctacaactttcttataacgattatgaacagattgtaacataaaattaggcaaacaatgcagtttctgaaatatgtacagaatttggacagattcagttactgaatttgtaaaaagcataactcctaacctgtcagacctatggctgtcaaattttaacaccagcaagataataaagttatctaccacttttctatagcac

SEQ ID NO: 53326 - DNA, 348 bp, Zea mays
ccccttggtgtctcttgccttggctacaaacgagcttgttcacccaacagtgtaagggatgcaactttcccatctcaagagctcatatgaacacaaatgtctcgccctctataactatatgatttggagagactcctgccttgggggaggactcgatctcaatggtcgagtctagcacatgagatgctatagcctctgtgtatgccgttgaacgtggaaataccgcatgccatagaacgtcgggtgggataaaccgatctattcctactacttgcgctgaaagccccactaatatccctatcagaatcgttcccatatattcaatgcacatactgctaatggtaagac

SEQ ID NO: 53327 - DNA, 394 bp, Zea mays
aacttatatttgaatttcttgctcactctctgctagcattccttgaaaaattgcggcctcaaagtgagcttgatgcaccaagagcttcattaatacttcccatgtaagaccattctggacacactcacacccacgagtaccttgagggtgtacatgtgatgagtcaccccactcattgtcccaattaaactcttcaatgaccacaaggtcaaaacttttccctttcttctcacgccttatttgaaacctaatcttcatctctcggttgtaggaaacaaagacaatatcattcaacctcttatgcaacagctgagcagcctatttcttttttttttggtatggatctgaaaaaatgggttaacaacaaataaacataatacttaacatgctaaca

SEQ ID NO: 53328 - DNA, 349 bp, Zea mays
tctatagggagaacacgtgatacgtttgactaacgtgcgattcgaaaaagaagaccatgtacagcttgtcaagcaggtaaacaagtgggaggagcgcatcacagcaagaatgtgatgaccacatcaagacccctggagctggtacatatggacctcttctgacccgtcgcctatctaagcataggaggaagtaagtatggtctagttattgttgatgacttttcccgctttacttgggtattctttttgcaagataagtctgaaacccaagggaccctttagcgcttcctaaggagagctcaaaatgagtctgagctcagagtgaagaagataagaagcgacaaccggt

SEQ ID NO: 53329 - DNA, 381 bp, Zea mays
agcttcattacacccttcgacacgtactgtttcgtacaaatgccagagggactcaagaacgccgggtcaaccttttcttgcctcaccaaaaagtcctcaaaagccaagtcggcagcaacattttcacctacgtaaacgacattgtcgtcgcaagcaaaaacaaagaggatcacctggccgatctcgcagaaacattcgccaacatgcgcgacgcacgactccggctcaatcctgagaagtgtgtcttcggagttcgccaggggaagatacttggttacctagtattgcaccgagggatcgaggtcaacccaactaagatccaagcgatcatcaacatggcacctccgcagtccaccagggacgtccaacgactgacaggca

SEQ ID NO: 53330 - DNA, 297 bp, Zea mays
gcgcgacaaggcccacgtcctctatacaagtgtactcctctataatccaagtgagcctttcatacttactcaccttggattacaactcgacaccatgaatccctacttagaaaacaattttcttgtgcgcttgatggaagaaatggacgaggaagaaaaagagttgcagttggcgaggcacatggtcaataagaggcgacgtgcacacaatgagcgtcgtcatggtgggtcgattccagcgcatgttaagattcatcgggatcacatgagcggcgatgcaagaatccgaccgactac

SEQ ID NO: 53331 - DNA, 366 bp, Zea mays
  unsure (1)..(366): unsure at all n locations
agctntgactctctgatacttatcactcatagccatatgtgcagccacatctcttttcagcccataccaccagtacttctgcttaaatctgatacatcttagtgctaccaagatgaatagagtaatcagaatcatgggcttccttcaatatagtctcacagaggctatcaatctccagtacacatatccggttcttgaaccatatcgtgccttgctcatcctccatgaattctagacctctaccttcagtaatctcatctttgatctcttggattttagcatcaccgatctgacccttgcagatttcttgctccaaggtaggttccacttcgatggttaactctttccgcgtgtgcaactattcct

SEQ ID NO: 53332 - DNA, 216 bp, Zea mays
caaaaaatctaatattttttcttatcgtaagctctgaaatgttgtaaggcttcaacaaatcaaaataaagtgaatatacattaagaataatgagtttatgaaaaaattacgcatcatttaacatcactttgctaatgtgcctaatatctatgtgccttaatgagtttatgaaagagtgaatatacattaaggctatggcaaactaaaaacatcact

SEQ ID NO: 53333 - DNA, 393 bp, Zea mays
agcttgcccccgtccatgcccccaactgtgccttccctccctccaccccccggagacgccgaccatctccccgttcatcccgccccgccataatccctcctgcgctccccttcgcgaccccatccatctcgccggcgtcccatgaccttaatctgcgcccttccatcggcgtcccttccattggcgtccacagttccaacacatcgatcctaggagtccctcgaatgcacggaccttccatcgtcaatgttatttagcgttaaaaatcttccgttctcaatttgaaaactccctgcaattgtatgcactatgcagtttaataattttacgtgaaaccataacacatgagtccatcgacgaatcagatattgttccactcttataaaccagtta

SEQ ID NO: 53334 - DNA, 403 bp, Zea mays
tttatttacttcctacatgcttttaatgtcttccttttcggtggttgatgccaaagggggagaagtttagggaccaaagcaatgaaaactatatcaaacaccaaacacaccaattttaaattttatatctccaaatgactttttcaagtggttttggttatttggtccaaaaataggaagtaagtgaattatggagttagggggaggcttaagtccataatatcactttgtggggacaatcatgcatcttagcaagtagattgcatattttcactcaaatacttgtattatttgcttgctttggttgtgttgtcatcaatcaccaaaaagggggagattgtaaggaaaatggaccccgtgccatttgactaattgagttttggtgtttgatgaacaacacaat

SEQ ID NO: 53335 - DNA, 393 bp, Zea mays
agcttggatattcttcgtctaagcactatggtcttgttgtgatacataaaaatttttcttcacgaagcatgaaaagaagggaagtgttttttcgtcgagactcaaaaatggtacgtgtttaaaagttcatgcatcgtaaagaattgaatcataaaacacgtatattacatacaggattacagaatattacacaaatcatatatcaaatgttttttgcaatagcacttagtcttccctaagtactatctctgcagcttcgttcagcagtcgatcgacaacctgatccatgatagcttcggccatctttttaatttcgtcgtcatctttaagctgaaggcccgaagatgctttagtaggatctgagtgaggacgggatactattacatcactatt

SEQ ID NO: 53336 - DNA, 376 bp, Zea mays
tgccactgccagctcggtatatcgtatataccatcctttcataatttcattctctctcgctcacggctcgcccatgacgcccaaacaaaggaggagaaagccctaagtggacgacggaaaagttacttggttgggtgaaggaaatggcggaaaaatcctcgacgatgccgacggctctttggttctatacctaacagtgtctccaactgttatgtaaaaaaggttttaaatttcagtttaaggaggtattagaaaaaaaacacatctccatagtaccctaaacaaagttgctaaattttagaagctgctattttatcctttattgtcctcacatttggcaatcccagagagagactcctcaaagcacttttttcgt

SEQ ID NO: 53337 - DNA, 394 bp, Zea mays
agcttggaaaaatctggtatgaatcggtggtaataactatccagtccaaggaaacttcggacttgatgtacagtggttgggggtttccactccaaaaatcttgactttgctgggatccaccgcaatccccttggcagataatacatgtcccagaaattggatctcctccagccagaatgcgcacttattgaacttagcatataattggtgttcccttaagcgcgttaatacgatccgcaagtgctgagcatgctcctcttcattcttggagtatattaagatatcgtcaatgaataccaccacaaatttgtccaactcgggcataaataccgagttcatcacatatgtgaagtggacaggagcatttgtcagtccgaaagacataaccagatat

SEQ ID NO: 53338 - DNA, 389 bp, Zea mays
cttgcccaagctactgaagctgcagggccgttgtctatgtattgtgggatgtaacgcggatgatactaaacaatatgcatgacctgcttcagctgactgggaaattcaactacagctatttccttttgcttctggattggcatatagcactttctggaggcatggcccttgctttctgcgcagaacaagcaaaacagtttccttgattgatctccgaatattgcggcgaagcccctggcgcctctgccttttggagctggcgtccggaataaagattgttgatgcccccaagcctcagataggatcttcctgcgaaggccctggacatttcagaaaatctgaaagcctcctccctactttgataaagtcattgtcaggacgaatgtact

SEQ ID NO: 53339 - DNA, 399 bp, Zea mays
  unsure (1)..(399): unsure at all n locations
agcttgtgcaaagtccacttgaactaattttctgagaaacccgcccccactgcaacatgacaccagaaggtccaactcaaaaagcaatgcatgnttcgataattgcagagcatatcagtacaagggacctggttcaagagtttttggctttcaaggtttttcctagtgtaaaagagtgggaaatgccgaagctgaagggggagaaaaaagaaggtgaacttgtgcgtttaccttactacttcaagtttaagaaatactttaaaacaccttgccaagagtggctggatacaattgaagtgatgtgcaatgaaatacttggcaattattccaaaaaagaagatcagttgatgaccgcagccttcggcacccgtcccaagcgaagactaaaccgagtgctgg

SEQ ID NO: 53340 - DNA, 284 bp, Zea mays
taggaccttaaaactcagcttgacaagcccgctggaattaatcttccgagaaacccgacctcgctgcaataagacacccgaaggtccaacacaacaagcaatgagtgaattcaaaattattgcagacatatcagcacaagggacctggttcaagaatttttaacattcaaaagttttcccaatttgacaaaatgggaaatgccgaagcttcagggggaaaaaaaagaaggtgaactcgtccgtttaccttactatttcaagtttaaaaagtactttaaagcacc

SEQ ID NO: 53341 - DNA, 401 bp, Zea mays
  unsure (1)..(401): unsure at all n locations
agctttaccctaaatagggattaaggggtattacttaacccaaattgaggaaacctaaatactttagggaaatagttataaaatatcccaaaaacaaagtgaatcacctttatacccctaagataccagaaaccctaattggaaccctgggaaaaccctaaaactaaaccctaggggcctatgtgcaaaattagtccacttttgggctaaagtgcaaaaaccaagccaaataagtattttaagtcatttggttcacaaatatgtggacttaaaggccaaaccctaagttttggacttaaatgcaaaatggacctcatttgagttctatactaagtctgaaattcagggttatagacccaactttggggctgtgtaactttcanaataatgagaattcatat

SEQ ID NO: 53342 - DNA, 403 bp, Zea mays
  unsure (1)..(403): unsure at all n locations
tggaggcgttcatgagaatactactttgcgtaggttccttcttttcttcttccatcaccttgaatgcgacgggttgcaccttgggtgtggaggtgccgccttgctccagttgacaatatgtttggagcctttgatcatcaactcaaagctcacaaactttcctattacttccttgggagacattagcttgtatctaggatcaccaccaattaattgaacttgtgtgggattatgaaaaacaagtgatcttataataaccttgaccatttcatggtcatcccatttggtgctcccgaggttgcgcacttggttgaccaaggtcttgagacggttgtacatcgcttgtggctcctctccttgtgtgaggatgaatcgaccgagcttnctctcgatcgtctcccac

SEQ ID NO: 53343 - DNA, 390 bp, Zea mays
  unsure (1)..(390): unsure at all n locations
agcttgtgtactagtgttaaggtgtctttatcaactttgtacgacttttcctttggtcatatatggttaccatttcgcgcgggggagaaggatgataanggtgtgtttggttggaagtataaggtgggatggaagagggcggccacattttctatagtgtttggatgagagtcacgtgggagtgaggtgaacatcaaagctttggtggcaacgtgatcctaaaaaattgaggggacgatgtcgccccgacccattctacttagacctcaaaccaaacacatcccaagtggccaaaaaatactaattgtactttactgtttacaaacagtgaaatatgttgggacacacttaattctgtacatggaaattgtgtcggttatttgtttgcgc

SEQ ID NO: 53344 - DNA, 343 bp, Zea mays
gcccgattgtctctggaaactcctcctcttttattcccccattggctcatggtaaagggagatgcttatgtaaactatatcaccgcctaaatatataaatgatgatgatgatatccatgatgctgatgatgatggctattcctatgatgatcttgctaaaatgttaggtgatgccgatgactacatgcaccaagaaaaagaaaaattcactgccttgaaagaattgtgtataaaccttcaagtgtcttttgaggagcctaagacctctcacaatgaccttaaagaaaattgtgagaagcttgctgatgctcaaaaatcatatattgtgcatgaaggagacgtg

SEQ ID NO: 53345 - DNA, 393 bp, Zea mays
agcttaacagaagagttgtccgtcatttggaaaaggagctgatggaggcagtggaacttgatctcaatggcctaacaaaaaatggatttggcgcaacaaatttcccgaagcagaaggcaacaaaacagttcaactaaatgtcaagccaaatgaggccgcgagagatttccatattgaaaaagagaatgatgaagtccttcattgttcacgtttgcatggtggttctgaacacaatgagggacatgcagattcagggctaagagctcagcgcctagagaatcaaggacatccagtgagtcctcttagtggtaacactagaaaaaaggctccttatactaagccgaatgttgtaaacataaagaatcctactaagaaacaagcaaacaatggttt

SEQ ID NO: 53346 - DNA, 323 bp, Zea mays
  unsure (1)..(323): unsure at all n locations
tgccaccgggtggcccttccatggggagggggcgccttgcttcaattacgaaatgtttggaggctttgatcattaacttaaaggctaaaaaccttgcaatccctttcctaagaaacattaatttatatctaagagtcccccgttttaattgaacttgtgttggattatgaaatacgaaggattctagaattacctttgccatctcatgggcattccacttggtgcttccgaagttgcncacttggttcaccatggtttttaaccggttggacattgcttgcagctttttctctttgttgatgacgaaacgaccgagcttcccc

SEQ ID NO: 53347 - DNA, 396 bp, Zea mays
  unsure (1)..(396): unsure at all n locations
cacctgcngcatgcagcttaacaacttaagcctgtggataatataggttttgctcttaatcgaccatgaaactattatatgaaaactgaaatattctttatttcacaaaatagaatttaaacggaaaaaattgttatcaaggtaggatatttgtcaataaatgtgcttcgactctggcacagtactgttgactgtgcgagcttcaaattgctctctgagatccctttggtgcgaaacatattggctcccttctggctgttgaacttgttgcancggaggtggaagcgaaggccgttgccatgaagcttgaggttgacttgccgaagctacagaaactgcaagatggttgcccacatatttcgggatgtaaagctgatggtatgaagcaatatgcat

SEQ ID NO: 53348 - DNA, 397 bp, Zea mays
agcttgtggaaagacaccgaactctattttgcatgtcttaagtgaagggcaaggtggaacggagggaaaactggaggaggcgcgcggcgacgggcggaaggctgtctaattccaagcatgtggaaagacaccgaacctaaagtgcatgtcttgagtgaagggcaaggtggaatggagggaaaacgggaggaggcgcgcggcgacaggcggcaaggctgttcggccttgcgtttgggctgaaaacgaggggttcgccatggcgcacgggccgaaaactgaggctcgggcacgaccccgaaaataagctaagtccaagcatgtggaaagacactgaacctaaagtgcatgtcttgagtgaagggcaaggtggaacggaaggaaaacgggaggaggcacc

SEQ ID NO: 53349 - DNA, 397 bp, Zea mays
cctaagtttagaaaacctaaaggctttagggtgaatagttttaaatgaccccaacaataaaggtgaatcacatttatacccctgaaatgccagaaaccctattggaacccgggaaaaccctgaaatcaaaccctaagggcttatggggcaaagggaagaacctttggactaaagtgtaaaaactactatgtttaaacatattaagtcatttggttcacaaatatgtggacttgaaagctaaaccctaagttttggactcatttgcaaaaaggaccttgattttgattcctatgctaagtctgaaatcagggttataggcccaactttggggctgtgtagctttcaaaataatgagaattcatgttaggtgaccgcatcaaagttgaagacctaacat

SEQ ID NO: 53350 - DNA, 378 bp, Zea mays
agcttctaaagggagaacacattttatgactaacaaatgttcattttgagaaagacaggatttgtagcgcatgccaagcaggaaagcaagtggtgcccatcatccacacaagaacatattaacgaccgacaggccactagagctcctacacatggatctattcggcccgattgcttacataagcatcggcgggagtaagtattgtcttgtaataatggatgattattctcgcttcacttgggtgttctttttacaggaaaaatctcatacccaagaaacattaaagggattcttgagacgggctcaaaatgagttcggcttaaggatcaagaaaattagaagcgacaacgggacggagttcaagaactcacaagttga

SEQ ID NO: 53351 - DNA, 273 bp, Zea mays
  unsure (1)..(273): unsure at all n locations
acccatgtgagacttagcagataagcatgtgtcgagttcagctctattaaatctaccaagtatagctgaccctctaacacaccccttaatgctattgaatcatcacttcttctaaagatagtgacacctacattagttaagagacagttgtagcccattttgcataattgagatacagaatgcaaattgtcatctaatgaatctacgagaaaaacattgganataaaatggtcacgagatatagctattttaccaagacctttgaccaaacct

SEQ ID NO: 53352 - DNA, 381 bp, Zea mays
agcttattacatgcgtgttttaacgtatttagtacagacactaatccacaaaattgcattgtaggtaatcaaaatgaatcgaactcgctggaccaattgtcgatgctaaggaacgtatgaggcaaagggatatggaaagatatgctgtgatgactgttgaagaaaagaatgagaaaaatatgaagcgtcgtgaagcacgtctacgaaataaaggactattgatagagccactctcatccagaggtgatgaaaagctaatttttattgctatacctacatgtttgtactatacaaagttgatgtgtagccttttgtaaatgggtgacatatgaagaaaacctttatacggaccaagcatgtgaggtgggtacctctatttat

SEQ ID NO: 53353 - DNA, 397 bp, Zea mays
agcttgccttcgcctcagtctatcatccgcagtccaacggggtcgtggaacgcgccaacgggaaaatcttcacagctgtcaagaagatgctccttgatgaaaagggcagatggaccgatttgttacctgaggcagtctgggcactaaatatgactgagtgcagggcgaccgggtttactcccttccgccttctatacggatcggaggccatgacccgcaagaaataaagcacgggtccccgcgaacagttccgtcagctgtccccgacgtggacgagccaacttcaaaggacctcattgacggagaccgagtcttcgccctacaggccctaaacaaataccaagcccagaccaaagcatggcgcgaccacagtgtcatcccgagggagttcagcgag

SEQ ID NO: 53354 - DNA, 411 bp, Zea mays
  unsure (1)..(411): unsure at all n locations
tctaaagggagaacacattttgggactaaccaatgttcattttgagaaagacagggtttgtagcgcatgtcaagcagnggaagcanagttggtacccatcatccaccagacatcatgacaactgacaggccgcttgagctacttcacatggatttattcggctcgattgcttacataagcttcagcgggagtaagtactgtctagttattgtggatgattattctcgcttcacttgggtattctttttgtaggaaaattctcaaacccaagagactttaaagggattcttgagacgagctcaaaacaagttcggattaaggatcaagaagataagaagcgataacgggacggagttcaagaactcacaaatagaaggctttcttgaggacgagggcatcaagcatgagttc

SEQ ID NO: 53355 - DNA, 396 bp, Zea mays
agcttatgtgatcatctgtcgtcttacaattatgaactaaaatatttcaacattttgagtgctgcaaacaaagagttaattctcattgaactcaagaacagctgggaacatatggagtcttttaaagatgttgttatctgctcataccatgcagtacttttcctcaacaagtggttggtttaaatactagaatagaactacatccatgaaaactattactgctcatatccacgacaaagcgccagtgaacgtgtgtgcgacgaggagggaccgcctgttgttctgagtccaaccaactagacctacaagtgaaaggtatgctatataatatggtgctattttgtcgtgatccagaatgttattgtaggccacacacaaaacggtgaccgataaaat

SEQ ID NO: 53356 - DNA, 403 bp, Zea mays
ttatcaaatggacgtgaaaagtgccttcctcaacggaccatatcaaggaagaggtctatgttgagcaacctcccggctttgaagatagtgagtaccctaaccatgttataactctctaaggcactttatgggctcaagcaagccccaagagcatggtatgaatgccttagaaattttcttatcactaatggcttcaaagttggaaaggccgatcctactttattcactaaaactcttgaaaatgacttgtttgtatgccaaatttatgttgatgatattatatttgggtctactaacgagtctacatgtgaagagtttagtaggatcatgacacaaaaattcgagatgtctatgatgggggagttgaagtacttcttgggatttcaagtgaagcaactccaag

SEQ ID NO: 53357 - DNA, 390 bp, Zea mays
tttattccgtgatgaaaccataacaccggaagaagccataattggttcaatttggaccctagcttcggtagaagacaaaaaggcttgcaaaataacaaaagacacctaagggaccatgcttcaagcaatatatcacatcaataaatatcaagctgaaacaatgaaatggcgagacacaaagggaagatttaagaatatcaagtcaggacacttggtgcttctaagagtggccaacccatacatagcggggaagcttcagctttagtgggaaggtcccttcttgggggtgtcttcatcaagacctggatcatacaggttgaaagacttggacggtaatgacatttcaagatcttggaacgcagatgagctttggagatattatgtgtaaac

SEQ ID NO: 53358 - DNA, 378 bp, Zea mays
agcttgcaagagacacctaactgtgtggtgatccttgccgggtcttagcaaaccttgagactaacaacgagcactcattcggtctgaatgaccaattgagaaggaaagggatcaaatagacctcacctttatgtcctcctgaacgaggactagggtatttggaacctgacctcggggaaacccatcacgggggtcactcgccaatcctaacttgatttgattctccatgtgtaaaagttcacttgctcatattgatttgaggttgctaccgcaggtctttcgcattagattgagcaactctaagcaaggagaactatcttccgcactccaatttaattttcatgctaaccgcggacttagtgcaagctaaactttata

SEQ ID NO: 53359 - DNA, 337 bp, Zea mays
  unsure (1)..(337): unsure at all n locations
gcttgcttctgacaatgtaagaatctggtcgtctgctggactatcatgaatttgtcaagaataaaccgtttcttaataaaaaccgtttgattggggaaaaccatatttcagcggcctgctaacctgttagccaacaatttaatcaccaacttcgcgaaactatgaaccatactgattgggcggaaatctctcacactagtggccccctccaccttgggcagaaatgtaataaaagctgaatttagcggacccaagtttctgaaatttctagcccaaatgcaatagactgncgccatgaaatcagccttgatcaccgaccaacaacttttgtaaaatc

SEQ ID NO: 53360 - DNA, 401 bp, Zea mays
agcttcaagccagattagtaaaaaacatacttatgaacaatagtgcaaaaaaatattacaaatacacccagcactaaaatgagatgagtgtatgtacctggcaacttgaaggtattaagcccataccggtgagtggtatccttttccaagtcttttggaaggttgatgatttcaatggcatcaaatgggcatttctgcaacagagattacagaagcaagaagtgcattacatcaaataggcacatcatacacagttacctggagtaagttagaaatctacctttacacagataccacaaccgatgcacagttcctcagaaatgaaagcgagtttcgacgccgaagtcacttcaatgcaaagcttccctaaacagtaaaacagaatattgtcataaaagtga

SEQ ID NO: 53361 - DNA, 359 bp, Zea mays
ttgcttcgtttttacacctgattattcttctgaaggtgaaactttagttgttctgcttgacttcgctgctgatttggacttcttctcttcttgtccctttatagtgctaggtagcaataatggcacccttctcgctcttcactgagtgaatggccctttccgcttttgaagctggctgagacgacaagggcgttgttggaaaccttcggctagtctgtgtggacaatgaatccatcccaggagacctttcaaattttgagatgcagtgctttaagcaaagaaccacctgaccatgaactacctgtaatacgcacaaatgcacgagcacgtgatggtttctgcgatcttttactgactgg

SEQ ID NO: 53362 - DNA, 376 bp, Zea mays
agctttgatacacggattaatttttttatcctgggcgtcagaactgaggtgcatggagattctctggtgtctcatcacataaaagaatgggattgttcaagtgattcaatgggaaaatactgcaccgtcctccgaaagctataagataaattcgagggtctggagtctcatcatatataaagagatcggaacacggcggccgatgtactgtccaagctcggattcggtcggactcatgtcccgcccggggtcttcgtgcaagaaattctccagccgagcatcttgacggatcaaatagaagagtgcaacatcatatatcaacccgagtcagactctgatgactggagacaaccgattattaattatatacagaatg

SEQ ID NO: 53363 - DNA, 244 bp, Zea mays
acacaggcgactagaccaagccccaatagaatcacatcaatccaataataacctaacctggagcgggagcgattacatgctgaaatgcagttgcttgctgaaaaaaagacacgggagttaacctgcaatatgacgaataaaagttgagacacaccatcgaagtgtagaatgcaacccatcaacaatgcttgcgaagctacaaaagcattcctaacggaacgcagacgaagttctgaagctcaaa

SEQ ID NO: 53364 - DNA, 391 bp, Zea mays
  unsure (1)..(391): unsure at all n locations
agcttatccctgacatctgatgcccgtctgcttatgaccaacgggaattagccatataccgacgggaattagtaatccccgtcggtttagggcttatcccgtcggttctaagccgacgaaaattaattggattcctgtagtgggctagagtctattcgaattttattagcctatgttgctcacctttccattaagctgtaccaaatggacatgaagagcgccttcctcaatgggccaatcaaggaagaggtgtacgtggagcaacccctggcttcaagtatgacaggtacccaaccatgtgtagaagctctctaaggcgctctatggacttaataaagccccaatagcatggtatgaatgccttanaaattctcttatttctaatgctttc

SEQ ID NO: 53365 - DNA, 371 bp, Zea mays
ttatcaaatggacgtgaagagggccttcctcaatggaccaatcaaggaagaggtctatgttgagcaacctcccggctttgaagacagtgagtatcctaaccattttataggctctctaaggcgctttatgggctcaagcaagccccaagagcatggtatgaatgccttagagatttccttattgcaaatggcttcaaagtcggcaaggccgatcctactttattcactaagactcttgacaatgatttgtttgtatgccaaatttatgttgacgatatcatatttgggtctactaacaaatctacatgtgaagaatttagtatgatcatgacacaaaaattccaaatgtcaatgatgggggagttgaaata

SEQ ID NO: 53366 - DNA, 392 bp, Zea mays
agcttggcttgttacatgttgctgttggggcaatgcttggctttttacctccaacaatacaatagggatttcaaactgcaagagtgtgcctggaggactggtgaatgagcaatggaaggtggaagatggggatggggatgcaaggaggaaaaggatggccttgtccttgtctttaatggagggcaagggaggctaaggaagagggcacacgtctgctgctgctttggttttcattttggcactgtttggcacagcttattttcagcttcttcacaaatttaagctgaagtcctgccaaacaggcagcttctgcagcagcttatcagttcagctgcttctcaaaatgaactaaaagcagccaacaagcagaagctgctttttaccagcttatc

SEQ ID NO: 53367 - DNA, 321 bp, Zea mays
cctcactctgtcgagtggcacagtagttggagcgacacaggcggcactgttttcttgttatgtcaacagtggagcggccaaatgactatggtccccgacagtagcccccgagcctcgaagggagtgttgatactctcttggaagctcttgtcgcacttttttgcaaggggaccggcctttctcggatgcgattcgttccggtgggtgcccgcgatcgcacccgtcgggtgtaacccccgaggcctccgacgagtggatttactccttcgaggtcttaacgcgtttcgtgatgcttccggcggactggtttggtcctcatgc

SEQ ID NO: 53368 - DNA, 391 bp, Zea mays
agcttgtgattttaccaattgaaagatcacaatctctacttatgaatttccattaaatatcttaagagagattgtattattaaaaaagcaatagttcctatttagcgacctctagtatatgaatgacaagaacgtttctaaaacaaggaaaccttatgatatgaactaaattacccttacaagcatcatgcataacatcaattgtaaaaaagatgaaagtagcatgattatttaattaagtttacatggaaagtttaattcatagcatggtgagtgattaataaagaagactcaaaaccaatttaaacaagaatgaatacatcacatagtattggtccgatcttctttgaatgttgaatggcacactccatttgggaaacacattctcatg

SEQ ID NO: 53369 - DNA, 385 bp, Zea mays
agcttctaaaagattttagagcattcttttatagtcgaaggaatcttcgcccttctcctcgctcttgagagatcctttgttcacatctttcgaattgttagactcaagtcgagctctaatactagtcgatcgatagtcgtctagaggagggtgaattagggacacctaaaatttaaatacttaaaaataaaatatatcctaaattagtggttagagcaagaggaattttaatccaagttaaggagataagttctcttgcacttgttgctcttataaatgcggaattatcttaagtagcaacacaagtgatttaaagtgaagatcactccagagaactctgagagagagagagagagagagggaagattcaattgcgagccaaacc

SEQ ID NO: 53370 - DNA, 385 bp, Zea mays
agcttattatggcctaatctcacactttaacagatgagacattgatacaaacaagccagtgttcacttacaaaagcttcacactacttatgaggtggaagaatctttttggatcatttttgtaacctaaaactcatcgtgcacggatcggatgcagccagaaacacgatcatacaaaagtagcggttacgttatgtccaacaagagagacaagtaaggaatggaatcatggacagagacaaaggaagatagtatattactacttttgtatggtttgatggtacccaacaggaaaaccatatgaattcccaagcagagtccatttggagtacggtaacccatgtatagataagttctcgcttctctgtccatccaaaataagagca

SEQ ID NO: 53371 - DNA, 313 bp, Zea mays
actcattatcccgatcgagaccatgggcatgaacaaaggcctagaccatcccttacacgcaaattgatcgtacaaagaatctttgctccactaaatgtctcttttagcacatataattgcctaagacaatgagtttctcttgcctatgctactccgacgtcttccaaatctcataaagatgtatcatattcttttggattgccaatgtctaaagtatcctaacttatccatactcctgtctagaacttaattgattaaatagcgcatatgttccctatggtgcatgattaccttcaattaatactccttttat

SEQ ID NO: 53372 - DNA, 265 bp, Zea mays
tttcctctaaagggtccccctatatcacttttccgcctattttgtcccatatttattcatgtgcgcaggggttcccccttaatactccccctataccccactaccactataaaatatcatttttctataccaactattaatttgttatctactaacaattactcgtggacccacaaaacagtgtgtacggtgatgaacagtgacacgctacatctggggggagagagaaagggaccgacacgtaaggggcgctgtagggggcacc

SEQ ID NO: 53373 - DNA, 329 bp, Zea mays
ccatgctctatgagcctgacgcagcccatgaaggctttcttcacattgaggaccttgccatcagcattcttgacaacaaaaccaggaggttgatgtacatacacgtcatcaatcagatcaccattcagaaaagctgatttaacatccatgtgatgcactttccacccattctgtgcagctaaagcgatcagcaaccttacagttcaatccttgccactggggcatatacttaatcaaaatccaccccctcacgctgaacataccccttagcaccaacctagctgtgtgcttatatatctttccatcagggtctcttttactttgaaaac

SEQ ID NO: 53374 - DNA, 396 bp, Zea mays
agcttgtgaaggttcttcatccccacatgtgctaagcagcgatgccacagccagcctatgctagtcttagcaattaagcatgcatctagaccggccttgtggggacagatatcccccgggtccactggaagggtaaaagacctcacgagaggcccaagggcccaataaatcgtaaggccattccttcgtgggcctggggagggacaatcagtaaagcaggttgacgtaaggccggattggtgtaagcccggacggcccactgtggcggaaccgcccgaattattccaacttaagtgcctaagtctcgccttaaaggctagaccacacttaaataggaataacccgtcagtccctcggatctagtccgataaagccacttatccaggatcgaatacc

SEQ ID NO: 53375 - DNA, 409 bp, Zea mays
  unsure (1)..(409): unsure at all n locations
gctttctctatttcactcaattaattagtgcttctataccttctntnncaccgggccaggtgccctanacccatatttttcttctgggtgctaccatcctttatttagcgtaggaaaaataagagttctcaggtttcatctactgactatttttcttgcttttatttagctaaggcccaatttagtttttgttggataaaaccctattaaagacttagactagggtgctataaaacttatgcagtggaaaacatgtattcctatctacttaaaatttctcaggactggttcaatagtataaatatttttccactattaattggaaatgagcagattattacattaattcaaaagtcctataatcaactgaaacaaggtggtttcctattttaatttgatgttagatata

SEQ ID NO: 53376 - DNA, 391 bp, Zea mays
  unsure (1)..(391): unsure at all n locations
agcttgtatgttccgggcttcaaaatcttggttatgatgaacggcccttcccagggaggcgtgagcttgtggcgccctcgggtgtcttgcgtaccgacacaaagtcccccacctggaggtctcgggaccgaaccccttcggcgtggtaacgtcgcaaggactgctgataccttgccgagtgtagtaaggccatgtccgagcctcctccagctggtccagtgagtcttctcggttggtccgattgcttcggtcgtcgtacgccctcgtcctcggggatccgtattctaagtctgagggcaagatagcctcggtcccatagactagaanaaacggcgtgaaacccgtggctcggcttggtgtcgttcttagactccagaccaccgaggggagt

SEQ ID NO: 53377 - DNA, 399 bp, Zea mays
ttctttaaccatgtgaggctagttagtgtcagcgataatgtgtttttttcatgtaaccattagatttaccttttgctttatgctgtgcttttggatatagtagtatgcataattatatcactgattttgtttcccattgttttattaaatttccagtttcattagtttttgctttgtctttgcttttaacttcttccatattcttggactctgaatttctcatatgtattgacttgttgaaggatgcgttagaactagagcaactcatcagttacctaataaataaagaaaattctgaaggagtaatattgcttggtcatagtactggatgccaggtatactatttctaataactgctacaagtactactttacaactgtgaaataatataacacaaac

SEQ ID NO: 53378 - DNA, 392 bp, Zea mays
agctttatacattttgaaagcaaatatttcttgatggttctgcataccaatcatccatatatataacctaggcaagctggaaagtgaaattaaactgttgcatgtgctcaaccatctataggcaaagatacatataaagagtgtcggcactcagtagtcttacgttacatgtattcttgccttatgagcataaacatcgggaaatagttaaaacttactgctacaccaattactcatatcagcaaatgaaaagaaaataataagcaggagcaaaatagagaacactacacttgttgctcctcaccaaaaggggaaataacaccttttcttgttcgacatacatgagctatatgagggtggcgatcagatttgcttatggttggtggcctact

SEQ ID NO: 53379 - DNA, 314 bp, Zea mays
taacgtgcattccaatttatattaccttgccccacctgattagcttgtaaacaagtgggaggagcgcctcacatctaaatgtgagtgaccacctttaatgaactactggagctcgctgtattattgaccatcttccgaccacgatgggtttctaatcctaagatggaggtggtatgggctagattttcggcgatgaattattccacctcacttgggtgttcttttttcatgataaggcagaaaaccataggacccttcagcgcttcctcacgagaactcaaaatgaggattacctcaaagtgaagaagattatg

SEQ ID NO: 53380 - DNA, 370 bp, Zea mays
agcttttgagaagctgaagaagctattgacttcagcaccagtgctagctcaaccaaatatcgcaaagccatttggtgtgtattggatgctttacatgcattgggtgcgtactaatgcaaaaaggtcgtgttattgcctgtgcttctcgacagctcaagcgttacgaagaaaattatccaacccatgatcttgaattggctacggttgttcatgtgctcaagatttggcgccattatctgataggtaatacatgtcacatttacactgaccataagagtctgaagtacatttttacccagtccgaactgaacatgagacagagaaggtggcttgagttgatcaaagattatgatctagaagttcattatca

SEQ ID NO: 53381 - DNA, 385 bp, Zea mays
ttatcaaatggacgtaaagagcgctttcctcaatggaccacatcaaatgaagaaggtctatgttcgagccaacctcccgcgcgtttgaaagatagtaagtaccctaaccatgtctatagctctctaaagcgctttatgggctcaagcaagccccaagagcatggtatgaatgccttagagatttccttattgcttatggcttcaaaatcggcaaggccgatcctactttgttcactaaaactcttgacaatgatttgtttgtatgcccaatttatgttgatgatatcatatttgggactactaacgaatctacttgtgaagaatttaatacgatcatgacacaaaaaattcgagatgtctatgatgggggagttgaagattttct

SEQ ID NO: 53382 - DNA, 387 bp, Zea mays
agcttcaactccatctatattatggattgcttttgaggctggccaatttccttcggcccttctggcagcttcctgacttccatgaatacaatgggcccttggtcccaaggtatcttcatgcaaagataagctggatgaaaaattgcttctaaggcattgagagtaccacgaccaatgattgcattgtaagggtattccatgtcaacgatatcaaacacaacttgttcagtccttgtgttgttgataaatccgaaggtcactagcattgtgattttgccgagtgctacaatctgccttcctccgaagccgcaaaggggatgtgtggcatcatgaattttatcttctggctcttgcatctgtctgaaggccttatcaaatatgatatca

SEQ ID NO: 53383 - DNA, 369 bp, Zea mays
agtaccacatcactttttatataatcatggcatgaaccaattgtaaattacacacggaccatacgtgggaccttaagcttacccagcgttgaaccattggatgtagtacgggtgaggatgtggaaacgttttcagacgaagcttgtctaccatggtggtgctggctaagttgttgcagcttcctccatcaattataatacaacaagatcgttccaaaactacacatttagtttggaacaaatcgagtgctggttttgctcagctttaataatatgggcactcaagacacgttttacaacgaggctctcatagtgttcagcatgttcagccccaatatgctcttcattatcattctacttttcagcatct

SEQ ID NO: 53384 - DNA, 382 bp, Zea mays
agcttgttcgattttcttgggaagagataattccgaagccgagggatgatgaagttatcgtctttaaaagcttcttcagagcagggctttaattccgctaaatgacatgataggggaagttctaaagaattttgaaatataccttcattagctgacccccaatgccattgttagacttagtgtgtacatatgggctctccgaagccaaggaatggattcgaatgtcgaagatttctgtcgagtgcacgaacttcactaccagacgaaggctagagcagatggccttcgcaagaactttggctgctacaattttgcgtatcagatggatacaaaggccctggttataggctatcataccaagtggccgactggatggactaat

SEQ ID NO: 53385 - DNA, 379 bp, Zea mays
cttccgcatagtgacatgtctcaagacgaaggagtgaaccgtcttaaagatgaaatgaccaatagacccatgatagtttgtgtcataattgctattgattgtaaaggcataaatgtaatttcacacaggctgcgccctgtgcctataaatagatgaacagtacccccgtactgttcacgcaatctggtaatcacttgcatgatacacttggaatattgccttctgtcaagacgaaggtataaatgtgattaaatgttatgttttaacatttaagttcgtataatgaaattatatgaataagtttatgtgttttgatatattattccttcatgttttatattttatatttcatctctcactattttacaactctagtcac

SEQ ID NO: 53386 - DNA, 390 bp, Zea mays
agcttgaaggctaagacacaggcatctgatgagaccattgctaagtgaagaagtccatagcagaaaatagtagcctccttcgtcagatttaactaaattgtagccaagtgcctccttaaatatgcctaccaacttgatggtgtcaagatacatcacataccagatggaggattaaagttatatgagcctaagctacatgattattaggatttatgttattggagtccaaatttgttttttgttgaaatacttgtgctagatttttttggatggatgatatactttgaaattagataatttcggcattacaatttattttgtttaatgacatattgtatgcatgaagaatcaatcatgatcgcaaattgtatggatttataatatttcatg

SEQ ID NO: 53387 - DNA, 257 bp, Zea mays
tgttggatgcaactgtgcacgacgaggggtctcaaccttacagataagggtgttatcggatccaatacggaccaaaatcactgaaaccaacattggttttatatttttattcggactcgaattcgaatacggatatcttcgaatacaaatacaatacggattgttctcgaatacaaatacggatagttgtgtgtcgaatccagaactaatcggacacaaataccgaccgtaacacatatttttgtcgatatcatgtg

SEQ ID NO: 53388 - DNA, 393 bp, Zea mays
agcttggtcaactaagagggaagtccattttggttttccactgaattctttttaatgtcttagtgagaatttttcaagatttctagttgacttatggggcgaaggttatctttcatttctttccctctatttcctttatgtttttaaagtgggtgtgaactacaagttgtcttaataaatttccaaaaattctgtaaaaattatagtggctttttactggtgcataattctctgtcctaaaattttggggcttaaagagtgaatagttctctctagataaaattatcaaacattagggcggaaggggtgttttgaactacaactacaatttaacagtaggttattctctaaaacttatttttgctggcattttgatgttatgacatgactttg

SEQ ID NO: 53389 - DNA, 351 bp, Zea mays
acctccggacactttaatctcagctggcctatacacagttggttcactgggcgcttcctggcttaggtctgacacatagataactacctgcgcgcaaataaaacgctggacctatggaggggcggccccttgcttcttcgactggatgggagaacatatacggcgtgaacacgcctggctcgaagaatgttctgccatacaagcatagcattaattatacaccgttataggttacatgtacaacgatggccacctcgagaataatatctagcataatcacttactagctgagtgtgagaagcgatgacacctgaattgtgatcataatacttcatgttactcctaacatta

SEQ ID NO: 53390 - DNA, 391 bp, Zea mays
  unsure (1)..(391): unsure at all n locations
agcttatgggctaatatcttgtgttgcctcgntttttatatcctatagcaatcaaaagcgagtgaccaacaaaccgtctactagagatgcaatgaatccgattcgggtcgagtgaagcaaaaaactgcgtgcaatagcacccatgaagccttctcatcgggtttcagatggccttttacttaatgtacaatttaaacaataattcaattataagcaattactcaccaacaataattgagttatatctatagattttaagccttctaacgttcagtagcaacaaaacatttcatcaatcattagccaagttacttattcaaaataattactattgtatcctaatcatttttgtgcaaaatgaagaatgaaccaaatttcgggtcgggtgtgg

SEQ ID NO: 53391 - DNA, 272 bp, Zea mays
gtttagaattgtgtggaacgcctattattcgcttaatgcctaatcccaccgaaagctgaccaccttaatagataaaccgtcagtcccttggatctattccgacaatgccacttacaagatcaagtaccacctactcactcgaaggtgaagcatagagcaaatacaataaagcataaaacccttaaattaaaaaagacttaatgttattacaacatcatcggagttttgcaaaagtaataacaaattgttctcagtgcagcggaaattaacta

SEQ ID NO: 53392 - DNA, 386 bp, Zea mays
agctttcctgctcacaccttctgcgctgtatcaaccttcgtattattctggtctgctgtgataccgacttgagtccgaagatacctgttacacattatactccagaaatactgtcaaatcctgtttttgaggaccttcgtaagccgaaggcccccaacagtagcccctcgcaatattaatttgtttaaaataataaatttagattgcgacatggacgaaggctttacgccgaaggtccgaaaaaacaccttccctttgctagaatagcaacattctctgacaagtggggtctttcaattttcaacgcactgggcgtataaatacagtcataccgcaaactcatttggcacgctctcttgccatctgctcccgctcacttcaatttt

SEQ ID NO: 53393 - DNA, 239 bp, Zea mays
aaaaaaacaaaactcattcttgccaaatcacttattgctgcagaaggtttcttcatcctgaccaaggacatttggccgcaatatgtatattcttcttattgcatacataacaatctaaatctgctttgcatgcttcaactagatgctcgatgcacttacagcgatagcaaggtggtggtcttggtttcttggccttgaaatctcgattctcccatttctgagtcgcatcgtgcacacct

SEQ ID NO: 53394 - DNA, 327 bp, Zea mays
agctctccgcaaaggtttctatactattggtgcctctagcctcaattacaagtgagtgtttgatcacaagaaaaaatgcgaaagaaaagagcgatccaagcgcaagagctcaaatgaacactaatgcttttgtgtggagttgggaaaagatttgatctcttttggagtgctttgcaatgaatgctagctcttgtatagtggttggaagctggaaaacttggatgctatgaatgtgggggtggttttctttctcaagattactttctctttataaacaattaaatctatgatcgaagagctttttgagtacaacaacaattcaaagga

SEQ ID NO: 53395 - DNA, 278 bp, Zea mays
gaagacacttgacctgatgaggggcagaagtgttgatatgggtttttataacacagacaggacatgtccgtcctaggtaaaaaaaaaaaaaaaacacacccggctggagtgttggactcaactcctttgattagggagatgggactttgactgattggcgtggtatctcactactaatcatgctgaggcaaggtagcttgcccataataagactgaagctgtcaattatatgtaaaaagtggctttggagtcatgcttttattgatagggaccttggg

SEQ ID NO: 53396 - DNA, 414 bp, Zea mays
  unsure (1)..(414): unsure at all n locations
agcttccacacgcttgccccagtgatcggctattctatgttgaatagctctctgataagtcgctccagcgntttttaggccgaacgacatggaggtataacagaaagcaccgaatggagtgatgaacgccgnttttcctcgttttcttttgccaggctaatctggtgatatccagagtagcaatccaagaaggacagcatagaacacccagcggtggaatctaccacctgatctatcctanggagcccaaagggatccttaggacaatgtttgttgagatccgtatagtcgacgcacatgcaccaatccaccttattctttttgagtacaagaacagggtagccagccactcaggatgtaatacttctctaataaacccagctgcgaccaagcgagccagctcagcgcgaatgg

SEQ ID NO: 53397 - DNA, 353 bp, Zea mays
  unsure (1)..(353): unsure at all n locations
aaacccccgctagnaagtgtgagttctggattagcgaagttctgttcttgggtcatactataaaccgagatttactagctgtggatccaaagaagtagcagcgattctggactggaaagcaccaaaagatgttcgaggaatcaagagtttcattggaatggccggttactatcggcgttttattgaaggtttctccaagattgtcagaccaatgacagccttgctagcaaagaaggttgagttttcaagtggaccctagcttgccaagaatcatttgaaatgttgaagcagaagttgacaatagcaccggtgttggttctgccagatgttcacaagccattctcagtatactg

SEQ ID NO: 53398 - DNA, 457 bp, Zea mays
caagcttggcatcgaactgtgtgtccgagacttattttatattccttcgcactccgaagcgataaacaatgttttgtcagaagaatttctggacagtaaccgaagttattgtggccaaaggcttcgcctcaatccacttggaagaatactctactgccaccacaacatattttaaatcgccttgtgctggtggaaatgggcctaacaaatccaggccccatctttgcaatggccaagtaggctgtattaactgggtaagagatgaaagttgcttctggtctcttgcacagtttttacagccttcatatttttggactaactctactgcatctgaagctgccttcggccagtacaatccttatcgaaaaacttttcccaacaagggcctagacctaatgtgagatccacacagacctgcatgtatctctttcattaattcaataccttcagctcttga

SEQ ID NO: 53399 - DNA, 347 bp, Zea mays
taacaattattacgttctactatgattgtattgaatgtaattatagttggtaatgtggcgcataatgttgtgaaaatatatgatttcagatcaagatccagcaatgccagttgcactaggcagggtatttccaaacacaatccatcgtttgtgtttgtggcatgttcagaacaggtatatgccgtatttaaacgagttgtacgctagatttgaggaagaggatttcaaaacaaggttccaatctataatacatcatcctttaactgtaactgagtttgagactgcctgagcaatgctgattgatgatttccatctacatgataacatcagtctttccagaatgtatg

SEQ ID NO: 53400 - DNA, 200 bp, Zea mays
tggcacctgctcctgctgaagaatgagtcaccagagtaaacgggggaacatcacagcgggctggcaaatgaaataccggccgcgactgagcttaaggcccaagaccagcactgggcgcctcactagctcagcatgggtccaatccgttctagcttaattgaacatcaaaataaacatgggacaaggtatgcaagatcaca

SEQ ID NO: 53401 - DNA, 197 bp, Zea mays
aatagaaaaaaaaaaattgtgggataaagaaaaatatattgtgggggttttaaaaaaaaaaagaaaggggaaaaaaaggaaaattttaaagggatataaagaaataatggagaggtgtaaaaaaaatgagggaagaaatgaaattgaaaaaaaaggaaaaattggggagagtgaaattaaggggggttgtgaaaaaa

SEQ ID NO: 53402 - DNA, 446 bp, Zea mays
  unsure (1)..(446): unsure at all n locations
agcttgtgaagattcttcatcccaacatgggctagttattatgccagagccaacccatattagtcgtagcaattaagcaagtattgagctcagctctattaaaatcaactaagtatagctgaccctctaatactcccttaaatgctactgaatcattacttcttctaaagataggcacacctatattcgtaaagagacagttgtagcccatttgcataattgagacactgagagcaaattgtaatctaaaaaatctacaagaaaaacattggaaatagaatggtcaggtgatatagcaattctaccatgtcctttaaccaaatcatgatttccatccccgaatgtgatagctctttggggatcttcgtntttctcgtacgaggagaacatccttttctcccctgtcatgtggattgtgcatccgctatcaataatccaacttgagc

SEQ ID NO: 53403 - DNA, 223 bp, Zea mays
tacgaagcatacccgcaacaattaagaatccagcatttgcgatgtcttagatgagcgccacgtgtactctatttcttgcaccatgccggagaggccaccagccacatgcttgccctatgctatagaggctgtatcgacgctcgctggcccgctgtttattatatcagcgacgcgtgacatggagggtcgtgtagtagttaggcagagcatcagctttggtcca

SEQ ID NO: 53404 - DNA, 313 bp, Zea mays
attatcatacgaaaccaaaccttggggtgaggatacatatcccaataattttggctgctacagtttcgtttctcagtccgggtcaagctgccccgtgccaacctttcggaaaatatgggccggcgactggatgacagaatggttttatgtgaagaatgatctgacatgtacgaaaagatatcaaaggtattattatacgccctatttggcaaagcttcagccttccgaggccgaatgttgaaatgaatgaagctgccgaagaatgccaaagggccttcggcgttatctgttcttttattggaacgagggactt

SEQ ID NO: 53405 - DNA, 317 bp, Zea mays
aacttgaagagaaatatagtaccttctgctcctctgcctacctgtatcttctctattttgttacggcattcttcttcctaaatgagaagtcgatgaacccaggtgcggcgttcgttgacaacatgttacctgtttgatagcatgcttgctgttaaaatctatttgacatgatggtaagaacagatatgttgccattggtctaatttggctatcctattaagaattgatattgtagacttgatcttacaatttgattgagtttggtatattccaatggtgctaaacgggtatgcaaagatagtggtaaatgaagttga

SEQ ID NO: 53406 - DNA, 450 bp, Zea mays
  unsure (1)..(450): unsure at all n locations
agcttctttaatgctctntctatatgatttatctttctgtactaaacaggaccaccgaccttagactcatatggaatatgtataaagagatgctacataggattgaagaaacccggtggaaatattttttccaatttgcacaaaagcaccggtgcctctttctccagctgttccatcacatctcttctgatttctttagcacacaactgtctgtagaaatagctaacttcagctaacattttccacacagcatcggaaatgtacccacgaaacattataggcatgagcctttccataattatgtggaagtcgtggctcttcagtccattcatcttcattgtcttcaagttcatagatcttctaaaaccagcagcataaccatcggggaatttaatatgcttcatccacttcatcactttctttctgtgcttaggtttcagacaatagtca

SEQ ID NO: 53407 - DNA, 276 bp, Zea mays
cagcttcatagtcgatagcttcggcgctgcttttgatagaatctgccaaaggtatttatttgtttaggatcttcggctacgaagcatacccccaacaattaggaatcaatcatttgcgatgtcttagatgagcgccacgtgtactctatttcttgcaccatgccgcagaggccaccagcaacatgcttgccctatgctatagaggttgtatcgacgctcgctggtacgctgtttatcgtatcagcgacgcgtgacatggagggtcgtgtagtagtt

SEQ ID NO: 53408 - DNA, 262 bp, Zea mays
  unsure (1)..(262): unsure at all n locations
cgcatgtcaagcagggaacaagttggtgttcatcatccacacaagaacatcatgacgactgataggccgctcgagctactccacatggatctattcggcctgattgcttacataagcatcggcgggagtaagtactgtctaattattgtggatgattattctcacttcacttgggtgttctttttgcaggataaatctcanacccaggagaccttaaagggattcttgagatgggctcaaaatgagttcggcttaagtatca

SEQ ID NO: 53409 - DNA, 341 bp, Zea mays
tgtaacttgtaactcgtaatagaaactttggttgaagaaagattgttcctcggacaagtggttaatatttattctctaaaatattctgcattttgttttttgaccttgtattttaacgtaattgagcctgaagcatagttttattgccggtaaaactacatggactcaaaaggtctggattgggaagatgatcagcacagattaagcgatccgacatgtcttgattcagcactgccggttgcaccatatcccaaccttgcagacagtagaccagaacctgcaacgacaggagaagctttctgaaaaattcacctgtgcttgaaccatccgggccttttcga

SEQ ID NO: 53410 - DNA, 307 bp, Zea mays
  unsure (1)..(307): unsure at all n locations
gagcttcgccacccgcacccncacccccgggcctgctctcggtcgtcccagctgccagccggtcactgacgttaacctgagcgcgcgtgagctgagagccgtgcacgcaaccatgttcatgtcaccacaccagcaaccggggtcgcgcgcgcgcggagacctgtagctgtagggccatctatatggtttttttttnttttttgcttttcattgcatcatcaaaatgcaggtgcgccgagtgatcatcgttttcactccgcaaaccgggaccggccggctctagtttactcgtgataaaccgcacctt

SEQ ID NO: 53411 - DNA, 337 bp, Zea mays
  unsure (1)..(337): unsure at all n locations
ttctaaagctctttatgggcttaagcaagctccacgcgcgnggnatgaaaggcttagggatttcttgctttccaaagacttcaaaattgggaaggttgacactactctattcactaaaagaattggcaaagacttatttgtttgtcaaatctatgttgatgatattatttttggatctactaatgaattattttgtgaggaattcggaaaaatgatgtcaaaaaaatttgaaatgtctgtgataggagaattgagcttctttcttggccttcaaatcaaacaattgaaagatggaatttttataagtcaatcaaaatatttgaaggacatgctcaag

SEQ ID NO: 53412 - DNA, 227 bp, Zea mays
  unsure (1)..(227): unsure at all n locations
cgtgcgcgctccatcctgnctgatgttgtaatgcacctattgttttttttttcttggataagccattagtagccgctggatacccatctggattgcgggcccacgactttgtctggagggatggttaagaccgttagtccaaaaacaccgacaagtaccctatggatgtgtatgggcatgcaaacatgagaatactgaaaagtgtaatgaccacaattgtctgccct

SEQ ID NO: 53413 - DNA, 346 bp, Zea mays
taagactaagacttgtcaagtttgacccgagttaagctttttcactcgctttattggcggttatctcaactaggttagacaagccctagatgcaatacaaggaattaaatatgcaatgcaagtgacaacaccatttgacatttcacataaaatttctgagatcaagaatatttagttcattcctcaacatgcaaaagcgggtcttatcaagaggcttagtgaaaatatccgctaattgatcttccgatctcactccttctaaaacaatatctcctttagcaacatgatctctaaggaagtgatgacggatatcaatgtgcttggtgcgagagtgttgtacaggatt

SEQ ID NO: 53414 - DNA, 368 bp, Zea mays
  unsure (1)..(368): unsure at all n locations
gagctcgcatatgatcaatggaatatctcctcttagccgttgtacaacatccatacggagatttctactacatagttacctgaagaaaggcccaactctgcaatngctgtaagattacggngtggctacactagcgcaaaacaaaattntcaaccccataatgccaagaactactgcggttataggtcatggaattaccactagacgcgcagagcagcggaagacgtctcgatgtagacgaacgcgtcgagcagtgccgtgcagtcgccggcgtccttcacgtcctcgcacagttcgtccaagtgctccagatgcagcacctccgaggtatccacacatacagggaggaagcgccgcgtaccgaactg

SEQ ID NO: 53415 - DNA, 292 bp, Zea mays
aaaaaaggcagagggggaaaacagcgatatatatatgggaaagaggccactcaaaaagcgggaagtgaataaagacgggcagaggtgggccatgcgatcgcaaaagagaggctaactatggaaactggggagggaagctcgcaaggaggcactgcgcaggaaaacagacatggcctggatataaaaaaacagaagggaatagggggtccaagagaatgaaaccaggactgacgagtaagaaaaaaggggaagaacggaacgaaaaaaatcagtggggagaaaaaggggaagg

SEQ ID NO: 53416 - DNA, 281 bp, Zea mays
  unsure (1)..(281): unsure at all n locations
cgcttcgccccgacgtgcagaacgtcaacctgtccgggatggggtgcagcgcggggctcgtctccgtcggcctcgccaagaacctcctgcagacggcacggccgggcacgcacgtactcatcgtctacacggagatcctctcgtcgcagtactacgtcggcacggagcgcgccatgctgctgcccaactgcctcatccgcatgggcgctgcggccatgatccttntcaacatcccggagcgcgcgcggtacaggctcacccgcctggtgcgcaccgtgacg

SEQ ID NO: 53417 - DNA, 155 bp, Zea mays
aaactcagcttttgacaaaacaaaaactctattctactattttaaaaacctcagtggttgctgagcctttatcactttgggccttatttttttcccctttgggcttgaacacccaaacagggaccgatagtggccccattgacctcattggctca

SEQ ID NO: 53418 - DNA, 299 bp, Zea mays
  unsure (1)..(299): unsure at all n locations
ggatcttacactgggccttttctggaatangctggccgcggtgaagtgttcttgcggtgggttcataccgatttggggagaattagaaattcaagctcactgatgattgactggaagcaatactggtcgggggggtgcatgataatgtggtggagctggccgcacgctcaatttatagaaagagcaagcggtgacgagcaatttgggcagattgcactggcgccggagatgaagaaaaagtgctggccgcgtgagtgcgtgtccacagtcgtggcgagctcaccggcgacgatgggact

SEQ ID NO: 53419 - DNA, 354 bp, Zea mays
  unsure (1)..(354): unsure at all n locations
agcttgggaagggtcttcatccgcacatgtgctaagttacgatgccacagccagcccatgctagtcttagcgattaagcatgcatctagaccggcctcctcttttgcaaaatcaactaaataaagtttgtcgtctagtgcacccttaaatgctagtgaaccatcacttcttctaaagacagacacatctatatttgtaaatagacaattatatcccatattacataattgactgacagatagtaaattatatccaagagactcaactaaaaacacattagagatagagtggctcatttggaatgcaattntacctaacccttttaccttgccttgttcccatcaccgaatatta

SEQ ID NO: 53420 - DNA, 330 bp, Zea mays
tgataccctttcgcccgcgcaatttcttaaagagacccccggttttctgttaattgacccgccgtccctggatcttcacagataggtcctcggaccttttatttaattcaaaataagtatttaaggaatatttttaatccctaatcttgtaaaattcataactttgtcatatgaactccaaattaggtgcttcaaattgcaaaatgttcataatattcttatctatctatttaaacaatgtttccctgctgtttttatgtcccaattaatagttgatcattagggtaaaattaatgttattggaaccctatttgagataaataaaagata

SEQ ID NO: 53421 - DNA, 438 bp, Zea mays
  unsure (1)..(438): unsure at all n locations
agcttctaaagggagaacacattttatgactaacaaatgttcattatgagaaagacaggtattgtagcgcatgccaagccgggaagcaagttggcgctcatcatccacacaagaacatcatgacaagtgacaggccactggagctcctacacatggatttattcggcccgatcgcttacataagcatcggcgggagtaagtactgtctagttattgtggatgattattctcgcttcacttgggtgttctttgtgcaggaaaaatcccatacccaagagaccttanagggattcttgagacgggctcaaaatgagttcggcttagggatcaagataattagaagcgacaacgggacgaagttcaagaactctcaaatngaagggcttcttgaggaggagggcatcaagcatgagttctcttctccttacaccccacaac

SEQ ID NO: 53422 - DNA, 331 bp, Zea mays
tgtcttcttttccctatcttcattcgtctgatgagtcatatgttctcattgtattgttgacaatgcactcatcaaaggggagattgcaaacacaaggatgacttgtcccttatgattcgggatgatgatgagtcattgtcaacatgggtagtactttggccgagtcttacactaacaagagtacaagattgtgttttgtgcaaccaagtctctcggcttgtggtgtgcaggtgtgcagtacaaggacggtggtcgacaacgaaggtgaagattatgcgggttcaaactgatgggatgtgagcggcgaatgacgagcgctgggtcttgatcg

SEQ ID NO: 53423 - DNA, 140 bp, Zea mays
agctcgcgtgactcctacatgcgcctatgggttctctttatagccccaagcaactaggagccgctggagacaatcttggaaggctaaccctgccttctgtcgggcggcgcaccgaacaccgctagtccaaaaacaccaac

SEQ ID NO: 53424 - DNA, 331 bp, Zea mays
ttccgtttatgcattgttttaatctgtcattgcggtatatcagcgatatttacatgtgaagtgttctacttattatgctgcatgtaaatcaagacggtttgtggtggtccatgttatctcataagttttgctaactatggtaacttttgagggagctcttagggagtcattgctttggatatcagccttgccctgtatattaagaaactgaagtttatcagttttctatgataatgtaactgtactgactattatgaagtttggggttgtttgtaaggaaaattttctgtttggagtaaatggggtcttcgtataagcttggaggtggttc

SEQ ID NO: 53425 - DNA, 146 bp, Zea mays
agctataccttgtgaggatcaaccttgacatatatctgctctgattagcagcctgctgcccacttgcttcggaagataattacagggaacttggtagttttccggtaggcaaagttatggcacccagaattatcgtgcaatccatc

SEQ ID NO: 53426 - DNA, 336 bp, Zea mays
tcgtcatctgaaagaaatttaccctgaaggtaagagatgatctcggttctccaatcttcgctaaaaacaggagatatattaagaactgctctttcaagaagttccaccgaaggtgcctttattgtttcgaagaacacatccgaaggtaaaggcagcccctgtgctgctgacctagctagcagatcagcatgctcattttgtcctcgaggaatattcttgacagaaaacccttcgaaggaagcttcgactcttcgaaccatatccagatatttttcaagcttcggatccatagccttacaacttttatcaatatgacccgaaacaacctgggaatca

SEQ ID NO: 53427 - DNA, 382 bp, Zea mays
agctcgtcgatcccaagctcactctagggtcttgaggccatgtatgaacagatgagcaaaactgcaggaggatgtggaggctttcattttgactttcagctcttccaaaggagacaggacaattgttgaagagacacacaacattgtagaggccattggatcagccaaaggaattcaagtacggagccaccaagagcatcagaagatatacttgtcatctttgaagagatacgcccaagcaaagagactgttacaaaggaagctgaaccatgcccaaagcaagaaatccaagctagcccaacagctgattatatttctggaaaatcgagacaaattggtcccagatggaatccattccgatgagagcgatatggaagatgga

SEQ ID NO: 53428 - DNA, 336 bp, Zea mays
tagccaaaataactcaaataaaaccccaaatcaagcttctcatgtggggacttaatgggaattctgaatttcaaaattctgaaatttaaaacttgagccaaaaaacaaagatgttcaccttgatccctaactcgaatcctaatggccccattaacaaaaatgtgcctaattaacccctctgtcatgtgccaagagatggcattgggacacgtgcctcggacacgtcaaaccagggattttctccctgagtgtggcagtgagacaaacatgatttctcccctctctatctcttaaaccagtcagcgaaacttgctagcctccacacacaaacgacaa

SEQ ID NO: 53429 - DNA, 437 bp, Zea mays
  unsure (1)..(437): unsure at all n locations
agcttgacttgtggccaagggatactcccatgtctatagtttggatttcggtgaaacctatgcacccgtagctaggcttgagtcaattcgcatattattggcctatgctacttaccatggcttcaagctntatcaaatggacgtgaagagtgccttcctcaatggactaatcaaggaagaggtctatgttgagcaacctcccggctttgaagatagtgagtaccctaaccagtgttacaaactctctaaggcgctttatgggctcaagcaagccccaagagtatggtatgaatgcctaagagattttcttatcactaatggattcaaagttggaaaggccgatcctacaccctttaccaaaacacttgaaaatgatttgtntgtatgccaaatttatgttgatgatattatattggggtctactaacgaatctacat

SEQ ID NO: 53430 - DNA, 340 bp, Zea mays
aagattcttcattccaacatgtgctagtcggcgatgccagagccagcccatgttagtcttagcagttaagcaagtgtcgagttcagctctatcaaaatctactaagtataactgaccccctaacactcccttaaattctattgaatcatcacttcttctaaagacagtaacacttgtatccgtaaaaagacagttgtagcccattttacacaattgcaaaactgaaagcaagttgtaatctaaggagtctacaagaaaaacattggaaatggaatgatcaggtgatatagcaattttacccaatcctttgaccaaaccttgtttttcatccccgaatgtg

SEQ ID NO: 53431 - DNA, 397 bp, Zea mays
  unsure (1)..(397): unsure at all n locations
agcttagtggtggttgagtgtgaaaatgtgctatcttttgtcttgnggaaaaccatcaaagtattgcctttttctgaagaacaagagtgacttcaattccaccatataaagcatgtattaaataggtccctctctctttatgggcgggatgggcttgcggaatacctagtgtattcacccagatttatttatgtttttcagcagctagagacttcttttctgctatgctcgactagaagggggttgtgtctgcacccagtctgcatgtggctggggctagttgatcttccattgtgttttgtatttcacgctcgctagagcttgtacttcggtattgtaatgaactttattcgaactctgtactatttgaagtaaggaatgtggttactagcctcct

SEQ ID NO: 53432 - DNA, 254 bp, Zea mays
tcgtctaccaagggacgcggtctcgcctcgcctgagcccggcctcggtcggaacagtggtctcagacgaatccacgtctcgcccgagggtctcctcagacagtgagcgcaccctcggctcagccaaaggcaagccttgtcgtgcaagcgaccttggccaaatcgccttaccagccgaccgtattgcatgcgcatttaatgctgggatcgcctgacaccttatcctgacacgcgcgcctcagtcggcaaggtcga

SEQ ID NO: 53433 - DNA, 262 bp, Zea mays
agcttcggctccatctatgttgtggattgatttagaatctgtctagtttcctttagcctttctagcagcttcctgactaccataaatagcaatgggtccttattccgaaggtatcttcatgcatagatatgctggatgaagaattgctttgaatgcattgtgtgttccacgaccaatgattgcttgtagggatattccatgtcaacaatatcaaacacaacatgttcagtcactggcattgtgatcttgccaagtgttacaa

SEQ ID NO: 53434 - DNA, 344 bp, Zea mays
tggctgtcaggctggtttattctgaaattcagacttacagtgtaataaagccatctttggggttgaattcaaccatgatctagttatcaaatgagctcagtcactatagtcgatttgtagctggtatgtagccctataactttggtacagaaagcttgctcggttactacacaaaattgggagtaaataaccctgcaaatcactctgtcaggtcggctgatgatcttcgccatggtacagtgacaaaagatctgaggtgccgtgcatctcaccgtcggtgactcgccgccgcgattcgtgtcgccaccgttccaatttgggctcggtaaggaacggataacgcc

SEQ ID NO: 53435 - DNA, 429 bp, Zea mays
  unsure (1)..(429): unsure at all n locations
agctntattttagcctctcattgtcttctttgagcttgngatgngtatcatcgtttgctcctgcagattctagctcanaggaagatttgcttgtcgacggacaacaagcattagcacatggtaatatagtttcaatttgaatacatgtgcaagagtgaggttgttgggattataagttttctatcacaacctcatgagcaatanttaatacgatatgatcatccataagaatttcatgagagcataggagcatatcatatttttcttgacaagctagattttcaacttttagcttttctacttggtccttaagcaaggtattcctatntactaattgagcgatacaatgtaaagcgttatcttgctcaattgaaaacagttcatacctttggaccaaatcaacatgagagcactttaactcctcatgtt

SEQ ID NO: 53436 - DNA, 339 bp, Zea mays
tcagcttagccaaaataactcaaataaatccccaaatcagcccttgaactatgaacccttggagaaattcaaatttctgaatttctgaatttcagacctcttcccaaagatcatctgcgttctctgtttttcgaaactcaaagccaggagatccaaatatcaaagttgtgccaaattcccttgaacacatcctggaaaagtttgaactcaaaccaaattcatttgacacggttttggtgcagtttgacctcgggaccaggcattctgacactggcaccttggtgacgctacaactccctgtccctagcctaaaaccgcgcgacgtccatacacaaaaga

SEQ ID NO: 53437 - DNA, 411 bp, Zea mays
  unsure (1)..(411): unsure at all n locations
agcttcggatctttagccttgcaactcttgttaatattacccgaaacaacctgngaatcagntgtaagtatggcccttctgattcccattgcttttagcttccgaagacccagaagcagggcttcgtattcggcaatgttatttgtgcaactaaaatcaagttttgccgcatagcaagttntaactttggaaggtgaaaccaacacagcagccgctcccgctccgaatgttccccaagacccatcgcanaacactgtccatgcttcggcgtctttatttgtttcttcctcctgagcccctggcgtccagtcagcaatgaagtctgctaacgcctgggactgaatcgaagatctatgaacatattcaatacaaaattcgtngagctctggagcccaattttcaatcctttca

SEQ ID NO: 53438 - DNA, 345 bp, Zea mays
tagaaacttaagctttatcaaatagagtgaagaggccttcctcaatggaccaataaaggaagaggtctatgttgagcaacctcccgactttgaagatagtgagtaccctaaccatgtgtataaactctctaaggcgctttatgggctcaagcaagccccaagagcatggtatgaatgccttagagattttcttatcactaatggtttcaaagtcgaaaaagtcgatcctactttattcactaaaactcttgaaaatgacttgtttgtatgccaaatttatgttgatgatattatatttgggtctactaatgagtctacatgtgaagaatttaatacgatcatgac

SEQ ID NO: 53439 - DNA, 283 bp, Zea mays
  unsure (1)..(283): unsure at all n locations
agctttcaccaaatcctcaagcaacggaatgggatatactacaagtcccactccaagaaggtttgctacaagtgtggtaagctcggtcactttattgctaaatgtccattatcaagtgatagtgacaggggcgacgacaagaaggggagaagaaaggagaagaagaggtactacaagaagaaaggcggcgatgcccatgtntggcgggagtgggacttcgacgaaagctctagcgactcctccgacgacaaggacgccgccaacatcgccgtcaccaagggac

SEQ ID NO: 53440 - DNA, 316 bp, Zea mays
cgctgatcaacgcacttgttctcactctacctgacttctctcaacaatatgagattgaaaccgatgctagcgataacggcatctgagctgttttacatcaagcaagtcaccccatcgcgtttgtcagtaatgccttgggcccttgtcatcaagccttgtcaacttatgagaaggaatgtttggcaatcctgatggcagtggaacactggagatcttacctcatctgcagtgaatttatgattcgcacggaccaccgcagattaattcatctagatgaccaacgtttgacgaccctgtggcaacaaaaagctttgac

SEQ ID NO: 53441 - DNA, 427 bp, Zea mays
  unsure (1)..(427): unsure at all n locations
gatccttaagtcacctgcagctgcagcttgtcttacctgccctggctttctatttgatgtggacatgaccgccctgagatgagggagcctcgggcgagacgaagattctctcgagcatctgtcctgaccaagacagacctcgggcgaggcgggatgtggagttttgagaagacccctgagggggacctcgcgcgaggcgatgtcttggtaagaccctagagggggaacctcgagcgaggcanaattctggttccttgtcctcggaggacgtaccttgacagggtccttatgattttaagcgcgttttaggggcataatctgggtacacctacttatcgtacccgataatttcctacttggattttgattgtatctgggacaaaacattcggtacaccatacagtgacatatcgttgtcttatgtctc

SEQ ID NO: 53442 - DNA, 337 bp, Zea mays
tgtacatctcaagatatgctaataatttcattgctgattgagaggccatgatatttatgcaaaaacttcagatcaaatttgggcatattgaaggaaaccttccaaataatctatattttagtaaacagtaattcgacagctaacttgtattgggaaaaatcgcaacaacaattttaaatggcaaatgtatacaacatgagataacttgaaagttttgaattgtacccgaggtaaagattaacctactaatgcctaggttacatgtcgtagaaaaaaacatttgagttgcattttatgtttaactatttgtttctaaaatttctttagtcctatatta

SEQ ID NO: 53443 - DNA, 279 bp, Zea mays
agcttgccttctgctgagtataccacttcgcaatctcatacggatgttcgtggaacgctgcaatatgcgaaaaatcttcactagctgtcaagacgatgctcctctacgataaaagggcaggtggccgattattacctgaagcgatctgttcattgaccacgaccgagtccaggccgactatgtccacccttttccgcttccattccggatgggaggccagaccccggcaagaaataaaacacgggtccccgcgaacagtcctgtcagctgtccccgacg

SEQ ID NO: 53444 - DNA, 332 bp, Zea mays
  unsure (1)..(332): unsure at all n locations
cgatctcgtgccttgctgcttttatccacatggccagcaataactttttaataatctttaggatgggcctttttattcccattgcccttagtttccgaagccccaatagaaatgcttcctactcagcaatattatttgtgcaactgaaattcaatttgactgcataacatgttttgacttttgaaagtgccactatgaccgtanctgctcctacaccgaaggctccccaagaaccatcgcaaaacactgtccaagcttcggcatctttgcttgtcccctcttcgtgagcccctggcgtccaatcagtgatgaaatctgctagcgcttgagat

SEQ ID NO: 53445 - DNA, 447 bp, Zea mays
  unsure (1)..(447): unsure at all n locations
agcttatgaagattcttcatcccaacatgggttattctgcggngccacagccaacccatgttagtcttagcaattaagcatgtgtcgagttcagctctatcaaaatctactaagtatagctgaccctctaacacacccttaaatgctattgaatcatcacttcttctaaagacagtgacacctacatcagtgaaaagacagttgtaacccattttgcataattgagatacagaaagcanattgtaatctaatgaatcaacaagaaaaacattggaaatagaatggtcaggtgatatagctattttacccaaacctttgaccaaaccttgatttccatccccgaatgtgatagctcgttggggatcctggtttttctcgtaggaggagaacatccttttctnccctgtcatgtggtttgtgcacccgctgtcgagtatccaacttgag

SEQ ID NO: 53446 - DNA, 263 bp, Zea mays
aatgacttctattaacaatcatgcttcttaatgccgcatatactatcaatcaatatctcttgacatgcactaagttaaaaggagaattcatgatacatttatgcaatttgtgatccatttgccatatgctaacaataacttagaaaaggatcacttgttgtagaactctcttttgtgcaaaatatttccatatattgtcttaagaataggtcttaagcaactaagacaaaggacaaagcacaatgaagagagcgtctctatgt

SEQ ID NO: 53447 - DNA, 434 bp, Zea mays
  unsure (1)..(434): unsure at all n locations
cttcattccaacatgtgctattcggcgatgccagagccagcccatgttagtcttagcaattaagcaagtgtccagttcagctctatcaaaatctactaggtatagctgaccctctaacactcccttaaatgctactgagtcatcacttcttctaaagacagtaacacctatatccgtaaaaagacagttgtaacccattttacataattgcgaaactgaaagcaagttataatctaaagaatctacaagaaaaacattggaaatagagtggtcaggtgatacangcaatttacccaatcctttgaccaaaccttgattcccatccccgaatgtgatagctcgttggggatcttggttnttctcataggaggagaacatcttcttctcccctgcatatggttatgcacccgttatcgatgatcaacttgaccccc

SEQ ID NO: 53448 - DNA, 333 bp, Zea mays
tgcatcaatatctgaccagcacttatctgattaaatattttgtgatgcaagccagaaaacgtgcatggcgaattgggcaaactagagatgtaatggtttacagactgatcacacgtgggacaatagaggagaaagtctatcatcgacagatatacaagcatttccttaccaacaaagtactgaaaaaccctcagcagaggagattctttaaagccagagacatgaaggatttattcacactacaagatgatgaagggaatggttcaactgaaacgtcaaatattttcggccaattgtccaaagatgtgaacgttggagttccaaatgatggtc

SEQ ID NO: 53449 - DNA, 204 bp, Zea mays
agatatgagccccaaagatatgaggctgaaccttttataaattaggctgaaccaagttaaaaaatatcagcttgttggttatatcctacgggcaaaagaagtcccccatttgtgaaactttcccttttttctccgacctaatgccgactgaccttctggggcaaataaaccattaccttggggagaggacactcacgcagctct

SEQ ID NO: 53450 - DNA, 298 bp, Zea mays
  unsure (1)..(298): unsure at all n locations
cgagaagtatgggatcagcctaaaagcttatgcttattctggngaagaaacggccgcctacagaactgcagatcaccattcaaacaaaaaagattgcgaagcagagcgcggagaatcaccgaacaggtcttcatacttcttcatgtattcccctatataccagaatacgaggtaataacctgggcttctgtgcttcggaagtcattcacaagcttctggcccagctccattccaccaccattgcacctactcacacccaagccagtaccagaaggcaccgcaccccaacacatgtgac

SEQ ID NO: 53451 - DNA, 330 bp, Zea mays
ccttactacttttgtctacatgaccagaaatgactttgttagttagttttaaggatggcccttcttattcccattgcctttaacttttgaaaccccaacagaaatgctttgtattcagcaatattatttgtacaactgaagtcaagccttgctgcataacatgttttgactttagaaagcgcaactaggacagcagccgctcctgcaccgaaggttccccaggaaccatcgcaaaacactgtccaagcttcagcatctttatttgtttcttcttcctgagcccctagcgtccaatcagcattgaagtctgctaacgcctggactgaattg

SEQ ID NO: 53452 - DNA, 450 bp, Zea mays
  unsure (1)..(450): unsure at all n locations
gcttctcctgaacaagtgccgcacttactgctgagtgtgaagctgccacatacagcagcagaggagcctctggcgctggtggagttaacgctgttaaatctatcagatactgcttcagctcttcgaaggctctttgctgagctgatccccattgaaaaacttcagctgacttcagcacttcaaagaatggtaaatttctttccgctgatctggatataaatcgattcaaagatgccaatcttcctgttagccgttgagcccctttctttgtgccttggcggctccatccgaaggatagcttcgatttatttggattagcttcgatcccttttgttgaaaccaaacaaccaaggaatttccccttctttactccggagacacanttttctggattcagcttcagaccagcttgcctaaaattggcgaatgtctcctgcaaatcagcaatgt

SEQ ID NO: 53453 - DNA, 326 bp, Zea mays
tggcctcagcttgcgcagcctgcacattagcaatggccttgttcgcctccctcctctcctccgccagttggcgccagagatccaccttctcggcctccatggcggctaccttctccgacagcctgcggcttttgctttccgcagccgacttctcccgcacagcatccgcgtgctgcgcccggagactctcgacctcggcagcaaactccgcagtcaaggcacccaacgcgatgtggtccacgaagtctgccgcctgccacataaacccatgagacccgcaccctcataaaaacaacaaccatcgaagttctacacaacttacatgc

SEQ ID NO: 53454 - DNA, 452 bp, Zea mays
  unsure (1)..(452): unsure at all n locations
gcttgctactggccttcttctttntctccatagcatgaaccttgctggaacactaccccacttaaaaagaatgagggtagaactcttgaatcttggggatttgaactccttgaagtacctcataacaagggtgttacggngccttcttctgctgttgctgcttgagcaggctgcggagaaatgactggcacagggttgattctgggagaaccttcttcttatcttctcttcactatcttcttttctcttctcactgaccctntctttctctttgctcttcccattggaggattctatcacanagtattaccatcatatagaggaggaaatcgaagatgttgaaccatgtacaacagtcttcaacccaagaatcaccaagcattgtgatcttaggggcaaggaagtgggaaatggtgttgcttgcgatttggcagaggggatttctctggagt

SEQ ID NO: 53455 - DNA, 348 bp, Zea mays
tctaaagggagagcacattttgggactaaccaatgttcatttcgagaaagataggatttgtagcgcatgccaagcagggaaagcagttggtgttcatcatccacacaaaaacatcatgacaactgacaggccactggagctcctccacatggacctatttggcccgatagcttacataagcatttgcgggagtaagtactgtctagttattgtggatgattattctcgcttcacttgggtattctttttgcaggaaaaatctcaaacccaagagactttgaaaagattcttgagacaggctcaaaatgagttcggcttgaggatcaagaaaataagaagcgacaaccg

SEQ ID NO: 53456 - DNA, 70 bp, Zea mays
ccgcgcgcactaaaaatggtgagcggttttttacttgcaaaaactccgactgtgaacgtgttggggttcc

SEQ ID NO: 53457 - DNA, 344 bp, Zea mays
tatgaagattcttcatcccaacatgggctagtcggcggtgccagagccaacccatgttagtcttagcaattaagcatgtgtcaagttcagctttatcaaaatctactaagtatagctgaccctctaacacacccttgaatgctattgaatcatcacttcttctaaagacagtgacacctgtatcagtaaaaagacagttgtagcccatttgacataattgggaaacagaaagcaagttgtaatctaaagaatcaacaagaaaaacattggaaatagaatggtcaggagatatagcaattttaccaagtcctttgaccaaaccttgatttccatccccgaatgtg

SEQ ID NO: 53458 - DNA, 456 bp, Zea mays
  unsure (1)..(456): unsure at all n locations
agcttgatagggaaattcatactgccaatgattagctgacttatctcattgaatatataagaagaactaagatctcactcaaagagaagaagaaactcaccttatcagtttgtcaggctctcagtgatgagaaagaatcaccgcggagcaattntgtggtaggccatatcgatgccatgaagagcccacacgcaacggagaaggcgaagagcaggaggccttctcatggttcagctccccattttatgtcctcgacgatgtgcagacggcaaagacagtctgcaggatgacattttgttagtaagccaaggctgacgaagtcggtaaacagacatctgacagctaaggtgagtggggccagtcattcagctactctagccttttgtacgtcatatgttcactcatataccatgtcaacaaatcatctatcttaaatctagacccagaaataacaat

SEQ ID NO: 53459 - DNA, 315 bp, Zea mays
gtcggtcgtccctgcctagcaaatttcaatgttcttttctacaagacttgcatgtctatttggaccacacatggaacaatatggctgaagcccaaaagttttctcatgctccaactgatgttgtatacatattgcactgtcgatgttcttttgtctctgcaagcaactcgctccaaccttgatgtatctgatacttgttacccttgctatatatatcctaaaagcatatatatagggccgggtcatatcctcctttacaaaaaggatatgggagatggatgatgttatgggacgtcaacttcgtcaacgtccaat

SEQ ID NO: 53460 - DNA, 438 bp, Zea mays
  unsure (1)..(438): unsure at all n locations
agcttgaanaagttgaggttgccttgacttcatcttttggtgcagatgttgatcctagggcaatagaccttgccatgagaatcgccgaaaggatgttcctcaaaatgaaggaagatgaggcgaagaacaagattgaagaagaagaatatgatcgatggagaccaaacaacgaatccacctcttcacaaggttcgtctttcaaatccacttctcatatgtgctttgtcgctaatgggagtgacagtgaaagcgaaagtgaggatgaggatgaacatgaaagtgatagtgaagatgagaatgatcttcaaaaattcttcgctcaactaagcaagaaccggatgagcttgctcaaactcatgaaaagagcggaagaacaaaaggaaatgcttcataagcaagaagatatcctcatcgaanaaatcaaagacttggagaagt

SEQ ID NO: 53461 - DNA, 333 bp, Zea mays
ttataaatgacaatttatttggaagccaagccatatcaatcgtctggacaatttgaagaatcgcacacatgccatcagtccattgagcatttaaaaacccccaatctacctcaaatgtgtcatcaacatcactccaacttcacaaattaaaaagggtgtaaacaacaatatgacctttaaacagtttaaataaaaatatcccaaaggcaacatccataacctttacttttaagttttcaaggttgtgacaactccttagcaaggtaaacatgaacaaaatgggcccactctcgacaacgcttgagcataatctatgtcactataatgaaatat

SEQ ID NO: 53462 - DNA, 332 bp, Zea mays
ttccaaaaagtcttggatcactatttttgggggtctgaagattaagttacatgtgttcgaagcgtgaagactgaatctgtccagttttggacagcacagccttcatagtatattttaaccttgatacatgctaaaccagccagggatgtttataaataatttgtagaacatttaattagctttccagaaagtctaggatcaatttgtttggatgtctgaatcttcagttatgaatttttaaagtcataagtctgaatctgtccaaatctggacagcgctgttgtattagcacgttttgaccttgctaagtgttgaattatgttgtgatgaaa

SEQ ID NO: 53463 - DNA, 451 bp, Zea mays
  unsure (1)..(451): unsure at all n locations
gcttcacctagagagattcacttgaatgctttttaaaggatactaagatatttgaagtatacccccaatattggtctatggtatcccaaaggtgctcaatttgaattaattggatattcggactcggattatgcaggttgcaaagttgataggaagagcacctccggttgttgtcaatttcttgggagatctcttgtttcatggtcttctaaaaagcaaaatttcgttgctctctctactgccgaggcggaatatatatcggccggtaattgttgtgctcaattattatggatgaaacanattctattggattatgggatcatttntaagaatgtacctctcatgtgtgataatgagagtgcagtaaaattggctacaaatccggtccaacactcaagaacgaagcatattgatatacgacatcacttcttaagagatcatgttggaaagg

SEQ ID NO: 53464 - DNA, 377 bp, Zea mays
aagggagagcgcatttttgtgactagaccaatggtcattcccataattattggatgagcatcgcttgtcaatggggaagcaagttggtgagtcatcattcctacaacacaaactcattcattgatctgactgtacaaggctcacatgatagactcgctccgacatggtacctcatttaggcacgcgatcggcattaccctacacgtttttcgcagggaccgacacactggctatttattagggaccaatattctccgtatacttaagaagttctgtctgcaggaaaattttttccccccagatacctttgaaaggatttttgagaatggcgcgccatgtgtctaggtagatgatcaaaaacgttttaaccgataacc

SEQ ID NO: 53465 - DNA, 158 bp, Zea mays
tgactctcgcattcagacgaagctccagtttagtgcctacttcatcagtaataaaagcttcgggagaaaaggttatttaattcccaagaaatctttcaagaaattcaaaattaaatggctagggtgcgctctactgctatagttgagcgtgaaggtga

SEQ ID NO: 53466 - DNA, 404 bp, Zea mays
tgcaagctttaccaaatggacgtgaagagtgtctttctctatggaccaatcaaggaagaggtctacgttgagcaacctcccggctctgaagacagtgagtaccctaaccatgtctataggttctctaacgcgctttatgggctcaagcaagccccaagagcatggtatgaatgccttacagatttccttattgctaatggcttcaaagtcggtaaggccgatcctactctattcactaaaacttctgacaatgaattgtttgtatgccaaatctatgttgatgatatcatatttgggtctactaacgaatctacatgtgaagaaattagtaggatcatgacacataaattcgagatgtctatgatgggggagtcgaagtatttcttgggatttcaagaaagcaa

SEQ ID NO: 53467 - DNA, 268 bp, Zea mays
cacatgggctgtccacaaggcttggcatttcgtcgaaccgccaagcgcggagcgtgactttgacggtggctgcgataatacacgagtttaagggcttggcatatcgtcgacaccatggatacaaaaacagcaagggtagcgggatgtctcaccgagggtcgacgacgtcgcgagcgggtctgcgccaaaaatattgaacacccagcgagcgtcacggcgtgctgcaacaacacgtctccctcgacattatgccgagcacttggcatgc

SEQ ID NO: 53468 - DNA, 420 bp, Zea mays
  unsure (1)..(420): unsure at all n locations
atatggacgacggggtcgaacttcgttaaattggtctgaacctggagaaagatacttctttatgcctgatatggcgaaagaggtcgaacaaaaagttcagagaattatttataatatgaaaaaggcacaagctcgtcagaagagttatgcagacacacggcgaaggcccttatatttcctggaaggagactatgtttacctgaaggtctcaccaatgaagggtgtatcgcgtttcggggttaaagggaaacttgcacccatgtacattggtccattcctggtgctngagcaatgtggaccagtggcataccgacttcagctccccgaaacatttgtctgtgtgcacaatgtgttccacgtgtcacaactgaagaagtgtcttctggttcctgatcgaaccgttgaagtgactgatgttgt

SEQ ID NO: 53469 - DNA, 331 bp, Zea mays
tgtgaaggttcttcatccccactgtgctaatcggcgatgccacagccagcccatgctagtcttagcaattaatcatgcatctagaccggcctcctcttttgcaaaatcaactaaataaagtttgtcgtctagtacacctttaaaagctagtgaaccatcacatcttctaaagacagacacatctacatttgtaaatagacaattatatcccatattacataattgactgacagatagtaaattatatccaagagactcaactaaaaacacattagagatagagtgctcatttgatattgcaattttgcctaaacctttcaccttgctttgg

SEQ ID NO: 53470 - DNA, 320 bp, Zea mays
atctgggttggcttatgaaagtgcccttttgtgagctgctttattttgaaatccccagaaggactttaactcccgcattattgacatctcgaatttctgggtcatgatcctactaaatttctcacatgtagattcctagttgaccccaatataatatcatcaacataaatttggcatacgaacaaatcattgtcaagagttttagtaaataaagtaagaacggccttttcgactttgaaaccattagtgataaggaaatctcttatgcattcataccatgctcttggggcttgcttgagcccataaagcgccttataaag

SEQ ID NO: 53471 - DNA, 334 bp, Zea mays
aaaggagaactgtgatggtctaaccaagttcatttcgaaaaagattaccttgtgcagcttgtcaagcaaggaaacaagtgggaggagcgcatcacagcaagaatgtgatgaccacttcaagacccctggagctgctgcatatggacctcttcggacccgtcgcctatctaagcataaggggaagtaagtatggtctagttattgttgatgacttttcccgcttcacttgcgtgttctttttgcaggataagtctgaaacccaaaggaccctcaagcgcttcctcaggagggctcaaaatgagtctgagctcaaagtgaaaaagataaggagcga

SEQ ID NO: 53472 - DNA, 436 bp, Zea mays
  unsure (1)..(436): unsure at all n locations
atattcttcatcagaacactacggatattgtgtgataaatgaaaattcttcttcacgaagcatgaaaagaaggaaaggtgttttttcgtcaaagactcaaaaacggtacgtatgtaaaatttcatgcatcgtaaagaattgaaccataaaaaagacaagtatattacattcaggattacaagatattatacatattatatttcagatgtttttacaatagcacctagtcttccctaagtactacttctgcagcttcattcaggagtcgattaacaacttgatccatgatagcttcagccatctttttaatttcatcatcatctttcggnggagggcccggagacgccttagtaggatctgagggaggacaggatacagctacattgctattacaaattgcgaacgaagtttanaatcaaaaattacaacacaataa

SEQ ID NO: 53473 - DNA, 345 bp, Zea mays
tggcaaactattttggtctagggaagcaaaggcacaggtaagaagtgttctctctgttggcacttgtacttgtgcttgttattagcgccaagcaggaacgcatgatcttgcttcctctaacttgggttctaatttcatgggcaggagcctggatgatgtgaaaatgaatattgacgttctcaagaactgtgctacagtcctgttcctggtattttcacaccttctgtttccccttgaattagcccatctcactaaggctactaactcgaacagcttagaccatcttcaacagcttacctttacatatactcatattcaaactacactcaataaacagttcaatat

SEQ ID NO: 53474 - DNA, 102 bp, Zea mays
ggttttttttgatgaaacgaaaagggggttttaattaattcccagccgtgcaaagaaatgtgatggattttaaggggtaagtgtagataagcaagagggagg

SEQ ID NO: 53475 - DNA, 429 bp, Zea mays
agcctatttatgattattatctgtctaagatatggtaactaatcaaggtgtaccttggattagaatagaatcgctatctactcataatactctttctacatgatctatattaatcagcaggggattatacactcagtaaaatcaatctgaaaatgaatatagtataaaataaatctactaatcttgtaaaatccctatcttctttgttttagctccgaaataattaattccagtcgcattagtttcaaattaatattcttcttcatctagtaaccttattttatcattaaaccaaggattaaaatttacatttagcttctctatatcccatagttaaatattcagagaaatcataactcgagaaccgtagctctgaatttagtggttcttgaccccacgatctcgtagcaacggtagattatattatgc

SEQ ID NO: 53476 - DNA, 312 bp, Zea mays
  unsure (1)..(312): unsure at all n locations
ttttatgactaaccaatgtttattttgagaaagacatatttgtaacgcatgccaagcaagaaagcaagttggcgcccaccatccacacaaaaacataatgacgacggacaggtcgctcgagcaacttcacatggatctattcggccccattgcttacataaacattggcgggagtaagtactgtctagttattgtggatgattattctcgcttcacttgggtattcttcttacaggaaaaatcacaaacccaagagacattaaaaggattcttgagacggngtcaaaatgagtttggattgagaatcaaaaa

SEQ ID NO: 53477 - DNA, 394 bp, Zea mays
  unsure (1)..(394): unsure at all n locations
agctntctcaccatatatagcatgcttaatgtttcttttagaatgataaagtntaatacgaaaacttggtcatcaagcagactgttgaccttctgaccagtcagcactaaagtaggtcagctgcctttctggtagaattcattaagtcggctntagaagcattggaaactagacttcaagacctttccaaaaagtacttatgggccttcatagctnttgggaatcaaaatatatgactgtttcttctggacggttctatngcgctagactgactcggacatagctctcttgctgattcgcccctcgatatgtttgtctttcctcttgtgaacctaataatatcacatacacgacttangagcataaagtctcatagtgttaattgaaatcataa

SEQ ID NO: 53478 - DNA, 358 bp, Zea mays
acactatacacatactaagcttgaggctatgcatagattaccgcccacttaacgcgtgtgtattatcaagaacaagtattctttgcctcgtattgatgttcttttcgatgagttggtccgagccaaagtgttttccaagatcgaccttcgccccagctaccatcagatcaagatacgagcaagtgatattccgaagaccgccttcttgacaagatatgggctatatgaattcttggtgatgtctttcgggctaactaatgcaccagcatatttcatgtatctgatgaattctgttttcatgactgaattggacaagctcgtagtggtttttattgatgatatcttggtgtactcgaag

SEQ ID NO: 53479 - DNA, 455 bp, Zea mays
  unsure (1)..(455): unsure at all n locations
agcttcagcagaatgactgccaaagttctcatttctcagattggcaggaatgttctgacatatgtcgatgacatcatagtgaaaagcatgaagcaagaaaatcacattaccaatctgcaagaaacattagccaatttcaggaaggctggtctcaagctcaatccagagaaatgtgtcttcggggtgaagaaggggaaatttcttaggtgccttgtgtcaacaaaaggaattgtagcaaatccaaacaaaatagaagctatatttcggatggagcgaccaaggacaagaaaaggtgctcanagaataacaggaagaactgcatctctcaacagattcatctcaaggtcagcagagagcaacttgccattcttcgaagtgctaaaatcagcggaagtctttcaatggggaccaactcaacaaaaggctttcgaagagctgaangcatatctaataca

SEQ ID NO: 53480 - DNA, 353 bp, Zea mays
gacactatccacaactcaagctttgctcggagcattattctatctctggcgggacttattcaagaggccatgcatgatgtcgcacgacgtgcgctttctcagtactactcgatgctcggcgggatggctgatggtcttgacctgaagtgttacccccgccgtccatctggcagcacttgaggtatggttgtctcacctgttggcgaggacaatcctatgttgagcagcacaatcaatctatctgccgtgctaaacatggagctagaccacgctttagacgacctgagtatggctcgtgctgagatcgcccacttgtgggatgagcgcgtggagcaccgtcacctggaggatgg

SEQ ID NO: 53481 - DNA, 342 bp, Zea mays
tgcaagcttgggaaattatctgagatacaagatcttggtctccttcaatattttcttgggaatgaaaatgctcgatcaccacaggggaatgtcctttcccaaaggcaagttgttcttgacttattaagtgaaacacgaatgccctggtgtcgctcatgtgggtcacccactgataaaaaccatctaacccatgccgagttaagagatcctgttgatagggaagcatatcaaagattggttggtagattgatctatgccacacaagacccgatatatcttatgcagcgagtgtggtgagcatctatgcatgaccctaggacatgacatgaatgttgttatcga

SEQ ID NO: 53482 - DNA, 293 bp, Zea mays
tgtgaagattcttcattccaacatgggctaagtcggcgatgccagagccaatccatattagtcttagcaattaagcaagtggtaagttcagctttttttcattaaaatcaactaaatatagctgaccctctaacactcccttaaatgttattgaatcatcacttcttctaaagacagtaacacatatctcagtaaaaagacagctctaacaccctgaatttggggatataacatatcttttctaatatccaccaaacttaggtgtcactctctcagtacttagctgtcctttc

SEQ ID NO: 53483 - DNA, 435 bp, Zea mays
  unsure (1)..(435): unsure at all n locations
agcttcgggtctcttgctgtacatctcttgtttcatgaccagaaataacttgggaatcggttatgagaacctgccttcttatccccattgtctttaacttgcgaaaccccaaaagtaaagcttggtattcagcgatattatttgtgcagctaaaatcaagtttcacttcatatcatgttctagctttggaaggtgcaactaaaatagcagctgcacctgccccgaaggttccccaagaaccgtcgcagaacaccgtccaggcttcagcatctatacttgctgtttcttcctgagcccctggcgtccagtcagcgatgaagtctgctaacgcttgtgactgaatcgaggatctgtgcacataatcgatgctgaattcgatagagtctgcagnccactttccaattctatcagtagcttctctgttccttataatat

SEQ ID NO: 53484 - DNA, 279 bp, Zea mays
ctgaaactggacaaggccggtaaaccaaataattgactttataacactctcctcgcgcgggttcgcccgattactactccgcagctacgcttcgccaggatggtattatggagcacgtgcacacgctaaattggtatggttagtatcccgcccactgtaaccgtctgttttgttgcgtttaatgaacgtcgtatattcctatgtactaatctaccactagcgacgttgcccaagctcctgtccagttttgaccgtggcgctccctgcccactggtgccc

SEQ ID NO: 53485 - DNA, 313 bp, Zea mays
  unsure (1)..(313): unsure at all n locations
agcttcttatatntgagagggtggtttgttcatcagaattgtcctactcttctttaagttttgggtaaaagagaactgtacctcatatttgctgcttgcttcagtaccaagtcggatggcaaacttgcctcccttgacgagtacatctcacggatgaagtcagggcagaaagacatcttctacatcacgggaagcagcaaagagcagctggagaagtctccattcctcgagaggctaaccaagaagaactacgaggtattttatgctgctggtggttatccacttcattatagtgtctgagatctggaaatac

SEQ ID NO: 53486 - DNA, 330 bp, Zea mays
tataacacagataagtattgaagtgcagatataaaaacgagtaaggcagagagtcaggatagaacagagcacacagacgcaagggtttatcccgaggttcggccaagcctgaaatgcttgcctagtcctcgttggagttagccacacctgggcttggagtctatttcaactccttcctctgtttgctcagatctgtcaatatgacagatagagcctttcactattgagtggggttacaacagaaccgcggctgcttacaaacttcttggcagcactccggcagagtaacgatacgctcaagaccttgctctagctctaagcagcacttct

SEQ ID NO: 53487 - DNA, 371 bp, Zea mays
ttgtgagcagccaagttcagaaaggaaatatctgtttctgctgaacagcccaagcccatgctcttgagtgaggatatagcacagcacaacgtgctcttgggatctcaactgtccgaagagcaggagaaaaccttaataaggtttttattcaacaacaaagatgtttttgcttggtcagctaatgatccgtgcggagtcaacaaggatgttattgaacactcgctcaatgttgatccatccttcacacccacaaagcagaggcttcggaagatgtttgatgacaatgtccaaggtgctcggaatgaaatgaaaacactctacagcgccggagttatcatagaggtaaaatacccatactggctgctaacact

SEQ ID NO: 53488 - DNA, 319 bp, Zea mays
tgcttggcaggagagcttccgaacgtgatgactcgtttggtccacggagtcgctttatcctgacgcaagttacttatcgcaagaagggacgagtgaggtatccgtatcccggaggcgtaggagtccctcggctcggtcagccttggctgcttacgtgtacctcgtcgtttccaggatccgctttccaaagtagtcaagaagcacggaagaaatcctgctaaaaagaggtcctttttcgaggaaaaaattcgacgcagagggggtctccccccttttatcccccgaaggagggttcactttttaacctgggcctcccttc

SEQ ID NO: 53489 - DNA, 343 bp, Zea mays
cccatgctgttgtgctatgatatagcaccaccacaacgcgcttttgtgatctcaactggccgaagagctcgagaagacctgagacacgtgatgagtcacaacaatgacgtcgtcggttcgctccataatgatctgtgcagagcaccatggactgtaaaggccctcactcgatgttgacccatccttcacacccataaagcaatgcttcagagatgctcgatacaagacgaagggctcggacgaagtaaacactcatacgccggagtatcgaaacgtgagccctaatgatcgtacactgtatagtaaaacgcctgtcatggaaatgtgtatcatttctgattat

SEQ ID NO: 53490 - DNA, 348 bp, Zea mays
tcacacgccctagaaactctggtgtgaatccaagcttatttgtgctgaaatatattattcaacataagataaaaaggagttaatagtttttattcattataaaataaacagtagataaaaaatacaagcaatcagacaagagacaggtttagcatggaaaacccaaacaggtaacacaggtgcacaaaataggaggatccaaagagtaacaagcagaaatgaaacagtagtccatcctcaataggctaaagacctgaagtgtttatgtagggtagaaaaaaactcccagcaactccccaccactaccacacagaccaaaaaaagggacaaacctaaaaaaagttctga

SEQ ID NO: 53491 - DNA, 332 bp, Zea mays
agcttataagtttctggatgagaagtggtcattcttctccgttgatgaagcaccagaagactaatcaaggaaggaatccatgtggaagttcgcaagaggaaggtttgtgtgttggcatcgatgcttcttcaataagctagctgccaagcgaatcctataagcctgaagatgatcttgagtagccagaatcagcgtttgcaatcgtcaaccagatgctcctcaaggccagatcttgttgaagttccatctcctcgaagagttgcaaagtgaacatatgtagctgaagtaaagctatacccataacccttctaagccgaatctcgatgatgaga

SEQ ID NO: 53492 - DNA, 336 bp, Zea mays
  unsure (1)..(336): unsure at all n locations
tatgagggcaaataacgaccctaggtttgcggagtatttgctgtgcgtaagcggtggaactgangacacaaatactgacggcgacatccgttgtgctaacgaggtatgtgtgccttacagagggagtgacaacgatcttgacaacctaataaacttagttttgccaaatctcaacaaaaatatgtctgattcgacctacatcacttcaagggcgatactgtcaacacggaacgaatgggtggatatgataaatgttaagatgattgatcgttttcaaggcgagcatatggtgtaccatagtttcaatagcgccatggatgatccccataactacta

SEQ ID NO: 53493 - DNA, 430 bp, Zea mays
  unsure (1)..(430): unsure at all n locations
gcttctaaagggagaacatgtgataggtctaaccattgttcatttcgaanaagatagaccttgtgcagcttgtcaagcaagtaaacaagtgggaggagcacatcacaacaagaatgtgatgaccacgtcaagacctctggagctgctgcatatggacctcttcggacccgtcgcctatctgagcataagaggaagtaagtatggtctagttattgttgatgacttttcccgcttcacttgggtgttctttntgcaggataagtctgaaatccaagggaccctcaagcgcttcctcaggagagctcanaatgagtttgagctcaaagtgaagaagataaggagcgacaacgggtccgaattcaagaatcttcaagtggaggagttccttgaggaggatgggatcaagcacgagttcttcgctctctacaca

SEQ ID NO: 53494 - DNA, 347 bp, Zea mays
  unsure (1)..(347): unsure at all n locations
tcagacattccgcaatatacaaaaataagtcgcttaaacacagaataagagcaactccaatggttatgtaaattttagctctctaaatcacagattttaaaagttgctaaataatttttggagtaaaaaaatgtgagttttccaatagttctctaaatataggttgtagttttgttttgtatctatccacataaaaaaataaagtcacaaatgtcatccattaccttcattatctacataatgcagtaaacatttttttanggagttgctaaatggttgccaaatgtagagaggaaataaggttagatgagaagttgttaaatttagaaagtttatttagagaactg

SEQ ID NO: 53495 - DNA, 345 bp, Zea mays
tctatagtcgacacacattctccttgaaccatctttcttgttcacgaatagaactggggcttcccattgtgacggaacctcccaaggtattaggcccacctaccgttgtccttttcctacagaccttggacaaccctgtagatgcacttaatcactcgacaagttcgataactgcatcctcatcgttttgcccaagagcgcttcatcggtcacacagatattacatcacatcagaggaaagaataagcggaagcaaattacaataacttaatttacattcatccaatatagatagagaatattattattacaataccagggtactatgagtgcataaagtattat

SEQ ID NO: 53496 - DNA, 356 bp, Zea mays
ctgcacgcgtgcgcgctcgtgatcacgccatgttcagaagggaatattctgcttcggctgaccagccgaagcccacgctcttgtgtgagagatatatcacagcacaccgtgctcttgagatctcaactgttctatgagcatgagaaaaccttaataaggatgatattaaacaacgactacgttcctgctcggtgccctaaagaaccgcgcggagtctacagggatgttattgaacactcgctcagtgtggatccatccttcacacccacaaagcatacgctccagaagatgtgcgatcactcagtaaaggtgcttggaatgaacagaaatcactcatcactgtcggagatattaca

SEQ ID NO: 53497 - DNA, 275 bp, Zea mays
gtgcttttattacctcgcacgtagttatcgccgaagggtcaagtgtcgtgacccttatcccggctgcttaggataccctaggctcgatcctcgcttggtgagcttcaataacacgcgcccagccatattcgatgtttagacggggctaggaatggctgggaatatccggttacagaaggagctttcttgatggccaagtcgcctccatatggtcaacccgtggctaaatgagctacagtgaagcttgagtgcatgcagaagggtaccgccaagct

SEQ ID NO: 53498 - DNA, 435 bp, Zea mays
  unsure (1)..(435): unsure at all n locations
ttcttgcagatacacctatggaagatctttgtatctctatagaggatcataatcgcacctggggaggacctgtgaattgcaccaaagcttcaccattctgtctcgcatcagggcagtagtttcctttgggtattgtgacttgtgagggaggagaaccttgccagcgtgtgtaccactcatcctttgatgtgagaagggaccttgtacgtagagaggccaggacttgtattttaactgttggtgttggttatgctaggaaatatggataactggctgcagtcttggtacggtgttgattcatgctctgtttaagcccttggtttctctctctaaaaagtagtctcttgtggttgttgatgaagcaagataattgngttagaagaaaagttatatatgcatataattattcatccatgttatcatgatgtatgcata

SEQ ID NO: 53499 - DNA, 332 bp, Zea mays
tatgaaattatctacaacttcttttaccaacccacaggttaattctgttgataaaatttcctaaatcttaagagaacagattctgcacagaattatgagactgaaaaactgctatagtaaaactgcaataactttctggtcggatgttcgattgaagtgttcttcgcggccacggaaagatctacaaatcatctacgactcatacatagacttttcatttttttgaggccactaagaccacggaaaactggcatgaacagaaactgtcgaatctgccattctgcagaaaactaaattcgggatcaaaacctaaccccacatcaaatccaacc

SEQ ID NO: 53500 - DNA, 400 bp, Zea mays
gcttggaagattcttatccgcacatgggcttttctgttatgccagagccaacccatggtagtcttaacaattaagcatgtgttgagctcagctctattaaaatccactaagtatagctgaccctctaacagacccttaaatgctattgaatcatcacttcttctaaagacagtgacacctatatcagtaaaaagacagttgtagcccatttgacataattgggaaacagaaagcaagttgtaatctaatgaatcaacaagaaaaacattggaaatagaatggtcaggagatatagctattttaccaagacctttgaccaaaccttgatttccatccccgaagtgatagctcgtggggatctaggtttttctatatgaggaaacatcttttctccctgcat

SEQ ID NO: 53501 - DNA, 329 bp, Zea mays
tcaaaaggtgacatcttcagactggcctgataactattattatatgagaactcagcataaggtagacttttatcccaacttcctccatgctgaagtgcacaagctctcaacatatcttccaatacttgattagtcctttcagtttgtccatcagtctgagggtgataagccgtactgaaattcaacttcgtactcatattctcatgaaagcttttccaaaatcttgaggtaaactgcgaacctcgatcagacacgatcttctttggtactccatgtaaacacataatccgagccatatataactctgctagctgagaacctttataagt

SEQ ID NO: 53502 - DNA, 335 bp, Zea mays
tgtgaaggttcttcatccccacatgtgctaagcggcgatgccacagccagccctttctattcttagctattaagcatgcatctagaccggcctcttcttttgcaaaatcaactaaataaagtttgccgtctaatacacccttaaaagctagtgaaccatcacttcttctaaagacagacacatctacatttgtaaatagacagttatatcccatattgcataattgactcacagatagcagattatatccaagagactcaactaaaaacacattagatatggagtgctcattagaaattgcaattttacctaaaccttataccttgccttgattc

SEQ ID NO: 53503 - DNA, 157 bp, Zea mays
agcttctcctggatcaagcgccgacttactgctgtgtgcgaagctgccacatataacaacagaggagcccctgtcggttgcggacttaatgttgtgagatctatcaggtttggcttcaattcttcaaaagctttttgtggccttgggccccattgaa

SEQ ID NO: 53504 - DNA, 337 bp, Zea mays
tattaaaacgataaaaaggtggaacgctcatgggtgaaattttgacttttaaacgtttaaactttgtttaaacgtagttttaaacaacatagttaaaataccaatatatcataatttcagacaataatatgaaattaaataccaaaacagagaggttagtggcttaccaaaacttcacccatgagctggattgaaccccaaaagtaactaatagaccgggcctaaaaatagctaatggtccaaaatgcataaaacactgcgttttacagtttagaacgccaaaacgctaaaacatgatttcaatctctaattaaagttttgacgtttaaacgtagtt

SEQ ID NO: 53505 - DNA, 398 bp, Zea mays
  unsure (1)..(398): unsure at all n locations
tgcaagcttgccagtttgtcagcgacttgtctcactgtcatatcattngaggggggcggggctgcatgtcacttaaagaactgattaatatctagtgcatgacaaggcaatgcaaattactgcagtagagcctccaactccctcaatcacatacttcccagcaatgtcaatttaattaactataagctgcagtcataaaaaaaaagacaaccttcacgactttctggtgacaatagtgactaataatgtatgcagatgatgagagggggatgtttcttttgtaaaccaaaaatgtatgcataaaacaacaaaaaatagttcacagcaccttggtgcaacagcaagcaatttcaagtggtatctctacacacttaaacgatgtatacgaattccaccgc

SEQ ID NO: 53506 - DNA, 327 bp, Zea mays
tacctatcttcatatttatatttaaactatgtatatactcgtgcgttaccactagcccggacgcagaaagcgacgtctaagctacaaatataattattgtttatttttaatcattaatgtatgtgtagtatgatggttagttccaaattgctagagcaaaggacatgggttcaagtgctcactttgcactaatttttatgtgctggcgctggacgggctcaaagtgtcagcatggagggtgaagccgtgaaacacaaggtgtccacattaagttcttaatagagtcgtgaagcaccaggtgtccacattaagttcttaatagagtag

SEQ ID NO: 53507 - DNA, 332 bp, Zea mays
tgctaccagctctcatggtgaggcttgcaacagcactgtttggtatgacaatttctagtgtgcttctagtcactagaggaacggcaaatctgatggagggcaaaaaaaggtgatcaaaggaacaagcaacctttagaaataacagcaagggcaaaatattacctttttgtagcactttgccttatatcatcattaatgttgctgccttgctcaaatgatccacttgcactgcctccactatcctgcaattgaacatgaaatattgcacaattcaaaaacagttgctagaaatcatccaaggtagctagcatgaactacaagtaaccattgca

SEQ ID NO: 53508 - DNA, 345 bp, Zea mays
tcgtccacccttcgcccaaatttgagatacgaatatgttcccaatgcttcgggccaagccggggatgtcattcaagtccgctggtgataagctgaagttcgtcctgtttacaatattcccgtgcgtgcaaccagccttcataaaagcaacagttgtgccacgagaagctagcagagcgcagaagtcaccatgcccagctatgacttcatcaagagaatcaacttcgccttcaatatgattgaagatgcctggcaggtcttcagctgaaggtttaaacttttcagaactggctccaactgagttgaagacctgcttcagtcgttgcacgcaacggttgccgaagtt

SEQ ID NO: 53509 - DNA, 341 bp, Zea mays
cgaataatcctcagctaactctgttgtgtcgacacacagaatcaataaaaggtgaagctggtggctctcgtcttatcaaacaaaaattggtcacatcatcatcaccatctcctacttgtgcaacgtcacaagttggcggctctcgtcttgtcaagccaaaattggtcacatcatcatcaccatctcctacttgtgcaacgtctgaagacgatggaacaaaatcctcgtttccggtaatagttgggtaatgaataagtgtagctgtgctgatgtcaccaccaataggctgagaaaaaacgagttttcttttggttaaagattcttcactatcacataaaaga

SEQ ID NO: 53510 - DNA, 451 bp, Zea mays
  unsure (1)..(451): unsure at all n locations
accctgtagnctggactataagntggttacggtatgtgtgccttatgcaagttgaccatttccagcatttgcgtaatgaggactctagggagaagcctcgtagtgagaccctggccattcacctcggaagtgaatacgggtctagctaacccgggctagaagggaatcacgactcatgggtaaagatgcgccacctctgcagagtgtaaaactgatatatcagccgtgctcacggttatgagcagcctggactcctcacatgataattgaacttgaagatggaaataaatcgaggtccgatgatctgccaatggtttgcttaagtggtttcacttaagtggttttgatataatcttgtatctttgcttaatgggaatacttgngattcacacttattagtaagacagatcgtgttaataaaatgggtgaccaactaaatgcttactgctca

SEQ ID NO: 53511 - DNA, 341 bp, Zea mays
ttagggtaaaagtcataaaatgaccctaagaataaacttgagtcacatttatacccctgggatacaatacaccctaaatagagccctggaaaaccctaaaactaaaacccaggggcttatgtgcaaaagtggtgaacctttggactaaagtgtaaaaactactatgtttgaacatatatagtcatttggttcacaaatatgtgaatttgcaagttaaaccctaagttttgggcttatttgcaagaatcacctcttaagcactataaagcctaagtctgaaatcagtgtgttttcttcaactttgagcccttgtatcttacaaattaataagaatttgccct

SEQ ID NO: 53512 - DNA, 459 bp, Zea mays
  unsure (1)..(459): unsure at all n locations
gcttaccgcatttgaagcatgatcgcttcctcttggtcttagtcttgctcggctggccattgcgaccctttagcaccgtcttgaagcgcttaatgatgagagccatttcttcatcattaagcccggccgcctcaatttgcgccaccttgcttggtagtgcctccttgctcctcgatgccttgagagcaatgggttgaggctcgtggattggaccgttcaacgcgtcatcgacgtaccttgcctccttgatcatcatccgcccgctcacgaattttccaagtacttcttcgggcgtcatcatcgtgtacctggggttctcacgaatattgttcacgagatgaggatcaagaacggtaaatgacctgagcattangcggacgacgtcgtgatccgtccaacgcgtgcttncgtagctccttatcttgttgataaggggtcttgagccggtgtaagtttgag

SEQ ID NO: 53513 - DNA, 346 bp, Zea mays
cttgtgaatggcttgccgccccaacagaggttgcacgttgatttcccacatactctggtatgtagggagagtggcacgaagcagtatgtaagacctgcttcgactgattctgccgggcttctgcttcggcaatctctttttgcttctgaatggtgatttgacacgttcttgtagtgtggcccttgtcttcaccacagaataagcaatatattttcctgtgctaatccccataccttcctctgaagcccctaccacctcggcccttgaagctggtggcctaaaggagctttgttgctgtcctgaagactgtgagctgtgttgtggcctctgaaactggcctcctttg

SEQ ID NO: 53514 - DNA, 249 bp, Zea mays
  unsure (1)..(249): unsure at all n locations
agcttgcaccccggtatattggcccttntcctgttcttgaacaatgtggaccagtggcatactgactccagttacccaaaacattgtgtgccgtacataatgtgttccatgtgtctcaattgaagaagtgtcttcgggttcccgatcgaaccattgaagtaacggatgttgccttataaccagacttgacatattcagaacaccctattcgagtcttggatcaaaaggacaaaaataccccgagggaaa

SEQ ID NO: 53515 - DNA, 345 bp, Zea mays
tctcgtaaaaagaaaaagaaaatatttcaactgtgttgggccagaattaactcaaccggcccaacattaagcggaatacaggggcgcgcccgtggcagcgctgtaggtttagcacaaaggtcctcgccggcgccggaattagtaacaaagtcctcaactaacttctgcgagtcactgacactttacttccagccccccttaaacttcttatcttttaaaatggaatccccgacgtcgccggtggcgcagatgcattctccttgcgatactacggtggagaagagctcgggcagccattggatagtgatcggatcaaatcttaacctaacccgcgcagttttgggg

SEQ ID NO: 53516 - DNA, 362 bp, Zea mays
tgcacgcgtgcgcgctctaacatcgcgtcgagcagtattacctcctgtcgacgagttgctttgaagcacgaagatccttagtggtcaaatgctgagctgattatagctatgcacggcgccgaactgtattctgagatactcgctgcttccgactatgatggaccaagatcgccatcgtagagcggtggctgacttgcttattagccaaagatgggctagcggcacgatacggcctgtccagagtatcgagtgaggatgcaagctctcgtatgtccttgtacgaacaatgaatccacactcagcgcgcactcgaccgtgagcgtggccaagtcaagacatggagtttacctcatgggccaccc

SEQ ID NO: 53517 - DNA, 321 bp, Zea mays
ttacagggagaaggagatgatatgaagctttaagggtgcttgaaagaatcaattcaatttttattaactcaagctatcaatcttcaatgatctatatgtggcggaaccacccgaattattccaacttatatgcctaagtcctgccttaaaagctagaccacacttaaatgggaataacacgtcagtccctcggatctagtccgatgaggccactaacaggatcaagtaccacatactcactcgatggtgaggcacagagcaaatacaataaagcataaatccacacattaaagagtattaaatttattacatcatcatcga

SEQ ID NO: 53518 - DNA, 187 bp, Zea mays
  unsure (1)..(187): unsure at all n locations
atgcgcatgctgtgatgcgtagacgtatcatagcatatacgtatgcctagcattgagctgtgcgaggaacaggacaanacactgatggcgctggatctcaaccgcaaagatgcattctcatggactgctgcatatctttgacgagctacagggacgttttgatcctcactcgtggtatacatgcttc

SEQ ID NO: 53519 - DNA, 334 bp, Zea mays
tggattgccagaatttttctggaaagttccacgcctttgatcaactccagattatctattgcagcagatttagagggacccaaagaaactcctaatttattagctatatctagcaagtcaacattattagaatcaagcagaggaaaagagttagtgtacatacctttgttgaggaaagcatctttggcttcagctctgaaaatagctttatcggccaccttcacatcttcattcttctcgagcctagagctttttctgatgccatctgagatgttggtgggcatgtccagaggttttttacctttcactttctgtaaatcctcaccattggggg

SEQ ID NO: 53520 - DNA, 391 bp, Zea mays
gcatgcaagctttattgtctcttattgtctctattgtcttaagttggcttcttggggggagaagtgttgattatgggaaatagggggagtttttgaaatctttgatcaatctcttctggaatgactctctttatgcttcaacatgtgtggttgacttagagatagagatctgagtttgatttgcaaaaacaaaccaagtggtggcaaaagatgatccatatatgccaaaattgaataaaactcaaagtcagtttttatttgaagtacatttgcacttgttctagttgctttatgttgtgttggcataaatcactcaaaagggggagattgaaagggaaatgtgcctttgggccatttctaagtatttcggtgattgagtgcaaacacaagt

SEQ ID NO: 53521 - DNA, 331 bp, Zea mays
tctccttgtcgtcatcaaccttgacatagaaccactccgacttccagcctgctgcccatttgcttcggtagctgattacaggaaactttgtggttttccgataagcaaaattatagcaaccaaaattgtcatgcaatccatcctttctagccttcgtctgatagtgcagctcgtgaacccgacaaaagctgtccgcaaatggctccactgcttggcttcggagtgcccagatataaacactaagcctaacgatagcgttaggagtcaactggtgaaaatagataccaaatctcttcagtacctctgcaataattccatgtagggggaatct

SEQ ID NO: 53522 - DNA, 59 bp, Zea mays
cactacagctgagaataaaggaactctgtgggcctatgaacgactaattacatttttgt

SEQ ID NO: 53523 - DNA, 358 bp, Zea mays
cgcgtgcaggctcgttatccgcacatgagctgattctttatgcctcaaccagcccatgcacgtcttatctatgaaccatgcatctacaccgcactcgccttttgataaatgggatgcgtatagttcgtcgcctagggcacccttaaaggctagtgaaccgtctcatgatctaacgacaggcgcgtctacatgaggagataggaccttatagaccatattacttgatcgactgacagagagtaaatgatatccacaagactcaactagaaccgcattacagattgagtgcttggtgaatattgcaatcttgcctaaaccttgcaccttgccttggttcccatcaccgaatatgactgag

SEQ ID NO: 53524 - DNA, 308 bp, Zea mays
tacttctcatcagggaaagcatgattacaagtgttgcttttgttgggatgctgattggagcttactcgtggggtgtggtttcagacaactatggaaggaggcaggtccaatcttttacttatgtcatgtaccattttgcacaaaattatgcaagtcaatttcctttttgctgatgattaacatgaagttaccaagcttgttactgatgtcatttctattggacaagtggcttcttcctacttcctagttatagctgattaatatcaatggcatgtttgggatcagaatacgccatgtgtaaaaaattc

SEQ ID NO: 53525 - DNA, 344 bp, Zea mays
tcggattcccaactttagaagacggactttcggtgctgtcaaagaacgatctggctgacagcctatcttacaacagtttaaaggtgcgacaaatagaattgttgtattttttgctgagttcaaaatttttcgattgtttaaaactattgacacagacatattcctgtttgcacggcctgatactcagcgatgccctcaaggcacacaaagatgctgaggaccaaagatgtactatagccctgagcaaccttcgttccgaagtgattgaactgatgaaccaacgtcttgaaaaatataacacattatactcattgatcaataaaataaaggaagacgaagctact

SEQ ID NO: 53526 - DNA, 373 bp, Zea mays
accccctttttgtgacctcttaaactcaccttgaagcctggtaagtagcataggctaataatatacgaattgactcaagcctagctacgggtgcataggtttcaccaaaatccaaaccttcgacttgggagtatcccttggccacaagtcgggctttgttccttgtcaccacaccatgctcatcttgcttgttgcggaacacccatttggttcctacaacattttgattaggacgcggaactaaattccatacctcgtttctagtgaagatgttgaggtactcttgcatcggcaccacccaatccgaatcttgaagtgctttctctacccccttatgaatgtcgccgaggatagtgtcgacggtgtgatctca

SEQ ID NO: 53527 - DNA, 415 bp, Zea mays
cgcttgtggaggttcttcatccgcacatgtgctaatcgtctatgccacaaccagcccatgcaagtattagccattaagcatgcatctagaccggcctcttcttttgcaaaatcaactaagtaaagttcggcgcttagtgcacccttaaaagctagtgaaccatcacatcttctaaagacagacacatctacatttgtagataaacaattatatcccgtattacataattgactgacagatagtaaattatatgcaagagactcatcgtaaaacacattagagatagagtgctcattagatattgcaatactgcctaagccttacaccttgccttggttcccatcaccgaatatgattgaatctggcgaagtcttattcttgacgtggaggtgacatcttcttctccccggatatg

SEQ ID NO: 53528 - DNA, 346 bp, Zea mays
tctaaagggagaacacattttgggactaacagacgttcattttgagaaagacaggatttgtagcgcatgtcaggcagagaagcaagttggtgttcatcatccacataagaacatcatgacgactgacaggccactcgagctccttcacatggacctattcggcccgattgcttatataagcatcggcgggagtaagtactgtctagttattgtggatgattattctcgcttcacttgggtgttctttttgcaggaaaaatctcaaacccaagagatcttaaagggattcttgagacgggctcaaaacgagttcggcttaaggatcaagaaaattagaagcgacaac

SEQ ID NO: 53529 - DNA, 381 bp, Zea mays
agcttcaacactgtgtgtacttttattggcacaagatacttgtgtcaagaacacatcgcctatagagtatggccgcttatgagtgaatgggagatgccaaaggaggctgttgtcgggtctagtcagggcggcttggtctatttaaaatataccttcagatatagaggcgagtttgatgagccaaacgatgagtggttgtgcagtattgaggcaaccagtgacgaattacttggggcctacacaagggctgaagatgatgcaatgatcttggccttcgaaggccgaggcaagaaaagattgaatagagtttttgacgtcattggtttcgtataccctgattatagctatcactcgcgatagctgggaaagagaaggaaaact

SEQ ID NO: 53530 - DNA, 346 bp, Zea mays
ttgtaaagtgagaaaagcggaggcaaatcttgtcacacctggcctaataatatctcttttctttgtgaacttcctcattagagacaaagtgctgtggtgtgcataaataaatatggtcaatccttttgctgaatcaattacattcttgaaccttttcatctttccaattccttcaagcattaggttaattgtatgggttgcacaggaagtccaaaataggttgggtctcttgacataaagcaaatcctttgctgccatattatttaatgcattatctgtgaccacttgcacaagatggtccttaccagcatccaatttctcaataaagttatccacaaactgaaaa

SEQ ID NO: 53531 - DNA, 327 bp, Zea mays
ttccaaacaatcttggatcactatttttggttatctgaagattaagttatggatgcttaaagtctgaaggctgaatctgtccaattctggacagcaaagccttctaatgctttttatccttaggtaaatatggaatcaccttgagatggttataaataaaccgtaaaacatttaattagctttgcagaaagtctaaaatcactttgtttggatgtctgaatcttcagttgtgaatttttgaagttgcacgcctgaatctgtccaaatctggacagagctgctgtgtttgcacaattcgactttgctaagtgttgaatcatgttgtga

SEQ ID NO: 53532 - DNA, 323 bp, Zea mays
aatctacaagtattcctatgtatcacaagtctacaattagccttcatttggccttcaaatggtatctttgagactacatttggtattatttacatgtcttttccaatatttgattagactatatttcacatcctatacttcccatgttgctataaatgcatatgttgttaaatcatattgttacctatgcataagggaagttagtctattcaaatcatgtcttgctgaaagttgcctagagggggggtggataggcggaatctgaaaattataaacttaagcacacactacaagcttgggttagcgttaaaattaatatcaag

SEQ ID NO: 53533 - DNA, 337 bp, Zea mays
tctactgaagcttcggctcaacaagctggaactgaagctgggccttcagagccctacaaggagcaaccttttgaagccgaagcaataaaaattccagaaccagtattagttgaagaaactgacaccgccatccccgaagcacctgccagcatgcgtgattacatgatacgacatgcctcggggaaaaagctatccgaagaagaaactcatgaagccatccattatgcaaaggaactaaaatatccgaagggggcagtaatattcaatggaacgaatgaagatgacttcttatactgcctgcctgacaacaaagagctatctgtctgccgagaaatgg

SEQ ID NO: 53534 - DNA, 411 bp, Zea mays
  unsure (1)..(411): unsure at all n locations
agcttagataccaccgaaatataggtgaagaagctccaaagtcgttactaaggggatgcaaagcttagataccactgaaatataaggtgaagaagctccaaagtcgttcctaaggggatgcagagcttatagactccaaagacgtccccaaggggatacagagtcttgggtgttccaatgtgggtgagtgtgtgtgttcggcataaccatcatattgcatcatatcatcacatcattccgcataacattacatcatacatcatatcgcatcaacaacgaagattggatacgaagcaagtcttcgacaataacttgaactaanatgtgctgaggcacaaaggcaaacttcaaaaaatacaatnttatcagatttgctatagaaggggcttctttctttatgaagcatgaaaa

SEQ ID NO: 53535 - DNA, 337 bp, Zea mays
  unsure (1)..(337): unsure at all n locations
acttttatttacttcctacatgcttttaatgtcttccttttcggtggttgatgccaaaggggagaagtttaaggaccaaagcaatgaaaactatatcaaacaccaaacaccacaaatttaaaattttatatctacaaatggtttttcaagtggttttggtcctaaaataggaaataagtgaattatggagttagggagaaacttaagtccataatttcacattgtggggacaaacatgcatcctagcaagtagattgcaatattttattcaaatacttgtattatttgcttgctttggttgtgttgncatcaatcaccaaaaagggggagattgtaa

SEQ ID NO: 53536 - DNA, 394 bp, Zea mays
ctcgacccggatccttaagtcacctgccgcatgcaagctttatcacatggacgtgaagagcgccttcctcaatggaccaatcaaggaagacgtctatgttgagctacctaccggctttgaagacagtaagtaccctaaccatgtctataggctctctaaggcgctttatgggctaaagcaagccccaagagcatggtatgaatgccttaaagatctccttatcgctaatggcttcaaagttggaaaggccgatcctactttattgactaaaactcttgaaaatgactagactgtatgccaaatttatgttgatgatatcatatttgggtctactaacgagtctacatgtgaagaattctagatgagcatgacacaccgattctagatgtctatg

SEQ ID NO: 53537 - DNA, 343 bp, Zea mays
  unsure (1)..(343): unsure at all n locations
tcatgcaactgctgccagaaatgaaaggggaactgagttcctctgtctgacacttatcttctttnggcacaaccactgaagtacaagacggatccgcagacatatacaattctgccaatactgcactgctgtagttggtcttgacaggtatgaagtgggctgacttggtcaagcggtccactactacccagatggaatcgtagccggctcgagtgcaaggcaatccgactatgaaatccataccaatttcatcccatttccactgagggatctgcaacggttgcaacaatccagcaggtctctggtgctctgccttaattcttcggcaactatcgcacatagc

SEQ ID NO: 53538 - DNA, 444 bp, Zea mays
  unsure (1)..(444): unsure at all n locations
agcttctaaagggagaacacattatgggactaaccaacgttcattatgagaaacacagggtttgtagcgcatgtcaagcaggaaagcaagttggtacccatcatccacacaagaacatcatgatgaccgacaggctacttgaactactccacatggatttattcggcccgatcgcttacataagcatcggcgggagtaagtattgtcttgtaattgtggatgattattctcgcttcacttgggtattctttttgcaggagaaatctcaaacccaagagaccttaaagggattcttgagacaggctcaaaacgagtttggattaaggatcaagaagataagaagtgacaacgggacgaagttcaagaactcacaaatagaaggctttcttgagaacgagggcatcaagcatgagttctcttctccctacacaccacaacanaatg

SEQ ID NO: 53539 - DNA, 327 bp, Zea mays
tcgcgagtgagggaacggatcccagtctctcgagaggtctaatgctgttgagagaggttttgccttgaagtgagtcgtctgagttagccttttttgcgtgtcttgggaaggccttgggcatctccttttatagatacaaggaggtgatccagctgtacacatgaggctgtagctatgtgataacgtggccggcggagaagtgcttgagccctgtagaagcgtagctagcggtgcatccccaggtcctgctgacgtttctttgccttcgtagagagctgaggacaatcgacgtcatggacgtatgcagggaatcatcattacctgtta

SEQ ID NO: 53540 - DNA, 442 bp, Zea mays
  unsure (1)..(442): unsure at all n locations
agcttctaaaggggagcacattttatgacaaacaagtgtttattttgagaaagacagaatttgtagcgcatgtcaagtagggaagcaggttggagctcatcatcgaaacaagaacatcatgacgaccaagaggccgcttgagctacaccacatggatctattcggcctgaccgcttacataagcatcgacgggagtaagtattgtcttgttattgtggatgattattctcgcttgacttcggtattctttntgcaggaaaaatctcaaacccaagagaccttgaagagattcttgagacggactcaaaatgagttcggattaagaataaaaaagattagaagcgacaatggaacgtagttcaagaactcttaatngatggatttcttgaggaggagggcatcaagcatgagttctcttcttcctacacacctcaacaaaatg

SEQ ID NO: 53541 - DNA, 328 bp, Zea mays
tcagcggctttatttggttcttcttcctgagcccctggcgtccaatcatcaatgaagtctgctaacgcctgggactgaattgaggatctatgtacatagtcaatactgaattcgttaagctccacagcccattttccaatccttccagtagcttctttgttcctcattatgtccttcaaaggctgtgacgaaggaacaattatgtgatatgcttggaaataatgccgaagcttcctaaaggccattaacatagcatacaacaccttctccaattctgtataatttttctttgataaacttaaaacttcagagacgaagtacactggag

SEQ ID NO: 53542 - DNA, 434 bp, Zea mays
gctgcagcttccggccttatactgtttctatttttatatgacccgaaacaacctgtgaatcagttttaagtatgggccttctgattcccattgcttttaactttcgaagaactagaatcaatgcttcgtactcaccaatgatatttgtgcaactaaaatcaagctttgtcgcataacaaggtttgactttggaaggtgaaaccaacacaacaaccgcttctgcttcgaaagtttcccaagatacatcacaaaacactgtccaggcttcggtggctttattcggtttctcctcctgagcccctggcgtcagtcagcatgaagtctgccacgcctgggactgatcaagattatgaacatattcatacaaattattgactctgcgccattttcaatcttcaagacttcttcgtctatatatcttcagagtggaaaag

SEQ ID NO: 53543 - DNA, 330 bp, Zea mays
  unsure (1)..(330): unsure at all n locations
tggacagtgttctgtgacgggtcctnaggaaccttctgtgcaagggcggctgctgtcctagntgcaccttccaaagtcagaacatgctatgcaacaaggcttgatttcagctgtacaaataatattgctgaatacgaagctttacttttggggctttgaaagttaaaggcgatggggataagaaaggcagtccttaaaaccgactctcaagttatttctggtcatgttgacaagagttgcaagcaagagatccgaagcttgaaaaatacctggacacagtttgaaggcttgaagcttctttcgagggattttctgttaagaatattccac

SEQ ID NO: 53544 - DNA, 441 bp, Zea mays
  unsure (1)..(441): unsure at all n locations
tctaaagggagaacacgtgatatgtttgactaacgtgcatttttatataagatagaccttgtgcagcttgtcaagcaggtaaacaagtgggaggagcacatcacagcaagaacgtgatgaccacttcaagacccctggagctgctgcatatggacctcttcggacctgtcgcctatctgagcataggaggaagtaagtatggtttagttattgttgatgactnttcccgcttcacttgggtgttctttntgcaggaaaaatccgaaacccaagggactctcaaacgcttcctcaggagagctcanaatgagtttgagctcaaagtgaaaaagataagaagcgacaacgggtccgagttcaagaaccttcaagtggaggagttccttgaagaggaagggatcaagcacgagttcttcgctccctacacaccacagcanaatg

SEQ ID NO: 53545 - DNA, 400 bp, Zea mays
  unsure (1)..(400): unsure at all n locations
ctaagcttgagcatgggggcataaggcagagtgaaggatgttttgtgttcatntaaactaaaggaggagcacacttcacaagttgttactttgcagaagaacataatgtatttgctcgaaagataaggtaccatgatgatgaacgagagatgcctncgtgtagtgatctttcgatttttcagacaaacggcaaagtcgttggtccacccaaggcatatcacctaagtatggaagaacggaagtctgctttactgtacatgttcacgaatatgcctgacgtggagaaatactttgtgtaagacttgtnttcttaaactgttcatatgtgaattantttatgttatcaaatatctcatgtcatancaataatattgacagcgagtttgatgaacaaaacatg

SEQ ID NO: 53546 - DNA, 452 bp, Zea mays
  unsure (1)..(452): unsure at all n locations
atcctctgagtcttctgccgcatgcaagcttcggcagctctcttcggagtagaacttgaagattttattatttctagcacatctaaaacgttgaccattctcttcctcttgggagtcgtggtaagatccttttgtgccttcggcattgacacctcaatgtggcggaaccgcctgaattattcaaacttaagtgcctaagtcccgccttataggctagaccacacttaaataggaataaatcgtcagtccctcggatctagtccgacgaggccacttatccaggatcgaataccactagctcacacgaaggtgaggcacagagaaatacaataaaacataataccacatatttaataaatatcattagtgattacattatcggagtttcagaaataataaccataaattntaatgcagcggaaataactaacggagaaaacccgagtaacatg

SEQ ID NO: 53547 - DNA, 371 bp, Zea mays
  unsure (1)..(371): unsure at all n locations
gctgatgtgccttatccagtttgcttgttcttaaggatcgccatgttgctttatcaacctaacctaggaaaggcatgtccgaccattttcttgaatntgatgcctttagtttcctcatatctatcgaaggcataccaacttaatcttatgtttgttttccctccgtatctaatcagatactaatccttgaccttgtaatctctatgatgggcatagaaatatgcttgnggctgaattaatagtctcccatcatactcctttcatcaagtntaagttatggccatgccttgttcatttcattgggccatgaatctattggctctctatttgtaactcgtntgacaggtagagtctcttgtatattgtcatcc

SEQ ID NO: 53548 - DNA, 423 bp, Zea mays
agcttataacaggaggatagaggcaagagcttgttcatatgtcatgatataatgagagttgtacaagcatggagtttgtgctccgctactcaagtgtttatccagaaccgaaggtatagagttgatgaaagaaatacatgcaggcctatgtggatctcacattggatctaggccgttacttggaaaaattttccgccaaggattttattggccgaaggcagcttcggatgcagcggaattagtccaaaagtgcgaaggttgtcagaaatgtgcacgagatcaaaaacaaccttcgttcttaacacagctcatacaacccatttggccattgcaaaggtggggccttgacttgttaggtccgttaccaccggcccaagggaatctaagatatgttgtagtggcggtggaaatattttctaaatg

SEQ ID NO: 53549 - DNA, 437 bp, Zea mays
  unsure (1)..(437): unsure at all n locations
gctcggaatggatcgcagnctatttctatctttagcgaatacaaacaggcacaagcaaacatatactcgcataagaacattacaccatacgagatcaaatattactaaagcgagcaatataaaatagagagcgcttctacagttatgcgatgaaaagaaccgcgatagtcgaagctatggtcgaggggttagcatgtctacactaatcaaatgtaaattaatactactaattagttttgactaacttactatgttaatagttgacagttaagcaagtaacttaattaatatgagcgattctaagcgagacgaattaacgacgcacgacgtgcatacacgatgtgcgcaacgcgctgacacaaacgacttagcgcgcggacaacgcgcgatacgcgcgaacggcacgctgtaaagtgcgcgacacacgctaacgggac

SEQ ID NO: 53550 - DNA, 409 bp, Zea mays
agcttgtacaaagtccactcgaattaatcttctgagaaacccgacctcgctgcaatatgacacccgaaggtccaacacaacaagcaatggatgaattcagaattattgcagagcatatcagcacaagggacctggttcaggagtttttggctttcaaagtttttcctagtgtaaaggagtgggaaatgccgaagctgaagggggagaagaaagaaggtgaactcgtgcgcttaccttactacttcaagtttaagaaatacttcaaaacaccttgccaagagtggctggatacaattgaagtgatgtgcaatgagatacttggcaattattctaaaaaagaagatcagctgatgaccgcagccttcggcacccgtccgaagcgaagactaaaccgagtgctggacgccct

SEQ ID NO: 53551 - DNA, 484 bp, Zea mays
  unsure (1)..(484): unsure at all n locations
actaagcttggcacgatgacctacatcggctacggggcgctacgagttgtgtggtgtggtgtgggttggcgtcaatctgggtgccaaacacgggaatgcaccacctgngtgctctctgcggaggcgcggacggtcagcgacacaggcgcangagcggatcctcctctgcacgctttcggccggtccgagagaactctagaactcgccccgggagagatcccgtcgagggggagagttccaaggcgttgcttcgagtcggcagaccgctcgatgctcctctaatcggcgtagagtcgaagagagattgttgggaaatactaaattagatctaaacctaaggctaaattactcctactcttatgaatcgaaggacgatgcanataacgtaaactgataatatatttgatgatngattggggggttcaatggcatagccttcattacatgaaggngtangtctgaccattacagtcggtctcagtaa

SEQ ID NO: 53552 - DNA, 381 bp, Zea mays
  unsure (1)..(381): unsure at all n locations
tctagagggagaacatgtgttatgtctaacaaatgtttctttcgtattagatagaccttgtgcagcttgtcaagcagganaacaagtgggaagtactcatcacatcaagaatgtgatgactacatcaagacctctggagctattgcatatggacctcttcggacccgtcgcctaccttagcatcagggaagtaagtatggtcttgttgttgttgatgatttttcctgcttcacttgggtattctttttgcaggataaatcagaaacccaagggaccctcaagcactttctaaggcgagctcaaaacgaatntgagctcaaggtgaaaaagaatagaagcgacaacgggtccgagttcaagaaccttcaagtggaggagtac

SEQ ID NO: 53553 - DNA, 428 bp, Zea mays
  unsure (1)..(428): unsure at all n locations
tgcaagctncgggaaacctacactcttcgatagagtgtctattatctctgccccgacacggtcgcgaatgcatcctaaggctccttcgtcaattccaccaaagagcatagctcctggctggtagccacaggatatcccatattcctgtagctccttcttttcggcctcggataattcttgacctaccaggttccaaaggtcaaagtccctttctttcgaagcagcatcaacaatctttttccctttgttaggcactgtggccatgaccttctctgcaagcacagctgtctctttcgcagccatattcgagataattttattaatccctgacagtgtactctcaaggttggcagcttcgacagcagctgcagcttcggcagaggtatcaacttcggtaatggcctccgcgcttgcaataagtgttattt

SEQ ID NO: 53554 - DNA, 442 bp, Zea mays
  unsure (1)..(442): unsure at all n locations
ctaagcttcgcttatctatactatggatgctttgaatctgttcttttttctttatcctttctggcagcttcctgacttccatgaatagcaataggcccttgatccaaaggtatcttcatgcatagatatgctggataaagaattgcttcaaaagcattgagtgtcccacgaccaatgattgcattgtaggggtactccatgtcgacaatatcaaacacaacttgctcagtccttgtattggtgacaaatctgaaggtcactggcatcgtgatcttgtcgagcgcttacaatctgtcttctccgaagccacaaagagggtgtgtagcatcatgaatcttatccttaggctcttgcatctgtctaaagaccttagcgaatataatatctgctgcactacctgtatcgaccagaacattgtggaccagaaatccttngataacac

SEQ ID NO: 53555 - DNA, 370 bp, Zea mays
agctgtaccaaatggacgtgaagagtgcttttctcaacggaccaatcaaggaagaggtctatgttgagcaacctccccgctttgaagatagtgagtaccctgactatgtatataaactctctaaggcgctttatgggctcaagcaagccccaagagcatggtatgaatgcctaagaaattttcttattgataatggattcaaagtcggaaaggccgatcctactttatttactaaaactcttgacaatgatttgtttgtatgccaaatttatgttgatgatattatatttgggtctactaacgaatctacatgtgaggaaattagtacgatcatgacacagaagttcgagatgtcgatgatgggggagtt

SEQ ID NO: 53556 - DNA, 400 bp, Zea mays
  unsure (1)..(400): unsure at all n locations
tctaccgatgtttttgtgctgggcagtgaaagctactatttctctttaccaacggngagatcatatngnttcatgttttcttactgcttaaatcaattggatctgcaatgcttacccctcctataaattgaatctattgtgtagtctgggcaaggagcatgctaccagtgccacttacgtgagcctgaggagcttcttctaagctgccacgtctgcagatcactgtgggtacactcgtactgccttgatcctccgctgactccttggacatgcatgcactgcagagatctgcgggtgctgtttcatcggtatcgttagccccacttactgtactagtcaaaccttaattgttgaaggaaattatcagaaggcttgaacaccgtatcggcttgtcttactg

SEQ ID NO: 53557 - DNA, 422 bp, Zea mays
  unsure (1)..(422): unsure at all n locations
agctntatgaaaccgacactctgtgacagagtgccgattatctttgccccggcgcggtctcgaatacattctaaggccccttcgtcgattccaccaaagagcatagctcctggcaggtagccacaggatataccatattcttgtagctccttttcagcctcggataattcttaaccgaccaggttccgaaggtcgaagtccttttctttcggagcagcatgggcaatcgttttccctttgtcaggcactgtggccatgaccttctctgcagttgcagctgtttcttccgcagccatatccgacagcattttatcaatcccagatagtgtactctcaaggttggcagcttcggcagtagttgcagcttcgacagaggtattagcttcggcaatggtcttggcgcttgcaatgggtgttatctt

SEQ ID NO: 53558 - DNA, 372 bp, Zea mays
  unsure (1)..(372): unsure at all n locations
ttgatcaattaaagaagagggtgatgtgtccaccagtgtttgttattgtacacctgcagaaaggatntgatatttatcgtgatgcatgtggccaacgcttgngatgtgtactcatgcaagaaggacatatgattgcctatgcttctcgtcagttacggggacatgaattgaactaccccacccatgacttagaattggcagccgntgtgcatgcacttaagatttggagacattacattatgagaaccaagtgccaagtgtacacggatcataagagtttgaagtatatattcactcagaaggatctcaaccctaggcaacgccgttggttggagcttattaacgattatgaattggagattcactatcacc

SEQ ID NO: 53559 - DNA, 300 bp, Zea mays
aaaagaaatagtatagaggatgcatgttatcgcctaagttggtctctcttttctcattccatggcactctaacaactatcgaaagttgttatatcaagagactacaatcattgaatagtgataaggggaactcaaccacgaattttcatgactcattacttgatgtatatagttacatactcacttaaaattaacatggacatagaatagaaatgaagagcttttgaacatctaccataccactactattactggaatctccacattgaaaaaatagcagaagcatacacataaagctgc

SEQ ID NO: 53560 - DNA, 490 bp, Zea mays
  unsure (1)..(490): unsure at all n locations
ntntgttccagatgtatgcatngactntcttcttgtacaatttattctattggcctcacttaaatcctacgaaacanagagtatataggagcaaaagtaaattagatggttcatcaaataaataacgaaatgattatcatgactatagtaatgtacctgtgctttaggggtcatccaattattgataagtgcaatccactgatcagctaatacaccatcaggagcattactattattagcatcctgactcttatgtgggtcaaaataaatggatttcaaattggacttgtgttgcctccatctctgtccaattgttcgcagcacccatgtttccatgcgggcagggtaaagaaatctcttctgcattaacaatggaaaaaaattgtgaaagtgtactattactacatggcaactgaaaaaatgtgaaagttacctttacttgataagaatggcctcttattgattngttatggtcctatctttctttcta

SEQ ID NO: 53561 - DNA, 315 bp, Zea mays
  unsure (1)..(315): unsure at all n locations
agctngctttctgtctgaacctttgntnttaacctttctcagatgcatgttacaacaagttgtgttttccctaacattatcaaagcaatgttatgcttcttgatgttatgacttgacatcaatctatccacccatctactgtttgataggcataaatcagagcagctgcgaaaaaaaaacataaatacttgtaagggagtatgttttcttgcatttcacgttttcagtgtttgtctcgaatttaccaaggatagagaaacttcagctttgcaccgattccctatcaaatangcagacgtgtaagtggaatggtta

SEQ ID NO: 53562 - DNA, 333 bp, Zea mays
  unsure (1)..(333): unsure at all n locations
tncactcattntgttctgggttggcgccccgtccgcatgcatcggtggtgttggggtgcagagcgagccgcaccgcatgcatcacgtacagcggctggtggcctggctgcctagccgatcgagggccgagaccaccatgtatgtgcctctctggccgtctggcacatagctgccggccggccggtgcagctaccgcggcgcggcatcgatgctgccaaaacccggccggtaagatccgtcccagggggccacgttttactgcgcacccaccacgactacacgtactacggtcgtgggcctgccgcggttntttcctgccgcgaatgatggatg

SEQ ID NO: 53563 - DNA, 396 bp, Zea mays
  unsure (1)..(396): unsure at all n locations
agcttgtcaagcattgtttggtacccatcgttttgtggatccatcatatgttgccaacaaagatctatgaacccgaatgtcctttgcgcctagcgcttggcaaattcattgcctctctagcacaagttgcaattttgggttgcctaggtatatatgaatcaaatgacaagctatgagtggaggagttaccaatgggacaatccttgcattgatgtcccttttcccggcatgtgtagcataagcgttttccaagctttgaaaattccttctttccttgtttgttgcttgctacatggttagtaaaaactctcttttctaaccctatgcccttttgtttaaaatggggaccagatttaatanagtgtcccttctttgaatatttacaacacagtttat

SEQ ID NO: 53564 - DNA, 310 bp, Zea mays
  unsure (1)..(310): unsure at all n locations
ggcagcttgtcagcatgaaacaagtgggaggaacacatcacagcaagaacgtattgaccacttcaagacctctggagctgctgcatatggacctcttcggacccgtcgcctatctgagcatatgaggaagtaagtatggtctagttattgttgatgactnttcccgcttcacttgagtgttctttntgcaggataagtctgaaacccaagggaccctcaagcgcttcctaaagagagctcanaatgagtttgagctcaaggtgaagaagatatgaagcgacaatgggtccgagttcaagaaccttcaagt

SEQ ID NO: 53565 - DNA, 387 bp, Zea mays
  unsure (1)..(387): unsure at all n locations
tgcaagctctattatatcgaatcagtaaagcggccttctcgcctggttctccctacctccgatcccctactctctcttttcgcgcgcggagtccggccgcggcagcaagtgccccggcaaaaggagacgtacgaggccaacggtggcggcatctacctgtgtgggccgcagtcgtcgcgcgaccgacggcgggccacgtgaataaaaacgagacagaaagcccgggcgcccgcctgatgcgataatgattgggtactgcactggcggccggcgctttagttgcttagccgcgtancatgggagagagaggatctgagcgaggggccggcgggacgccgctttcgccctgcactatcatggctgacgatcgcgagccgatcgataccg

SEQ ID NO: 53566 - DNA, 177 bp, Zea mays
  unsure (1)..(177): unsure at all n locations
cgagacagcccaccactgccgcgaggaacgaggctgaatgaaagaagcaagcactaaacagcacccatcgcttcgaggagggaggccgcggaacgaaacacctnancaggccaaatcaaccggaaacaatcgcgcgcgaggccacgcgccggtgcagacgaatcacaaacacacgca

SEQ ID NO: 53567 - DNA, 446 bp, Zea mays
tgcaagcttggaaaaagataaaattctacttacactggtagataaagtgaataaagacgaagctgcttcaaaggcccaggccgaagctcaaaaacgcgagattaaagatcttcagaaacagctggctagagctaaagaggagcgcgcgcttgaggaaacgaaacgagaacttagtgattttatggtcaacaaattggaatcaaaagttaaggagcttcgcacatctcaggggaaatgctatgtcaaatctgtagaatgtgtgaataaaattaaatccagcttcgccagcgtaggcgccttttccagcgaagagaatttctctcgaggcaatcccgaaggtccgctggaatggattagccacgaagcagaggccttcgaagagattctgaacagtcgcggcgaacatatgtgcttttcgggcgccagaaggaatgcttccgtcttat

SEQ ID NO: 53568 - DNA, 385 bp, Zea mays
  unsure (1)..(385): unsure at all n locations
catgggctagtcggcggtgccatagtctacccatgttagtcttagcaatgaagcaagtgtcgagttcagctctatcaaaatctactaagtatagctgaccctctaacactcccttaaatgctattgaatcatcacttcttctaaagacagtgacacctacatcagtaaatagacagttgtagcccatttgacataattgtgaaacgcgaaagcaaatgtaatctaaagaatctacaagaaaaacattggaaatggaatggtcaggtgatatagcaattntacccaatcctttgaccaaaccttggttcccatccccgaatgtgatagttcgttggggatcttggttnttctcataggaggagaacattntcttctcccctgtcat

SEQ ID NO: 53569 - DNA, 421 bp, Zea mays
  unsure (1)..(421): unsure at all n locations
gtattcctggaccagacatatatctgttttcaaacatcaattntaaacacacactcactatgagacantttgcgtgcattaagagccaaactntacaaattttaactaataatttgcccaactatctttttaatctctactattattaaggctgcaagagtagtcggtcattccgtctgccatcattcctgttctgccattcccgttctgccactgttcccattcccatgtctatcattcccattctttattctgtctttctcattcccgtacaacccacgtctagctaaaattaaaaaaacacatgtcggggaccataattagcggtaccctcaagactcctaatctcagctggtaacccccatcagcacanagctgtaaaggcctgatgggtgtgattaagtcaaggatcggtccactc

SEQ ID NO: 53570 - DNA, 483 bp, Zea mays
  unsure (1)..(483): unsure at all n locations
gttgaacagagtgtcttgtccatctgctcatgggaagagtntctgtaactaataaggttctccctttctggccaaatcatagatggaatgaataaatgcttagtcacaagaatattagtaatgcgtcaagactcaaggctataattttaaatttctagaactattnttgatagttgtcgttttcagttatgtagtgctctacttactgcacctattgagatatttaatagagaaattaaataaaggatactgctactcatataaatatagatatattcttgctccctcaatattcanaacgtgcaaatcacaaccctaggtgattatgagagagcttatgtgaagtaattcatatatagaatggcccacgtggcatatggcatctcacattctatgcctctnttctttgctatatgtgaanggaggaatcactaataccatagacgagttagatcggtagaaaatgtaagctctctattattg

SEQ ID NO: 53571 - DNA, 440 bp, Zea mays
agcttaaagaaacatgatcaaaggcatagaacacatgtatgctatagatcaatccaacttacgcgaataagacatttagctctgaaaggatcacgatgcccaagaggggggtgaattgggcttttgtaaaaatcaacactaattaaaacctaagcaagagctaagcaagagcccaacttcaccccaacaactagcactaagaatataatactagaaatgcaacaatgctaagacaatacttcaaatacttgctaaacaaatacacaatgtaaagtgcttgaattaagtgcggaatgtaaagcaaggtttagaagactcctccaatttttcccgaggtatcgaagagtcggcactctccactagtcctcgttggagcacccgcgcaagggtatcgctcccccttggtcctcgcaagaaccaagtgctcactacgagatgat

SEQ ID NO: 53572 - DNA, 420 bp, Zea mays
  unsure (1)..(420): unsure at all n locations
tctcggcgtannatgatgtgaggcagctgcccccgtccatcatgaccttggtgagcctgacatcgccgacaacggngtcgacgacgagcgggtatttccccgggctcggcacatggtcggggtggtcggcccggtcgaaagtgatgggcttgtcggaccagtctaggtagactggcgccgccaccttcaccgagcagacctcccggcgctcttgcttgcggtgccgagccgaggtattcgccgcatgccctccatagatcatgaagcagtcgcggacctcggggaacccccctgctgggtgatcttcgttcttgtcgtcgtcgtgggccctgccaccctcggcgggtggcccggccctgtggaagtgacgccgaagcataacgcactcctcgagggtgtgcttgacnggcccctgatgat

SEQ ID NO: 53573 - DNA, 443 bp, Zea mays
  unsure (1)..(443): unsure at all n locations
ngcttgtcctttgagaggaatttccagaagccccaactgactgattgccaagttaaaattaatcattctgaggtggtcccctccaggtttattgtggtttttacgagatctgatcatattaaaatcgccaaggaagatccatagtttgtcatcattaatctcaagactggagaaccaagagagaaattcctctcttctgtgaggggtacaaggggcgtaaatgttggcgagccaccaggtttgattagtcaactttgtacggaaacaaatcgtgtgaccgaaagagttttgatcaatcacctcagcatcaaagtgagagcctttccagattgttaaatagccctcagaagcgccaatagaatgtccgaaggccaacttatcaaaggatctgttgcagaagcgacaaatgtatgagtcatcgaacgactcttttttgtctcttg

SEQ ID NO: 53574 - DNA, 252 bp, Zea mays
agcttggagctgttttttgcaaagaggatccttcgaagcttaaccttgacgccctgaatagctccaggaccaccagcaatgccattcagaggccaagtgtatcctccaacagcatgaatgaagcgcccagcgcgtctgatgatcagttggaggactccaatgatgatgatgatgcgaggtcttgtagtcctgctgggaagtaaggcttaatgcctttcccttgggtggtgccgttatatctgtgcccttgat

SEQ ID NO: 53575 - DNA, 423 bp, Zea mays
  unsure (1)..(423): unsure at all n locations
tgaagtagagcttgaagtctttatttcttccagtacatccaatacgtggaccattcttttcctcttagaggtaattgcaagaatattttgtgccttcggcacggatacttctgccgaaggacttgtaatttctgatatctttgttctctcgacctctggctcatccaatttgaccaatggtgctttcggcgttgtagccagcccttcaattttctgcattatcgcagtttctttggctttgttagccgaagaggtctcaccaccaaattcaggcacctgtagccgtttcaatgtatcacggccggtgagtaagaaccttcaccttcttccttttcagcgcgggcccgcttggagcagccgaagcaacatncttcacaggtgccacacctttccttttctgacctcgtagcgggtagcggtagt

SEQ ID NO: 53576 - DNA, 417 bp, Zea mays
  unsure (1)..(417): unsure at all n locations
agcttaaccttgtaatgaggataagctacctttgtttcaaaggtggagggtccttacgtctctttgaaatccttaagggtaaatgcttaaaatgattccaacatgctttcataagtgcatagtctgtcatgagcatcacacttttattatgacactttgcacttcacaaatttctatgatatagatatgttctcattaacctaattatgtgcacttggcatttaaggccaaaatctctattcctctcaaggcacatatttagggggagcaatctatattatatagaactgtttaagcttaattgacatatccttttaatcatgtccctttcctttggtacatttgcatattttctatctctattatgccaaggctaagactaatatgtntccatgagcatctcatgtattaagtctt

SEQ ID NO: 53577 - DNA, 443 bp, Zea mays
  unsure (1)..(443): unsure at all n locations
tcaccttttcttatgacactgngagcaaaaccctatcanggtacattaactntctcaggggcatattgtgatatatggaacatagataagagggtaaggaaagatattgcaaagttgaaacctcaaacgtggataagttcagctggcagctgcagtttttattttccttttgtttcttggatttttctatctatgtctcctagcctttgtcttaacccaagtacctagctatataagtatatgttgatgaatatatatcttttgcttattctttcacgtcacctgtttcccaactcataacacatatcgaactntgtaggattattttgatgttattgagactcctatggantttggcacaatatgtcaaaacttggaacgtggtgacangtatatgaattcagaggatgtatataaggatgtacagttcatatggggatact

SEQ ID NO: 53578 - DNA, 421 bp, Zea mays
agcttgagtgatactgattgcgattatgactattgtgaagatgatcacgaagctatgcgcagaacagggaaaccgacctaaagatgaaaagccaaattggacctctagttatcgataaatgtaaagggcattaatgtaattttgcacggactgtgtcccgtgcctataaatagatgaacagtattcccgtactattcggactgacttggcattcacttttgcgtcacgcctgtactttctttccttcaagccgaaggtacatttgtaattcatctttgtccacacaagtgatataaatatattaataataatgtttacagaaattatgctactttctgtattttgcttgaatgttcttcattttttatcatgatcataaaggtacgtctttcatgaccttcgtcctaattcattatatccg

SEQ ID NO: 53579 - DNA, 455 bp, Zea mays
  unsure (1)..(455): unsure at all n locations
ctcagcttggcaaattctcctgttaccatcagagtacattcgtgatgtgatttatggatcnttcgcacacacactgaagagacacggaaatggtgaaagaccagacgttgacacttgtagttcattccatccctctcgtggtcccgagagtgcgcttactgaagacggatcgaagtttaaattntgttgcatgaatgagggtgaaaacggaagttcatgtcaatgccattcatcgaaactgcctgacaaggattcgagtgtgacagatgcgcataaaaattcaggtaagtatttgcctggtcttgttcaggatatttcttggaacaaaatctggttcatggaatatgcatctgatttcaaagaacatacatcaactntagcaagcttaagcagccactcaccctgttctcaagataatagtaatggaagcagtgatgagtgcttcgagaattatg

SEQ ID NO: 53580 - DNA, 348 bp, Zea mays
gcttaccacattttaatcatgagcgcttttctctttgcttggtcttgcttggctgccccttgcgaccctttaacgccgtcttgaatcttttgatgatgaaggccatctcttcatcattaagtccggacgtctcattagtgccaccttgctaggtaacgcctccttgcttcttgttgccttgagagcaaggggttgaggctcgttgattggaccattcaatgtgtcgaccacgtatcttgcctccttgatcattattcgcccgcttacgaattttccaaggacttcttcgggccacattttagcgtacctgtgactcttacgaatattattcaccacatgaggatcatg

SEQ ID NO: 53581 - DNA, 402 bp, Zea mays
tagcccgaatacattagaccattcactatctcggcctcggtgggcaactcggcttatcgcttgcaattgccgaattccatggcaggggtacacctggtatttcatgtctctatgttgaggaagttcttgtgggatccagaccatcagatcaagatggaaccaattgttgtgcagcaggatctgactctagagtgtcgtccggtgcgtatcttggaatcctcggagcgtgttttgaggaagagatcaattaagtatgtcaaggtcttatggactaatcagtctgagcgcgaggctacgtgggaacttgaggagctgatgtggcagaaatatcctaaacttttcgttgtgggtaagtattggtgattcattaatcttttcttttgtccgtccgatagaagcgtc

SEQ ID NO: 53582 - DNA, 377 bp, Zea mays
  unsure (1)..(377): unsure at all n locations
agctagacaatgattattgtctcttagtatttagagcttacggcaaattctcaagcaaaggaggggggaggactacaaaccccgctccaagatggtttgctaccggagtagtaagtctggtcactatgttgctaaatgtccatatacaagtgatagtgacagggacgacgacaagaaagggaataagaagatgatggagaagaggaaatattacaacaagaagggtggcgaggctcacatangactggaatgggactccaacgagagctccaccaactcctcctccgacgaggacgccgccaacatcgccatcaacaaaggtcttctttttcccaacatcggccacaaatgtttcatggngcaagatatcaaaaata

SEQ ID NO: 53583 - DNA, 373 bp, Zea mays
  unsure (1)..(373): unsure at all n locations
actaagcttcgcttgacatactcttgatactcgngacccgattccttttatacctattcacatatttcacttggaaaatattgtcaaatcatgtntttgaggaccttcggaagccgaaggcccncaacagtagcccctcgcaatattaatttcctggaatgataaattcatattgcgacatggacgaaggctttaagccgaaggtccgaanaaacaccttccctttgctagaatagcaacagtctttgacaagcgggaccctccagttttcaacgcactacgtgtataaataagagctcaccacgagtttatttggcacgctctcttgccatctgctnttactcacccaactnttagcctgtgcgcaacaaca

SEQ ID NO: 53584 - DNA, 408 bp, Zea mays
  unsure (1)..(408): unsure at all n locations
agcttgtgactttgagaaagctccttggattacatatataagcccgtttaatatgcgatcagatcttgtacgagctcccacggaggaacggtacgtttgatccaaaacacgcaagttgctccatctgaatgccgttgcctgtaagcaacaagttgccaccgtacctagaaaaactgcagcctccatttactccctgtccaggacgacattcttcgtagatcacagaactcatatatatgtaaagattcccagggcaacgtgagaccagcatcgtcatatagtagtccaccgcgtagaacatttggtcatgtatatatagtcgttttaaagatgagctgttgagtggagagtangctgctgagggtcctttgacgagagtncgtatttgccgagagtctgatactccgc

SEQ ID NO: 53585 - DNA, 371 bp, Zea mays
  unsure (1)..(371): unsure at all n locations
tctaaagggagagcacatnttgngactaaccaatgttcattttgagaaagacagggttggtagtgcatgtcaagcaagaaagcaagttggttcccaccatccacacaaatacatcatgacgaccgacaggtcgcttgagctactatacatggatttattcggcccgatcgcttacataagcatcggcgggagtaagtactgtcttgtaattgtggatgattattctcgcttcacttgggtattctttntgcaggaaaaatcacaaacccaagagactttaaagggattcttgagacgagctcaaaatgagttcagattgagaataaaaaagattagaagcgacaatgggacggtgttcaagaactcacaaa

SEQ ID NO: 53586 - DNA, 430 bp, Zea mays
  unsure (1)..(430): unsure at all n locations
agctntagaagtcctaattcacccgcccactcttaggcgtcacccgtttccttcaggttgctctacccatcactcgtgacaccgctcaccggtgtcacttccacgacatgctcgacaccttgctacgccaggcactcgatcggcgcacttggtccatcgactatcgctgtgttgtcttccagcacagtcgcggggtttacccggaccgctgggaggcgacttgtttggtgcgtcatccggagaatagtctccagggtgcggaggtctgcttggagcattactctatctctgagcgggactcagctgagtcggccatgtaggatgccacacggcgtgcgctntcgcactacttctcagtgcttactgnggtggccgatggtctcgagttgaggtattaccctcgccgtccatctggcagcacaggaggcgt

SEQ ID NO: 53587 - DNA, 463 bp, Zea mays
  unsure (1)..(463): unsure at all n locations
cactcgcttgttccatgcgatgcanagtacactgtcacagcgataagcatcatgatgcagaattgcttagtggactcaattgaacacaacgagggagaggaatcatcaaatataagctccgagattgtagcttgtaaatgcggtgtcttctttattttccttacagattcttcttatgtattaatgattcattcatcccttttgaaatttgcttgttactgcagtggctctttgttcagtgcaattatgaagatgcttctttgctttcaattgtttntttgcttcgaatgcatcacttacaaattacaatgccattattgtggtcagatgcatacctggaacaactgagaaaggatgtagccatggcagagcangggaatcagaaggtatctggtgagaatagtgtcactgcagagacaacattcaatggttggttngttatttgcatgttttctttcttgac

SEQ ID NO: 53588 - DNA, 347 bp, Zea mays
ttatcttcgtcaccgaataggcagaatagtctcctaagctgattaccatatcttcctccgaagcttctcccccttctgcctcttgggctggtggcctgaaagaactttgttgtgcccctgatgattgagagttgtgttgttgcccttgggtatgattccccctgtcgtcacttgagctgggattatggattgacctaacatgcctagggtggagtcttcctccaaagcctctggccatatcggagatcttgaggcttcttcccttctgtgccgaaagtcattgtcggctctgatgttgtcacacccgggttttggtgcaccaagacctcggtgtggacataaaatca

SEQ ID NO: 53589 - DNA, 412 bp, Zea mays
  unsure (1)..(412): unsure at all n locations
tactaagcttagctccatctatgttatggattgcttttgaatctgtccagtttccttcggcctttctggcagcctnctgacttccatgaatagcaataggcccttgatccgaaggtatcttcatgcaaagatatgctggatgaagaattgattcaaaagcattgagagtaccatgaccaatgattgcgttgtaagggtactccatgtcaacaatatcaaacacaacttgttcagtccttgtgttgttgataaatccgaaggttactggcatcgtgatcttgccaagtgctacaatctgccttcctccaaagccacaaaggngatgtgtggcgtcatggatcttatcttcgggctcttgcatctgtctgaaggccttagcaaatataatgtccactgcactggctgtgtcaac

SEQ ID NO: 53590 - DNA, 359 bp, Zea mays
ttcttttgcgcccttaccgcgttgctaagtattaagccctacacgaaagaatgagtggatcaatattagagcacaagactagttcgaaattcacaactctcaaatatacgatttttgtaccttcagactgttatatgcaaggctatccggaagatcgtccttcgtcatggcgcagaggccagcttcaagcttcaggaaccccatacttctggccatctcccggcagacagataattctttgttgtctgggaagcaatacatgaagtcatctttacctgtgccattagacactaaggcccctttcggggacttcagttctcgggcgtagtgataacttcaaaatttcttcttcagataat

SEQ ID NO: 53591 - DNA, 303 bp, Zea mays
  unsure (1)..(303): unsure at all n locations
atacctcactcgtcaccttgacaccgngcgactcacgcttggtgaagaggctcagacaaccaacaggcgagtcttacagctcgaatatgaggaatatacacagtttcgtgccacaattacatacatgttcatgcctcgacagccataatgaacaaaaacactggcattcaaagtgccattacaaacggaacttcggttacccctccgcatgtactaacaaccccactcgatgggagagggcctgtggagcaacagaagaccgacgaacggcgcgccgatgcccgctacagcagcaacgactac

SEQ ID NO: 53592 - DNA, 419 bp, Zea mays
  unsure (1)..(419): unsure at all n locations
agcttatagtgatgggaagaggcggacaatttacttatattatattccttcagtnagcagggattatgaccaacttaatgatctatactatgagcactcataaatgtcacatggagatgacatctaattgaacttcacgaaagatcaaatgggcatagctactactatactaactcataacaaaaataaagcagagttcagttattagtatagtcagataacagaacatgacatattacaaaatattttcaacataagcaagtaaataaatggagatatctccttgcaaaactacagcttcaaaagtttacacttgttcatagcacaaattttagattacaagtacactaccaagcagtggcggatccacgaggggggctgggtgggctccagcccccttgcgccggcagcttacaagt

SEQ ID NO: 53593 - DNA, 386 bp, Zea mays
  unsure (1)..(386): unsure at all n locations
atccagatanttttcaagcttcgggtctttatccttgcaactcttgtcaatatgacccgaaacaacctgcgaatcagttttaagtatggcccttctgatccccattgcttttagcttccgaagacccagaagcagggcttcgtactcggcaatgttatttgtgcaactaaaatcaagttttgccgcatagcaagttntaactttggaaggtgaaaccaacacagcagctgctcccgctccgaaggttccccaagacccatcgcaaaacactatccatgcttcggcgtctttatttgtttcttcctcctgagcccctggcgtccaatcagcaatgaagtctgctaaggcctgggactgaatcgaagatctatgaacatattcaatac

SEQ ID NO: 53594 - DNA, 441 bp, Zea mays
  unsure (1)..(441): unsure at all n locations
tgccgtatgcaagctctacatctagttgcatatggctttaggactaccacacttaatacatgntgctctcctataacttttttctcgaacacgcaggagatctgcgtatcattccattaatagatagaagatgggacaacacaacacacacgacacacacatgactcaacaagacacaccaacacagtcaccacacacaaccactcagaacaagacactagactatccccctgggtcaagcataaacacaagagttgaaagcaggttcaaccctttcgccctggcactacaccacatcctgagctcatcgctagcgagggtgatagtactcgctatgctcggcgagctcccattgaacacacaggcattgcgatgacgccaaaggctccaagcgccagaattactagagaattgaacctgattgggatcacgngaatcttt

SEQ ID NO: 53595 - DNA, 393 bp, Zea mays
ctcaagcttcgtattattccgatctgatgcaatgccgactttactctgatgtgtcttgttcacacattgcactacagaaatactgttaaatcctatttttgaggaccttcggacgccgaaggtccccaacagtagcctttacaaagatttcccagaggtcatagttgaaagggaaatgtgcccttgggccatttctaagtattttggtgatcaagtgcacacacaaattgtttaagtatgaaactgtgccaaatgatggaagaagtgcaaagtcaacacaaaggtatgattctagaatcagtacattgcgttttatgtgctaacatatttgtctaagtgctataatcagagaacagataaaaggaaaaagagttggctgtgtacatgcaactg

SEQ ID NO: 53596 - DNA, 398 bp, Zea mays
  unsure (1)..(398): unsure at all n locations
agcttgtgaaggttcttcatcctcacatgtgttaagcggagatgccacagccagtccatgcaagtcttagccattaagcatgcatctagaccggccccttcttttgcaaaatcaactaaataaagtttgccgtctaatacacccttaaaagctagtgaacgattacttcttataaagacagacacatttatatttgaaacagacagttatatcccatattgcacaattgactaacagatagtaaattgtatcctagtgactctactaaaaacacattaaagatagagtgctcattagaaattgcaattntacctaacccttttagcttgccttgattcccatcatcgaatatgattgaatcttgggaatccttattcttgacgtatgaggtgaacatc

SEQ ID NO: 53597 - DNA, 441 bp, Zea mays
gtacagatcgaatacagaccgatacgaatgctactgttatatcatagtgtagtccagatctagataggaatatgaatatcttaggatacgaatataacatggataggttattcgaatatttactcaattgaactcatagacatactgtaaaatttaacatacgcatatgtagatggttatctaaggataagtatatagatagttcagacgaatctaaattaaaataaatttctcatgatcttctatatccaagttaacagaactatataaataatattcttagacgattgaatcatataataaaagtgtaacaacaacacatgatatttaataagtgatatgtgtacaaatacaagtaacatgatattgatataagatacttaatgtacccagaacaataaatctaccgctaatgaatgaatgtgctatatagatgtgtga

SEQ ID NO: 53598 - DNA, 425 bp, Zea mays
  unsure (1)..(425): unsure at all n locations
agctngacaatgaggaaatggcgctcgtcattaagagcttccgccaaatcctcaaacaaaggagggggaaagactacaaatcccgctccaagaaggtttgctacaagtgtggtaagcccggtcattttattgctaaatgtcctatatctagtgacagtgaccgaggcgacgacaagaaggggagaagaaaggagaagaagaggtaccacaagaagaagggcggcgatgcccatgtttgtcgggagtgggactccgacgagagctcaagcgactcctccgacgacgaggacgccgccaacatcgccgtcaccaagggactcatcttccccaacgtcggccacaagtgcctcatggcaaaggacggcaaacgaaagaagttaaatccaactcctccactaaatatgaatcttctagtgatgataatg

SEQ ID NO: 53599 - DNA, 383 bp, Zea mays
  unsure (1)..(383): unsure at all n locations
taaagccatggtaagtagcataggccaataatatacgaattgactcaagcctagctacgggtgcataggtttcaccgaaatccaaaccttcgacttgngagtatcccttggccacaagtcgagctttgttccttgtcaccacaccatgctcatcttgcttgttgcggaagacccatttggttcctacaacattntgattangacgtggaactaaatgccatacctcattccgagtgaagttgttgagctcctcttgcatagccaccacccaatccgaatcttgtagtgcttcctctaccctgtgtggctcaatagaggaaacaaaagagtaatgctcacaaaaatgtgcaactcgagatctagtggttacccccttatgaatg

SEQ ID NO: 53600 - DNA, 424 bp, Zea mays
  unsure (1)..(424): unsure at all n locations
agctntaggcacacacttgaagttcaattcttcttatcacccgcagacagatggtcagacagagagaaccaaccagattcttgaagttatgttgatagcttgtgcattgcaagacaagttaggttgggacaagaggctaccatatgcataattctcctacaacaacagctaccaagccagtctgaagatatcaccattccaagcactctatgggaggaattgcataactccgttgcattgggaccaacccagcgaaaggcatgtgttcggtctagatattctgcttgaaactgaagagaacatcataaaggttcgagagaatctaaagatagcacagtccagacaacaagctatgctgacacccgaagaagagaactaagttttgaagtaggagattntctctacttgaaagtgtcaccgatca

SEQ ID NO: 53601 - DNA, 508 bp, Zea mays
  unsure (1)..(508): unsure at all n locations
tanagccatggtaagtagcataggcaagtaatatgcgaattgattcaagcctagctacgggtgcataggtttcaccaaaatccaaaccttcgacttgtgaatatcccttggccacaagtcgggctttgttccttgtcaccacaccatgctcatcttgcttgttgcggaagacccactcttgcttgtcaacattttggttaggacgtggaactaaatgccatacctcattccttgtgaaattgttgagctcctcttgcatcgccaccacctaatccgaatcttgaagtgcttcctctaccttgtgtggctcaatagaggagacaaaagagtaatgttcacaaaaatgagcaacacgagatcgagtagttacccnncttttgaatatcgcgaggatggtgttcatggngtgatctcgttggattgcttggtggactcttgggtgtggcggtctttgaactngntcatcttnctcatcttgatcatgggcaatctcccctgatcattgtct

SEQ ID NO: 53602 - DNA, 420 bp, Zea mays
  unsure (1)..(420): unsure at all n locations
agctcgccgttgatggtggccgcgctgggctgttcgtcgagggggccgtgcgcgaagtccctgtccatctgctacaagtccgtcttccaccactcccctatgaccatggggacctccgcgtgaggcttgggaaacgggtaatacgagtcgtcgtcggcgcgtcgtctcggccggatgatgaaggctccgtgcacggtgccgcggacgctgaagacgtgcgcgtgccaccacagcgttccttcctgcccggccacgtcgaaccggtaggtgaagttgtggcccggcaggatggggcactgggtgaccattggcacgccatcggcccagcagttccgctgctgcttcaccccgtgcctgcacanatctttctgtttgagatcgatcgagcgagcgagcgagaggatgaagaaacaacgggtc

SEQ ID NO: 53603 - DNA, 370 bp, Zea mays
  unsure (1)..(370): unsure at all n locations
gtagcataggcaagtaatatgcgaattgtctctgcctaactgcnggtgcataagtttcaccgaaatccaaaccttcgacttgtgaatatcccttggccccaagtcgggctttggtccttgtcaccacaccatgctcatcttgctttgtgcggaagacccacttggttcctatcaacatttgattangacatggaacaagatgccaaacctcattccttgtgaagttgtngagttcctcttgcattgccaacacccaatccgaatcccttaatgcatcttccaccctgtatggctcaatagaagacacanaggagtaatgttcacaaaaatgagcaacacgagatttgagtggtacccccttatgaatatt

SEQ ID NO: 53604 - DNA, 296 bp, Zea mays
agcttgtgaagattattcatcccaacatgggctattcggcgatgccagagccaacccatattagtcttagcaattaagaaattgtcgagttcagctctattgaaatcaactaagtatagctgaccctctaacacacccttaaatgctattgaatcatcactttttctaaagacagtaacacctatatccgtaaaaatgcaattgtagcccatcttgcataattgagaaacagaaagcaagttataatctaaggaatctacaagaaaaacattggaaatagaatggtcaggtgatat

SEQ ID NO: 53605 - DNA, 315 bp, Zea mays
  unsure (1)..(315): unsure at all n locations
tctatagagagatcatgtgttaggactaaccgatgtctgttttgagaaagacagaccttgtgcagcantgtcagcanggaaacatgtgggaagcactcatcaccgcaagaatgtgatgaccacatcaagaccactagaacttcctcacatggatctctttcgtcccggtgcctatcttagcatcgggggaagtaagtatcgtcttggaatacttgatgatttttccgcttcacttgggttttctttttgaagacanatccaaaacccaagggaccctataacgcttcttaaggagagctcanaatgagtttgagc

SEQ ID NO: 53606 - DNA, 396 bp, Zea mays
  unsure (1)..(396): unsure at all n locations
agcttggtcattntattgctaactgtcccgtcaatgatagtgatcaggatcaagggaacaagagggagaaaaagaagaactataagaaggcaaagggcgaggctcatcttggcaaggagtgggattcggactgctcctcgtccgactccgacaatgagggactcgccgccaccaccttcaacaagtcatccctcttccccaacgagcgtcacacttgcctcatggcaagggagaagaaagtaagcactcataatactagtacttatgcttcttcaagtgaggatgagtctagtgatgatggtgagatagattactcatgcttattcaagggattagatagaaccaaggtagacacaattaatgaattgattgatgccttgaatgataggaatatgc

SEQ ID NO: 53607 - DNA, 492 bp, Zea mays
  unsure (1)..(492): unsure at all n locations
cgtctagtacacccttaaaagctagtgaaccatcacatcttctanagacagacacatctacattngtaaacaaacagttatatcccatattgcataattgactaacagatagcaaattatatccaagagactctactaaaaacacattagagatagagtgctcatttgagattgcaattntacctaacccttttaccttgccttgattcccatcaccgaatattattgaatcttgngaatccttattcttgacgtangaggtgaacatcttcttctcccccgtcatatggtttgtgcatccgctgtcgataatccagcttgaacccccggatgcataaacctgcaaggcaaatttaggcttgggtcttaagtacccaactcatgttgngtcctgcaagggtagcacaaatattcttagggacccaaatgcangttntggtctccttgcatcttgccctaattntctacaactatcttctattcttttacaat

SEQ ID NO: 53608 - DNA, 375 bp, Zea mays
  unsure (1)..(375): unsure at all n locations
cttctcgacccggatccttaagcacctgagctgcagcttgacttctctgtcgcgaaatttatcaggctagggctgcttgcaccactgatgttatcaagatcattatcgaagctggaaccagaaaggaaggtaccagtccacacctcgaaagagtagaccaagaaacagggaccttgaancatccatcacaggatcgaggaagaagaaaagatgcttcgtctcaccgatcttataagagattgtcacgctgcgaggaaatgtgtatatcacccaaataccagaccgaagcctcaatacgagagcttctcagacaatcatacacgatgagaaggtagatgattccatatggaattttctttgatgatcttctcttac

SEQ ID NO: 53609 - DNA, 418 bp, Zea mays
  unsure (1)..(418): unsure at all n locations
cgaggctgtgtatagattaccgccctcttaatgcggtgactattcatgaataagnatcctttgcctcgtattgatgttctttntgattagtcggttggagccaaagtgttttccaagatagaccttcgctccagctaccatcagatcaagatacgagcaagcgatattccgaagacggctttctcaactagatatgggctatatgaattcttggtgatgtctttcggactaactaatgcaccagcatatttcatgtatctgatgaattctattttcatgcccgaattggacaaattcgtagcggttttcatcaatgatatcttggtgtactcaaagaacgaagaagaacatgcccggcatttgcatgtagtgcttcaacgtctacgagagcaccacctttatgccacagtgtcaaaat

SEQ ID NO: 53610 - DNA, 441 bp, Zea mays
  unsure (1)..(441): unsure at all n locations
agcttctaaagggggagcatantttaggattaacaaatgttcattntgagaaagacagggtttgtagtgcatgtcgagtaggaaagcaagttggctctcaccatccacacaagaatataatgacaacgaacaggccactagagatactccacatggatctattcagcccgatatcttacataagcatcggcgggagtaagtattgtctagtaattgtggatgattattctctcttcacttgggtattctttttacaggaaaaatcacaaacccaggaggctttaaagggattcttgagacgggctcaaaatgagttcggattgagaatcaaaaagataagaagcgtcaatgggacggagttcaagaactcacaaatcgaaggctttcttgaggatgagggcatcaagcatgagttctctccctacacaccttaacaaaatg

SEQ ID NO: 53611 - DNA, 376 bp, Zea mays
  unsure (1)..(376): unsure at all n locations
gctgggcttttgcttccactacacaagatgttggttgaagttctgaaaacattcgaaatataccttcatcaacttacccccgaagcatttatcanagtgggggtttttatatgggctatgaggagtcaagggatagagccagatgctangtgtttctgcaatattcacaagttatcctaccagacaaaggcaaccggaaaggaacaataccataacaacttcagatgttatagcttcgtgccccgctctgaggcgacctatctcgtgccaacatttcagaagaagtggtcgggctcttggatgaagcaatggttctacataaagaatgatctanatcagagggaggatgtgaggngcatcattcaacgtcccatat

SEQ ID NO: 53612 - DNA, 437 bp, Zea mays
  unsure (1)..(437): unsure at all n locations
gcttatgaagattcttcatcccaacatgggctcattcgacggggccagtaccaacccatgttagtcttagcaattaagcaagtgtcgagttcagctctatcaaaatctaccaaggatagctgaccctctaacactcccttaaatgctactgaatcatcacttcttctaaagacagtgtcacctacatcagtaaaaagacagttgtagcccatttgacataattgcgaaacggaaagcaaattgtaatctaaggaatctacaagaaaaacattggaaattgaatggtcaggagatatagcaattttacccaatcctttgaccaaaccttggtttccatccccgaatgtgatagctcattgnggatcttggtttttctcataggaggacaacattttcttctcccatgtcatgtnggttgtgcacccactattgatgat

SEQ ID NO: 53613 - DNA, 427 bp, Zea mays
  unsure (1)..(427): unsure at all n locations
tatcgatcgatcactgtcccgaacttcattcattatctgaatatcgtgaaatgaagcctgaaatggtntttttctccagtactagttntgcaggctcgtttaaaagaaaaaacgtgatgaaatccccttgaaataaagatggagacgcaccttcgctgcctgaatctctgtctcgtcaatcttgatctcactcgacacaggcctcagcatgcagatgaagaagaggtcggacttgtgaaacgccacgttgtgggcatgcctggcaacacacgttacgtaggacaaatttagcctacagttcgaagatactgagacgcaattatatcgggttaatcgccgaaacagaggaaggcaaacaaactactgtacctgaaagcaacgacgtcaacgaactcggtgtnacctgcatagcgtatcgcaatcacag

SEQ ID NO: 53614 - DNA, 440 bp, Zea mays
  unsure (1)..(440): unsure at all n locations
agcttcggcatagcccattccttcatagttggaaatattttgaaagccagaaattcctgcactaaatctctagtgccaatgtgctctgcgataatcctgaattcagccaacgcagtttgggttggaccttctggtgtcatattgcattggggtctggtttctccgaagatcagttcaagcggactctgtaccagcttctccttgtcatcatcaactntgacgtaaaaccattccgatttccagcctgccggccacttgcttcggtagctgatcacaggaaatnttgtagttntctgataggcgaaattgtaacaaccaaaatattcatgtaacccatcctttctggccttggtttggtaatgtagctcgtgcacccggcagaaaccttcggcaaacggttccaccccctggcttcggagagcccanatataaacactaag

SEQ ID NO: 53615 - DNA, 407 bp, Zea mays
  unsure (1)..(407): unsure at all n locations
agaaagcagcttcngcttatcattcgaatcccatgctcttatgtgaggacttagcagagcagaaggtgctgttgggctcccaattttctgaagaacaggagaaaaccttgataaggtttctgttcaacaacaaagatgtttttgcatggtcagccaatgatctttgcggagttaacagggatgttattgaacactcgctcaatgttgacccatccttcagacccagaaagcagaggcttcgganaatgtctgaagacaaggccgaacgagctcggaatgaagttaaaagactcctcagtgcaggagttatcagagaagtaaagtacccagaatggctagctaacactgttatggtaaaaaaggccaatggcaaatggcgaatgtgtatcgattntacggatctcaac

SEQ ID NO: 53616 - DNA, 440 bp, Zea mays
agcttctaaagggagaacacatgataggtttaactaatgtgcgattctataagatagaccttgtgtagcttgtcaagcaggtacacaaatgggaggagcacattacagcaagaatgtgatgacaacatctagacccctggagctgctacatatggacctcttcggacccgtcgcttatctaagcataggaggaagtaagtatgggttaattattgttgatgacatttcccgcttcacttgggtattctttttgcaggataaatctgaaacccaagggaccctcaagcgctttctaaggagagctcaaaacgagtttgagttcaaggtgaaaaatataatgagcgacaatgggtccgagttcaagaaccttcaagtggaggaataccttgaggaggaagggatcaagcacgagttctccgctccctacacaccacaacaaa

SEQ ID NO: 53617 - DNA, 417 bp, Zea mays
  unsure (1)..(417): unsure at all n locations
gagaagcttcacggcttcactcgaaagcgatccagcggctatggctaggctggagttcaacagaaaaggctggccacgatggccatgcttgggcagagatggcgggcggcggtgctcgctnttcacggcgtgctccggtgatctctggctctggcgaggctcggcgtgtgcaagtgccaccggctaaggcctcgggaggaatttataggcgagggcacggcacaggcgcgcaaggcatggcgaccacacgcggagcgcacgctgccgcggccagtccgcactcggccggtcaggcaagcgatcgaacacgtggctntctgcttctgcccgagttcaagcgctcagaggttgaagatcttcacgaatttgggcgatgaaggtagagccgagttatggaatgacangctntgttcacag

SEQ ID NO: 53618 - DNA, 422 bp, Zea mays
  unsure (1)..(422): unsure at all n locations
agacgggaacaaccgtagcatgcactacatcccttgaagaaaatgtcaagaaattgaggattgccaagaggaagaaacaaaagatgaaattcaacacctcctccaaaagcctcaaccacgcctncacaaaaggtaacatccaaggtaatgatcaagccacacttcacattaagaggtgtaatgaatgctttgaagaggggcactaaattaggtcatgtccctacattaaaaatggcttgattattaacaaggatgatagaccttgtgttaaatgctccaagaagggacacttgcttagatcttgtccccatttaaaacaaaaaggcataggggtagaaaagaaaagttttactaaccatgtagcacgcaacaaacaaggaaagaagaaatcttcaaacttgaaaaacgcctttgcacacatg

SEQ ID NO: 53619 - DNA, 331 bp, Zea mays
gacactatgaccactcaagcttatcttagaggtgaaagtgtgatagtgtgcatcatggctcatatctcaaccttgtgatgcagatgagctcaccttgaataatgcggggtttcctagagttcctttcgatcttaacgcggagaatgctctagctttggagatcatacatatatggagcctataaagctgatctatgcatgcttccgatgctaatcgatgcattattttttgatatcatcttgtgtagcatcatctttacttggatgatgtgtacatcaattggcatctatcatgctcgttgattatcatgcgatagatattcatgtgttga

SEQ ID NO: 53620 - DNA, 366 bp, Zea mays
agctaatcagatgtttctgaaaagtgccttattcattgcaccaatcaatgtagaggtttatgctgagcaacctcccgcgcttgcagatattgagtaccctaaccatgtgtttaaactctctaaggcgctttatgggctcaagccatccctaaaagcatggtatgaatgccttacggatttccatatagataaaggcttcaaagtcggagaggtcgatcctactttatttactaaaactcttgacaatgatatgtctgtatgccatatatatgtggacgatattatatctgggcctactatcgacactacatgtgaacaattcactaagatcatgacacataaactcgagatgtttatgatggggga

SEQ ID NO: 53621 - DNA, 331 bp, Zea mays
  unsure (1)..(331): unsure at all n locations
tgtatncnctactacaagcaccacggtgcaagataatatattctctatcctccctcttgtggttcatcttgcatcaatccatccgggcagggacactcaacatcaaattcactagtcggttgagggccccccgggttcgaaacaccgacatttggtgcgccaagtacgggctcactgcgtgttgacaatactattccattcagttccagatggataatcttcatcaacctcttcagcctaggacggcgctccgttntgggagtctcaagttcatgatcctcgacggcagctacgacatgatactcctcctaccgcagcacgacagcaatga

SEQ ID NO: 53622 - DNA, 423 bp, Zea mays
agcttatgacaaagttatcctcatcccaaagagcgccactaatgtccttcagtttgcaaaccttgacccacctagacctccacttacgaaggtgattgtacacttgttggcctgttacttcttggccacagaactcagagacatttttaacaacatagttatggtggatttccttaaaacccttgtcgatcttaaccccatttactatcaagtcaacaaaacgacggagaacaaacccagacattacaacaatccacctaagagcgggcctagccccctgaccagcaacctcagagaccatgtcagccataactagaacaagtaaaagattagggggaagagtaatatagtagtgacagataatagaagtagcatagtagtaacatagatagtacaagtaacatagaagtaacagagatagta

SEQ ID NO: 53623 - DNA, 451 bp, Zea mays
  unsure (1)..(451): unsure at all n locations
actgcatcagagaagcaagttgcataccatacttgtgttgctctacggcaatactttagagctcatctccttcagcttggtgactccattcggccaagcaaaagcatccgcagtattgctcggaacacttctagtgcacgagctggctacaaaccttttgacattagcaatgaagctatggatgctgtctttcgtcagatccagcgggacagaaagttaggccttgctcttgtgagagttcgttggcctgtgttagacaaattttttgcctcaaatggtcacgtgactatgctggagttgtgtaagggaaaacacactgcacacatngcattgtgggttatgtgaggcttngtaataacctgattngattcacagtttcaggcacatggtgatcgcctattgcgtgaattaactcaatatgcaatggagttcttcacatcataacacttat

SEQ ID NO: 53624 - DNA, 419 bp, Zea mays
agctattaggtgttgtgttgctaggacatatcttgtgtgtgtgttggttgtttgtttgtttacggcgcagtgactccgcagcagggagctagtagtgagccacacagcattcagagcaatggcgtcgctgacgaccggctactgttgcgtcactgcagaagctttgggctaagagagggagccctagaggtatctgcgtggcgttggtgtgcgcggtatggaggaggaggtaggaagggaatgatgaatacattattgtgcgtcgaccgatgcagatagctagggcggctacaatacactgtgtcgtgcactgcagggacacgtggtcatctatgtaatgcgtgttcaagaaatatatacttattctgtttcaaattataaaatatatatcttaatcttccagggagttaaaatagctc

SEQ ID NO: 53625 - DNA, 405 bp, Zea mays
  unsure (1)..(405): unsure at all n locations
tggtgccgatggagaaacanaaatccttgaagtcttggctatcatatngcttgtcgntgtcgactgttagttcggacggtactccgaagcggcaaacaatgttttgtcaaaagaaattttgtgcagtctttgatgttattgtggaaacagccctcgcctcgatccatttggtaaagtattcgatagcgacgaaggcgaacttaaggttccactgagccgtgggcaggggcccgacgatgtccaggccctagcgctggagaggccatgtgtgggcgatcagttntgtgaattgcgaggggctgcctaatcgaggagaaaacttctggcaggcttcgcacgaccttgcaacccgatttgcggcaaagatcattgcaggccagtagaaaccttggtggatcacctttg

SEQ ID NO: 53626 - DNA, 295 bp, Zea mays
tgcttcatgagcggttgtttcggcgtcacgtataaacaggttttgctcgaagtatttcttcctacaggaccttcggcgacgaagcatggtcccaacattaggcccttcgcggtgctagatcattgttcgtaacgagcttgatccgtgaaaaaagtctcttaggcttcgggaagccgaaggctcgaaaaacaccttccatgagctcgttgccgggaaacgatacaatttccgagcgcgaagcggtcccaccatgcaggttcaccttctcgggtttcgtggcccaccgttcactggg

SEQ ID NO: 53627 - DNA, 384 bp, Zea mays
  unsure (1)..(384): unsure at all n locations
tgaagccatggtaagtagcataggccaataatatgcgaatggtctcatgcctagctacgggtgcataggtttcaccaaaatccaaaccttcgacttgtgaataccccttggccacgagtcgagctttgttccttgtcaccacaccatgctcatcttgtttgttgcggaagacccacttggttcctacnaacatttggttaggacgtggaactaaatgccatacctcgttcctcgtgaaattgttgagctcctctttcatcgccatcacccaatccgaatcttgaagtgcttcctctaccctgtgtggctcaatagaggaaacaaaagagtaatgttcacaaaaatgtgcaacacgagatctagtggttacccncttatgaatgt

SEQ ID NO: 53628 - DNA, 282 bp, Zea mays
cttggcctttcgcatgctggggactggatatgaatggacctttcaagatagctcaatggggacacactcatgtattggtggcgattgacacttctctaaatggatagaggtcaagcacattgcttctttaacctctgctaatgacgcggaattcatacaagacataatatttagattcgggataccaaacagtttcattcctgacttacgatccaactacaccacttcagaattctttgacttctgcgagcaaaagagcattctgatcaagtacgcattttt

SEQ ID NO: 53629 - DNA, 293 bp, Zea mays
cttaatcactaccaataaaacagactcgccttgttttttggagcgcgcgtggctgttctgtaagttataaccaagataaatagagaaacccagctatgatctaatgattagcttgtggaggttttcagatttgccaagactcgagcggattaccaatcaagtgcaaatggcgaataaaaacttcttactataacaccatggcggcaggggctattactagcttcacacaagaattaaatgtgatgaggaatattcaggatagtagctacaatatcgtctataagtttgaaatg

SEQ ID NO: 53630 - DNA, 389 bp, Zea mays
  unsure (1)..(389): unsure at all n locations
agcttangccccttgtccttgtccatttgattctttggtcctgtcattgttagcacaaaacagagacaaaaaggcaacaaacaatgtgaaccctacaactatctctcatggtggtggtggaggtggtggaatacaaattatgaagcgtcttaccccgctcttacaaggttcttaccagtactgcaggtggcaaacggtgaccgttgtgactgtccaacgagcatgggtgtgattgcaaaggagtacatgttctgctcgagagaaagctggagctatgggaaggctgactaaatatatatatgtggcacacaagtcagtaacagatagcaatgctgaataagtgttccaagtactcgttctagttgttggcctagaaaatgtaatagaac

SEQ ID NO: 53631 - DNA, 414 bp, Zea mays
  unsure (1)..(414): unsure at all n locations
tgtgaaggttcttcatncctacatgtgctaagcggcgatgccacagncagcccatgctagtcttagctattaagcatgcatctagaccggcctcctcttttgcaaaatcaactaaataaagtttgccgtctaatacacccttaaaagctagtgaaccatcacttcttctaaagacagacacatctatanttgtaaaaagacagttataccccatgttgcatagttgactaacagatagcaaattatatcccaaggactcaactaanaacacattnagaaatgagtgctcatttgagattgcaattntacctaaaccttttaccttgccttgattcccatcaccaaatataatggaatcttggggaatcttattcttgacgtaggaggtgaacattttcttctcccccggcatat

SEQ ID NO: 53632 - DNA, 463 bp, Zea mays
  unsure (1)..(463): unsure at all n locations
atcctctgagtctgctgccgcatgcaagcttaattataattctcggacgagctatctcggttgacgagtggggatagaattatttgcaccgaanaccttagtcgtcaagttcgaattaaattgcccagaataaaatcgtaagagtaggtcaagcttccgaattcgtattctcgcgagcgatatattttaaataatcacgagacgtaccaattttcggaacaattatgtttcgaatatcacgaaaatttaggaagagctcggacagataaaaataaaaatgatgtcacactcgcgacagacgaaacagatacgatattaaaatcacgatagacgaagatgattaaaatttagcatttgttttatccactgatattacgtgcttaaatccatactcgttgtcgagcggaatataaacaccaggggtgttacaaaaaccctagagaaaataaatataaaagcaatt

SEQ ID NO: 53633 - DNA, 419 bp, Zea mays
  unsure (1)..(419): unsure at all n locations
cgtatcatcaatagagaaagcagcatctgcttgggccaaagntntaacatggtcacaccctgctttcttcaaaatagctacaacttccctcgcaccagagaacgcgcagacgtncccacggtcgctcaaaatttctttcaaagcttcggcttcgctgctgatccactcaattacgccctcaggatcgcctcttatgaagntgtcttcgctcgagtacgcgcccacgttggcgaagctagtttttatctttntgatgcattctacagatntttcaaaacacctttcttttgatgagcgaagctctgcaactgtttttcaaataaattttccagtacttactggcatcttggtcagcttcggcaatagcgcatttcaatttggattcngcccagttgttttgaagaatttcaatctcattc

SEQ ID NO: 53634 - DNA, 399 bp, Zea mays
  unsure (1)..(399): unsure at all n locations
agcttgtgaagattcttcataccaacatggtctattcggcgatgccattttcaacccatattagtcttagcaattaagcaagtatcgagttcaactctattaaaatcaactaagtatagctaaccctctaatactcccttaaatgctattgaatcatcactttttctaaagtcagtaacacctatataccgaaaaagacaattgtagcccattttgcataattgagaaacagaaagcaaattgtaatctaaagaatctacaagataaacattggaaatagaatggtcacgtgatatagcaattntaccaagtcctttgaccaaaccttaatttccactcccgaatgtgatagctctctggggatcttcgtttttctcgtaggaggagaacattcttttc

SEQ ID NO: 53635 - DNA, 340 bp, Zea mays
  unsure (1)..(340): unsure at all n locations
tcacaatggataaatcctggaaataccttcctctcatgttgaccagatgattctctttgatagttgatntaccatanactgaatggcttggtcgccagggacgatcttcggagtcctcaccaccactgtccacatcatagctgtcactgtcaccagtatcttcagacaaaccttccagaatctccttggtgattntttctgtattggtctttgacatcgctataagaaaccccaagttnttctcttcgtccaggctcagcttcatctcagcagcagtcttcttatcctcagacatcttcggagacacttaaaactattntcanagccgaagcttcaaact

SEQ ID NO: 53636 - DNA, 385 bp, Zea mays
gaacggagggaaaacgggaggaggcgcgcggcgacgggcggcaaggctgttcggccttgcgtatgggctgaaaacgaggggttcgccatggcgcacgggccgaaaactgatgctggggcacgaccccgaaaataagctaagtccaagcatgtggaaagacaccgaacctaaagtgcatgtcttgagtgaagggcacggtggaacggagggaaaacgggaggaggcgcgctgccacgggcggcagggctgttcggccttgcgtttgggctgaaaacgacgtgttcgccatggcgcgcgggccgaaaactgaggctcgggcacgacccccgaaataagctaagtccaagcatgtggaaagacaccgaacctaaagtgcatgtcttga

SEQ ID NO: 53637 - DNA, 431 bp, Zea mays
  unsure (1)..(431): unsure at all n locations
taccctgtcccattctcagggcatgtggctagataagatagttcttgatcaacatgcctacatacgcatccaatccttaattgacccgggcggaacatcacctgttcctagcccaagtctcgatttaagtatttccatccttaggattgtgtctgttccttangatgaaagagcatcacagggaactttgcagtaagatcccactattactccaaatgaaaacattcttgcaggtagaagccatcctctcccgggttagatggaggacaacctctatccacaagatctaaacaaggctaagcatttntgtaaatcatattntgatacttcacagaagtatctataagggtatggatatcaaggaaagcaatgcatcaaagggtttccaagcaactcctataaacttaatgcacatttcactagacataagt

SEQ ID NO: 53638 - DNA, 440 bp, Zea mays
gctcggatattcttcatgagaacactactgttattgttgtgataaatgtaaattcttcttcactaagcatgaaaagaagggaaggtgttttttcgtcaaagactcaaaaacggtacgtatgtaaaatttcatgcatcgtaaagaattgaaccataaaaaaaaagacaagtatattacattcaggattacaagagattatacatattatatttcagatgtttttacaatagcacctagtcttccctaagtactacttccgcagcttcattcaggagttgattaacaacttgatccatgatagcttcagccatctttttaatttcatcgtcatctttcgggggagggcccggagacgctttaatacgatctgagggaggacaggatacaactacattgctattacaaattgcgaacgaagtttaaaatcaaaaattacaaca

SEQ ID NO: 53639 - DNA, 364 bp, Zea mays
  unsure (1)..(364): unsure at all n locations
tctanagggagaacacattntacgattaacaaatgttcactttgatatagacagaatttgtagcgcatgccaggcagggaagcaagttggagttcatcatccgcataagaacataatgacgaccgacaggccactggagctcctacacatggatctattcggcccgattgcttacataagcatcggcaggagtaagtattgtctggttattgtggatgattattctcgcttcacttgggtattctttttataggaaaaatctcaaacccaagagaccttaaagggattcttgagacgggctcagaatgagttcggcttaacgatcaagaacataagaagcgacaacgggacggagctcaagaat

SEQ ID NO: 53640 - DNA, 362 bp, Zea mays
  unsure (1)..(362): unsure at all n locations
agcttcngcttaacgacctttggcgccaccattctgtatagagaagaatgtatgaagaaatcaggaagtataataaaggaaaaccaaggtaaaaaagacaggtaaaagtttcataccgagttaaatagttttcgagcttcgtccccggccaactcaagtccgccttttgcccagatttgtgtgataaatctgttccctatgcttcgggctttggctggaatgtcaactagatctaatgtcgaaagattgaaatttggcttattaacagttttggcgtgagtgcacacggccttcatataaaagctacagctgtgccgcgtgaagccactagggcacaaaagtctctgtgctcggntataact

SEQ ID NO: 53641 - DNA, 488 bp, Zea mays
  unsure (1)..(488): unsure at all n locations
tctanagggagaacacattgtagaactaacanatgttcattntgagtattactggatntgtagcgcatgtcaagtaggaaagcaaagtggagttcatcatccacacaagaacatcatgacaaccgacagaccgcttaaactactctacatcgatctaattggcccgattacttacataagcatcggcaggagtaagtattggcttgttattgtggatgagtattatcgcttcactggggtattctttntacaggacaaatctcanacccaagataccttanagagattattgagatgggctcaaaataagttcggattaaggatcaagaagattagaagcgataatagaacggagttcaagaattcacaaatcgaaggatttcttgaggaggagggcatcaagcatgaagtctcttctcctacacacctcaacanaatggtgtagtggagaggaagaatagaactctcttggatatggcaagaaccat

SEQ ID NO: 53642 - DNA, 376 bp, Zea mays
  unsure (1)..(376): unsure at all n locations
agctcgtaaagattttttatcccaacatggtttagtcggcgatgccagagccaattcatattagtcttagcaattaagcaagtgtcaagtttagctctattgaaatcaactaggtatagctgaccctctaacactccctttaatgctactgaatcatcacttcttctaaagacagtaacacctaaatctgtaaaaagatagttgtaacccattttgcataattgagaaactgaaagcaaattgtaacctaaagaatctacaagaaaaacattggaaatagaatggtcaggtgatatagcaatnttaccaagttctttgaccaaaccttgatttccatccccgaatgtgatagctctttggggatctttggttttct

SEQ ID NO: 53643 - DNA, 414 bp, Zea mays
  unsure (1)..(414): unsure at all n locations
actatagagcatgcttctagcaaatntaaaatcttcattctctatctcatgctcattaattntaggagttagatgagctatgtgattactttgttgtttaattaacgcaaggtgatcatggatagcatcaacattgatatctctacatctagtacaaatagagacatgatcaacagtagatgtaaatggtttgtaagcatttaattcttcaatcttagcatgtaaaatagcattctcatttctaagattggaaatagcatcattgcaaacatttanatctttagccttagaaattaatctagcattntcatccctaacgctagagaatgattcattcaatttatcaatcttagcaatcaaactagcattctcattgctaagaatgacaatcgaatcatgacanacatttgattt

SEQ ID NO: 53644 - DNA, 419 bp, Zea mays
  unsure (1)..(419): unsure at all n locations
agcttctaaagggttatcacantttaggatttacaaatgttcattntgagaaagacaggatttgtagcgcatgccaagcagggaagcaagttggtgcccatcatccacataagaacatcatgacgactgacaggccactggagctcctacacatggatctattcggcccgatagcttatataagcatcggcgggagtaagtactgtctagttattgtggatgattattctcgcttctcttgggtgttctttttgtaggaaaaatctcatacctaagaaaccttaaaaggattcttgagacaggctcaaaacgagttcggcttaaggatcaagaaaattagaagcgacaacgggacggagttcaagaactcacaaatagaaggcttccttgaggaggagggcatcaagcatgagttctct

SEQ ID NO: 53645 - DNA, 409 bp, Zea mays
  unsure (1)..(409): unsure at all n locations
tcgtgaaaatatttttcgaagctacactccgaagatctttattgatctccttgtgacttagcatgattntccctctttcacagcattcttccgaagatcaatattgtgtccccttcttgtgccatatgcagcatgatgtatgatgcttatgctatgcgaaatgatgtgatgatgttatgctatgtaaaatggtatttattccgaagatacacgcacatccctgcaataaaacacataatctttntaaatcagcgttgacttttcgctgtaagcctccgttaggagcttcttcgccttttacttcagcggaatcagcgtttattnttcgctgtaagcctcccttacgagcttcttcgccttttactttcggcggtattcgcgttgacttttcgcgcttcgccttttactt

SEQ ID NO: 53646 - DNA, 423 bp, Zea mays
agcttaccacatttgaagcatgaacgcttcttcttgtcttggtcttgtttggctgccccttgcgaccctttagcgccgtcttgaatctcttgatgatgagggccatctcatcatcattgagtccggccgcctcaatttgtgccaccttgctaggtagagcctccttgcttcttgttgccttgagagcaaggggttgaggctcgttgattggaccattcaatgcgtcgtccatgtacctcgccttcttgatcatcattcgcccgcttacgaattttccaaggacttcttcgggcgacattttggtgtacctgggattctcacgaacattattcaccacattaggatcaagaacggtagaggaccttagcatcagtcggacgacctcgtggtccgttcatcccgtgcttccggatctccttattt

SEQ ID NO: 53647 - DNA, 385 bp, Zea mays
  unsure (1)..(385): unsure at all n locations
ctaagcttatggagtgcgaaacacactcaattatgcagattcttttagagtggttnggccacgaacgggctgttcttcacggngcggtgaacccgattacgggaaaatggcgctgcggcgttcaccagtggaattgacggcacagctntgggctatacggctatatggggttctagttttgctgcgcacaaccaatttgggaggagggggcagaggcagcacgaatttctgcttccattcaacctatggtgtgcgcgatgctcatacctcgccgcgaagcatggctatttatagctgcgccggcccagtggtcacctcgcggccgagaagagcatcactaaggcatgtcgaccacgtccgtaanaggcacagggagggagaacta

SEQ ID NO: 53648 - DNA, 387 bp, Zea mays
  unsure (1)..(387): unsure at all n locations
agcttatgctgtatgtcctagcaagtggagtattaataaatngactcactgcacatgtaggatgggttttcggtcttgctattgatatgattatgttattctctgtgctagttttgacattatctagagagatgctatgcttatctcacatacttattattctcatccctgtggatacagctatgccgcctcgtagagctcggggtagtccgcaagctcctagtggggactcgatgagtccggcggcaatgttagccgcgatgcangccatgcagcangagttggccctactgaggcaagccattcctgtcgcccctgctggtgctgctcanggagctggaggtggagaagtgcccggnggcgctgtccctgcgggcgctgttcctg

SEQ ID NO: 53649 - DNA, 422 bp, Zea mays
  unsure (1)..(422): unsure at all n locations
tgcttacttggtaagatgaccaaggcgcccttcacgggtttatcggataggacgttagatntattggaactcatacatactgatgtgtgcggaccaatgagtacgacagctaagggaggattccaatacttcataaccttcactgatgattntagtagatatgggtatgtctacttaatgaaacacaagtctgaatccttagaaaagttcanagagtttcagaatgaagtanaanatcagcgtggcaagaaaaataaagcactgcgatcagatcgtggtggtgaatatttgagtcatgagtttagcaatcatctaaagagttctggaattgttccacagcttaacgccgctggaacgcctcagaggaatggcgtgtctgagcgacgtaatccgactttatttgatatgngtcgatcaatgat

SEQ ID NO: 53650 - DNA, 404 bp, Zea mays
agcttgaaccgaggattcgcgtcaccggaatagcgaaaccgtgctcgccggagttcattcccccgccggagcacgtggaccgggtaaatcactgagccattttctgattcaatgcacagatagcctctacatcaccccaggaagctcaccgtgtcgttggattggactaggtcaccgtggtttggccggcacacccgccgccggcgaggacacccacctgcgcacgtggaccgagcgattacggccatccccgtcggcgagccgtacgtcgttgtgaccgccagaacctccccgagccaaccctacccctcgccggacctatctcgccgccggtaagccgcgccgcccctttcttctctgctggtactatatgcacttgggagggaccgcgatggagaggaaga

SEQ ID NO: 53651 - DNA, 368 bp, Zea mays
  unsure (1)..(368): unsure at all n locations
aacagtgcanatatcaatgaatgctggggtaacttcacacctactcgtctgtntatatagtgttgcaggtaagaaggcgaagcgccaggatttttacaccaggcggtcacccgcttgtactcgctgtgcggtgggccgcagagaccaaacagtaactctgcaaggtgggaccgctacgcgctgggaaattgaatcgtttctcggcaacgagctcagggaaggtgttttttggaccttcggctcctcgaagcctaagagactcttttcacggatcaagctcgttacgaaaaacgatctagcaccgcgaaaggggctactgttgggcctgtgcttcgtcgccgaaggtcttacaggaagaagcggtcttc

SEQ ID NO: 53652 - DNA, 440 bp, Zea mays
agcttacataagaattgataaataagattttgtatcctatgatatagtttcctccccctaaatatgtgcatttcagaaaataccaattttgtactcagatgccaaaaccacatacttgggtcgagtgaagacaacttatatcatactattcatagggtgctttgtgtcataaataaacgtgatgctcatgacatattatgcactcatcaattttcttcatcttatgttttacttatgattcaacccccctttgtcagttatttctcccccttttcaaaagtcttcttacacttagttacataagactaaaggtaagctttaatgcacaatttctccccctttgtcataaatctccaaaaaaagatataaagaatataaagggtagaaattaagattaatcaagatttgaacacactatcatgaaaagggtccttatatgg

SEQ ID NO: 53653 - DNA, 344 bp, Zea mays
  unsure (1)..(344): unsure at all n locations
ccgactagtgttctggaggctgcatgtattccacattgccctgcatggacctnctncagaagttgcttcccagtggacgggttccttgttgtgaagaatgtcccctattagaaaaccagtaactactatgactttgtggtcgtcaaagtagtggcgtagcttgcgggcagttagaagtactgcatataatagcttctgaacttgaggatactttttcttcgatggacccagaacttcactgatgaagtagacaggatgttgtaccggataagcatgcccttctttcactcgttcgactaccaacacagtgcttaccacgtgagtcgtacaagagatatatagca

SEQ ID NO: 53654 - DNA, 395 bp, Zea mays
agcttaccgcaatgtatgtttcgttgaaccattttgtcttctcctagatttaatttctaccagaattagttgtgtctcttgagcatttttcagaggacacacataatgctatccgtgacaacaacttgttcaagaaccatacaactagcagtgtcctaagtcctagaacaggaagttgttcggcccaatgaaaaagcgatatgctaccacactcgctcggttagaggtggattgacagatattatagacaaataaatcattttctattcaaatttgtatagaaggagatctaatctcctcaatccaccccttatcgaagatgccctataggataaagatacaccatggttgtggttcatgaacggccatcttggtaatacactattgaaatacta

SEQ ID NO: 53655 - DNA, 355 bp, Zea mays
tgatcatggcctcaatgacaatctcattgggtactgttggcgcttgagctcttactcgcaaaaatcttcggacgtacgcttgcaggtactcctcatggtcctgtgtgcattagaacaaatcttaaacagcgactggcttcgtctagaagcccttgaagctggtgactagcatgtccttcagcttctgccatgacgtaattgtccctagctaaagggaagaataccatgtctgagccacacttcgaactgccatgacgaaggacttcgccatgacggcagtattggccccatacggtgaatatcgtgcctcgcagctcatcaggaactggcttggatctgaatgctcatcatacat

SEQ ID NO: 53656 - DNA, 393 bp, Zea mays
  unsure (1)..(393): unsure at all n locations
ttctctatgtgaatgtttatatatattaactcaggtagcactacaactagcaatgtatggatgaatcgaacgaagtaaaagaaggcatacaatcttatagaaactttgtatcttgaaaccgccatgattggcaaaaaagttggatgcatcctttgcattggtgtgttcttatcaccaagcagtaatgtgaagcaagttcatttgtttactaagaacggatcaacacaaattagtgaagatttcgttcacaagagatgcaggatggagaggtggtacatatcaatatggctatgatactattnttccccttacaatcttttgtatggaacaagaaaaaacaatgtatgtggttactatcgtaattcacaaatttagttctaaataataaatata

SEQ ID NO: 53657 - DNA, 336 bp, Zea mays
  unsure (1)..(336): unsure at all n locations
tttcataaggctgacatctcgtcccatccggtccttagcatnctaactctcttggcgacgcctccgaagagcattcccacgcgtgaagccgcatgaattgcataatccctcagctcttccttctcagccttagacaactttcgaccaagtatgtcttgaaaattaaaatccttttcctccgaagtatcttcggcaatctccttctctttcctgggcactgcggccagggtctctttggcagctgtagcagcttcttccgcagccatgttcaaaattatcttatcaatatcaaagaaagtgccttctagaattgtatcttcggccgtctcagctttg

SEQ ID NO: 53658 - DNA, 408 bp, Zea mays
  unsure (1)..(408): unsure at all n locations
agcttaaagccatggtaagtagcataggcaagtaaaatgtgaattgactcaagcctagctacaggtgcataggtttcactgaaatccaaaccttcgacttgtgaatatcccttggccacaagtcgggctttgttccttgccaccacaccatgctcatcttgcttgttgcggatagagatggcaatgggtacccgaaacccgaaacccgatgggtttttaccccattagggtatgggtttgggtcaattttcatacccatgggtttgttaacgggcataaatctgtacccagcgggtttatgggtacgggtttgttcctatagtacccaaacccgtgaacccgtgggtttcttaaacccgaccaaacctagtgcatattgtcattntaatttataaaccaacaacaaac

SEQ ID NO: 53659 - DNA, 388 bp, Zea mays
  unsure (1)..(388): unsure at all n locations
tcggtacactacgacttcattctcttcagggtgtggacaagttntttcctcttcgtcggccctcacaatggacaaatcccggaaataccttcctctcatgttaacaagatgattttctttgctagttgatttgccgaanaccgcatggcttggtcgccaagggcgatcttcggagtcttcaccaccactgtccacatcataactgtcgctgtcaccagtatcttcagacaaaccttccagaatctccttggtgattntttctgtattcgtcttcgacatcgctataagaaaccccaagttcttctcttcgtcgagactcagcttcatctcagcagcagctttcttctcttcagacatcttcggaaacgctaaaaaactggtttcaaag

SEQ ID NO: 53660 - DNA, 392 bp, Zea mays
  unsure (1)..(392): unsure at all n locations
gctatctaaaaaatattatacagaattgattatagtgttgnatgctgtcttaatggcctccaggaagcttcggcattattgtcaagcatttcatataagttgtccttcgtcacagcctctgaaggatgtcatgaggaacagagaagctactataaggattggaaagtgggctgcggaactcaacgaattcaacattgattatgtgcatagatcctcgattcagtcccaggcactagcagacttcatcgctgactggacgccaggggctcangaagaagaagcaaataaagatgccgaagcttgacagtattctacgacggntcctggggaaccttcagggcatgtgccactgctgtcttggttgcaccttcaaagtcaaacatgctatgtat

SEQ ID NO: 53661 - DNA, 456 bp, Zea mays
  unsure (1)..(456): unsure at all n locations
tgttggctgtgcctggtggttgttcctgcgcggtgtgcgtgtatcatttttatacgttntttataaacggcgcatgattcgatcctcaccgtcgacttcggcgaccttggcagttgccgttggatgcgatgcgatgcgagcgtggcccgtggctcgttttgtccgcgcaagtagagtaggtgtaggtatctccatggaaaaggagagggtcccgcctgatcaaggagccaggcaacagattcaggcccagcggcagtgacaccacacatgaggcccaacgccattgggcacgtcgttgggacccaagagcaagatggagatcgggaggaaagcgtcaacgaccgttcgacacgtggcacgaaggagccctttgagcggcttgtgggttgcagcattgcacgttgcggcggtcatgggaaaagaagaatggtggcaaagganaaaatgtactctata

SEQ ID NO: 53662 - DNA, 402 bp, Zea mays
agcttggacaatttctgcgatggtcttgtataacttcgcgcaggtgcagctgccattataattgcactcttaaaagctatgaacatgctacgcagtgaaacttgattatagtcgtacaaataatatcgctgaatacgaggctttgcttttgggtctttggaagttgaaagcaatggggataagaagggcggacctcaaaaccgattcccatgttatttctggccatgttgacaaaagttgcatagcaagagatccgaagcttgaatattacctggatacagtccgaagacttgaagcctccttcgaagggttctctgttaataatattcctcgaggaaaaaatgaacatgctgatctactagcctagtcagcagcacatgggctgtcattacctgccgaagt

SEQ ID NO: 53663 - DNA, 301 bp, Zea mays
  unsure (1)..(301): unsure at all n locations
agcgtttccgaagatgtctttatctgctaagaagttgctgctgagatgaagctgagtcttgatgaagagaagaacttacggtttcttatagcgatgtcgaanaccaacacagaaaatatcaccaaggagattctggaagggttgtctgaagatactggtgacagtgaaagttatgatgtggacagcggtggcgaagactccgaagatcgtccctggcgaccaagccattcagtttatggtaaatcaactatcaaaaataatcatcttgttaacatgagaggaagggtatttcgggatctgt

SEQ ID NO: 53664 - DNA, 420 bp, Zea mays
  unsure (1)..(420): unsure at all n locations
agctntgttaagatctgtaaaatcgatgcacattcgccacttgccattggccttttttaccataacagtgttagccagccattctgggtacttcacttctctgataactcctgcactgaggagtcttttgacttcgttgcgagcaccttcggccttatcatctgacatcttccgaagcctttgctttctgggtctgaaggatggatcgacattgagtgagtgctcgataacatctctattaactccgcagagatcattggctgaccatgcaaaaacatccttgttattgaacaaaaaccttatcaaggttttctcctgctcttcggataactgagagcctaacagcaccttctgctctgctatgtcctcacataaaagcatangcttcggctggtctgctgaagctgctttctccttctg

SEQ ID NO: 53665 - DNA, 334 bp, Zea mays
ctaacgcctgaactgattgagatctatcacatagtcatggtgattattagttctgcacccatttccaatccttcaagtacttctctgtttctataatgtccttcagagttgtgacaaggaacaattatgtggtattcttgaaataaaccaaagcttctggagccattaacacatatacaacacttctcaattctattaattttctttgaagacttacacttcaatacgaagacactggagctgcttttgactggcatctacttctctgtacagcgcgacttaatgaaatgcaaccgcacatataaacaatggaccctgcgcagggagtatgtgt

SEQ ID NO: 53666 - DNA, 419 bp, Zea mays
agacacctgcagcatgaagctgttcaattttgatgacacatagcgtattatggttcgcagattatttgttgcgcgtaggtggtggaattgaggaaacgaacaacgatggtgatgatcgtcttccaaatgatgtatgtgtgccatatagtggtaatgaccgcgaccttgatagactgatatatgacatttaccccgatctaaatgaaaatatgtctaacacaagctacatcacttcaagagcaatattgtctacacggaatgactaggtggatatgataaatatgaggatgatcgatcgtttccaaggggagcagatgatgtaccatagttttgacaccgcggtggatgatcctaataactatcacccattagagttcttaaccatcttgactcctatatactacccctgacgttctgat

SEQ ID NO: 53667 - DNA, 435 bp, Zea mays
tgccttcgcctcagtatatcacccgcagtccaacggagttgttgaacgcgccaatggaaaaatcttcacagatgtcaagaagatgctcctcgacgaataaagggcaggtgggccgatttgttacctgaagtggtctgggcgctaaacacgactgagtgcagggcgactaggttcacccctttccgccttctatatggatcggaggccatgaccccacaagaaataaaacatgggtccccgcgaacagtttcgtcagttgtccccgacgtggacgaacccacttcgaaggatcttatcgatggagaccgcgtctctgctctacaggctctaaataaataccaagcacaaacaaaagcatggcgcgaccatgcagtcatcccgagggaattcagcgaaggggaactcgtactcgtccgaacagctcggacagagtct

SEQ ID NO: 53668 - DNA, 408 bp, Zea mays
  unsure (1)..(408): unsure at all n locations
taagacacctgagctgcagctgaccatatgtggattctgcattcttactgatcgatggatgcattagtaatgaagcatgaactgaatattacctcccactttattgtgattctcagggctgcgaataagattgaaatcacctaaaaagatccatggttgatctggcaaaattataatattagagaaccattctaggaaatcctctttgccatttgacgtgcttgggccataggtataaataaggagccatgactgatttattaatttggtgcgaaaacaaattgtctgggcctacacattttagaatatttgtccctagagaatatagagctttgagagaagtgtatcatgccacccgacgaacncatagtgggatgataacacaactcatcaaagcttctacgactg

SEQ ID NO: 53669 - DNA, 419 bp, Zea mays
  unsure (1)..(419): unsure at all n locations
ntaccctgcagactggactataagtttgggttacgtcagatgactctatgcagtgaccatcttcaacatctatatagtgaggactttatggaaaagcctcgtagtgcgaccctagccagtcacctcggaagtgaatactggacttgcacagctaggctagaagaaaaacacgactcatgggaaagttgtgccacctctgtagagtgtaaaattgatatatcagtcctgctcacggntacgagtgacatgtaccctcacatgataattaaatttgaagatggaaataaatcatgatcggcttggtttaagcggtatgcttaagtggttcgctcaagaggttgagcttcatgttgatggtatttgagcttatgatgattatgaattatgcttaatcgggtttgcatatacttatacttagt

SEQ ID NO: 53670 - DNA, 444 bp, Zea mays
ttaagcacctgggctgcagcttgtcttttgtgttggacgacgtgctgttttatgctagggacagggagttgtagcgtcaccaaggtgccagtgtcaaaatgcctggtcccgaggttgagctacgccaaaaccgtgtcaaatggtttggtttgagttcaaattttcccacaatgtgttcaaggtaatttggcacgactttgatatttggatcttctggctttgagtttggaaaagcagagaacacagatgatctttgagaagaggtctgaaattcaaaaattcagaaatctgaatttccctaagggttcattgatcaaaggcctggttttgggatttaattgagttattttggctaagccttcttaatctttcttgttacttaagaaatatactttaacttatataattggctcaacttaaaatttataacttttatttctcttt

SEQ ID NO: 53671 - DNA, 418 bp, Zea mays
  unsure (1)..(418): unsure at all n locations
tcgggtcaggaagtcgccttagaggccagcgctcctgatgatagagntttgacctctgctgatgatactgacttggtccccactgatgcattgtgggttgttccggttggtgatccttcatcgagccatcaattaacttcctacgacttgggagttccttcgttcttttccaacctccaggtaacttagtttttactgatctagctgtaccccgggtgtgagattgttcttacacttatttggttntaatgtcaagcattggttgatgaaatggttggtcagctgaggtcgcanggtgcttctgtcccagaaagggctctatatttggcacattggaatccagtgctgcttcagcggcgggtatctgatttggagatggcaaatggctagtagtgcccctttgttcttctttgactac

SEQ ID NO: 53672 - DNA, 409 bp, Zea mays
  unsure (1)..(409): unsure at all n locations
agcttcggcataccccattctctcagcgttgtaaatactcggttggccaagtattcttgaactaagtccctagttccaatgtgttcagatacaactctaaactcatacgcagcatccgggcatggtgcccccggcgtcatgttgcactgaggcctatttagcccaaaggttaactctagcgggctctgcactagcttctcctttttctcatcaatcttaacataaaaacattcagatttccaaccggtcggccatttagtgtgatagctgaccacaggtgtcttcatgtctttgcgataagcaaagttgtagcagccgaagttctcatgcangccgttttccctagccttcgtctgatagtgaagttcatgtactccgcagaaggcttcggcgagtggctcaccccttg

SEQ ID NO: 53673 - DNA, 460 bp, Zea mays
  unsure (1)..(460): unsure at all n locations
tcggcgtctttattgatttcttcttcctgagcccctagcattcaatcagcgatgaagtctgctaacgcctgggatngaattgaagatctatgcacataatcaatagtgaactagttaagctccgcaacccattttccaatccttccagtagcttctctgttcctcattatgtccttcagaggctgtgacgaaggaacaattatgtgatatgcttggaaataatgtcgaagcttcctggaggccattaatacaacatacaacaccttctccaattctgtataatttttctttgataaacttaagacttcggagacgaagtatactgggagcatgtttttaagctggccatctagcttctcttgacaagtgccacacttactgcatagtgcgaagctgccacatacaagagcaatggaagccctggcgaaggtggagttagtgggtgtaaatcaatcaagta

SEQ ID NO: 53674 - DNA, 350 bp, Zea mays
cgacttaaagatttaatgaccttatagtccataaaagtctgagtcattgtcgtaaacttttatgaggagcatgaatgtaatagcacacaggctgtgtcctgtgcctataaattgtgaacagtatccctttactgctcacgcattcctgaaattgcaatcacatcactcggaaatactctttgccacggcagaggtataaatgtacctaaacattacatttgaatatcttatgtacatataatacggtaatgatagtgcttgtcataattacttgccttaatgctgtatgctcgagttatatatattatctttgaaagtcaattacgaagaataaccttcgtaatgtgcaa

SEQ ID NO: 53675 - DNA, 404 bp, Zea mays
  unsure (1)..(404): unsure at all n locations
tcttcaccagccgtggcgcgcgctggctagttttcggtgtctatatgatngatctgcatggngaattgaggaacgaacatataattccagtggtacgtgcacctaaacttgagagcagctgggactgggagctgcccagtctgagtcgatgaacacaggcggtcgtcccaacaactcctcccaaaagtgagtgagcctctttcctgaaggttttagtacgaccgatcgtttggaatgtattgttacagaatcgcanacgtcgtacgtatatatgtgatctctcagccattcagtatcgtagatgatgttcacggcgtcacctgcttaattggatggatttcttggacaggctagatgtgaagatcacacagcaaccttgaaaaacacgcacacaccagcagatg

SEQ ID NO: 53676 - DNA, 427 bp, Zea mays
cgcgtgcaagcttctaaagggagagcacattctgggactatctaatgttcatttttataaagacagggtttgtagcgcatgtcaagcagggaatcaagttggtgttcatcatccacacaagaacatcatgacgactgataggccacttgagctgctccacatggatctattcgtcccgatagcttacataatcatcggtgggagtaggtactgtctagttattgaggatgattattctcgcttcacttgggtgttctttttgtaggaaaaatctcaaacccaagagaccttgaaaggattcttgagatgggctcaaaatgagtttggcttaaggatcaaaaagattagaagcgacaatggaacggagttcaagaactcttatatcgaaggcttccttgatgaggagggcatcacacatgagttctct

SEQ ID NO: 53677 - DNA, 366 bp, Zea mays
  unsure (1)..(366): unsure at all n locations
aggcttagcaattaagcatgtgtcgagttcagctctatcaaaatctaccaagtatagctaaccctctaacacacccttaaatgctattgaatcatcacttcttctanagacagtgacacctacatcagtaaagagacagtcgtagcccatntgacataattgagatacagaaagcaaattgtaatctatagaatctacaagaaaaacattggaaatggtatggtcaggtgatatangaaatttacccaatcctttgaccaaaccttgatttccatccncgaatgtgataagctcgtggggatcttggntnttctcatatgaagagaacatcttcttctcccctgtcatggtggttggtgcactcgt

SEQ ID NO: 53678 - DNA, 285 bp, Zea mays
caatcaccactatccaaccttcgatggcgctacggacatcaagatatctgataggcatgcctccacttttacagctaaacaatattgagtacctcccttcctactatttggccattccatagaagaacacctcactcttgtggaaatttattttcagacccgacagctgctcaaaagcacataatatgagtgttatattctctgcctatgccacaatgggctccataaacaagatagtatcatctgcgtattgtagaatggaaagccctccatctaccaagtgtg

SEQ ID NO: 53679 - DNA, 440 bp, Zea mays
  unsure (1)..(440): unsure at all n locations
gcttgtggntcacccacaacctcgctcgcatgcgagtggagaacctcgctatttctgtaacgtacaggacgctgtcccttctgttttccaactaatattacgcgatatcttgaatgtggtgaatgttggtaaaagctattattcatatgtagtggcgtgaacatgtgtgcgaatcggggaaatagctgagtaatgctgattggacgtgatgtgtaaatttaaagattggtacgtgtgtgtaggtgcattattgaacatgtatgtcgatgtattataatagcgattgtgatagagtcttttgaggtattctgaatgcatcccgagtatggctgcattcgaaatacggaaagagacatgtagtgcgatgatcaggctagatcgatttataggtcgtatgacaacgttctataagtgatacgttgagtgcgtacatggatcta

SEQ ID NO: 53680 - DNA, 447 bp, Zea mays
tgccgcatgcaagcttgacaatgaggaaatggcgctcgacatttttagctttcgtcatatcctcaaacaaaggagagggaaagacttacagtcctcgctccaagaaggtttgctacaagtgtggtaagcccggtcactttatagctaaatgtccattatcaagtgacagtgacaggggcgacgactagaaggggagaagaaaggagaagaagaggtactacaagaagaagggcggcgatgcccatgtttgtcgggagtgggattccgacgaaagctcaagcgactcctccgacgacgaggacgccgccaacatcgccatcaccaaaggactccttttccccaacgtcgggcacatgtgcctcatggcaaaggacggcaaacggaaaaaggttaaatccaactcctccactaaatatgagtcttctagtgatgataatgctagtgatg

SEQ ID NO: 53681 - DNA, 428 bp, Zea mays
  unsure (1)..(428): unsure at all n locations
tgtgcanagtccacttgaactaatcttcggagaaacccgccctcattgcaacatgacaccggagggtccaactcanaaagcaatgaatgaattcagaattattgcagagcatatcagtacatgagacctggttcacgagtttttggctttcaagggttttcctagtttataagaatgggaaatgccgacactaaaggcggaaaagaaagaaggtgaacttgtgcgcttaccttactatttcaagtttaagacatactttaatactccttgccaagagtggctggatacaattgaagtaatgtgtaatgaaatacttggcaactactccaaaacagaagatcaattgatgactgcggccttcggcacccgtccgaagcgaagcctgaaccgagtgctggacgccttgngttttgaataccctgactatg

SEQ ID NO: 53682 - DNA, 375 bp, Zea mays
  unsure (1)..(375): unsure at all n locations
agcttgtanggtccctagccgcccttagccgcttcatctcaagactgtctgagagggcactgcctttattcaagctgctgcggaagtccggtccattctcttggaccgaagaggcagaacgagcctttcaagaggtgaagcagcaccttgtgtccctgccaatactggtagctccggagccggggggccgttatacttgtacattgcagcggcttccaaggcggtgagcatggtgctggtcgctgagagggcggcacaacaaccccaggggagtcaacaagttcccccaggagaaggtgaaagggaattacgcttacacctagttcctatataattttggtggttgaattgcccaaccacaaatctttgactaac

SEQ ID NO: 53683 - DNA, 412 bp, Zea mays
  unsure (1)..(412): unsure at all n locations
tcggcgtgtctgcagaaaaggaaaccgacttanagatgaaaaggctatttatacctcggtggattactatagagctactaccaaatgtaaagggcatggatgtaattttatatgggttgtgtcccgtgcctataaataggtgaacagtacccccgtactgttcacgctgacttggcatttgctttntgcgtcacgcttgtacttttacttccttccaagctgaaggtacatttgtaacttgatgtcgtttctattcttctataaaaataataatacagaaatgaatcgataacaacatataattgtctatgttntccttcatattctatatttcgtatgatccttccttcgtcattatacgttgtgtttatgaaggtacgtccttcataaccttcgtccgaaaatcattata

SEQ ID NO: 53684 - DNA, 308 bp, Zea mays
agggcagacgacattatgggaaatgggaaaagtgtctacagaagatagtcaaaatagcagctaataacagtaaaagaatggaactctagacactattggcaaaaatgtgccaacttctactcctgccaccagctatttgaggtgacaaactctagtccttctttggggggtggagcaagctttgaatcaaatcaatggcttgaagttcaaaggcaaatgtccgctgtgcaactggtcacctctgtggactttcggttatccaaactctctaggcttgcaaggctctgtactggtgagttctgtactca

SEQ ID NO: 53685 - DNA, 334 bp, Zea mays
  unsure (1)..(334): unsure at all n locations
tggaggcgtcgataggtagcgacttggtgaccctcctccttcttcttctccgttgccttgaatgcaacgggttgagcttcngatgtggtggcatcatcaagctcgttgatcttccttgagccttctatcatgcactcaaaactaacaaaattcccgataacttcctcggtggtcattctgcgatatctaggattaccaccgattaatctgacctgagtaggggtaaggaaaataagngatcttagattaaccttaaccacctcgtggtcatcccactttacgctcccgaagttgcgcgcttggttcaccaaggtcttgagccgattgtacatgt

SEQ ID NO: 53686 - DNA, 395 bp, Zea mays
  unsure (1)..(395): unsure at all n locations
agcttttaaaggtatatcacgtgataagtttgtcttacgttcaattcgtaaaagatagaccttgtgtcatttgtcaagcaggtaaacaagtgggaggagcgcatcacaacaagaatgtgatgacaacttctagacccctggagttgctgcatatggacctcttcggacccgtcgcctatctgagcataggagggagtaagtatggcctagttattgttgatgacttttcccgcttcacttgtgtattcttattgcaggataagtctgaaacccaagggaccctcatgcgcttcctcaggagagctcaaaatgagttctagctcaaggtgaataagataaagatcgacaacgggtccgagttcaataaccttcaagtggaggagntccttgaggag

SEQ ID NO: 53687 - DNA, 456 bp, Zea mays
  unsure (1)..(456): unsure at all n locations
tcgcatctctgaactaactcggctgcatcgttcttcgtcgttggtcaatagaatcctgacctgaaaactttcccgactagtgttctggatgctgcgtgtactccacactgccctgcatgaacttcctccagaagttgcttcccggtggacgggagaatgcatttcatgaggacgcctgatgcgccccttctgataatacctcccaatgagggtatagtgagccgatgtctggcatacgctctgccgagtcttgcatctggtcttcctattcttattacttaataatcggcgtctcagcatcaagtctgactcggtgactacgatgtgcctctttgttgattattggatactcgcgtngatttttgccgaaactcggggggactgagtcgacgacccagttgatatatatcggtgcgtgtccgactttttcatgtgaattcaacctcaattatctca

SEQ ID NO: 53688 - DNA, 423 bp, Zea mays
agcttgtgagcagtacaagtacagaagggattatgctgcttcggcctatcagccgaaacccatgcttttatgcgaagatatcgcaaagcagaaggtgctgctgggatctcaattgtctgaggaacaagagaaaaccctgataatgtttctgttcaacaacaaagatgtctttgcatggtcggctaacgatctctgtggcgtcaacaaggatgttattgaacactcgctcaatgttgatccatccttcagacccagaaagtataggcttcggaagatgtctgatgacaaggacgaaggtgctcgaaataaagtaaaaagactcctcagcgctggagtcatcaaagaagtgaagtatccagaatggctggctaacactgttatggtaaaaaaggccaatggcaaatggaggatgtgtattgattt

SEQ ID NO: 53689 - DNA, 476 bp, Zea mays
  unsure (1)..(476): unsure at all n locations
ttggcttcatctatattatggattgctttcgaatctgtcctatttccttcagcctttctggcagcttcctgacttccatgaatagaaataggcccttgatccgaaggtatcttcacgcatagatatgctggatgaagaattgcttcaaaagcattgagtgtcccacgaccaatgattgcattgtaggggtactccatgacgacaatatcaaacacaacttgctcagtccttgtattgttgacaaatctgaaggtcaccggcatcgtgatcttgccaagtgctacgatctgccttcctccgaagccacaaagagggtgtgtagcatcatgaatcgtatcctctggctcttgcatctgcctanaggccatggcacatataatatccgctgcactgcatgtatcaaccagaacattgtggaccagaaatcccttgatgacacaagaaatgaccatagcatcattgtganggtaatcttt

SEQ ID NO: 53690 - DNA, 421 bp, Zea mays
  unsure (1)..(421): unsure at all n locations
agcttatacttataagtatcatgtncaaaatatatgggttntcagaagggcaaaatgtgcaaccccaataaaaaccctaattgagccctataaacaagattcaagagaaaggggaaaagggtatgaaattataaacattaaagtatactaaataagcaacgacaaagattaagtaagcttggccaaaacaatttaaataaaactctaaacaagcttctcaagtgggatttcattatggaattctgaaatcctgaattctgaatttcagaccttgagccaaagatcaagcgtgttcaccttgatccctaactcaaatcctaatggccccattgacaaaaacgtgcataactaacctctctgtattgtgccanaagatggcatcnggacacgtgccatggacacgtcaaaccagagatctttc

SEQ ID NO: 53691 - DNA, 386 bp, Zea mays
  unsure (1)..(386): unsure at all n locations
tcaagcttacggcttcacggngaagcggtcaaggggctggggctttgttgtggttcaacagaaagggcaggccacgacggccgtgctcgggcagtgatggcgtgggcgagctctggtgatctctggctcgagcgaggctctangtgcgcgagtgccaacggctaacgcctctagaggcatttataggagagggcgaggtggagacgcgcggtgcgaggcgaccacgcgcggtgcacgcgctgccgcgaccagtccgcgctcggccggtcaggcaagcgatcgaacaggtggctctntgcttctgcccgagttcaagcgctcataggttgaagatcttcgcgtaattgggcatgatcactgcacaagatttgctctctcgacagagc

SEQ ID NO: 53692 - DNA, 355 bp, Zea mays
gtagcgcatgccaaactaggaagcaagtcggtgttcattatccacattataaacatcatgacgaccgacctgccgctcgaactcctacacatggatctattacgctcgatggcttacatattcatcagcaagactaagtactggctattattgtggatgaggattctcgctacacttgagagttccttctgcagagaaaatcttatacccaagagacctgtaaaggagtcttgagatgggctcaacatgatgttgggttaaggataaggatgctatatgcgaaaactggacggagttcaagaactttcatattaaagcttcttgacgaagagggaacaatcatgaatactctttc

SEQ ID NO: 53693 - DNA, 359 bp, Zea mays
  unsure (1)..(359): unsure at all n locations
agaacacatcttacgtttaacacatgttcattttgagaataacaggatntgtagcgcatgccaggcgggaaagcaagttggagtccatcatccacacacgaacatcatgacgaccgacaggccgcttgagctactccacatggatctattcggcccgattgcttacataagcatcgacgggagtaagtattgtcttgtaatagtggatgattattctcgcttcacttgggtattctttttacaggacaaatctcagacccaagagaccttanagggattcttgagacgggctcaaaatgaagtccgtctaacgatcaagataataagaagcgacaatgggacggagttcaagaactctc

SEQ ID NO: 53694 - DNA, 268 bp, Zea mays
ttcgctttatttctatcatccgtttttcaacagggtcgcggagcgtgccaatgggaaaatcttcacagttgttatgatgatgctcctctatgaaaacaaggcggatggaccgatttgttaccggaggcagtctgggcgctaaacacaactgagtgcatggcgaccggttttactccttttcgtcttctatacgggtcggaggcaatgaccccgcagaaataaagcatgggtccccgcgtacagttccgttagccgtgcccgacctgga

SEQ ID NO: 53695 - DNA, 445 bp, Zea mays
  unsure (1)..(445): unsure at all n locations
cgagaaatatctagacacggggcgaacgattgaatctttctttgaaggatcttctgtcacaaatattcctcgaggagaanatgaacatgctgatntgctagccaagtcagcagcacaggggctgcccttaccttcggaagtatttttcgaaacaataaaagcaccttcggttgaacttcttgaaagagcagtcctcaatatatctcctgtttatagtgaagactggagaacagagatcatctctttccttcagggtaactttctttcagatgacgaagcttataacaagagaatagaggcaagagctcgaccatatgttataatagaaggggagttggacaagcatggggtctgttctccactactcanatggttatccagagccgaaggtatagaattgatgaacgaaatacacgccggcctgtgtggatctcacattggatct

SEQ ID NO: 53696 - DNA, 379 bp, Zea mays
  unsure (1)..(379): unsure at all n locations
agcttcggcatagcccattccttcataggtgtaaatattntgnaagccagaaattcctgcaccaaatctctcgtgccaatgtgctctacgataatcctaaattcagccaacgcagtttgggttggaccttctggtgtcatgttgcattggggtctggtttctccgaagatcagttcaagcagactctggaccagcttctccttgtcatcatcaactttgacgtagaaccattctgatttccagcctaccggccacttgcttcggtagctgatcacaggaaattttgtagttttccgataggcaaaattgtaaccaaccaaaatttcatgtaacccatcctttctggccttggtttggtaatgtagctcgtgcacccggc

SEQ ID NO: 53697 - DNA, 394 bp, Zea mays
  unsure (1)..(394): unsure at all n locations
acactatannaatactaagcttgaggaagtcctttcggtgatgttgaaggatgatcttactgttagtcttgcatacaacagtataaaggtacagaggctatgtctaactctaaagttgaaattaaagtatttctattgtcatgcttagttctctctttttcttgcagggcttaattcttagcaatgccttgagggcacaaaagaacaccaaagatgaaagctacacaatagcacttaacaaccttcgctcagaggtgattgaactgagaaatgaaggtctagagaaagaacaaattttgatttcattagtgagtaaaataaaagaagacgaagctaagtacaatgctcacgccgaagcccacaaagccgaggttgaagaccttcagagacaact

SEQ ID NO: 53698 - DNA, 271 bp, Zea mays
atggttgtgaaccctctgctggtcgacgataacattgatgctgatgagggtggtgcggcttggtcattcctacaacgatgggtgacagggaaccaaatcttcttcttcttggtgttgatgtcccttgctggtgtgccgtgttctttccagttgtgtggtcgatgcgttctcccaaaaaggtgatacccaattttcaaaaagaagataaattgaagttattcttatttttctttgtttctttccgagcccttgctactgggtttggagtttt

SEQ ID NO: 53699 - DNA, 350 bp, Zea mays
  unsure (1)..(350): unsure at all n locations
tgtgcaaagtccgctcgaactaatcttcggagaaacccgatctcgctgcaacatgacaccagaaggtccaacacaacaagcattgaatgaattcagaattattgcagagcatatcagtacaagagacctgggtcaggagtttttggctttcaaaagttttcctagnttgaaagaatgggaaatgccgaagctaaagggggagaagatagaaggtgaacttgtgcgtttaccttactatttcaagtttaagaagtactttaaaacaccttgccaagagtggctggatacaattgaagtaatgtgcaatgaaatactcgcgcattattctacaaaagaagatcagttaatga

SEQ ID NO: 53700 - DNA, 435 bp, Zea mays
  unsure (1)..(435): unsure at all n locations
agctntaaagatgatgaaagggcgcaaggcgatggacccggatggtatcccaatagaggtgtggaaatgacttggggatattgctatcgtttggctaaccaagttgttcaactatatttttcgatcaaacaagatgatcgatgagtggaggaggcgtacattagtaccaatcttcaagaacaagagacatattcaaagttgtaccagctatcgaaggattaagctcatgagccacactatgaagctatgggagagagttattgagcatcgcctgagaggaatgacgcatattaccatgaaccaatttggattcatgtctggaaggtcaaccatggaagcaatttttttaataagacaggtcatggagcggtataaggagcagaatgacttgcacatggtttttatcgacttggaaaaggcctaaataaaatacct

SEQ ID NO: 53701 - DNA, 340 bp, Zea mays
gaacttcgcgtagcatggtcttcccagtaccgtgtggtaggttcctcggaacccgaccacctcgaacgtcaaagtctcccttcggaagttggagggtgttccgaagcagacgggaagatcgagttgtccgaagggctggacgcgcttcccggggatgatcccatggaaaggcgcagcgcccgcccggaccgaggacagatcgatacgcagaagcccgagggtctcggcgtaaatgatgttgaggctgctgcctccgtccatgaggaccttggtgagcctgacatcgccgatgacggcgtcgacgacgagcgggtatttccccgggctcgacacatggtcg

SEQ ID NO: 53702 - DNA, 434 bp, Zea mays
agcttctgactggtgggcccgccagggtgtcttgtgcacaccggacatctactgttccttgtccggtgtgccggagtgggcgcgcctgccatctgcgcgcgcagagcgcgcattaaatgcgcggcagagagccgttggcgcggagatagccgttgctccggagtcgcaccggacagtccggtgcacaccggacagtccggtgaattttagtggacgagccgttggctttgcccgaagctggcgagttcctgaagccgacctcccttggcgcaccggacactgtccggtgtacaccggacagtccggtgaattatagcggagtcgcctctggaaattcccgagggtggcgagttagagttggagtcctctggtgcaccggacactgtgcggtggtgcaccggacactgtccggtgtacaccggacagtccggtgc

SEQ ID NO: 53703 - DNA, 350 bp, Zea mays
  unsure (1)..(350): unsure at all n locations
gtcatgttatagcacctaaaagccagcaaaaataagttttagagaattacccactgttaaataatagttgtagttcaaagcaccccttctgccctaaaagttgataatgttgtccagagaaaactattcactctctgatccccgaattttgagatagagaaatatacaccagtaccaagccactgtaatttttacagaattttgggaattttatttaaagcaacttgtagttcanacccactccaaaacattaaagagaataacagaaaaggaaagaagaaataaacctcaccccaataagtctaacttgagtacttatcaattctcactaagggctaaaaagaattcag

SEQ ID NO: 53704 - DNA, 414 bp, Zea mays
  unsure (1)..(414): unsure at all n locations
cagctttgactttgacccgaactgtnagcctttatggttagctctcgatgtgtatacaagccgtgtatatgagtgttgggggtacctctaattacgatacccgacagtagcccccgagcctcgaagggagtgtacgcactcgcttggaggctctgtcggctttatgcgagaggaccagccctctcttggttatgtttcgttatggtgggtgtgcgccagcgcaccccccgggtgtagcccccgaggcctcggaggagtggtctgactcctctgaggtcttaattcgtgttgtgatgcctcggtcggcctggtcgttccctcatgcggcctggccgtagctcgggtgcatggtcaggctccgagtttctgagctggttcattgacgctcgcaacagttttggccgcagccgggtg

SEQ ID NO: 53705 - DNA, 496 bp, Zea mays
  unsure (1)..(496): unsure at all n locations
tctcccatgtctttcatatcanagttcgaggatagaaactctgttcctgctattagattcctatcagtactagctaaaagtatgtcatcaacatacaaaacaaggaagatatactttccattcttaaactntgcataaatgtaattgtcttcctttctcctcgaaatcaaatttctaatagtctgaccgaacttgagataccactgtctggaagcttgcgttaatccataaatggaccttcttaagtgacattccatatgttcttttccatgcatgacaaaaccctttggtgtgccatgaacatgtnttctattaactccctatttangagtgatatatttacatccatctgatggggttcgagatcataatgcgtcactaatgctataatgatcctgaatgaatctttcattaagacacgtgagacngctcaattgtatcaatgccttctctatgtgtgaaccctttgtcacaaatctatcattgatctttctca

SEQ ID NO: 53706 - DNA, 395 bp, Zea mays
  unsure (1)..(395): unsure at all n locations
agctngggttgaattggagcccgtggtaactgggtgtcagtccactcattcaggaagtcggccaagacttgggattttatggcatttcgaggggcgaatgaaagtgtttcgcccatgagttccactgcccatttcgctatcctacctgaggcctctcgggactggatgatctctcttagaggaaaggatgacaccacagtcatcgggtgagactcgaagtagtgtcgcagcttccgccgtgtcaggatcactgcgtagagcagcttctggatctgcgagtagcggactttggtctcggatagcacttcgctgatgaagtagactggcctctggatgagcagtgcatgcccttcttctcgtctctcgactacgaccgcggcgctgaccacctgagt

SEQ ID NO: 53707 - DNA, 401 bp, Zea mays
  unsure (1)..(401): unsure at all n locations
ctaagcttcccggcacgccgaggatacgcagatctcgggtgtcagggctcgtgaagattgccccagcagcgaacattagtaactccaagtgcaatatacattntgtccctgngcccacatgtcagggctcagtacctttgtgcatgccccccttcagctataaaaggggaggcatgcgacgttataacacaagttcactcagactctcaagcttccacagcaatccaacacacagtggagcagggtgttacgctccggcggcccgaaccactctaaaccctcgcgtgttcttgtgttcatccttccatctcgcataacaggcaaaacacttaagcccctcctcatcttaagaattanggcgagtgcactccaccacccggctagagatttcttctccgaca

SEQ ID NO: 53708 - DNA, 283 bp, Zea mays
  unsure (1)..(283): unsure at all n locations
gcgcataactatacctctgatatcttcttgtgcctttacgncatcttttacatacaaccattcttgtatccagtcgccgggccatctctttcaaaacgtatgcatccggacagccttgacccataccgagaaacaaaattgtagcagccaaagttattgtgatactgttctctaccccaacgttttgtttcgtatgataattcatgtatatcgcagaagccttttgcatcaggcttcagaccttggcttctcacggcccacacgaagatattcagccttatga

SEQ ID NO: 53709 - DNA, 419 bp, Zea mays
  unsure (1)..(419): unsure at all n locations
agcttcattaacaacgccatttcctacgactctccatctctctctctctctacgncctatacgactcctcctatacgttctatacgactctccatctctccctctctacgtcctatatgactcctcctctctccctctctatacgttctatacgactctccatctctctctctctctacgtcctatacgactcctcctctctccctctctatacgttctatacgactctccatctctctctctacgtcctatatgactcctcctctctccctctctatacattctatacgactctccatctctctctacgttctatacgactctccctctctccctctctatacgttctatacgactctccatctctctctctctacgtgctatacgactctccttctctatacgtaactcgataatat

SEQ ID NO: 53710 - DNA, 386 bp, Zea mays
  unsure (1)..(386): unsure at all n locations
ctaagcttgactttgcctaacatggcctgatcggtgaatggtgcgctgtttcagcacgtctaatgacgcgcccactgtcaatccaccttcagtcacgtcaattgtcatatctgtccccgcggctgactgacccacggtccccacgcttggcggtttcgtcgggccacgtgcggngcgcctcgttgccgatgcactggtttaaaataaccttttgtcttctgcagcggccccaaggaggcatgctatcgcgtgcagcagttcgcatcctgctctttctacacccgaaatctggcaaacgaactgtatgacttgtggacctgnggacccgggcccccgtgttagacactgngctgcctgngtcctaagtgctcgtcgaacgggatttc

SEQ ID NO: 53711 - DNA, 383 bp, Zea mays
  unsure (1)..(383): unsure at all n locations
agcttncacacgcttgccccagtgatcggctaagcatgtntgaatagctctctgataagtcgctccagcgtttttgaggccgaacggcattgaggtatatcagaaagcaccaaatggagtgatgaacgccgttttttcctcgtcttctttcgccaggctaatctggtgatatccagagtagcaatccaagaaggacagcacagaacatccagcggtggaatctaccacctgatctatcctagggagcccaaagggatcctttggacagtgtttgttgagatccgtatagtcgatgcacatgcgccaatccaccttattctttttgagtacaagaacagggttcgccagtcactcgggatgtaacacttctctaataaacccag

SEQ ID NO: 53712 - DNA, 473 bp, Zea mays
  unsure (1)..(473): unsure at all n locations
gcttatgaacactcttcattccaacatgggctagtcggcggtgctctagtcaacccatgttagtcttagaaattaagcaagtgtcgagttcagctctatcaaaatctaccaagtatagctgaccctctaacactcccttaaatgctattgaatcatcacttcttctaaagacagtgacacctacatcagtgaatagacaattgtagcccatttgacataattgtgaaatgtaaagcaaattgtaatctaatgaatcaacaagaaaaacattggaaatggaatggtcacgagatatatcaattttacccaaacctttgaccaaaccttggtttccatccccgaatgtgatagctcgttggggatcttggttttctcgttgaggagaacatctcttctccacgtcatgtggttgtgcacncgtatcgatgatcaacttgaccctccgatgataacctacaaacaagttagtcttg

SEQ ID NO: 53713 - DNA, 372 bp, Zea mays
agcttgtaacctctactacgagcaccctggtgcaagataatataagcctcatccccctctcgtgtttcatcttgcatcaacccatctgggcagggacacgcagcatcaaattcactagtcggttgagggtcctacctggcacgccagtagaaactttgtcggaaagcgtttcctacgagggctcgaggtgctgcatggtgactgcaagccctcgagtgtatttcttgtaacagctcttgtccttgggcaacggttatgcatcgttggagaatgcctgaggggctgtggtggtacaactctttttcatcacccagtaaaacgaacgacttggcgcgccgagccagtcgccgagcttcggccttgtcgaggggc

SEQ ID NO: 53714 - DNA, 390 bp, Zea mays
gacctataaaactaagcttggaagattcttattccacatgtgctagtcggtgatgccagagccagcccatgttagtcttagcaattaagcaagtgtcgagttcagctctatcaaaatctactaagtatagctgaccctctaacactcccttaaatgctactgaatcatcacttcttctaaagacagtaacacctatatctgtaaaaagacagttgtaacccattttacataattgagaaacggaaagcaaattgtaatctaaagaatctacaagaaaaacatttgaaatagagtggtcaggtgatatagcaattttactcaatcctttgaccaaaccttgatttccatccccgaatgtgatcgctctttgggaatctctggttttctcat

SEQ ID NO: 53715 - DNA, 421 bp, Zea mays
agcttctaaagggagaacacttgatacgtatgtctaacgtgcaatttttaaaatatagaccttgggcagctcgtcgagcaagtaaacaagtgggaggagcacatcacagcaagaatgtgatgaccacttcaagacccctgtagctgctgcatatggacctcttcggacccgtcgcctatctgagcatatgaggaagtatgggctagttatcgttgatgacttttcccgcttcacttgggtgttctttttgcaggataagtctgaaacccaagggaccctcaagcgctttctcacgagagctcataatgagtctgagctcatagcgaagaagataatgagcgacaacgggtcccagttcaaaactctttagtggatattttcttgaggatgaagggataatcactatttttctgttcctata

SEQ ID NO: 53716 - DNA, 380 bp, Zea mays
  unsure (1)..(380): unsure at all n locations
tctanagggagaacacgtgataggtctaaccaatgtttatttcatattttatagaccttgcgtagctgggcaagcaggtaaacaagtgggaggagtacatcacagcaagaatgtgatgaccacgtcaagacctctggagctgctgcatatggacctcttcggacccatcgcctatctgagcataggaggaagtaagtatggtctagtcattgttgatgacttttcccgcttcacctgggtgttctttctgcacgataagtctgaaacccaagggaccctcaagcgctttctaacgagagctcacaatgagtttgagctcanagtgaagaagataatgagcgacaacgggtccgaattcaagactcttcaagtggaggagt

SEQ ID NO: 53717 - DNA, 355 bp, Zea mays
  unsure (1)..(355): unsure at all n locations
gcttatcaaatttcaaagactcatctttacttaaaagaatactagtagtggatctttaggcccaaattttatttaacaaggtaagttctttactgattctagatttatctgatctagatctgtcttttaacaaagaatcaagttcacttattatctacgatgaatgtcggcgtttcgaccctgggggtccctgtaccgacgagtaaactgtcgctgcgtgtcccaacccagatgggtcgcgcgagatggaacacaaaggggaaaaaggggaaccacggctcgtattatcctgcgcccagggcggatgcgcttgcagtangggtgtacaagcgttcgcgtgagagggagagagcct

SEQ ID NO: 53718 - DNA, 402 bp, Zea mays
  unsure (1)..(402): unsure at all n locations
ggacgacgtanggtgttgtcagtctcccgctgacgtctagttacctcatggacatccgcagcaatgtttcggcacatggagaagaatgccgcanacccgtgggccaagcgggcacccatcccacgaccacgacctcgaccacgaccacgaccacgtggtgtgggagatccgcggccaggagaagggcgtgaggcaccggcagcagcagcagcagcaggaccagcagacggacccgcagatgcatgagcacgagaactggatggngctttcctgaggcgccctgctggattgttgggatcaatccacaaaggggtatatgactgatgtctagtacctttgtcaaatntatactgggtcacaacctccatcatcttcatgataaaccgagcatgaagacacccc

SEQ ID NO: 53719 - DNA, 399 bp, Zea mays
  unsure (1)..(399): unsure at all n locations
agcttatcaaagaataattatacagaactggagaatgtattatatgctgcgttgatggtctccaggaagcttcagcattattttcaagcatatcatataattgttccttcatcacaacctctgaaggacataatgaggaatatagaagctactggaaggatcggaaaatgggctgccgagctcaatgaattcactattgattatgtacatagatcctcaattcagtcccagtcgttagcggatttcattgctgattggacgccaggggctcatggagaagaagtaacaaaagacgctgaagcctggacagtcttctgtgataattcttggggaacactctgcgcaggagcggctgctgttctattancgccctctaaagtcagaacatgctacgcaaca

SEQ ID NO: 53720 - DNA, 340 bp, Zea mays
  unsure (1)..(340): unsure at all n locations
ttggtagcaaaacagtgcaatagtcttgaatgctggggtaacttcacacctacccgtctgtttatatagtactgcaggtaagaaggtgaatcgtcacgatttttacaccaggcaaacagctgctcacacccgctgcgcggtgggccgcagagaccaaatagtaaacctgcagggtgggaccgctacgcgctcagaaactgtatcgtttctcgacaacgagctcagggaaggtgtttttcggaccttcggcttcctgaagcctaagagactntnttcacggatcaagctcgttacgaanaacgatctatcaccgcgaaggggctactggtgggatcatgct

SEQ ID NO: 53721 - DNA, 260 bp, Zea mays
ccgaccgaggccacatattaccatgggcgcatgccctaaactagcgtacttgaagttggtgccacacagacaaaactgtaaatagtcagagcaccaaaccttccgaaaacaagtctgggctcccaacgtacccggtccggtgcgccaccagaccgattcggtgagtccaagaccaacccaagttaagctcttttaatcctaacattttcactgtgaagtggccttttcttgtagcttccattcaacttagacatacatga

SEQ ID NO: 53722 - DNA, 395 bp, Zea mays
  unsure (1)..(395): unsure at all n locations
tctacgtatatatntcgtattaattacaagatctatctctaatgatctatggntctagagctatcttggtcttgcagtcggggttgccataagactggtgtccacgctgaggtgagcggtacgggtgctgagtcccgacgggagcggtggaaccaccatccaggtgacgatgttccgcgcgctcagcccgaagcagggcgatctcagcacgagtcctactcagctcatctaatgcatggtccagctccgtgttagcacggcggctaggttgactgtgctgctcaacctaggattgccctcaccgacaggtgagacaatcacgcgtnctgtgctgccagatggacggcgggggtaatacttcaggtcaagaccatcagcttgcccaccgaaaaccg

SEQ ID NO: 53723 - DNA, 168 bp, Zea mays
actcttatccacatggccagcaatgacttgaaaatagtccttaaggaaggccttcttattgccattggcctttatttccgaaaccccaaaaaaagtgcttcgtacttagcatattatttgtgcaacttaaatcagtttgactacaaacatgttttgacttttgaagtg

SEQ ID NO: 53724 - DNA, 418 bp, Zea mays
  unsure (1)..(418): unsure at all n locations
cttttcaccatattatcacgggtatcttgagaaggttgagcattacactttcccttcaaaagcgttaaagctcctttcttaagccttccaacttcttccttgagctctttatttcttgtgtgatagaaatatcactaattcctgaaatttctagctcaatggaagattggctttcttgaaagcaacattgtagcacatgataatatagtttctacttgagtacatgtgcatatgtgaggttggtatgatttgaaattagttaacacaacctcgtgagccatttctaacatgatatgtgaatccataaatttattatgagagcacacaagcctatcatgttnttcttgcaagctagatttcaatatttacccttaatcgngtcttaacatacattttatgtctaatgagcaatatatga

SEQ ID NO: 53725 - DNA, 378 bp, Zea mays
  unsure (1)..(378): unsure at all n locations
tcacctgcagcatgcaaacttggtcattttattgctaaccggcccttcttttatttttatcaggancaagggaacaagagggagaaaaagaaaactcttagaaggccaaggcgaggcttatcttggcaaggagtgggattcgaactgcacttcgtccgactccgacaatgaaggactcgccggcaccggctttaacaagtcattcctctttcccaacgaagcgtacacttgcctcatggcaagggaaaagaaagtagcactcataatactagtacttatgcttcttcaagtgaggatgagtctagtgatgatgatgagatagattactcatgcttattcaagggattagatagaaccaaggtagacaaaattaatgaa

SEQ ID NO: 53726 - DNA, 348 bp, Zea mays
cagcttttaaggctttcagaccaagcccaacttatctcatgatctggttcaatgcccacaagatcatgaggagtatctccggcctacgtccgaaggtcttgcgtctgaaaacacaagcgcctacagtgcccaatgaaattatcattgaggccatgaacaacgggcttcgtccaggacctactgcccagtattttggtagaaagccttcacagactttggaaaagctgctttaaaatatggatgaatacatccgcgctgacaatgattttcgtcagagaagggaggaagcttataggttctctgagatgaccaagggctttggagggagaattcacccaagacatgtca

SEQ ID NO: 53727 - DNA, 175 bp, Zea mays
ctgagcaaactacggcttaccaggaagctctccgagggcttggatcaaacggaggatgacggaagaggggctggccacggtggttgctctcgcggactgcggtccggagaggtcgccgggatttaatggctggctcgggcgagtccgctaggtacggaggaggtaacgggaaggc

SEQ ID NO: 53728 - DNA, 297 bp, Zea mays
actgaaacaaacaatgcagttttcaaaatctggtctgcggtggacagaacgcaacaaccaagttgtaaaattcataactcttaaaccgtcaggcctttagttatgaaattttaacacaagccagataagaaaagcatctacaactttcttataatgaccataaacagattgcaacaatgaattaggcaaacaatgcagtctctgaaatctgtacagaatttggacagattcagttactgaatttgtaaacagcataactcctaaactgtcagacctatggcttgcaaattttaacac

SEQ ID NO: 53729 - DNA, 408 bp, Zea mays
  unsure (1)..(408): unsure at all n locations
tagcaaatcacagtgcacaagagctaaaaattgagtgagcgggagtggttgttcagaaagtgtgtcaaatgagtttgcggtatgcccgatttatacgccaagagcgtcaanattcagagaccccgcttgtcagtgattgttgctattttagcaaagggaaagtcgttnttcggacctttcgcgtaaaagccttgtcaggtcgcaatctgaattcgttatataaacaaattatattgcgagggctactgttggggaccttcgcatccgaaggcctcaaaacaggatttaacgtatttctgaatacaatgtgtaacaggttcttcggactaaagtggcattgctgtagaccgaatatacgaaggtgatcagagccaatggcgagcggaaacttcgggtgacaacaaaagg

SEQ ID NO: 53730 - DNA, 369 bp, Zea mays
agctttatcttctcttgttcaaattggtttttttgacagataagcttcaaattcaattctgatactttagcttcagtctctgccagcaagccttagtcggttggagttcaaagtctttcttttcaagaatagctgattgctcttttatcttgctctctagaatttcgaatatagcttcatgtttcttatcctctagatcttgctgcatccttaaagctttgcttagaagcatgctctgcaaataaacaaccttcgttaggaatatttccattattaaaaagcaataaaagccagagaaaaggttgattaccttgaaattggaataaaataagctgccgacgatatgttgtcgtcggtagcggctgatat

SEQ ID NO: 53731 - DNA, 427 bp, Zea mays
  unsure (1)..(427): unsure at all n locations
ttgcggntttgatccctagctgtagttagtaatcctggctgtagttggtaaatttgtgtttggaaattaatcagggcatgtgcttttagtgtctgtccatgtataatcagttagatcttattactttccattcctcctctaacagaatgacttgccataatgttctatgctattagttntcatacttgttaattgggtgtttatttaggattataatctatccagattatataatctaacaaattntaaactaacactcatgtttgtaaattggtagattatataatcacggattttatcgtcaccattgtactcacgttgttcgtcgccagggtcctgagctattggaggctcgtcaatttgtgttttgtggcatcgcacgggcacatacctagttagataatatatatgtctttcatcctattgc

SEQ ID NO: 53732 - DNA, 354 bp, Zea mays
  unsure (1)..(354): unsure at all n locations
caacttngggagaacacaacttttttttcttttttggcatggacggngntgtctcccccagctctcacaatagacatatctctgaaaacctttctctcatgttctcaagatgactttgtttgatggttgattttccgaagattgaatgacttggcctccagggccgatccttagaatcttccgccccactttctacatcatagctatcgctgtcaccagtatcttcagataggccctccagtatctccttaaaaacttttctgtatttgtttttgccattgactcaataaatccagcaatataaggatccacagccttcttctccttaaaaagcttctactcttcagtcagctt

SEQ ID NO: 53733 - DNA, 357 bp, Zea mays
agcttgtggaccatagcctatctattggaattgccacctcacatgtcagcagttcacaatgtatttcatgtatctcagctgcggaaagtgtccgcctacccactgaagtgctaccggaaccagatcttgagatagaaccagacttatcttatcaagagtacccagtcaaggtattggatcagaaggagagatcaacacgggcaaggacaatcagaatgtataaagttcagtggagtcaccattcagcagaagaagctacatgggagactgaggattttctacgctcccgcttccccgactttctgcccaaaggagtcggtacgtaaccccaaaaccccgcccccacctgccctttga

SEQ ID NO: 53734 - DNA, 413 bp, Zea mays
  unsure (1)..(413): unsure at all n locations
ttgggcacacanttntgaacttcagcctcggcttaatcacccactatgacagactggtccagaccttgaaagaactcaatcatgatcctattaagatatgttgagagcctgtgcgttgcagacaagtcaggatgggacaaaaagttaccttatgcagaattctcctacaacaatggttaccatgccagcttgaagatgtcgccgtttcaggcactctatggacggagttgtaggactccgctgcattgggaccagcctggagagagacaagtgtttggccccgacatcttacttgaagccgaaaagaatatcaaaatggttcgggagaatctgaagatagcacaatcaagacagcgaagctatgccgaccaaaagagaaaagaactgagtttngaagtgggagattacgtcta

SEQ ID NO: 53735 - DNA, 355 bp, Zea mays
  unsure (1)..(355): unsure at all n locations
agcttgtcaccagcatgtctttttttttttttcatgaagngatagctcctggccgaagagaagaataccgtgtctgggccacattcttactgccatgacgaaagatttggccatgacagctgcattgcctccatatgaagatatggttgcttcgtaactcatcaaaaattgcttcgggtctgaatgcccatcatacatcgaaagctgaggtggcttatacgatgggggccatgggatagcctgcagttctgctgccaagggagaagcatcgtcaaaagtaaaggtaccatgattagagtcatcataccatccatcatcatcgaacaagccttcttgatgaagctccctatgttgg

SEQ ID NO: 53736 - DNA, 378 bp, Zea mays
  unsure (1)..(378): unsure at all n locations
ttcaggtacggtggcactttctccaagtctatgaacattatccctgcctctgtagtaagaagttgagcctcagtttgcctctctctaagctcatagcccttctttgttaagtcaatatggtcaacatgttgtttctcacatagctccatttcttttattttggattctgcattntagttnttgcattgtggactttttattgttttgattgtcttttgctaaatggggacgttgatagctttcgatgatganagttatttcttacattgcnaccaagtactgctgcaatagatctttgttaaagaaaaatgccgcggaagaaggatttcaccaatccaaaatgcctttgcaaaaatatgtacaatggatgccactgat

SEQ ID NO: 53737 - DNA, 354 bp, Zea mays
  unsure (1)..(354): unsure at all n locations
agcttctaaagggagagcacatttttggacttaccaatgnncactccgagaaagacagggtttgtatcacatgtcaagcacggaacaagttggtgcccatcatccacacaagaacatcatgacaacggacaggccactggagttactccacatggatctattcggcccgatagcttatataagcatcggcggaagtaagtattttcttgtaattgtggatgattattctcgcttcacttgggtgttctttttgcaggaaaaatcacaaacccaagagaccttaaagggattcttgagacgagctcaaaatgagttcggattaaggatcaaaaagataagaagcgataatgggac

SEQ ID NO: 53738 - DNA, 322 bp, Zea mays
  unsure (1)..(322): unsure at all n locations
tttgcctacctcgattggtgcccaggtggtattcgaggatatgcagcaaagcgccatcgtcagggacgcgcacgcctacggcgtcatggtgcatgtccgcccgtttgcatgcttgatggagttcactctcaacattnttttggaacagggattataatatatcattctgagcacctgggtcttggtgccagtgaaaggaaaacagggcttgtatctatcgctgctatactgcttttcgtttgctccatattccattgaaatacctggagaggttgttttcctccatcctgttcacaactttgccctgctcgcttatgatcct

SEQ ID NO: 53739 - DNA, 365 bp, Zea mays
agcttgtgaagattcttcatcctaacatgttctagtcggcgatgccagagccagcccatgttagtcttagcgattaagcaagtgtcgagttcagctctatcaaaatctactaagtatagctgaccctttaacactcccttaaatgctattgaatcatcacttcttctaaagacagtaacacctgtatccgtaaaaagacagttgtagcccattttacataattgtgaaactaaaagcaagttgtaatctaaagaatctataagaaaaacattggaaatggaatggtcaggtgatatagcaattttacccaatcctttgaccaaaccttgatttccatccccgaatgtgatcgctctttgggggat

SEQ ID NO: 53740 - DNA, 401 bp, Zea mays
  unsure (1)..(401): unsure at all n locations
tatgggtgcagggttcatcaaagaggtattccatcctgtatggttagccaaacctgtgcttgtgaaaaagaaaggtgggaagtggaggatgtgtgtaactacactggtctaaacaaagcatgttcgaaggttccctaccctctacctcgcatcgatcaaattgtggactccactgctgggtacgaaaccctatcattcctcgacgcctactcagggtatcaccaaatcaagatgaaaagtccgactagctcgtgacttatttcatcacaccttttggcatgtactgctatactacgatgctatttggcttgaggaatgcangtgcaacataccagaggtgcatgaaccacgtgtttggagagcacaccggctgaacggtcgaggcttacgtcgatgacatc

SEQ ID NO: 53741 - DNA, 353 bp, Zea mays
agcttctaaagggagaacacgtgataggttttactaacgtacaattcgaaaaagatagaccttgtgcagcttgtcaagcaggtaaacaggtgggaagagcgcatcacagcaagaatgtgatgaccacttcaagacccctggagctgctgcatatggacctcttcggacccgtcgcctatctgagcatagggggaagtaagtatggtctagttattgttgatgacttttcccgcttcacttgggtgttctttttgcaggataagtctgaaacccaagggaccctcaagcgcttcctaaggagagctcaaaatgagtttgagctcaaggtgaagaagataaggagcgacaacggg

SEQ ID NO: 53742 - DNA, 329 bp, Zea mays
  unsure (1)..(329): unsure at all n locations
tggaggcgtctattggttgtcggcttggtgttgactcctccttcttttcttccgacgccttgaatgcaacgggttgagcttcggatggctcgcaagctcgttgattttcctcgagccttctatcatgcactcaaaacttacaaaatgcccgataacttcctcgggggtcattntagtatatctaggattaccacgaatcaattgaacttgagtgggatttagaaaaatgagagatcttaanataacatttaccacttcgtggtcatcccacttcttgctcccgaggttgcgcacttgggtcaccaaagtcttgagccgttgtacatatg

SEQ ID NO: 53743 - DNA, 348 bp, Zea mays
agcttaagcccctgttttgggccattgattttagtacctaagaaaaatggaacttggaggatgtgtgttgattgtagactattaataatattaccgttcgctatcgccatcctattccacggctagatgatatgcttgatgaattaagtggttccacaatttttactaaaattgatttgagaaggggataccatcaaataagaatgaaaactggagatgaatggaagactgcatttaaaacaaaatttgggttgtatgaatggttagtgatgccctttgggttaactaatgctcctagtacctttatgagattaatgaaccatgttttaagaactttcattggaaaat

SEQ ID NO: 53744 - DNA, 433 bp, Zea mays
  unsure (1)..(433): unsure at all n locations
ctgctttngaaataaatgtaagtttatgtaattcgcttccgcatttctttatctccgatgntctgtaatgtctgcaagacgggtgagacgttccttggtgaaggtatagggaaagaataccgagcctttgtcaaagtaactntaanggaaccanntctaacaggngtgtcttgaatgtcttgttaaaacaagggacaaactgtaaggtggggcctaaattaccttggaagttccgtcacaaatatcacttcaatgtatgcataggagtgcaaagtgtaagtactctgtcttcatacctctgagggtataaaaccacatcatctgcaaatatcacttcaatgaatgcatatgaatgcaatgcatatgtcctctgccttcgtacctctaagggtatgaagccgcatcgtaccccttctcgggcaacgtacgatgc

SEQ ID NO: 53745 - DNA, 363 bp, Zea mays
  unsure (1)..(363): unsure at all n locations
agcttgtccgttttgctgaggatgaagncgttgtttttaagagcttttccagggcagggcttcggttccctctacatgagatgataggagaagataagaaatttgggatatatcttcatcaggtgacatctaatgcaatcgttagacttagtgtctacatatgggctctccgaagccagggtatgagtgctaatgctgaagctttctgccgggtgcatgagctgcactaccaaacgaaggccagagcggatggtcttcataagaactttggctgctaaactttgcatatcggaaagatacgaaggccccggtaattggctatcgcaccaagtggctgaccggttggacaagcaaatggtttta

SEQ ID NO: 53746 - DNA, 326 bp, Zea mays
  unsure (1)..(326): unsure at all n locations
tcacgcggaattcaccaaattcagccactgtaggtgtcgttgtttcagtgctgtcagatttcacagacggcaaaaaaatttgcaagtcttttcagcgcactgatgcaggcgtccaaaaccagactcagcctcacctatcaaatacttagaatcaatgatgttccaagagttcccacaagcaatgataaacccgtgtaataatgtcaacatgaaatagaaataacaaccttgcagatactcaaaanattcactcttgatcttatcatccagatagtagccataagcatatgtccatttcaacactcgcctgcattctataatctgat

SEQ ID NO: 53747 - DNA, 365 bp, Zea mays
  unsure (1)..(365): unsure at all n locations
agcttgcatacacataagtgcttcnaacatttatggtgctatgcctactgcgaagtggactaataatcctccctccagtactaaagacagactctgatgccctgttgacacaggaatagcaagaacatcacgtgcaatctttcgcaaagttggatacttgagcccagcatgctgccaccactgaattatatccaactcttgtgtcctaggcaacaatggttcttctaagtacaaatccaactctgtccggacgtatgtggatgtcacttgtggttgctttgacatataatcatcgaaagtatcaatccaatcttcatctattgtcatagtagaagcactagttgtcctagtttgagcaccatctg

SEQ ID NO: 53748 - DNA, 429 bp, Zea mays
  unsure (1)..(429): unsure at all n locations
gtggaattgagagattgatcacttttgtgtgtctataattgaattctagagctcttgtaaggtgtagaagtgtgaaaacttgatgacttgaatgttgggtggtnnnnnnnnccccnnccaactcttatattttttttctcactaatctttctctcctcttcatatatacctttctctttccttcacatcacatatcccttctcttccctatactctccatacttcctccttcccctatattcctatgatctttatctttcttctctttcatccctctcttcactctctcctcctcctctctctcttcctttcatatcttacatcccttccttcttccctttcactcccctttttcttcaaaacttcttctctaaaatctttccatcttatacttcctttaaccttccttctcttccccttcttcctcct

SEQ ID NO: 53749 - DNA, 357 bp, Zea mays
agcttgtggttatctaaagcttaaagaatattttttctgttacttaaatttttcgggaaaggttggacaggtagtatagaataacacgggagtgttatccagtgcaaaactccgcatatgcaccctttcattccttgctacttcagcccgaaagagagagagagagagagagaaccgcttcaagctacctggggtctaccactggacttcttcatactccttttttttttccatgataagaactagaatatatgcttcgaataactggacacggttaccaacgctctcattaagcttatatattgctgtgcgcaggtctatcgcaatcatttggatcaggtatatatagacagcgct

SEQ ID NO: 53750 - DNA, 214 bp, Zea mays
  unsure (1)..(214): unsure at all n locations
tgttataatcaagatgactattaaataaggtatntttcgacatctattacttttttgtagctataatttgctttaaactttgtcgtaattntttattcatcgttgcattaccacacttaaattttctgacgtcctccgctgatcttaaggggtatctttaaagaatagtgcaaaaacgtcaaagatgtatcttggtgaaggaaatctctaacac

SEQ ID NO: 53751 - DNA, 313 bp, Zea mays
ggaccaggggcataccaacttcaattacccgaaaccttgtctgcatgccaatgtgttccacgtatcccaattgaagaagtgtcttcgggttctagatcgaaccgttgaagtgacggatgttgccttaaaaccagacttgacatatttagaacatcctattcgagtgttggatcaaaaggatagggttacccgaaagaaaactcttaaattctataagatacaatggaaccaacacacagaagatgaagctacatgggaaacttaagactttctagaaaagaatttcctaggctttttagcttcatgtaaattg

SEQ ID NO: 53752 - DNA, 351 bp, Zea mays
agcttcgaagcaacaatttgaaactgaagcttggcctttttatcccaccaagggaaaacctttggaaaccgaagaaagaaaattgtagagcaccgaaaaaataaaaatgtcaaagccaattttggttgaaaaaattgacactgctgcccccgaaacacctttcaaaatatacgattatattgggccacacgcttcggggaaaaaattatccgaagaagagatttttgaaactaatcactatgccagaaaattgaaatatccgaagggggcactagtgttcaatgggacagacgaagatgacttcctgtactgcctctcggacaacaaagaattatccgtctgccgggagat

SEQ ID NO: 53753 - DNA, 432 bp, Zea mays
  unsure (1)..(432): unsure at all n locations
tatgaagattcttcatcccaacatgggctagtcggcggtgccagagccaacccatgttagtcttagcaattaagcaccgtgtcgagttcagctctatcgcaatcaacaatatagctgaccctctaacacacccttaaatgctattgaatcatcacttcttctaaagacagtgacacctatatcagtgaaaagacagttgtaacccattttgcataattgagatacagaaagcaaattgtaatctaaagagtctataagaaaaacattggaaatagaatggtcaggggatatagcaattttacccaatcctttgaccaaaccttgatttccatccccgaatgtgatagctcgttggggatccttggttttctcataggaggagaacattntcttctcccctgtcatgtggtttgtgcacccgctgtcgatgat

SEQ ID NO: 53754 - DNA, 348 bp, Zea mays
aacctatcttgggcggccgtctttatttttgtttattgaaacaaccgcatcactgcccgcctggaatggcccgggggcaacatcaattggccggagggtgccaccttataatatgccgtcggggcggaagacccaatatttcaaaataccccttaaaaacagcatttaaaagttggcgtctggagtggcttataatgggtaattatggaaattctttccctttccgctccggaagacaggcagacgttcgtactccgagttggactgaatctcccaccgaccaagaagtagccgaaacgggtgtgtcgcttactgaagttggattactgaaagaaagaggtctgactg

SEQ ID NO: 53755 - DNA, 357 bp, Zea mays
  unsure (1)..(357): unsure at all n locations
gctttttggagttaattcaaatcttatcaactcaagctatcaatcttcaaatgatctacatatcaagattgacccaaggttactntcaattattgtattcaaaactcatatcatctcgggaagatattaatgttggaggaaataaagaatcatcatgtgcggaatatcaaagcctacaacatggaggagaatcanaggatggtaacatttatattcttaagtgcaattatcttaaattgtcgtgtgtcttgtgtagtcacatagaaataganagcacttgcatgttnttaaaatatgtcatcattctttgaagaaattcctctcatatggtagaatgtgtatttaacaattctatat

SEQ ID NO: 53756 - DNA, 355 bp, Zea mays
  unsure (1)..(355): unsure at all n locations
agcttgcacccaggnacannggttcattctttgtgattgagcaatgnggaccagtggcataccgacttcaactacccgaaacattgctgctgtgcataatgtgttccacgtgtcacaattgacgaagtgtcttcgggttcccgatcgaaccattgaagtaacagatgttgtccttgaaccggacttgacatactctgagcaccctattcgagtcttggatcaaaaggacagggttacccggagaaaaactctcaagttttataagatacagtggaaccagcattctgaagatgaggctacatgggaaactcaagattttctagaaaagaatttcccaggctttttagcctcatgt

SEQ ID NO: 53757 - DNA, 423 bp, Zea mays
  unsure (1)..(423): unsure at all n locations
tcatactcggctgcgttgttagaggccgggaatagcaattggagagcgtacttgaggtgttcgccccccggtgcagtgaagagaattcctgctcctgtccctgcagcttcagcgagccatcaaaatacattcgccatacttctgcgggttctggattatccggcacttgctgttctgtccattctgatacgaagtcgaccaatgcttgagttttgatggcagtgcgaggtcggaactcgatatcatgggaccccaactcgcaagcccacttggctattcggccaatggcttccttgttgtgaagaatgtcccctattggaaaaccagtaactactatgactntgtggtcgtcaaagtagtgacgcaatttgcgggcagttagaagtactgcatataatagcttctgaacttgaagatactttt

SEQ ID NO: 53758 - DNA, 354 bp, Zea mays
agcttcgtctcaacaggcactattttctttttctcggccccagcctcaattattgcaactttaccttttatttgcctagaatcagcttcagtctgggctttggcagttttgacaaccttctctatggaagagcggcgtttggaatctgttgtttctacggaagcttcagtttcggttggctttgtctcagcttcggcttgcatttttgaagcctcgggaatcttccctgaaggagtagagcttaaagcctttattgtctctagcacgtccagtacatttaccatcctttttcttttcggggttgccgcaagacttttttgtgtcttcggtactgttatttccgccgaaggactt

SEQ ID NO: 53759 - DNA, 355 bp, Zea mays
agcttccaatctcttcaagcttcttatttatttattttgaccattagggattagtgacttgagaaagtgtgatttgggtctcatttgttgctcttgttgcttggcttttaattttgctttcttcatcttcttctaaactctctagtgacttgtaaaggtagcaagagacacctaagtgtgtagtgatccttacgaggtcttaatgatcattgagattaagaagaagcactcatccggtctaagtgatcgtttgagagagagaaatgattgaaaaagacccggccttcatggcctcctcaatggagagtaagttcattaccaccgaacctcgggaaacaaatcgctgtgtcatttg

SEQ ID NO: 53760 - DNA, 409 bp, Zea mays
tgaatgcacactgaacactcaacatattctttgactatctagctacaactccgattaaatggtttgtccgactacaactctgattaagcaagataattattatcttcctacttatttttggctaaaataatagtatagcctgtcaattcgaaatgcaacaaccatacagggaccaaaaatacagctttatgaagtaatttcataattgacaggctatgaagaaatttcagttatataaataaataactatctatgctcctcttctttctgtggaggctacagatctgcgcaagatagtggcttccctggaagagaagatcaatgctgagataactctctatgcagcacaaaggccacgcaatgcagattcatccgagttaacgcacgatgacgaagctccccacgacag

SEQ ID NO: 53761 - DNA, 356 bp, Zea mays
cccggatcttaagcactgagctgcactacacaggttatgctatgttttgcagaaaaagtcattttcacagaagatgtctgatcaaattaatttgagtatagtcttccttgatctttactagtctattttgtaactccctattagcttcatttaatttgccatatttttccttagcatcttttagggagtttgtgagctcatttacagttgatgacatagttttattttcttcctttatttcatcactagcctttataactatgtcatacttggcatttaaagattcattttcatttttcaacctatcacatttagcttttgactttctaatgatttgagtatattctttaagcaag

SEQ ID NO: 53762 - DNA, 357 bp, Zea mays
  unsure (1)..(357): unsure at all n locations
atgaaatcgttgtttttaaaaagcttttcaaggcggggctttggttcctctacatgaaatgataggaaaaggtttaaagaattttgagatatacgtccattaattgacacccaatgcaatcgttagacttagtgtctacatatggcctcttcgaagcctgggtatgagtcctaatgctgaagctttctaccangtgcacgagctgcactaccaaacgaaggccagagcggatggtcttcataagaactttggctgctacaacttcgcatatcggaaagatacgaaggtcccggtaattggctatcataccaagtggccgaccggttggacaagcaaatggttttacataaaagcgga

SEQ ID NO: 53763 - DNA, 343 bp, Zea mays
acttgaagaaaaataagattttatttttctggctgccctaccactacaaattcaagaaacatttcaaagtaccctgccaagaatggctggatacaatcgaagtaatgtgcaacgaaattcttggaaattattctaaaaaagaagatcaattgatgacaacggccttcggcacccgtccgaaacgaaggctaaaccgagtgatggatgctataggctttgaatatccttactacgagctactggacaagggtgtcgaagggcaaaaaaggaaaagagtggctagtgatctaaataaggacgacgaagatcaatcaaagaagaaaaaacaagagtctgaggcaaa

SEQ ID NO: 53764 - DNA, 140 bp, Zea mays
  unsure (1)..(140): unsure at all n locations
tgacattgtcccncttttgaaagccaatgccttccttaatgccaggggcgtctcccactatagagcatgcttctagcnatttaaattttcattttctaagcatgctcataattttagcactaggtgagcttgggatcatt

SEQ ID NO: 53765 - DNA, 365 bp, Zea mays
agcttaattggcggaaaattctttactgacatctgggaaaatggcggcccgaggatggcgcacgaaatgataaaaaagagcgaaaatgattctatgattaaaagaagcgacgaaggcagctgaaaaagcggcggaacttgagaggcggataggtattgcttaataactttttaactttatttactaattttgcaacttcggacttatttacgttttatatcgcagctgaactatctcctcctccagagcccttcgagtcgatggccaacccagaagtagagaaagaagatgaagtcactaaagtggccgaagttattttggacgaagctgttaatcgactgctgaacgaagctacggaagcagtt

SEQ ID NO: 53766 - DNA, 425 bp, Zea mays
  unsure (1)..(425): unsure at all n locations
tcaatacaacgagctactatccctcctcattgagtagtgggtgagataagctagactaactctaattgtcgttgggcttgacctagattgaattaactattttggctaggttggtaggtctcgaagtggtttcttgtggcatactccccttttacttgaacctttaatcgaatgttgctctaccatgacttttatagtccaaaggagtggaagttntatatgtatatagtacttgtaaattctacctattattatcgagtcanagcacgtcctgttttgagcttatgatcatgtgacctgcaacatgtatgttttgacgaaaccattcatatgaaagagtgtagttagggatgagctgccacagtgaggacaacaattactatatattttattatatattagactatactccacaaatcgtatat

SEQ ID NO: 53767 - DNA, 303 bp, Zea mays
  unsure (1)..(303): unsure at all n locations
ttcaaactttaaacttcncaactttttcttttttatactgccgaaatcaaaacgtgaaaataaggaaaggtgcacatttccaggagaacggaaagtaaccaatattagtttcttaccggcttaaaataactttgagcttcatcaccccccatttttcccccgccccccaaccacaactggggcatgaatctatattcaatgcctcgggctaagcttgggatatttatcaaaactgatgctgaccaacttaaattttgtcctgttacaatatttccatgcgtgcaccccgcctttaaaaaaaaa

SEQ ID NO: 53768 - DNA, 396 bp, Zea mays
  unsure (1)..(396): unsure at all n locations
agttatgctcaagattaattgttccaaactttcagcacattaaccatcctttatctttttggagttgccactgcccctttgccttagtcgcctcaacttttgatgatggactcaaaatttctaatgtttttcctttttcagtttctggtccttccgctatctctattgctggggctttggccattgctttggattttggcggttgaattggttctcttgcttcggggccgaggaggcctcgccacaaactcgggcactatggccgctcaatgcaccgtggagggtgtgtgtacacttttacctttntcctcttcggcgcttgctccccaggagcagccgaagtagtgtcctttgcagaagaaatattttttctcttttgacctcgtattggataat

SEQ ID NO: 53769 - DNA, 292 bp, Zea mays
gggagtccttgcaatctttgatcaacccttttgaaatgactctctttatgcctcaacatgtgggtttgacttaaaaataaagatttgagtttgatttgcaaaaaacaaccaagtggtggcaaaagatgatccatatatgccaaaattgaatcaaaaccaatttgagttttcatttgaagtgaatttgcacttgttctaattgctttatgttgtggtggcataaatcaccaaaaagggggagattgaaaaggaaatgtgcccttgggccatttctaagtattttggtgattga

SEQ ID NO: 53770 - DNA, 393 bp, Zea mays
  unsure (1)..(393): unsure at all n locations
tctaaagggagaacacgtgataggtctaaccaatgttcaattcgaaaaagattgaccttgtgcagcttgtcaagcagggaaacaggtggaggagcgcatcacagcagaatgtgatgaccacttcaagacccctggagctgctgcatatggacctcttcggacccgtcgcctatctaagcatagggggaagtaagtatgggttagttattgttgatgatctttcccgcttcacttgggtgttctttttgcaggataagtctgaaacccaagggaccctcaaacgctttctcaggagagctcaaaatgagtttgagctcaaagtgaaaaagatatgaagcngacacgggtccgagttaagaaccttcaagtggaggagttccttgaagaggaagg

SEQ ID NO: 53771 - DNA, 373 bp, Zea mays
  unsure (1)..(373): unsure at all n locations
agcttgtgaaggttcttcatccccacatgttctaaacggtgatgccacagccagcccatgctagtcttagcaattaaacatgcatctagaccggctcctcttttgcaaaatcaactaaataaagtttgtcgtctaatacacctttaaaagctaatgaaccatcacttcttttaaagacagacacatttacatttgggaataaacagttatatcccatattacaaagttgactcacagacaacaagttatatccaagcgactcaactaaaaacacattagaaatagagtgctcggatgaaatagcaatttttcctaaccctttcaccttgccttggttcccatcaccgaatatgattgaatcnttgggatcctt

SEQ ID NO: 53772 - DNA, 333 bp, Zea mays
tcggcagaaggaagaagtagtcttttatgttttgctatgttaaagcttcggcagaaagttgatagtactttttatgttttgctatatgaagaaaagctttggcaaaaagagaaggcggccgtttaggcttcgttgggtacgaaaagaagggaaggtgttttttcgccttccgctcaaaatactggatttcgccacatcaaagcgactcaatcgaagggtaaaatatattaccaggtatgtacaaaagttcttgagaacagttctacttcggctcaaaaaacttgttacaaaagtatcctgagtttttcctatagacaattttactgatcctca

SEQ ID NO: 53773 - DNA, 359 bp, Zea mays
agcttgtacgttccgggcttcttgacctttttgatgacgaacggcccttcccagggaggtgtgagtttgtgccgcccttgggcatcttgtcgcagtcgaagcaccaggtcgcccacctggaggtctcgggaccgaacccctcgggcgtggtagcgtcgcagggactgctggtacccgcgccgagtgtagtaaggccacgtccggagcctacttcagctggtccagtgaatcttctcggttggctcggttgcttcggtcggtgtaggccctcgccctcggggaaccgtattctaggtctgtgggcaagatggcctcggccccatagactataaagaacggtgtgaagcccgtggcttggg

SEQ ID NO: 53774 - DNA, 413 bp, Zea mays
  unsure (1)..(413): unsure at all n locations
taaagccatggtaagtagcataagcaagttaaatgcgaattgactcaagcctagctacgggtgcataggtttctccgaaatccaaaccttcgacttgtgagatcccttggccacaagtcgggctntgttccttgtcaccacaccatgctcatcttgcttgttgcgggaaaacccacttggttcctacaacattttggttcggacgtggaactaaattccatacctcatttctagtgaaattgttgagctcctcttgcatcgccaccacccgatccgaatcttgaagtgcttcctctatcctgtgtggctcaatagaggaaacaaaagagtaatgttcacaaaaatgagcaacacgagatcgagtagttacccccttgtgaatatcgccgaggatggtgttcacagggtgatct

SEQ ID NO: 53775 - DNA, 353 bp, Zea mays
agcttgtctgtgaatcaaccatggcggcttttgcgggcacggatgtaatggctagagaggggcgctcgggtttgagggggagaaaatgaggggaagatagagctatatactgggggaagtgcttcggccaacgaccgggtcacgagcgccggtagtcccgccccggaccgcgccattcacggcgaggtagttgactgacggctcaaggttacacgcgatgtccgctcggttcgttgggggagaagaagccctggcagaggggtaaggcggcggcacgactcgacttaaaccattagcgagttgaccgcccgcacatggcgctcgggtcgttgcaacgatctccgttcttcgcg

SEQ ID NO: 53776 - DNA, 388 bp, Zea mays
tgccaagccctcggaccaggccagacttcaccggaagcccgagatcgacctcaccggacttcggtctttcgccgccgcgcatggacagagctaaccggtgagtgctccgccccaattccttgcacccatatctatctctgacatgcccgttgaacctctctgacccatccaattgaactatctcgccgtgagcatgccggactcctcgccggcgccgagcatccccgcctgtgcacgtggaccagccaactccggccatccccgacggcgacccgcacaccgttgtgatccccgagacctcccctacgtcctcgacctcttcaccggagcaatctcgccgccggtaagcccctccgccctttcttccgccgcgattactggttaagtt

SEQ ID NO: 53777 - DNA, 354 bp, Zea mays
agcttatcaacagcatcatctatttcactttttgaaataccaacctataaatgtgaagttaatgtcactgccattaggaaatgatcacaaaactatattgtaactgctagtgaggtagtgatgcattgaatgccaagaatttaaatcaagatagctgaataatgacaaagtggtgcattgctagagcgtgaaagcatttgcccaaatcaattctggcttcctgtcatcccagacaagagctacaccataaacttttttgtataagtaccatattactacatataggtcaagaacaagcaggctaacatgtgtccccggtcatggaatcaatcgtctctggcattgctgtccatc

SEQ ID NO: 53778 - DNA, 414 bp, Zea mays
  unsure (1)..(414): unsure at all n locations
ttgatgtgcactcaaagttggtttcgtcatgctcttaattgtaaagaaatgtgccttgctaatattctaagtgaatcaattttctatatactaatatgattttggtttacaatataggtgaagataatgtggatgttaatagcttttggtcatgtcttgaagacattgaagaggaaatgaaggaggatccttgtatcgcctcggatgattagtttaaacttaaatttgtggttgttatcctataacttgtttgacatttattattgctatgaactgatgtcttggaagctgtaaactatatatgtatggaactggagctgttgtatgnttgttgtatgggactatttggaaatngcttgtgtttgaaattattacttgtttgtatggcggccacgcgggtttgttcgcgggtct

SEQ ID NO: 53779 - DNA, 353 bp, Zea mays
agcttattggttctcttaaagtttaggagattgcgaaagcaaaagacactcgtggaaaatgagttgagacttctagtgccaatatggacaaaagaaaaactccaatgcgtcacataataataaaaagaagaacaggcaacaaaatgccacgaaacctaagcaggcaacctcgttcaaaaagaagaacaaaggagctggttgctttgtttgcaggagtactgaacactgggcaagcgcttgtccagaccgcaaatttaagcaagagaaaaccagctcaagagaagaaatcagtaaacatggttgttagcgataccgcataagggacatcggggtatggtaatcttttatctact

SEQ ID NO: 53780 - DNA, 265 bp, Zea mays
ttgcgagagagggaacggatcccaggtctcttgagaggtctagtgttgtgagaaggtttgccctgaagtgttattttggtgatgttgtgtgagccgtctgggtgagcctttcaaagcttgccttggaaggccctgggcatctccttttataggtacaaggaggtgacccagctgtacatatgagggtgtaactatgcgctaatgtggatggcggagaagtgcttgagccctgtaaaacgtggccggggcacagccccagtcctga

SEQ ID NO: 53781 - DNA, 341 bp, Zea mays
agcttgagccgaggcattgcctcaccggagtatgcggtttcaccctcgccgaacttcggtcttccgccgccgcgcgtggaccgagctaccagtaagtctttttccaattccttgcacccacatcttccctagcatcccgtgaagctctctgacccgttcaattgacctatcgcgccgtgagtaggccggattcctcgccgccgacgagcatctccgcctacgcacgtggaccggccgactccgaccatccccgacggcgacccgcacatcgctgtgatcctcgagacctcccctacgtcctcgaccacctcaccggagcaacctcgccgccggtaagcccc

SEQ ID NO: 53782 - DNA, 252 bp, Zea mays
tgaagctgaagttgtcaagagttctaacttgcacaagtcattgaaggaacttcaagataaatgtccgaattttggcaaccggtgcgtgcaatgactgaagcaagtcttcaactcagttggagccagttctgaaaaatttaaaccttcagctgaagacctgtcaggcaccctcgatcatattgaaggtgaagttgatgctcttgatgaagtcatagctaggcatggtgacttctgcgctatgctagcttctcg

SEQ ID NO: 53783 - DNA, 346 bp, Zea mays
agcttggacctatgcgtcctccttacatttgtaccgaaccaccatggctggcttgagggtgcgtgctctactacacagttccagaattatatatgtaactgcttctttcttgtttgtttcctggccctgatcgcttcttgctatcttggttgccctcttctgttattaaataaaatataataggctgttgggtaccagtttgattacgatgactaccacaggtactgtactgtactggactcagattcggctttcttaagtttgccatctgcatttcaggttccctaatagttctcccgcttaattcctgtgcagctttgttcatgggaggttgtcttatgacaaa

SEQ ID NO: 53784 - DNA, 394 bp, Zea mays
  unsure (1)..(394): unsure at all n locations
ttacaccttatgactaacgtctctgtgtcgtgcttaactgttagccgataacattctgacacgggaaacttcccgactagcgttctggagctgcgtgtattccacattgcccagcatggacctcctccagaagttgtttcctagtggacgggagaacgcacttcatgaggacgcctgatgcaccccttctgtataatgtctccccaatgagtgtatagtgagccgactgtctggcaatgcgctcggccgagttcttatcgtctgggtcttcttcattctttatatacttaatgattggccttctccagtcatcagagtctgactcgggttgatctatgatgntgcattcttctggttgatccattgagatactcggctgtagaatctcttgcac

SEQ ID NO: 53785 - DNA, 349 bp, Zea mays
agcttcggaattacttaccgacttaaaagtttaatgaccttttagtccataagtgtttgagtcgttgttgtaaacttttatgaggggcatgattgtaattcctcacaggctgtgtcctgtgcctataaatagtgaacagtattcctttactgttcacgcattccggtaattgcaatcgcatcactcgggaattaatctttgccaaggcagaggtataaatgtatctaatatttgaatgcattaagttaatataatatgaaagtgatgttgttcatttataatttatttgtctttgatgcttcatatttaatattaccttacataatctattagagttcaattacgaaga

SEQ ID NO: 53786 - DNA, 251 bp, Zea mays
cggtgccaatggagaagcgttaatgcttgaagtcttggctgtcaaattgcttgccgctgtcgactgttagctccgactgtactccgaagcggaaacaatgttttgccagaagaatttttgggcactctttgatgttattgtggagacagcccttgcctcaatccattaggtgaagtattcgacagcgacgatagcgaacttaaggttcccctgagccgtgggcaggagcccgatgatgtctaggccccagc

SEQ ID NO: 53787 - DNA, 362 bp, Zea mays
agcttcatgaatggtaccttcgacgtcacgttcgagcagcttcagtcgaagctgtctctttctgcaggaccttcggcgacgaagcatggtcccacggtgtcttgatttgcttggaatccttcattccaaacttgttgagtatgtcttgagtgtacttcgtttggctgatgaaggtgccctcttggagttgcttgacttgaaatcctagaaaatacttcaactcccccatcatagacatctcgaatttttgaatcattatcctactaaactcttcacaagtagatttgttagtagacccaaatatgatatcatcaacataaatttggcatacaaacaaatattttgcaatggttttggtaaag

SEQ ID NO: 53788 - DNA, 378 bp, Zea mays
  unsure (1)..(378): unsure at all n locations
ttcggccagcagcaaagttcttttcggccgccagcgccaatgggcaaaggcgccaggggcttcgggggaaggtttggagatcagccaagnaaatttactgcttattctgtgtgaaaacaagggccataccaccaggatgtgccaagttaccatccaaaagcagaaagagatagcaaaagcagcagcgcaacaaagtcagccgaagcaggtcatgcatactgcttcgtatcattcgccttatattccagaatacgtaggcaaccaccctgcagcttctgttgcttcggcaagccaaccccaagcatcttggcagcagcctccaccgccaccgccgatgcagcgaggacaacagccagaagggagtcagcacaatcacct

SEQ ID NO: 53789 - DNA, 363 bp, Zea mays
agcttaaagccatggtaagtagcatatgtaagtaatgttcgaatggactcaagcctagctacgggttcataagtttcatcaaaatccaaaccttcacttgtgaataacctttggccacaaagtcggcttttgtttttgtcaccacaccatgctcatcttgcttgttgcaaaatacccatttggtacctacaacattttgattaggatgtggaactaaatgtcatacctcattcctcgtgaagttgttgagttcctcttgcattgccagcacccaatccagatcttttagtgcatcctctaccttgtatggctcagtagaggaaacaaaagagtaatgctcacataaatgtgcaactcgaaatc

SEQ ID NO: 53790 - DNA, 368 bp, Zea mays
  unsure (1)..(368): unsure at all n locations
tctaaaggagagcacatnttaggattaacaaatgttcattttgagaaagacaggatttgtagcgcatgccaaacagggaagcaagttggagcccaccatccacataagacatcatgacgactgacaggccactggagctcctacacatggacctattcggcccgatagcttacataagcatcggcgggagtaagtactgtctagttattgtggatgattattctagcttcacttgggtattctttttgcaagaaaattctcatacccaagagaccttaagggattcttgagacgagctcaaaacgagttcggcttaaggatcaagaagattagaagcgacaacgggacggagttcaagaactctcaaa

SEQ ID NO: 53791 - DNA, 144 bp, Zea mays
gctttgccctcggccaactaatatcagaataagataacacactttgggtgtggagagatagcgagagtagcgtgtacccttcgtggcaagaggctggacggggtgtatatgtctctcggttggcgtgaacctgatctggtctta

SEQ ID NO: 53792 - DNA, 362 bp, Zea mays
gcagcttgccaagccctgggacccggccaaactttactggtagcctgagatcgacctcaccggacttcggtcttccgccgccgcgcgtggaccgactatccaatgagtctccgcccaattccttgcgctcatgtcttctctggcatcccggggaccttcctggacccatctgattgaactatctcgccgtgactaggccggtctcctcgccgctgacgagcatccccgcctgcgcgcgtggaccgaccgactccggccatctccgacggcgtcccgcacaccgttgtgatccccgagacctccccttcgtcctcgaccacttcaccggagccatctcgccgccggtaagcccctccgccctt

SEQ ID NO: 53793 - DNA, 264 bp, Zea mays
  unsure (1)..(264): unsure at all n locations
gtgacactataaaactaagcttcggaaatcccatattntttgccatctctcagcagacggatatttccttgttgtctgggagacagtatatgaagtcatcttcgtctgtgccattgtacaccaaggccccttcgggtatttcagttcccaggcataatggttggcttctgcaatttcttcttcagatagtttttttccaaagcatgtcgaataataaagtcaaaatcttcggatggtgcttccggagcaagagatttaactttt

SEQ ID NO: 53794 - DNA, 371 bp, Zea mays
  unsure (1)..(371): unsure at all n locations
ngcctgcggggccctaagaatttttctaactctcgtttatcaatattcccatttttccttctaatattgagtgttgaggggttttcttatttaattcaaaactttataaagaaatacagaaaccatgggttctattatttttatctgataattcataaattccacaatctagcacaattggtcttaacatttaatgagcaataatttttttgggcttgatcccatatcttcctccgaaacccctgccgcctctgccccttggagctggtggcctgaaagagctttgctgctgtgccgaagactgtgaggtgtgttgtgacctctaaagctggcttcctttgtcgtcattctgactggagctgtggattgat

SEQ ID NO: 53795 - DNA, 425 bp, Zea mays
  unsure (1)..(425): unsure at all n locations
tatcagcagtataagcacaaaagagaaaagggtgcttcatctgatcagccgaagcgcatgcttttatgtgaagacatagcagagcaaacagttctgttgggatcccagtttctgatgaacaggaaaaactttgttaaaattcttgtttaacaacaaagatgtttttgcttggacagccaatgatctctgtggtgtcaataaagatgttattgagcactcgctcaatgtggacccgtccttcagaccaagaaagcaaaggcttcngaagatgtccgatgataaagccgaaggtgcacaaaataaagtaaagagacttctcagtgccagggttatcagaaaagtaacatatccagagtggctggtaacattgtcatggtgaaaaaagccaatgggaaatggagaatgtgctttgatttacagatctc

SEQ ID NO: 53796 - DNA, 361 bp, Zea mays
  unsure (1)..(361): unsure at all n locations
agcttaaattgttaaaggntattttcttgtgtttaccaagaggaccttcggactaccgaaaattattcgaaacagcaaaaaagtcgtctaaggaacgcacagttagttgccgaagtcacaaaaaagtcgttccaaagggaacgcagtgtaagttttttgctccaaagtcgttcctaagggaatgcaaagcttacagcgaaaagtcaacgctgattccgccaaaagtaaaggcgaagaagcttcaaagacgttcctaagggaatgcagagcttacagcgaaaagtcaacgctgattccgctgaagtaaaaggcgaagaagctcctaagggaggcttataatgaaaaattttgtatgttttgg

SEQ ID NO: 53797 - DNA, 441 bp, Zea mays
  unsure (1)..(441): unsure at all n locations
aggaccttnaaactcagcttctaagggagaaccgtgatggttttctaacatgcttttcgaaaaagatagaccttgtgcagcttgtcaagcaggtaaacaagtgggaggagcacatcacagcaagaatgtgatgaccacttcaagacccctggagctgctgcatatggacctcttcggacccgtcgcctatttgagtataggagggagtaagtatggtctagttattgttgatgacttttcccgcttcacttgggtgttctttttgcaggataagtctgaaacccaagggaccctcaagcgcttcctcangagagctcaaaatgagtttgagcttaatgtgaagaagataaggagcgacaacgggtccgagttaagaaccttcaagtggaggagttccttgaggaggaagggatcaagcacgagttctccgctccctataca

SEQ ID NO: 53798 - DNA, 355 bp, Zea mays
agcttctccatgacccacaaatttgagattctttttgcatcattcatcttgcccggtgaaaacagatcatttggagaagaaaagaaaaaaatgtcatctgtgcacttcatcgtgtgcatgatttgaatatgaactactcacagagtcaagaggcttagaccaaagagactttttcttcaaattgtgtacatgcttcctctggctcttcagctcttgtctgatgatctgaacagtgtcccctgttcattcatgggagtcggttattaagtgtgatgaggatcagggaactggactggcagaaaaaatagcatctgaagcgacaagggtgatacatggatgaccatcgacatacccc

SEQ ID NO: 53799 - DNA, 419 bp, Zea mays
  unsure (1)..(419): unsure at all n locations
tccttcgagggattttctgtcaaaaatatccctcgaggactaaatgagcatgctganttgctagctaagtcagcagcacaagggctgcccttaccttagatgtgttcttcgaaacaataaaagcaccttcggtggaacttcttgaaagagcagtcctcaatatatgtcctgtttatagcgaagattggagaactgagatcatctcttatcttcagggtaaattcctttcagatgacgaagcttataacaggaggatagaggcaagagctcgtccatatgtcatgatagaaggggagttgtacaagcatggagttttccgccaagggttttattggccgaaggcagcttcggatgcagcagaattagttcaaaagtgcgaaggttgtcagaaatgtgcaagagatcaaaaacaaccttcg

SEQ ID NO: 53800 - DNA, 383 bp, Zea mays
tcctgtgagtctacctagagcatgcaagcttgccaagccctccgaccccgccagactttgatggtagcctgagaccgacatctgcagacttccgtctcatatcgcaatcataagcgtctaagaatgggaacagaggtaaaggtctaccaaccttgacgtggacagaagctgtgaagaaggacctgaaggagtggaatattgataaagagctcgccgtggataggaaggggtggaagtgtgcaattcacgtgccagaaccttgatttatagtttcgctttttctctttaatcgattgaccttttcttgtgcccatttagatcttgctggttctcgtgggttttatctcttttatgtgtttccccgtttcgtcgtttttcggttc

SEQ ID NO: 53801 - DNA, 230 bp, Zea mays
tgccttcgcctcagtggaccacccacattccaacggtattatggagcgcgccaacggcaagattctcacagcgatcaagaaaatgctcctcgacgacaagaagggcacaatgggccaacactgctaacctgaatcagcctcgggcacgtgaacaccgaccggagtgccccggcgaccggaattcactccgctttcgccctgctataccggatcagaaggccatgaacccc

SEQ ID NO: 53802 - DNA, 332 bp, Zea mays
agcttctaaagggagaaccggctataagtttttctaatgtacatcccgaaaaagattgaccttgtgcagcatgtcaagtccgtcacaggtgggaagaactcatcacaccgagaatgtgatgaccacgtctggaccccttgatctactggctatggaccttttattgacccgcgcctactgtaccatagggggaaagtaatcctgtctagccatcggcgatgatttttcccgcttcacttacgcgttgtttttgcaggataagtctgaaacccaagggaccctcaaacgcttcctcaagagagctcataatgagcttgagctctaagtgaaaa

SEQ ID NO: 53803 - DNA, 368 bp, Zea mays
  unsure (1)..(368): unsure at all n locations
agcttatgaagattcttcatcccaacatgtgttctattcggcggngccagagccaacccatgttagtcttagcaattaagcaagtgtcagttcagctctatcaaaatctaccaagtatagctgaccctctaacactcccttaaaagctattgaatcatcacttcttctaaagacagtgacacctatatcagaaaaaagacagttgtagcccatttgacataattgggaaacagaaagcaagttgtagtctaaggaatcaacaagaaaaacattggaaatagaatggtcaggagatatagcaattttacccaatcctttgaccaaaccttgatttccatccccgaatgtgatagctcgttggggatctt

SEQ ID NO: 53804 - DNA, 427 bp, Zea mays
tgccttcgcttcagtctatcatccgcagtccaacggggtcttggagcgtgccaatgggaaaatattcacagctgtcaaaaagatgctcctcgatgaaagaaaagggcagatgtgaccgatttattatccggagggcagtctgtggcgctaaacacatactgagtgcagggcgaaccgggttcactcctttccgccttctatacggatcggaggcaatgaccccgcaagaaataaagcatgggtccccgcgtacagttccgtcagccgtccccgacgtggatgagccaacttcaaaagatctcattgacggagaccgggtcttcgccctacaggccctaaacaaatatcaagcccagaccaaagcatggcgcgaccacacagtcatcccgagggagttcagcgagggggacctcgtactcatccggac

SEQ ID NO: 53805 - DNA, 418 bp, Zea mays
  unsure (1)..(418): unsure at all n locations
tgcacacatagctcttttgaatacctttgatcatatctcttttatatgctatgactaatgtgttttcaagtttatttcaaaccaagtcatggtatattgaaagagaattggagtcttcggcgaaaacaaaggcttccactccgtaactcatacttcgccatcactccgagcaactctctcgtctttgggggagaaatgagcatcaaggaaaaggacttcatccttgggggagagagtaaaagctcaaacgcaaaaggacttcgtctttggtataatcttaactcacttatttatgaccaaaggggaagattgcacttccagggctctaatgattccgtttttggcgattcatgccaaanagggggagaaatgagcccaaagcaaaaggaccgcaccaccaccaccaaattcaaaaact

SEQ ID NO: 53806 - DNA, 350 bp, Zea mays
tcaagcttggctggattttttgctgtgagagttaataaaatctcttcttggttatagctcaacctgacggttctgagttagtgttgaaaattgccttgtgttgggttaaccaattcatacccaaaattacatctatatcctggccctttagaacaatcatgttagcaggaaagttccgtccggccattgttactggcactccataggccacttctctagtataaatgtgtcccccaggtgaatgaattttaaatccctcctttgattcatggtatgcaatatgatgttgttccacaaacttcttgctaatgaatgtatgtgaagcaccaaaatcaaaaagaataattgct

SEQ ID NO: 53807 - DNA, 389 bp, Zea mays
ttgagctcttattatgcagaattctccccctaaagaagtgcttacattagaatcttagcctggccttaaatgccaaatgacatacttaggctgaatcaaagcattgctacaccttaatacatgtgggatgcattgtgtcaaggatcaaaccatgatgcgtataacacacaaatgcgcagaatcagagttaaacaccactcgattgagtggatattatcacatgaatatcaacctaccactattcaccattaagataccaatgtaaactaagataccaatttaaagcaatcttaaaacacctttaatcttaaagcaccattaatcttaaagcaccattaatcttaaagcaccattacccacactgaatatctattacagaataaacactt

SEQ ID NO: 53808 - DNA, 360 bp, Zea mays
cagcttattctctgataccaactgtaacactcttggttttttatacaacccggaatgctactgaactacacttccgagtccatattaaattcgcagcatcccctttgcaagattgcataaaagagggggcaacagagataaacatatatcatgactaaaacatactaagtattattaatcggctagcaaggaaagataaacatacgacctgaactgaattaaccagtgcgcacgaccatataaaaaataaacaaacttcctttgacaataagtttctaattaaatcatggctgcgcctgtgcagcgttattgtgagagtgaaagtggacgtgctgctactcccctcattcccaacatgta

SEQ ID NO: 53809 - DNA, 432 bp, Zea mays
  unsure (1)..(432): unsure at all n locations
aaactaagcttggatgttcttatcagaacactggatattgtcggatttttgataattcttcttcacgaagcatgaaaagaagggaaggtgttttttcccgaaggctcaaaatggatgtacttaatgtttcatgcatcgttaaaaatncaataatgaaaggagacttgtatattacatttcaatatacaaagtgttacataaattacactttaaatgatttttccaaatagcatctaatcttctctcaatactgcttcggcggcctcatttaacaagtggtaacaatcttgtccaagatagtttcggccatttgtttaatttcttcgtcgacattngatccagcagtttctgagggaagagaacatntcttcatttactttacaaacctaaagccaagattggaatataattacaacacattagagcgactta

SEQ ID NO: 53810 - DNA, 363 bp, Zea mays
  unsure (1)..(363): unsure at all n locations
agcctctactcgtttgccccactgggcggttttgtttttctgaattgctctctacnaagtcgctccaaccgtttcttgaggccaaacgacatggagtatatcataaagctcccaacgaggtgatgaatgctgttttttccttcgcttcttttgcccagctgatctgatgatacccggagtagcaatctaagaaggacaacatataacacccagcggtcgaatctacccaccctgtctatcctaggaagtccgaagggatccttcggacagtgtttgttgagatccgtatagtccacacacatgccccaatccactttattttttttgagtacaagaacaggatttgctaaccactcgggatgt

SEQ ID NO: 53811 - DNA, 372 bp, Zea mays
  unsure (1)..(372): unsure at all n locations
agcaaatacgccacccttctctcgaggtcatcgntcatgtcgctggtctgacagagacaaaacggcagggacacccttcgccgatcggcagcagacgaatgcctgcgaccgcgacatcccacaatgcaggctcgcccagctcagaggcccacatgtgagccggcccatcgtaacgggccctggatggccgccccgtggtacaagccttactatgtaaggcatgccgtgtaatacagtccggaccccagcgcatgggaataacccggcgataaccccagaagctacggcacaagcgttcctaacacaggggcgtggtgctctggaacgaataaataccccggacagggcccgggagagggcacataacaaaac

SEQ ID NO: 53812 - DNA, 355 bp, Zea mays
  unsure (1)..(355): unsure at all n locations
accttcctcttatttggnctttgtatggtttatttatgacaccctataatctctgttcgattaatcagacgttgtaagtctttctaatcgctacctgcattggtcgagttgtaccaaaacatattggatggagtaaacaacaacatcagttagtcaaatcaaaaaatattatgcggagaacggagacaatcaataaaaaatcttgtgatttttttagtggatagtttacgtgagtattgttgtgagtcgtcgcaatgcacggcacggacaaccgattagtattgtttgaaaacactgtatactggataataaaaaagatagaaattatatgattacgttgaattacacatgataa

SEQ ID NO: 53813 - DNA, 341 bp, Zea mays
gccaacgacgcacaagcggaggcggaggaggaggccctgctcctggcacatgcaagcaacgagccatctccagcggcaccggccgcagcggcactccaccaccttgatgagtcgaaagcacgcgctttcctcggcgacggctccaacaaggacatgatcgaaggatggtgcctcgacaccggcgccactcatcacaagaccggccgacgggagttcttcaccgagcatgactctaacgaccgatgctccgtcaagtttggggacgacctcggcgtagagatcaagggcgccggctcagcggctacaccgccgcgtctggagagcacaggctggccaccgga

SEQ ID NO: 53814 - DNA, 357 bp, Zea mays
agcttgagcatagtttcaaagttgattatatactggataaactgtaatggttctagcaatgtccagttattgtgttcattatcgacaatactaaaaactaaagtactaataatgaccacaaagtgaaaatgcaacatacctatcctaatttgtacaaatatagctagaatcaaacaacgttacatcaatatgagaccactcgcgctcaagaaaaatgtaatcatatataaaacgcacgagcataaaaacgaacaaagctgattccctcgagtacctcgcatgatgccatttgtacatagactactcaaacggatcgatctatcaagagaggaaggggccatcgcatgaagagtgccg

SEQ ID NO: 53815 - DNA, 395 bp, Zea mays
  unsure (1)..(395): unsure at all n locations
tgcacgaacttgaaccgaggacccgcgctaccggaatagttcaatcgtgctcgccggagtttggaaccccgccggtgaacgtagaccgggtaatcctctgctccattctatcgattccttgtgcacgtagcctctacgtcaccccgtgaagctcatcgtgccatttgattgaactagatcgccgtggtttagtcggaacacccgccgtcgacgagaccacccgcctgcgcgcgtggaccggacgattccggccacctccgccgtcgagccgtacaccgctgtgaccgccatgacctcccggagccgaccccgcccctcgccggacctctttcgccgtcggtaagccggaccgcccttttcttttccgcgggtactggttaaacctanggagggac

SEQ ID NO: 53816 - DNA, 354 bp, Zea mays
aacttcactgatttactgcattttttatctatttaacttgagaaaaaagggatgccaacccaatcatcagctggaccggaggtagggtatggaagaggaagaagaacgctcaattaactgaaatggacatggatgagacgaagcccaagctccgtggagcttaccaggaagcaaaaaactgtgagtcccttctccttgggtctatataacccatccacgcgctattttctgggaaaatggcattaattatttagttcaccacttctgaccacaatataatatatattttttcttcctttgttttttagcgaaacagagacgtgcaatccaagtagtggagctgcgtgacattgc

SEQ ID NO: 53817 - DNA, 398 bp, Zea mays
  unsure (1)..(398): unsure at all n locations
ttccacccaggagtntaggcgggtgctttgggaggaatatttgtcgcactggatatcgagagctcggagatatccggccatgtatacgatggtggggcatcctcggtaggatctctccctgatagggcctgaagtttttttctctatgtgggggtatttttgttgctcggagggaagtaacgaaggggggggggttcaaaaagctctctggaagaattgtgcataactgtttaagggctattcgggcaacactttagcacgtgtctgagaagccgggcccgatagaggtgacttggaacggagggtggttagggtaactaccgctttctcccaagcagaccaccctaaagcacttctcacctccgttattcggttttctttccagacatatttcggct

SEQ ID NO: 53818 - DNA, 353 bp, Zea mays
agctttggatgcttctcattgtccaaaatttttggttttcctccgcaaaggggtagtggccttttaaatttccagttctatgcagtatttatgtacatctaaaaaatttactctaccctttattaacatccacaactcatcccttcgcaaaactaaaacaaacacgcacacactagttagtatttacattatgaacctactactcatccatttcgaagaaacttgctgatccatggagtttatgaacgaaccgcgctggctgctgagttgtgtcctgagggcttgtacaatggtatgctcctctttttcatgtttcctgtacactctaactttcctttacatttacaagatta

SEQ ID NO: 53819 - DNA, 234 bp, Zea mays
  unsure (1)..(234): unsure at all n locations
tatnttaattttctacttgcatgcgttcttataatattgtcttttatgccactattatcagtggtgctcttttctatgtatagggagcgcacttgaattatacaacaatgggcgttcatatcatatctaagttaatgatttatgcttccatatgcctaaggctttctacaccttttattggccaaaacatttaatattcgggagataaaaaacaatattggtcgcataacacct

SEQ ID NO: 53820 - DNA, 347 bp, Zea mays
agcttgggatatctaacaaatctgaagctgtttttgctgaagtttggtctgttcacaatgtttccatgtgtgcagtcagccttcaaaaagcagcagctgtgccccgaaaagctaccagggcgcaaaagtcagcgtgcccaccaataacttcgtcaagggcatcaacttcgccttcaatatgttctaatgtttttggcagattttcagctgaaggtgtaaatttcgaagagctagctccgacagagtgaaacacgtccttcaaccgctgcacacatcgggtgccgaagctcaagcatttctcctgaaactctgtaaaggaattctgcaaatttgagtatttatccact

SEQ ID NO: 53821 - DNA, 414 bp, Zea mays
tgagtcaatcattttgcaaaggataattgatgctcaaaatgataatctgggtatgaagcacatacgagaaaagataagggctggagtatccaaatgttcaaggaagacgatcaaagtgtgatatggtttaaaaaccgcatattagtgccaaagaacgaagaactccgccagcaaattcttgatgaaacacatcttaatcgttattctattcatcccggaagcactaagatgtaccaagacttaaagcaacattactggtggacaaagatgaagatcgaaattgcacgctatgtggctaagtgtgacacttgcaaacgtgtcaaggccatacacatgaaaactgctggtccattgcagtcattaccaataccaacatggaaatgggaagacatcagtatggactctattgtggga

SEQ ID NO: 53822 - DNA, 344 bp, Zea mays
  unsure (1)..(344): unsure at all n locations
agcttgaaaaaatctttccacctgccttctttgatgtcatggggcacttgagtgtccatcttcccgatgaggcaatgctaaaggacctgttcagtatggatggatgtacccaatagaaaggcgactaggcactttgaaaaattttgtaaggaacagggctaggccggaaggatcaattgctgaggcatatatggcaagtgataccttaacattttgttctangtacatgaaggatgttgacactagatttaaccaggatgatgatagtggtacagagatgccattgcctaatgacatgtctgtttttaagcatggtgctagtcttgttggagctactaagactg

SEQ ID NO: 53823 - DNA, 417 bp, Zea mays
taaaggtatttttggataaactatttattactattggtttcttatgtggaattttcggtcgacgatacgctattcgatggatttaattgatttagatgaatttctatgacaagaaattaataatacataaatagcctcaaaaatcatgaaatttacggaggcacaacatatgttcatatataaccatagaaatggttggatcataagatctataagatgttccgtgtcttccatttcacgttcacttatttgtatgagttacatgtgaaattgctataactatccaagtttcaacataattaagaatttactttatcattttcatatgaggaatcgagttatcttcgtataaaatgtttatttgtttttgtaacctatttgcaatttttgagtgaaactagaatattttatgaaatt

SEQ ID NO: 53824 - DNA, 360 bp, Zea mays
  unsure (1)..(360): unsure at all n locations
agcttgccctggctcggatcccgggcccggggcccagctctgacctccctccctgtctttccccgagctcgcgctcaacctgctcgccggccctatcgcccaactcggatttcgcttggtcgcaagtcgttccccgcgcgcgcccatctncctgttgttgcgttggccggagtttcctgctcgctcggccggccatggtggccgcgcaagtctcctgaccgggggaagctctggcccaggccactgttggggccgggatatggcgcgttcctgcgcccggtcttcgtctctatcacgccgatctgcgctcgtccgtggccgtcgaccccgcctagctctttgctcgccatagccctggtc

SEQ ID NO: 53825 - DNA, 360 bp, Zea mays
ttctaacccaactggtcccgcataaaatcttcttatagtcgatagtaaccattgtaacaagatgatgtccagaatctgcctaaaatcaacaacacctgtttttgggcccaataccttgtacacccttaggttgctcggccacctccttggtcaccgccttagtcatattatatatattcagtagtatctattagattagatgggttttgcttagaattatttgtttatacagttttgtcgtttcattgcttcgtagaaccccacattcgagatcttcgttatacctctgtagttgtcactttaattgagctatgtacttttaaattctttcttgtattctttggttcccatacaaggact

SEQ ID NO: 53826 - DNA, 321 bp, Zea mays
  unsure (1)..(321): unsure at all n locations
ccgacttaaagatagaatgaccttttagcccataagggtctgagtcattattgtaacttttataaggggcatgattgtaattccctacaggctgtgtcctgggtctataaatagtgaacattactcctttactgttcacacattcctataattgcaaacgcattgtccgaaaattattatctgtcaaggagaaggataaatgtatttaaactttatgttctgacatttntatattcatataataaaatgtgtgaatgatgttacctatttctgatacatctatctttaatgtctcatgttatatatatattatttcatatt

SEQ ID NO: 53827 - DNA, 408 bp, Zea mays
  unsure (1)..(408): unsure at all n locations
taaatctgaggctcgtagatggaactaagggtgngtnttgtttgactttttactttgatttttgccccctaaaagccaaaagccaaccaaagggctggattcatgaagcaggtttcctaaaagccgactttctcgtagtgcanatctgaaagcacccctggacctgcttttagtggcttttcngatggaactatgaaaacatatatcaaagaatttntaacgacttttattggttccaccaaaggtttttagcttttaacagcttacagcctaatcagctttttccacagctcacagcccacaacaactttttttcacagccacagcccaaccaaacagaccataaggctcctaattcaacattaggagggaacatatatcttatgctcataatatctgtatgaacac

SEQ ID NO: 53828 - DNA, 364 bp, Zea mays
agcttctcctggacaagcgctgcacttaccgctgagtgcgaaactttcacatataataataaaggagcccctggcattggtggagtcaatgttgtaaatctatcaaatactgtttcagttcttccaaagccttctgctggattggtccccattgaaagacttcggctgacttcagcacttcgaaaaatggtaagtttctctctgctgatctggatatgaatctattgagagatgccaatcttcctgtcaatctttgagcccccttctttgtagttggtggctccatccgaagtatagcttcaattttacttggattagcttcaattccttttgttgaaaccaagcatccaagaaatttcccctt

SEQ ID NO: 53829 - DNA, 206 bp, Zea mays
tccattgacctataaaactcagcttgacacatagctcatttgaatacctttgatcatatctcttttatatgctatgactaatgtgttttcaagtctatttcaaaccaagtcataggtatattgaaagggaatggagtcttcggcgaagacaaaggcttccactccgtaactcatactttgccaccactccgagcaacttttttttt

SEQ ID NO: 53830 - DNA, 364 bp, Zea mays
agcttgtgaagattcttcatcccaacatggtctattcttctgtgctagagccaacccatgttagtcttagcaattaagcaagtgtcgagttcactctatcaaagtctgccaagtatagctgaccctctaatactcccttaaatgctactgaatccgcacttcttctaaagacagtgacacctacatcagtaaatagacaggtgtagcccatttgacataattgagatacggaaagcaaattttaatctaatgaatcaacaagaaaaacattggaaatggaatgggcaggggatatagctattttacccaaacctttgaccaaaccttgggtttcatcctcgaaagtgatagctcgttggggatc

SEQ ID NO: 53831 - DNA, 436 bp, Zea mays
tgacactcagaaactcagcttacagcgtgattgccacaacttggggttttctccgtctttcgatggaatattcattttaggaaggctgcccaacgatgatgaagaagaaccatgaacataaccccccgagaatcatgcgttatgtgttgatatggaaccttaggaggaacatatgcatcatgatacggggaaaaagcatggcaaggaattgggccttggtcattcataccattagtcgggagttgggtttggggtggcacctcccggaacccaaactctcggtgtcaaggaacctggcaatgcccatcagggccatcaacgtaacatccagcagccgggaaacgctccgacgccgatccatcttggacaggtcccgccgtgcaaacgtcagaagcaccatggtccaatacacggtcgactttggcaagctccacac

SEQ ID NO: 53832 - DNA, 166 bp, Zea mays
agcttgagcgagaccgcaaggactacaaatatgacctcttttttgtgcacgcccgggagctggaagtgggccggaagagaaaagctgaccaaaggaaggacccttgaaccccaaggaggatggtgtcacaaaactctatgccaagcttagtgccttcaatgaaatc

SEQ ID NO: 53833 - DNA, 410 bp, Zea mays
  unsure (1)..(410): unsure at all n locations
gtgacactactgaaactaagctttaagctcaaatatatcacaaagtggagtanggtattactctccggcggttcgaaccactctaaatccttgtgtgtttttgtgttttcccgttccacctaatatgcaaacgcttangcccctccttatctaaggatttanggcaggtgcattctgccacccggtcggaaaattcatctccaacattttgcgcgccaagtaagggcttaggctttaggtttttgcttggtttcttgctcggcttgatggtgcanatcgttgagcaccgcgccgcactttggaggatttcgtggtggaagaagaaactgcatcctccgcgccacgagagtccaaccgccctgtgactggggctgttgtngtgcactctgcgcggcaacacacccctgcgc

SEQ ID NO: 53834 - DNA, 356 bp, Zea mays
agcttgctagctgctgctgctagtgatgttttacggcctaatgggccagggcagttcgacgcttgccacttgggctgttggccgcaggccgcacgcagacgcgcgtcacgcaagaagcccagacgagtaaacggactgcatcctgtagccactgggtacctgaccgtcaagtaccccgtatccgatccgaaaatacgggtacttatcgggtattagtgattacgtatcctatcagtatccggtaattattattcatgtagtacccgtatccgtcccgataataataataaccgtattcgtatccgaaaattcgtcccgttttcatacctgtatccgatacccgtctcgaataccca

SEQ ID NO: 53835 - DNA, 384 bp, Zea mays
  unsure (1)..(384): unsure at all n locations
ntggccncacctgcaggctcgtatcctcttctgaggctgtcccggngccaatgtcggtaccctgaatcaggggtaccccttactacagtatgaagaccggtgctcgcgcggctatctctagtcgcgcggtgaacaacacccgacccctccacgtaggcggctctggggccgccacgtggccagaggagacgatatactccaaggtggggacggtgtgttcggacccccacgggaaagtgccggacccctgtatgcacagcccggacctccgtgcgaggttcaagacctcgacatgtacaaaccagacccctgggacgggtcccggacccctcatgaggggtctgggctactcacagtggggtccccggatccaaggcaaagata

SEQ ID NO: 53836 - DNA, 356 bp, Zea mays
agcttctaaaggcagaacacattttaggacttacaaatgttcattttgagaaagacaggatttgtagcgcatgccaagcaggaaacaagttggcactcatcatccgcataaaaacataatgacgaccgacaggccacttgagctcctacacatggacctattcggcccgatcgcttacataagcatcggcgggagtaagtactgtctagttattgtggatgattattctcgcttcacttgggtattctttttacgggaaaaatctcaaacccaagagaccttaaagggattcttgagacgggctcaaaatgagttcggcctaaggataaagaaaattagaagcgacaacgggacgg

SEQ ID NO: 53837 - DNA, 423 bp, Zea mays
tggaccagaatattgtggggttcttgtttaaggccttgtaaatattgaacttggcaatattatatatgaggaggtacctagaccatctaatcagattcgacactaattgatgctattggctatgttattccttggccaattacacatgtaagtttcttttttatttgaaatagtacatgtgtccccataacaacttcaaattgagttattgatctaacacatgtttcataggtgaaacaagctagaagctcatcttgtacccgcaacaagttggtacctgcagcacgtggacaaagctagatggcgtggacaaagctagatgggaagcctagtataattgcaaagtgaatcagttagattctagtagttactaaaatttttaagtgatatttgtatgatattgccactttggctttgcttctt

SEQ ID NO: 53838 - DNA, 353 bp, Zea mays
agactttccatgttgcgcttgaacattccattccgagcccgcatttgaccggggtgaccgtcacaagttggtgttcttctgcagtccaatccatcatgttcaaatcctttttcccttcgggcttctcccttattcctaagcaaaacaaaaaagccccggtcttcattggcttaatatgaaggacctgaacctccgagagtgaacaccctgttggtgagttgacaacaccaacgccaataatgggacccaaaattggtacttggattggtataaaaacctccataatggggatgtgtttatcattctccccttcttgcattagaaacgtcctcgactcaagctcaactttctct

SEQ ID NO: 53839 - DNA, 429 bp, Zea mays
taggaccttaaatctcagcttcgcatctgaaagaattaccctgttttaagagattatctcagttctccaatcttcgctataaacaggagatatattgaggactgctctctcaggagttccactgaaggtgcctttattgtttcgaagaacacatccaaaggtaaaggcagcccctgtgctgctgacttagctagcaaatcaacatgctcattttgtcctcgagggatatttttgacagaaaatccttcgaaggaagcttcgactcttcgaaccatatccagatatttttcaagcttcagatctttagccttgcaactcttgtcgatatgacccgaaacaacctgtgaatcagttttaagtatggcccttctgattcccattgcttttagcttccgaagacccaaaagcagggcttcgtactcagtaata

SEQ ID NO: 53840 - DNA, 357 bp, Zea mays
  unsure (1)..(357): unsure at all n locations
agcttcggctatggtcaaatttttggcattttaacagtgcaatagcaatgaatgctgtggtaacttcacacctacatgtctgttatatagtgccgtacgtgggaaagtaaatcgtcaagtcttccgcaccggacaaacagccgcccacacccactgaacggtggggcacaaagcccaagaaagtgaatcgccaggacgcgcgtaactgctgcatgatggggccacctcgcgctcgaattattttaatcgtttctcggcaacgagctcagggaaggtgtttttcggatcttcggcatcccaaagcctaagagactttttcacggatcaagctcgttacgaanaatgatctaacaccac

SEQ ID NO: 53841 - DNA, 412 bp, Zea mays
  unsure (1)..(412): unsure at all n locations
ctcaggtctcttgctttgtaactcttgttcttgtgaccataaataacttgggaatcagttttaaggatggctcttctgattcccattgcccttaattccaaagacccaaaagcatagcttcatactcggctatgttatttgtgcaactaaaatcaagttttgccgcataacaagttttaactttggaaggtgaaaccaacacagcaaccgctcccgctccgaaagtttcccaagacccatcgcaaaacactgtccatgcttccgcgtcatatttgtttctcctcctgagcccctggcgtccagcaacaatgaagtctgctaacgcctgngactgaatcgaagatctatgaacatattcaatacaaaattcattgagctctgcagcccattttccaatccttccagtagcttc

SEQ ID NO: 53842 - DNA, 473 bp, Zea mays
  unsure (1)..(473): unsure at all n locations
actcagctgngaagattcttcattccaaccatggtgctaagtcggggcgatgttcaagaagcncaagctctctatggttacttctgtaagcacattaaagcaaagtggtcgaagctcagctctatcaaaatctactaagatgctgaccctttaacactcccttaaatgctactgaatcatcacttcttctaaagacagtaacacctatattcgtaaaaagacaggtgtagcccattttgcataattgagaaacagaaagccaattggaatctaaagaatctacaagaaaaacattggaaatagagtggcaggtgatatagcaattttacccaagcctttgaccaacccttgatttccatccccgaatgtgatagctcattggggatctttggttntctcgtaagaagagaacattttcttcttccctgtcatgtgggttgtgcacccgctatcgatgatccaacttgagcccg

SEQ ID NO: 53843 - DNA, 347 bp, Zea mays
agcttgacaacactatttgacatttcacatttaatttctgagatcaagaatatttagttcattcctcaacatgcaaaacgggtcttatcaagtggcttagtgaaaatatccgctaattgatcttccgacctcactccttctaaaatgatatctcctttagcaacatgatctctaaggaagtgatgacggatatcaatgtgcttggtgcgagagtgttgtataggattattagcaattttaacagcactctcattatcacacaacaaaggtaccttttctagaactacgccatagtctagaagagtttgtttcatatataaaatctgtgtgcaacaagcacctgcggc

SEQ ID NO: 53844 - DNA, 416 bp, Zea mays
  unsure (1)..(416): unsure at all n locations
tggcatacaactggcaatctcgtagcctttgaattacttttctcaaatgctcctcatgctcttgctcattctgggaatatatgagaatgcatcaatgaacaccactacgaacttatcgaggtagtccatgaacacactgttcatcaagtacatgaagtaagctggcgcattcgtcaaaccaaatgacatgaccgtgaactcatatagtctttacttggtgatgaatgttgtcttcagtatatccgaaggtcggattctgagttgatggtaccctgacctcagatctacctntgagaacacactggctcctctcaactgatcgaataaatcttcaattctaggcagggggtatgtgttcttgacagtgacttcatttaaagctcgatagtcgatgcacatcctcttcgtgccaccct

SEQ ID NO: 53845 - DNA, 351 bp, Zea mays
agcttgcccacgttttcaagcaccatcttttagaacatgcactaaggacatagtgtcccaattctttcgagagaaagccaagtaaagtctttttttatagactcatgtcaaagaatttgcttgaccacagattgttggacttcccaacaacaagatggttatatggcagtgactgcaacttttatagatgagaattggaattcgcataaaaaaatcattggattttttaaggttaagggacacaagggagaagatattggaaaaagtttattgaaatgcctgactgaatggggattggagagagtgatgacaataacagttgataatgcatcagccaatgataccgatatt

SEQ ID NO: 53846 - DNA, 412 bp, Zea mays
tttcagaaaactgggtcttgatatgcattaataatgaatctgacagtttggaaacttcaggattacagtggcctgtcttgtactctccgttgaaaccgtagtcatttttggctgtcctaagtcaaatttctttagcttggaatagagtgctcattacttaacattatatagtcatgtagaatgattctaggttccattccatctaatatagatgagtttttttaataaatctatcgatgtggaaggacaggagctgagcagtttaaattcctaaatatccttagatctcattgtatctgagtttctgttctatacctacatagagacgcttttcatctgtttgacatttcaataatgccaatgattccttgacatgattatcagtatcgtccaatattgttctggagaaagg

SEQ ID NO: 53847 - DNA, 362 bp, Zea mays
agcttgtgcaataggttgaactccacagggtagaggaagctgcagcaagagaggctgctcttgaacatcaaaagaaagaaaagaagaagctaaaagaacacgaggaagaggtagttcacttaatactatcaaagtcaaagttgcagaatatgattgagattcatatatttacttatacagtttagtaagctacagcttggttcggtaaattacagaagcttcatgaatcatgatctcttatgcatggatggtaaattatttttagtttacatctcagtgttcattttacttaattgaccatcaatagcatggagtaccaaattttcttcgtcttaggaaatatatcctcattacttgtgcga

SEQ ID NO: 53848 - DNA, 367 bp, Zea mays
  unsure (1)..(367): unsure at all n locations
tttacagaagaagaaggagccctcggcaatgaagaagtctgctaggccgaaataacgaagaattattactgtgactgaagccattgaagaacaccaccaccagcttcgggtcnaagacaccagctgtcgagagtgctacagctgccgaagctgcaatggtcgaagatgcanatctagaaagcacactttctaatattgataaaatacttctggatatggccgcagaagaagctgctgcagccgccgagagaccatgaccacaatgcctgngaaggagaaggagacggtcgaagatacttcggaagaagaaaatttcaactttcaaaacttaattggacaagaattgtcaaaggatgagaaagaagag

SEQ ID NO: 53849 - DNA, 360 bp, Zea mays
agcttgtttaaaatgtttggtgaattttgggattataaattattatctaaaattccagaagtatggattttggctatttaaatgtcccaaattcctatttgaactaaaaatcaagaaactatttttattaaatactataagaaattagaagcctaacaaaattggtctggtatttttagcatttttctacaattttccagaaattctttaatcctggtagaaaaagaaaaggaaaaacaatgaatagtgttgggctgaattcagcccaaccggcctacaaaaggggagaacccatgcgcgcccgcacccgcggggcggttttacaccgaagccctcaggggtttgaatatctaaggaaga

SEQ ID NO: 53850 - DNA, 413 bp, Zea mays
  unsure (1)..(413): unsure at all n locations
ggctatcaatgtggacgtgaaggtcattacttccgaactgccctgagattatntcactacagatcacctccgagatgtaagctatctcagtcttcacacatgaaatatgaacaaaaatgcacaaaaaatttctaccaaacaacgtataaaacaacttccaccatgtaaccttatcaagatcgtgcttggctttggcttgtggcggaaatcggccatcttagtaatagttgggcctaagaaaagatgtggagatcaataatggcccaaagaaaagacaacaccctcaaacgcctgcatcaacaaagattaaacaacggatagagaccacatgaaggataagttatgcagtgacaagaactactccatatgataatgcaacgatttttggaacactagtaatcacataaccatcg

SEQ ID NO: 53851 - DNA, 356 bp, Zea mays
gcttgttaaaaagttggtgaatcctggaattattaattattccctaaaattccagaagtatagattttggctattttaaatgccccaaaatccctattagaactaaaaatcatgaaactatttttattaaatactataagaaattagaagtctagcaaaattggtatggtatttttaacatttttctataattttctgggaattcccaaagtccaaaagaaaaagaaaaaggaaaacatgctacaagattgtgctgaaactggcctgggtcggcccatttactggcgaaagcgtgcccactcttgtggttttgcagaaaggcccctatcggtttgaataactggaaacgagtcatg

SEQ ID NO: 53852 - DNA, 333 bp, Zea mays
ttatcaaatggacgtgaaaagtgccttcctcaatggacctttcaaggaggaggtctatgttgagcaaccttccggctttgaagatagtgagtatcctaaccatgtctataactctctaaagcgctttatgggctcaagcaagccccaagagcatggtatgaatgcctaagagaatttcttattctaatgacttcaaatcggcaagccgacctactcttttctaaacaatgcaaagattgtttgatgccaattatgtgatgatacatattggtctaaaaccatctacttgtgagaattataggatatgatcaaaattcagatgctatgagggga

SEQ ID NO: 53853 - DNA, 367 bp, Zea mays
agcttctaaagggagaatacattttgggactaacaaatattcattttgagaaagacaggatttgtagcgcatgtcaggcagggaagcaagtttgtgttcatcatccacacaagaacatcattacgactgacaggccactcgagctcctacacatggacctattcgacccgatagcttacataagcatcggcgggagtaagtactatctagttattgtggatgattattctcgcttcacttgggtattattttggcaggaaaaatctcatacccaagagaccttaaagggattcttgagacgggctcaaaatgagttcgacttaaggatcaagaagattagaagagataacgggacggagtttaagaa

SEQ ID NO: 53854 - DNA, 351 bp, Zea mays
tcgcacctctgaactaactcggctgcatcactcttcgctgttggccaatttaatcctgacctgaagaccttcctgactagtgttctggatgctgcatgtattccacattgccagcatggacctcctccagaagtcgtttcccagtagatgagaaaatgcacttcatgaggacgcctgaagcacctcttctgtacaacgttctcccaatgagcgtgtaatgagccgactgtctggcaatgcgctcggctgaattcttgtcaatctggtcctcttcattctttatatacctgatgattggccttcctcagtcatcagagtctgactcgggttgatctataatattacactctt

SEQ ID NO: 53855 - DNA, 375 bp, Zea mays
  unsure (1)..(375): unsure at all n locations
agcttccacagcaatccaacacacagnggagtatggtgtttttctccggcagcccgaacaactctaaaccctcgcgtgttcttgtgttcatccctcctctcgcataacaagcaaaacgctcaagtccctcctcatcttaagatttagggcgggtgcactccgccacccggccggaaatttcctcttcaacagaaatactaacggaaactcgtaatttaatacaaatagaaatgttattgatgtttgactaatgattgattggccaaaccataacataaaacaaatagatatagagaagcaacattctattgtttaagactttagatcacttgtcatttgaaaagagccggtggttacaatggccaattgtgctat

SEQ ID NO: 53856 - DNA, 341 bp, Zea mays
aactagacattgtcaccctgtttgtagcctttgccatccctaaaggccggggtgttcccattatatgacatgctttttactcatttagaattttcatatctttagactcccgcttcagtaatttttactagttaagttgaacctatgtgatcattttagctctttaacttaaagttaagggatcatgaatagcatcaacattaatatcttcacatttcatgccaatagaaacatgatcaacaatggatgtagagggttagtaagattctaattcatctatcttaaattttagcatggcattttcatctctaagacaggaaatggaaacattgcaaacattt

SEQ ID NO: 53857 - DNA, 374 bp, Zea mays
  unsure (1)..(374): unsure at all n locations
aagcaagacaacaccanttgacatccnaaatatttatttctgattcaacgatatagaattcattccgcaacatgcacaagcggggcctatacaatggcttagtaacatacccgctaattgaccttgcgacctcactcccttgtaaagagatatcctctatagcacatgatccctaaagaagcgatgacagatatccaacgggttcggtgcgagagcagtgaacaggaggaataatcaatttgtaacaacactcttatgatcacacaacaaagggaccttttctagaactacaccataggctagaagacgtttgcccatatataaaatttgagtgcaacaagcacccgcggcaaagataccgcttcggcggtgac

SEQ ID NO: 53858 - DNA, 354 bp, Zea mays
agcttctaaagggagaacacattttgggactaaccaatgttcattttgagaaagataggatttgtagtgcatgtcaaacagggaacaagttggtacccaccatccacacaagaacatcatgacgaccaacaggccgcttgagctactccacatggatttattcggcccgatcgcttacataagcatcggcgggagtaagtattgtcttgtgattgtggatgattattctctcttcacttgggtattatttttgcaggaaaaatctcaaacccaagagaccttaaagggattcttgagacgagctcaaaatgagttcggattaaggataaaaaagataagaagcgataatgggac

SEQ ID NO: 53859 - DNA, 418 bp, Zea mays
  unsure (1)..(418): unsure at all n locations
tggtgccaatggagaagcagaaatccctgaagtcttggctgtcaaattgcttgccattgtcaactatgagctcggacgggactccgaatcgacaacaatgttttgccaaaagaatttctgggcagtcttcgatgttatcgtggatactgccctcgcctcgatccacttggtaaaatactcgacggcgacgaaggtgaacttgaggttcccttgggccgtgggtagtggcccgacaatgtnccagccccagcgctgaaggggccacgtgtgggcgattagctttgtgaattgtgaagggcttcccaagcgtggagaanacttctggcangcttcgcatgaccttgtggcccgatttgcggcgtatatcatggcaggccagtagatgccttgacggatcaccnttgcagctagggcccta

SEQ ID NO: 53860 - DNA, 358 bp, Zea mays
agcttgatgtttaaaatgacatcagcttcttccaaatctttcatctcgaaattgctcgatagaagacttttaacttcctcatccattgagatttgatccaaagatcaagatgtcatcaacataaaggcacagcataacagactcacccccaccataccgatagtatacacatgtgtcagattcatttacaacaaagccagctgttgtaagagtattatcaaacttttcatgccattgcttaggtgcttgttttaggccatacaatgattttatcaacctgcacaccttgttctcttgaccatccgcaatgaacccttctggctgatccatatagatctcctcatccaactctccattt

SEQ ID NO: 53861 - DNA, 398 bp, Zea mays
tgtgggctcacttaattgctctctagttgttagagatgtagagggagagctcactgcagaagaggaagacggcggcgtctgccccaattgagctcagagatggatgagagtggttggtggccaatgcaagttggagaggggctccgggtactccttttataagtgcctggggagggggcgatggacagctggcctccggcaggcggagcacaacggctggcaatagtggcggcgatgggactgcacggtgaggggagggggcggtgccgtgcatgtacataggcacaacaccaaggggggtgaggcagtgcctaactccgctatggctatcgacggcgggaggaggacgactgtggtctgttatataacctccttctttgtgctcccgttagggggga

SEQ ID NO: 53862 - DNA, 353 bp, Zea mays
agcttaccgcatttgaagcacgaacgctttttcttggctttggtcttgcttggctgtcccttgcgacctttaagcgccgtcttgatcttttgatgatgagggccatctcttcatcattaaatccggccgcctcaatttgtgccaccctgctaggtagcgcctccttgcttcttgttgccttgagagcaaggggttgaggctcgttgatcggtccattcaaggcgtcgtccacgtatcttgcctccttgatcatcatccgcccgcttacgaattttccgagtacctcctcgggcgtcatcttcgtgtacctgggattctcacgaatattgttcacgagatgaggatcaagaacg

SEQ ID NO: 53863 - DNA, 396 bp, Zea mays
tgccccgagactctgttctgatggttcttatgagtactatttgttggtctttggtctcaaatgctatacatcaagaacaaagcaacacaattgtaacaattaaagaccttcttcctttgaagcattatatccttatggatataattatcttcagatgaagggcatgaaggacataccttcatcatatcagtaaatgaacataaattaggggttatgaaaatcagagaaattaaataatgattatatatcagcaacttctcattctataaacatgagttaacattcatattatacattgataccttcggcttgccggaaggtgaagatacgagagtgacgtcaaaatgattaccattcagcgtgagcagtacaaggatactattaatctattataag

SEQ ID NO: 53864 - DNA, 359 bp, Zea mays
  unsure (1)..(359): unsure at all n locations
agcttagcaagngcgagttctgtatcagtgaagtcctgttcttgggtcacattataaaccaagaaggattggctgtagatccaaaaaaagtaacaactatcttggactggaaagcaccaaaggatgtccgaaaaattaagagtttcatcggaatggccggttattatcggtgtttcattgaaggtttctccaagattgctaggccaatgacatccttattggcaaagaaggttgagttcaagtggaccccagcatgccaaaagtcctttgagacattgaaggataagttgacaacgacaccagtactgattctgccagatgttcacaagtcattctcagtatattgcgatgcttcgtat

SEQ ID NO: 53865 - DNA, 415 bp, Zea mays
  unsure (1)..(415): unsure at all n locations
tcaagtgtttcaagagatagtgatgtcctattttttcctagaattctaccagctgcactaaaggcagattctgaggataccgtactcacaggaatagccaaaaaatctctagccatcaaagacaatattggataggcatctatgtttttcttccaccatcctaaaacattgaagttttcatccggcttgacaaggatcctagggtcctccaagtaagtatccatttctgttcgctctggacgggcatncatgggatttaacttcgtaaactggtccatcaattgcaacttctccttttcatacaacaaaatgcaatctgaacggacagtctgtcgaccgactaatcgaaaagatgggtggcagtaatttatcatttctttccaggatggatcttcacactttctaaatgaaatct

SEQ ID NO: 53866 - DNA, 348 bp, Zea mays
agcttcacctattcaccccctctaggcgactttcagtgtcacctaatacgctcgacaaaggacctggtaaaggggcctacgggaagctactttgtcgagtgtcagtacagtggacactcggcaaaaagtgagactttgtcgagtgccactctgtgggcactcggcataagctccatcgccgtgacctggcatcgtgacaatgacttttctttgccgagtaccgggtgacactcagcaaagtctttgtcaagtgcctgataaaaagtacttggcaaagaagttgttgccgatgtgatgtcaattggtattagagcccggtacttcattagagtctaacaactcgaagtg

SEQ ID NO: 53867 - DNA, 408 bp, Zea mays
  unsure (1)..(408): unsure at all n locations
tcggagaatcatatctttttaaccataactccgattttagtgatnctcaaacctacgacctagtagcagcgtgtagaatattcttacgnttttgttatcatgtttggngtattgttatgtttatgtactccttgtctatttgaatctatggctacgagtagcattaaggtcacgagataaattgaagattaactttggagaagtacctgcgaacctcgagtataaggcaagttgtgcccttgatcacttttctctctacctaataatgttcatgttaatcactatgacatgctcaggttaatttgatgggacctaataggtttcccaagtattgtttatcccgcaccttgcaaacaaatgaactattgggtagtattgctactgctctacttggttttgggaaataat

SEQ ID NO: 53868 - DNA, 350 bp, Zea mays
agcttcatattcagcaatattcactacactacggttcacttacagcgacctacggttggttgctaaaacggccttcagcgacctacggttggttgctaaaaacttttagcgacccataaagatggtcgctgtaagtgccgtcgctaaaggctttagcgaccgacatctttttagcgaccgaccgtccgtttctaatattgtatatttagcgaccaaccgtgagttgttgtactatagatttagcaaccaatcgtgagtcgttatactatacatttagcaaccaacagaaaattgcccctagttatagtcgttaataatgataatataccattaattagcattcaacaact

SEQ ID NO: 53869 - DNA, 408 bp, Zea mays
tgtgaagattcttcattcatacatgtgctattcggcgatgccagaaccagcccatgttagtcttagcaattaggcaagtgtcaagtccagctcttccaaaatctactaagtataactgaccctctaacactcccttaaatgctattgaatcatcacatcttctaaagacagtaacacctggatccgtataaagacagttgtagcccattttacataattgagaaacagaaagcaaattgtaatctaaagagtctacaagataaacattagaaatggaatggtcaggagatatagcaattttacccaatcctttgaccaaaccttggtttccatcctcgaatggtgattgctctttgggatcttggtttttctcataggaggagaacattttcttcttccctgtcatat

SEQ ID NO: 53870 - DNA, 363 bp, Zea mays
agctttgacatttgtcatgccggcgaaaaagtcatcaaggccaagggctgcattgcagccactggatgttaatcaagatacattacgcgaactagagccagaaaaagaaggctaccaatcccacacctcaagaaggagagttagaccaagaaatcatggaccttgaaatcatccatcaacaagttcagaggaagaaggaaaagatgcttcgtctcaccgatcttcagaagaaaattgatgaggccgctaaggaaatgcgtcatatcacccaagatgaccaagaccgaaggcctcaatatagagagcttcgtcatgacaattcgtacaacgatgatgaatgttatgatgatttccatcatggta

SEQ ID NO: 53871 - DNA, 408 bp, Zea mays
  unsure (1)..(408): unsure at all n locations
ctatgaaactcagctntgccagatcagttctgatgtgtggttgcgttctgtagatgtcatgagaactattgcgtaagaggaaggaagggcgttgctcagcanggagcgagccgctccgcaggatgaggtgcccagcagcagcacctgccgtccccgcccccgatgtcgatcgacagatgttctgatgcgactcngcagttaagctatcgtcagactttggccccattcacacagcagcagcacaacagcacaagcaccccccacctcagatgctaaatgcctaagatagcgtgtgaattatgagggtcatccccaacgttcgtcatctttgacccatgatgctgaaatggtgccactggagcggagtgctaccgtatgcagacggagaagtttgatgccccgctgtga

SEQ ID NO: 53872 - DNA, 359 bp, Zea mays
agcttaacaagtgcgaggtctagatcagtgaattcctatttttgggtcacattataaaccgagaaggattggctgtagatccaaagaaggtaacactatcttggactggaaagcaccaaaagatgtccgaggaatcaagaatttcatcggaatgtccggttattatcggtgtttcattgaagggttcttcaagattgccaagccaatgacagctttgttggcaaagaaggttgagttcaagtggaccccagcatgccaaaagtcctttgagacattgaaagaaaagttgacaacgacaccagtactgattctgctagatgttcacaagccattctcagtgtattgtgatgcttcgtata

SEQ ID NO: 53873 - DNA, 428 bp, Zea mays
  unsure (1)..(428): unsure at all n locations
tctanagggagaacatgtgataggtctaaccaatggtcatttcgaaaaatatataccttgtgcagcttgtcaagcagggaaacaggtgggaggagcgcatcacagcaagatgtgatgaccacttcaaaacccctggagctgctgcatatggatcttctcggacccgtcgcctatctaagcatagggggaagtaagtatggtctattttttgttgatgacttttcccgcttcactggggtgttctttttgcaggataagtctgaaacccaagaaccctcaagcgctttctcaggagggctcanaatgagtttgagctcaaagtgaaaaagataaggagcgacaacgggtccgaattcaagaaccttcaagtggaggagttccttgaagaagaaggatcaagcacgagttcttcgctccctacacaccac

SEQ ID NO: 53874 - DNA, 308 bp, Zea mays
agcttaactaaaataatcccatcttcctgccttatcacatccaccacatcttgggagcaagaacgcgacgatggatccgggggacacgctcgtgcggcatatccctgaggccagcgcacagcgaaagcccccatgaagcgcccatggcggcgaagtgggaacggctgctgcatcggatcccgaaggcacccacgtggcggtggccccatgaggtgtgcacgacaatgaagtgccaaccgtcgcgacggcggatctcgggagggcaccagcgtggcaacgtctccctaaggtgcacatggaaccacccc

SEQ ID NO: 53875 - DNA, 294 bp, Zea mays
tcggcgaccaagtgatcaagttcttcgagttctacgatatgaagaccctgacatctgttttggtgaaggcaagtgtcctctgacccattatgtcccatttacttatatacactgtcccgcatacttatgaacaaccctaggatttactagctttctatttaccttgtccttgatttaccttttgaagtactaatgtaagctacatgctagcgctttactttaatcaatgaacatgatgagatacaatgatgaatctataatttattctggaaagaagatatacttgggggattt

SEQ ID NO: 53876 - DNA, 336 bp, Zea mays
agcttgggatatctatcaaatttgaagctgacaagctgaagtttggtctgttcacaatgtttccatgcgtgcatccagccttcaaaaaagcagcgttgtgccccgagaagctaccagggcgcagaagtcggcgtgcccaccaataacttcgtcaagggtatcaacctcgccttcaatatgttctaatgtccttggcagattttcaactgaaggtgtaaatttcgaagagctagctccgacagagtgaaacacgtccttcagccgctgcacacatcggatgccgaagcctaagcatttctcctgaagttctgtaaaggatttctgcaaattgagtac

SEQ ID NO: 53877 - DNA, 91 bp, Zea mays
tatgtggtgcttcaaggtgtcagtccaagggtggtccctcttgagagtgacattaagttgctcaagcaaaccagttgtggtgagcaatggt

SEQ ID NO: 53878 - DNA, 367 bp, Zea mays
  unsure (1)..(367): unsure at all n locations
ngcctgcggggccctaagaatttttctaactctgggttatcaatattcccatttttccttctaatattgagtgttgagtggttttcttatttaattcaaaactttagaaagaaatacagaaaccatgggttctattatttttatctgatagttcataaattccagaatctagcaaaattggtttgaacatttttggatgattattcttcgagttatgcatttatttagctatctgttataacaaaaagaaaagaaattcgaaaatggaaaagaaaacaggtttacgctgaggcccctgnggtttttccttttcttttctcacagaacagcccttggtccactattggcttgggtcactgacattgcg

SEQ ID NO: 53879 - DNA, 366 bp, Zea mays
  unsure (1)..(366): unsure at all n locations
tgacattgcctccctattggaagccaatgccatccttattgccagggcgtcgtcctctataaagcatactacgagcaaatttaaatntttcattttcaagttcatgctcggcaattttagcatctaagttagctatatgatcattttgttggttaattaaaatcatgtgatcatgaatagcattaatatcaacatctctacatctagtgcaaatagctaatgacatgctcagtggtagatgtagagggtttgcaagaattaagttcaataatcttagtatgcaatatatcanttttatctctaagatcggagattgtaacattgcaaacatctagttctttagccttagtaagcgaattttcattt

SEQ ID NO: 53880 - DNA, 356 bp, Zea mays
agctttggctcaacaaccttctgtgccactattctgcacacaaatgaaagtataaggtaaaaagaaataaaggaaaacaaaggtaaagacaggtaaaagtctcataccgaatcaagcaattttcgagcttcatacccagccagctcgtgcccgcccttagcccaaatttgagtaataaatatgttccctatgcttcaggcttcggacgggatatcaattatatctgacgccgaaagattaaaagttggcttgttcaccaccttggcgtgagtacatcccgccttcataaacgcagcaaccgtcctgcgagaagctaccaaggcacagaaatcttcgtgcccgcttataacctcgtc

SEQ ID NO: 53881 - DNA, 103 bp, Zea mays
tctgttcggtgaccaaccaataacaccttataaagtaatttcgggctcaataagaaccttaacttcgacagaaaatgaaagtgactgtccaataacaaaagat

SEQ ID NO: 53882 - DNA, 351 bp, Zea mays
agcttgaagccatggtaagtagcataagccattaatatacgaattgactcaagcctagctacgggtgcataggtttcaccgaaatcaaaccttcgacttgggagtattctttggccacaagtcgggctttgttccttgtcaccacaccatgctcgtcttgcttgttgcggaaaacccatttggttcctacaacattttgattaagacgtggaaccaaatgccatacctcattcctagtgaagttgttgagctcctcttgcatcgccaccacccaatccgaatcttgaagtgcttcctctaccctgtgtggctcaatagaggaaacaaaagagtaatgctcacaaaaatgtg

SEQ ID NO: 53883 - DNA, 412 bp, Zea mays
  unsure (1)..(412): unsure at all n locations
ggtgaaggttcttcatccccacatgtgctaagtggcgattccacagtcagcccatgctagtcttagctattaagcatgcatctagaccggctctcttngcaaaatcaactaaataaagtttggccggctaatacacccttaaaagctagtgaaccatcacttcttctaaagacagacacatctacatttgtgaataaacagttataccccatgttgcataattgactaacagatagtaaattatatcccaaggactcaactaaaaacacattagaaattgagtgctcattagaaattgcaattttacctaacccttttaccttgccttgattcccatcaccgaatataattgaatcttgggaatccttattcttgacgtaggaggtaaacatcttcttctcccccgtcatat

SEQ ID NO: 53884 - DNA, 360 bp, Zea mays
aactttatcaaatggacgcgaaattatgccttttctcaatgtgaccacaacaaaggaagaaggtctatgtttgagcaaccctccggctttgaaacaagtgagttattctaaccaatgtctaataagctctctaaaggcgcttttatgggctcaaacaaagccccaagagcaattgtattgaatgcccttataaatttcccttaatggttaatggctttcaaagttggaaaagcccgaacctacactctttactaaaactcttgaaaatgacttggttggtatggccaaatttatgctgatgatattaatatttggggtctaactaccagtcttcatgtgaagaggttagttggattatta

SEQ ID NO: 53885 - DNA, 418 bp, Zea mays
  unsure (1)..(418): unsure at all n locations
tgacgattgggtgttgtttgttcgggtgctgccgctactatcggacctatgcctcaatttggatgtttgacagttgcactntgttcgttgtcgatcttttagccctccagtagtgcacccgactctcaaaagctcgggtgttgtttggttcgcatatttgtaacttgatgggtaactgataacgttaaatcacgtttgtttaagtccgacagttatcggataccacactagaaagggatatcggtctattcaaacttattagtgatagtatttgaacgtgaatcattactattatcatttacgttacattgtatgaacaaaaagacatgttggtctttatgccttgacacgctgccttgaccgtactacatcatttgcaaagcgacctttcgctcgctttcaanatgccgctacgaca

SEQ ID NO: 53886 - DNA, 355 bp, Zea mays
agcttcgggaaccccatacttttagccatcttccgattgacaggcaattctttgctgtctgggaggccatataagaagtcatcttcgtctgtgccattgaatactaaagcccccttcagatacttcaattctcgggcatagtgattagcttcaaaaatctcttcttcagataacctttttcccgaagcatgtggtataatataatcaagtacttcggaagttgcttcgggggcagcagtgctagtttcttcagccaaaatttgttctgctatttctgttttttcggcttccaaagatttcaccttggcgggctctgaaggcctagcttcagtttcagatagttgctttgaagctt

SEQ ID NO: 53887 - DNA, 364 bp, Zea mays
agctttaaaaagaattcaatggaaccccaaaaataaacctaccacttaacttagctaagtttgatccaatttaccaagtataccacccaaaagtctcgtataagtaaggtttaactctatctaactcaagtagatcatgcaccatcaaaagttgaaattactaaagcacatatcatatcatgcatctatcttacgcattgcattcattagattgtaatctcgccgacggagagtgcgtgctcatccccgagcaaggaactgtccaagaggaggaccaggagcaagcttccgaggctgctattgaggatctccctgcagccctagctattgaaggcaagccccgatttatatgcataaccgtatt

SEQ ID NO: 53888 - DNA, 268 bp, Zea mays
tgagaccgagcgagcagaaattatggcgcgcgtgcattgtaactccacggcggggtcgcgacaggggaagacggagcgttcgcgcatccatggagaaagaaaaatgccagagcgagcatcgggcaccgccatggagattgggactggacgacccgatggagcaacagcggccagccatggccggacccgatggggccagcgcccaatccgagcagcgcgtctagggcagaacggcagcagggagatggatggtcggcactggagctgc

SEQ ID NO: 53889 - DNA, 347 bp, Zea mays
agcttctcctgtctggaataatctaccgttttccggacagtcgacttagaatagatgtatatgaactttatgcacctgagaaatgatcaattaggcaaactagttagtccattagatttgtgatgggcgtcaaacaccaaaatcgattataggaaatggttaaggtcatttccctttcattaatatcatttttatgtaattgttatcctttaacactttattggataattaaagtcataacacagggtcttgtactagtgattatcacacagttaagggtgaaaacgaaaacagtaattttcggatacctggaaccgttttttgacactttaccaaaatttagagcc

SEQ ID NO: 53890 - DNA, 425 bp, Zea mays
  unsure (1)..(425): unsure at all n locations
tactcatccncgtctatcatttcaatctcggtcacggctatatgcgtgatctgctgaccgtagcctaatagcgattacaatccagtgaaaatccaggcagtctattgtgtcaatttggccagataaaaccatggcgtctgggttcatttcgacttctgttcggacttaagaacaaaccatttggaacgattcttttgtaacaanaaaaaattgatttactgatgtgttttctttggtaacgactcatgtcttgcccgcaggaacctcatgtgtggcagcacgtgcgctgcttatgagtctagaacactgatctggaaggaggtgaaggtgaaggcatggtgtctatgtgctatggcgactggcaagttaatggggccgcatggatgactgctgctcttgtttttttaagctcgtctgccgtatgc

SEQ ID NO: 53891 - DNA, 352 bp, Zea mays
  unsure (1)..(352): unsure at all n locations
agcttgcatactttcttcagtcatgggttcttttntgtgtgtcctatttgggtagcctttatttcttccagcaaaaatgtgccgtagtcagataagcacctggattatttaatccttttacatttttgcattgtatacatttgtaccgatttgttggaaaataaggttgtcagcagaccatgcatacgatcgtgcaaaacactattttacaccgtagacaacaccatttacagagcgaagtttgaaatagaagatgagataggagataggacgagtaagccgctagagacatcctaacaagtatattaatatggtggggcagtggcagacttctgcaaaccatttatggcac

SEQ ID NO: 53892 - DNA, 412 bp, Zea mays
  unsure (1)..(412): unsure at all n locations
nagcttggtgccaatggagaagcagaaatccttgtttgtcttttctgtcaaactgctngccgntgncaactgtgagttcggacggtactccgaagcggcaaacaatgttttgccaaaagaatttctgtgcagtctttgatgttactgtggaaacagccctcgcctcgatccatttggtaaagtactcgacagcaacgaaggtgaacttgaggttcccctgagccgtgggcaagggcccgacgatgtccangccccagcgctggagaggccatgtgtgggtgatcagttntgtgaattgcgaggggctgcctgatcgaggagaaaaactttggcaggcttctcatgaccttgttgacccgattgcgacgcagatcattgcgggccagtagaaaccttggcggatcacctttgc

SEQ ID NO: 53893 - DNA, 459 bp, Zea mays
  unsure (1)..(459): unsure at all n locations
ccttagaaactaagcttacctacccaagccttatattatgtaagtgggattgattatatcaccattgnttctaatgattggtggtgtcaaaccncccgagtcctaaaacttgatctctttaatgtgtataactcaatttgagggtctttagctgattctgaaaaaacactcttcctaaggctcgagccgagttgcatgagatgatttccgacccccgagccaaggggctcgatgatagttcatctatcctattatgtttcttataaacaaaattgcattaaagattccaccatatatcaagagatttagtagtatgctactttgatcgaagttttgatgtgcatagccgagtccaatgactcagctgttttattcctccaaaggaaaaggatgtggatcctcataaagatccccaccttaagaggccaaatcctaggatctagtagttgttatacccct

SEQ ID NO: 53894 - DNA, 434 bp, Zea mays
  unsure (1)..(434): unsure at all n locations
agcttctcctgttcggaataatctacggnattttatacttttttattanatagccngagatgaacctttggcacctgtaaaatatataatctagagcaaactagttagtccaattatttgtgttgggcaattcaaccaccaaaatcaattatgaactaggtgtaagcctaattccctttcaaaaaggacgtcacttcacttcatttccaattgtacaatgaacagtcgcaagcaatcgagaccgttttgatttccatgaagaagcatatccctagcacaacgcggcgaacacagcatcagaggtcagtaaatggattgatcaccgcttcacacacatcattacactatgtaaactcagggactgttttacggaaaatacaacanaaccacaaattgngcatacccattgattgggcacacccattggtgccatg

SEQ ID NO: 53895 - DNA, 448 bp, Zea mays
  unsure (1)..(448): unsure at all n locations
tggtcattntattgctaactgtcccgaaaatgatagtgacctttattttggataaatgggaagagagagaacaagaaggtttacaagaaggccaaaggcgaagcacaccttggaaaggagtgggattcggattgctcttcgtccgactccgacgacgaaggactcgccgccactgccttcaacaaatcggctctcttccccaacgagcatcacacttgcctcatggcaagggaaaagaaggtaatcactcgtaatgctaatacttatgattcttctagtgatgatgaatctagtgaggatgaaattgattactctagtttattcaagggattggatagaactaagatagcttagattaatgagttgattgatgccttaaatgaaaaggatagaatcttagagaaacaagaagaccttttatatgaagaacatgactaaattgttagtg

SEQ ID NO: 53896 - DNA, 456 bp, Zea mays
  unsure (1)..(456): unsure at all n locations
cacctgcggcatgcaagcttctgggcagcagcaaagntcttttcggtctttatcttcnattgtcataggcgccaggggcttcgggggaaggtttggagatcacccaagaaaaatttactgtctattctgtggtgaagacgagggccataccaccaggatgtgccacgttaccatccataagcagaaggagatagcagaagcagcagcgcaacaaagtcagccgaagcaggtcatgcatactgcttcgtatcattcgccttatattctagaatatgtaggcaaccaccctgcagcttctgttgcttcggcaagctaaccccaagcatcttggcagcagcctccaccgccaccaccaacacaaagaggtcagcagtgtcacacccggatttcggggcaccaagacccgggcgcgatcataatcaccaggtgtgctgggacccagtctcacacatatga

SEQ ID NO: 53897 - DNA, 452 bp, Zea mays
tagaaaaatctggtatgaatcggcggtaatatccagccagtccaatgaaacttctgacctgatgaaccgtggtcggaggtttccactccaaaatgtccttgactttgctgggatctaccgcaatccccctggcagacagtacatgtcccagaaactgaatttcctccagccaaaacgcgcatttgctgaacttggcatataactgatgttctctcaagcacgttgacacgatccgtaaatgttgggcgtgctcctcttcattcttggaatatattaaaatatcgtcaatgaagaccaccacaaacttgtccaactcgggcatgaataccgagttcatcaaatacgtgaagtggacaggagcatttgtcaatctgaaagacattactaggtattcaaataatccatatcgcgtagtgaatgcgcgctttggtatatctttgggccgaataccg

SEQ ID NO: 53898 - DNA, 425 bp, Zea mays
  unsure (1)..(425): unsure at all n locations
agcttaaagtcggtcgtcgatcgtgccccttttcttcttttgccctctcaccttccctctctataaaatggcaccgagtgccggaccactccaccctatcaccctacccttgctctcacacgctcctcctcgctgctcgctcatctgtgtgtgtgttcgcgccatcacgccgctcgtcgtgattggaggtccctgctccttccccgtcgccgacgaggacgaccacaagctcactggcgccccttcgacgaatccctgcctagagcattgtccgccatagagaaaccggcccggcctcaagctcgttgtctcctctgtcgttgaagccgagagccggaggtagaagatggtcggtttctgttttagtccctgnactttgtaaatatggcgctcatatttataccagtttaaaaaaaaagttaact

SEQ ID NO: 53899 - DNA, 439 bp, Zea mays
tcagctccatcaatgttatggattgcttttgagtcagtccagttttcttctgtccttctggcagcttcctgacttccatgaatagcgatgggtccttgatccgaacgtatcttcatgcagagataagcaggatgaagaattgcttcgaaagcattgagggtgccacgaccaataatagcattgtaagggtattccatgtcaacaatgtcaaacacaacttgctcagttctagtgttgttgatgaacccgaaggtcactgacatggtgatcttgcccagtgctacaatttgtcttcctccgaagccacagagaggatgtgtggcatcatgaatcttatcttctggctcttgcatttgtctgaaggccttagcaaatatgatatcagctgcactacctgtgtcaaccaggacactgtggaccagaaatcctttgataacac

SEQ ID NO: 53900 - DNA, 437 bp, Zea mays
  unsure (1)..(437): unsure at all n locations
agctcgagacgggagaaaccgcaacaagngttttactccatattataggatgccctaaagcaataaatgaagaaatcaacatgaacaaggaaaaaggtaaaaattcaattagtcatgttgtttgtatcgatcatctctctatgtcatccaagagcaaaaagggaagaggaaaaaggaggtgcttcaagtgcaaggaattaggtcacttcattgcgtcttgtccacacaaagacaaggatgaaggaatgaggagatgttttggatgcaacaataaggaccatatgatcacttcatgtccgctcatgaagaatcaaagacgtgcacccttcaagatgaccctcactaagaaaaaagacacaacacaagtgtcatgtcaggttgagcgacgcttctgctacatgtgtggtgagcatggtcatctaccttaggtatgtaag

SEQ ID NO: 53901 - DNA, 457 bp, Zea mays
  unsure (1)..(457): unsure at all n locations
taagcttctaagggagaacacgttntaggactaacaaatgttcattttgagatttacagggtttgtagcgcatgccaagcaggaaagcaagttggcgctcatcatccacacaagaacatcatgacaactgacaggtcactcgagctactccacatggatctattcggctcgatcgcttatataagcatcgacgggagtaagtactgtctagttattgtggatgattattctcgcttcacttgggtgtcctttttgtaggaaaaatcacaaacccaagagaccttaaagggattcttaagacgggctcacaacgagttcggattaaggatcaaaaagataagaagcgacaacgggacggagttcaagaattcacaaatagaaagctttcttgaggaagagggcatcaagcatgagttctcttctccccacacacctcaacaaaatagtgtagtggaga

SEQ ID NO: 53902 - DNA, 285 bp, Zea mays
  unsure (1)..(285): unsure at all n locations
ttaccctggccttcatatggtggaccaccttggcacacaaacaacaaaatctgctacttcctcacctaaaacaacgaagggataaaccctgagtatggaaataactcgcaagtcttacccgactaaagaaaagactctcacgggtatgctggttatatgggagtcaaggtaaggcttttcaatgatcaaagactctgttttgcagaaatgcttactaaagtggatccttaanaatccaatttatttgtcaggtaagtacaatacctgcactagagtttttctccc

SEQ ID NO: 53903 - DNA, 436 bp, Zea mays
  unsure (1)..(436): unsure at all n locations
agctttaaggggcgacagactttttctcangttatattacagnggccacctctagcttctttgcgacctctccatagaaaacctcttctgattttatcaatagcttccaaaccccactgtgggatatccactgccattgctaagtataccgtcatgctagtaagaacatgctgaacttgcactcttcttccagcccgtgtcattaagtcagccttccaattaggaagctgatcagctatcttatccacaaaaggttggaactgttgctttgtcaacttgtgtaaggataaagggagccccaaataacggcacggaaaggttgagatttcacatggcatcanggtctggacttcgagcagcacctcctcagagcatctaataggatacacatttgacttttgcacattattgtgtagccccgacgcgtctccaacag

SEQ ID NO: 53904 - DNA, 452 bp, Zea mays
  unsure (1)..(452): unsure at all n locations
actaagcttggatcaaagatttcaatctagcaangnnnggantatgtctacgtacttctagtactaccactggagcagtgctgcaaatcagatctaatgtatctctgcctgcatggctggcatggcttggctagtttaccccaaaggcctttaaacccacgagttgaaggccgtgcgcgtgctgccgtgcgcatgcggtacgacatccttgcacgtgctgggtgggagaagaaaataaacgtctgtgcccctgctgctacgacttgtattaattcactccgtccattggaaaatatcaattctagctttgaacagctagaaggtacgcattcctttccctttggtatttattagtaaaaaaaaattatagtgccggtcttagagttatttgcactggcgtttttcagtacccgcagtgatcaagacaagtgaaaatctgcattttcactgtc

SEQ ID NO: 53905 - DNA, 428 bp, Zea mays
agcttaacggatggggatgaagcttattacttttatgtgaaaaaactctacagaaactcttgaattatccttgtgaacaatattgtaatttaagaatcagatactactctgtaaatttgtccataccttggaatatatttttacctttccatccatgtatgaactgctttgatgtggacgaaacttgtattttttgagccgaaggcgaaaaacaccttcccttcttttcgtacacaacgaagcataaatctgcttcctttcctttcgccgaagccttatcattagattcaaagcaactgtctgtatttgtatgatatgatgatgatgatcctatgtatttctaaatgaatgtatatgagtgcaatgattgatgtgatgtattttgcaaatgaatgtccagacacacgcttacgaagccacatcaaaac

SEQ ID NO: 53906 - DNA, 446 bp, Zea mays
  unsure (1)..(446): unsure at all n locations
tgtgtcagttcttctgcacaagattattgatgcccatataattgattanggtatgaaacatattcatgagaaaatagaagccagcaaagctaattgcttcagaaaggatgatcaaggcataatatggtttaatgatcgcttagttgtgcctaaggatgcgagagtccgccagcaaattttggatgaagctcatcttagtcgatattccattcatcccggaagtactaaaatgtatcaagatttaaaacaacattattggtggacaaaaatgaagattgagattgcacactacgtggcaagatgtgacacctgtagatgtgtcaaagcaatacatatgaagactgctggtccattgtaatctttgcccatcccaacttggaaatgggaggacattagcatggacttcattgtgggattacccaagacaacaaaaggatntgattcta

SEQ ID NO: 53907 - DNA, 424 bp, Zea mays
  unsure (1)..(424): unsure at all n locations
tgaggcatgcaagcttctcccggcgccagcgccgtttatatcctangttttgtccggcgcaagcccctgcctggctggaaccgcgccgtcaccctctactttctcgccttagttggatccgtcgctgccgcggccttaccggccggatccatgttgccgcgtccttctcagctcgatccgccgtcccattggctggatcgtgtcttcccgtccggatcacgagctgccgtggccttcccgggcggatccgacattcaccttcttttctgccgcgggcgcggacaccttgaccagcgcagccgcgtgcgctgctgtccgcctccctggcggggctccttgacgtctggtcaatacgaaaagcaggaaggtcggcctgccggtgccctactgctgtgtcgccctgccgatcgtgacactcgaacgt

SEQ ID NO: 53908 - DNA, 446 bp, Zea mays
  unsure (1)..(446): unsure at all n locations
tctcaactcgctctaacaaacacactgacgagggtggccattgtacattaactgaagaagatcttatgtacgttgcaccacgccgccggtgatcttgcgctcggatccgcgccggccgccgtgattcgtacactccgtactcagggttttcaaacccttgttgttgtaggtgaggaaaagcagacttttgttgtttttgttctaaggtggtacccaagaatgaaccccagcagtgaagtctgtcgcgggaggatgttggcctcccactacaaaaacaatactcttttatgcgggagggtgttttgcctcctgcgtctgtaataataatactttatgcactcctaagtaccctggttttgaataatgatactcttcctctatatttgatgaatgtaaattaaattattggaatctgcttncgctcgttctttcctccgatgtgatgg

SEQ ID NO: 53909 - DNA, 424 bp, Zea mays
  unsure (1)..(424): unsure at all n locations
agcttgaagcaatcgaagatatatttttatgttatatttgggaggnctagagtatacctctgaagagttcttaatatactatggatgctaacctggcccctacatatatgtggaagtaggttctctgctgaaagaatacatacctgtaacaagctggggattagaccagcatacagtgctggtaccccaccttggtcaacaatcttaaggcatgttgcaagcgcattcattctggttgcttttacttgcatctgnagctgcctacggaccacttcaaatgggtatgtagcagcttcagcacagcaaccagcaatggccccatagagtaaagtcctcacagtacccagttcaagttgatccaatgcatttgtctcttggttttgttgcttcatcatcgatacccttttcttttcttcaggagaat

SEQ ID NO: 53910 - DNA, 472 bp, Zea mays
  unsure (1)..(472): unsure at all n locations
ctattacggacctataaaactcagcttctaagggagaacacattntatgattaacaaatgttcatttttataaagacaggatttgtagcgcatgccaggcagggaagcaagttggagtccatcatccacacaagaacatcatgacgaccgacaggccgcttgagctactccacatggatctcttcggcccgattgcttacataagcatcggcgggagtaagtattgtcttgtaatagtggatgattattctcgcttcacttgggtattctttttacaggaaaaatctcaaacccaagagaccttaaagggattcttgagacgggctcaaaatgagttcggcttaaggatcaagaaaataagaagcgacaacgggacggagttcaagaactctcaaattgaaggcttccttgaggaggagggcatcaagcatgagttctcctctccctacacgccacaacaaaatggtgtagt

SEQ ID NO: 53911 - DNA, 420 bp, Zea mays
  unsure (1)..(420): unsure at all n locations
agctcgagtcaatcatttttctatgtttattatgctcaaaaagataatccgggtgtgaagcacataccagagaagataacggctggagtagcccaatgtttcaaggaagactatcaaagtgtgatatggtttaaaaaccgcatagtagtgccaaagaacagaaaactccgccagcaaactcttgatgaagcacatcttagtcgttattctattcatcccggaagcactaagatgttccaagacttanagcaacattactggtggacaaagatgaagatcgaaattgcacgctctgtggctaagtgtgacacttgcagacatgtcaaagccatacacatgaaaactgcttgtccattacagtcgctaccaataccaacatggaaatgggaagacatcactatggactttattgtgggatgc

SEQ ID NO: 53912 - DNA, 415 bp, Zea mays
  unsure (1)..(415): unsure at all n locations
tttagctctgaagcttcggatttgaaaacagttntttagtattttctaagatgtctgaagctgctaagaaggctgctgctgagatgaagttgagtcttgatgaagagaagaacttggggtttcttatagcgatgtcgaagaccaacacagaaaaaatcaccaaggagattctggaaggtctgtctgaagatactggtgacagtgaaagttatgatgtggacagcggtggcgaagactctgaagatcgcccctggcgaccaagccattcagtttatggtaaatcaactatcaaagagaatcatcttgttaacatgagaggaaggtatttccgggatttgtccgttgtgagggccgacgaaggggagaagacttgtccacaccccgaagagaatgaagtcgtagtgttccgaagctt

SEQ ID NO: 53913 - DNA, 438 bp, Zea mays
  unsure (1)..(438): unsure at all n locations
cttaacaccgagctgcactgcaggacaattataatttattttttttggatgagaagtggtcacccaagttttgttgatgaagcaccagaagtccaatcaaggaaggaatccatgtggaagttcataaaagaaaggtttgcgtgttggcatcaatgcttcttcaataagctagctaccaagcgaaacctataagcctgaagatgatcttgagtagcccgaatcagcgtttgcaatcggcaaccagatgctcctcaaggccagatcttgttgaagttccatctcctcgaagagttgcaaagtgaagatatgtagctgaagtaaagctatacccataacccttctaagccgaatctcgaggacgagattcattttaagtggggtagatttgtagcatcccaaaaattgaaatcctgaaattntctcacacttgctctaaat

SEQ ID NO: 53914 - DNA, 427 bp, Zea mays
  unsure (1)..(427): unsure at all n locations
taatgtccacacaattgattaggagttagcacaatttagcctagtggctagagaggagttcttgcaaggcacgataaccacaagaagatcaatcacagatagacacagtggtttatcccgtggttcggccaagttcaacacttgcctactccacgttgtggcgtcccaacggacgagggttgcaatcaacccctctcaagcggtccaaagacccacttgaataccacagtgtttcgctttgtttgctttatcccgctcgcgaggaatctccacaacttggagcctctcgcccttacactttgatgttcacaaagaagcacggagtaacagagggatgagcaacgcacacaagacacanaatcagagcaacaatacgcacacaagtcacaacacgagctctcaacacaactcanagaagtttctactc

SEQ ID NO: 53915 - DNA, 417 bp, Zea mays
atccaagcactgagctgcagcttattctagtgccccagaccacattttaccttttgtttatgttcgaaggttcctgcgtctaagggcacaagcaccaacagtgcccaatgaaattgtcattgaggccatgattaaggggcttcggccgggaccttcagctcaatactttgccaggaagcctcctcaaactttggagaagctactccagaagatggacgagtatattcgagctgataatgacttccgccaaagaagggaggaagcatacaggttctctgaaatgaccaggggcttcggaggaagattccatccgaagcacgtcaggtcaattcacaactctactcagagtgatgatagagggagtcaacagcaaaggccacagtactcctcgcaagtttcggggcagcagcaaaactc

SEQ ID NO: 53916 - DNA, 371 bp, Zea mays
aacactcagctgccggccgaggtcggactctgcttatctggccatgatctctacgctcttgcgacacgcggagccaagatcttcgtcttttggacctctcctccgggcctccactacagcctagctcggggcctccgactcgacccgagcagtgcagcggtcgcttgcggccttcgacgacgttccgcgaactctctaagagcctgaccgggacgcactctgagctcttaccacagctgaacgagtcatagctggaccctcggagcacgaatcaggggccggtcgctcactgtgttgcactctggctcggcgcctgcctagctctagttgctgactggcctgactcttgatgggcacgctcacactctgcg

SEQ ID NO: 53917 - DNA, 421 bp, Zea mays
  unsure (1)..(421): unsure at all n locations
agcgngggctttagagacctaactccggggtttctacaatgatatttacaacacatcttggaacccaaatgcaagttatgtctctattgcatttagatcccaactttctagcaactactctagcatttgtacctgacagtacaaatgaagcatcacatgtatgataaatagcagttggaccagtggatactttcctaggtacatgagaaacaacatgattacgcctaggccattttctacaatgagcataagaggagctagttgcaaacatggcatgaaaactaaatacatcatcatgacacacaggaaaaacaaaatgattatgacacttatcatgatgagtaacattagtaactgttttataaagatagacatggttcttttgagaactactagccatatgagccttctcttttctctt

SEQ ID NO: 53918 - DNA, 451 bp, Zea mays
  unsure (1)..(451): unsure at all n locations
ntgaaaatgcaacaagatctggaagacaagaaacaagaggttataatttttttatttagaaggcaaaataaaagagcaatcagctattattgaaaagaagaactttgagcttcaagcaactgaaggcttattggcggaagccgaagctaagataacagaactgaacacgaagcttctctgccaatctgaacagtttgaacaagaaaagcaagaacttaatgcaaaacttgaagccgaagtccaacaaaattcagatttgaaaaaactattggcgggccttcaagacaaatgtttggaatttagcaacaaatgtattcaacgactgagaaaaattttccactcagttggagctagcagtgagaaattcaccccgtcagctgaggatttaccaaagaccttcgaacatattgagggtgaaattgatgagcttgacgaagttatagccgggcac

SEQ ID NO: 53919 - DNA, 443 bp, Zea mays
  unsure (1)..(443): unsure at all n locations
acctgagcatgcaagcttttgcgtctgcttagaccttgcttcttcggctcatttaaganannagccttataatcgcctcgggagtaagttgatgaagatagacttcgaagattttcaacacctccacgacgaagctgctcaaggggaatcgcaatccagctttcaaaaagcttcggtacaccacaacttcattttcttcagggtgtggacaagttttttccccttcgtccgccctcacaatagacagatcccggaaataccttcctctcatattaacaagatgattctctttgatagtcgacttaccataaactgaatggcttggtcccacgggcgatcttctgagtcttcgccaccgctgtccatatcataactttcactgtcaccagtatattcagacagcccctacacaacttccttggtaagtctctctgtgttggact

SEQ ID NO: 53920 - DNA, 451 bp, Zea mays
ttagtacagttccaaaagacaatacacatttatgtcatcaaatgattttttctacaccaatattcaacaacgtagtttgcaaccatgtatgttatagatacacgttctaaatagtagatggtcgctacatacaaaagagtggcatatgtgataattggtcgcgacccattagttcttgtcacaaacaaactaagttgtagatgcctaaacattaagggaggaaaatctcatatccatgacctgaactggagaagcatgggtgttagcttgtgcatgttagaactgaagcgttataatccaatagaaactggagatcattaggataccaccatcagaacaacttttgagcaaaagattttcaaaacattgataaatacctttagggcacacacgatatacgtaatttactaatttaggtgtcccataatttaagcaaaaaattaaagtgact

SEQ ID NO: 53921 - DNA, 425 bp, Zea mays
  unsure (1)..(425): unsure at all n locations
agcttcatgcaactgctgccagaaatgagatgtgatctgttttctctgnctgacactatcttctttggcacaccatgaagacaaacgatccgagacatatacaattctgccaatactgcgctgctgtagttggtcttgacaggtatgaagtgggctgacttggtcaagcggtccactactacccaaatggaatcgtagccgactcgagtgcgaggcaatccgactatgaaatccataccgatttcatcccatttccactgagggatctgcaacggttgcaacaatccagcaggtctctggtgctctgccttaattcttcgacaactatcacacatagccacatgctctgcgatctcccttttcattctgtaccaccagaatttcttctttagatcctgatacatcttctcgctgccagggtgaat

SEQ ID NO: 53922 - DNA, 459 bp, Zea mays
ctcagcttcttgcgcatagcttcggaactggttcatccttcatcctgttcctgcttttcatattatgtacagctttaccccaagtccgaaggttcctgaatatatattacacttgggaaacattgttagtcatgtttttgaggaccttcggaggacgaaggcccccaacaataacgagcagctatgcaccacgggagtctttgtaaaggctacgtagtgtatccctggccattcaccttggtagtgaagatcgggtctgtacaacccaggctgggaagggatcatgactcgtgggtaaagtgtgcaacctctgcatagtgttagaaactggtatatcagccgagctcacggttaagagcatccttgggatcctctttgattataagaactttggatacttttatgatgatgattaacaatgatgttataagactggtctctggtatttcctcttttgag

SEQ ID NO: 53923 - DNA, 442 bp, Zea mays
  unsure (1)..(442): unsure at all n locations
agcttgaagtacattnttacctagtcaaaactttatatgatacatatgagatggcttgagctgattaaggattatgaattggaaattcattatcacccaggcaagaccaatgtggtggcagatgcactaaatcgcaaggcttcctgtcattgtcttacgatgaagacttctgacatcccattatgccaagaaatggagaaattaaacctggggataattcaacatggaaccttaaatcacttgaagcctgagtcggttcttctgcaaagaataattgatgcacaaagaagtgatgatgatatgaaacacattcatgagaaaataaaggccggtaaagcaaactgtttcagaaaggatgatcaacgcattgtatggcttaacaatcgcataggtgtgcccaagaatgatgaagtccgccaacaacatttggatgaagctcatc

SEQ ID NO: 53924 - DNA, 468 bp, Zea mays
gacctataaaactcagcttctaagggagaacacgtgataggtctaactaatgtaactttctaaatggatagaccttgtgcagcttgtcaagcaggtaaacatgtgggaagttctcatcatgccaaaaatgtgatgacaacatcaagacccctggagttacttcatatggacctcttcggacccgtcgcctatctaagcataggaggaagtaagtatggtcttgttatagttgatgatttttcccgcttcacttgggtattctttttgcaggataaatctgaaacccaagggaccctcaagcgcttcctaaggagagcccaaaacgagtttgagctcaaagtgaagaagataaggagcgacaatgggtccgagttcaagaaccttcaagtggaggagtatcttgaggaggaaggaatcaagcacgagttctccgctcgctacacaccacaacaaaatggtgtggtagag

SEQ ID NO: 53925 - DNA, 391 bp, Zea mays
  unsure (1)..(391): unsure at all n locations
agcttgagcaaaatgaatagcttcttttgangttgcttaaagcaagcttcggctatggtcaatattttggcagcaaaacagtgcaatagcaatgaatgttgtggtaacttcacacctacccgtctatttatatagtgccgcacgtgggaaagtaaatcatcaagtcttctgcaccggacaaacagcccgcacccactgaacggtgggccacagagcccgagaaggtgaatcgctaggacgcgcgtagctgctgcatggtggggccacctcgcgctcggattattttaatcgtttctcgacaacgagcttagggaagatgtttttcggatcttcgacatcccgaagcctaagagactttntcacggatcaagctcgtcacgaaaaacgatct

SEQ ID NO: 53926 - DNA, 445 bp, Zea mays
  unsure (1)..(445): unsure at all n locations
nttgatgattagggccatctcctcattgtcgagctttgatgtcgtaattggttgnctacttggtgtagactcctccttcttctcctccgttgccttaaaggccactggttgcacctcggaggtggaaggctcgtcaagctcgttgatcttcttggagcccttaatcatgcattcaaaactcacaaaattcccgatgacttcctcgggggtcattagtggatatcttggattaccacgaattaattgaacttgtgtggggttaaggaaaataagagctcttagaataaccttaaccacttcgtggtcatcccactttgtactcccgaggttgcgcacttggttcaccaaggtcttgagccggttgtacatgtcttgtggctcctccccttggcgaagacggaagcgaccgagctcccnctcgatcgtttcccgcttggtgatcttg

SEQ ID NO: 53927 - DNA, 435 bp, Zea mays
  unsure (1)..(435): unsure at all n locations
agcttgtcatcaggcccaagacattttgcgctttatcttcgatagagccagggcaacgctgcccccggccgtcaacgggtccggccaggacctagctgcagcggcgatgctacttcgagccatgctggaaccatccaccaccgagggacggcgtatccagggcgaactcaaggatctcctggaaggcgccgcagttcgatgagccgagagctccgcctcccgaaggcgagctgacccctcagagcatcacacggtgtcctcccgacgcattcgggaagcctcggtccatcccgagcgcacgcgggacgaggcgcccgccgcccgggatcgcctcggcaacgagcaccaccatctcgaccatcgagcccgcctcgacgagaaggtgcaccgaggctaccatcctangcgtgggggacgctgcaacagtgaggagga

SEQ ID NO: 53928 - DNA, 452 bp, Zea mays
  unsure (1)..(452): unsure at all n locations
acctataaaactcagctgtcggtagacagttcgctggctggagactgtctgtgttatggcagcgggtcggataagtgcgggaagccatttacccgtncgccacatatccgcgcctctagtgcttatccgtacccgcgagagcttgcgggtaaaattttcgacccatgcccgtacccgcaggatatccgcggatatcgggcaacccgttacccgccagaaaataccatacgagtatgtggtcatgttcattttaccaagaacatcaatgacttgacatacataatatggcaaggaacatagttcaaacttcaaagtccacaaacatgatcgatcatccacaaacataagtctcaaacccttaagataattaattattacaacacaatgttttaggataaaatgaacacatgggcgatattttgatgggctagtaaattaagcgggtaacgggt

SEQ ID NO: 53929 - DNA, 418 bp, Zea mays
  unsure (1)..(418): unsure at all n locations
agcttaagccaggaagtagttatgcttatttatgcgaatngactcaagcctagctacgggtgcataggtttcaccgaaatccaaaccttcgacttgggagtatcctttggccacaagtcgagctttgttccttgtcaccacaccatgctcatcttgcttgttgcggaagacccatttggttcctacaacattttggttaggacgtggaaccaagtgccatacctcgttccttgtgaaattgttgagctcctcttgcatcgccaccacccaatctgaatcttgtagtgcttcctctaccctgtgtggctcaatagaggaaacaaacgagtaatgctcacaaaaatgtgcaacacgagatctagtagttacccccttatgaatgtcgccgaggatagtgtcgacggggtgatctcgttgt

SEQ ID NO: 53930 - DNA, 448 bp, Zea mays
aaactcagcttctaaaggagaacagcatttgggactaaccaatgttcatttttagatatacagggtttgtagcgcatgtcaagcaggaaagcaagttggtgcccatcatccacacaagaacatcatgacgaccgacaggccgcttgagctactccacatggatctatttggcccgatagcttacataagcgtctgcgggagtaagtactgtctagttattgtggatgattattctcgcttcacttgagtattctttttacaggaaaaatttcaaacctaagagactttaaagggattcttgagacgggctcaaaatgagtttggattaaggatcaaaaagataagaagcaacaacgggacgaagttcaagaactctcaaattgaaggctttcttgaggaggagggcatcaagcatgagttctcttcttcctacacacctcaacaaaat

SEQ ID NO: 53931 - DNA, 300 bp, Zea mays
  unsure (1)..(300): unsure at all n locations
agcttgtgaagagaacanatgcttatgtgggttagttcgcggggccagagcccacccatagtattcttagcaattaagcatgtatcgagtatagcgctattaaaatcaactaagtgcagttgaccctgtaacactcccttagatgctcctgaatcatcacttcttatgaagacagtagcgcttatatcccaaagaagatagttgctacccattgtgcttaactgacaaacacaaagcagattgtattctgaaaaatctacgatacaaacattgngacaataatggccatgtcatatagca

SEQ ID NO: 53932 - DNA, 155 bp, Zea mays
ctcagcttgtgaggttctgaacatcatgtggacacagtcttgttcaaggaacacatgcataacaactctggctgctacagctctcgatcctcggtccggggcaagctgatccgtaccaaccttcttgaagagatggtcccgtgattggatgacag

SEQ ID NO: 53933 - DNA, 349 bp, Zea mays
  unsure (1)..(349): unsure at all n locations
gccaacccatagtagtcttagcaattaagcaagtatcgagtttagctctattaaaatcaactaagtacagttgaccctctaacactcccttaaatgctactgaatcatcacttcttctaaagacagtaacacttatatccgtaaaaagatagttgtaacccattntgcataattgagaaacagaaagcaaattgtaatctaaagaatctacaagacaaacattggaaatagaatggcaggtcatatangcaatttaccaagtcctttgcccaaaccttgatttcatacccgatgtgatagctctttgggacatcattttctcgaagaagagacatcctttctccctgca

SEQ ID NO: 53934 - DNA, 440 bp, Zea mays
tctgtaatgttcatgaattattatatgaaacaaatttcttgtggcaaggaacagtaccataacaactttggctgctacagcttcgtttctcggtccggggcaagctgtcccgtaccaacctttcggaagagatggcccggggattggatgacagaatggttttatgtgaagaatgacttatcaggacgagaagacatcaaaggtataattatgcgtcctatttggcaaagcttcggccttcggaggccgaaggttgaaatggacgaagccgccgaagagtgccaaagggcctttggggtagtctgctcgtttattgggtcaagggacttggtccaagaacacattgcattcagggtatggccacttgcggagaagtgggaaatgccgaaggagaccattaaagagcccgacgaaggcggtctagttagactgaaatacac

SEQ ID NO: 53935 - DNA, 412 bp, Zea mays
  unsure (1)..(412): unsure at all n locations
tgaggcatgcaagctntaccaaaaggacgttataagtgtctttctttatggaccaatcaaggaagaggtctatgttgagcaacctcccgactttgaagatagtgagtaccctaaccatgtgtacaaactctctaaggcgctttatggacttaagcaagccccaagagcatgggatgaatgcctaagagatttccttatcactaatggcttcaaagtcggaaagccgatcctacactctgtactaaaaccattgcaaatgatttgtttgtatgccaaatttatgttgatgatatcatatttgggtctactaacaaatctacttgtgaagagtttagtaggataatgattcaaaaattcgagatgtctatgatgggggagttgaagtattttctaggatttcaagtcaagcaac

SEQ ID NO: 53936 - DNA, 415 bp, Zea mays
tgtgaaggttcttcatccccacttgtgctaagcggcgatgccacagccagcccatgctagtcttagctattaagcatgcatctagaccggcctcctcttttgcaaaatcaactaaataaagtttgccgtctaatacacccttaaaagctagtgaaccatcacttcttctaaagacagacacatctacatttgtaaatagacagttataccccatgttgcataattgactaacagatatcaaattataaccaagagactcaactaaaaacacattagagatagagtgctcattagaaattgcaattttacctaacccttttaccttgccttgattcccatcaccgaatattattgaatcttgagaatccttattcttgacgtaggaggtgaacatcttcttctcccccgtcatatg

SEQ ID NO: 53937 - DNA, 411 bp, Zea mays
  unsure (1)..(411): unsure at all n locations
agcttgggttttaggtacccaactcttgtgttttctacttgttagtcacaatagnttttggaacccatatgcaagttttgtctcccttgcatttggatcccaatttcttagccactacttttgcattcttgcatgaaagaacaaaagaagtgttgcaagtatggaaaacagtagtagattcattgcacattttcctaggcacttgatgcacaacatgatttctcctaggcctacttctaccatgaacaaaggtagaactagaggcaaacgtagcatgtgaattaaaagcatcatgatcatacctcctattataatgagcattcctagaaaattttctatcataaataaaagcatgatttctttgagggctactagccataggagccttcactttctccttgttgagaatgg

SEQ ID NO: 53938 - DNA, 438 bp, Zea mays
  unsure (1)..(438): unsure at all n locations
agcttctaaagggagagcacattntaggattattttatgttcattttgagaaagacaggatttgtagcgcttgccaagcagggaagcaagttggtgttcatcatccacataagaacatcatgacgactgacaggccactggagctcctacacatggatctattcggcctgattgcttacataagcatcgacgggagtaagtactgtctagttattggggattattattctcgcttcacttgggtgttctttttgcaggaaaaatcacaaacccaagagactttaaagggattcttgagacaggctcagaatgagttcggcttaaggatcaagaaaattagaagcgacaacgggacggagttcaagaactcacaaattgaaggcttccttgaggaggagggcatcaagcatgagttctcttctccctacaccctacaac

SEQ ID NO: 53939 - DNA, 454 bp, Zea mays
acacatgaaactcagcttctaagggagaacacgtgataggtctaactaatgtaactttctaattagatagaccttgtgcagcttgtcaagcaggtaaacaggtgggaagctctcatcataccaaaaatgtgatgaccacatcaagacctttggagttgcttcatatggacctcttcggacccatcgcctatctaagcataggaggaagtaagtatggtcttgttatagttgatgatttttcccgcttcacttgggtattctttttgcaggataaatctgaaacccaagggaccctcaagcgcttcctaagaagagctcaaaatgagtttgagctaaaggtgaagaagataaggagcgacaacgggtccgagttcaagaaccttcaagtggaggagtaccttgaggaggaagggtcaagcacgagttcttcgctccctacacaccacagcaaaat

SEQ ID NO: 53940 - DNA, 446 bp, Zea mays
acctgcggcatgaagcttctaaaggagaacacgtgataggtcttttcttgttcttttctaataagatagaccttgtgcagcttgtcaagcagggaaacaggtgggaggctctcatcacaccaaaaatgtgatgaccacatcaagacccttggagatgcttcatatggacctcttcggacccgttgcctatctaagtataggaggaagtaagtatggtcttgttatagttgaagatttttcccgcttcacttgggtattctttttgcaggataaatctgaaacccaagggaccctcaagcgcttcctcaggagagctcaaaatgagtttgagctcaaggtgaagaagataaggagcgataacgggtccgagttcaagaaccttcaagtggaggagttccttgaggaggaggggatcaagaacgagttctccgctccctacacacctc

SEQ ID NO: 53941 - DNA, 387 bp, Zea mays
  unsure (1)..(387): unsure at all n locations
tgggaggctgctagacaacctgctgaactcggatatgcgcatgtgcatcttctatctgcagagctaactccactgacgagcaagatccctatccaccaaggctgacgcggtgtataagtaaacaacccacggatggtggtagctgaaggcaaccaactgactgaagacgtccctcctatactgtgatctccggaatatgttgcgatcatagaggggaaagccatgatgataccctggcgattgtttcccctctgccggcaaacccaattgttgactcntgcgtctcaccagctgcatatccatccaaacagaattgagctcacagagaaatgcttgagtctaacctaagggcacagaaaaataacatgcagcatctacgtctccaaa

SEQ ID NO: 53942 - DNA, 442 bp, Zea mays
  unsure (1)..(442): unsure at all n locations
agcttatgtggatgatgtgggganaaaactgtaatctttttttactccattaaggatttgcagctggtcttcaacagcccgaggcagtaccggtggaagctcaatccagaaaaatgtgtctttggagtgccagccgggaagttgctcgggttcattgtcagccatcgaggaattgaagctaacccggaaaaatcgaagctatcatgagaatggaagcaccacgatcacaaaagaaagtgcagaggcttactgggtgcatgtcagctttgagcagattcatattaaggtttggagaaaaaggcctaccattctacaaattgctcaagaaggtggacaagttccagtggacctcagaggctcaggaagctcttgatgcactgaagaagttcttgaccacaccgccagtgctaaagccgccacgccgatccatgctagaccagtc

SEQ ID NO: 53943 - DNA, 463 bp, Zea mays
  unsure (1)..(463): unsure at all n locations
gacctataaaactcagcttanagcaacaatctgaaactgaagctaggccctcagagcccaccattgttaaacccttggaagccgaagaaacaaaaatggcagagccaactntggttgaagaaactgacaccgccgcacccgaagcatcctccaaagtcctcgattatattgtacgacatgcttcaggaaaaagattatctgaagaagagatttttgaagctaatcactatgcccaagaattgaagtatccaaagggggccttagtattcaatggcacagacgaagatgacttcttatactgcctcccagacaacgaagaattatctgtctgccgggagatggctaggagtatggggttcccgaagcttgaagctggcctctgcgctatgacaaaggtcgatcttgcagatagccttgcatataatagtctgaaggtatgaaaattgtatatttggaaatctat

SEQ ID NO: 53944 - DNA, 431 bp, Zea mays
  unsure (1)..(431): unsure at all n locations
agcttctgggagaacaaccttggcagattttcttccattctatcggancgcaggagcattcaatgtaaggatcgcctgacaccttatcctgacgcgcgcttttcagtcgatagagccgaagtgaccgcagtcacttcgcccctccactggatgacctgacaggaaaacagcgccgcctgccctgctccgactgctgcgccacccgacagggtgaggctgacagccgccaagtccggcctcaagcgccataggaagctccacctctcccgaccccaaggctcggactcaacctccacctcagacgacggacttcgcctcacccgaccccagggctcggactcaacctcgagcttggaagactgtttgcgcctcctccaaccccagggctcggactcacactcgacctcggacgacgatctccggctccccca

SEQ ID NO: 53945 - DNA, 324 bp, Zea mays
cacttaaaactaagcttataaatggtgtgaaaggccttctcatggaccatctagttttgtctatgttgaaaacctccccctgtgaagacaagagctgctaaccatgtgactaacacctcttgctctgttggacaccgcaagcaccaaagcatgggctaatgcctaataaaaagcatattacgatggatgcaagtcggaacgccgacctacatttttacaaaactcctgaaatactcgctgtagccgagttttctgatgatattaatatgggttactaccaggtacatgtgaaagtttacaagatcatgaccacaatccagagtt

SEQ ID NO: 53946 - DNA, 417 bp, Zea mays
  unsure (1)..(417): unsure at all n locations
agcttaagctgatagnagaaggttgtcttcctttttacactncaacacccacactcacgtgcagccagagagaaaggcgcaaacatggaaataaatgtgtggaggcacaaataaagtctttgccagaattcaaactcgaggcctctggctttgatagcatgttagagtggacgaactaaccagttcaacccaaaagcttaagctgataggagaaggtggccaatccatttatacacttcaacagtattgacctagatcagtggtcagttgacgcctccatgctgcaattgaagcctcatattggcctaattatgctacctttgctgaatntgtcattctgtgatcagctgctccaggttcaattggtggtaaaggcaaatgtgaggggtagtggagtcaaaggtttggtaatgcaac

SEQ ID NO: 53947 - DNA, 442 bp, Zea mays
  unsure (1)..(442): unsure at all n locations
tcggatataaggacatattntcgtcagttccgaatataatatgtctcatgataagaagacagctgctgaaacgaagctaaccgaagaggagaagcttcttgaggaaaagactgctggattcatcgagtcaattgcaaagtccaatacagagaagattaccaaagaaattctagaaggcttatctgaagataccgatgacagtgatagctatgatgcggaaagcggtggcgaagactccgaagatcggccctggcgaccaagtcacgcagtctttatgaaatcgactatcagacagagtcatcttgataacatgagaggaaggtattttccagacatatctattgtgagggctgacaacggagacatgactgttcctgttcctgaagagaatgaagtcgtaatctaccgaagcttcttcaagactgggtgtcggttcccctta

SEQ ID NO: 53948 - DNA, 425 bp, Zea mays
  unsure (1)..(425): unsure at all n locations
agcttcgacttttcgaaccatgttttttatatttttatgctncgganctttagccttgcaactcttgttgatatgacccgaaacaacctgagaatcagttttaagaatggcccttctgattcccattgcttttagcttccgaagacccaaaagcagggcttcgtactcagtaatattgtttgtacaactgaaatcaagtcttgccgcgtaacaagttttaactttggatggcgagaccaacacagcagctgctcctgccccgaaggttccccaagacccatcgcanaacactggccatacttcggcatctttatttgtttcttcatcctgagcccctggcgtccagtcagcaatgaagtctgctaacgcctgggactggatcgcggatctatgcacataatcaatgcaaaattcattgagttctg

SEQ ID NO: 53949 - DNA, 430 bp, Zea mays
ttagtgattagtgagagagatttgcttgtgttctttctagctcttgcgctcggattgctttcttctttcttgattccttcttgcgatcaaactcacttgtaattgaggcaagagacaccaatcttgtgggtggtccttgtaagaactttgtgttccaagtgattgagaagagaaagctcactcggtccgagggatcgtttgagagagggaaggggttgaaaaagacccggcctttgtggcctcctcaacggggagtaggtttgagagaaccaaacctcggtaaaacaaatctgcgtgtctcacttcactattcgcttgcaatttgttttgcaccctctctcgcggactctattatatttctaacgctaacccggcttgtagttgtgtttatatttgtaaatttcagtttcgccctattcaccccccctct

SEQ ID NO: 53950 - DNA, 384 bp, Zea mays
  unsure (1)..(384): unsure at all n locations
ctggtgtccctggagggagggcgagctggccctggcatggactagagtctgtactctagaaggcaacgtgtcgaagtgactgaatgccgctgcacctgtgtgtgtacttctgacactcttcatccgcgcgtagcatgttccacctatctgatagagattacgcgctgagcaaaagaactcgcacatttgccctctttcgctcagttatttcgaaagggattgtaaatgctcaattcacacgtgtaatgacgagcttattaccctgattccttaatgactgatcttctagacttctacaacctttcatctttgccatatataaccacctcattatttgatgcgtncaacgtgaccgtatctcgcggcccaacacatttttgtgct

SEQ ID NO: 53951 - DNA, 341 bp, Zea mays
agctaggaggcgtcgattggttgtctacttgttgtatactcctccttcttctcctccgttgctttgaatgcaacgggttgagcttcggatgtggtggcatcatcaagctcgttgatcttcctcgatccttcgatcatgcattcaaaactcacaaaattcccgataacttcctcgggggtcattttggtatatctaggattaccacggattaattgaacttgtgtagggttaaggaaaataagtgatcttagaataaccttaaccacctcgtggtcatcccactttacgctcccgaggttgcgcgcttggttcaccaaggtcttgagccgattgtacatgtg

SEQ ID NO: 53952 - DNA, 355 bp, Zea mays
ttttgctctggaaactgatgcttctgggttttgaataagtgctgtattgctacaagacaatcaccctcttgcctttgtcaacaaaccgctgggaattaaacatatgggcttgtctgtgtatgaaaaggagtatcttgctgtgttgctcgccgtcgaccactggcgatcataccttcaacacgcccccttcattatttacactgatcatcggagtctctcccacctcaatgagcaaaaattgaaaactccatggcaacagaaagtcttcaccaagctccttggactccagtatcaggtggtttacaaaaaaggctctgataatagcgcggcagatgctctctctcgcgcccccatg

SEQ ID NO: 53953 - DNA, 275 bp, Zea mays
  unsure (1)..(275): unsure at all n locations
tcccctttctcttcaaatcacgcaccaattcagggaagagacattcgtaacaatggaatgaaagtgtgtgctatctgaagaaaattccattctgaaataccagagagcancctagagggggggcnggtgaataggtgatctctcataaaattcaacaacctaatancccacaacaacttggttaaagtgttaagtatggctaaagtagcgagctcttgcgaacacaagtatcacagaaaaacaatcacaagagacacacgaggttatcccgtggg

SEQ ID NO: 53954 - DNA, 431 bp, Zea mays
tctaaagggtgaacacgtaatagggctaacaaatgttactttctaaaaagatagaccttgtgcagcttgtcaagcaggcaaacaggtgggaagctctcatcataccaaaaaagtgatgaccacatcaagatatctggagttgcttcatatggatctcttcggacccgtcgcctatctaagcataggaggaagtaagtatggtcttgttatagttgatgatttttcccgcttcacttgggtattctttttgcaggacaagtctgaaacccaagggaccctcaagcgcttcctaaggagagctcaaaatgagtttgagctcaaggtgaagaagataaggagcgacaacgggttcgagttcaagaatcttcaagtggaggagtaccttgaggaggaagggatcaagcacgagttctccgctccctacacaccac

SEQ ID NO: 53955 - DNA, 421 bp, Zea mays
  unsure (1)..(421): unsure at all n locations
agcttctaaaggagaactcttatatttttactttgcaaaactcgaaaaagatagaccttgtgcagcttgtcaagcaggtaaacaagtgggaggagcacatcacagcaagaatgtgatgaccacatcaagacccctggagctgctgcatatggacctcttcggacccgtcgcctatctgagtataggaggaagaaagcatggtctanttatagatgatgattcttcccgcttcatgtcacacccggtttttagaaggtaaaccgaatgcgaaccatgtacgtgccaggatcagttattcacgtcacagcagtacataatatggacatcatcacacagtgctcaaaatagtattaaaagggaataatagttgattacatcatacgtctgagacgtccatatagttcttacaataaatcagagc

SEQ ID NO: 53956 - DNA, 418 bp, Zea mays
tgtctggctatgctcaagcgccggcggtcttatctttctatttggtcaacactggattaacaacacctatcttactaataagtgtgaatcacaagtattcccattaaacaaaggtatatgagtatatcaaaaacacttaagtgaaaccacttaagccaaccattggcagatcatcgaatctcgatttatttccatcttcaagttcaattatcatgtgaggagtccacgctgctcataaccgtgagcacgactgatatatctgttttacactctgcagaggtggcacatctttacccatgagtcgcgattcccttctagcccgggttagctagacccatattcacttccgaggtgaatggccacggtctcactacgaggcttcttcctagagttctcattacgccaatgctggaaatgg

SEQ ID NO: 53957 - DNA, 424 bp, Zea mays
  unsure (1)..(424): unsure at all n locations
agcttgtattcctcgntgtagacctcctcctatactaccttctcttcacctgnggggggtatatatcgcaagtgtgagctcacaaaagatcatagctcaaaaagttgtggggaataatgtgcatgaactcaccaaaggtgggagttcatgtgtagtgtaaggctgatcaacaattaatggttaaagctgagcattgcttttaataaattggtcaaattttatagcagttactaaatataagtgtataccaacccaaagtaatagtagatcaaaattaataataaaccacaatgcgatgcaaatgacaaattgaatttacttccataaattaatcatgtgagtgtctgagccgcccatgaccgtgagcacggctgatataccagttttacactctgcagaggttgcgcatctttacccacaagtc

SEQ ID NO: 53958 - DNA, 447 bp, Zea mays
  unsure (1)..(447): unsure at all n locations
tggacaaccaatcatntattattcgagaatttaattnggttttattatcaatttaaacctttctataggaagagagtggctcttcactcccatcggattgacaaaaagtgaatctcatgttttcttatttatttgactcatgttggtgtgatattttgctaaacagatttgtaatgttagaatcttagaatttccatcacttgccattcctcaaatataaatatattgcatctattatatggctcttctgacaaaagaagtttgaaaacagagaggaaggataaggacacaaagaaaagaagtaaaaagaggataaaggtatactctagcttatgacctgctgcctatttgtgaaattgttgcgatttatctagtggaaatatatttagttatgataactctgttctaggtactttgcttacttaaaattngttngatgccctcacc

SEQ ID NO: 53959 - DNA, 372 bp, Zea mays
  unsure (1)..(372): unsure at all n locations
gatgtacctgtttgcctggcaaaccaagcatgtctattcactggtgggttttatctagtaaatggtcgaattggctcttccaactatgcagacttttgtagagggataaaagtccttacgaccagcaaaggttcataatttttggttgattagtttgggagatatcgaacttcaaacttaactatgctgctatctgaaacaaattcagtcggttatattgtcggatgttttagaacctatagatgacaaaatttaattatccatcgaatactgatgttgtagagtattttgtgtagatgcttctagatattntgtttgatagcactgctgtaataattntaaagatacaaaattaacaagtagtggtgctac

SEQ ID NO: 53960 - DNA, 448 bp, Zea mays
  unsure (1)..(448): unsure at all n locations
tcgcccctctgaactaactcggctgcatcgatctctgctgttttccttatataatcctgacctgaagaccttcccgactagtgttctggaggctgcatgtattccacattgcccagcatggacctcctccagaagttgcttcccagtggacgggagaatgcacttcatgaggacgcctgatgcaccccttctgtataatgtctccccaatgagtgtatagtgagccgactgtctggcaatgcgctctgccgagttcttgtcatctggntcttcttcattctttatatatttaatgatcggccttctccagtcatcagagtctgactcgggttgatctatgatgttgcactcttctgtttgatccattgagatactcggctgtagaatttcttgcacgaagactccgggtgggacctgagttcgactggatcctaacttggacagtaca

SEQ ID NO: 53961 - DNA, 438 bp, Zea mays
agcttcataaatattaccttcaatactaaaatatttacacttatctatgctcaacaggagtaattggacgtcaataagacaatccacataaccaaactaccttgattaacctcacatacaacaaaacctactattactgcacttgaacaatttgtacctcgtgatatcacaggatgcattcaaagtagtagacatacatgatctatcaaccatcattcatataagaaaaatctcaatccgatgcaacaaccccatcattaaagagatagatgactaacaacataagcaactcctagttaagcattgacttcgtttaagataaagcggtccaaataatgattcaacaagcatgcatagagaaaactgctcataaaaaaatatataaaacgggttgtcaaaatcgcccacatgactagcctacaacaactaaaaattatg

SEQ ID NO: 53962 - DNA, 448 bp, Zea mays
  unsure (1)..(448): unsure at all n locations
acgaccgatgcttatagccgtatccacgcatgcatgtgttgtttaatcactggntnnacnggnacgacgtgctcattcatgcgttctccagagttcagactttgaggcgagctttcccactacgtaccattaacatcgtttcagtgcttcccatttacacgagcgagctcacgaaaaagcaacttttctcaggtgggtgcgactgacactcgagagtacagtcccgccgtgcgggttttggcgaagcatcgagtcacacagatagtcagattagggatggcacattggcttccaccagttccaccagtcccgtgcgtcctctcgtctgccgcaataaattcagggctagctcgtggggatggcaggcatgcattggttcctgtgtttagtacgtactagcgccctgcctttctactgcctgcccgtctcctctgtgtcgtctgtcctt

SEQ ID NO: 53963 - DNA, 438 bp, Zea mays
agcttgaattgtctatggatgtaggtgaactataatattttttgagccattgggttattgacagtggatgcacagaacatatgacatgcaacccacagatgttcacctcacttgatgagaatgttgatggacaagataaaatcacatttggagacaattcaaaaggaaaagtgcaaggacttggcaaggtggcaatttcaaatgatttatcaatatcaaatgttctcttggttgcacctttgagcttcaatttattatcagtgggtcaactctgtgatcttggacttcaatgcttattcactccaacagaggttattgtatcaaagatggatgatgaatcaatggtgttcaagggatttagatacaacaacctctacttagtggatttcacttcagaagatgcagacttaagaacttgcctcttcaccaaagcttcac

SEQ ID NO: 53964 - DNA, 455 bp, Zea mays
  unsure (1)..(455): unsure at all n locations
ccttagaatactaagcttctaagggagaacacattntgggactaaccaatattcatttttagttatacaggatntgtagcgcatgccaagctgggaagcaagttggagcccatcatccacacaaaaatgtcatgactaccgacaggccgctggagctactacacatggacttattcggcccgatcgcttacataagcatcggcggtagtaagtattgccttgtaattgtggatgattattctcgcttcacttgggtattctttttacaggaaaaatctcaaacccaagagactttaaaaggattcttgagacgggctcaaaatgagttcggcttaaggatcaagaaaataagaagcgacaatgggacggagttcaagaactctcaaattgaaagcttccttgaggaggagggcatcaagcatgagttctcttctccctacacgccacaacaaaat

SEQ ID NO: 53965 - DNA, 298 bp, Zea mays
  unsure (1)..(298): unsure at all n locations
agcttcctcaagctctcaataatacaactcatatttgagtatggtattatggncngacagcccaaaccactctaaatccttgtgtgttcttgtgttcacctacctcatcaagcaaaccctatgttgccccatgttcttaggattatgcgggtgcattaccccacccaactgcagtttactcttcaacatttggcgtgctatgtatgggggaaggacaacattatggattcctctacctccctatggatttcatgaaggagggcaacgagggctacccattcgttaacatgacatcgct

SEQ ID NO: 53966 - DNA, 447 bp, Zea mays
  unsure (1)..(447): unsure at all n locations
ggcaggtcgcttcanatcaaagcgccctcatgcagatgatgtttactacactccaactactgattcagaggcccaatcttcagctgggggcactgaatctatggacgcagaagacattcctcatatacatcctgactacccaattgatatcacaggatggacatttccaaagaggaggttttttatggctgaatactgctcaaggagaactgtgaatcaatacactctgccatctgacaccaatgttcaattcttccacactcagctccaatttgatgttttttggggcacattgatggataccaattttcataaacatcaggtgattgattggtccttcatgctgggacaatcagttatggaggatcttattcctaagtttgagacatgtggtctgtatcagtttatgggacagagaactgacttcagtgagatggcagccaagca

SEQ ID NO: 53967 - DNA, 367 bp, Zea mays
  unsure (1)..(367): unsure at all n locations
agcttgacattgctccatgttttaccaatgtctttcttaangcgcgggtgtctcccattatagagcatacttctagcaaatttaaatttttcattttctatctcatgctcattaattttagaagttagttgagctatgtgatcattttgttgtttaattaaagcaaggtgatcatggatagcatcaacatttatatctctacatctagtacaaatagagacatgactaacagtgatgtagagggtttgcaagcatttaattcttcaatcttagcatgtaaaatgacattctcatttctaagattggaaatagcatcatcgcanacacttaaatctttagccttagaaattaatcttgcatttctcag

SEQ ID NO: 53968 - DNA, 440 bp, Zea mays
  unsure (1)..(440): unsure at all n locations
tcggctccatctatattatggattgctnttgaatcttgttatttttcttcagcctttctagcagcttcctgacttccgtgaatagcaataggcccttgatccgaaggtatcttcatgcatagatatgctggatgaagaattgcttcaaaagcattgagtgtcccacgaccaatgattgcattgtaaggatactccatgtcgataatatcaaacacaacttgctcagtccttgtattgttgacaaatccgaaggtcactggcatcgtgattttgccaagtgctacgatctgccttcctccgaagccacaaagagggtgtgtagcatcatgaatcgtatcctctggctcttgcatctgtctgaaggccttggcaaatataatatccgctgcactgtctgtatcaaccagaacattgtggaccagaaatcccttgatgacaca

SEQ ID NO: 53969 - DNA, 428 bp, Zea mays
  unsure (1)..(428): unsure at all n locations
agcttctaaagggagaacacattttatgatttattttgttcatttngagaaagacaggatttgtagcgcatgtcaagccgggaagcaagttggagtccatcatccacacaagaacatcatgacgaccgacaggccacttgaactactccacatggatctattcggcccgattgcttacataagcatcggcgggagtaagtatnggtgaaagggaattaggcttacacctagttcctaaatagttttggtggttgaatcgcccaacacaaacaattggactaactagtttgctctagattatatngtttacaggtgccaaaagttcatctataactntgctaaatcgactgtccggaataccgtaaattattccggacaggagaagctttttgggaaaacanggcaagcgcggaccgttccggcccctt

SEQ ID NO: 53970 - DNA, 446 bp, Zea mays
  unsure (1)..(446): unsure at all n locations
ggcaccaagagattcatttcagagatctttaatatgttttctattntgttgcaatcgatgtttttattgtaagataagctaatggtcaaatatacttttcaagatttttttttcaaatcctaacgcgccctacaaaaagagggaagccaattttgaagtccaggtaagaagtataaaattcaccagtcactgtagcttccatgtagaaattgcaatttctagatttactatcatactgtagaaacactggtatactaaagacaggaccaagaatgtttctgatggtgctgaatttcaaacaaaaaaaatgtacctgcccaagaagataaccagcacctgcaagatacacagacgctagaattccagcaatagtaccctcaatactgattgcaccttctgtacctctaggaacaacctttaatgttgtcaccaggtacctattctac

SEQ ID NO: 53971 - DNA, 427 bp, Zea mays
agctttgtagggggcatgtcaagctgtatatttttttctaacactcatcctataaaagcttttatgtcaacatcaaggccactagagttacttcacatggacctatttggaccaacaacttatgctagtgctggtggcaacctctattgtctggttattgttgatggtttttcaagacacacttgggtgttcttccttcatgacaagtctgagggtgcatcaatattcaagaaatttgccaagaaagctcaaaatgaatttgactgcaaaatcaagaaaatcagaagtgacaacaaaaaggaatttgacaacaccaacattcatgaatactgttatgaaattgggatcaagaatgaagtttctgcaacatatacacctcaacaaaatggagttatagaaagaaagaatagaactttgatcaaccttg

SEQ ID NO: 53972 - DNA, 446 bp, Zea mays
  unsure (1)..(446): unsure at all n locations
aagcttacattcaatntctgcttttcttgttcgaaacttcttgatctttgaaagaagancactgctcagnggtgcaatttgggtttcggcttctgctagtaaaccctccactgtttgaagttcgaaatctttcttttcaagagcagctgcttgatcttttattttgctctctaatccttcaattataacctcatgttttttgtcttcaaggtcttgttgcatcttcagagccttacttaatagcatactctgtgcaaaaacaaccttcgtcagaaaactccttcgtctttaaaacaataaaaagccaaagaaaatttttaccttgaaattggaatagaataaactaccgactatatgctgtcgtcggtagcggctgatatcagcctcaagcttcgggaaaccaatactctncgacagagtactgataaccttcactccagttcggt

SEQ ID NO: 53973 - DNA, 380 bp, Zea mays
  unsure (1)..(380): unsure at all n locations
agcttgangcctgtgacgacgactattctatgttgtgatgcacccccgggccaagcgagggagccacgagaggaggtgcaggcagcccacgacaagtccctcggaacccggagagcacagctcggaccccaaaggcaaaaccgacgaagaccggcgacagtggcaatgagggacaaccctacaccgttggtcatcatgatgcagttggaataagagcagacacgctgactaacgtggaacgctaaaatgatcctcgccgaccggaccacgctgagagacagaccgaatcgtaacacaccggatcaggtgattgcatggacaccgccgaccaacgatgcggaccaaggagcccaaccagccccatcaggaaccacgcacag

SEQ ID NO: 53974 - DNA, 399 bp, Zea mays
tggaaaggcgctacctacttctgtctcaccacgattcattttgaattgacaggatgccgaactgatgccacacttcaaatctcaaaatcaggtctgtccctggacagaatacaacaaccagtgtgttgaatttgtaactcctactcttgcaggcatatggttctgaaactttcacacacgcaagataggataaacatctgctactttctgatgacgaccatgaacagattgctacattgaattatgcgcacgacgcagtacctgccatctgcacagaatctggacagactcaattgctgaatttgcgaaaagcgcatgttgtaaacgatcatactaatggctgtggatctgtacacaagtaagataatatagatagctaccactattatatggcacata

SEQ ID NO: 53975 - DNA, 415 bp, Zea mays
  unsure (1)..(415): unsure at all n locations
agctntgttcccggntgatttgataagagaattctcactcggnccgagggaccatttgagagagggaaggggttgaaaaagacccggcctttatggcctcctcaacggggtgtaggtttgtgagaaccgaacctcggtaaaacaaatccgtgtcacactccttatttgcttgcgatttattttgctccctctcccgcggactcgattatatttctaacgctaatccggcttgtagttgtgattaactttgtaaatttcagtttcgccctattcaccccctctaggcgactttcagtaaccgctgggcagttacgcgctccgcgcgtggtggtttggcttcttctgtcctgggccagcttgcatgacacgtgggacccagcccttgtgtcgtanggggaggaccttggatgcgtgt

SEQ ID NO: 53976 - DNA, 461 bp, Zea mays
  unsure (1)..(461): unsure at all n locations
acacttaaaactcagcttgtaagtattctgtgatggttcttggggaaccttatcgttggagcagctgcgggcctagttgcgccttccaaaatcaaaacatgttatgcagcaaagcttgacttccgttgtacaaataacattgttgaatacgaagcacttctgttgggtcttcggaagttaaaagcaatgggtataagaagggctatccttaatactgactctcaagtcatttctggtcatatagacaaaagtagtaaggagagagatccaaagctcgaaaaatatctggatacagttcgaaggttggaggcttctttcgaaggattttctatcaagaatattccaagaggagaaaatgaacatgcagatctgttagccaaatcaacggcataggagctccctctaccttccgaggtattcttcgaaacaataaaagcatcttcngntgaacttatggagag

SEQ ID NO: 53977 - DNA, 379 bp, Zea mays
  unsure (1)..(379): unsure at all n locations
agcttagcaagtgcgagttctggattattgattttctattcttgggtcacattataaaccaagaaggattggttgtagatccgaagaaggtaacaactatcttggactggaaagcaccaaaagatgttcgaggaatcaagagtttcatcggaatggccggttattattagcatttcattgaaggtttctccaagattgccaggccaatgatagctntgctggcaaagaaggttgagttcaagtggaccccancatgccaaaagtcctttgagacattgaaagagaagttgacaatgacaccagtactgattttgccagatgttcacaagccattctcaatatattgtgatgcttcntataccggatagggatgtgtgta

SEQ ID NO: 53978 - DNA, 436 bp, Zea mays
  unsure (1)..(436): unsure at all n locations
tgcccaacctcacagncaactcttgggcatgtacattccatatgatatcaacaaagntgctaagcctcttattttcagcttcgagcaatttcatctttttggccaggatggaagtagttccaccacacttccttttgttgctgatgacgcccaaccgaaggtgaagctagtgttatatgtcattatttacaataaacaactacaaataaacacgtggtgttgacatgttccatatgaaatgataaatcaagcatctcacaagcagaccacaatttaaaagctagatttggaagactcaactgcataccagccgcagcaactaattatcagattgttattactggtcgtagactaattaattagaatggtcactaaaacatatatgcaactgattagntactactggtcgctaggtagagatagataacataccact

SEQ ID NO: 53979 - DNA, 386 bp, Zea mays
acgaggatgccggcctaactgactagcatgacaaatacccttcaaatgtcccctactacatgaaagatcgagactactggtaatcttggtcatgacgtcgggtccaggatggccgagacgtccatgccatgtggtggaggaggtggcggagaccaaggcaggaggtggacacaccccggccgtggagggctggagcgtgtatagaggccccgagctgtcacagcgggcgagaagggtcctggtggccatatccttcacagaaaaaccagaggggtcaaactcattggaacaggagttgtccgtagtgaatccaccaacagaaagaagatcgtgggtgatgtggggagctaccagaacatccgtgaggccaaacggcccacggagaa

SEQ ID NO: 53980 - DNA, 442 bp, Zea mays
  unsure (1)..(442): unsure at all n locations
tctaaagggagaacacattntaggactaacaaatgttcattttgagaaagacaggatttgtagcgcatgccaagcaggaaagcaagttggcacccatcatccacataagaacataatgacgaccgacaggccacttgagctactccacatggatctattcggcccgattgcttacataagcatcggcgggagtaagtattgtcttgtaatagtggatgattattctcgcttcacttgggtattctttttacaggaaaaatctcaaacccaagagaccttaaagggattcttgagacgggctcaaaatgagttcggcttaaggatcaagaaaataagaagcgacaacgggacggagttcaagaactctcaaattgaaggcttccttgaggaggagggaatcaagcatgaattctcttctctctacacgcctcaacaaaatggg

SEQ ID NO: 53981 - DNA, 424 bp, Zea mays
agcttgatacactttagccacggtgagagtattatgactgtgtatgatgacaccccgagaattgctgaacgatgcagggagggaacacaggacaagaagagctccgtcttcatcatcaaactttacctccatagacgtcatatcggccacgatctccttaaacactgatatgtgcgtcagaacggagcctacttcctgctacttgagggagaacaacttcattttgacatgcatcttgctgggcagatcctttgacatacagatcgactccagcttctaccagagagcagctgcagttttctccgccagaacctcctgcagaatattgttagacagatgaaggcgaatatgtgcgagcgccttacgatccttgcgcctctcctcatcactccacgtactagcatccttgatgccaaatccatct

SEQ ID NO: 53982 - DNA, 442 bp, Zea mays
  unsure (1)..(442): unsure at all n locations
agcttgttcccaactgcggntattgcaccgtttatattttttgtgttgagccacctgngnttngctgtcgcggtgggaagggtgagctatctcaagtggagacccctcccctactcaaaaggttgtgggatagtgcagactctgatgctaggcactttcgtgataacattaggtttttcaatggccatttatctttcacttccctatactggtgcctcgatagtatgacaactaatgtaagggattctggtatatacacgtttcgagcacagggcatgtgtaccacaatatcaagtcatttggtatggaaggtggggcagagcataaacaccttgagctttacttttatgatgatgatcccagtctcgagcatcggtaccgtaagtgccgtgaagagcatcaacagaaagacaacgaggttatcaaacagatagtcgacata

SEQ ID NO: 53983 - DNA, 434 bp, Zea mays
  unsure (1)..(434): unsure at all n locations
ccgaggcatgcaagcttctaaaggagncacgtgnacggcttttcttgtctttttttaaaagaagaccttggcagcttgcaagcacgtaacaagtgggaggagcacatcacagcaagaatgtgatgaccactctaagacctctagagctgttgcatatggacctcttcggacccgtcgcctatctgagcataggaggaagtaagtatggtctagttattgttgatgacttttcccgcttcacttgggtgttctttttgcaggataagtctgaagcccaagggaccctcaagcgcttcctcaggagagtttaaaatgagtctgagctcaaggtgaacaagataaagagcgacaacgggtccgaattcaagaatcatcaagtggaggagttccttgaggaggaagggatcaagcacgaagttttcgctccctacaca

SEQ ID NO: 53984 - DNA, 438 bp, Zea mays
  unsure (1)..(438): unsure at all n locations
tctatannaacactcaagcttctaaaggggcagaacacgtgatagggtataactatacgtgcaattttaattatgatattctcttgtgcacgcttgtcaagcacgctatacacagtgggagagagcgcatcgcaccacagaatgctgatgactcacttcaagaccgcctggagcttgctgtatatggactctcttctgacccgtcgcctatctaagcatatgagggagtcagtatggactagttattgctgatgactatgcccgattcacttgggtgttctttttccaggataagtctgaaacccacgggaccctcaagcgcttcctcaggagagctcataatgagtttgagctcaacgtgaagaagataacgagcgataacaggttcccagtcaagaaccttcaaatggatgagttccttgaggaggaagggatcaa

SEQ ID NO: 53985 - DNA, 438 bp, Zea mays
  unsure (1)..(438): unsure at all n locations
agcttgtcaatacatatcaaaatagcaacatctattagctcttttactgcaaacgatacctgtaacatggccattcgcgtgctggggactagatatgattggacccttcaagaaagctcaaggaggatacactcatgtactggttgctattgacaaattcactaagtggatagagtacaagcccatcgcttctctaacttcggctaaggcagtggaattcatacaagacataatattcaggttcggaataccgaatagcatcataactgacctgngatccaatttcactagttcagaattctttgatttctgcgaacaaaaaagcatccagatcaagtatgcatcagtggcacacccaagagccaacgggcaagtataaagagccaacgaactgatattggaagcactcagaaagaaagtcttcgacaagaatgaaaa

SEQ ID NO: 53986 - DNA, 423 bp, Zea mays
taagaccctggtcacaagatccgaagctatggaagcacattatggtctgatcatgacatcgtccgactcatgctaaggtcatttacagtaattgacccccatcttgtcaatcttattcgtgaaaatcccaagtacaccaaaatgatgcccgaggagattcttggaaaattcgtgagcgggcgcatgatggtggaggaggcgtgatacgtggatgatgctctgaatggtccactacccgtctacgagccacagcccgttgcgctcaaggcaacaagcagtagggaggcgctaccaagcaaggtggcacaagttgaagctgccgggctaaatgaagatgagatggccctcatcatcaaacgtttcaagaccgcactcaaaggacacaaagagtacccctccaagaacaaaacaaggggaaagcgc

SEQ ID NO: 53987 - DNA, 444 bp, Zea mays
  unsure (1)..(444): unsure at all n locations
gaaactaagcttccacattgaagcatgagcacttccctctnctaggtcttctatgctttcccttgcgaccttttagcgcagtcttgaatctcttgatgatgagagccatctcttcatcattcagtccggccgactcaatttgtgccaccttgctacgtaacgtctccttgcttcctgatgccttgagagcaagaggttgaggctcattgattggaccattcaatgcgtacgccacgtatcttgcttccttgatcatcattcgcccgcttacgaactttccaagtatcttctcgggcgtcatcttggtgtacctaagagtctcacgaatattgatcaccagatgaggatcaaggacagtgaaagaccttagcattatgcggacggtgtcgtggtccgtccatcgcgtgcttacatagcttcttatcttgttgacaagggtcttga

SEQ ID NO: 53988 - DNA, 198 bp, Zea mays
ccacacgctcttaactgcctacttgaatggccatcggcttttctgccaaagatgctagcgtgggcgccggcgctagcgacttcttctattcgtgctgcggctcgggctggctagcgcctattcctattcacgtctcattcctctttcttggctaataaccgccaaatccactcaaaccgcataaaaatacgaaaatat

SEQ ID NO: 53989 - DNA, 380 bp, Zea mays
  unsure (1)..(380): unsure at all n locations
cagcttatcaaatggacgngaatagtgcctttctttttgaccaatcaaggaggaggtctatgttgagcaacctcccggctttgaagatagtgagtaccctaaccatgtatataggctctctaaggcgctttatgggctcaagcaagccccaagagcatggtatgaatgccttaaaaatttccttactgctaatggcttcaaagtcggcaaggccgatcctactttattcactaaaactcttgacaatgaattgtctgtatgccaaatttatgttgatgatattatatttgggtctactaacgaatctacatgtgaagaatttagtatgatcatgacacagacattcgagatgtctatgattgggggagtgaagatttttt

SEQ ID NO: 53990 - DNA, 447 bp, Zea mays
acaaaaactcagctcggtataaagatgttagtacaatagaaccaagtgtctatttatcgagctcttgcgaatcacaataatcacagagaaagacaacacaagagacacaatgttttatcccttggttcggccaagtataatacttgcctacttccacgttgtggcgtcctaatggacgagggttgcaatcaacccctttcaagtgatccaatgatcaacttgaataccacggtgttcttccttatagttttcttcccgtttgcaaggaatctccacaagttggagcctctcgcccttacaagattgttcacaaagaaagcacggagtaagatcgggaagagcaatgcacactataattaaatccacaccgcatacacgcacacaagtgagaagatgagcacacacaatacgtgcaaggagtctacaactcgaaaagtgctccagtct

SEQ ID NO: 53991 - DNA, 384 bp, Zea mays
  unsure (1)..(384): unsure at all n locations
acagctncagacgaagctgcttcttcctacaagaccttcggcgacgaagcatagtcccaacagtagcccctttcgcggcgctagatcgtttttcgtaacgagcttgatccgagaaaaaagactcttaagcttcgggaagccgaaggtccaaaaaacaccttccctgagctcgttgtcgagaaacaattcagtttcctagcgcggagcggtcccaccttgcagagctactgtgtggtctctgcggtccaccgcgcagcgagtgcaagcggctgtccgcctggtgtaaaaatcctggcgattcaccttcttacctgtgaagttaccacagcattcattgctattccactggttgctgccaaattttaaccatagctgaacttgact

SEQ ID NO: 53992 - DNA, 430 bp, Zea mays
  unsure (1)..(430): unsure at all n locations
actaagctgagtcatcatttgcaaggataangatgctcttattatttctgggtatgaagcacatacgagagaagaaatggctggagtagccaaatgtttcaaggaagacgatcaaggtgtgatatggtttaaaaaccgcatagtactgccaaagaacgaagaactccgccagcaaactcttgatgaagcacatcttagtcgctattcaattcatcccggaagcactaagatgtatcaagacttaaagcaacattattggtggacaaagatgaaaatcgaaattgcacgctatgtggctaagtgtgacacttgcagacgtgtcaaggccatacacatgaaaactgctggtccattacagtcgttaccaataccaacatggaaatgggaagacatcagtatggactttattgtgggactgcccacgacgaca

SEQ ID NO: 53993 - DNA, 427 bp, Zea mays
atcttgaagcccatggaagcatcttatgcatgtattattctaatcgactcaagcctacctacgggtgcataagtttcaccaaagaccaaaccttcgacttgtgaataaccctcggccacaagactgactttgttccttgtcaccacaccatgcttgtcttgcttgatgagaaatacccatttggtacctacaatattttgagtaggacgaggaactaagagccacctcattcctcgtgaagttgttgagtccctcttgcattgctagcacccaatccggatctcttagagcatcctcaatcctgtaaggcttaatacaggatacaaaagagtagtgttcacaaacatgagcaacccgagatctagtggttaccctcttatgactgtcaccgagaatggagttgatgaggtgatctcatcgaattacc

SEQ ID NO: 53994 - DNA, 445 bp, Zea mays
tcgttcttctgttgccgttgcagcacgagcggcatcccgatgttacttgtccggattgaccctccctcccacgtttccaccagcatgcatgcgccatgcggccacgcgctgttgtgtgcctgtgtgccaatgatgagtgagtgggtgtgggtcccatcccggcagaaagctttctttaggtcgacgtcaagtcaaatggcaccatgcttgctatattgatctgtacaatggaaggggcatggaaactgcggcaagatccatcttgtcgtgtttgcacacatgccctgaccgatcgtgacttgtcacccgccgatctgtccatttcagttttcaatggataagcaattttgtaacctaagtctagctaatagcttgcctattagttacttctaataaaattagctaatagttaattagctatttattagttagctaattctactag

SEQ ID NO: 53995 - DNA, 422 bp, Zea mays
agcttcaactccatctatattatgtattgccttgttatcagtccagcttccttcggcccttctggcagcttcctgactcccatgaatagcaataggcccttggtccgaaggtatcttcatgcacagataagctgggtgaagaattgcttcaaaagcatttagggtaccacgaccaatgatggcgttgtaggggtattccatgtcaacaatatcaaacacaatttgctcagtccttgtgttattaacaaatccgaaggttaccggcatggtaatcttcccgagtgccacaatctgtcgccctccgaagccacaaagagggtgcgtagcatcatgaatcttgtcttcaggctcttgcatctgtctgaaggctctggcaaatatgatgacagctgcactgcctgtgtcgaccaagacattgtgga

SEQ ID NO: 53996 - DNA, 437 bp, Zea mays
taccgcacttgaagcatgatcgctttcccttggtcttagtcttgcttggctgtcccttgcgaccctttagcgccgtcttgaatcttttgatgatgagggccatctcttcatcattaagaccgaccgcctcaatttgcgccaccttgctgggtagcgcctccttgctccttgttgccttgagagcaatgggttgaggctcatggattgagccattcaacgcatcgtccacgtaccttgcttctttgatcatcattcgtccgcttacaaattttccaagaatttcttcgggcgacatcttgatgtacctaggattttcacgaatattgtttaccaagtgaggatcaagaacggtaaatgaccttatcattatgcggacgacgtcgtgatctgtccatcgcgtgcttccgtagctccttattttgttgataaagatcttg

SEQ ID NO: 53997 - DNA, 434 bp, Zea mays
  unsure (1)..(434): unsure at all n locations
cgagaaaggaagaactgcagcaagnggtaagctcaataagattaatgtgcccaaagctataaatgaagaaatcaacatgaaaaaggaaaaaggtaaaaatacaattagtcatgttgtttgcactgatcatctctccatgtcattcaagcacaaaaagggaagaggaaaaaggaggtgcttcaaatgcaatgagataggacacctcatcgcgtcttgtccgtacaaagacaaggatgaagggacaagaagttgctttggatgcaaaaataaggaccacatgatcacttcatgtccggtcatgaagaatcaaggatgtgcatcctccaaagtgaccctcatcaaggaaaatgacacacagcaagcgtcatgtcatgttgaacgacgcttctgctacaagtgtggtgagcacggtcatctatccatgtatgttataa

SEQ ID NO: 53998 - DNA, 439 bp, Zea mays
tatgcaacatcgtttgagatggtgtggacatatcctacgatgacctgaagaggcaccagtgcatatcggaataattaggcgtcccgagaatgtgaagagaggtagaggtcaaccaaccttgacgtggacagaggatgtgaagagggacctgaatgagtggaatattgataaagagctcgccgtggataggaaggggtggaagtgtgcaattcacgtgccagaaccctgatttgtagtttcgcttttcctccttaatcgtttgaccttttcttgtgcccctttagatcttgctggttcttgtgggttttatttctttttatgtgtttccccgtttcgtcgtttttcggatctactttgcctttatctcccttttcttttctttggggttgagctctgaggctttcatatgggatttcatctctagcctaccccaacgtgc

SEQ ID NO: 53999 - DNA, 406 bp, Zea mays
agcttgttagagcttgaaccagggacccccgtcatcggaaaggcgcaatcgtgctcgccggagttcggaaccccgccagcgcacgtggaccgggtaagtctctgcgccattttccgattcactgcacacatagcctctacgtcaccccgtgcagctcatcatgtcgtttaattgaactaaatcgtcgtggttaggctggagctctcgccgccgatgagttcacccgcctgcgcgcgtggaccggtcgattccggccacccccgtcgtcgagccgtacctcgctgtgaccgccaggacctcccgaagccaaccccgcccctcgccagacctctctcgccgccggtaagccgcgccgccctattcctttccgcggtactgtttacataaggggagggacctcggggga

SEQ ID NO: 54000 - DNA, 450 bp, Zea mays
  unsure (1)..(450): unsure at all n locations
tcgcacctctggactaactcggntgcatcactttntgctgtcggcaagtagaaaccagatgttggggcgaaggcgaagacgctacccttcgctccagccttcgtctatctcgctgcaccaacggaagcagaatgaccggtgaggtccaccctttgtcgtctacactacaagacgaaggcctacgatgacgtcgccccgtcccacgtcctcactcgacctagaggcccacgtgggattcgacccattgtaacaggccccgcacggagaagtgtattacaggcccgatatgtaatagcttttctgtaatgacaatttgtaaccctcctttataggaatattccggggatagtccaggtgcctgagggtacatgcgtccttacatcgagatgttgggcactcagacacctataaatacccacgtacagtgcccttgagaggccagattaacag

SEQ ID NO: 54001 - DNA, 445 bp, Zea mays
catgaagcttgccatacttgtaaagcaacaacactttctatcatcttatttgcagaccataccagtgacttggcctttcgcatgctggggactggatatgattggacctttcaagaaagctcaagggggatacactcatgtattggtggcgattgacaaattcactaaatggatagagttcaagcccattgcctctttaacctctgctaaggccgtggaattcgtacaagacataatattcagattcgggataccaaacagcatcataattgacttaggatccaacttcacaagttcagaattcttcgacttctgcgagcaaaagagcattcagatcaagtatgcatctgtagcacatccaagagccaacgggtaggttgagcgagccaacggaatgatattggaggcactcaagacaaaggtcttctattagaatgaaaaattc

SEQ ID NO: 54002 - DNA, 448 bp, Zea mays
  unsure (1)..(448): unsure at all n locations
tgggaagattcttcatcccaacatgggctagtcggcggggcctgagctctcccatgttagtcttagcaattaagcaagtgtcgagttcagctctatcaaaatctaccaagtatagctgaccctctaacactcccttaaatgctattgaatcatcacttcttctaaagacagtgacacctatatcagtaaaaagacagttgtagcccatttgacataattgagatacagaaagcaagttgtaatctaatgaatcaacaagaaaaacattggaaatggaatggtcaggggatatagctattttacccaaacctttgaccaaaccttgatttccatccncgaatgtgatagctctttggggatcctggtttttctcataggaggagaacatcttcttctcccctgtcatggtggttgtgcacccgctgtcgataatccaacttgagccccc

SEQ ID NO: 54003 - DNA, 428 bp, Zea mays
  unsure (1)..(428): unsure at all n locations
agcttaataatagcaagaaaaaaggntgtactatttaactaatgttagaaaaatttggagaagtttatatctacctactgacctagttaaaaatgttaaacccctctgtccattacattaagttagttttaaccccttattccataatatgcttaagtttaagaaaaatagaaaaagtgacataaataatgaaccagagggcacccctatttttgttgagatacttagtcaatgtagttcactggaaaaatgtatcataccctgttgtagtgtaaaataagaaagctaccttttaaattaataaaacaaggataacttagaaaaaccctacaaaaataaccctaaggtaaaacctccccaaaccttaagataactaatgtgttgataataagaacttaagaaaaatctganatctgttgtttgatatt

SEQ ID NO: 54004 - DNA, 448 bp, Zea mays
  unsure (1)..(448): unsure at all n locations
ntaccaaatggacgtgaaaagtgccttcctcaatggaccaatcaatgatgagatctatgttgagcaacctctcggctttgaagatagtgagtaccctaaccatgtttataaactctctaaggcgctttatgggctcaagcaagccccaaaagcatggtatgaatgtctaagagattttcttatcgctaatggcttcaaagtcagaaaagccgatcctactctctttactaaaacacttgcaaatgatttgtttgtatgccaaatttatgttgatgatatcatatttgggtctactaacgaatctacatgtgaagagtttagtaggatcatgactcacaaattcgagatgtcaatgatgggagagttgaagcattttctaggctttcaagtaaagcaactccaagagagcaccttcattagccaaacgaagcacattcaagatattcta

SEQ ID NO: 54005 - DNA, 445 bp, Zea mays
  unsure (1)..(445): unsure at all n locations
gagctcgtcagacttgttaagaggaactcaagtatatgtttttttctgcaccaatattggtaatgccagacatccacaagggatttgatgtgtattgcgatgcgtcacaccttggacttggatgtgtgctaatgcaagaaggaaaggtgattgcttatgcttcaagacagttgacgaagcatgaaaagaattatcctacgcatgatatggaactanctgccgtagtgcatgctttgaagatttggaggcactatatgattggaaacaagtgcaaaatctttacggatcacaaaagcttgaaatacatattcactcagaaagaactgaacctcaaacagagaacatggcttgagttgattaacgactatgattnggaaatacaatatcaccccagaaaagcaaatgtaatagctgatgctctgagtctgaacggtcaagtgaacaa

SEQ ID NO: 54006 - DNA, 456 bp, Zea mays
actcagctggcattgctccctgtggaagccaagtattcttaatgctcgtgttccttccctataaagcatgctacgagcaaacttaaatgtctcattttctagttcatgctcggcaattttagcatctaattttgctatatgatcattttgttgtttaatcatagcaaggtgatcatggatagcatctatattaacatctctacatctagtgcaaatagaaacatgctcaacggtagatgtagagggtttgcaatcatttaattcaacaatcttagcatgtaaaatgacattctcatctctaagattggaaatagaaacattgcaaacatttaattccttagccttagcaattaatttctcattctcattcttaaggctagcaagagatgcatttaatttatcaatcttagcaatagactagaattatcatttctaagaatggtaattgaatcatca

SEQ ID NO: 54007 - DNA, 286 bp, Zea mays
caccgtagtcgacgtcggtggggagcaacgcttcaaccccaaagaccacaaagtagggcatatacctagttgagcgacttacggttgttcttaagttccataggaccactgttagtgcctctggccatcgttggtcgagctgcttgaggtgcatgaaaatctgagatttgaggccttgcatgatcatttggctcgtttgacctacccgtttgcgcgagggtgagccacgacagcccaatctatacggatgtgggattcgccatataactctatgaactttgttcta

SEQ ID NO: 54008 - DNA, 438 bp, Zea mays
tgagccgaggcattgcctcaccggagaagcggaatctccttttttttgacttcggtcgcccgccaccacgcgtagaccgagctatccggtgagtcattcttcaattcctcgcgcctatgtcttcccggacctctagtgaagctcactgaccagtttaatcgaactctaccaccctggataggccggagccctcgccaccgacgagctcccccgcctacgcacgtggaccggcctactccgaccatccccggagacaacccacacatcggcgtgaccgtcacgacctcctttacgccctcgaccacctcaccagagcaatctcgccgccggtaagcccctatgccctttccttcgccgcgggtacagtttaatttggagaaggacctcaggttaagtttagcaaaacctcaggggttttctaaactgttagtggcatat

SEQ ID NO: 54009 - DNA, 429 bp, Zea mays
agcttgtgaacagtacaagttcttttggatttacagcttcggctgatcagccgaagcccatgctgctgtgtgaggatatagcagagcagaaggtgctattgggctcgcaattatctgaagatcaagagaaaaccttgataaggtttttattcaacaataaggatgtttttgcatggtcagccaatgatctttgtggagtgaatcgggatgttattgaacattcgctcaatgttgacccatccttcagaccccgcaagcagaggcttcggaaaatgtctgatgacaaggccgaaggggctcgcaacgaagtaaaaagactcctaagtgcaggagttatcagagaagtgaagtatccagaatggctagctaacactgttatggtgaagaacgccaatggaaagtggagaatgtgtatcgatttcacagatc

SEQ ID NO: 54010 - DNA, 445 bp, Zea mays
  unsure (1)..(445): unsure at all n locations
tgctcctcttgactgatgaaccatagcccattacgtctgtctccagtcccaatcctcttcccagntctcttctcctgaaaaacacatgattgttcatcaaatatagctagacacttgaactgatcaatgattgagctgacagaaaggagattgactagaaatgatgggacatgcaaaactgatgatagattaatggatggtgtacactctgtagaccctacaccatgaatgagttgggaggtaccatcaacaatttggacagtttcagggtgaatagaatgagagtatgttttaaaagaatcaattagtcctgtgacatgtctagatgctcctgaatctattatccactctctatgacttctacatgaagatgcaagggcttgtgcctgagtttctgtgcccgaatgggcgtagttggcaaagttaccgaagtgctgggtggatg

SEQ ID NO: 54011 - DNA, 431 bp, Zea mays
  unsure (1)..(431): unsure at all n locations
aagcttttcaccatgtgatcactgttatctttatatagttgggcaacacatttccgctttagttgtgtcaagctcttctttagcctctcattttcttctttgagcttttgatatgaatcatcatttgttcctgcgaattctagctcaaaggaagatttgcttgttgacaaacaacaagcattagcacatggtaatatagtatcaatttgaatacatgtgcatgagtgacgatgttgggattttaagttttctatcacgacctcatgagcaatgtttaatatgatatgatcatccataagaatttcatgagaacatagaagcatatcatatntttcttgaaaagctagagtctcaacttttagcttttctactcggtccttaagcaaggtattcctatntactaatngagcgatacaatgtaaagcgttatc

SEQ ID NO: 54012 - DNA, 445 bp, Zea mays
tcatgaagaggaaccttcggccatctcatacaaacaactttatccgatagccgcttcttcctacaagaccttcagcgacgaagcatagtcccaacaacgtcctcttcattgggagagcggagtcacccaccgtctccgacgacgagccgaccgcacccggagaagaaccgcctcaacgagaatcctgccgacggaggaaccggcgcaggaacattcgacgacaccacgcggccggagaacgggatccggagcaacctgtctcgcgagacgaggtctcggagataggagaaactccggaagaacacgtcttcagagaacgaagaaactcccgacgacgtgatcgccgacgggctcaggaacaagccgagcaagacgcaaggcaacgccgggagaatccattcttcgggcgcaacctgaaccctgacttcgcccgagccatgaacac

SEQ ID NO: 54013 - DNA, 436 bp, Zea mays
agcttgaagctggactctgtgctatgacgattgtttatcttgcagatagtcttgcatataatagcgtgaaggtatgagaactgcgtgtttggaaattttataatttgcaaatcattcttttattcttaaaccaactcttttacatatagggtttaatactaagcaacacgttgagagcgcaaaagaatgtcgaagacgagagctatgatattgctttcaacaacctacgatcagaggttattaagctgagaaacgaagctctggagaaggataaaattctgcttacattggtggacaagataaaagaggacgaagctgcctataggcccaggctgaagcccaaaaacgtgaaattaaagatcttcagaaacagctagctagagctaaagaagaacgtatacttgaaagacaaaacgagagcttattgatcaatggg

SEQ ID NO: 54014 - DNA, 447 bp, Zea mays
tcgcacctccgaactaactcggttgcatcactcttcgctgttgttcaatataatcccgacctgaagaccttcccgactagtgtcttggacgctgcgtgtattccacattgtccagcatggacctcatctagaagtcgcttcccagtagatgagagaatgcatttcatgaagatgcctgatgcgccccttctgtatagtgtctccccaatgagtgtgtagtgagctgactgtctagcgatgcgctcggctgcatttttatcgtttgggtcctcttcattctttatatatctgatgatcggccttgtccagtcatcagagcctgactctggctgattcacgatattacactcttctgcctgatccattgagatgcttggctgtggtatttcttgtacaaagactccgggtgggacctgagttcgactggatactaacttggacaataca

SEQ ID NO: 54015 - DNA, 293 bp, Zea mays
  unsure (1)..(293): unsure at all n locations
agcttttagttntgaagctttggctttgaattattttntttaggggctccgaagatgtctgaagataagaagactgctgctgagatgaagctgagcctcgacgaagagaaaaacttggggtttcttatagcgatgtcnaaaaccaatacagaaaaaatcaccaaggaaattctggaaggtttgtctgaagatactggtgacagtgacagttatgatgtggacagtggtggtgaagactccgaagatcgtccctggcgaccaagccattcagtttatggtaaatcaactatcaa

SEQ ID NO: 54016 - DNA, 429 bp, Zea mays
  unsure (1)..(429): unsure at all n locations
ntccaaaaagtcttggatcactatctttggtggtctgaagattaagttatggatgtttaaagcgtgaagactgaatttgtccagttctggacagcacagccttcacagtgtattttacccttgatacatattaaaccagccagtgatgtttataaataatttgtagaaaatttaattagctttccagaaagtctaagatcactttgtttggatgtctgaatcttcagttgtgaatttttgaagttgcaagtctgaatctgtccaaatctggacagagcggctgtgattgcactttttgaccttgctatttattgaatcaagttgtggtgaaaataccaaagttatagttcactctttaagctttccagaaagtcctagtttgctatttttggattaatatttgaaaangtatgattaaaacgagtaact

SEQ ID NO: 54017 - DNA, 396 bp, Zea mays
agcttaacccagaaaaatgtgtctttgtagttttatcaggaaaattgctcggattcattgtcagccaccgaggaattgaagccaacctagagaaaatcaaagttatcatgagaatggaagcaccacgatcgcagaagaaagtacagagacttactggatgcatggcagctttgagcaggttcatatcaaggctaggagaaaaaggcctaccattctacaaattgctcaagaaggtagacaagttctagtggacctcataagctcaggaagcccttgatgcactgaagaagttcctgacaacaccgctagtattaaagccgccacaccgagccacgccgagtcagccgggcgaagatatgttgttgtacatctcttgcacgactcactttgtgagca

SEQ ID NO: 54018 - DNA, 419 bp, Zea mays
tgcacagtcaacaacactgtgcctgagtcgaagcatatttactataaagaatacggtgcctcggccaaggaatatgatgcattgatgtatcttaactctttctgccttttatattttcttgaaaggaaaacaatacatgagggataaattttcaacttgatgtaataatattgtcgttacatcatcgagtatgacagaattaggtttcgaagctataaagtcgttcctaagggagcgcagagtaagttccgaagctacaaagtcattcctaagggagcgtagagtaagtttcgaagctcaaaattcattcctaagggaatgcagagccaaaataccacctaaatcaaatgtgaagaagctcaaagtcgctcctaaggggatgtagagcttaaataccacctaaatcagaggtgaagaac

SEQ ID NO: 54019 - DNA, 394 bp, Zea mays
  unsure (1)..(394): unsure at all n locations
agcttctcctgtacaagtgctgcacttactgctgaatgcgaagctttcacatataataacaaaggagcccctggtattggtggagttaatgctgttaaatctatcacatattgcttcagttcttcacaggccttctgctgaattggtccccattgaaaaacttcggctgacttcagcacttcgaaaaatggtaaatttctttctgctgatctagatatgaatctgttgagagatgccagccttcctgtcaatctttgagcccccttctttgtacttggtggttccattcgaagtatagcttcgattttgcttggattagcctcaattccctttgttgaaactaagcaaccaaaaaatttccccttctttactccgaagacacattnttttggat

SEQ ID NO: 54020 - DNA, 370 bp, Zea mays
tatctaccgtgtcaccgtaattcgtttgagccatcccatcatcgtttatgagtttgccacgccgcaggccacgtaaccgcgcgccaagcttctttcttcccttcgggcgccaacagcatagggtcaaattgaaagccaccgctctcggagtctataaattgagccccccctcggcttcgctatgtattttactagctatcgcacccgctcccacacccgattgtccaccagctcgcctgaattttgcacttcccccaaatcggttctccgccgccgtagaagtgaactcaccgtcgccagcccaactccggtcagtgcccgcccttttcttcctcgtttgagcattctcatgcctctgtgatgctccccg

SEQ ID NO: 54021 - DNA, 441 bp, Zea mays
agcttcctgactgatcaaaaagaccgagcgtttatgtggtttttttctttctataattctctttctttttgtcaataaaggacatataaaagtttatatatatatatatattctgaaaatgtagaaaacaaatacaatattattactaacacaataaaaacttatttccaaaaaaaattatttctggaaattcctattatttaaataacggttcttggcacaagggaaataaaatcaaaatggaattcttgcaaacacttataaacaaaaatagtaacatatcgaaatgctattctaaaaatattattttaacaactcattaatattttattaatcgagatctttcgcacacaattaaatccaagaattggatttgaaattcaaattaacaaagtatatgattcagcatgatcgcatcaaacacttgataaaatcgattta

SEQ ID NO: 54022 - DNA, 449 bp, Zea mays
tcagctccatctatgttatggatttcttttgagtctgtccagttttcttcggcccttctggcagcttcctgacttccatgaatagcaatgggcccttggtccgaaggtatcttcatgcaaagataagctggatgaagaattgcttcaaaagcattgagagtaccacgaccaatgattgcattgtaagggtattccatgtcaacaatatcaaacacaacttgtccagtccttgtattgttgataaatccgaaggttactggcattgtgattttgccaagtgctacaatctgccttcctctaaagccacaaaggggatgtgtggcatcatggatcttgtcttccggctcttgcatctgtctgaaggccttggcaaatatgatatcagctgcactgcctgtatcaaccaaaacattgtggaccagaaatccttttatcacacaagagataac

SEQ ID NO: 54023 - DNA, 382 bp, Zea mays
  unsure (1)..(382): unsure at all n locations
tccaagccactgatgatgcagctttaaaggaagccacttangaatttatatttcatttttacaagaacgatttgatcgcatgccaacacgaaacaagttggacccatcatccacacaagaacatatgaaactgaccgccactgagctctaacatggatctattcggccgattgcatacataagcatcggggaagaaggttggataaaatggggatgactattatcgttcactgggtgtattttgcaaaaaaatctatacccagaaaccttaagattttaagacgctaaaagagttggttaagatcaaaaaaaacaaccacaccggcggaatcataataccatctagcttcttagaggggataacatgagtctctctcctacc

SEQ ID NO: 54024 - DNA, 451 bp, Zea mays
  unsure (1)..(451): unsure at all n locations
ttatgaatgatgacttccgcgcacgtacgagcaacttcagtcgatttttttctttatgcaggaccttccgcgacgaagcatggtcccaacaggacgcacggagtactccaacaagaacaaaacaagaggaaagcgctcctgcttcaaatgcgttaagactggtcatttcattgtataatgccctgataataataatgaccagggacaagataagagcgggaagagggaaaagaacaactacatgaacgcgaatggcgaggcacaccttggaaatgagtgggattctgactgcttctcatctgactccgacgatgaaggattggctgcctcggccttcgacaagtcttcgctcttccccaacgaacgccacacttgcctcatggccaaggagaagaaggtacgtattcgatatntccctaagtactcttcttctagtgatgaggaatgctcc

SEQ ID NO: 54025 - DNA, 110 bp, Zea mays
gacaagaagccggctgttccaatcggccgatctgatgtgggatagctccactaccaagtacccgctcttggcaacggacggcagccactggagcagcgaggtattgagca

SEQ ID NO: 54026 - DNA, 448 bp, Zea mays
tatctcaaccttagaggaaagcttatcctaatgggtgatgtgttagttttatctttgccaagtgtgatattcatgtttcttgcaatgttgctcatatggactagtgtttccgctgcgatgaagtatttggcttctatagtgtaatagatagtcatgtggctaatggtgctttaagattgtcttaaattagtgtcttagtttaaattggtattagtttgaattggtatcttaatgatgaatagtggtaggttgatattcctgtgatatatccactattttgaatggtgtttaactctgattatgtgcatttgtgtgttatagcatcatggtttgattcttgccacaatgcatactaaaaagtgcaagtgtagaaatgtttcgatttgcctaagtatgtgcaaattggcgtctgaggccaaaattatgtttttgaagtaagcacttattt

SEQ ID NO: 54027 - DNA, 428 bp, Zea mays
  unsure (1)..(428): unsure at all n locations
acctgcangcatgcgagctcgcatacacatgaagccggcaactggttttggagcatgtttacttcgaagagggctaagcaccctccctccagaactaaaaacagattctgatgccactgttgttactggaattgccatgatatcccgagcaattcttctaagagacgggtatggaattcccgcgtgttgccaccaagaaataatgtcaagctcttgagatcttggaagtgatggctcttccaaatacaaatataactcagtgcgcatatagagaagaagatgcttccggctcctctgacatgaacttatcaaatatgccaagcataaggacgtcaccttcattaacgacgacattcttaagacctacaccatcagttgttgccacaccctccattggatcttgggacttcaagaacaactcatacttc

SEQ ID NO: 54028 - DNA, 399 bp, Zea mays
actaagcttgtacgacattatacgacatgatgctatcatatagtttctttatttattgattatgatacttcaaacaaatattaccattatatatgatcggtttgtgtccccccccacccccccgctaatataaaaatcgggcatatctttcgccatcctttctaaaaccgataatcgctaaataatatacctgtgacattgcacaatattttacaaatgcctatcatataaataggactacgaactgatttctgaagtttaaccgcatgaaacattggatgggacgatatattcgtcagacaagtacctacagtggtagaaaccaacagcgactttttttttgtatgggaacgaatgaaccacatgcgataaggaaggcactacagatccatttttaat

SEQ ID NO: 54029 - DNA, 185 bp, Zea mays
cagacacccattagacaaatagaacgccatccacacacctgctgaaagaacaaaatattaatgggaggcacagacacaaacacgatacataggagccgccacgggaagaactcccccacccatctcacctcttgcagaccaacaccaaccccccaacaatagaagaagcccacccaaccatgacc

SEQ ID NO: 54030 - DNA, 299 bp, Zea mays
gcgacatctggtgtgactgggctattaagactgtcttaggatgtaaagtggctattataactaatgaactgatcgggccttatcttgcaactcatatgtgttacacaggctgagcctttctcacccctcctgtttaaccttgatgctgatggtctggcctgccctattcatcaagctcaagacaaaggcttgattcccggccttacttctcacactattactaatggttgctgttgtcttcaatatgctgatgatactatctccttcaatcaacattgcttggaaggtgctacaaatcc

SEQ ID NO: 54031 - DNA, 387 bp, Zea mays
  unsure (1)..(387): unsure at all n locations
agctntaccanatggacgngaaatatgcctttctaatggaccaatcaaggaagaggtctatgttgagcaacctcccggctttgaagacagtaagtatcctaaccatgtctataagctctctaaggcgctctatgggctcaagcaagccccaagagcatggtatgaatgccttatagatttccttatttcaaatggattcaaagttggtaaggccgatcctacactctttaccaaaacacttgaaaaagatttgtttgtatgccaaatttatgttgatgatattatatttgggtctactaacgaatctgcatgtgaaaagtttattatgatcatgacacagaaattcgagatgtctatgatggtggagttgaagtatttcctatgatt

SEQ ID NO: 54032 - DNA, 427 bp, Zea mays
  unsure (1)..(427): unsure at all n locations
cgtgaagattctttatcccaacatgggctagtcggtgatgcctgagccaacccatattagtcttaccaattaagcaagtatcgagttcagctctattaaaatcaactaagtatagctgaccctctaatactcccttaaatgctactgaatcatcacttcttctaaagacagtaacacctatatccgtaacaagacagntgtaacccattttgcataattgagaaactgaaagcaagttataatctaaagaatctacaagaaaaacattggaaatggaatggttaggtgatatagcaattctaacaagtcctttgaccaaacctnggtttccatccccgaatgtgatagctctcctgggatcatcgtttttctcgtaagaggagaacatcttnttctcccctgcatatggttggtgcatcgtataatg

SEQ ID NO: 54033 - DNA, 448 bp, Zea mays
  unsure (1)..(448): unsure at all n locations
accttaagtcacctgcggcatgcaagctttgngcacacacttgaagtttatctttcttattccccacatacagatggtcaaacagagagaaccaatcagattctggaggatatgctgagggcttgtgctttgcaagacaagataggttgggacaagagattaccatgcatatgcagaattctcctataacaacagctatcacgccagtttgaagatgtcaccattcgaagcgctctatgggaggaattgcagaactccattgcattgggactaacctggtaaaaggcaggtgttcggtccacatattgtgcttgaagccaaagagaacatcacaatggtccgagagaattaaaggcagcacagtccagacagcgaagctatgccgacaccagaagatgggaactcagtttgaaatgggagactatgtctacttgacagtgcacccatc

SEQ ID NO: 54034 - DNA, 436 bp, Zea mays
tctaaagggagatcatgtgttatgactaaccgatgtctgtttgttaatagcagaccctgtgcagcatgtcagacaggaaaacaggtgggaagcacacatcactgcgagaatgtgatgacaacatcaagaccattggagctccttcacatggatctttttggacccgttgcctatctaagcatcggggaagtaagtatggtcttgtaattgttgatgagttttcccacctcacttgggtgttctttctttatgataagtcagaaacccaaaggaccctaaaccgcttcttaaagagagctcaaaatgagtttgagcttaaagtgaaatgataaggagcgacaatgggttctagttcaagaatctacaagttgaagagtttcttgaggaggaaggcatcaagcatgagttctccgctccctacacaccacagcaaaat

SEQ ID NO: 54035 - DNA, 409 bp, Zea mays
  unsure (1)..(409): unsure at all n locations
gaccttaagngacctgagctgcaactgctttgtgcagcgttttttttgatttattaatcncgaatgcaaaatacgtgatatacccggtgaaataaaaatcaactattgttatgttcatatagcccatttttatgttttgcagcggggtaaccacccacttgtatgcgataagcgggggaatgggaacacatctacacactgcacatgaattcctaccactgaaatactcttacatataatgacagttcatgttcatccccttccactacaatatttatctacactgaaatactctaatatgaaatgaccgntcatattcatctnctttcactaaaatacattcatatctcataagatattggagacaaataatttaagtcactattgtcgtggagaatccgaggatagt

SEQ ID NO: 54036 - DNA, 440 bp, Zea mays
  unsure (1)..(440): unsure at all n locations
tctaaagggagaacacattntacgattaacaaatgttcattttgttaataacaggatatgtagcgcatgccaagcaggaaagcaagttggtgcccatcatccacacaagaacatcatgacgaccgacaggccactagagctcctacacatggacctattcggcccgatcgcttacataagcatcggcgggagtaagtactgtctagttattgtggatgattattctcgcttcacttgggtattctttttgcatgaaaaatctcatatccaagagaccttaaagggattcttgagacgggctcaaaatgagttcgccttaaggatcaagaaaattagaagcgacaacgggacggagttcaagaactctcaaattgaaggcttccttgaggaggagggcatcaagcatgagttctcttctccctacaccccacaacaaaatg

SEQ ID NO: 54037 - DNA, 445 bp, Zea mays
ttaagtcacctgcagcatgcaagcttggatggcttttatattatatattattcgggaaaatcggcggtaataaccagccagtccaaggaaactttgaacttgatgtacagcggttggcggtttccactctaaaatatccttgaccttgatgggatcaaccacaatcccattcgtagagagtacatgtcccagaaattggatttcctacagccaaaacacgcacttgctgaatttaacatatagttgatgttcccttaagcgcgttaatacgatccgtagatgttgagcatgctcctcttaattcttggaataaatcaagatatcatcaacgaagaccactacaaatttgtccaactcgggcataaataccgagttcatcagatatgtgaagtgggtaggagcattcgttaatccacaagacataaccaaatattcgaataatctg

SEQ ID NO: 54038 - DNA, 440 bp, Zea mays
  unsure (1)..(440): unsure at all n locations
tgccaattcttatcaaagcaacaacacttacccgctcagtatttgcagaccattcctgtaacatggccatttgcatgctgggggctggacatgataggacctttcaagaaagctcagggaggctatactcatatactagttgccattgacaaattcacaaaatggatagagtacaagtcaatcgcttctttgaactcagccaaagcggtggaatttatacaagacataatattcaggtttgggatactgaacaacatcatcactgacctgngatccaacttcaccagttctgaattctttgatttctgcgagcaacaaagcatctagatcaagtacgcgtcagtggcacacccaagagccaatggccaggtataaagagccaacagaatgatactggaggcactcagaaagaaagtgtttgacaagagtgaaaaacttgc

SEQ ID NO: 54039 - DNA, 204 bp, Zea mays
aacctcattctctctcttattatgcgctgctgtgttaaaatgaggcttctaattctatgcataccgctcatggttggatgacctagaagaaaattcctaatgcctctaatgcacattatattacatttacaatgttcgatgcttcttatgtgcctaccaacaaattaggcgaaggacctgccacatatgttgggggcaaacaca

SEQ ID NO: 54040 - DNA, 385 bp, Zea mays
  unsure (1)..(385): unsure at all n locations
agcttcctcccttctntggtgaaagttattgttatcccgaatgtattcatccatcttctgaagcagcttctccagagtttgtgggggcttcctggcgaagtattgagttgtgggtcctggccggagacccttaagcatggcctcaatgacaatttcgttgggcactgtgggcgcttgtgccctcaatcgcaagaaccttcggacatacgcttggaggtattcctcatggtcttgcgtgcactggaacaaggcctgagctgtgactggcttcgtctgaaagccttggaaattggtcaccagcatatccttgagcttctgccacgacgtaattgtccctggccgaaaggaagaataccatgtctgggccacgttctggactggcatg

SEQ ID NO: 54041 - DNA, 311 bp, Zea mays
cctggagctactacatatggacctcttcggacccgtcgcctatctaagcataggaggaagtaagtacgggctaagtattggtgatgactcttcccgcttcacttgggtattcttttcgcaggataagtctgaaacccaagggaccctcaagcgtttcctaaggagagctcaaaatgagtttgagctcaaggtgaagaagataaggagcgacaacgggtccgagttcaagaaccttcaaatggaggagttccttgatgaggaagggatcaagcacgagttcttcactccctacacaccacaacaaaatggtg

SEQ ID NO: 54042 - DNA, 453 bp, Zea mays
  unsure (1)..(453): unsure at all n locations
acctgcggcatgcaagcttgtcaatacttatcaaaacagcaacatctatcagcacagcatctacaaaccatacctgtaacatggccattcgcgtgctatggactggatatgattggacccttcaagaaagctcaaggaggatacactcatgcactggttactattgacaaattcactaagtgcatagagtacaagcccattgcttctttaacttcagctaaggcagtggaattcatacaagacataatattcaggttcggaattccgaatagcatcataactgacctgngatccaatttcactagttcagagttcttcgatttctgcgaacaaaaaagcatccagatcaaatatgcatcagtggcacacacaagagccaacgggcaggtagaaagagccaacgaaatgatattggaagcactcacaaagaaagtctntgacaagaatgagaag

SEQ ID NO: 54043 - DNA, 178 bp, Zea mays
  unsure (1)..(178): unsure at all n locations
ctttttcccccaaaaaccaacnaagcccaaaatgcaatttaaaggctgtttttgttttaaacaaggaactttattcggaacatccaagcaaaattggatattccctcccaaccattctctttttcaggcttatattaaaaaaggttttagtttggctcccctaggcaaaaacataaaa

SEQ ID NO: 54044 - DNA, 425 bp, Zea mays
agcttgaagctggactctgtgctatgatgatttactatcttgcagatagtcttgcatataatagcctgaaggtatgagaactgcgtgtttggaaattttataatttgcaaatcattcttttattcttataccagctcttttacatatagggtttaatactaagcaacgcgttgagagcgcaaaagaatgtcgaagacgagagctatgatattgctttcaacaacctacgaccaaaggttattaagctgagaaacgaagctctggaaaaggataaaattctgcttacattggtggacaagataaaagaggacgaagctgcctcaaaggcccaggctgaagcccaaaaacgcgaaattaaagatctccagaaacagctagctagagctaaagaagaacgtatacttgaagagacaaaacgagagctt

SEQ ID NO: 54045 - DNA, 406 bp, Zea mays
  unsure (1)..(406): unsure at all n locations
tcgagcgcggcanagcagcggcgtcgtgcgcagagctacttgtgtttgtgtacagaacagcggaagggcggggagaaaagacaaggtttgatgtgttgtgtttttgacaataaggttacatgtgcgtttgaattttatttgatatatgcatgtgtttgatgtggttttcaattttgttcgatttaatcataggtatggagataatgcaagatatgactcattgtctaaatacatggatagaataagggtttatgggaaacaattcacacctgcatatgtgaaaggagttgaagagttcatgaattctgttagtgaaagatacccataagacacacacattcgttgtgcgtgcgtgaattgtcttaatcaaaagctgcgacctcatagagaaggagaaactcatata

SEQ ID NO: 54046 - DNA, 380 bp, Zea mays
agctttgtccacatcaatttatttcatttatttatggaaacgtaaaaatatattacaaggtgtggacaaatttacacagtagaacttgatccttaaaattacactattctctataaaggataatacaagagttttcttagagtctttccacagctaggtattcgagcttcatcaccatctgttgagcttcggatcgtctgctaagcttcggctctatgttcctcggcttcgtcatcctgtacatattaaagcattataagaaaaatgtcagtttcaaggaaaaggtaagcacaaggtatgattctattaccggcttgaggtgacttcgagcttcgtcaccagctaggctttcgccaccctctgtcctgatttgcttataa

SEQ ID NO: 54047 - DNA, 377 bp, Zea mays
  unsure (1)..(377): unsure at all n locations
gacacttaaaactcagcttgcatctgaagaattaccctgattgtattatatgatctcggctctccaatcttcgctataaacaggagatatgttgagaactgctctttcaagaagttccaccgacagtgcttttattgtttcgaagaacacatctgaaggtgagggcagcccctgtgctgctgacttagctagcaaatcagcatgctcattttgtcctcgagggatattnttgacagaaaatccctcgaaggaagcttcaactcttcgaaccatatccagatacttttcaagcttcggatctttagctntgcaactcttgtcgatatgacccgaaacaacttttgaatcagttttaagaacaggccttctgatttcca

SEQ ID NO: 54048 - DNA, 411 bp, Zea mays
  unsure (1)..(411): unsure at all n locations
agcagcaactctgcttggggacacacttccccctctctctcctgaagaacctcttcaccctcctgctccagatgtgaatgagtggcaccagcacgcgtatggcgtacctttctcttcaaccgatgacgtccaagaagagacctattttgatgagccggagcagtttgacccacccccatatcgcggggatccgggtccatcagccttataccactcgccccaggacccgtctggcagtgctcctcctccgacccagactggagaggaacattttgcctacgacctggcgcaacatctctntgctcctcatcaacctcctccccactggagatacttggctagacgcgtccctctctctctctttgggtcctggggccaaaaacgcggagaacggtcactattcagtacttc

SEQ ID NO: 54049 - DNA, 423 bp, Zea mays
  unsure (1)..(423): unsure at all n locations
gcttctnctggacaagcgctgcacttaccgttttttctatactgccacatataataacaaaggagcccctggcattggtggagtcaatgttgctaaatctattaaatactggtttagctcttcaaaggccttctgttggattggtccccattgaaagacttcggctgacttcagcacttcgaagaataggaagtttctctctgctgatctggatatgaatctattgagagatgccaatcttcctgtcaatctttgagcccccttttttgtagttggtggctccatccgaagtatagcttcaattttacttggattggcttcaatcccctttgttgaaaccaagcatccaagaaatttccccttcttcactccgaagacgcatttgtctggatttaacttcaagccagcttgcctgaaactggc

SEQ ID NO: 54050 - DNA, 441 bp, Zea mays
  unsure (1)..(441): unsure at all n locations
tgagttattntattacagaccacagctaaaagggagtgctgtttagttatattatacaaaccaagggaggcgcaaactcctcccgatgagttcttaagcaaaagatcctatgtggaggaccaagtactcccgcacttcagtcttgtttttgctcatttggtaccaccttggagcaaaagcaacaaaaatatgtcgcttcctcacctaaaaacaacaaagggataaaccctgagtatggaattactcagcaagtcttacccgactaatgaaaagactctcaagggtatgctggataaataggagtcaaagagaggctttagcaaaaatcaacttatacttttgcagaagtagcttactaaagtgagtccttactttcaatcttttaacgccatattaagtattaatagactctatttgcatctagtctaatttcacatcaca

SEQ ID NO: 54051 - DNA, 310 bp, Zea mays
  unsure (1)..(310): unsure at all n locations
agcttggaacatctggagatctttttttctttctatgagacaatattgtggagagggttcgtgcacatgttcgttatgacctaaatggctagatagaacatggtaacatttgtggatctcatttcctttctattangcactattgtggagatcatttatgcacatgtttggtaagacctaggtgactagatccgaggtgaatagcctataaacaatttcttaccaactcatatttataactagagcaattctaattagtataataggtggcgcgaaaccgaatatttgatctatctctactttttaatat

SEQ ID NO: 54052 - DNA, 316 bp, Zea mays
  unsure (1)..(316): unsure at all n locations
tgagacgggaacaatcgatgcatgcactaactctttttatgataacttaaggacttgaggattgccaaaaggaaggatcacagaatggaaatcaacacctcctcgaaaaacctcaaccatgctncatataagtacatccaaggtatgatcaagcccacaccttacacttataaaaaataacaagtgttttgaatgctttaagagggacacttgattaagcatgtgcttacattaaaaatggcttgattattagcaaggatgatagactctgttttatatgctcaaagaagggacacttaataaaatttgtcactat

SEQ ID NO: 54053 - DNA, 420 bp, Zea mays
tatctcaacttgagaggaaagcttatcctaaggggtgatgtgataatgtgttactcagagtcttgccaagagtgatattcatatgcttcttgcagtattatatgtgttgcatcatatggactagtgtttccgctgcgatgaattttttagcttctatagtgtaatagatagtcatgtggttaatggtgctttaagattgctttaaattagtgtcttagtttaaactggtattagtttgaattggtatcttaatgatgaatagtggtaggttgatccactaaattgaatggtgttttaactctgattatgtgcatttgtgtgctatagcatcttggtttgattcttgacacaatgcatcctaaaaagtgctaaagtgtagaaatgcttcaattttctaaccatgagcaaattggcgtctga

SEQ ID NO: 54054 - DNA, 411 bp, Zea mays
  unsure (1)..(411): unsure at all n locations
agcttatgaagattctttatcccaacatgggctattcggcggggccagagccaacccatgttagtcttagcaattaagcaagtgtcgagttcagctctatcaaaatctaccaagtatagctgaccctctaacactcccttaaatgctattgaatcatcacttcttctaaagacagtgacaccaatatcagtaaaaagacagttgtagcccatttgacataattgagaaacagaaagcaaattgtaatctaaagaatcaacgagaaaaacattggaaatggaatggtcaggagatatatcaattttacccaaacctttgaccaatccttgatttccatccccgaatgtgattgctctctgnggatcttggtttttctcatatgaggagaacatccttntcttccctgtcatg

SEQ ID NO: 54055 - DNA, 424 bp, Zea mays
  unsure (1)..(424): unsure at all n locations
tcatgctgagcgaccggtccttgtacgccctggcgcacgggtgccctcagcttaccaggctcaacatcagcgggtgctccagtttcagcgacgtggcgctcgtgttcctctccagccagtgcgggaacctgagatgcctgaacctgtgcgggtgtgtgagggcggcctctgacagagcgctacaggtactttcgtttgctgcagccttggtcgcttgagctcgcgttgatccctgctgttttggtggtgtgtcctgtcctgtgtaggccatcgcctgttactgtggccagctgcagtncgtgaacctgggctggtgtgatggcatcactgacaagggggtgaccagcctggcttctggatgccctgaactcaaggccgtcgacctgtgcggctgtgttcttataacacgtgagttgctttcacg

SEQ ID NO: 54056 - DNA, 420 bp, Zea mays
  unsure (1)..(420): unsure at all n locations
agctttctttggcggcatgacaaaggtcgangttttgttaaagnggncgaaaagggttcaccggaggtgggcgccaatgttggggacttgtccttaaatgctatgaattaagaacaaggcaacacagaaattgttaaacgttaaagtccttcgtccttcgaagcattatttcccttgggatataatgagtttcggacgaaggttatgaaggacataccttcatcagcacaacaataatgaagaaggattcttataaagtataaacacttaaatattattattaactcatttctattttattattatggaaaaatagacatgataacaaattacaaatgtaccttcggcttgaaagaaggcaaaagtacaagcgtgacgcanaagccaatgccaagtcagcgtgaacagtacgggagcact

SEQ ID NO: 54057 - DNA, 435 bp, Zea mays
tgtaaagctcaacacaagtattcaacaatgatggtccaaatgctgacatgattatgctggggacatcacaagtgaagtaagacattgcttaagtgagactcagtgtgcgtaactcaaagacaaccgatcaagccaaggatggaggcaagaagaggttcgaggtaccgagtgcacgtccatcacaaaccaagtggactaactagtttgccaagatgtcatttatctcaagtgcataaggttcaacaaaaaccaagaaagaaattcagttggggactcaaatttatttggagcaagacttgagagtgtgctgaaaaatggcgcaccggacagtgtccggtgcaccaggcctgagcgcaagcgaacaggccactctcgggtgtctgccaggcgcgctccactataattcaccagactgtaccgtgtgcaccggacatg

SEQ ID NO: 54058 - DNA, 430 bp, Zea mays
  unsure (1)..(430): unsure at all n locations
cgacaacgaggagatggctcttatcatcttgagctttcggctaatcctcaagcaaaggaaggggaaggactacaaaccccgctccaagagggtttgctacagatgtggtaagtccagtcattttattgctaaatgtctatatacaagtgatagtgacagggacgacgacaagaaagggaagaagaagatggagaagaaaatgtattacaacaaaaagaagggtgacgaggcgcatatgggccaggaatgggactccgacgagagctccaccgactcctcctctgacgaggatggcatcaacattgccgtcaacaaaggccttctcttccccaacgtcgaccacaaatgcctcatggctaaggatagcaaaaagaagaggtatattctatagatacccncaaatacactacttccgatgatgaaggtacct

SEQ ID NO: 54059 - DNA, 386 bp, Zea mays
  unsure (1)..(386): unsure at all n locations
ccttcatatttgttaatcatatgacttaagatactttactttaatagtttttgcactttagtccaaaagtggactaattttgcacatangtccctanggtttggttttagggttttccagggtttcaattacggtttttggtatcccacgggtataaatgtgattcaagtttatttttgggaacattntatgactattcccctaaagcctttangttttctcaacttgggttatgttttacccctttaatccctatttagcggttaagtccctatcgagggttctatttgcaaaacactaaaacaatacaactntgtttgaaattttacctagtgaatgcactctangtgtgtcaaacatatgcaatgccaatgcttatgatgtca

SEQ ID NO: 54060 - DNA, 336 bp, Zea mays
tgttgaatgctaaaatcggaccctcgatgagattgttttttaaatgcttgaagagcatacgactcctatgcgttttgggccgatacgatcaacactgccttgtcatgtgttcagtcgtatctttctttgggcttttctgaacaaaacttcttactaccacccaaggttatccatttgaaggtattaggctgcaaatgctttgggctaaaacagggtaatctatacaaatttgtatcccacacttctgatggcgttatttgggtatgcattacattctgatgcttatcgtgttcttaacctagagactagctgcattatggagacttgtgtggccca

SEQ ID NO: 54061 - DNA, 323 bp, Zea mays
  unsure (1)..(323): unsure at all n locations
tttgagaaagacaggatntgtagcgcatgccaagcangaaagcaagttggtgcccatcatccgcataagaacataatgacgaccgacaggccactggagctcctacacatggatctattcggcccgattgcttatataagcatcggcgggagtaagtactggctagttattgtggatgattattctcgcttcacttgcgtattctttntacagganaaatctcanacccaagagaccttaaagggattcttgagacgggctcaaaatgagttcggcttaaggatcaagaaaattagaagcgacaacgggacggagttcaagac

SEQ ID NO: 54062 - DNA, 414 bp, Zea mays
tctcgcttttgatgggctatggcaacaaatcttgcgtaacaaatatctctgttcaaaacctttgtctcaagtggagtgaaaaactggcgattgacacttttggtcttgtctaatgaaggtaaaacgagagttctttcgttttggtgtttttgttgtgaaacatggatcccaagtgcgtttctgggaggacatctggttatgtggttcaaccttaaagggccactacccttgcttgtataacattgctagatcaaaatctataacaattgcagaagctcttaatgtgtcacttcctaatctcttgtggcgaagaagtctagttggtccaaatctagtagcttggactgaattgtgcacccgcttatagaacattgttgtaactcacgagcaggatgatttttattggaagttacc

SEQ ID NO: 54063 - DNA, 299 bp, Zea mays
agaaagacacgattcggagcgcatgccaagcaaggaaacacgttggcgcccaacatccacacaagaacatcatgactactgacaggccactggagctcctacacatggacctattctgcccgatagctcacataagcatccgcgggaagaagtactcgctaagtattgcggatgattattctcgcttcacttgggtattctctttcgaagaaaaactccatacccaagagaccttaaagggatccttgagacgggctcacaacgacgtcggcttaacgatcaagaaaatcacaagcgac

SEQ ID NO: 54064 - DNA, 373 bp, Zea mays
ttacctacctgatttcgcaaaacaacacgccgggctcgatgcattcttaatggcttacatttgcatgggctggctgtggcaatcccgcttaacacatgtggggaagaagaacctccacaagcttttaaagggagaacatgtgataggttctaccaatgttccatttcaaaaagatacaccttgtgcaacttgtcaagcagggaaacaagtgggaagctctcatctcacccaacatgtgatgacaacatcaaaatccctgaaactgctacatatggacctcttcggacccgtcgcctatctgagcatatgaggaaataagtgtgggctacttattggtgatgacttttaccactcacttgggcggtctttttgc

SEQ ID NO: 54065 - DNA, 450 bp, Zea mays
  unsure (1)..(450): unsure at all n locations
atcttagcgactgggctgcagcttgtcactccggaatagaccccatgctacttagaatcttttcatctatcaatgctgacactggcaagcagttaaaacagtctgtgaatgttttccacagctttacactgaatctgcgtttgcactcgtcataaaaaccatagatgcgatttactgatgcgcattcatggttgccccttagaagaaagaagttctccgggtacttgaccttgtaagccaaaagaagacatattgtttctaggctttgctttccacgatccacataatcacccaagaaaaggtagttggcctgaggcggatagccaccataatcaaatagcctcaggagaatcagagtactggcatggacatcacctgatcagaaaaaaaaatatgtgagatcaatatttgtcacgaagctccactaaaggcatttangggaactcatac

SEQ ID NO: 54066 - DNA, 409 bp, Zea mays
  unsure (1)..(409): unsure at all n locations
tggaaagcagagagagaaagagagagcataagctacaggccgtttttggaatggatgcagtgcactaatcggtgtactatcagtaggctagtattatccggtgatgaatatagatgttcaataagcacgaggcccgcgagcccggcacgaagcccgtttttttggcccggtccgagcccggcacggcccggttatatgcgggcccgggccggcccggcacgaataagcgggctgggctcggacaagatattaggcacgatgggctatcccggcacggtccgtttagctctaagcccgctntttttacactaaaacgtgcttttcggcccgcaaagcccgcttttctgcccgcttttttcgtgctaaacgggccgacccggcccgtttagtccctgtgcggcccgggatc

SEQ ID NO: 54067 - DNA, 415 bp, Zea mays
  unsure (1)..(415): unsure at all n locations
gacacgcgttccatccagagattgctattgtacttggggagcaataaacgttatttcgggcatgcgtcatcgtagttggtgtaaagggaccggaccgcggtcctatcaccctggttgactgtgatttcacgtggggtaggtatacacattgaatgctcaagtccccgcggttcttgtgcctttgactganggcgggctcggagctgtcttcctacccgagacgggcttgggcgaggcgaaaacgacgtttctgtggagaggggaccttgggcgggacgaggatttcctcgagcgctgccctttgccgagggcgagctcgagcgaggcggagttttgagtgaccccccgagctacggctcgaacgaatcatggctcatactttctcgacctcagtgaatatgtatgacaatactct

SEQ ID NO: 54068 - DNA, 406 bp, Zea mays
  unsure (1)..(406): unsure at all n locations
ntggaaaaagataaaattctgcttacattggtggataagatattttatgacgaagctccttctaaagctcaagccgaggctcataagcgcgaaattgaggatcttcggaaacagttagccagagctaaagaagaacacatacttgaagagacgaagcgagaacttagtgaccagtgggcaaatcatttaaaaagaaacgttgaagagcttcgtgcatcccagaaaaggtgctataacaaatctatagaatgcgctaagaaaataaaaaccagcttcgccagtgttggcgcattctcgagtgaagaaaacttcacaaggggtgaccccgaaggcccaattgaatggatcagtcacgaagctgaagcctttgaagaaattttgaatagcccccgagacatatgtgcct

SEQ ID NO: 54069 - DNA, 443 bp, Zea mays
  unsure (1)..(443): unsure at all n locations
ggatcttaagcaccgagcatcaactggagacaagtattctaaattattattttctgtggatgcatgaacatattaagttttcttaggctactataatatcatgcaaggacagtggaacatcattctccatttttacatccatatattatttataaaccatttaaaactatataatatgcatcaaacaagttaaatcactaacttaatcatacatgcaccacaattcatgaaatttttaccagtcaccaagcatcacaccaagatctactgtaaaaatgtcaatccatttggagcaatagagctatagatcaaaaaataacaagaaaatcaataatatntttcctatntaacatgttttaattaacataccaagaaaacagtgaacaacatantaagtttatatntttcgtagctagagtatgacaacatctaactaacaaaac

SEQ ID NO: 54070 - DNA, 411 bp, Zea mays
tcttggaagcacgcagctccctgatggtggaatccttggtgtttatcaacttgttgagtcaagagacttcatcttgagatgcatgcagctcatggcgatgatggtctaagtcacacatggtgaagagatggctcctctccaggatggtccaggagtcactagtgtcacggtacaccctcgtcagattgtcacgggaagcaattgtttgtttttctttctacaagcaagaacagcactaaacattgaagctaggagagcaaagcataagcatccaatgaagtttacctcgtgtgccatcttctcggaattgagttgcgcattcagagaggaagttagggaatgagcactgtccacaaaagcacaagtctggattaagcccgcctgtctttgagaatacttttttcaatgtca

SEQ ID NO: 54071 - DNA, 373 bp, Zea mays
  unsure (1)..(373): unsure at all n locations
atgaaaacttcctctccttcagntggtttaatattctatccttagtgggatgtaccatagtataagttaaatttccttgcaatataaaatgttcaatagtgcatataactttgacatcaactatatgtgtgcactaatttaaaggaatttaatctatccttttgggtttcaagaatgattattcattctccatccacatataaggattattatttgtgaaaccctcccttgtgtttctaatgctctcttttctaagtgtttcaataaggtctttccaagtgctttcaagatggattcaaaatctacggatataagagtcttggttctttcaatcattgagtttcaatgggtctcatatcaagtatgatcgaac

SEQ ID NO: 54072 - DNA, 413 bp, Zea mays
  unsure (1)..(413): unsure at all n locations
ttagggtaatagttataaaatatccctaagaataaacttgaatcacatttatacccctaaggcaccaaaaaccctaattggaaccctggaaaaccctaaaaccaaaccctaggggcctatgtgcaaaattagtccacttttgggctaaagtgcaaaaaccaagccaaataagtattttaagtcatttggttcacaaatatgtggacttgatagccaaaccctaagttttggacttaaatgcaaaatggacctcacttaggtttcattctaagtctgaaattcagtgttgaggactccactttggagccctgtatcttttgaaatatanggtttttggccaaagtgaccacaacaagtctgtagcccaattatatgagaacaactttgtttaaaagtgcaagccatgttcttgt

SEQ ID NO: 54073 - DNA, 413 bp, Zea mays
cagcttgactcattctgttcattcgcatacagctttattcttagggcaccgtacttgaggtcgatgggggaggactgcttccgctccataggccataaagtacggcgtgtatccagttgagcggttcgagtcgttcttaagctccagaggactacgattagcacatgtggccatcactggccaagttgcttgagacgggtgaaatctcgatacttgaggccttgcatgatcatcccattagcctgctcgaccaatccgtttgcacggtggtggcccacagcggcccaatctacacggatgtagtattcgtcgcagaactctaggaatctattctcggtgaactatgtaccattgtctgttatgatcaagtttggtaccccgaagaggtgaataatgttggtgatgaactttac

SEQ ID NO: 54074 - DNA, 406 bp, Zea mays
tcaacttgaagctgaagctttgctaacttggtctaagagatcttgttttgtcttcctttgtaacgttgcatgcctccccttttatagctaacgggggcgtgtacaatggtactgatccccgacatgtgggcccaagcacataacagatgtagtacttggagctactaacgattgctgttggagcaatcttcttgcgccctgacatcccaaaactgcgtagcatcggcgtgtaggggaagcttctcgtataagggatgatgagcacagtgtttcgcgcagcacgggcgcactgtttgacaatatactggacaggtgcgccgtttgcaagatggccctggcgccgcctaccagtggaatggacaggacacattaaatgctgagagggcacatcgtttgtctgcacggt

SEQ ID NO: 54075 - DNA, 417 bp, Zea mays
  unsure (1)..(417): unsure at all n locations
agcttaccaaggtcctcatggacggaggcagctttctcaacatcatctacgccgagaccctcgggctcttgcagatcgatttgtccacaatccgggccggtgcggcgccctttcacgggatcatccccgggaagcgcgtctagccccttgcacaacttgatctgcccgtctgcttcgggactccctccaacttccaaaaggaaaccctcacgttcgaggtggtcgggttccgaggaacctaccacgcagtgctagggagaccatgctacgccaagttcatggccgtccccaactacacctacctcaagctcaagatgtcgggccccaatggngtcatcaccgtcggatccacataccgacacacgtacgaatgcgacgtggagtgtgtggagtacgctgaggccctcaccgaatccg

SEQ ID NO: 54076 - DNA, 408 bp, Zea mays
tcagcaacttcaacactcttttttggaattgtgcttgaagacttaattgtctccaagacgtctagtacatttaccattcttttcctttttggggtcactgatggccccttttggttttttgctgtcccaatgattgctgtaggactcaaaacttctgatgttttggagccctcagttgcttctcttacctcctcaattttttctgtgagcggcgcttcggctttctcttttgtttctgacaacaaaatgtttgattgttctgattctatctttggtggcacttcggccgtttctgcgatctctggcaacaaagctggctcgattagtttttcagcttccgtggctgaagaagttttcccggtaaactccggcaccgaagctggttcaatataacgaggccgttgcgta

SEQ ID NO: 54077 - DNA, 402 bp, Zea mays
tttagcaacgaaatcaatcgagacaattatatagaattatttctttttcaatgaccagttcttgaagcaccctccagaatacgaagagtcccaagtccacaggtccttaaaacaaccataactactatgtctagcgttcttacagaccgcacgacttcaacaccacttatgttacacctggatttagaacgaaaataaatgtgaacaatttacatgcccacatccaaatcacatgcacagaggttgcatacatgccatcccattacatagtgcatacatataaagaggattaaacaatattaccaaccccttgtttaaacatatataaccttgttcataaaattaagcgacaaccgaaccaacgaatgaaaggattacgaccctcatagcatctgctgggga

SEQ ID NO: 54078 - DNA, 326 bp, Zea mays
aagcccatgcttttatgtgaagatatagcagagcagaaggtgttgctgggatctcaattatctgaagaacaggagaaaaacctaacaaggtttctgttcaacaacaaagatgtcttcgcatggtccgccaatgatctctgtggtgtcaacagggatgttattgaacactcgctcaatgtcgatccatccattagacccagaaagcagaggcttcagaaaatgtctgatgacaaagccgaaggtgctcggaatgaagtgaaaagacttctcagtgctggagttattagagaagtaaaatacccagaatgactagctaacacttgtat

SEQ ID NO: 54079 - DNA, 408 bp, Zea mays
tcagtcttagcgttagtctcggtcttagttagttttagttagacagggtagtttgctatatcctgtgcatttatgtttgtcatgatgaactatgtttggtttggatctttgtaatgattgtcaccagagtgtgggtatcccctgcattttggtttacatactatgtcaataaagttagttatatagttgggaaaacctttattctactttcctctttatttgagaagctgtggggtctgtgttggagatcagtgaagatgctcatctgttcagtgctgttggagaattctatactcttttcttatgctgcaagctttgccagatcagttctgatgtgtggttgcgttctgcagatgtcagagaacaggcgcataggaggaaggcgtgctcaacatgagcaagccggtc

SEQ ID NO: 54080 - DNA, 390 bp, Zea mays
  unsure (1)..(390): unsure at all n locations
gagagcgcgacacaatatatgttgtttcaacaatcacaagcatcaccccttttatacgagagatgtttttaaaataaattattttactcattgagcacttgaccccactagtcaaatatccaaagtaacttttcataatgagcttcgagaaggtgtttctcggaccttcaacacgaggacttccaatcatattttatgtggtctaagctcgttatgaaaaacaaactcgttccgaaggggctactggtgggctctatattaccgaagattctcanaaccctttgttntcaggttgagagtgtgtntcangcacaatatgaagaatagacaaagccaaccttcgggcaaagcggctagtgagccagaaaagaagatctttgcgtgcatgtc

SEQ ID NO: 54081 - DNA, 337 bp, Zea mays
  unsure (1)..(337): unsure at all n locations
ntaccatatgtcatcttgtacccatcaaacacattctgcacgattcttatgattgtcctaaccttcatatttggttccgactgcagaattcacataaatcgcttcccaatgagggttgatgtcaactggcgatgtttcatcgctaactcatgttcaacacatgtgagcggccccactacttttgtcatattccactttgcggtgatcctttgtatcctagcacataccctccatgaacagttatccttgccgcatacaaccgggtaaccacgtttctcgtaccaatgaaatactctatacggcctcttacgtaagactgcataatgctgtaaccacc

SEQ ID NO: 54082 - DNA, 440 bp, Zea mays
agctctatcaaatggacgtgaaaagtgcccttctctatggaccaatcaaggaagaggtctatgttgagcaacctcccggctttgaagacagtgagcatcctaaccatgtctataagctctctaaggcgctctatgggctcaagcaagccccaagagcatggtatgaatgccttagagatttccttattgctaatggcttcaaagtcggtaaagccgatcctactctattcactaaaactcttgaaaatgatttgtttgtatgccaaatttatgttgatgatatcatatttgggtctactaacgaatctacttgtgaggaatttagtaggatcatgacacagaaattcgagatgtctatgatggcggggttgaagtattttctaggatttcaagtgcaagcaactcaagagggcaccttcattagccaaacgaagtacact

SEQ ID NO: 54083 - DNA, 410 bp, Zea mays
  unsure (1)..(410): unsure at all n locations
tcagctccatctaagttatggattgcctttgagtttgtccagtttcttccgcccttctggcagctttctgacttccatgaatagcaatgggcccttggttcgaaagtatcttcatgcaaagatatgctggatgaagaattgcttcaaaggcattgagagtaccaccaccaatgattgcattgtaagggtattccatgtcaacatatcaaacacaacttgttcagtccttgtgttgttgataaatcccaaggttactggcattgtgattttgcccagtgctacaatctgcctttcttcgaagccacaaaggggatgtgtggcatcatggatcttgtcttctagctcttgcctctgtctgaaggccttggcnaatatgatatcagctgcactgcctgtatcaaccaaaacat

SEQ ID NO: 54084 - DNA, 331 bp, Zea mays
ggggcataggtttaaccaaaatcaaaccctctaattgggaaaacccttgggcaccaattcaaccttggttcctggcaaccacacaatggctccctgcgtggtgggggagaaccacttgggtccctacaacattttgttaggacggggacaaaatggcctaccttcgttcctcaagaagttgttgacttctcctggcatcgcaccacccaatcccaaatcttgaaggcctcctctaccctgtgagggctaatacaggaaaacaaaaaagtaatgctccaaaaatgtgcaacacgaaaatcagtgggtacccccttatgaatgtccccaggat

SEQ ID NO: 54085 - DNA, 321 bp, Zea mays
  unsure (1)..(321): unsure at all n locations
taggtgaccctcttagagtgccttaagagctactgaatcatcacttattgtaaagaccgtaacagctatattccgagaaagacaactggagcccattttgcataattgagacactgaacgccagatgttatgctgagaatctgccagaaaaacattggtaatgtaagggtcaggtgatatagcaatntgaccaagtcctttgaccaaccttgatttccatccacgaatgtgatagctatttgaggatcatggtgtctctcgtaagaggagaacatngctgtctcccctggcatatgggttgtgcacccgctatcaatgagc

SEQ ID NO: 54086 - DNA, 106 bp, Zea mays
gacctatgaaactaagctttggggagtgggagagatagagatctccgggcgcttgttttatgctataacgagcacgtgcaaagagtgaaactcggatgccacgaat

SEQ ID NO: 54087 - DNA, 340 bp, Zea mays
tttcttgtgtcattccgatagaagcgtcagaattcgaggtcttatttcttttaagaggggtagaatgtgatacccggtttgcaaagaaaaaagtgggggttgctttttttgttttttttccctcatccagttgttgttttggggatttggaattttgtgaataacatttgcaactagggcagtagaatttttttggtttgacatttgcgttgcggtcgggagctgtcgcgtgggttagttgggccgcaattggtgtttcggcccattaggcctcccaaaccctagccgccaccctcctatctactccccctaatggctgccgtctttccagagctttatc

SEQ ID NO: 54088 - DNA, 350 bp, Zea mays
  unsure (1)..(350): unsure at all n locations
cttcggcttgggccagaatcttcacatgttcgcatcctgccttctctaagatagccgcaattcccctggcacctaagaaggcgcagacatctccgcgaccactcaaaacttcctcaaaggcttcggcttcgcccgtgatccattcgattggaccttcgggatcgcctagtacgaagttgtcctcatttgagtatgcgccaatattggcgaagctggtttttaccttttctacacatgccacagatttttcatagcatctttcttttgaagaacgaagctccacaactgttttttcccagtaattnttccagtagtcactggcgtctcggtcagcttcggcaattgcacat

SEQ ID NO: 54089 - DNA, 411 bp, Zea mays
  unsure (1)..(411): unsure at all n locations
tcataactnctagtggtacctattgctaccttcagatgcctgatgggctcaaaaatgctggaggaagcttcagtagaatgactgccaaggttcttcgctctcaaataggtaggaatgtgctgacttatgttgatgacatcatagtgaaaagcacaaaacaagaaaatcatgttgccgatttgcaagagacgtttgccaatttcagacaagctggtctcaagttgaacccagaaaaatgtgttttcggagtaaagaagggtaagtttcttggctgcttggtatcaacaaagggtatcgaagctaatccaagcaagatcaaagctatccttccgatggaaccaccaaattcaaagaagggggctcaacggttggcaggaaggttggcatcattaattagaatcatatcaagat

SEQ ID NO: 54090 - DNA, 417 bp, Zea mays
  unsure (1)..(417): unsure at all n locations
acttatgactttatcttaccgttaaaagtggcaaggggacctctatgggccataagaatgggtataaatagcacccaacaccaagagctacatgttagaaccccattacactaaaaccagagtcactagatgatttggtgcctatttaagctaagcattggatcaattcggtgcatgtccaacgactagtttttgaactagttgttattgtaccatgaagcactgtagtgacatgtagtttggtgttcatcaccagattaatacaatggcaactntacatttctaaacagtctcggatcaatccgatgagtccatgaccgaaccctatagcgtataatatggcagtcccacgtaagcgcactagataagtctggtgctatntagaaccttctattcacctccaattcaaccaactat

SEQ ID NO: 54091 - DNA, 409 bp, Zea mays
ttctaacataaatgggaaaaagcgggaacctataccagcttcttcatctgatggtgacactgatggggatagtgacagcagcactgatgaagaagatgaataaattaacgaggatacaaagcccatcctacatgtacgcttttattaccgaaatcacaactcgagacttagccacataaaactttttttttcaatgtcagcaagctatgttgatgtagtgatgttttctgttgctatatttcaatgtaccagctaaaaaaggtggctcatgcggggtgtgtaaatcggatacgctcaatgactcaaaagccacatatatgtgctacttggggagatactggtcatgttcaggtgattcaaaccttagatttctttttcattttatgtgatcgttggctgcctaaacctg

SEQ ID NO: 54092 - DNA, 473 bp, Zea mays
catctcgaccggatcttaagtcacctgcggcatgcaagcttgtggcttgcccgagtcccgttctctttttattattttttggttggcctgtcgccttgcccgtgaaagggtgcaagcatgcaacgcaaaagctccctgtggtctgccgctgctagacgcctagacctatagatatccaaatgagcgggtcgtgccggcacggcccgaacatgcctaggcccggtacggattagaaccgtgtcggcccggcctaaattagctagtgggccgtgccgtgccgtgccgacacacgggtcccaagcgaggcccaggcacgacccgctaggttaataatcgtgtcaggccgacccacagactgacgggtctaacgggctcataataatatatgacgtttaaatgataaaaatatcctaaaaatatgcattttttacggtttcaatcatatttattagctctaaacatttatttacacc

SEQ ID NO: 54093 - DNA, 453 bp, Zea mays
  unsure (1)..(453): unsure at all n locations
gtcacctgcggcatgccagctttgccctatcttgcttctatttgagctattatatgaattacattctacaaattggtacttatgaacctgcaagtgcatacttagcaaactggttagtactcgaggttatgttggtcattaatcaccaaaactaagttagaaatggcatatagtacatttaccttcacaaggcaagagacatgttgcacatactcacacctgattagtccacagggcccaaaccaagatgctactttgtttataatcatgtgtcatagacccaaaccataagggcacatctccaccttgtgttcgcatttatggtattttttgtgtatacatcacaaagaccatagaaagagtagatctggtaccaaagacnttcacatgagtaggatctagaanagggtctaaacttacacgggattagactattgcatcatgtcataacta

SEQ ID NO: 54094 - DNA, 419 bp, Zea mays
  unsure (1)..(419): unsure at all n locations
agaagcgtcgtcagaggcaattcatggatgggctcccgttggagccgtcgccggacacgcctggcaacgacgacgatgatgatgatgatgacgaagacgatgacatggtggcccgacttggcctcagtccggatccgaggctgggccagaggtcgtcgagccagctcccatgtgggctggcgtcaccaacgtccgaagagcggaggtgggccgagggggtacttgaccccttggccgagataattgaggtgactccgacaggtcagaccgaaccgcttgtcccccaagagcaagcgcccgtgccggccgtacgggaagttggtcccccagctgtcgtgatgtcgcctangtaggccgccccctcggcgcctcgggcgtncgaggtggaagcagcgtcgaagccggccacggaacaaccc

SEQ ID NO: 54095 - DNA, 328 bp, Zea mays
ccgaccttgcaactatggtgcaggaaggaaatggttatattcttattggtctgacacacattctctgtaagtcactgcgtttcccttacattcatttactttgaaaatatttactaccaaaacaaaaattgactcgtaatttatatttttcatgccaatctggtgataatactttccaccttaaattttttgtttattctctttatgctgtctatgcacgtgaatatatctgacgtacgaatgtgaaaatgaatgtctatgaaaaagaatcttcatacaaccaagtacaactcagtttagtgaatgtctatgaaaagaatccttctac

SEQ ID NO: 54096 - DNA, 423 bp, Zea mays
  unsure (1)..(423): unsure at all n locations
agctntgtaggagaaggagatggtatgaagctttggggtgcttaagcgagttaattcaattcttattaactcaagctatgaatcttcaaatgatctatatattcaagattgacccaaagttatttcagtttattatattcaaaactcatatcatctcgggaagatattaatgttgtaggaaataaagaatcatcatgtgcggaaaatcaagtcctacaacatggaggaatgtcaaaggatggtaactcttatacttttaagtgcaagtatctcaaattatcatttcttatatgtcttgtgtagtcacatagaanaaggaagcacctaagatgtttttaaaattatgtcaccattctttgaagaaattcctctcatatggtagattgcatattcttcatttctatattatggcaatctacatgc

SEQ ID NO: 54097 - DNA, 377 bp, Zea mays
gtatcatttcatcaagaccctcttgggagggaaactgctttttaaattctgaatggcatttggtagctctccaccctctgtttcaagggaagtgaaacccgaaatatttctcaagaactttagcagaaacaagtcccttcaccacttttaacataccgataaaaaccctttttggctttttgatcaaaaggttaacgaagtgagaccgattaaaaccttaaccatcaacagcccaaccaacaatgggccttgtgggctttgttttgctatgaaaaacaccacgcaaaggacaatggtcttctttgcggcaatatcacaacacaaagcggtacaaccaattctggcatgatgtcctttacaccacatttttgacaaac

SEQ ID NO: 54098 - DNA, 279 bp, Zea mays
  unsure (1)..(279): unsure at all n locations
ttacttctttatctttattgtgaatcaactcttgaagctctangtttctttccttttcaaggataagcaagtcttcttgagcatcaagagttgcttttcttttatctagcttttccattaatttggtgataacattgtatccatttaagccaaattctttaatcattntatttttcatggcaatntgatcatcatcatcatcatttgaaaaatcattactaaataaagttaccttatctcccttntccatganngcaagtggagtgtangagtcgtctt

SEQ ID NO: 54099 - DNA, 409 bp, Zea mays
  unsure (1)..(409): unsure at all n locations
ntggtctagtgcacccaagatccaaacaaataccttcaatcattcgtctgaaggttccttcgtcttcgggcctaggcgccagcggtccaagatgacatcgccattgaagccaaggtcaaggggctcaggacaggaccagtagctcaacattttgcaaggaaacctctacattcttttgagaagttactacaaaagatgatgagtacataaaagttgacaatgacttttgccaaacaagggaggagttaaacatatatactgaactcgctaggggctttgggggaagatttcacccaaggaatgcccgaagcattcacgacccgatgcaaggtgaagaaaaggcgacccaatctcagggtcaatcaggccaacaataagcaagctctcagcagcagcattctcatggcac

SEQ ID NO: 54100 - DNA, 134 bp, Zea mays
ggagtggagcaagttcagcatattcccaaagcaaggacaatcatgaagtccatcctcgcggagccggacagtgaacatttcagccaacaaaatcttgatgccatatgcaaagctcttcaagcacccttgtctcg

SEQ ID NO: 54101 - DNA, 380 bp, Zea mays
tcgcaccttcgaactaactcggctgcatcacttttcgctggtgttttatagaatcccgacctgaagaccttcccgaccagtgtcttggacgctgcgtgtattccacattgtgcagcatggacctcatctagaagtcgcttccccgtagatgagagaatgcctttcatgaaaatgcctgatgcgccccttctgtatagtgtctccccaatgagtgtgtagtgagctgactgtctatcgatgcgctcggctgcatttttatcgtctggttcctcttcattctttatatatctgatgatcggccttcttcagtcatcagagcccgactctggttgattcaccgatattacactcctttgcctgatccattgagatgcctggct

SEQ ID NO: 54102 - DNA, 440 bp, Zea mays
  unsure (1)..(440): unsure at all n locations
gcttctaaagggagaacatgtgataggtctaactaacgtgcatttcaaaaaagatagaccttgtgtagcttgtcaggcagggaaataggtgggaagctctcatcacaccaaaaatgtgatgaccacatcaagacccttggagatgcttcatatggacctcttcggacccgtcgcctatctaagcataggaggaagtaagtatggtcttgttatagttgatgatttttctcgcttcacttgggtattctttttgcaggacaaatctgaaacccaagggaccctcaagcgcttcctcaggagagctcanaatgagtttgagctgaaggtgaagaagataaggagcgacaatgggtccgagttcaagaaccttcaagtggaggagttccttgaggaggaggggatcaagcacgagttctccgctccctacacaccacaacaaa

SEQ ID NO: 54103 - DNA, 415 bp, Zea mays
  unsure (1)..(415): unsure at all n locations
tgaggaaggagaaaccgcagcaagggtcaaactccttgagaaagatgttcctaaagcaataagtgaagcaatcaacatgagacaagaaaaaggtaatgattcaattagtcatgttgtttgcactaataatctctctgtgtcatccaaaagcaaaaagagaagaggaaaaaggaggtgcttcaagtgcaaggaattaggtcacctcattgcttcttgtccatacaaagacaaagaccaatggatgaggagatgttntggatgcaatgaaaaggaccacatgatcacttcatgttcggtcataaagaatcaaggacgtgcaccctccaagatgaccctcaccaaggaaaatgataaacgacaagcgtcatgtcgggttgagcgacgtttctgctacatgtgtggtgagcatggtcat

SEQ ID NO: 54104 - DNA, 440 bp, Zea mays
  unsure (1)..(440): unsure at all n locations
agcttaatgcccctaanagatagtctaattntgttgatggcaaggctcccatggttcaagatagtgaaggctacattttatatcctgctaactatcctgagcacaaaattaggaaaattcatgctaggaaacctcataatgtttctcaccatgcattcgtgtataaaaataaggcttctagctctaggcataccacacatgttaaaatgcctagaaagaaaattcctgctacatcaaatgatatgtttcttttaagacttttgatgcatcgtatgttttaactaacaaatcaggcaaagtagttgccaaatatgttgggggcaaacacaagagctccaaaacttgtgtttgggtacccaaggtgcttgtttctaacgtcaaaggacccaagacntgttgggtacctaagaacaaggcctaaacttgttttgtatgtttat

SEQ ID NO: 54105 - DNA, 411 bp, Zea mays
tgatgtagcaacctcatgtgatgatttgattcaagaagagcaaactattctacatgctgaattgactgaaaaagttgaagtcctgactttaaacaaccaaaaattgaagaattacttgactgatgcaactactagaggaaaagttgctattgagaacaatgatttcaacaatgagttggcagtggataatcaaaggcttaagaatgaggtcaagaaactaaaaagtgaaaatgaacatcttgcaacaagtgtgcaaaagttcaacaagggtcaatacctccaaaatgagctgcttatgaacactgttatgaaaaataacaagagtggtattggatacaatgcttttgtgcaaaagaaagctatcactcaatacaagccaaagcagactcacaagcctatcaaatgctttga

SEQ ID NO: 54106 - DNA, 314 bp, Zea mays
gaacatcaatgcccccactttattatttgaatctaagtctaactctaatgatgattcttgccagcattgtgccaaatatcatgcctcttgttgtctaactaaccatgccaggaagcataacccacaggtgaaggtcaaagaaattctgaaaagatgctctagcaatgatgggttaaagaaagttgaacccaagtacaagtcccttaagcccaacaatggtagaagggggcttgggttcaactcatccaaggaaaaccctagcacagtgcataaggggtggagatcccccacgttcatagagggaaccactctat

SEQ ID NO: 54107 - DNA, 416 bp, Zea mays
  unsure (1)..(416): unsure at all n locations
tctaaagggagaacacattntgggactaacaaatgttcattntgagaaagacaggatttgtagtgcatgtcacgcaaggaagcaagttggtgttcatcatccacacaagaacatcatgacgactgacaggccactcgagctcctacatatggacctattcggcccgattgcttacataagcatcggcgggagtaagtactgtctagttattgtggatgactattctcgcttcacttgggtattctttttgcaggaaaaatctcataaccaagagaccttagaaggattcttgagacgggctcaaaacgagttcggcttaaggatcaagaaaataagaagcgacaacggaacggagttcaagaactctcaaattgaacgcttccttgaggaggagggcatcaagcatgagttctctt

SEQ ID NO: 54108 - DNA, 166 bp, Zea mays
acacaagaacatcatgacaactgataggccactcgaactcctacacatggatctattcggcccgatagcttacataagcatcggcgagagtaagtactgtctagttattgtggatgactattctcgcttcacttgtgtgttctttctgcaggcaaaatctcatacc

SEQ ID NO: 54109 - DNA, 359 bp, Zea mays
tctaaagggagaacatgtgataggtctaaccaatgtttatttttaataagatagaccttgtgcagcttgtcaagcacggaaacaggtgggaggagcacatcacagctagaatgtgatgaccacttcaagacccctggagctgctgcatatggatctcttccgacccgtcgcctatctaagcatatggggaagtaagtatggcctaattattgttgatgacttttcccgcttcacttgggtgttctttttgcaggataagtctgaaacccaacggaccctcaagcagcttcctcaagagggctcaaaatgaggttgagctcaaagtgaaaaagataaagagcgacaacgggtccgagttc

SEQ ID NO: 54110 - DNA, 420 bp, Zea mays
  unsure (1)..(420): unsure at all n locations
gcttcatcatctgaaaggcaattgccctggagaaaagatataatctcaggtctccaatcttcactatgaacaggagatatattgagcactgctctttcaaagaggtccaccgaatgtgctcttattgtctcaaagaatacttccgaaggtaaaggcagcccctgtgccgctgacttggctagcagatcagcgtgctcattntctcctcgtgaaatattcttgacagaaaacccttcaaaagaagcttcaagccttcgaactgtatccaagtatttctcaagctntgggtctcttgctctacaactcttgtcaatatgaccagaaataacttgggaatcnggtntaagaaccgcccttcttatccccattgcctttaacttccgaagccccaaaagcaaagcttcatattcagcaatatta

SEQ ID NO: 54111 - DNA, 402 bp, Zea mays
tgactaaaataactatatctagttgccttctcacatgcaccacaccgttcttaactcctactccatttatatttgagggtatccctgtattccaaaatttgaaactagtattggccacctccttcaccttttggctcttctatttagtcccttgaacatataatatatttatacacctcctagttggtgtctcaactaacttccttcacatacttgtgagcaacctatatttcgaatatctaaacgaactttactaacttccttaccctttgcacttgccgatgatgagaagacccttgcatatttttcagtacaccagaacgctgacatagtgcaccactaacaaagtagagacacggcccttactcacttgacattatgcccggttcaaaacaacacaac

SEQ ID NO: 54112 - DNA, 369 bp, Zea mays
  unsure (1)..(369): unsure at all n locations
gcttctaaagggagagcacattntgngactatcttatgttcattttgagaaagacaggatttatatcgcttgtcaagcagggaagcaagttggtgttcatcatccacacaagaacatcatgacgactgacaggtcgcttgagctactccacatggacctattcggctcgatagcttacataagcatcggcgggagtaagtactggctagttattgtggatgattattctcgcttcacttgggtgttctttctgcaggaaaaatctcacacccaagagaccttaaagggattcttgagatgggctcanaatgaattcggcttaaggatcaaaaagataagaagcgacaacgggacagagttcaagaactc

SEQ ID NO: 54113 - DNA, 398 bp, Zea mays
tgcgcctaacagatcgtctaattttgttcaggaatgtttctatggcttacgataacgaaggttacattttatatcctgctggttattccgagcacaagaatacgaagattcattctatgaagtctcactctggctctcatcatgcttttatgtataagagtgaggcatctagttctaggcaatccactcatgttaaattgcctataaagaaaactcctattgcatcaaatgagtctagagtttcatttaagacttttgatgcttcttatgtgctcactaacaaatcaagccaagtacttgccaaatatgttgggggcaaacacaagggttcaaagacttgtgtttgggtaccccaggtgcttgcttctaatggtaaaggacccaacacccgctgggta

SEQ ID NO: 54114 - DNA, 418 bp, Zea mays
  unsure (1)..(418): unsure at all n locations
agctttgcgggaaggtatggtaatcagcccattaaactattcttcttattctgcggcaaagacaagggacacaccacanagacgtgccaagtcacggtccacaagtagaaggaaatcgctaaagccgaagcacggcagaaccagccgaagcaggtcttgcatactgcttcgtgttactctccgtacatcctagagtatgtggacaaccaacagcctacgacctctgttgcttcggcaaatcattcccaagcttcctgggctcaattaccaccaccaccaccaccaccactggcgcctggcccgactcaaaatcaacatccagaagggcatcgacagtttcagcaacagcgtgaccttcgggaggagtccgaagctcgtatagtcaacaacactgtgcccgagtcatggcatatctact

SEQ ID NO: 54115 - DNA, 405 bp, Zea mays
tataatgatatttaaaaaccttgcgtaaagtttggcatgacttggacaaagctcggtacctaaaccccaaaaccttgaacttcacagtgcctgccctatgaaccatagggctgtttggttcacgaaatgtaacgtaaagggtgatggtaatggtttacacttcattactgtcggtaacaaggttcaatagaccggtatcaatttttagcatggtatctgattaccgttggactaaaacaaacatgatttaacgttatattcaagcattacaagatttgaactaaaacaaatatgtgaacccaaccgtacctaaaatgctgactccataaaccctagttttctagagtaccgtgaacgaaaattatattcaagacctaatatgatgaaccttattatttttgcatt

SEQ ID NO: 54116 - DNA, 382 bp, Zea mays
  unsure (1)..(382): unsure at all n locations
ctttggtcatatatggntaccatttcgcgcggnggagaacgatgatcaagggtgtgtttggttggaagtataaggtgggatggaagagggcggccacattctctatagtgtttggatgagagtcacgtgggagtgaggtgaacatcagagctttggtggcaacgtgatcctaanaaattgaggggacgatgtcgccccgacccattctacttagacctcanaccanacacatcccnaagtgccaaaanatactaattgtactttactgtttacaaacagtgaaatatgttgcgacacacttaattctgtacatggaaattngtgtcggtatttgttttgcgcagtgcactatgtacttaatgcatcatacttgccaaatctc

SEQ ID NO: 54117 - DNA, 136 bp, Zea mays
tgtttgaaatttgagaagtcttggtcgcgcggactgtcctttctcttgtgtggcggaccgtccgcgatcctccagagggtcccatgtttgaccatttgtggtgactctgtgttcttttgcactgccgaccacaccc

SEQ ID NO: 54118 - DNA, 411 bp, Zea mays
  unsure (1)..(411): unsure at all n locations
ttggaccttctgttatccgaagccttcatattttttcgcggaccgagctcgttacgaaaaacgatgtatcaccgtgaaggggctactgttgggggtcttcttctttgccgaaggtcctcaagacataaacaccttcggcaagatgtcataagaagtccgccccacttctgccgaaggtaatcaatacaaagacctcagaaagaagcaacgatgtggaacgtcgaagctcggtagctttggctcagatcaaccaaagaaggaaaaggctagatagaccttattaacttagtttacttataaacaaatgttcaagggcatgaatgtaattntacccgtgctgcgtcccgtgcctataaataggtgaatagtaactccgtattgttcacgctggattgtattcactctctcgca

SEQ ID NO: 54119 - DNA, 392 bp, Zea mays
tggtgccaatggagaagcaaaaatccttgaagtcttggctgtcaaattgtttgccattgtcaactgtgagttcggacgggactctgaagcggcaaacaatgttttgccagaagaatttctgggcagtcttcgatgttattgtggatacagccctcgcctcgatccatttggtaaaatattcgacagcgacgaaggtgaacttgaggttcccctgcgccgtgggtaggggcccgacgatgtccaggccccagcgctgaagaggccatgtgtgggcgattagcttcgtgaactgcgaagggcttcccgatcgtggagaaaatttctggcaggcttcgcacgaccttgtgacccgatttgcggcgcacatcatggcgggctagtagaaaccttga

SEQ ID NO: 54120 - DNA, 437 bp, Zea mays
agcttcctttccaaaatctcactatgcaagctcctgcattagtatataaaggaatgaaattcgattcccatgctgatgaacagttatgtgtacctttttcacttgcattgaaatcctggctagtttgggaatctcatttttctaaagaatttttattttcccagtggaaaataaactaattttaccttgggaaaatggaaatccattggaaaaatacagttgccaaactagccctaaaagctctggattttttcaaaaaataatccttgccatgcaagttcctgcatttgtacggaagtaactaaatgtctgaatatgattccaaaaaaactggcaggttgggtgttatcatgctaaccgcaagaacaatttcctctaagacataagaaaactgaagttgtataaatggtaaaatatagatatttgcattcctttgg

SEQ ID NO: 54121 - DNA, 402 bp, Zea mays
tgacaagaataaagacaatctcctgtaattgatgccctgccttgcctgttttgctaaactgtctgcaaccttgttcatctctctttggatcttgagcacttagtagttccttcctggtggggcatcaatcagtgccccaagggttggtccgaagcactaatggctgggttgcggagcaccaagccggaggtagcagcattaaccaagtagccaacaccttattatctgttagaatgttggtcacctgcaaatatagagttgacggctagtttggcacctagcagtagaacatgtcctgcctccaatgggtccatgaatcgagttatggcaactagaaagaataaagaactggagcacaagctacgtgtaagataataagtgaagatgcgaatgcatgtctga

SEQ ID NO: 54122 - DNA, 423 bp, Zea mays
atgtcttagattctcagaacattgattgaaatcttgcacacattgctcattttatacctttgatcatgccatatctctttcatttggtacaaatgcatatttcttattcttcttgtgccaaagctaatactaatgtgcttccaagaatatttctatgattagtcttgaattgaaagggaaatgaagttgtaggcaaagacaaggcttccgctccataattcgtcagtatcctttgccctactcatgaatttacttcatacctttcttgataaagacctctcgatttctctatttttggcgcttaatgccaaagggggagaaattaataggccaaagcaaaaggaccgcaccaccaccctgttttctaaatacttttctttaaacaaaaaccctcttgacatctaaggggagaacctttccagg

SEQ ID NO: 54123 - DNA, 397 bp, Zea mays
ttccaagccctcggacccggcagaacttcaccggaagcccgagatcgacttcaccggatttcggtcgcccgcctgcacgcgtggaccaagctctccggtgagccattcttcaattcctcacgcacacccttccttgttccctggtgaagctctctgacccattcaattgaactatcgcgccgtgagcaggccggactcctcgccgccgacgagcatctccgcctgtgcacgtggaccggccgaccccgaccatccccgacggcaacccgcacatcgctgtgatccccgagacctcccctacgccctcgaccacttcaccggagcaatctcgccgccggtaagcccctccaccctttcttccgccgcggttactgtttaagttaggagaaggaccaca

SEQ ID NO: 54124 - DNA, 409 bp, Zea mays
  unsure (1)..(409): unsure at all n locations
tggagcagcttccagggtctcggggaaactatctaagggcttggttgaggctgaaggtctctggaaatggctggccacggtggctgacgctcgggtggctcgggcgggtggcgcagagctcactggagctaagggggtgtttctggccaccgagggtgagcaccgagtgaggtgaggcgcgtctggggtggtcttaaaggcacgggcgagcacggcctatggatggctctgacatgcgcttanggtgtgcgcgggcgagcgccagtgcgcgctctggcgtctgggcacgacatcgagcacgaggcagcgcagagagaggtcatgttcaaacgcagattggctccaaatctctgagattatggccatgatcccattgagagatctcttctcctgacattcctttgtcgtt

SEQ ID NO: 54125 - DNA, 423 bp, Zea mays
  unsure (1)..(423): unsure at all n locations
agcttatgaagattcttcattccaacatgtgctagactgcggtgccagagccagcccatattagtcttagcaattaaacaagcatctagatcggtattctctttagagaagtcaactatatagagcttgccgtctaatacacctttaaaagctaatgaaccatcacttcttctaaagacagatacatcaatatttggtaataaacaattatatcccatatgacataattgacttacagaaagtaaattgtaaccaagcgattctactaagaacacattagaaattgaatgctcggtagtgatgtctattntacccaaacctttgaccttgacttgattcccatctncaaatatgatcgtgtcatgggagtccttgttcttgacgtaggaggtgaacatcttcttctcctccgcatgtggttat

SEQ ID NO: 54126 - DNA, 404 bp, Zea mays
tcggaaccccatgcttctagccatctctccgcagacggataattctttgttgtctgggagacagtatatgaagtcatcttcgtctgtcccattgaacactagtgcccacttcggatatttcaattctctggcatagtgattagcttcaaaaatctcttcttcggataatttcttccccgaagcgtgtcgcacaatataatcgtatattttggaaggtgcttctggggcagcagtgtcaatttcttcaaccaaaattggctctgacatttttattttttcggctgcctttgcaattttcgtttcttctgtttccaaagattttaccttggtgggctctgaaggcccagcttcagtttcaaattgttgcttcgaagcttcagcaacaaaggcttcagtagacactt

SEQ ID NO: 54127 - DNA, 413 bp, Zea mays
  unsure (1)..(413): unsure at all n locations
tgtgtctntggatgaagtgcttgcttttttattgaacgtgagtgaatgggatgcttggatggagtgaatgcacgtggttggggttgtattcatagccaccaaccacttcctagccttgcctcctttttgccaaccgcggacggtccatgctcctcgttcggatggtccgcccctacacatcaacgatcgaaatcgcaacggtgagcagtaacggctatatcaatagctataagtgcattaaacgtgtcatcagatgtcagataaagcagtcatagacggtccggccgtgcaccccggacggtccacgaggacgctaaaaatttattntaccgaacctgtcaccttctggtttctctggtttttcaatgagcggacggtccgtgcctgacgccggatggtccgagcttggtccc

SEQ ID NO: 54128 - DNA, 415 bp, Zea mays
  unsure (1)..(415): unsure at all n locations
taatgccnctaagaaactatctaactntgtaaagggccaggctcccatggttcaggtcttcaggatagtgagggttacattttatatcctgcaaactatcccgaacataagattaggaagatttatgctagaaaacctcataatgtttctcaccatgcatttatgtacaaaaatgaggcttctagctctaggcataccatacatgttaaaatgcctagaaagaaaattcatgttgcattaaatgagcacaatgtttcttttaagacttttgatacatcatatgttttaactaacaaaccaggccaagtagttgccaaatatgttgggggcaaacacaagaattcaaagacttgtgtttgggtatccaaggtgctcgtttctaacgtcaaaggacccaagactgtttgggtaccta

SEQ ID NO: 54129 - DNA, 420 bp, Zea mays
  unsure (1)..(420): unsure at all n locations
tatcacctatcagctagcacattaaaaaggtagctggaaggaacttaagcttactttactctgccatccttttncagcatcttcgctagggaaatcggcactgagcagcttatgagctgagtatccaagacgctttcgtagaaagggaatgattgctttggagcatcccatgtgtatatttttcccatttggttccccagatttgtctaacaacacaacaacagaatttacaattgattgtatagtaattaacacatcagaagacagaaggtatgaaaatgaggacactgcacacaaaatagtgcactaaaattaggtaaaaaaaggttgcataatgtccaagcactgtgtgcacaaatagctagttacctagatccataatatcctccaactatttacatgctccacaatacaggtaat

SEQ ID NO: 54130 - DNA, 452 bp, Zea mays
ggatcttaagcaccgccgctgcagcttgtcacatacagcacaaagagatattgttgctttggtggatcaaccgaagcctatgctcctatgtgaagatatagcagatcaaagggtactgctgggttctcagctatctgatgagcaagagaaaactctgataagatttttgttcaaaaacaaagatgtttttgcttggacagccaatgatctttgtggggtcaatagagatgtcatcgaacattcacttaatgtggatccatctttcagaccaaggaagcaaagacttcggaagatgtctgatgacaaagctgaaggtgcccgaaacgaagtaaagaggcttctcagtgctggtgttatcagagaagtaacatatccagaatggctagctaacactgttatggtgaagaaggctaaatgcaaatggagaatgtgtattgacttcacagatctca

SEQ ID NO: 54131 - DNA, 385 bp, Zea mays
tactccttcgtgggaagggccattcatcatcgccaagattttgtagcacggaacataccagctggccaacgatcaaggtgaggtctacagcaacgcttggaacatccaacagctacgtcgcttctacccttaagatgtttcaagtcgttcatatacctcattttctttacatacacacataaagtctaaccgtcaacgaaggatcagccttgccttggcaaagcccgaccctacctcgggggctagaaggggggaaccccctctgcgtcaaaattttcctcggaacatatttctaccaagaaagattttctaccaaaatgactttcgtgccttctcgactatatcaataacagaatcctgcaaacgagtgagagtgcacgtaagc

SEQ ID NO: 54132 - DNA, 418 bp, Zea mays
  unsure (1)..(418): unsure at all n locations
cacattttgggactatcatatgtttattttgagaaagacggngtttgtagctgaaagggaaatgtgcccttgggccatttctaagtattttggtgatttagtgtccaacacaagtgcctaagtgttaaatggtggacaaagtacaaatcaagtataaaggtatgtttctcagacttagtacattgttttagagactaatgtattgtgtctaagtgttggaaacaggaaaaatcaaattgaaattaaagatggccttgttcagccaaagtcagctctgtttgggtgcatcggactgtgtccggtggtgcaccggacagtgtccggtgcgccaggctggctcangcgaacttgctgctctcangaagtgattaacggcgtatggctataattcaccggactgtccggtgtgcaccggact

SEQ ID NO: 54133 - DNA, 409 bp, Zea mays
tctaaagggagaacatgtgataggtttgactaacgtgcaatttgaaaaagatagaccttgtgcagcttgtcaagcaggtaaacaagtgggaggagcgcatcacagcaagaatgtgatgaccatttcaagacccctggagctgctgcatatggacctcttcggacccgtcgcctatctgagcataggagggagtaagtatggtctagttattgttgatgacttttcccgcttcacttgggtgttctttttgcaggataagtctaaaacccaagggaccctcaagcgcttcctcaggagagctcaaaatgagtttgagctcaaggtgaagaagataaggagcgacaacgggtccgagttcaagaaccttcaagtggaggagtttcttgaagaggaagggatcaagcacgag

SEQ ID NO: 54134 - DNA, 429 bp, Zea mays
  unsure (1)..(429): unsure at all n locations
agcttcggctacccttntccttttccggccttctacacctttattcagattttcgtagtcagggtattcaaaacccagggcgtccagcactcgattcagtcttcgcttcggacgggtaccgaaggccgcagtcatcaactgatcctcttttttggagtaattaccgagtatttcattgcacattatttcaattgtgtccagccactcttggcaaggtgttttaaaatatttcttaaacttgaaatagtaaggtaaccgcacaagttccccttctttcttctccccctctagcttcggcatttcccattcttttaaggtaggaaaaaccctgaaagccaaaaactcttgaaccaggtctcttgtgttgatatgctctgaaataattntaaactcagccaacgctnnttgggttggaccttctggtgtcat

SEQ ID NO: 54135 - DNA, 344 bp, Zea mays
tctaaagggagagcacattttgggactaacaaatgttcatttttataaagataggatttgtagcgcatgttaagcaagaaagcaagttggtgtttatcatccacacaagaacatcatgacgactgacaggccgcttgagctactccacatagacctattcggcccgatagcttacctaagcattagcgggagtaagtaatgtctagttattgtggatgattattctcgcttcacttgggaattctttttgtaagataaattcccaacccaagaaactttaaagggattcttgagacaagctcaaaatgagttcggaatggaaattaaaaagatagaagcgacac

SEQ ID NO: 54136 - DNA, 435 bp, Zea mays
agcttctaaagggagaacacgtgataggtttgtcttacgtgcaattcgaaaaagatagaccttgtgcagcttgtcaagcaggtaaacaagtgggaggagcacatcacagcaagaatgtgatgaccacctcaagacccctggagctgctacacatggacctcttcggacccgtcgcctatctgagcataggaggaagtaagtatggtctagttattggtgatgacttttcccgcttcacttgggtgttctttttgcaggataagtctgaaacccaagggaccctcaagcgcttcctcaggagagctcaaaatgagtttgagctcaaggtgaagaagataaggagcgacaacgggtccgagttcaagaaccttcaagtggaggagttccttgaggaagaagggatcaagcacgagttctccgctccctacacaccac

SEQ ID NO: 54137 - DNA, 363 bp, Zea mays
ttatcaaatggacgtgaaaagtgccttcctcaatggaccaatcaaggaagaggtctatgttgagcaacctcccggctttgaagatagtgagtaccctaatcatgtgtataaactctctaaggcgctttatgggctcaagcaagccccaagagcatggtatgaatgcctaagagaatttcttatcactaatggcttcaaagtcggaaaggtcgatcctactttatttactaaaactcttgacaatgatttgttcgtatgccaaatttatgttgatgatattatatttgggtctactaacgaatctacatgtgaggaatttagtacgatcatgacacaaaaattcgatatgtctatgatggggga

SEQ ID NO: 54138 - DNA, 332 bp, Zea mays
  unsure (1)..(332): unsure at all n locations
cacattatattccgctaacatagacctagccatatcaatgcgagtcctattctttctttcaacaataccattntggtccgggatatatctggaagagaattcatgtttaatacccttgtcatcacaatattcatcaattcttgcattnttgaattccgacccattatcacttctaactntcttnggatcaaaatcaaattgattntgagccatatagcanatgacttgaatgtttcanacacattagatnntatcccgaagaaatanacccangtgaatctagaacaatcatncacaatcacaatacaataggaattaccacncatactcac

SEQ ID NO: 54139 - DNA, 394 bp, Zea mays
tgtgtgtctcaaggtacctggcctttgcctcatggaggacttcactgacgtagtagactggcttctggatggtttggacctctgcggttggttccgagtccccaaactcctggccttccatcaacatcgtggtggtcggaccaccaccttctcctatgggaactttctgactcccctggggatgttgtggcgtcctttcggcgaccagcaccatgctcaccgcctctgtagccgctgcaatgtataagtacaacggctcccctagctctggagctaccagtattggtaaggacacaaggtgctgcttcaactcttgaaaggcttgttctgcttcttcagtccaagagaatggaccggacttccgcaataacctgaagaagggcagcgccctctc

SEQ ID NO: 54140 - DNA, 369 bp, Zea mays
  unsure (1)..(369): unsure at all n locations
gcacaccggacatgtactggttgatgtccggtgcaccggtatgggcgtgcctgacgtctgcgcgcgctgcgcgcgcattaaatgcagcgcanggagctcgtggcgccgcagggagccgttgctccgctggcacaccggacagtccggtgcacaccggacagtccggtgaatattagcggagcggctgccgcgcgaacccgaggctggcgagttccggagaccgcgcttcctatgagcaccggacatgtccggtgcacaccggacagtccggtgaattatagcgcgccggcttccgagaattcccgacggcgagaagtttgagttggtgtcctctgngcgcaccggacactgtccggtgacaccggacag

SEQ ID NO: 54141 - DNA, 397 bp, Zea mays
tgagtaaatccgacacttggaaccacaaatgtacccttagggtataactccgcaaggctgcctaccttatgtgcacgaaaagaagccaatgagctggagggattgagggccttcatacaataaagtagctccatattaatctcatcaaattgattattaagctcttgaataattttatcaataacccaatatatacaactgttcgtaagtagattattcatacgagattgtgtcaatagttacgagaatgggaactttattttggcatgaaggctgatacatgttttcattttagcactgaatatattgctattctttttagatattttttggcattctttattaggagtgcccccctcaggtcaaatattacacgctagggataatagtgcgtgtc

SEQ ID NO: 54142 - DNA, 432 bp, Zea mays
  unsure (1)..(432): unsure at all n locations
agcttgntctgaagtcctgaaggctcttatgactttcttttgtaactatctataaaaacttagggtctctttgcattattttggcaaagaattgtaattcttagttgaacaaaatattgtactaatttgggaatatcttgtaatataattttacctttttgctcctgtatgaattgctttgatatggacgaaaccaccgcttgcaatttttgagccagaggcgaaaaacaccttcccttcttttcgttcacatcgaagcattttttattaaaaacgattcaccttcatacgccatgaagttttatctgagacgaagcatcttcattttcaacgaagcattntatcactgaagacaggcatcttctgtcttttcctgttagtactttatgtcatgatgatgatgatcctatgaatggctaatgaatgcttgta

SEQ ID NO: 54143 - DNA, 341 bp, Zea mays
cgccgaaggtggtcgaatgagttcaccggaggtggccaccaatgttggtcacttgctctcagatgctatgaaccaagaacaaggcaacacaaatgttaatggttaaaagaccttcgtccttcgaagcattctctcttaagatataatgatcttcgagcgaaggtcatgaaggacataccttcatcatttccataaacaaggatgtaaataaggacatataaaacacaaagggaatatgaataatcattttaaatcatcagattattcatattctttattatataaacctgaacaaatatcaatgatattaatactacatatgtaccttcggcttgacaaaa

SEQ ID NO: 54144 - DNA, 405 bp, Zea mays
tgtggtgtgtgaagaagacaggcagaaatgcacctatggtgacactggttatcgaaagtgacttttaacctttttcagaaagaacacatatatagtttatatattattataagccctgggcttccaataactagaggaagccttgggccaatgctgtcacccggttcaaccacaccaggttcgagcggctataaaaacactcctagaccattagggattaggttttagcgagaacggcggttccctcgggcgtgagcggcggcgattcctgtgaaccagcagcggtgctgtaacacccctggtattactaaaactaaaacttggcatgacatcatatgcattggcatgattgtattgtaatacatctagaatgaattcaatagaatcaaagaaaatctaaatttc

SEQ ID NO: 54145 - DNA, 413 bp, Zea mays
  unsure (1)..(413): unsure at all n locations
cacatttgataagtaaaattgacttatttctctaaagatgtcgcttatttaacgaactacggacttatacgcaatgaattgtatgcttcgaggactagcaattagtttttgcattacttaggagaatagtaaattaattctggaataaaagcaagatctttccttataaaaggcggctgagcgatgtgtcacaaatttattgaccggaaggctggccacgtggagggctacaaagagcacaaccacaacaactctcgaaaggatctagtgtggagcggtttctagattnttcctgcatgcatcaaggagcgtgggtgtatggcatgcatggngcccaccaggtgtttcctattcggcttaatccaaaaccaaaacgcacgatggcagtttcagacaccactgatgcctgatgc

SEQ ID NO: 54146 - DNA, 412 bp, Zea mays
tctaaagggagaacacgtgatagggttgactaatgtgcaatctctattatgatagaccttgtgcagcttgtcaagcaggcaaacaagtgggaggagcacatcacagcaagaatgtgatgaccacttcaagacccctggagctgctgcatatggatctcttcggacccgtcgcctatctgagcataagaggaagtaagtacggtctagctatcgctgatgacttttcccgcttcacttgggtgttctttttgcaggataagtctaaaacccaagggaccctcaagcgcttccttatgagagctcaaaatgagtttgagctcaaagtgaagaaaataatgagcgacaacgggtccgagttcaagaacctttaagtggaggagttccttgtagaggaagggatcaagcacgagtt

SEQ ID NO: 54147 - DNA, 257 bp, Zea mays
  unsure (1)..(257): unsure at all n locations
gttgtgtacccttcggtagctggaccgcagctatttagttcgcaaccggcggtcgtcttcttcggcgaggtaaattctcggctgcaggcttacggaagacagggagataggagattagagctaatatctttcttgacctccaaagtgcatatatatatatagcccatggccccaactaatcaaccctatactttagaatctaagctaacactaatccttatctntcctaacttctctccttgcgggtacctgaccta

SEQ ID NO: 54148 - DNA, 365 bp, Zea mays
tctttccaagtctgcaaccactgttttagataactcttttgcacaaagctgacggaagaaataactcaactctgaaagcgctagccacacatgctcaaggacatagtctcgaaacattgcaggaagaacttgttcaatccatatgtggaagtcatgactctttatccctaagactcgcatagtagataagttcaccccccctactcacggtagctgcatacccattaaggaacatcaacatctcgatccactgaagtacttcattcctctgggccctgcttaagataaaaacggacttaagccttctccaccgtttttcgccacttggcggcttcatctctaaggttggggtatcaaataacgct

SEQ ID NO: 54149 - DNA, 120 bp, Zea mays
  unsure (1)..(120): unsure at all n locations
tctttctcattccttcttgagatcaaactcacttgtaattgnggcaagagacaccaatcgtgttgtgatccttgtgggaactctgtgttccaagtgattgagaagaanagctcactctgt

SEQ ID NO: 54150 - DNA, 429 bp, Zea mays
acctataaaactaagcttctaagggagaacacgtgataggtctaactaatgatcaattcttataagatagaccttgtgcagctcgtcaagcagggaaacaggtgggaggctctcatcacaccaaaaatgtgatgacgacatcaagacccttggagatgctgcatatggacctttttggacccgtcgcctatctgagcataggaggaagtaagtatggtttagttattggtgatgacttttcccgcttcacttgggtattctttttgcaagataagtctgaaacccaaggaaccctcaagcgcttcctcaggagagctcaaaatgagtgtgaactcaaggtgaagaagataaggagcgacaacgggtccgaatttaagaaccttcaagtggaggaatatcttgaggaggaatggatcaagcacgagttct

SEQ ID NO: 54151 - DNA, 376 bp, Zea mays
tgccccggtacattggaccgtttctggtgattgagcatgtgttctttggcctaccgacttcaactaccccgaacattgtctgttgtgcataacgcgttccacgtgtcacaattgaagaagtgttttccggttcctgatcgaaccgttgaaataccagatgttgttcttgaaccatacttgacctactttgagcccccatattagctcttggatccaaaggaccggcttacccggagaaaaactctcaagttttataagtataccgtggaaccagcattctgaatatgaagctacatgggaaactccagacttcttgaactagaatttcccacgctttctagccctatgtaatttgtaaaacgtatatagttattgc

SEQ ID NO: 54152 - DNA, 383 bp, Zea mays
  unsure (1)..(383): unsure at all n locations
gaaagctggattgcgacttccttttttctgcttcgtcagggaggtgttgaaaatcttcgaagtctatcttcatcaacttactcccgaggcaattataaggctaaatatcttcgtgtgggccgcgagaagccaatgtctgaagcctgacgcaagaagcttctgtaatgttcatgaattattatatgaaacaaagccttggggcaaagaacagtaccataacaactttggctgctacagcttcgtctctcggtccggngcaagctgtcccgtaccaacctttcggaagagatggcccggngattggatgacagaatggttttatgtgaagaatgacttatcagcacgagaagacatcaaaggtataattatgcgtcctatttggc

SEQ ID NO: 54153 - DNA, 424 bp, Zea mays
gaactatataaactcaagcttaggggaaatagacaagatattccccagaatagagttttatctcttttatatccctaggataccaaatatctcaattaaaaccctggaaaaccctaaatccaaaccctacgggcatatgtgcaaaattaatccactttgggactaaagtgcaaaaaccaagttaataaagtatcttaagacacttggttcacttacgtgtgaatctggaagccaaaccctaatacttgagttcatttgcccaaaggcccctagttgtgatttcaccctaagactgaatctcagattggtgagcttaactttggagctttatagacttcaaatcagtaagagtttgccctgtggcaccacatcaaacttatatacctattaatggataacaaagttgcttaagagagcatgccat

SEQ ID NO: 54154 - DNA, 237 bp, Zea mays
ccttcaagtaattttattcttctatcggtatcatttacatgtcttctcaaaattttaaatagaatatgtcatttgacatcttatgcccccatgtttccatatatgcatatgttattaaatgtttcatttaatattactagagtatcttctatcatttacctatggcattgggggagttagtctatttcaacaatgacttgtttcctcttgtttattcatgagcttttcttagggcta

SEQ ID NO: 54155 - DNA, 406 bp, Zea mays
ttacgaagaggaaccttcggctatcttatacacacagctttatccgaggatcgcttctctctataagaccttcggcgacgaagcatggacccaacagtagcccctttcgcggtgctagatcgtttttcgtaacgagcttgatccgtgaaaaaagtttcttaagcttcggagcgccgaaggtctcaaaaacaccttccctgagctcgttgtcgagaaacgattcaatttccctgcgcgtggcggccccaccgtgcagaattactgttcagtctttgcggcccaccgtacagcgagtgcgagcgggtgtccgcctggtgtaaaacttctggcgcttcgccttcttacctgcggcactatataaacagacgagtaggtgtgaagttaccacagcatttactgctatttg

SEQ ID NO: 54156 - DNA, 384 bp, Zea mays
  unsure (1)..(384): unsure at all n locations
ctcaagaagcaagtcccattgttatttgtatctgaagtccttagtgtctcaaagaaaaattatacagagctggagaaggtattatatgccgttttaatggcatccaggaagcttcggcattattttcaggcatacaatatcattgttccttcttcgcagccgttgaaggatataatgagaaatagagaagctactggacggattgngaaatgggctgcagagctcaacgaattttacattgattatgtgcatagatcttcgatccagtctcaagcattggcagatttcattgccgactggacgccaggggctcaggatgaagaagcaaataaagatgccgaggtgtggaccagtatttgtgatggatctcgnggaatcttcgga

SEQ ID NO: 54157 - DNA, 336 bp, Zea mays
cgtcatagtcaactctgggggtatcctcctatctatgtcttatttgcgagctcgggcagctgcgataagatgagaacatggaaaattgtactgcctcggtgccccacaagtacatgacaagtcattatggagtggtggtactgttctctctatgtcggcatgaactatggatgaatggtggtttaatggtgtaacctattggagaaacatttttcttgttacttcttaaatttaagaattaaccagtacgagggttagaaagtaatatatatttattagagaaacccttttttggttactttttaaatataagaattaaagagttgttaaaaaact

SEQ ID NO: 54158 - DNA, 392 bp, Zea mays
ctgcagcttataaatggacggaaaggcctttcttatggaccaatcaaagaggaggtctatgttgagcaacctcccggctttgaagatagtgagtaccctaaccatgtatataaactctctaaggcgctttatgggctcaagcaagccccaagagcatggtatgaatgcctaagagattttcttatcactaatggcttcaaagtcggaaaggccgatcctactctattcactaaaactcttgacaatgatttgtttgtatgccaaatttatgttgatgatattatatttgggtctactaacgaatctacatgtgaagaatttagtaggatcatgacacagaaattcgagatgtcgatgatgggggagttgaagtacttcttgggatttcaagt

SEQ ID NO: 54159 - DNA, 243 bp, Zea mays
ttgactttgacctgagctgtaagcctttatggctagctctgtatgtgtttaccggccgtgattaagagtgttgggggtacccctaattacggtacccgatagtagccctcgagccttgaagggagtgcaagcactcgtctggagggtctattggatttttgcgaggggaccagcctttctcgggtatgttttgatccggtgggtgcgctcgaacgcacccgacttgtgtagcccccgacgcct

SEQ ID NO: 54160 - DNA, 404 bp, Zea mays
atagttatttgtctactcttctcacttctggtagatcggaggtagataatggtaagcatgccaaagggtggaattcagtgtagttcggctacataaaccccagatatttgtccatttaagaccgacctttaccatttagcttacagtgtatatcagacttgtcaaaggactatcccgagtcaattcagtgactataagtatttacaattccgagatatgtatgcgacacaagcatagaggttctagatagaacgagtaaagtggttcgacgggaacacactatggttttcacaccaacatagtgaaaattttcttagaataacctctcggtatactcgcaacttcgtgttgctggcgattacatgtccttttatctcatagtttgcttcatgtcatttagcgac

SEQ ID NO: 54161 - DNA, 404 bp, Zea mays
tctatagggagaacacgtgatagggttgactaacgttcaattcgaaaaagatagaccttgtgcagcttgtccagcaaggaaacaggcgggaggagcgcatcacagcaagaatgtgatgaccacttcaagacccctggagctgctgcatatggatctcttcggacccgtcgcctatctaagcataaggggaagcaagtatggtctaggtattgatgatgacttttcccgcttcacttgggtgttctttatgcaggataagtctgaaacccaagggaccctcaagcgctttctcatgagggctcaaaatgagtttgagctctaagtgaaaaagataaagagcgacaacgggtccgagttcaagaaccttcaagtggaggagttccttgcagaacaacggatcaagc

SEQ ID NO: 54162 - DNA, 433 bp, Zea mays
agcttgatagattcttctgcaatctaaagtgggagggagatttcaacaattatggactgcacgctctttcatcttcagtctttgaccactgcccgctccttctatccaattatgctaggccgaggcgtccatgctccttcaaatttgataattttttgacggttttaccgggtttcaagcaggtggtggagcatgcctggtcgaagccgacccaacatcatgaacctttccataggttgtattataaactccagagcacagcccgggcgctcaggggatggaaggcttgttcctgattctaggttgttcatgcatatggccatggaagttctccttaggctagacctagcacaagaaaatagggcggtgtgggacttcgagtcaagtctccgaagcagactgaagatgtgtatcccttggctatgctgtattg

SEQ ID NO: 54163 - DNA, 272 bp, Zea mays
tgactatgatggtgatcacaacgaaggatacgatgatcacgaagctatatgcaaaagagcttcggcatcatggcggggaggggaaaccgacttatagatgaaaagccaaactagaccccgaagaattactatagggttattgataaatgtaaagggcattaatgtaattttgcatgggctgcgacccgtgcctataaatatgtgaacaagatccctgtactggtcacgctgacttggcatacacttttaccccacgactgtatttttctttc

SEQ ID NO: 54164 - DNA, 390 bp, Zea mays
  unsure (1)..(390): unsure at all n locations
aacatacaccacctttcaccggttgtggacactcgcacgacacacggctattgtaatacatcacaagtacaaacatcttcctttgttgcgagtataaccatattacggcatatactcgcacacctcaatcaattatcttacgccaccaccactataatacaccacggaacacacacacatatgtgtcccccatattacgcacaagacatcaacaacatagtgactacgacaggactaatcataccctgatttgatcgactataccatcaccgatcatatgcctaaaccaatacacttctcacataacatctattgatgtattccctanaacatgatccgcatttatntatntaaacttagtcttcgcatcaaacaacacatcgcatatat

SEQ ID NO: 54165 - DNA, 416 bp, Zea mays
tcaaaaagccgttcctaagggagcgcagcgtaagttttctgctctaaagtcgttccttatggaatgcagagttagataccgccgaaatataaggcgaagcgcgaaaagtcaacgcgaataccgtcgaaatagaaggcgaagaagttcaaaaaacgttccttatggaatgcagaacttacaccaaaaaataaacggtgcagccgaaaaataaacggcaaagagatttcagtcattccttatggaatgaaggttgtggatgaagcttcggatgtgtgtgtttgggcattcatttgcacgatacattagcatcattcttcgcatcatatcatcgtatcatatcgcatagcatcacatcatacatcatatcatatcaatgacatcaaatgaaaacgaggccgatcttcgggcaatgcttt

SEQ ID NO: 54166 - DNA, 328 bp, Zea mays
  unsure (1)..(328): unsure at all n locations
tgaaggatatcaaaaaacaagacaacacaaatggataaatcttttactccactctttaattaactcctctcatagagattaattaaaagggagaaagtaaaaatgttagataaaaaatgacaagcatgaaatatgtaagatctaaaggtaatacaagcaactcatcttggttggacattactttactccaattttattacatggtaaatgatatcaatgatacctacgacttcaacaagcactgatacaaatgtaagaagagaagtcagtttcgtagacagagcanatcagttttctatggcaaaaaaacgtgtgtatgcatgatact

SEQ ID NO: 54167 - DNA, 411 bp, Zea mays
  unsure (1)..(411): unsure at all n locations
tgactgggtgcanaagggtattcacaagtcgaaggtttggattttctatgaaacctatgcacccatagctaggcttgagtcaattcgaatattatttgcatatgctacttaccatggctttaagttatatcaaatgaatgtaaaaagtgccttcctcaatggtcctatcaaggaagaggtgtatttgagcaacctcccggctttgaagatattgagtatccttcacatgtctataagctctcaaaggcgctttatggactcaaacaagccccaagagcatggtatgaatgcctgagagactttcttgtcactaatatttttatagtcggaaaagctgaccctgctctcttcactaaaacaattgacaaagacttgtttatatgctaaatttatgttgatgatattattttg

SEQ ID NO: 54168 - DNA, 424 bp, Zea mays
  unsure (1)..(424): unsure at all n locations
ttcatccccacatgtgctaatttgtatgccacagccagaccatgctggtcttaggtattaagcatgcatctagaccggcctcttcttttgcaaaatcaactaaataaagtttgccggctaatacacccttaaaagctagtgaaccatcacttcttctaaagacagacacatctacatttggaaatagacagttataccccatatgacataattgactaacagatagcaaattatatccaagactctctactaaaaatacattagagatagaatgctcattagaaatcgcaattntacctaacccttttaccttgccttgattcccatcaccgaatataattgaatcttgggaatccttattcttgacgtaagaggtgaacatcttcttctcccccgtcatatgggttgtgcatccgctatcaat

SEQ ID NO: 54169 - DNA, 402 bp, Zea mays
tgtacagtcttctgtgatggttcttaaggaaccttcagcgctggagcggctgctgttctaatagcgccttctaaagtcagaacatgctacgcagcaaggttggacttcagttgtacaaataatattgctgaataccaagctcttctgttatggcttcggaagctaaaggcaatgggaataagaagggcaatctttaaaactgactcccaagtcatttctggtcatatagaaaaaagtagcaaggcaagagatccgaagcttgaaaaatatttggatacagtccgaagattagaggcttccttctaaggattttctgtaaaaaatattccaagagggaaaaatgagcatgtagatctgctagctaagtcagcggcacaggggcttcctctacgttccgaagta

SEQ ID NO: 54170 - DNA, 437 bp, Zea mays
  unsure (1)..(437): unsure at all n locations
gcttgagggtctcggcgtatatgaagttgattatttttttccgtccatcaagaccttggtgagcctgacatctctgacaacggggtcaacaacgagcgggtatttccccgggctcggcacatggtcggggtggtcggcccgggcgaaagtgatgggcttgtccgaccactctatgtagactggcgccgccaccttcaccgagcagacctcccggcgctcttgcttgcggtgccgagccgaggtattcgccgcatgccctccatagatcatgaagcagtcgcggacctcggggaacccccctgctgggtgatcttcgntcttgtcgtcgtcgtgggccctgccaccctcggcgggtggcccggccctgtggaagtgacgccgaagcataacgcactcntcgagggtgtgcttgacgggcccctgatgatacgggcacc

SEQ ID NO: 54171 - DNA, 416 bp, Zea mays
taatcctgagaagtgtgtcttctgggtgccccgaggcatgctcctattgttcatcgtcttcgagcgaggcatcgaagccaacccggagaaaatcgcggtcatcaccagcatgggacccatcaaggacttaaaaggggtacagagggtcatgggatgccttgcggcccttgaccgctttatctcacgcctcggcgaaagaagtctgcctctgtaccgcctcgtaaggaaggccgagtgtttcgcttggacccctgatgccgaggaagccctcggcaacctgaaggcgctccttacaaaggcgcctgtcttggtgcccccggcggacggagaagccctcttggtctacgtcgccgcgaccactcaagtggttaacgccctgattgtggtcgaaaggcaagaagaagggcatgcattgc

SEQ ID NO: 54172 - DNA, 383 bp, Zea mays
aattcgattgattgatatagtcaatgccctgcttaattagttaggttattctacgtttggtagttagttccatgtcatgagagatgtgcaaattacctgtgtaattaacggtgaatggcatcgatctatctaattagcgtggaattcaagataattgagaaacacaatttagacaattagttaatatgctcccttactctaaatggtcggtattcaaaaatagtgaataaaaatgtgacgagtaatgtgatattgggtgttcgccaaaaggcttgtgcttagcttattattgcttgatgtttgaagtagacgtgattacgctaaaaaaatgtgataattgggcgtagtcgcatgtcgatagctagtggtttcgtataaaatag

SEQ ID NO: 54173 - DNA, 401 bp, Zea mays
tcacatgtctcgtatgatttctaatcaaacgaagttaaaagcccttctatatgaagctcctccatgcgaatctcacttatatgacccaaacgacagtgccacatgtatgtaggacttaaatcatttggtcgaggccttttagcactaatattacatataggtgcatcatcaagatttaaaatgaataacccatttctaatggatgaaaaaagcccaaacatgccattcttagagaacacacaaccattgttttcactcgcaaatgaataaccatccttcatcaaacatgaaggagacataatggttcgactcatactaggaactacataacaaatatataacttcaaaataaatcctgatgggaggtggagttggattgttctgacggtcaacgcatcaac

SEQ ID NO: 54174 - DNA, 371 bp, Zea mays
catagtggttatcgagagtgtggagatatccgaccatgtagacgatggtggggtcatcctcagtaggatctctttctgagagggcctgaagtcttttcctctatgtaggggtatttttgttgctaggtgggaagtaacgaaggggggtttcaaagacttctctgctgtagttttggcatagctgtcggagggcttttcgggcaacatttttggcaagtgtctgggaagcggtgtccggtgagggtgacttggaaaggagggtgattcgagtagcttccgctttctcccaggtagactgccatagagaacttctcagttccattctcgtggtattctttctagacgtactccggcttcttgcggattcccat

SEQ ID NO: 54175 - DNA, 407 bp, Zea mays
tggccactgggccacggactgtcgacagccacgacgtggtcttaccaacgtcgcacaggcggaggcggagcgggaggctctgctcctagcacatgtaagcatagaactatcttcagcggcaccggccgcagcggcactcctccaccttgatgagtcgaaagcacgcgcttttctcggcgacggctccagcaaagatatgatcgaaggatgttgcctcgacaccggcgccactcatcacatgaccggtcgacgggagatcttcaccgagcttgactctagcgtccgaggctccgtcaagtttggggatgcctccggcgtagagatcaagggcgccggctcagtcgtcttcaccgccacgtcaggtgagcacaggctgctcaccggagtctactacatccccgcgttga

SEQ ID NO: 54176 - DNA, 344 bp, Zea mays
  unsure (1)..(344): unsure at all n locations
gaattcagaacacatgcccgcagcatatctttaagtatttggtttaccctctcaatctgcccacttgtttgaggatgataggccgaactgtggagcaacttagtacccaatgatttgtgaagttcttcccaaaatttggatacaaattgaggtccacgatctgacactatagtctttggaataccatgcaaactgagaatgcgagcaatgtataattctgcataggtgagaaccgggtaatgtcttgactggcagaaaatgagcaatnttcgtaagccgatcaacaataactcggatggaatcatagctttttgctgttctgggcaatcccacaataaagtcca

SEQ ID NO: 54177 - DNA, 409 bp, Zea mays
tctaaagggagaacacgtgataggtttgactaacattcaattcttaaaagatagaccttgtgcagcttgtcaggcaggtaaacaagtgggaggagcgcatcacagcaagaatgtgatgaccacttcaagacctctggagctgctacatatggacctcttcggacccgtcgcctatctgagcataggaggaagtaagtatggtttagttattgttgatgacttttcccgcttcacttgggtgttctttctgcaggataagtctgaaacccaaggtaccctcaagcgcttcctcaggagagctcaaaatgagtttgagctcaaggtgaagaagataagaagcgacaacgggtccgagttcaagaaccttcaagtggaggagttccttgaggaggaagggatcaagcacgag

SEQ ID NO: 54178 - DNA, 360 bp, Zea mays
ccaagcaagaaagcaaattggtgcccatcatccacacaagaacatcatgacgaccgacaggccgcttgagctactccacatggatctattcggcccgattgcttacataagcatcggcgggagtaagtattgtcttggaatagtggatgattattctcgcttcacttgggtattctttttgcaggaaaaatctcaaacccaagagaccttaaagggattcttgagacaagctcaaaatgagttcggcttaaggatcaagaaaattagaagcgacaacggcacggagttcaagaactctcaaatcgaacgcttccttgacgaggagggcatcaagcatgagttctctctccctaccgccac

SEQ ID NO: 54179 - DNA, 399 bp, Zea mays
tgtgaacagtacaagttcaggagggaaaaagcagcttctgctgatcagccgaagcccatgctgctgtgtgaggatatagcagagcagaaggtgctattgggctcgcaattatctgaagatcaagagaaaaccttgataaggtttctattcaacaataaagatgtttttgcatggtcagccaatgatctttgtggagtgaatcgggatggtattgaacattcgctcaatgttgacccatccttcaaaccccgcaagcaaaggcttcggaaaatgtctgatgacaaggccgaaggggcttccaaccgaataaaaagactcctaagtgcaggagttatcagagaagtgaagtatccagaatggctagctaacactgttatggtgaacaaagcccatggaaag

SEQ ID NO: 54180 - DNA, 279 bp, Zea mays
ctcaacctctatcactcttgcgcctaaaaaggaaggggctgatcttgtaaaagattctagacttatcaatttggtgcataggtttgctaaattgtttactaagttgttgctaaatcgtctggctggtcgattacatgacttggtctctctcaactagagtgcctttattaagtggcgttttatctacgataacttcatcgtagtgcaacaaaatgctcgctttctccataagcgaaagactactagtctattggtcaagctacacgtttctaaagcttt

SEQ ID NO: 54181 - DNA, 392 bp, Zea mays
agctttgtcttgacctactctcatatactcgtaatgcaagttctataatatctgctcacacatttcacttggaaaacattgtccaatcatgtttctgaggaccttccgaagccgatagcccccaacagtagcccctcgcgatattaatatgctgtactgataaattcatattgcgatatggacgaaggccttaagccgaaggtccgaaaaaacaccttccccttgctagaatagcaatcactctttgacaagcgggaccctccaaatttcaacgctctgggcgtataaataagaactcatccccagttatttgacacgctcttttgtcaaatagttttacttccccacctttaaactaccccccacaacctttgctcggcctttaaatttta

SEQ ID NO: 54182 - DNA, 396 bp, Zea mays
  unsure (1)..(396): unsure at all n locations
tgcaagcttgacaggaccggcttcgtttgaacccttttagctggntataacatatccttcagctttgccatgaggtgattgtttctggccaaagagaggagtaccaggtttgtgcaacactcctgacagccatgacgaaagactttgccatgactgcagtattgcccccatacaaagatatggttgcttcataactcatcaagaattggttctggtctgaatgaccgtcgtacatggcgagttggggtggcttgaagactggggcaaggtgaacctgcagtctgtgatgaggaaagtctataaaagcaaatttcatgagaaaatctctatcatcggcctgtgtaaaccctctgatgagctcttgccggagcttggtctgcatctgacagatacaac

SEQ ID NO: 54183 - DNA, 411 bp, Zea mays
tctgaggtatcgtgcgagagaacaagaggaggcggtgcgcgtgtttatatttgatagccaacggaccgcaatccgctcaaagttcgcatgctataatttatccgaagacctagcgcttcttgatggagctatattggacatgtgaaacctctatatttacggtacatggggggtacacgctcttgttggagaggccccccctcttatatatcatctacaggaggcccgcttcactccccagcggtgccccctatggtgcatgccgaatcgtggaagcttctctttcctctagatgaagttggactctacccagcgggcgccaactttgttgtcttccgcgctcatggcgacgctggccaccaatggtatattggccacgctcgaagcgaccaatgctccccccgcctctcg

SEQ ID NO: 54184 - DNA, 434 bp, Zea mays
  unsure (1)..(434): unsure at all n locations
agcttcggctccatctatgctatggattgtctttgaatctgtccaactcccttcagcccttctagcagcttcttgacttccatgtatagcaatgagcccttgttctgaaggtatcttcatgcataagtatgctggatgaagtatgacttcgaaggcattaagtgtccctcgaccaatgattgcattgtatgggtaatccatgtcaacaatgtcaaagataacctgctcagaccttgtgttatgaacataaccgaaggtaactgacattatgattttaccaagtgccacaatctgtcttcctccgaagccacaaagagggtgtgtagcatcatgaaatttgtcctctggctcttgcatctgcctgaaagcctntgcaaatatgatgtccactgcactgcctatgtcaaccagaacattgtggaccagaaatcctt

SEQ ID NO: 54185 - DNA, 396 bp, Zea mays
tcgtcatatgcggtcccagaggacttagcagcttgattggcttgcattcggacattacctttaaaaactcttgtacttcggtagcaggaggggttgaaagagtttcctcctccacttcaatcatcttcggctctaaagctgcagcctttctcttcttcaaagccggcgcttttggctcaggaatggattttctcttcttcaatgttttttcatcctctaccattctaacagcctgcctactcagaacgctgacaaatctcttcctttttgccccttcggcacctttgttgagtcgctcgcaatcagcgcattcgaaagtcagagcatacattactcaattcaatcttttttcggtcgggtaccgaaggctacagtcattaattgatcttctttttt

SEQ ID NO: 54186 - DNA, 336 bp, Zea mays
tattatactaagcctgactctctctcaacggtggaagatgaacaatcatgtattgtatgtcccacatgtaaggtaaattatccattaggtgggcccactttagcatacacctaacaaagaacgtcccaagtggtcctacatggcatgggatggcccatacaccatatagggggttggttgacccacataggccgactgatggcccaaatatccacacttgaacctccctgcctgaagcatctatacatacatgaaatgacacttagatgacctacacacccttcaattattggaggtttgttcgtatggctcataagtctgactacatggatccat

SEQ ID NO: 54187 - DNA, 301 bp, Zea mays
  unsure (1)..(301): unsure at all n locations
ttatcggctcatatatattcattcatcttctggaggagcttctcaaggtttgtggtggctttcctgcaaaatattgcaccataggtcctggccggagccccttgatcatggcctcaatgacgatctcattgggcactgtaggtgcttgagctctcagccacaagaaccttcggacgtacgtctacagatactcttcctgatcctangtacactgaaagagagcttgggcagtgaccggcttcgtttganaaccctgaaagctggtaactagcatatcctttagctcctaccatgacgtaat

SEQ ID NO: 54188 - DNA, 364 bp, Zea mays
tatctgcttaatgttctagcatcccttaagtctcctgttactcgtagaccccaccctaaattaccaagaacacctcgatttcccctcgggtttcgcagtcgtcatgggcagaaggactccgggccggatttgtccaattaagggtcagattagagtcgccaggggtagaaataggtgtcgaccgagttagggcatcagtcgttgcgtatctcggccagtacaggctcgtaggagggcgtgctcaccgtcgttcgccgtcggggacctgggtctgcgaagaaacagaaatacaggggcctaagtgggaatatcagagagacaataaatagtggctagggattctttactagttattccaacaact

SEQ ID NO: 54189 - DNA, 345 bp, Zea mays
  unsure (1)..(345): unsure at all n locations
gacatgcattatcagctggtttctgcacgtgaagccctttcaccttagattatgctagcatagtaacgattaaactttgacagaattattaaagtgaaaaagtttacttaacaccttaaactggttctagttgtttactcccccattgcaccccacacgagtggtggagccaggattctacgtaggttatttaaaaaatagcgctctccaaaatagtactccctctggtttaaaatagtgtttgttttaactnttcaatcttatgtctatattcaaatagatgataaagaatttagacacatatataaacacatgcatcanatattgcatgaacctactatcacc

SEQ ID NO: 54190 - DNA, 411 bp, Zea mays
tcgcgttcagctctgttatttttgcttcagcttccgccaataaaccttcggttgcctggagctcaaagttctttttctcgaaagcatctgattgttcctttattctgctttccaaattttcaattataacttcgggcttcttatcttcaaaatcttgctgcatttgcaaggctttgctcaacagcatactctgcatgaaaacaaccttcgccagacatgtttttattattagaaacaataaaaattaagggacaagtagttcaccttgaagttggaataaaataaactaccaacgacatgttgtcgtcggtagcggctgatgtctgtttctagcttcgggaagccgatactcttggacagagtactgataactttggctcctgtttgatctcgaatacaatctaatttttc

SEQ ID NO: 54191 - DNA, 278 bp, Zea mays
ttcatactggttcaagaagacttcgggccttcgctccagctttctctcgcccgccctttggccataccatttttataaatctattggagatacttcgggcgaaggcgggcatatcatccaggattgatgaagataagggtaaagtgggcctgttgacaacctttccatggtcgcagccggccttcagaaatgcagcagcggtaccccgagaagctacccaggcacagaagtcgccgtgcccggctataacttccgcaagctcttcgatttcagcttca

SEQ ID NO: 54192 - DNA, 413 bp, Zea mays
  unsure (1)..(413): unsure at all n locations
agctntaagctctctgaccataaaattacctcacctaggttcaacaaagatgcttttatgccggaatgaaattttaagagggtaaactatgtatgaagcacggataatgcatggacatgctttctctttcttttataccacatatgccaagaacgtatataaaaggaagatgtaggtaccagcttaaatgaaaggagggagttttaaccttttgtacctttacataaagacgcctctttttattgtgctttggcctcagtcttagctgcttaagacctatactccagacaacatatggaaatgttttgccaagagagagttctacaactagtgatccttctcccagtcattgttagcctatatcaaatggatcacaaattgcctatatgtatcatgagctctccttttaacct

SEQ ID NO: 54193 - DNA, 389 bp, Zea mays
  unsure (1)..(389): unsure at all n locations
ctgcagcttattatgcctgtggagtgaaagngatcctttttcttgctgtggacctaagctaatcaaggtgtttcttataccataaccataaggaaagcagactaacgcttgccccacatgagacctatgcacaactctaattggaatggggcgatgattaaccaagaactctctaatgaacgtgaccatatcaccaaagtccaactcaagctcaggcaaatggtgaactgacacaataccccaatcttcatgaatagtgggttgagaacgagtgaccatgtgtaccatggtttccctatgctagacctacttcgtgatgaagccatccagaagaaatgtcgttggatcaactcggtggtatgccattggagaagcgtacgacgaggtga

SEQ ID NO: 54194 - DNA, 418 bp, Zea mays
tcacctttacacaaaggatgtaaagggaacttgtatgtatgtagtcactaccaaagtcaaggaaaaagagaccacacatggaagtggtatgtccttttgatccaatagagatgatagatgttgcttgatcacttgacaaacaacaccgaaatcgtttcaaggaaaagatctacggaagatagcatgttagtgtggttccataatggatcatagccaagaacttcgatactagcgtaccgaatagtactaccatgtgtcggccgccacatgaaactttcagatttacgcggcaccctaagttattgactaagacaccatcatcgaactagcaccaataatgaatcttatgtagcagaaatagattgtgccaagataacccattgatatagtctcataatggatcacaactactaatcgc

SEQ ID NO: 54195 - DNA, 360 bp, Zea mays
tattgtcttgctttaatgaaaaaatgacgctggctccttctcgatgactcgctttccttgattatagaactgattcttttgagacagtagatgaataacttgtgcatcacactgacgcttccagaagtagctgccgaggaatctgggagtcggtattagcgttttaaaaaccacgccgagcgattgaaggtcgacgtcagcattttggaagtaatacagagcaatcgaacatgagatcagcattttaaaggcaacaccgagtggttgaaggtcgacgtcggcattttagaggcaatgccgagcgatcgaacacaagatcagcgttttataggcaacgccgagtgactggaggtcggcatc

SEQ ID NO: 54196 - DNA, 220 bp, Zea mays
  unsure (1)..(220): unsure at all n locations
ggagtccatcatcaacacaagaacataatgacgactgacaggccacttgatctactccacatggacctattcggcccgattgcttacataagcatcggcgggagtaagtactgtctagttattgtggatgattattctcgcttcacttgcgtattctttntacagganaaatctcaaacccaagagaccctaaagagattcttaagacgggctcaaaatg

SEQ ID NO: 54197 - DNA, 406 bp, Zea mays
  unsure (1)..(406): unsure at all n locations
tcttggtcctgttcattntcttgagggcctcaacatccatgtatttcagtcccatcttctcagcctgagaatgcagtaaaatggtttgtgtggggaaaagttgatccacataagaagggcacttgcattatcttagcaaaactttcaatcttccatgtagctgagcaggatttgcataagcacatttaattgcaaatggaatcaagtgcgggcttggactgactaatacatgccagccacaattgagtaactcgaagcattagtgtttttgcagatttactactgcaagcatgttcaacatataaataagtacattttcaagtgcatcatcaactgcctgtttacctcctcaacgtgttgggcatcaccaagcatgcacaccttcatctttggacgagggatgtga

SEQ ID NO: 54198 - DNA, 450 bp, Zea mays
  unsure (1)..(450): unsure at all n locations
ttaagcacctgcggcatgaagcttccacttctgactaacttggctgttctttctttgctgttggccaataaaatcctgacctgaagaccttcccgactagggttctggaggctgcatgtattccacattgcccagcatggacctcctccagaagttgcttcccagtggacgggaggatgcacttcatgaagacgcctgacgcaccccttctatacaatgtctccccaatgagtgtgtagtgagccgactgtctggcaatgcgctcggctgagttcttgtcatctggttcttcttcattctttatatacttgatgattggccttctccagtcatcagagtctgactcgggttgatctataatgttgcactcttctgttngatccattgagatactcggctgcagtatttcttgcacaaagactccgggtgggaacctgagtcgactggatc

SEQ ID NO: 54199 - DNA, 404 bp, Zea mays
tcagctgaagagggaaggaccttttctggcaggatcttcgtctatactcgggtcctacagggtgaaggatatggacggcaacgacattcctagatcttggaatgcggatgaacttcggcggcattatgtgtagcctgatgtcatcttttttatactttcctatggcaccctttttctttccaaagggggagaaaggtttttaatggggccatagcatgtaaattctctttttcttataacagctttacaagagcaatttcctccgaggatgtacatggtaaaactgagcatgcaccatcgagcgcaaagtgaaaaaggaaaaacagggagaagctagaaggacgtccctaaagggatgcagagcacggcgaagctacaaaaaagccattcctaagggagcgcag

SEQ ID NO: 54200 - DNA, 371 bp, Zea mays
  unsure (1)..(371): unsure at all n locations
tatacccgttttttttttgttgnggaccgagccaatggaaggattttctatctcgtaaaaagatgcctccttgacaaaaaaaagggcaagtgggccgatttgctacctgaggctgtctgggcgcttaacacgactgagtgcagggcgaccgggttcaccccttttcgccttctatatggatcggaggccatgaccccacaagaaataaaacatgggtccccgcgaacagttccgtcagccgtccccgacgtggacgagcccacttcgaaggatctcatcgatggagaccgagtctttgctctacaggctctgaacaaataccaagcccagacaaaagcatggcgcgaccacgcagtcatcccaagagagtc

SEQ ID NO: 54201 - DNA, 353 bp, Zea mays
tctaaagggagaacacgtgatagggctaactaagggtcaattctaaaaagaagaccttgcgcagcttgtcaagcagggaaacaggtgggaggctctcatcacaccaaaaatgtgatgacgacatccagacccttggagatgctgcatatggacctttttggacccgccgcctatctgagcataggaggaagtaagcatgggttacgtattgttgatgacttttcccgcttcacttgggtgttctttttgcaggaaaagtccgaaacccaagggacccttaaacgcttcctcatgagagctcaaaatgagtttgagctccaagtgaagaagaaaagaaacgacaatggatccga

SEQ ID NO: 54202 - DNA, 320 bp, Zea mays
  unsure (1)..(320): unsure at all n locations
gcttcanntccatctatgttatggattgcttttgtattacnccaattgccttccggccttcttgcagcttcctgacttccatggatagcaatgggtccctgatccgaaggtatcttcatgcaaagataggcaggatgaaggattgcctcgaaggcattgagggtaccacgaccaataattgcattgtaagggtatttcatgtcaacaatgtcaaacacaacttgctcagttctagtgttgttgatgaacccacaggtcactgacatggtgatcttgcccaatgctacaatctgccttcctccgaagccacagagaggatg

SEQ ID NO: 54203 - DNA, 245 bp, Zea mays
ctaccggttgggctatgcgggccaccacgcatcgagtgcaagcggctgttcccccggggtaaaaatcctggcgaataacccttttaccctggtcactatataaaacgacgaatatgtgtgaagtcaccaccaacaatcttggtatttgcactggctgctggcaaaattcttaaccatagccgaaacttgactctcacaatcacaccaagctccagtctgaaacccacttcctccgaaaaaaagcc

SEQ ID NO: 54204 - DNA, 395 bp, Zea mays
  unsure (1)..(395): unsure at all n locations
agttctggcacgttttctatgtgttcattacattgttgaagttctcctaatgaactgtatgcagtctaacattttctgcaacagggcggataaatgtggtgtatgataatctcaaggaatatttaccgtctcttcacagttaacatatctattctttagattttcatacagcctgcttggcacgtgccaaaataaagtcgtttgtaagttgaatggataatgaatgaagcggatttaataatttgggcaagattcttggtcctgctgccacgctgtattctggacaggtgttatataatcaatttgtagtagcctgtattgcagtgggatgacaccagtgttcagtagaactgtaggatttttngaaaatttttgtggtctatctagcaaacacc

SEQ ID NO: 54205 - DNA, 404 bp, Zea mays
tatgaagattcttcatcccaacatgggctagtcggtggtgccagagccaacccatgttagtcttaacaattaagcatgtgtcgagttcagctctttcaaaatctactaagtatagctgaccctttaacacacccttaaatgctattgaatcatcacttcttctaaagacagtgacacctacatcagtgaatagacagccgtagcccatttgacataattgggaaacagaaagcaagctgtaatctaaagaatcaacaagaaaaacatttgaaatggaatggtcaggagaaatagcaattttacccaaacctttgaccagaccttgatttccatccccgaatgtgatcgctctttggggaacttgggtgttctcgtacgaggagaacatcttcttctcccctgtc

SEQ ID NO: 54206 - DNA, 275 bp, Zea mays
  unsure (1)..(275): unsure at all n locations
tgaggccgactcgccgaagccacagaaactgcatgatgtctgtccacatattctggaatcacggggaagataccaactgttgcctacttgcttccgtgacctgtggctgtcgttcactttttcttttgctttgatagcaaatgcacattctggtctatcgactcgttctcccgagaaacacaaaaaatgttctctgttgaaccccaaatctttcttcaatagtccctggcgcctttgctctcttggaagctcgcggtncagaacgaacctctgct

SEQ ID NO: 54207 - DNA, 358 bp, Zea mays
  unsure (1)..(358): unsure at all n locations
cacattttgggactaacaaatgttcacttngagaaagacagggcttgtagcgcatgtcaggcaggaaagcaagttggtgttcatcatccacacaagaacatcatgatgactgacaggccactcgagctcctacacatggatctattcggcccgattgcttacataagcatcggcgggagtaagtactgtctagttattgtggatgactattctcgcttcacttgggtgttctttttgcaggaaaaatctcatacccaagagaccttaaaaggattcttgagacgggctcaaaacgagttcggcttaaggatcaagaaaattagaagcgacaacgggacggagttcaagaactctcaaa

SEQ ID NO: 54208 - DNA, 412 bp, Zea mays
ctggctgtcttatgcggttagcaaatctaaatctaattcctaaatttaacttggtcaaaaagtctaagtgccatgtgtgtattgaatcaaaacaaccccgcaagcctcacaaggctgctgaggcaaggagtttggcacctctagaacttgttcattctgatctgtgcgagatgaatggaattttgaccaaaggtggtaaaagatactttctcacttttatagatgactccactagattttgctctgtgtatctcttaaaaacaaaagatgaagcatttaattattttaagacctataaagctgaagttgagaaccaacttgagaggaaaataaaatggttaaggtccgatcgaggtggagaatatttctctaatgtgttcgatgagttctgcgtggaacatggtattattca

SEQ ID NO: 54209 - DNA, 304 bp, Zea mays
acatacaagctggccaacaatcaaggcgaggtctacaacaacgcttggaacatccgacagctacgtcgcttttacccttaagatgttttcaagtcgttcatatacctcgttttctatacatacacaaataaagtctaaccgtcaaggaagggtcagccttgcctcggcaaagcctgaccctccctcgggggctagaaggggggaaccccctctgcgtcaaaattttccttggaaaaagttgtaacacctcaggtgttaccatggctagagcacaccttggtactgaggactgtgatcacatgtg

SEQ ID NO: 54210 - DNA, 406 bp, Zea mays
taaccttgtaacgaggataagctacctttttccaaaggtggatggttcttaagtatctttgaaatctttaaggataaatgcttaaaatatttgcaacatgctttgataagtgcataaactgtcatgagcatcacacttatactttgacacaatgcacttcacattctgtataatatagatatgttctcattaaactaaatatgtgcaattggcatttaaggccaaaatatatgttcctctccatgcacatatttagcgggaacaatctatgttatatagaattatgatcatgcttaatttgacatatccttttgatcatatctcttttatgtctatgactaatgtgttttcaagtatattctcatgcttagtcataggattgaaagggaaatggagtattcggcaa

SEQ ID NO: 54211 - DNA, 416 bp, Zea mays
tgaacccaaatccaacggctgtagtaacccgatacctcttcggcctgctcattttgcaattgagcccttctggaatttgaaaaccaacccgcagtccatctgtatgcaaagatcattaccataaggaccttattttctccaaacagcccctgcacttgtgaatattaacatactcactccatgccacgaataaaatcagagaaattcatttataaaatgatttttaatgtaaaaataattgtaggaacttgtttaattcctggaaaattcatttttgctcctttttaatccattccagttcctataattttgtattaatattggttatcacttagtaactctatttgaacatgaaacatagactaaaattggctacttaatttattccatgccaagcacttaattattcagaaaat

SEQ ID NO: 54212 - DNA, 371 bp, Zea mays
tcgatacactacgacttcattctcttagggtgtgggcaagtttttttcccttcgtcggccctcacaatggacaaatcccgaaaataccttcctctcatgttgataagatgattctctttgatagttgatttaccatatactgaatggcttggtcgccatggaccatcttcggagtcttcaccaccggtgtccacatcataactggtgctgtcaccagtatcttcagacaaaccttccagaatctccttggtgattttttctgggatggtcttccacatcgctcatacaaatcccaagttcttctcttcataaagactcagcttcttatatctgcagccttcttagcaggttcacacatttttcgaaacact

SEQ ID NO: 54213 - DNA, 411 bp, Zea mays
  unsure (1)..(411): unsure at all n locations
agcttatgaagattcttcatcccaacatgggcttgtctgcggngccacaaccaacccatgttagtcttagcaattaagcatgtgtcgagttcagctctttcaaaatctactaagtatagctgaccctctaacacacccttaaatgctattgaatcatcacttcttctaaagacagtgacacctatatcagtgaaaagacagttgtagcccattttgcataattgagatacagaaagcaaattgtaatctaaagagtctacaagaaaaacattggaaatagaatggtcaggtgatatagcaattttacccaatcctttgaccaaaccttgatttccatccccgaatgtgattgctcgttggggatcttggtttttctcataggaggagaacantttcttctcccctggcatg

SEQ ID NO: 54214 - DNA, 412 bp, Zea mays
tcttgtagctgctgccaaaaatgagatgtgaactgcgtttctcgatctgacactatcttcttcggcaccccatgaaggcagactattcgtgacatgtataactcagctaacgttgctccggtgtatgtcggcttcacaggtatgaagtgggccacctttgttaagcggtccaccaccacccagatggaatcataaccggcccgggtacgaggtaggcccactatgaaatccatcccgatctcatcccacttccactgaggaatccgcaatggctgcaacaatccggcaggcctttgatgctctgctttgggtctctgacagctatcacaaatggcgacatattctgcgatcttcctttttataccataccaccaaaaccttctttgtaaagcctggtacatcttctcactcc

SEQ ID NO: 54215 - DNA, 442 bp, Zea mays
  unsure (1)..(442): unsure at all n locations
tgccagcttgctaggagacatgaagtacagacttattatgttctanctagtaccttttagggcgtgtttggttagctctcaatccatgtggattgagtgagattggatgagtttgaatcccaaacaagtcaaacttcttaagaaatctttccaattccatccaatccatgtgtattaggaataaccgaacaaatccttaggtggccctgcagtgagtaaccctagccgtgcatagtgctagtgcacaaccatcgatggtgtacaactgtgcacagcagccttcgatttggctgcacagtgctgtgtgtttctttagtgcgcctgctgcctgagtgcgtcgaagtcaacaacgacgacgacccataagaagaagaaaaaaaggtgagggctgttaggagttatcgaagtcaagaaacagtgagagcttatccgatcctaggtg

SEQ ID NO: 54216 - DNA, 401 bp, Zea mays
tgctacatgccttcttctttttctccaaagcaggaactttactggaacactaccccacttaaaagaatgagggtggaactcttgaatcttggggatttgaactccttgaagtacctcataacaagggtgttacggggccttcttctgctgttgctgcttgagcaggctgcggagagatgactgacatagggttgattctgggagaactttcttctcatcttctcttcactatcttcttttcactgaccctttccttctatttgctcttcccactggaggattctatcaaagagtattaccatcatacagacgaggaaaccgaagatgttgaaccatgtacaacagtcttcaatccaagaatcaccaagcattgtgatctcaggggcgagggagtggaaaat

SEQ ID NO: 54217 - DNA, 441 bp, Zea mays
  unsure (1)..(441): unsure at all n locations
gcatgcaagcttgcantccttgttagcagcatacngtatgtagatgtatgcaaataaacacaccgacaggtcttgtctcctttccttgtgaaacagcattgttcgcttgcacgaaaaccttctgggtgaggtcaatcatactgcgtgtggctgataataaaagggagcagttgtgtaatgattatacgggtctaaatcagtcttggttttaagcctatattgtgaacatcaagttctaaaccaattgaagttatcatacttattggaatattgggccatgtctatatatgaaatggtatcgcggaaactaagncgcccattacatatatatatttgtttttctctgtagattggatcgattttttgctttacctagaatccacaaaaaacaatacatacaccaccccaaatctcatgtcctataaaaccatcttgttcact

SEQ ID NO: 54218 - DNA, 407 bp, Zea mays
tgtgaaggttcttcatccccacatgtgctaagcggcgatgccacagccagcccatgccagtcttagcaattaagcatgcatctagactggcctcctcttttgcaaaatcaactaaataaagtttgacgtctaatacacccttaaatgctagtgaaccatcacttcttctaaagacagacacatctacatttgtaaaaagacaattatatcccatattgcatagttggctaacagatagcaaattgtagccaagagactcaactaaaaacacattagagatagagtgctcattagaaattgcaattttacctaacccttttaccttgccttgattcccatcaccgaatataattgaatcttgggaatctttattcttgacataggaggtgaacatcttcttctccccc

SEQ ID NO: 54219 - DNA, 399 bp, Zea mays
  unsure (1)..(399): unsure at all n locations
aagcactatctcttaacatagatgttctatggataaactcaacacaagagatggaattagtagcacaagcactagtttcttatttagcaaccctttatatgtggaaggcaagcgagttgctaaaatagagaaacctcataatatggactaaatttccttgaaccctcatgcacaatatattntgaatgacatggataatatgcatggttgttcaatgaagtctaaaagggctgacttaatccatattatggtaagtgtctaataaagaagaatcaaatccaaattaactagatagagaatacgtcacataattttggacggttcaccatatgataatattcattcatcttccaattagacctttatttcataatcaacaactgatgtatatcctcaagt

SEQ ID NO: 54220 - DNA, 401 bp, Zea mays
tcatatatataataatataaacatatagtaggtacagacgttcatcagatgtgttgttctgctgaacagcactcgacactgggggcggtggctgcaattgcgggtttggagtcttgcttcctacggaacaaacatatcagactgccactcggactggccatcaagggttttgtcacttctcgcatcgcatcggctggtgcctgaaactgctgaaactctgcgcataaactgtcttgtaacactgcactttggtatggggcagcttgccagcttgtgaactataggccacggccggtcatgccagtcagaacacatatactgcccaaaattacacactggcgtgccaagaagcattcaactgctacagttctgtgtcttcttcccggcctctcggaaaccga

SEQ ID NO: 54221 - DNA, 421 bp, Zea mays
  unsure (1)..(421): unsure at all n locations
agctntaccaaatggacgtgaaaagtgacttctctcttggaccaatcaaggaggaggtctatgttgagcaacctcccggctttgaagatagtgagtactctaaccatgtgtataaactctctaagacgctttatgggctcaagcaagccccaagagcatggtatgaatgtctaagagattttcttatcactaatggcttcaaagtcggaaaggccgatcctactctctttactaaaaccattccaaatgatttgtttatatgccaaataaatgttgatggtatcatatttgggtctactaacaaatctacttgtgaagagtttagtaggatcatggtacaaaaattcgagatgtctatgatgggggagttgaagtatttcttaggatttcaagacaagcaacttcaagagggcaccttcat

SEQ ID NO: 54222 - DNA, 391 bp, Zea mays
  unsure (1)..(391): unsure at all n locations
tgagcacattagcctccacactactgaatttaccaaatgtgcttactatgatgattgttcgtcttggtattcagaatgatatccataaaggatatgatgaatctatgatagattcgaaaaaattcatatcattaatgaccatcaacaatgaattgtcatttccaactggttatggttggagtcaggaattttgcacgctcctgacttgcgattaactgcatgtactgcatgtacatagttccctatggttatagtacatgggaatccaagaaagatttcccatgcgtacattgggtatgtttccaatctcaccaccgtagncgacatatatgggcacacagaatactggggatctatgtgagaattcattctccggcgatcattaagtttt

SEQ ID NO: 54223 - DNA, 242 bp, Zea mays
  unsure (1)..(242): unsure at all n locations
tagtaacccttatccacctctgccttccacttctaaggtgattgtacacatgtgttccagtgatctcatntgccataatttttttggatatccttagaaacttagttcaagtgaacctccttaaagcccttatcaatccccacaccagtggcaatgaggtggcagaagtgtctaagaatgaaggaggatatgtcattggtccacctcaagtcccacaattntgctacccaataacaacaaca

SEQ ID NO: 54224 - DNA, 324 bp, Zea mays
gcttataacggagatcacgcgatgcgtccaactactgaagcgatcgtacacgagagaccgagtgcatcttgtgccgcaagttaacttgtgagaacctctcaccataccacaaatgagacgaccttcatgccacctttggactgctcctatggacctgttgtggacccatcgctatctaatgatagagaggaatgtcagtttggccacgtcatgagcgacgattttttacgctttactcgcgtattctttctgcctgataaatctgacaccctcaggacactcatgcgcttcctaagacgagctctcaatgacctctaggtcaac

SEQ ID NO: 54225 - DNA, 407 bp, Zea mays
agcttgaagccatggtaagtagcataggccaattatatatgaattgactcaagcctagctacgggtgcataggtttcaccgaaatccaaaccttcgacttgggagtatcccttggccacaagtcgggctttgttccttgtcaccacaccatgctcatcttgcttgttgctgaagacccacttggttcctacaacattttgattaggacatggaaccaaatgccatacctcgttcctagtgaagttgttgagctcctcttgcatcgccaccacccaatctgaatctttaagtgcttactctaccctgtgtggctcaatagaggaaacaaaggagtaatgctcacaaaaatgtgcaatacgagatctagtggttacccccttatgaatgtcgccgaggatggtgtcgac

SEQ ID NO: 54226 - DNA, 401 bp, Zea mays
tatgaagattcttcaccccgacatgggctagtcggcggtgccagagccaacccatgttagtcttagcaattaaacatgtgtcgagctcagctttatcaaaatctactaagtatagctgaccctctaacacacccttaaatgctattgaatcatcacttcttctaaagacagtgacacctatatcagtaaaaagacagctgtagcccatttgacataattgggaaacagaaagcaagttgtaatctaatgaatcaacaagaaaaacattggaaatggaatggtcaggtgaaatagcaattttacccaaacctttgaccaacccttgatttccatccccaaatgtgatagctcgttggggatctttgtttttctcatatgaggagaacatccttttctccccg

SEQ ID NO: 54227 - DNA, 454 bp, Zea mays
  unsure (1)..(454): unsure at all n locations
ttaagtcacctgcggcgtgcaagcttttccaaaatctagaggtaactgtgagtctctatccgaaacgatcttctttggtacggcgtgtaaacacacaatccgagccatgtataactctaccaactgagaacctttataagtagccttgatcggaatgaagtgagctactttggttagcctgtccacaatcacccatatggaatcatacccttttgaggtgcgaggcaacccgacaatgaagtccataccaatctcctcccacttccattcgggtacttttaacgggtgtagtagtctagctggtctttgattntcagctntgactctttgacacacatcacacatagccacgtgtgcagccacatctcttttcagcccatactaccaatatttctggttcaaatcctgatacatcttagtgctcccaggatgaatggagtaatcagagtcatgg

SEQ ID NO: 54228 - DNA, 409 bp, Zea mays
tactcctccctaagaagggtcgttcatcatcacctatattttgaagcccacgacatacaagctggccaacgatcaaggcgaggtctacatcaacgcttggaacatccaacagctacgtcacttctacccttaagatgtttcaaatcattcatatacctcgttctctttacatacacaaataaagtctaaccgtcaaggaagggtcagccttgcctcggcaaagcccgaccctccctcgagggctagaaggggggaaccccctctacatcaaaattttcctcggaaaagtcttttgccagaacgtctttcgcgcttttcgactgcttcgatagcggggtcctgaaaacgaccagagtacacataagcggccaggtcgaccgagccgagggaatcctatgcctctgggata

SEQ ID NO: 54229 - DNA, 288 bp, Zea mays
  unsure (1)..(288): unsure at all n locations
gctctatcaaaatctaccaagtatagctaaccctctaaacactccttaaatgctatngaatcatcatttcttctaaagacagtaacacctacatcagtaaatagacagttgtagcccttttgacataattgagaaacggaaagcaaattgtaatctaatgaatcaacaagaaaaacattggaaatggaatggtcagatgaaatagcaattntacccatacctttgaccaaaccttgaattccatncccgaatgtgatcgctcctttgggatcttggttttctcatatg

SEQ ID NO: 54230 - DNA, 128 bp, Zea mays
  unsure (1)..(128): unsure at all n locations
tggcgtctggggcttttttttaaagaaactccgttttacgtgaaaggaggtgaaaaccgctggctctaagactagttggacactggaaaatacggtcattggtaaatatgatgttntttagtcctgta

SEQ ID NO: 54231 - DNA, 395 bp, Zea mays
  unsure (1)..(395): unsure at all n locations
ttgaatgcaatggtgtgcacctcgggtgtggaggtgccaacttgatccaagttgacaatgtgcttggagttcttgagcataagtttcaaagctcacaaactcgcccatcaccttcttagaagacatttgctcanacctacgattctcatggattaattgcacttgagtgggattacgacaaacaagagatctttgataaccttgaccatttcatagtcataccacttgatgctcccaaggttgcggactcggttcactatgatcttgagccgggtgtacatagctngngactcttctcctttgttgangacgaaccagccgagtnctctctcgattgtttcccgcttggtgatcttgtctccttcgtgcgtcgtcttgatgacgttctaaatttc

SEQ ID NO: 54232 - DNA, 242 bp, Zea mays
  unsure (1)..(242): unsure at all n locations
atgactgcagtattgccaccataggaagatatcgttgcttcatagctcatcagaaactgcttccgatctgagtgtccgtcgtacatggtgagttgaggtggcttgtatgacggatgccaaggtgtatcctgcagntctgctgacagaagagaagcatcatcaaaagcaaaatttccatgatggaaattctcataccagtcatccttcgtgaagaagccctcctgatgaagctctctatgctg

SEQ ID NO: 54233 - DNA, 156 bp, Zea mays
gtctcaacgcaaaagtttgcaagatttggcgtttatgttgggaaaccctgctgatcttgggatactctacggacaagcaagtagttcctacggggagggccaatgtcagccacctgaagctggtgcatagtttatacgaggtgtgacagaaaactt

SEQ ID NO: 54234 - DNA, 264 bp, Zea mays
agccagccatgctagtcttagcaattaagcatgcatctaaaccggcctcctcttttgcacaatcaactaaatagagtttgtcgtctaatacaccccttaaagctaatgaaccatcacttcttcttaagacagacacatctacattggtgaataaacagtattacccatattacataattgaactaccgatacaaattatattccagcactttactagaaacattaaaaatggaggctcattgagattgcatcttgctaagcttt

SEQ ID NO: 54235 - DNA, 334 bp, Zea mays
tgttactgttatgcaagctattgaggaaacgccaccgctagcctcagcgtcaaaaatatcaccagctatcgaagttgctgcttctgccgaagctgtgactgctgaagctaccaacctggagagtacattatgtgctatcgataaagtgctcttggatttggctgcagaggagactactgcatccgcagaagaagtcctggccacagtgcctgaataagggaaggaaattgccgaatatatttcggaagacaaagtcttcaattctcaaaatataattggtcaagaattatccaacgctgagaaagacgagctgcaggagtatgctaaatcctat

SEQ ID NO: 54236 - DNA, 416 bp, Zea mays
  unsure (1)..(416): unsure at all n locations
atcttaagtcacctgcggctgcagcttgtctttgtgttgacgccggcgtttttgctaggataggagtgtacgcaccaagtgccatgtcaaatgctgtcccgaggtagctgcgccaaaccgtgtcaagtgaatttggtttgagttcaaacttttccagaatgtgttcaaggtaatttggcacgactttgatanttggatcttctggctttgagntttgaanagcagagaacacagatgatctttgggaagaggtctgaaattcagaaattcagaaatctgaatttctctaaaggttcattgatcaatggctgatttggggatttgtttgagttattntggctaagccttctcaatctttcttgttgcttaataaatatactntaacttatatatttggctcaactcacaatttaaac

SEQ ID NO: 54237 - DNA, 442 bp, Zea mays
ttgacatttcacataatatttctgagatccagaatatttagttcattccttaacatgcaaaagcgggtcttatcaagtggcttagtgaaaatatccgctaattgatctttcgacctcacttcttctaaaatgatatcttccttagcaacatgatctctaaggaagtgatgacggatatcaatgtgcttggtgcgagagtgttgtataggattattagcaattttaacagcactctcattatcacacaacaaaggtactttttttagaactacgccatagtctagaagagtttgtttcatatataaaatctgtgtgcaacaagcacctgcggcaatgtattccgcttcggcagttgacaagggcaacactatttgctttttggatgtccatgacactagtgatctaccaagcagatggccatccccagaagtacttttctatc

SEQ ID NO: 54238 - DNA, 349 bp, Zea mays
tttctctctggctgcacgtgagggggttgtgaagtgtataaatagattggctaccttcttctaacagcttaaacttttgggttgaattggttagtgtgtccactctaacaaggccaataggaacaaaaagaatggttcagatttaaggatcaacaacaattgatcaaggggtttatccttagatcctgtgttggtagctgtcatgtgggggcggacgtttgcacgacgccagccaaaccagcgccaaaatagggggtgcggtcaagatgtaatcggtcagatcaagatgtgatagaccaagtagagtctgttaagagtttttagcacatagataatgataaaattgtta

SEQ ID NO: 54239 - DNA, 182 bp, Zea mays
agcttagttaacgacagattttagactatgcttacttgtactttcccctaattgatgtaacccttgagaactcttgagatttgtgggatgtttgtaaccatgttatcttcattcgaacctaatgttatgattatggcaattttatttccatatgagataatagcatgttgttcaaacctaat

SEQ ID NO: 54240 - DNA, 387 bp, Zea mays
  unsure (1)..(387): unsure at all n locations
ttctattctagcgattatcaaaagatgtccattgaagcaaactatcacggctaccaattgaaaggtcatttattatcatagctccatgatatttaagggtaagcatctagtatcaccaaatattatagagcatgagcaatctaaaaatatgcaattactcacgacttaagataccaatntcttgacttacagaggtacgcaagtcctgattgctccatttcttgctcatctctctctttccaccttgagactacacaagatcactcaagaaacaattagtctcagaagacacaagttatgtgtgctcccnctaaacttgtgcataagtatttgaataacttgcactatgcacattctagctttctcagaactagaggggatcacaac

SEQ ID NO: 54241 - DNA, 395 bp, Zea mays
  unsure (1)..(395): unsure at all n locations
aatgtcatttcgagaaagacaggatgtgtagcgcatgtcaagcaaggaagcaagttggagtccatcattcgcacaagaacattatgacgaccgacagccgttgagctactccacatggatctattcggcccgattgcttacataagcatcggcgggagtaagtatcgccttggaatagcggatgattattctcgcttcacttgcgtattctttctacaggaaaaatctcaaactcaagagaccttaaagggattcttgagacgggctcaaaatgagttcggcttaatgatcaagaanataagaagcgacaacggaacggangtcaagaactctcaaattgaaggcttcttgangngacggcatccagcatgagttctcctcttcctacacacctc

SEQ ID NO: 54242 - DNA, 267 bp, Zea mays
  unsure (1)..(267): unsure at all n locations
ccggaccctgcaactaggggacctcttactactggataaagacgccgtacccacgccgctatttttagtcgcgtgggaaaagagctgtatgtgggaacagggcatgactcgccccaacctcgggcgactactctangccagcaacagcacctgaccccacaacatgggcgggttcgctgtcaccacgtgtccagagaaagtgacatactctgaggtatcaccagtgaagtccgacccccatgggaaagtgtcggacccctgtatata

SEQ ID NO: 54243 - DNA, 400 bp, Zea mays
atggatcgacattgagtgaatgctcaatgacgtccctattgacaccatatagatcgatggctgaccatgcaaaaacatctttgttgttgaataaaaaccttatcaaggttttctcctgctcttcagataattgggatcccagcaataccttctgctctgctatgtcttcacatagaagcatgggctttggctgatcagccgaagcaaccttctctcttctgtacttatattgctcacaagcttcggctccatctatgttgtggattgcttttgaatctgtccagtttctttcggcctttctagcagcttcttgactgccatgaatagcaataggtccttggtccaaaggtatcttcatgcatagatatgatggatgaagtattgcttcaaaagcgttgag

SEQ ID NO: 54244 - DNA, 271 bp, Zea mays
  unsure (1)..(271): unsure at all n locations
ttcagtatgtgctcatcggttatttttgtagggtttaattctgagcaaggctttaaaggcccaaaagacagccgaagatgatagctgccagctagcgctcggaaatcttcgatcagaagttattacactaaggaatgaagctcttgaaaaagacanaatactactctccttggtggatagactganaactagcgaagcccagcttaacgcacaaaccgaagctcataaagccgagggtgaagattaaagaagaagcttgctgaaatgaatg

SEQ ID NO: 54245 - DNA, 372 bp, Zea mays
gcatgaaatgaccctattatatatcttgaatcacttttatacccctgggataccagaaaccctaatggaaccctggagaaccctgaaaccaaaccctagggacctaagtgtaaaattagtccacttttgggctaaagtgcaaaaaccaagtcaaataagtattttaagttatttgggtcacttatatgagaatttgcaatccacaacttgagatttggacttaagtgcaaaagtgccccacttaacctttttggggttaagtctggattttagtgacattggctcaactttggggctttgtaacttacaaagtatagggtttttaccctaggtcaccacatcacagttgaagacccattataggagaacaac

SEQ ID NO: 54246 - DNA, 404 bp, Zea mays
gctttgaagatagtgagtaccctaaccatgtctatacgctctctaaggcgctttatgggctcaacaagccccaaaacattggatgaatgccttagagatttccttattgcaaatggcttcacagtcggcaaggccgatcctactttatgcacttaaactcttgacaatgatttgtttgattgccaaattatgttgatgatatcatatctgggtctactaacgaatctacttgtgaagaattaataggatcatgacacaaaaattcgagatgcctatgatgggggagttgaagtatctctaggattccaagtcaagcaacttcaagagggcaccttcatttgcacactaatatacacaagacatactaccacgttggaatgatgatgcaagccatcagacaccat

SEQ ID NO: 54247 - DNA, 469 bp, Zea mays
  unsure (1)..(469): unsure at all n locations
gcagcttatccattgactcttgctttctctatttataagtnagtgggtttactaacttggaaaaacccttcataaatcgtctatagtatcccggcaatccaagaaaacttctgatcttggacgcactctttgggtgcttccaatctagtatttcacttatctttcctgggtccactttaattccaccatcggtaacgatatgtcctaagaaagcaacttccttcaaccaaaaatcacacttcgagagttttgcgtacagttggttgtcacgaagcttttgtacgactagccttagatgatcttcgtgtgcttcttcattcggagaatatatcagtatgtcgtcaatgaatacgaccacaaactgatccagatattccatgaatactntattcatcaagttcataaagaatgctggtgcattagtcagtccaaacgacatgaccacaaactcatatactccatatctcgt

SEQ ID NO: 54248 - DNA, 415 bp, Zea mays
ttgatgttctttttgaccagttggtcggggccaacgcagtttccaagatagaccttcgctcttgcttccatcagaccaagatacgagcgagtgatattccgaagacggtattcttaaccagatatgggctatatgaactcttggcgatggcattcgcgctgacaaatgcaccaccatatttcatgtatctgatgaattctggtctcatgccggaattggacaagttcgcggtggtttcatcgatgacattctggtgtactcaaagaacgaagaagaacatgtcgggcatttgcatgtactgcttcaacgtctgcgagagcaccacatttatgtcaaggtattcaagtgcaattcttggctaaagggaaataaatactttgtgtaccactatctcctaaggctggataactggtga

SEQ ID NO: 54249 - DNA, 349 bp, Zea mays
  unsure (1)..(349): unsure at all n locations
catcattcaaagaatgcgatgaccacatcaagaccattagagctattgcatatgggtgtcttcagcttccttgcttgccatagcatcggggaaagtaagtgtagtcttgttattggtgatgattatacatgcttcacttgaatatttttcttgtacgataaaagagaaacccaaggagcccacacaagagattcttaaggagagctcanaatgagttcgatgtaaggatcaagaaaatccgaagcaacaacaacatcgagtttaagaacctgcaagtagatgagtaacttgaggaggaaggcattacgcatgagttatccactccctacacnaccacatagattggagt

SEQ ID NO: 54250 - DNA, 251 bp, Zea mays
  unsure (1)..(251): unsure at all n locations
caacgaaaccttcgagcaattgaaggtattattggccactgctctggtattggctcaaccggacattgaaaagccttttgatgtgtattgtgacgcatcangcagtggcctcagatgtgtcttaatgcaagagggccaagttatagcatatgcttcaagacatttgtgcgacatgaggaacattattcaactcatgacttagaattagctgctgtggttcatgcccttaatatatggcgtcattatgtgct

SEQ ID NO: 54251 - DNA, 271 bp, Zea mays
  unsure (1)..(271): unsure at all n locations
ataggagaacactgctataaaaaatcactcttaacttgtctctaataagagatggggtcatgcccaatggtgaaacgtattctctattatattagattacataagacattcgatgaagaaggtcttatactctaaccatcgattcgtttgctggtnaatccctactataatatagactaaaaaggcacatttggcctattacaacatatacatatttttatatcttatacaactcacctaaagcttatgcatgacataaccgctcggcact

SEQ ID NO: 54252 - DNA, 436 bp, Zea mays
  unsure (1)..(436): unsure at all n locations
agcttgagccgaggcattgcctcaacggagaatctaaatcacnctcgccggacttcggccggccgccaccgcgcgtgaaccgagctatctggtgagccatttttcaattcctcgcgtggaccgacctactccgaccatcaccggagacgatccgcacatcggcatgaccgtcaagacctcccttacaccctcgaccacttcaccggagcaatctcgctgccggtaagcccctcctcccttttctccgccacgaccactgtttcattagggggaaggaccatgggtttgatttagtagaaccttaggggttttctgcatagtcagagactcatgtgaatagtaacccgaggacccatctgcaaggaaacttagaaactttcgctagggacccaatgcanaacctttttcctttaccatttctgttattctttttaat

SEQ ID NO: 54253 - DNA, 337 bp, Zea mays
cacaaacagacacaagcaagcgaacacatatatgcataagaacattacaccatacaaataacaacacagcagaacatgcgagatgaaacacagcgcgttactatgtggacacgcgaggaaaaaaagaaatgtcgaactcgaagagacagtacggaaaacatcgcgcgcacgctaaacaagaattaacgctaacaattaaaccgacctcatcaatcagagactatatctactatccagtctgattaatgcgctacactaacatctcgcaaatacacaagtactctagataacacaagtgagtctaagcgagacgaatcttatgacaagcgaaacaaca

SEQ ID NO: 54254 - DNA, 363 bp, Zea mays
tgcagcatgcaacttcaaaacttaagcctgtgaagaaaatatattttccttgtggccaagaacgaaactattacatgaaattcggaagatggcctttattacacgggaaataaaactgaatgaaaaagactggtatcaagggaggatatttggcaatagatgggcttcgactctggcacagtgctgttgactgtgcgaacttcggactgttctctgaagtccctttgatgtgggccatattggctcccttctgggtgttggccttgttgcagcggtagtggaggcggatgctgtctgcaagaaacttgaggttgactcaccgaagctacagaaactgcagggtgtcgcctacatattctgcga

SEQ ID NO: 54255 - DNA, 340 bp, Zea mays
  unsure (1)..(340): unsure at all n locations
ttaagtcacctgcagctgcagcttgtgatctttttgagcccttgatcatacttcaaagctcacaaaattcctgattacttcctcgggagtcattagtgtgtatctaagattaccacgaattaattgaacttgagtatggttaaggaaaataagtgatctcaaaataaccttaaccacttcgtggtcatcccatttcttgctcccgaggttgcgcacttggttcaccaaagttttgagccggttgtacatatcttgtggctcctccccttggcgaagacgaanacggccgagctccccctcgatcgtttcccgcttggtgatcttggtgagttcatcaccc

SEQ ID NO: 54256 - DNA, 389 bp, Zea mays
  unsure (1)..(389): unsure at all n locations
ttaaatgttcaagccaaattcaaatttttgttttgaatttcagatttctaatatccaacataatcctaatatgaatataaatactactatttgcaatatttttatttgttttccttcctattattcaattatgagtgaaataatgaatttattatcatttcctttgtttttactcattttctattttatattttcatttataatttgagatcaaatttatgtgtttaataaagtacctcacaacanagtcatcagcaagagatgcactcttctttatttatttattgattacttaactaatttagtaccattaattgattatgaaaagaaaggaaccaaatgaatttcccagggttcaatgattctcaaaacactatcataaatatact

SEQ ID NO: 54257 - DNA, 355 bp, Zea mays
  unsure (1)..(355): unsure at all n locations
gtagagctatccagacatgctctgggacatagccttgaaccatcggcggaaaaatccgttcaatncatatgcggaagtcatgacatcttatccctaacactcgtagagtagatcagttcacccgcctactcaggttgctgcatacccatcagggaacattaacatcgtgatccattgcaatacttncttcctctgngccatgcttacgacaaaattgcgattaggccttctccatgtctttccaccactaggcggcttcatctctcggtttggtctatcacataaggctactagatccactcttgcatttacatatccttaacttataggaatgtcataattgtgcccaagtgct

SEQ ID NO: 54258 - DNA, 318 bp, Zea mays
  unsure (1)..(318): unsure at all n locations
ttgcgccgagggcccctgtgtttaacccgaatcaaacctcgcagatctacccttacgccactattcacttgagtctctgacctttcacttaaccccctggatttccctccctctcacccgcagtccctccctctactgaaacagtagccgcggaaaaagaaagggtggcgcggcttaccggcggcgagggagttccggcgaggtggtcggtgacgttcatgaggtcgcgacagtcacgtcgatgtgcgggtcggcgtcagaggtggtcggagctcccctggccacgaacacaggcggcggngatcgacggcgacgcct

SEQ ID NO: 54259 - DNA, 340 bp, Zea mays
taaagcgcgcgagctctgcagacggtaattgcactgatatatcagccgagctgccaggtaagagcgacctcggcatccgtcatgattcaagatacatatgagatcgagaacattgagtctactaatgatcatggatcaacgatgataatgatgttcctagaggaggaaatcgctcacggatcggctaatactactacttggcttacgataattacttatacctgaccaactataaggaactgatggagcttatccccgcatttagctcgaccacttgagccatgcggaacacttgctgagcatgtgatgcgttctcacacttgctatgaacaacaccaga

SEQ ID NO: 54260 - DNA, 272 bp, Zea mays
  unsure (1)..(272): unsure at all n locations
tttggcatcaacaccaaaacgggatccatcttggccctttaacctcattgcctcccaaagtcttaattaacgcagatggcaataatatttcatgagatgaacttggaattagttaccctctcatcggagtgcagtggaagtctttcatggtccaagaccacctttctcctttcaatcctccttcgagactaaattatcaaactccagcacaaggttagtctcaaaaggtcaagtngtaacacatctccccctaaacatgtgcatcaatttgc

SEQ ID NO: 54261 - DNA, 273 bp, Zea mays
ccaacttgatacattcattaccgaaggaagagaagattcaagcttcctatcatgttgcgaatctggcaatcttgctattaagatggttaacaccgatacacatactgtattcccactggcttatcgtctaattgaattggctttgatattgcctgttgcaactgccattgtacaaagagcattttcatgcatgaaaatcatcaagacagatttgcgacataagatgggtgatgaatggatgagccatcgtctgacttgctatatccacaggga

SEQ ID NO: 54262 - DNA, 373 bp, Zea mays
gctgccagccctcggacccgggcagacttcatcggaggcccgagatcgacctcaccggacttcggtcttccgccgccgcgcgtggaccgagctatccagtgagtctccgtccaattccttgcgctcatatcttctctggcatcccgtgaacctccctgacccatccaattgaactatctcgtcgtgaccaggccggtctcctcgccgccgacgagcatcctcgcctgcgcgcgtggacctaccgactccggccatctccgacggcgtcccgcacaccgttgtgatccctgagacttccccttcgtcctcgaccacttcaccggagcaatctcgccgctggtaagcccctcgccttttcttcgcgcggtactgt

SEQ ID NO: 54263 - DNA, 234 bp, Zea mays
ttataaatagtaatggcttattggaaaaaaacaaaggcgattctgaccctctgggctattaatgggaacgatagtgatgttcaccgataccgtcctaacctcaaaaatataaactattggattaaattgctattcataattattccttatcacataatattatcgcctgacggtttaccccaccgttgtaacatgtggacaaccagctaatgaacttcaaatttaggggcattc

SEQ ID NO: 54264 - DNA, 432 bp, Zea mays
  unsure (1)..(432): unsure at all n locations
aatgctacggcatctcccattataaagcatgcttcgagcaaatctaaatttttcattttctaattcatgctcgacaattttagcatttaacttagctatgtgatcattttgttctttaacatgacaaggtgaccatccatagtttcaatattaacatctctacatctagtacaaatagtgacatgctcaacagtagatgtagatggtttgcaagcattcaattcttcaatttttgtcattaaattgtcattctcaattntaagacaagacattgaatcattgcaaatactaagctctntagaacaagttttacattntctacttgaagagcataagcattnttcaacttaacaattttttntattntccttaacgaacacgtcctcttggctttccaagatatcatccttctagttaatggtgtctattaat

SEQ ID NO: 54265 - DNA, 397 bp, Zea mays
  unsure (1)..(397): unsure at all n locations
agctcgccttgtaacaccgtgtgccctcccttttatagctcaaggggggcacgtacaaggatactgagccccgacatgtgggccccagggcaattggaaggaaacactaatgccctgaacgccagggtgaacttccagcgccatactgtccgtagcgtatacagtantgatatgtcatcgcacctttcttggtacgcgtgcgtcatgacgagagcagcgcatgctgcagcatgggtgtatcgcctgccaacggaatggacaggcacaccacctgtaagatggcctaaatcgctgccgtcatcggagtggacatggactttaatgctgatgaacacatcgcctgccagggagcgatacgctcattaatgctacgcgcacatcgcctgtagtgaatgga

SEQ ID NO: 54266 - DNA, 403 bp, Zea mays
  unsure (1)..(403): unsure at all n locations
atccacgattattactatttatattacagagtatcttcacttctagttataataaagaaattgtttccgatgaggatcaaagatgttatcaattaaattatctagcttttgacatcttgactaattctcttagaacagaagattatcgtgccttcatatcaaattatgacgaatcaatccatgatgcgcatgactattggactagaattagaagcanatttaatgagtcctattatgatagtccattttgtgcttctacttcctttggtacttgtgatactaacccttgccaggaggaagaggaaaatgaacgatggagaccaaacgatgaatccacctctccaacaggttgtcttttcattttgattcccacatgtgttgtgtggcttatgaacatgatagc

SEQ ID NO: 54267 - DNA, 267 bp, Zea mays
gactaacgttctggatgccgcgtgtacttcacactgccctgcatggacttccttcaaaggtgcttcccgcgggacgggagaacgcacttcatgaggacgcccgacgcgcccctcctgtatcatacctccccaatgagtgtataatgagctgattgtctcgcaatcgcgtctggcgagattctgtcatccggctctccttcattctttatatacttgataatcggttgcctccactcatcagagtctgactcgcgttgatctatgata

SEQ ID NO: 54268 - DNA, 151 bp, Zea mays
atagccgaagcatctgccttttctgtatgatatgatgataatgatcctatgtatgtctaaatgaatatttatgaatgcaaatgtcatgatgtgatgtatcgtgcaaatgaatgtccaaatatatattcgaagccataatcatagccttcat

SEQ ID NO: 54269 - DNA, 325 bp, Zea mays
  unsure (1)..(325): unsure at all n locations
gtattgaattatcacttccgcattatttagcaatactcctttcaagcaagatcttagtttgtatactcctatatttgtatatcttgttctaaccactaatcaagggatctagttgggggataaacgtttaattttcaggtttcgcctattcaccccccctctangcgacttacaacatccactgtagttcatcttatctctggcagaggagaagtcggcgccgcaatctttagtcggtccgatgtaggctcggacggaacggagatatgggctaacgccgangctgggctcgggcgatgtggagagtccttccgaggccggagcc

SEQ ID NO: 54270 - DNA, 304 bp, Zea mays
atgagtatatggctaattcaaaccttgacaccattcctgtttggaaaacctggtttctcagtgcatttaattattaactgattctggtaaaggactcagaatatatacgacaacaatgttgctaattggtgatagattccgataggaacagagagctggatttgggaaagacattcaagatcataacccgaattgctaaaagcttacaatatctccacgaggattctcaactgatagtagtccaccgggacctgaaagcaagaatgctctattacacctgtattacgtacctaagatctctgac

SEQ ID NO: 54271 - DNA, 473 bp, Zea mays
  unsure (1)..(473): unsure at all n locations
agcttatgaagattcttcatcccaacgtgggctatttagcgatgctagagccaacccatgttaatcttagcaattaagcaagtgttgagttcagctttattaaaatcaactaagtatagctgaccctctaacactcccttaaatgctactgaatcatcacttcttctaaagacagtaacacctatatccgtaaaaagacaattggagcccactttacataattgagaaactgatagcangttatagtctaaagaatctacaagaataacattggaaatagaatggtcaggagatatagcaattttaccaagtcctttgaccaaaccttgatttccatccctgaatgtgatagctctctggggatcatggcttttctcatacgaggagaacattnctttctccnctgtcatgtgggttgtgcacccgctatcaatgattcaacttgagcccccggatgcataaactctacaaac

SEQ ID NO: 54272 - DNA, 291 bp, Zea mays
tcacttatatgaaccaaacgacagtgccacatgtacgtaggacttaaatcattagaccgaggccttttagcactaatattacagataggtgcatcatcgagatttaaaatgaataacccattcataatggatgcaaaagccacaaacatgccattcttagagatcacacaagcattgttttcactcgcaaatgaataaccattcttcatcaaacatgaaggagacataatgtttcgactcatactacgaactagataacaattatgtaactccaaaataaatcctgatggg

SEQ ID NO: 54273 - DNA, 224 bp, Zea mays
  unsure (1)..(224): unsure at all n locations
gacctaactgcttacgccaaaatataatacgagttatgctgatgtgtgatcagtttatgcaaatatagtctgcgcatattacgtgcatcgggcccatgattcggcccacgccaccactataaaaacacccccacgccgccaggaattagggtttagcggcggcggcggctctctanggcgtgcgagcagcggtgattctgtgggccacgcacggtgtcaccttg

SEQ ID NO: 54274 - DNA, 378 bp, Zea mays
  unsure (1)..(378): unsure at all n locations
acttcacacctacccgtctgtttatatagtggtgcacgaaagaacgtgaatcgtcacgatttttacaccaagcaaacagttgctcgcacccgctgaacggtgggccgcaaaaaacagaatagtgaacccgcatggtggaatcgctacgcgctcgaaaactgtatcgtttctcgacaacgagctcagggaaggtgtttttcggaccttcggcttcctgaagcctaagagactttnttcacggatcaagctcgttacgaanaacgatctagcaccgcgaaggggctactgttgggaccatgcttcgtcgccgaaagtcctacagaaagaaacagctgccgctgaagctgctcgtacgtgacgacgaaggtatcattcatg

SEQ ID NO: 54275 - DNA, 392 bp, Zea mays
  unsure (1)..(392): unsure at all n locations
acatgtgctaaggggcgatgcctcttcctgtccatgctagncttagctattaagcatgcatctagaccggcctcttcttttgcaaaatcaactaaataaagtttgccgtctaatacacccttaaaagctagtgaaccatcacttcttctaaagacagacacatctacatttgtaaatagacaggtatatcccatatgacataattgactaacagatagtaaattatatccaagactctctactagaaatacattagagatagaatgctcattagaaattgcaatttacctaatcctcttaccttggcttgattcccatcaccgaatataattgaatcttgnggaatcttattcttgacgtaggaagtgaacatcttcttctnccccgcatat

SEQ ID NO: 54276 - DNA, 414 bp, Zea mays
cctttgctctgatcaggttcaagccttcttcgcacatacaccagatggccatttgcccctggattgcccaacgtgtgatgattggtccgactcaaggggccataaggctgtggtcgctttatgccaactgtagcagcaactttgttttcaggaaaaggagaagttgtgggttgctcattaacaacattcttgggctgttttggtgattccctcagtgctgccgtattctctgaaactgagtgcgggttgtcaccacgaggcatggtgcctctgccacgaagtaacctggatcgatttatatgtcatcagcagcatttaatggtattagttaccaacaagcacgaagaccaacttgccacatgccaagtcaattgtaaaaattagttttaaatttttttttcagttatgctacct

SEQ ID NO: 54277 - DNA, 468 bp, Zea mays
  unsure (1)..(468): unsure at all n locations
attctncccttagacatcaaacaccatatctctattaagcaagaacataggatgatgtcaagggacagcagggtattaagcacggaaaatgcaacacactaacattactcccccttacacattaaacatatgcaacacaagcattggagaaaaattaaggtacaaatacgcaaaaaggtcaatacctccttttgtacctttaccatgttatggtgtactttccatctaagtaggcgaagtttttcttgtcatcaattcaagatttccatcttgaaagttntatctctagggagctcctttacacttatgcctgatcctttatcctgaccttttcttgtgctaagatacaaaacttagaacacgttatagtatcgtggcacaagatgaagcttctattctagtgattaccaaaatataccaattgaagcacactaccaaggctanccaatgaacaatcatcactgtcat

SEQ ID NO: 54278 - DNA, 440 bp, Zea mays
actcacataaatgccacgtgaatcctcttcccgaccattcatcattttacaatgagtagtcatccaaagggatagatcggttggttctataccagtttctggatctctctgtaatgtgaagaatgtatcatacaagtttgtcattaatcatggaaaataaagtagtggtcatatcattacctgttgaaagcttatttgggaaaaagttctagaacccattatatgcttcgttctttgtttctgacggttttccgagttccgactgcttattttctagaaaataataatagttggaaatgaattaataaataaatcgctagaatcatccatattatgcaagtgtcaatcgttaaagtaaaggaaatgaaatagcaaacctggaatttctcagatccaaaatacaacaccatgtaatgccactcgacgatgtctacatcttc

SEQ ID NO: 54279 - DNA, 321 bp, Zea mays
agctcttatggagacatacaacagaagtgctgtgctctcattatccaaaacggaaaaacttataggttttgtcacaacaagatgtttgctggcaactatgatctctgcgagtaaaggatgtattgaacactttaatgtgaccatcttcaaccaaaagcgagcttcgaaatgttgatgatagcaagtgctgaataagcaaaactctatgcagagttctaaataagaccaaatggtactacctgtatgtaaaagccatgcaaggcaatggatcgattacaattacacgctgtcaagacaatttattcaaggaactctactatc

SEQ ID NO: 54280 - DNA, 301 bp, Zea mays
  unsure (1)..(301): unsure at all n locations
cttagtttatcaaagaacaattatacagagttggagaagatactgtatgctgtcttgatggcctncaggaagcttcggcactatttccaagcttacaacataattgttccttcatcacaacctctgaaggatattatgaggaacagagaagctactggaaggattggaaaatgggttgcagagctcaatgaattntgtattgaatatgttcatagatcttcgattcagtcgcaggcactggcagactatattgctgattggacaccaggggctcaggaggaggaaacanataaagacaacg

SEQ ID NO: 54281 - DNA, 350 bp, Zea mays
  unsure (1)..(350): unsure at all n locations
gcttggtgccgatggagaagcagaagtctttgtttcttggntctcgaactgcttgccggtggcgaccgttagttcggatggtacttcgaagcggcaaacaatattttgccagaanaacttctgggcccgctttgatgtgatggtggagactgcctcgcttcatccatttggtgaagtattcaatggctacaaaggtgaacctgaggttcccctgagccgtgggcaggggcccgacgatgtctaggccccagcgctgaaggggccacgtgtgggcgatcagcttcgtgaactgcgaggggcgccccgagcgtggngaaaatntctgacaggcttcgcaggatctgatgacc

SEQ ID NO: 54282 - DNA, 416 bp, Zea mays
  unsure (1)..(416): unsure at all n locations
tgctcacaccttcggcactgtaccaaccttcgtattattcttgtctactgngaagccgacttgagtccgaagatacctgttcacacattatactccacaaatactgctaaatcctgtttttgaggaccttcgggtgccgaatgtccccaacacaatgcacatttctccttttcttatatatcttctatctctatctattttcttcatgtcttctgtgcaatacgtatttttcacttcttagttctttgcgcgtgtccaaaggcacaaccaggaagggagccagaacaatatttgaagtaccattatattaatcactacaaccatataatctcactaaatcacttatagcagacatacataatagtttgaagtaccattatattatacatcgctgaacgatataacccataaaataa

SEQ ID NO: 54283 - DNA, 172 bp, Zea mays
  unsure (1)..(172): unsure at all n locations
gcttcgtgaaaaattcttcgaagctatactcctaagatgaagaatgtgtctncttgtgaccacgattttcactctttcaaatcatacttncgaagatcaatattgtgtccccttcttgtgccatatgcaacatgatgtatgatgcttatgctatgcacaatgatgtgatgat

SEQ ID NO: 54284 - DNA, 435 bp, Zea mays
  unsure (1)..(435): unsure at all n locations
ccgcgcagaccacttactattgctggcgcgcgcgttttctgttgtaacactaaccaccagactcactggttatgcgcgccggtggttttacgctggcagaacaggcccgcgctacatcttaacaattncatcgcctggctactggtggtccgcgcgccaagtactggcatgtgggcccaagtggcagctggcttccttccctgcgctggagccgggctggttcctgaaactaagatcgaccggtgtccggggatcgtatgttgtgggcttttccccttcctatacgactccacagataactaccaacgcgggtccccgttggccacctgcgaactgactccgtaacacgcagagcagtaatcactgactcgcgcggtggggagcacttggctcggcgggatccgacatgcatactatctcctggctatagtatag

SEQ ID NO: 54285 - DNA, 120 bp, Zea mays
ccatacaacggatatgacctgatcgcagcgcatagcacctgcccttgcgaaatatttgccatgcgaaacggggcgaaaagagccatttggccgtcaatcaaactgtgaactcccacgatg

SEQ ID NO: 54286 - DNA, 406 bp, Zea mays
  unsure (1)..(406): unsure at all n locations
agctntgagcacacacttgaagttcagctcattttaccacccacagacagatggtcaaattgagagaaccaattagattctggaggatatgttgagggcttgcgctttgcaagataagatgggttgggacaagagattaccatatgctgaattctcttacaacaacagctatcaggccagtctgaagatgtcaccatttgaagcgctctatgggaggaattgcagaactccattgcattgggaccaacctggtgaaagacaggtgttcggtcctgatattttgcttgaagctgaagagaacatcaaaatggtccgagagaatttaaaggcagtggagtccagacaacgaagttatgctgacaccgaaagaagggaactcagttttgaagtggagactatgtctact

SEQ ID NO: 54287 - DNA, 394 bp, Zea mays
  unsure (1)..(394): unsure at all n locations
gcatgcttaattgctaagactagcatgggctggtgtggcatcgccgcttatcacatgtggggatgaagaacctaccaagcttctaagggagaacacgtgataggtctaaccaatgttcantttcgaaaagatagaccttgtgcagcttgccagcagggaaacaggtgggaggctctcatcacaccaaaaatgtgatgacaatatcaagacccctggagctgctacatatggacctcttcggacccgtcgcctatctgagcataggaggaagtaagtatggtctagttattggtgatgactcttcccgcttcacttgggtgttctttttgcaggataagtttgaagcccaagggaccctcaagcgccttctcangagagctcanaatgagtttga

SEQ ID NO: 54288 - DNA, 459 bp, Zea mays
  unsure (1)..(459): unsure at all n locations
cttcatccncacatgtgctaagcggcgatgcctcatttctttccatgcaagncttagccattaagcatgcatctagaccgggctcttcttttgcaaaatcaactaaataaagtttgccgtctaatacacccttaaaagctagtgaaccatcacttcttctaaagacagacacatctacatttgtaaataaacaattatatcccatttgacataattgactgacagatagcaaattatatccaagactctccactaagaatacatttgatatagaatgctcattagaaattgcaattttacctagcccttntaccttgccttgattcccatcaccgaatataattgaatcttgggaatccttatttttgacgtaggaggtgaacatcttcttctcccccgtcatatggttggtgcatncgctgtcaataatccagcttgaacccccggatgcataaacct

SEQ ID NO: 54289 - DNA, 459 bp, Zea mays
  unsure (1)..(459): unsure at all n locations
ctggaactgatgcaatgaagatacatattttctattaccaatactgnaaaaaatatcttcacaaaggtgatgaaaaaggaaactgtaagaatggttattgcttagttgtattagcaatcttacaaattatcatactatactacattgacttaacttttgttgagtgacgaagggaggaaatgggtagacacttccagattacatctgtcctacttgatgttctgaanattgttacacctaacaaactctatccatttattacttcaccgtataacatgatatttcatattaatcccatttttaatatcatgaaatggcattgctttgatcttttgcttatcagttggctgttcagttccctagaataaagacaaaagggtgtctactacgtggtgtttatgtggtaggttgtagtacacaagatgaaatggttgactgatcatactaaaatctgatgga

SEQ ID NO: 54290 - DNA, 392 bp, Zea mays
  unsure (1)..(392): unsure at all n locations
catgaaagaaggaagtgttttccccaggctcaaaaatggttgtatgcaaatttctgcatcgaaagaataaactataaatagattatatattacattcaaagttacaatgtattacacatgttacgttccacatgtttctacaatagcgtttaatcctccttcagaactatttccgcaacttcgttcagtagctggtcgacaaccttgtccataatggcttcgaccatctttctaatttcatcgtcccccttcgggtggcggcccggagatgcctcagcaggttctgatggaagagaagatacagctatattactattacanaccacgaacaatgtctggattagaattacagataatacaaccactacttaaactattgccttcggctctga

SEQ ID NO: 54291 - DNA, 235 bp, Zea mays
gatactctttgatagagaaccgaaaccttcgcaccagtctgatcccggacgcaggccaacctttcgtcatcaatgccaccgaagagaagtgctaccggccgaaatcctcaagatataacatattcttttagctctccttttttagcctttggcagctcttgaccaactaagttttgaaagttaaaaacttcatctgtcgaagaggcttcggctatttctttctccttctcgggct

SEQ ID NO: 54292 - DNA, 355 bp, Zea mays
cattatgttctatctacttataattcactggcccgcatacaatgagtaacctaaggaatgactagctttctatttacttatccttgtctacccttttggagtatcatggttagctttatgctattgccttactttaatcaatgaacatgatgtgaatattatgatacgatgatgctatcccaatgatgatattgtgatactctagggggctcgggcctttccctgagacctctccgaaggacctgctcgggagcgacacccgggatacagccaaccatagggtgaaacggtgcccttactaataattaaggaacagaggtgaagtgcttcccgccggctgtcatggggtcagcac

SEQ ID NO: 54293 - DNA, 338 bp, Zea mays
  unsure (1)..(338): unsure at all n locations
ttcttgtcttgactacgatgtcatcgacctacggctccactgtgccatcgattgtgttcccgaacacattggttcatgcattcgcttgtaccgtcgcgcccgcattccttaaaccgaatggcatggtgacatatcagtacatgccgaacggcgtgatgaaagaagtcgcgagctggtcggactctttcatttcggattctggtgatacncctgagtactgcatcgtggataagacagggcttcgcacccagccgtggaattcacgatttggtcgatgcgacgcacaggtgatggaaccttccgacatgctctgttgagaccagtgtagtctacacaca

SEQ ID NO: 54294 - DNA, 77 bp, Zea mays
ttgtatttacgttccagttgcttcacatgccacatttggatgctgttggggaacacattgtttaccaaacagtttca

SEQ ID NO: 54295 - DNA, 364 bp, Zea mays
  unsure (1)..(364): unsure at all n locations
agcaagtgtcaagcacaataagaaatatgtttctcaagangaagaaatcaacatgagctcgaaacaaggtaaagatccacacaatcatgttgtgtgcaccgaccctctctccatgtcattcaagtacaaaaagggaaaaggaaaaacgaggcgtctcaagtgcaagaagttacgccacctcatcgcgcctggccatacaaagacaagaatgaagggacaaggagctgctttggatgcaacaataaggaccacacgatcacttcatgttcggtcatgaagaatcaaagaagtgcatcctgcaaggtgaccctcaccaaggaaaatgacacacagcaagcgtcatgtcacgttgagcgacgctcct

SEQ ID NO: 54296 - DNA, 337 bp, Zea mays
  unsure (1)..(337): unsure at all n locations
acctgcagctgcagcttgccgcgtgtccacacagagttttatcttgttcaaaagaatgaccgcccgtgaacaaaatttgctaaagatggaaccttaaaagaatcatgccacggcctggatctggcttattaatttcatctacagcaagattagactctgntagagaaatcagactggttatgatgcacagttcccaagcttcctctcattgtgatggaactcaggagtaacaagcaaataggcgaaaagcgatggctgccgctaaaaaattgccacttagtcaactcctgctgcagcatgtctgtatttctgtgtactgtcgctatgtgcggggaac

SEQ ID NO: 54297 - DNA, 338 bp, Zea mays
aatggaacactaccccacctaaaatgaatgacgggagaactctcggatcttggggaattgaactccttgaaataccccataacaagggtggtaccgggccttcttctgctgatgctgcttgagcgggctgcgaaaaaatgactgacacacggttgattctaggacaaccttcttctcatcttctcttcactatcttcttttcactgaccctatctttctcttgctcttcccactggaggattctatcacagagtattactatcacacattggaggaaaccaaagattatgaaccatgtacaacagtctccaacccaagaatcaccaagcattgtgatc

SEQ ID NO: 54298 - DNA, 289 bp, Zea mays
  unsure (1)..(289): unsure at all n locations
ccttagtggcatcctgatctgcggattatctgatataagccaatttctcggtggcgcaggtacatggatccgatgcnctgccgagtaccaccaccaacattcctatccggaaggctgcgatgagagtgaccaacgcatctaatcacaccatgctccatgggctgtagcgcactactattacattgaaccactggcgcattatattacgctgcttgatatcatctggccgtttcaagcgatggggtggtaccgtgcacatcaattttctgctgtatgccaatgagctctg

SEQ ID NO: 54299 - DNA, 293 bp, Zea mays
ttcacgccttgggatcggaacccactcgccttcgcgagaaccatctgctcgaaacctcttgtatcaacgggccatagcttaacgaacgcaaagacctaattcaaggcgggaagggcgtttctggcctcgcgctgaaagcaccgctctagcctccctggtatcgggtgtgtccgatgctgcaacggctaagacaaaaccatccgcgccggagccagaccgtcacgttacacgaccccattagccaaccacggcaaagggcggagcatgcagcgatgaccggcagggacggcttc

SEQ ID NO: 54300 - DNA, 77 bp, Zea mays
gttgggatgaagcaactcaatcggttaaccaaacattgacttagttcgacgcttaaaagatgtgaagtttgaaaaga

SEQ ID NO: 54301 - DNA, 391 bp, Zea mays
  unsure (1)..(391): unsure at all n locations
gaagcccggaacatacaagctggccaacgatcaaggcgaggtctacatcaacgcttggaacatccaacagctacgtcgcttctacccttcagatgtttcaagtcgttcatatacctcgttttctctttacatacataaataaagtctaaccgtcaaggaagggtcagccatgcctcggcaaagcctgacccttccttcggggctagaaggggggaaccccctctacgtcaaaattttcctcgaaaaagttttctaccaaaacgactntcgtgctttccgactatatcgataatagaatcctgcaagcgagtaagagcgcacgtaagcggcaaggccgaccgagccgatggactcctacgcctncgggatacggatacctcactcgtcacct

SEQ ID NO: 54302 - DNA, 437 bp, Zea mays
  unsure (1)..(437): unsure at all n locations
agcttctaaagggagagcacaatttatgatttacatatgttcaatttgagaaagacaggatttgtagcgcatgccaagctgggaagcaagttggtgttcatcatccacacaagaacatcatgacgactgacaggccactggagctcctacacatggatttattcggcccgatcgcttacataagcatcggcgggagtaagtactgtctagctattgtggatgatcgttctcgcttctcttgggtattctttttgcaggaaaaatctcaaacccaagagaccttaaagggactcttgagacgggctcaaaatgagttcgccttaaggatcaagaaaataagaagcgacaacgggacggagttcaagaattcacacattgaaggcttccttgangatgagggcatcaagcatgagttctcttctccctacccccacaac

SEQ ID NO: 54303 - DNA, 369 bp, Zea mays
  unsure (1)..(369): unsure at all n locations
caatctgtcatttctctgattcagcattggttccaagtttgtatcatacaaagatgtggctggttccgcgagtctgtttcgccccctggcacagtattggacatgatatttatctaacactgtcatcctgcaagacagtagcttagaggttctgaaaactgaaaataacttgccatatacaaacacctgacagcaacattgatgaactgaagctnnnnnnatatatgtggtttctgaaaactgaagataagttgtcaagtctagagaaagtacttgaatacattacatcacaaacaagtctagagaaagtacttcaatacattacatcatctgaaaactgaagaaagtacttcatacattagatcatca

SEQ ID NO: 54304 - DNA, 366 bp, Zea mays
  unsure (1)..(366): unsure at all n locations
atgatgcttggagcgccatttcctccgctctttacacttctggttcctggatacaatagccttgtccaagtatttatgcaagatagcacgataaggatgttccaagcattagagaccacaccataattgattgaaggatatcctgtcacaatgtcaacacaactgctcagtctaggtgtgagaatcgaagtactgacatgggatcttgccagcgctacattgcttcctcgaaccacaagaggatgtgtagcatataatctatctttgctcttgcattgctgaagctttacanaatgatgcgctgcactgctgtatcaccaaaattggaacagaatccttgataacacaaaataccatggatcgtgt

SEQ ID NO: 54305 - DNA, 324 bp, Zea mays
  unsure (1)..(324): unsure at all n locations
agtgtcgagttcagctctatcaaaatccaccaaggatagctgaccctctaacactctccttaatgctattgaatcatcacttcttctaaagacagtaacacctatatcagtaaatagacagttgtagcccatttgacataattgggatacggaaagcaaattgtaatctaaagaatctacaagaaaaacattccaaatagtatggtcaggtgatatagcacatttacccaatcctttgaccaaaccttgatttcatccccgaatggatagctcggggggatcttggctntctcatagacgagaacatttcttctccatgtcatg

SEQ ID NO: 54306 - DNA, 492 bp, Zea mays
  unsure (1)..(492): unsure at all n locations
tgatactcangctcgcatctcccaaatatgaagagtttgcatagggtcaacacatcttgtttgtatagccactatanggaacaaccttgctatagagactaagccctggcaccatgaaatgcctagagataattacgcccaaagataggctgtcagactgccttaacgctgaattcagactgacagtgcgattgaccaatctttgagctaggattcgagcatgatctagcaataatctgggaatgaatgctatagcaaaggtaaagatggactatagatctataactntgatgcagatgaattatgaggttgtcacataaaacttggagaaattctgctctagccgcgctatgctagttgctctgatgaactgtcgcgatggtacagtaactggatnggatcactagctcagagacctcgccgtcggcgaccccacgcgtggattcctgctaatgccgtgattcacgctatatcaaacacggataacgatca

SEQ ID NO: 54307 - DNA, 341 bp, Zea mays
  unsure (1)..(341): unsure at all n locations
ggaagctctcatcacaccaaaaatgggaataccacatcaagaaccctggagatgcttcatatggacctcttcggacccgccgcctatctaagcataggaggaaggaagtatgggcttgtactagtgatgattttcccgcttcacttgggtattctctttgcaggataaatctgaaacccaagggaccctcaagcgcttcctcaggagagctcataatgagtntgagctcaaggtgaagaagataaggagcgacaacggcgccaaattcaagaaccttcaagtggaggagtatcttgaggaggaanggatcaagcacgagttctccgctctctacacaccac

SEQ ID NO: 54308 - DNA, 266 bp, Zea mays
gaaaaagagagggacagcgcaaaaggaccccaccgccagagacaggccgaaaaaacccccaacccacaagagggcagcccaaccgccaaaagacgccacaggcacccgaaccgacagaacgcaccacacgaaggacgaggcacacacgaagcagcgaagaaagacacgaaaagggcgagccagcgccaaggagcacaagcaacaccccgagaagagcgaaacgcgacaagacccccccacgggccaagcccagaagcgcaaaaaag

SEQ ID NO: 54309 - DNA, 299 bp, Zea mays
acaaaagaagaaaatcaatacctcttccaaaagcctcaaccatgccttcataaatggtaacatccaaggtaataatcaagtcacacttcacactaagagaagtaagaagtgtagtgaatgctttaaaaaggggcactcgattaggtcatgtccctatattcaaaatgacttgattattaacaaggatgataaacatttttttaaatgctcaaagaagggacacttatttagatcttgtccccatttaacacaaaaaggcataggtgtagaaaagaaaatattaactaaccatgtagcaa

SEQ ID NO: 54310 - DNA, 326 bp, Zea mays
  unsure (1)..(326): unsure at all n locations
gctcatgcctaagtctggtaaaagattgttcatcaagtggcttggtaaagatatcggctaattgatctttaatattaatggaagaaatctcgatatcccccttttgttggtgatccctaagaaaatgataccgaatggctatgtgcttagtgcggctatgctcgacgggattgtccgccattttaatcgcactctcattatcacatagcaaagggactttggttaatttgtaaccgtagtcccgcagggtttgcctcatccaaagcaattgcgcgcaacaatgtcctgcggcaatgtactcggcttcngcggtggaaagagcgacc

SEQ ID NO: 54311 - DNA, 378 bp, Zea mays
  unsure (1)..(378): unsure at all n locations
cctgcacttctctgtatttgaggcccactcccgaaaacagaaaaccagagaaaaatacattacaaatatatctctagtgcaaaaaataattgctagaacctgtatcatctatacaaaattcatatgaactccacattaatccatctcaattnctataattctgtaatactatccttcatcagttagcaccactattctgacatgaaagccgcattaaacatcatatcctatttaatcttgtacaaaatacatacaaccttacgaaattcataacttctccgtttaactccgatctgatcgctcaagtccgctagtctcgaccaccccacatcatattattagctcgactacgttgcgcatgtcacttaccatcccgtt

SEQ ID NO: 54312 - DNA, 320 bp, Zea mays
  unsure (1)..(320): unsure at all n locations
tggacactacatgagacgtgacacttcttcttttgcttccgtgtaatagctttgagcatacacatcaccatcggaagtgaattagagaagagacaaagctgttctcaagagagagagaataaaaggctgcaggctgcnaatctcacaattacaactgattcccagaaatatgggtcattctggaaagaagggtaaacaaaggggaaggtaattgatgagactttcactgctttttaagaaaaaggaaccagcctataaagccagccagcagcaaagatgctgcacaaagagagggggacagggaatggaaagcatgactg

SEQ ID NO: 54313 - DNA, 326 bp, Zea mays
catatccttcagcttttgccatgatgtgattgttcctggccgaagagaggagtaccaggtgtgtgcaacatttttgactgccatgaccaaagatttcgccatgaccgctgtgttaccgccataagaagatattggtgctttggaactcatcagaaactgcttcagatctgagtgtccgtcatacatggggagctggggtggcttgtaagacggaggccaaggtgtagcctgcagttctgctgacagaggagaagcatcatcaaaagcaaaattctcatgatggaaatcctcataccagtcatcctcgttgaagaaaccctcttgat

SEQ ID NO: 54314 - DNA, 377 bp, Zea mays
  unsure (1)..(377): unsure at all n locations
cgccaacaagcacatcttgcagatgtctgacgtcagctctcaactcattcatacgctgaccatcttctacccacaccttgttttggtgacgaagctccgtccgaagctgctccacttgggcttctaagtctccgatggggtccgtactgccgctgctgctctcttcatgtcttggagccaactgatgccgaggtacgccaataggtccagtggacttacgcgcagttntcctcgtgcgcggcgacatatctccataagggggacaactttattagtgtacgttttaaacatgatgcatgcataattacgggaatcaaccttcgtgattcccagcctcctatacattgcactctattacctggtctacaaaatgagta

SEQ ID NO: 54315 - DNA, 378 bp, Zea mays
  unsure (1)..(378): unsure at all n locations
agctcggtgaccttgacattggtgtgttgttgctccacaccactttgattaattcgtctggccactttcccctaggctgattgaagattaacttcattattcctgtcattataatgtcattagctctttcgacaagtccatttgactctgaatgcctaacagatgcaaaatggatcttcgtgccaatttgcgcacaaaactctttaaaagcttcagcatcaaactgtgttccgttgtccacagtaatagccttcggcactccgaagcgacaaacaatattntgccagaaaatttttttgaactgtgaccaaagttattgtagcttaaggcttcgcctcaatccacttagaanaatactctacttgcaccacgacatat

SEQ ID NO: 54316 - DNA, 305 bp, Zea mays
ataggtgcagtcataatgatgaccaacgaacccaattccacaggccacaacacagctcacaattttcacggcagcagcataggtccttcgcgccattatctccaatgggcacatgcagtaagggcttccgatgaacatatcgggaccacccccagaaaatctattgttattttcgggtgaagaccatgccacactacaagaacgtgcctattactattcagaagcaaaacaaattgccgaacacaagcccgaccaaccaactgaaggaagtctacatactgcttcatgctactctcctacatacc

SEQ ID NO: 54317 - DNA, 340 bp, Zea mays
ttagtagcacacgcactattttcttatttagcaaccctttatatgcgaaagacaagcgtgttgctaaaaacagaaaaacctcataatatggactaaatttctcttgagccctcatgcacaatatattttgaatgacatgaataatatgcatggttgttcaatgaagtctaaagggctgacttaatccatattatggtgagtgtctaataaagaagaatcaaatccaaattaactagatagagaatacgtcacataattttggattggtcaccatatgataatattcattcatcttccacatagacctttatttcataatcaacaactgatgtatatcctc

SEQ ID NO: 54318 - DNA, 322 bp, Zea mays
  unsure (1)..(322): unsure at all n locations
ggtggaggaccaaatcatcgaagcttataagtttctggatgagaagtggtcacncaagttccgttgatgaagcactagaagagcaatcaaggaacggacccatggataagttcgcaagaagaagggatgcgtgttggcatacgtgcttcttcaataagctagcttccaagcgaaacctagaagcctgaagatgatctctgagtaaccagaatcagtgtttgcaatcagcaaccagatgctcctcatacgccggatgttggtgaagctccatctcctctaagaggtgcaaagcgaaatatatagctgaagtaagctatcccat

SEQ ID NO: 54319 - DNA, 359 bp, Zea mays
  unsure (1)..(359): unsure at all n locations
actttaaggaagccatttagattacattgttcttttgaaaagaaggatttgtagcgcatgccaagcagggaagcaagttggagtccatcatccacacaagaacattctgacgaccgacaggccgcttgaactacttcacatggatctattcggcccgattgcttacataagcatcggcgggagtaagtattggcttggaatagtggatgattattctcgcttcacttgggtattctntttacaggaaaaatctcaaacccaagagactntaaagggattcttgagacgggctcaaaatgagttcggcttaaggatcaagaaaataagaagcgacaacgggacggagttcaagaactctc

SEQ ID NO: 54320 - DNA, 443 bp, Zea mays
  unsure (1)..(443): unsure at all n locations
tcatccccacatgtgctaagcggcgatgcctctttcattccatgctaancntaactattaagcatgcatctagaacggcctcttcctttgcaaaatcaactaaataaagtttcgccgtctaatacacccttaaaagctaatgaaccatcgcttcttctatagacagacacatctatatttgtaaatagacaattatatcccatatgacataattgactcacagatagcagattgtatccaagactctctactaaaaatacattagagatagaatgctcattagaaatcgcaattttacctagaccttttaccttgccttgattcccatcaccgaatacaattgaatcttgggaatctctattcttgacgtangaggcgaacatcttcttctcctccgtcatatgggttgtgcatccgctgtcgataatnncagttgaaccccc

SEQ ID NO: 54321 - DNA, 407 bp, Zea mays
  unsure (1)..(407): unsure at all n locations
agctngncaagcatattatggtacccatcgttgatgggtccatcatggntagtcaacacaaatctaagaacccaagagtcctttgcgttagcacttgtgaaactcattacccttctatcggcatatgtagcataggcgatcctcaagtctagaagatttctttcttgctacatggatagtgaatattttcttctctaacattatgtctctttgtttcaaatgaggacaagaattaataaagtgtcccttctttgaacatttaaaacaaacgttatcatccttgttaatagtcaacgcctttttaatatagggacatgatctaatcaagtgcccctcttcatagcattcactacacttcttattttatttcgatgaagngtaactcgaatactaccttggatgtacct

SEQ ID NO: 54322 - DNA, 276 bp, Zea mays
  unsure (1)..(276): unsure at all n locations
actcaccatccacaccagaacataccgacgactgacaggccactggagctcctacacatggatctattcggcccgatcgcttacataatcaccggcgggagtaatgactgcctagttattgcggatgattattcccgcttcactngggtattctctttaccggaaatatctcacacccaagagaccttatcacgattcttgagaccggctctcaatgagttcggctcaaggatcaagacgacatgaagcgacaatgggacggagttcaagaactct

SEQ ID NO: 54323 - DNA, 309 bp, Zea mays
ggtacataaatgctatgaatgaatgcttatgtatgcgaatgccatgatggaatgcaatgtgcaaatgaatgtccgaagcgtatgtccgaaaccacacctattcatcattttcttaggagcaaaacacacgtcagctctgctttcccttaggaacgactttggagcatctttgccttttacttatgcagtatcagcgttgacttttcgctgtaagctctgcatgcccctagggacgactttggagcttgttcgccttttacttagacgggataagctctgcattcccttgagaacgagtttggagcttct

SEQ ID NO: 54324 - DNA, 304 bp, Zea mays
  unsure (1)..(304): unsure at all n locations
agagatctcaacctactccgaangtcttgcatctcagagcacaggcgcctacattgcccaatgagattgtcaatgaggccatgacaatgggctatcgccaggacctactgcccagtacttcgccagaaaacctccacagactctggagaagctgcttcaaaagatggatgaatatatcagggctgacaatgacttccgccaaagaagggaggaagcttacaggttctccgagatgactatgggcttccgaggaagaatacacctgaggcatgtcangtaaattcacaacactcataatgatgat

SEQ ID NO: 54325 - DNA, 400 bp, Zea mays
  unsure (1)..(400): unsure at all n locations
tgcaagaaacaagggtcttatgctataagcaaaagtttatattaatttctgatcatgcttaggttccagctgcaaattagagaaagcgcatggaacttatctaatgcttgcttattataattaatactaaataattcatatgggacttgttttangcgtcaatgtgcaatatagaanagcactatcacgagtaccaaaatagtgcatgcataaaaaaataacaatatgatacatgttccagtagcaccatatgctgtcaaatatggggtgagtaactataccactcatgccaacaacttcaggtgtgcgtacccagtgccaaaagcttccacagaagaaagggtatggagaagagaactttctacatcttacccttgcttatttttaaggatctcaaaca

SEQ ID NO: 54326 - DNA, 217 bp, Zea mays
cgaccccaaaaagcgacagattttttaaggccagaccgacgggcgggtgggcaccgaccgcacaccccgcggacaaaaccgccacaccccaaaggaaacaggaaaggcaacaacgcaatccaaaagaagacccgccagccgccaccggaaacagcggaggagccacccaccacacgcgagacccaccaggccccgagccgtgaaaggacccaccacc

SEQ ID NO: 54327 - DNA, 116 bp, Zea mays
  unsure (1)..(116): unsure at all n locations
cgctntagactatcatccacattcaacgggggcatggaacgcgccaacgggaaaatcttcacagccgtcaagaaaatgctccttaatgtaaaagaaggcagatggaccgatttgct

SEQ ID NO: 54328 - DNA, 327 bp, Zea mays
  unsure (1)..(327): unsure at all n locations
cattctgagaaagacgggtttgtagcgcatgccaagcaagaaagcaagttggtgttcattatccacacaagaacatcataacgatcgacaggcttgttgagctacttcacatggacctattcggcccgatagcttacataagcatcggcgggagtaagtattggcttgtgattggggatgattattctcgcttcacttgggtgttctttctgtaagataaatcttaaacacaaaagactttnaggggatcttgagacggggctcaaatgagttcggcttaaggataaaaaagattagaagcgaccacgcgatagagttcaataactc

SEQ ID NO: 54329 - DNA, 379 bp, Zea mays
  unsure (1)..(379): unsure at all n locations
tctgaacaagtgctgcacttaccgcttagtgctaagcttgcacatataataaccaaggagcccctggcgtaggtggaggtaagtgtggtagatctatcaaatactggttcagctcttcaaaggccttctgctggattgggccccattgaaagacttcgctgactcacacttcgagaatggtaagttctctctgctgatcctgatataaatctattgagagatngccaaccttctgttaatctttgagcccccttttttgtacttggtggctccattcgaagtatagcttcgactttacttgggttggccttaattcccttntgtgaaactaggcaaccaagaaatctccccttctttactcccaagacacatctttctg

SEQ ID NO: 54330 - DNA, 299 bp, Zea mays
  unsure (1)..(299): unsure at all n locations
gacacctctacatttggtaacaaacaggtataccccatattgcataattgacttacagatagcaaattatatccaaagagactctacttaaaacacattagagattgagtgcttattngagggtgcaattttacctaacccttttaccttgccttgattcccatcaccgaatattattgaatcttgcgaatctttgtttttgacgtaggaggtgaacatcttcttctccccgtatatggttgtgcatcgctgcaataatccagcttgaacccccggatgcataacctgcaaggaaattt

SEQ ID NO: 54331 - DNA, 322 bp, Zea mays
ttcaaaccttcgacttgcgagtatcccttggccacaagtcgagaattgttccttgtaccacaccatgctcatcttgcttattgggggaagacccaatatgggttcctacaacactttgattacgacgtcgaactaaatgccatacctcggctctagtgaacatgttgagctcctcttgcattgccatcacccaatccgaatcttggagtgctgtctctaccctgtgtggctcaatacaggaaacacaagagtaatgctcacaaaaatgcgccatacgagatctagtggttacccccttatgaatgtcgccgacgacggcgcc

SEQ ID NO: 54332 - DNA, 252 bp, Zea mays
  unsure (1)..(252): unsure at all n locations
aacatatgtcgtgtggttagagatcctcaactgagtaaattgattccgatcgccgttatatcctcggacagtggagacttgatctctgacctacaacntaggtcaggatgtaaacattatgaataanaatgatgctgtattgatgagataatgaaattagactacatgcaactagagtctattaatattttatttggcgttacatattgaaagagggactcactttagtacgctatctctgcaaaagtatct

SEQ ID NO: 54333 - DNA, 330 bp, Zea mays
  unsure (1)..(330): unsure at all n locations
gccaaaaattcctgcactaagtccctagtgtcaatatgctctgcgataatcctgaattcagccagcgcagtttgggttggaccttctggtgtcatattgcattggggtctggtctctccgaagatcaattctagcggactctggaccagcttctccttgtcatcgtcaattttgacgtagaaccattctgatttacagcctgccggccacttgcttcggtagctgatcacaggaaattntgtagtctttcggtaagcaaaattgtaacaaccaaaattttcatgtaatccattctttctggccttggtttggtaatgtagctcgtgcact

SEQ ID NO: 54334 - DNA, 475 bp, Zea mays
  unsure (1)..(475): unsure at all n locations
agcttgtgaagattcttcatcctaacatgggttagtcggcgatgccagagccaacccatattagtcttagtaattaagcaagtatcgagttcagctttgttaaaatcaactaagtatagctgaccctctaatactcccttaaatgctaccgagtcatcacttcttctaaagacaacaacacctatatttgtaaatagatagttatagcccattttgcataattgagatacagaaagcaagttataatctaaagaatctacaagaaaaacattggaaatagaatggtcgggtgatatagcaattttaccaagtcntttaaccaaaccttgattcccatccncgaatgtaatagctctntggggatcttccgtnntctcgtaggaggagaacatcctnttctccctgtcatgtggcttgtgcatccgctatcaataccaactggtgccacagatgcataaactgcaaacagtttagg

SEQ ID NO: 54335 - DNA, 148 bp, Zea mays
  unsure (1)..(148): unsure at all n locations
gcttaagctctttgacaaaaaagtattttatctagttntaccagagatgcactaaagcaggaatgaatcttgggaaattaaactatgtatgaagcaggggatatacatggacatgcttctctcctttatacaattgtagaagtttaaa

SEQ ID NO: 54336 - DNA, 354 bp, Zea mays
ctaaaaccaaaccctatgggtttatatgcaaaattattccacttttggactaaagtgcaaaaaccaagccaaataagtgtcttaagtcctttggttcacaaatatgtgaatttacaagccaaaccctaagttttggacttatatgcaaaatggacctcatttgagctctataccaagtctgatatttagtgttaaaggctccactttggggctttgtaactttcaaattataggggttttgccctaagtcaccacatcaagtgtgtagctcaatcatatgagaacaactgtgtttaacgaagtgagccacagtgctaagagaatatgggagataattaagcctgaagaatggct

SEQ ID NO: 54337 - DNA, 368 bp, Zea mays
  unsure (1)..(368): unsure at all n locations
agcttatgaagattcttcatcccaacgtgggctagtcggcgatgccagagccaacccatgttagtcttagcaattaagcaagtgtcgagtcaactctattaaaatcaactaagtatagctgaccctctaacactcccttaaatgctactgaatcatcacttcttctaaagatagtaacacctacatccataaaaatacaattgtagcctatttttcataattgagaaacggaaagcaaattataatctaaggaatctacaagaaaaacattggaaatagaatggtcaggtgaatatagcaatttaccaagtcctttgaccaaaccttgatttccatcnccgaatgtgatagctctttggagaatcatg

SEQ ID NO: 54338 - DNA, 376 bp, Zea mays
  unsure (1)..(376): unsure at all n locations
gcttgaagctgggttaagtgccatgacgaatgatgatctcgcagacagcctcgcgtaccatagcctgaaggtacgggaattaaacacttgagaaaaaccccctattctttttttttacgccacgcattcctttnttcttatatgaattctttttgcatatagggcctggtcctaagcaacgcgttaagagcgcaaaagagcgccgaagatgaaagttgtgaaatggcgtttaataatttacgctccgaagttatcaaactgagaaacgaagctttggaaaaagataaaattctacttacactggtagataaagtgaaaaaagacgaagctgcttcaaggcccaggccgaagctcaaaagcgcgagattaaagatct

SEQ ID NO: 54339 - DNA, 295 bp, Zea mays
cgcatgccgagccggatagcaagttgggactcatcatccacacaagaacattatgacaagtgacaggccactggagctcctacacatggacttattcggcccgatcgcttacataagcatcggcgggagtaagtactgtctagttattgcggatgattattctcgcttcaccgggtgttctttttgtatgacaaatctcatacccaagagatcttaaagggattcttgagacgggctcacaatgagttcggcttaaggatcaagaaaattagaagcgacaatgggacggagttca

SEQ ID NO: 54340 - DNA, 371 bp, Zea mays
  unsure (1)..(371): unsure at all n locations
tcacaaataattagtttagcaggtctaactggtgatggttctgtactgtgctctcctaccagtagaagtcctaagttgccaataaattgttaccatgggacaactacgccaactcaggaaaggaaaagctcggatttgcttcttggcttgtgattgaaaatccattttcttttaagctagaaaatggctctgccgaatccccaaagtccaatatgcttgttgactcatcagctagcaataatcatggcaatggaaacaattcatctttagatgaagagaatgaagaccttntagcggatttcattgatgaagatagtcagttgcctagtaggacaccaaaagcgaaatggtaaaggaattcttacattgaa

SEQ ID NO: 54341 - DNA, 403 bp, Zea mays
  unsure (1)..(403): unsure at all n locations
ttccacttctcaactacttacaagagctctagcattcaattctttacacaccaaagagatcaaatcctctccaaattccacacaacgccctagtgattagagagagagatttgcttgtgttctttcgagctcttgcgcttggatcgctttcttctttcttgattctttcttgtgatcaaacactcacttgtaattgaggcaagagacaccaatcgtgtggtggtccttgcgggaagtttgtttcccaagtgatttgagaaggagaagctcactcggtccgagggaccgtttgagagagggaagggttgaaagagacccggcctttgtggcctcctcaacggngagtaggtttgagagaaccgaacctcggtaaaacaaatccgcgtgtctcacttcattattc

SEQ ID NO: 54342 - DNA, 412 bp, Zea mays
  unsure (1)..(412): unsure at all n locations
tgtgaccgccagatcttgatccgacggccgcgcaagcttcgccttcacccaacccaagccaccccaatcagtcactgcacacggcggcggatcaccggagctcacaatctggccaacccgagcgcctaaacacaaattcgcctggctctcgcgagattcgcgacctcctgaacccatttcgcctcacaatttcccttgtcccacagcgcagatccacgacccacggtgcagtttaacacacggcggagcaaatcgttccgacgagcaattacaaggattagacgttttcaagcgcggcgcggtgtgggctcctatctaccaaggaatgatccgcaatccagagaggggaaagttaccgtcgaggagggccgangggatcactggtgcgaccgtggtcgactccgcggcaatg

SEQ ID NO: 54343 - DNA, 419 bp, Zea mays
  unsure (1)..(419): unsure at all n locations
tgatgagtggtaaatcatgttgatatctgttctgctttgtgcactgcaacgaaggatcaattttgattagctagctgtaaacctttgaataatttaagcacaaatgtattttttaaatgactatgaacatatgagataattggtgagggacatcgatgaacaagagcaagagctgctctccagacaaaataaacaaaaagaaaaattgcgagggttgggatgaaacctcggcacttaaacttcctggcacacataatcaaagtcaccatagtcttgtaccaacaaaggatattggataaagtaaacaatggtaggccttcagtgttggtgatgtagatgatgacagtgatgacaaatgacaataggaagaacaatatgttactaanaataccgaatacaccaacatcgctaactccaac

SEQ ID NO: 54344 - DNA, 404 bp, Zea mays
  unsure (1)..(404): unsure at all n locations
tatgaagattcttcatcccaacatgggctagtcggcggtgccagagccaacccatattagtcttagcaanttaagcatgtgtcgagttcagctctatcaaaatctactagtatagctgaccctctaacacacccttaaatgctattgaatcatcacttctcctaaagacagtaacacctacatcagtaaacagacagttgtagcccatttgacataattgggaaacagaaagcaagttgtaatctaaagaatcaacaagaaaaacattggaaatggaatggtcaggggatatagcaattttacccaaacctttgaccaatccttgatttccatccccgaatgtgatcgctctttggggatcttggtttttctcatatgaggagaacatccttttctcccctgca

SEQ ID NO: 54345 - DNA, 398 bp, Zea mays
  unsure (1)..(398): unsure at all n locations
tttaatgtgcacttcagacttttagccattttgtatttattaatgtgttacatgtcgtattgcaatgcattagcatatgcctttactttgcgctggtattatatgtgtcatcttgctctaccctgtaacattactgcatcttttgttatcttatatctactttgtaatgcatggtgtattcatcctttcattgtctcatttcaccatcaagaggcacccaaagtttgtttgcatgatttatttttaacattggtctaaatatgtattttgttaggtgatatttcattntacatgctgatgtttccgctatttcctatagtctttgcacactgtgctatccttattccttgtaccaaaatatttgaagcaatgattaggtgcagaatgcagatagttat

SEQ ID NO: 54346 - DNA, 352 bp, Zea mays
tggattgcttgaatggtggtggttggaggtatttatattctcaatcactattctagtcgttgtctcaattctctgtcgatgggcacaccggacagtccgggatgcaccggacactccactgttcactgttcggtgagtgtcacgtcagccgaccgttggagtttggagctgttgaccgttgaagtcgtctatctttttggtgcaccggacagtccggtggcacaccagacagtttgtgcgaactggcatcgcagactgtctctgaccttgtcggcgtttcgagaccggagggtccctgggccgacgagtgaaatgtctccgcatgccccagcccagatgggtcatcgcgaga

SEQ ID NO: 54347 - DNA, 400 bp, Zea mays
  unsure (1)..(400): unsure at all n locations
tcggcatgacgaaagaaaagaggaaccgactttatgattaaaagtcaagttgaacctcgaaggattgccataaaattattatcaaatgtaaagggcatcaatgtaattttacacgggctgcgtcccgtgcctataaatagatgaacagtactcccgtactgttcacgctgacctggcatatgttttcgcgcatcacgattgtacctttactttccatcaatctgaaggtacatttctaatttgtttttatgatattggtaataaaaataagttgataattatacctgcatcattactcatattntgtgtatatgtgctctcttttaccattattaatcttacgaaggtttttctctttataaccttcgtccaagatccattatatccgaagggacataat

SEQ ID NO: 54348 - DNA, 294 bp, Zea mays
gagcctcccccctgagggtgtgcatacaaggtttgaatacttgtgggagacatgcactttgatcttaagatcatgaggggcacattatctataattcgagctttggcacatataagacagaatgacaccacttggagaatataaattcggaactttaaataagcaatgtgtcgagctctaactaagcattttaaaccatgtaagtttgctcaggaatatgagttggagacgggcattcctaccatatgaacggtctactatgcgtgccactctaatcaaatagcaataccacat

SEQ ID NO: 54349 - DNA, 411 bp, Zea mays
  unsure (1)..(411): unsure at all n locations
ttaaaataagggttatagagtgacaaataaaatattaatttatgtgaaatgaataatggtgtgtataggcacctcacactactacaatgatctttttatgacggctccaatttataatagatgtggatgacataaaaactacatatgacttgggtggtgagcattgtagttgttcatgtcgccgttgaggtcatcactaagacccaaaaaatatcgcaattaatggagcaaggttttgccctttgaatcttaaaaggaatcatgtttaagaagtaagctatgtcatccacgatcttttcaaagattagttcttgacttcttgcaaattatgaggtttagcgatagccaaagaatatagacaatctcccctagntaaaatagacactctaccccacttataatagacaatct

SEQ ID NO: 54350 - DNA, 294 bp, Zea mays
  unsure (1)..(294): unsure at all n locations
tttgaattcaagcgcacggagaacttccaacaagcacttcagaaactccaacttactcggcatctactgaacatcacttctatatctactgaacatcacnttctatggctgatctttccttctctacctataccaactgaagtttccagctttccagcaaggtattgggatagttcactcagattttgagatggtttttgggcaagtgtttaaagacggaacctggcccagtgtgacttcaggtaaagtatggctgccttgtangacaggagtttacttaactgcatgcattca

SEQ ID NO: 54351 - DNA, 414 bp, Zea mays
  unsure (1)..(414): unsure at all n locations
tcggcacaatgacggatctcacgacgaaggggcgaaccgacttaaagatgaaatgacttaaaaacccatgatgttctatgtcattattgtagttaattgtaaaagggcattatatgcaattatacacaaggctacanccctgtgcctataaataaggtgaaacaagtacccatgtacttgttcaacgcaatctttgtaatcgatgtcgcattacactaaaattatcgctttccgccaaggcgaagatatgaacataataaaatatgtgaataatgttatctgtttttaacatatctatttctaatgttntacaatttatacttcatttttacattattttataagtttgatcatgaaggtatgaccttcgtgatattctgatcatggccttcgtccgaagttcattaaaccctt

SEQ ID NO: 54352 - DNA, 422 bp, Zea mays
  unsure (1)..(422): unsure at all n locations
gcttccttgtacacttgtagtgtcaaaaaaattgttgctggtgtctagttgcgcaaaccctatcaaggccctgtttctttccataaatccttgcccctgaaacttcatacattcctgttgatcatccagctgatcttgttgcctacctctcctttcgcatggatctggtgatctctttccttgtgaatcatgttgtggctttatcatccgaatctctggatcccttaatgattctgcctcgttatctgggtatctgctataacccgttctcaagtatcagatgttgatctgcctaaatctctcacttctgatcattctcataccccttctttgaggatcatgacacttgttttatcaacttatctctaagcggcatatccatgtggattaatggantgttgtgttatctttgaatctctcct

SEQ ID NO: 54353 - DNA, 415 bp, Zea mays
  unsure (1)..(415): unsure at all n locations
tcaaaactaaaagctcagtaaatttttgcgcgcaagagtcttttttgagtaagcgggggcagatagcaagtgtgcgtaccaaaatgagtttggggtatgatcnattatacgcccagtgcgttgaaagtcgaaagacccgcttgtcagtgaatgttgctattctagcaaagggaaggtgtttttcggaccttcggcttaaggccttcgtccatatcgcaatctaaatttgtcgctaacaaattaatattgcgaggggctactgttgggggccttcgtcctccgaaggtcctcaaaaacatgatttgacaatattttccaagtgaaatgtatgaacaggtatcttcggacttagattatgaacatgaagtacgatcaggacgaagcttaagctagacgaaggangattgagatggat

SEQ ID NO: 54354 - DNA, 419 bp, Zea mays
  unsure (1)..(419): unsure at all n locations
tgatggcttgccttgctcttcgttatgatgaagctcgttgtggtcgtgagatcaccggaggtgggcaccaatgttnggataccttgatttcagtcccctaagacattggaatcaaggcaacatgagagatagggatcttcgtcctaagtataacacttctttagagtgttcatgcgaaggacgaaggtcttcagatgaaaatgtaaatatatcatggataaacaaaaattggcaaaagaaacataaaccaatctttcgtagcaaccttcttccaaaaaataaagatcaaaacctcccccttgtattttgtgaaatctggtccaatggttaaactctatatccaaaatgtggccaaaattgaggaanaatgaacaaaaattggcaagagaaacataaaccggactttcctagctatactc

SEQ ID NO: 54355 - DNA, 424 bp, Zea mays
  unsure (1)..(424): unsure at all n locations
ttggcgacacagcaagccctgtctctgagctagagacgtttcttgaccccaccgctttactagcatctctgcccttctaggagatcgacatttgacaaggtcacgactttgattcggtcataaaaaacttagcaatatgtttgtttcttttattcatacaattttattctttgaacttgtatcatatattgatatgaaacttgaattctatacagtactagctatttataatctcgcttgattttgtcacatggtctttctggcctcccatgaattcttggtctgcgtccgccactgcctaaactagacaagtaagtttgtccttgtcaacatgcgcgtctgtaaagaatacctacctcggcaggaattgtgagtttttccttctgcaggaatngatcaacagatctatttgatttgcaatgcc

SEQ ID NO: 54356 - DNA, 371 bp, Zea mays
  unsure (1)..(371): unsure at all n locations
tcngctatgggtaaatttttcagcagcacaacagtgtattggcaatgaatgttgcggtaacttcacatctacccgtctgtttatatagtgctgcaggtgtgaagtgaatcgtcaagtcgcccgtacccgctcaacagtcacatgcactcactgaacggtggaccatggtgcgtgcaagatgaatcgacagatcgtgcatacccattgcatggtgggactgcccccgctcggattattttaatagtttctcggcaacgagctcaaggaaggtgtttttcggaccttcggcattccgaagcctatgacaatatttcaaggatcaagctcgttacgaaaaacgatctatcaccgcgaaggggctactgttgggg

SEQ ID NO: 54357 - DNA, 412 bp, Zea mays
  unsure (1)..(412): unsure at all n locations
tctaaagggagagcacattntgggactaacaaatgtttattttgagaaagacaggatttgtagcgcatgtcaagcagggaagcaagttggtgttcatcatcacacaagaacatcatgacgactgacaggccactcgagttactccacatggacctattcggcccgatcgcttacataagcatcggcgggagtaagtactgtctagttattgtggatgattattctcgcttcacttgggtgttctttttgcaggaaaaatcacaaacccaagagaccttaaagggattcttgagacaagctcaaaatgagttcggcttaaggataaaaaagattagaagcgacaacgggacggagttcaagaactcacaaatagaaggctttcttgaggatgagggcatcaagcatgagttct

SEQ ID NO: 54358 - DNA, 396 bp, Zea mays
gggcggcagtaccagtttcttcagccgatattttttctgttatttctgtttcttcggcttccaaggatttcaccttggtgggctctaaaggcccactttagtctcagattgatgttgccttgaagcttcggcaacaaaggcttctgtatgcacttcggaagattcaacaattttcttcggagttgtgcttgaagactttattgtctccaaaacatccaacacattaaccatcctttttcttttgggggtcactgctggacccttttggcttgttgctgcctcaacttttgttgaaggacttagaacttccgatgtttttagatcttcaaccctcggttcttctattttctctgtcgccggtactttggccggcccttcaatagtcggcaggggagt

SEQ ID NO: 54359 - DNA, 398 bp, Zea mays
attgcatctaggttttgtcttacctagctgagataaccgccaacaaagcgagtgaaaaagcttaactcgggtcaacctgacaagtcttagttttaagcttttagcacttaaattcttactttctatgcaattattgattcttgaaatatgcatgaggtactgcacttatggggagtattcaaaactcaaatcactcatgaaaaccccgagtgcaaaccaaaatgcaaatttcaccatttgcctattttctctaaaaattatctagcctatggcaaaatattttgaaaagtatatgagggtgccaatacctgccccaacaagtgttattttgagtgattataagttgggatttggtttggttaggagttagatagaaaaattcaaaattttccaaactc

SEQ ID NO: 54360 - DNA, 423 bp, Zea mays
taagcttaagtttcctcaaaatcccttcccatatttctctggtcttcacacaggagactaggatgtgatgtatggtttcctccgcctggtcacaaaatgggcatgctgcttgatgtggtaaaccctcgcctaaccagccggcctgaagtccaacacctattggtgatggccagccaaacaaagaatttacagttagctggagcccaactcttccagacttttctccaggggcaaactgaatggtccctatgaacatcgcttggtaggctgatttgcaggaatatgttccattagatgataatttccaaacatgtcggtcagggacttctggctgcaacactacaccatcaaccaagtcccagattgagagacaggcttcacaacaaacaaggtgacccaatatgcttccaaatataagggata

SEQ ID NO: 54361 - DNA, 411 bp, Zea mays
  unsure (1)..(411): unsure at all n locations
tctgctcgcacagagtgcattgcgaagttcataaatattgatggatcagatcctttaggctggttaccttgtcttctgaatatcttttcaccttatcaacatcaggcctacaacacgaatacacgattaaacattcatgtgtattaactatactcagcatgatgatgattatgcaaccagctacataccctgtgtttagaatgagtgtatctcatatacggtttacaacaatagatacttgtgccttggagtatggaatttttaaaatctgcttcatgatatcaggtggggcaatcacatctatttcatcaccatattctgccaaacctgacacagctaatgtttcacacttncttgataagttctggttgatatgaccactgtcataagagtatgaacagagtcataaag

SEQ ID NO: 54362 - DNA, 431 bp, Zea mays
ctaagcttggaggcatcaattaggagcctatttgttggtgtaggctcttccttcttttcttctcttgccttgaatgcaacgagttgcacctcgggtgtggaggtggtgccttgaccaagttgacaatgtgtttggagtctttgatcataagttcaaagctcacaaacttgccaatcacctccttgggagacatttgcttatacctaggatctccacgaattaattacacttgagtgggttatgaaaaacaagagatcttagaataaccttgaccatttcatggtcatcccacttggtgctcctgaggttgagaacttggttgaccatcgtcttgagccggttgtacattgcttgtggctcttcacatttgttgaggatgaaccgatcgagttctccctcaatcgtttctcgcttggtgacctttgtcactt

SEQ ID NO: 54363 - DNA, 403 bp, Zea mays
gcttttcattgagatcttgttattctcgttcgaactgctcttactttctgataagcttcaagtttagttctgatatttttgcttcagctacgccattaagccttcggtgactggagctcatagatctttttctcaaaagcatctgattgctcctttattttgttttccaaatttccgattataatatcatgctttttatcttcaagatcttgctgcatttgcaaggctttgctcaacaacatactctacacaaacacaactttcgtcagacatgtttttattagaagcaataaaggttaagaaacaagtcattcaccttgaagttggaataaaataaactaccaacgacatgttgtcgtctgtagcggctgatgtctgactccaacttcggaaaaccgatact

SEQ ID NO: 54364 - DNA, 425 bp, Zea mays
tgtcaacaacataagcataaaagagagaaggctgcttttgcttataacctaagcctatgctcctatgtgaagatatagcatgatcaaagggtactgctgggatctagtatctgatgagcaagaaaaaacccatataaggtttttattcaacaacaaagatgtctttgctgggacagccaatgatctttgtggtgtcaacagagatgtcatcgaacattcacttaatgtggatccatccttcaggccaaggaagcaaagacttcgaaagatgtctgatgataaagctaaaggtgctcggaacgaagtaaagaaactctcaatgctagtgttatcagagaagtaacatatccagaatggttagctaacactgttatggtgaagaaggctaatggcaaatggagaatgtgtattgatttcacagatct

SEQ ID NO: 54365 - DNA, 414 bp, Zea mays
gcttctgacttctgggcccgcctggctgtccggtgtacaccttactataattgtagattgtccggtgcaccgtctcccgcgtgcctgacttctgcgcgcttctggcgccattaaatgcgcctgcaagtgaccgttggcgccaagtagccgttgctccgctggctcaccggacagtccggtgtacaccgtacatgtccggtgaattatagcggagtgaattcccgaagctggcgagttccaaaggcgctcttccttggagcaccggacactgtccggtggcacaccggatagtccggtgaattatagcggagcgactctggtttttcccgaaggtgaaaaagttggcctgaagtcccctggtgcaccggacactgtcaggtggtgcaccggacattgtccggtggcacacccgac

SEQ ID NO: 54366 - DNA, 319 bp, Zea mays
tggcacaccggactgtccggttgtgctcctgacagcgtccgttgcgctaggctggttcgtggtgaactccccggtctagggattgactgggcgtatggctataattcaccggactatccggtggcgcaccggactatccggtgagccaacggtcgccagcgccaacggtcggccatgcaatcttcgcacgacacgtggactgctccaacggtcagctggtgcaccggacagtgtccggtgcgccaatcagcccaaaggagcaacggtcggatatgccaaatttggaaggagatcgcgcaccggacagtctacaggacct

SEQ ID NO: 54367 - DNA, 425 bp, Zea mays
ctaagcttctccaggtctgtggtggcttccttgcaaaatattgtgatgtgggtcctggtcgaagccccttgatcatggcctcgatgacaatctcatcgggcattgaggcgcctgagctctcagtcgcaaaaaccttcggacgtacacctgcaggtactcctcacggtcctgcgtgcactggaagagggcttgggcagtgactggcttctgctagaagccctggaagctggtgactagcatatcctttaaattctgccacggcgtaattgtccccagccaaagagaagaataccatgtccgagccacacttctgactaccatgacgaaggacttcgccatgacagcagtattgcccccatacgaggatatggtagcctcgtagctcatcaggaaccgcttcagatctgagtgcccatcatacatgg

SEQ ID NO: 54368 - DNA, 429 bp, Zea mays
tcaagcttgcgttttaggtacccaactcttgttgggtcctatcattgttagtcacaccagactttggaacccagatgcaagttttgtctctcttgcacttaggtcccaacttctagcaactactttatcattcttgcatataaggacaaacgaagcatcacatgtttgataaagcatagtttgtctagctgatgctctcctaagcgcatgaaaagcaacatgatggcgtataggcctatttctaccatgagcatatgaagagctagatgcaaacatggcatgagaactaaatgcagcatcatgacatacacgagaaacaacatgattatgacacatatcatgatgagcaataccagtaactttcttctcataaagataggcatggatcttttgagagctactagccatgggagctcttcctttctcttt

SEQ ID NO: 54369 - DNA, 428 bp, Zea mays
tcaagcttctaaagggagagcacattttaggactaacaaatgtttattttgtgaaagacaaggtttgttgtgcatgccaagcaggaaaccaagttggtgctcatcatcacacaagaacatcatgacgactggcaggccgctcgagctactccacatggatctattcggctcgatcgcttacataagcatcggcaggagtaagtattgtctagttattgtggatgattattctcgcttcacttgggtattctttttgcaggaaaaatcacaaacccaagagaccttataggggttcttaagacgagctcaaaacgagttcggattaaggataaaaaagataagaagcgataatgggatggagttcaagaattcacaaaatgaaggctttcttgatgatgagggcatcaagcatgagttcttttctccct

SEQ ID NO: 54370 - DNA, 417 bp, Zea mays
tctccagggtttgtgggggcttcctggcaaaatattgttctgtaggtcctagccaaagccccttgatcatggcctcaatgacaattacattgggcactgtagcgcttgagctctcagacgtaggaacctttttacatacgcgtgaagatactcctcatgatcttgggtgcattgaaacaaagcctaagcagtgactggcttcgtcagaaagccttggaagctagtgattagcatatccttgagcttctgccatgatgtgattgtccctggccagagagatgagtaccatgtttgtgctacgcttttgactgccatgacaaaagatttcgctatgactgcaagttgtacacccctggtgttactggtactaaaacttgagcatgacatcatcagcattagcatttcatatgtttgata

SEQ ID NO: 54371 - DNA, 363 bp, Zea mays
aagcttcgcggagaagccaccttggccagattggctcgccattcgaccgtatcgcaggagcattcaatgcaaggatcgcctgacaccttatcctgaccgcgctcctcagtcgacaaggccgcagtgaccgcagtcacttcgccgctccattgactgacctgacaggaaaacagcgccgtctgccctgctccgactgctgtgccactcgccagagtgaggccgacagcagctaagtccagcctcgggcgccataggaagctccgcctcgcccgaccccagggctcggactcaacctcgacctcggaagacggtctacgcctcgcccaaccccagggctcggactcaacctcgacctcggacgat

SEQ ID NO: 54372 - DNA, 414 bp, Zea mays
tcggcgcacaacagtgaagcgcaatgtagaatgctttttcacaacgacgcacgaaggcgacacaaggagaaggtgttattcaagttgctaggagcaaatgacaatgttatccctatgatatctgtaaactttgtgtgtaatctatgagggtatgaatgtaatatcgtatgaagttgtacgactccctataaatagattaacagagccctacataaagcacctttttggtgggttgtatgattactgtgtaattctcactctatggcatcttcattgtaattcaccctacagtgtcaaaggtacaattgtaaagttaatttactaaacgaggaatatatgatgaagatatcttgattgtactgtcgtattcaaattctttcatattcgatgaatgttcatttattcacataacac

SEQ ID NO: 54373 - DNA, 441 bp, Zea mays
ccgtgacactataaaactcagcttcctctcagcttttccaaagtagcccagtttcatcatcatggtcacgtcgacttcagacacagtagacttctcaaaatctaggtggctgggttttgatgggacaaatgttataatcctcctcttcttcatcagcattttcttcctcaatatcagccttttcagcttcgatagcaggtgtatcttcgttgatggtttcctctgtcacaaccaaacccgactgtctcatgacttcggaaattggagccgtctcggtggcctcggtctcctctccttcacgagtcacccttgtagtcgagcgtactctggccatctgatggattttttgcggtttttacaaagttgatgtctttcgcagttttgacgaagttctctttttttgacgaagcttactcaaaatgatggtctgctcgagagtgc

SEQ ID NO: 54374 - DNA, 425 bp, Zea mays
tgctacaggccttcttcttttttttctccatagcaggttctttattggaatactaccccacctaaaaagaatgaagggtagcaactcttaaatcttggggatttgactccttgaagtaccacataacaagggtgttacgggtccttctgctgttgttgctgcttgaacaggctgcggagggatgactggcacaaggttgattctgggagaaccttcttcttatcttctcttcacttacctttttttctctttgatcttcccactggaggattctatccaagactattaccatcatacagaggaggaaaccgaagactatgaaccatgtgcaacagtcttcaacccaagaatcaccaagcattgtgatcttatgggcgagggagtggaaaaatggagttgcttgcgatttggcagaggggatttat

SEQ ID NO: 54375 - DNA, 427 bp, Zea mays
tctacagaagatggacaaatacatcagggccgacaatttctttctgtatatataggaagaagcctacagatactctgagatgaccaggggcttcagaggaagactccccctaggcatgtcaggatgatccataatcccagctcaagcgatgatagggaaatcattctcaagcgaatcagcacaaatcccaatcatcatgtacacaacaaagctccttcaagccaccatctccaagaggcagaggaggaagaagcttcggtggaagatttagctcccaaccaagaaggttgttttgcctattctatggggaagataaggggcacacaacaaggacattccaagtcacgaaggaaatagctaaagccgaagcacgacagaatcagccgaagtaagtcctgcatacttcgtgttattccccatacatccc

SEQ ID NO: 54376 - DNA, 423 bp, Zea mays
  unsure (1)..(423): unsure at all n locations
tctgcatttatattgtttacttaaggtgtgatatttactattctttgnttagaatatagactatttggtaggattggaacttaggttggtaactcattttgctgtaagatagcaacacttaaacaaaacctgagttgcactagcatgtttatttatttgcataggttttgttcaagagaatcattagtggcctagattagtgcaaaaaatagaagtcctaattcacccccttaggcgtcactgtttcctacaactataaaagaagggatgaggcatccaaaatgggttgatcataagcaatagccaccatgatatatgacataaggtattatatcgcattgagatcacaaatctatctaaatctttgtgtgtcctatgcatttaactntagttcttgatctcatgatctnacctcataaccca

SEQ ID NO: 54377 - DNA, 417 bp, Zea mays
  unsure (1)..(417): unsure at all n locations
tccaccactttgttctagtgaccttgntatgcttatttcgttngaaacgaatcttaaaacggaagtcagctgcgacaagcttatgttgggttaccacacactctccaggtataaccttgcaatctaagcaggcatgtctgtcctcttttctcaagaggacgaaatcaatctggctagtgtgttggccactactgaaggtcaccaggtgggatgtcctcttcctaaagaaagtgtttgctataaacatgtcataggctagggcaaagttcaggatttcctctccttcttgattcctagtcccaaagtcgaagcctctgtaacacccggttttaaggaacaaagccgggtgcatctcatacatgcgccaaagaagacaacatatataatcacagagtgtatagagataaatgtcacaat

SEQ ID NO: 54378 - DNA, 401 bp, Zea mays
aaaaacccatttaccggttttttctgcttaccatacctgaaacatggacatttgcgtgctcgggattatacatgagcgcacccccaagaaagctcagggaggctatacccacgtgctggctgccattgacaagttcaccaaacggatagagaacaagcctattgggtcttgaacttaacccaaggcagcggagttcatacaagacataatattcaggtttgggataccgaatagcatcataaccgacctgggatccaacttgactagctctaaattcttggatttccgtgaacaacggagcatatatatcaagcacgcatcagtagcacacccaacagccaatggtcaggtggaaagggctaatggaatgatactggaagcactcatgaagaaagtgtctg

SEQ ID NO: 54379 - DNA, 417 bp, Zea mays
  unsure (1)..(417): unsure at all n locations
ttagctatntgcctcagtggcctcacttcactgttaactttggaattgaaatataatatgacattaactacacttccgtcagaagaggcgtttcaacaaatgacaaagctgaagtgcttcgctataagtggttgttggtgtctcaaatcactggggggattacatgctgctccatctctttcggctcttgattgttgggattgtccttctttaaagctagcacgtggagccgaactaatgccattgaaccttgctagctaccttgacatccagggctgcattcttgcagccgattcattcactaattatgtgccagacctgaaacaacttaccattattaactgcagatgctccccatccttatcgatnggccacctgacctccttgaatcatacaactaattggtctcctgatctt

SEQ ID NO: 54380 - DNA, 421 bp, Zea mays
tgccatgtttccactgttctcactttgagttagccgattcatcaacgcaatgtgaagaataccttttttctctaagatcctcattgatactatgtactgcatgcagtcatctaattttgatgacctatccttgcccaatcatgtctatcacttgactaagtctctctacagactcaaacaagcacctcggtattggagtagccgcttcgcaacttacatgtagcctattggtttcaacactgccaaagtagatacctccttatttgtttatcatcatggttcaaagactacttaccttattttataaattgatgacataaagttgactaccccaccagtttccacgctttagcatgtcatcaatgctcttcgtcaaaaaaattctttgagacatgggcctcttcatcacttttttcatgtc

SEQ ID NO: 54381 - DNA, 416 bp, Zea mays
  unsure (1)..(416): unsure at all n locations
tggtctgctgctgaactanatttgagcctcgtaagtattgtgcattttttgtataattgaaatgcatacattaattcctcaagtaccattagagaaccataacatcccttctcttcatcatggaggatacgtttttgatttcctattttgtcatttcatctagtcttgctctgagataatacattatagtatggtgctaccgtagcaccatgttcataagttccatccaaatactgtcttgtgctaatacctaaacaatatttttttgttctgagttttatttatttcatgttgatccttgttacattagttaactgcatggctgtcacatttgtgcaccagaactattatttgaacttaatacactgctaaccatacccaggaaaaatagttgctgctaacacctctatgttgac

SEQ ID NO: 54382 - DNA, 415 bp, Zea mays
tgacccggggaccctcgtcaccggaatagcccaatcgtgcacaccaggagttcaagaacccgccggcgcacgtggaccgggtaagcccctgcaccgttttcaaattcgttgcgcgcatggcctctgtgtcaccccgtgaagctcctcgtgcaccctaattgaactataccgtcgtggtttggccggagcaggagccgccgacgacccccgccgcctgtgctcgtggccagggtaactccgaccacctccgacaccgacccgcacaccgacgtgaccgtcgtgacctcctggacgtcactgaccaccctgccggagctctactgccgccggtaagccccaccgccgtaatctatgccgcgggtactgtttaagtcggtcagggagcgcgggttagatttcagattagtccaggggg

SEQ ID NO: 54383 - DNA, 414 bp, Zea mays
tcgacatcatttggtctctcttcgtcccgagcccctgttttccaatcaacaatgaagtctggttacgcttgggattggatcaaagatctatgaacgtaatcaatagtgaattcgttcaactctatagcccactttccaactcttcctggggcttctctgtttctcattatatccttgaaaaggtgtgaagaaggtactctaatatggtacgtctggaagtaatggcgaagctttccggaagccatcagtacaacatatagtaccttctccaactctgtgtaatttttctttgatgcgctaagtacttcggagacaaaggacacagacacttgctttttgcttggccatcttgcttttcttgcaccagcgctgcactaaccacagcgtgggaagcagctacatacaacagcaatg

SEQ ID NO: 54384 - DNA, 447 bp, Zea mays
  unsure (1)..(447): unsure at all n locations
tgacactataaaactcagcttggtcattttattgctaactgtcccgacaatgatagtgttcatgatcaatggaacaagagggagaaaaagaagaaccaataagaaggcaaagggcgaggcacatcttgcaaggagtgggattcggattgctcctcgtccgacttcgacaatgaaggactcgccgccaccgccttcaacaagtcatccctcttccccaacgagcgtcacacatgccttatggcaagggagaagaaggtatgtactcgaaactctacttatgcttcttcaagtgaggacgaatctagtgatgaggatgaaatagattattcatgtttatttaagggcctagatagaaccaaggtagataaaattaatgaactgattgatgccttaaatgataagaataggcttttagaanaacaagaggacttgttgtatgaagaacat

SEQ ID NO: 54385 - DNA, 422 bp, Zea mays
tccttgatctcgtagggtccaatgtaacgaggagctattttgtttttgatcccaaatctctggacacccttggttggtgataccttaagataaacatgatctccccctcaaactatagaggcttccgcctcttatcatgatagctcttttgcctggcctgagcagcttctaggttcttcttgataattctgacctttgcttctgcttcaagtaccaaatctggcccaaaaatttccctctctcctgcttgagaccaattcagcggggttctgcatcttctcccatacaaggcttcaaaaggtgccatcaagagactggactggtagttgttattataagaaaactctgccaaggaaagacacttgtcccaatcttttccgtagtgtagtgcacatgcccgcaacatgtcttccaaaatctga

SEQ ID NO: 54386 - DNA, 432 bp, Zea mays
  unsure (1)..(432): unsure at all n locations
tataaaactaagcttgngaacagcacaaattcaaaagggagaaagcagcttctttttatcagctcttgcccatgctcttatgtgaggacatagtagagcagagggctgtgggctctattatccgaagaataggagaaaaccttgataaggtttttgttcaacaacaaagatgtttttgcatggtcagccagtgatctttgcggagttaacagggatgttattgaacactcgctcaatgttgacccatccttcagacccagaaagcagaggcttcggaaaatgtctgatgacaaggccgaaggtgctcgtaatgaagtcaaaagactcctcagtgcaggagtgatcagagaagtaaagtacctagaatggctagctaacacttgtatggtaaaaaagggcaatggcaaatggcggatgtgtattgattttaca

SEQ ID NO: 54387 - DNA, 403 bp, Zea mays
tttgaggaaattctgaatgatcgcggagatatttgtgctttcttcggccgccaagggagtcgcagctattctggagaatgctggatgcgatcacgtgaaaactgtactcaggccaaagccgccttcttgaaagggaaatgtgcccttgggccatttctataagtattttggtgattagatggccaacacattaattgagttcttatgtgcaaaatgtgtgaagagtgcaaatcaaagcataaggtatgtttctagacttagtatattattttgtatactactgtgtttgtctaagcgctagaaacagtgacaaaagaagaagaaaagaaaaggaaaagagttggctgtgtgcagccaacaccaacgctggccaggcacaccggactgtccggtgcgccaggct

SEQ ID NO: 54388 - DNA, 428 bp, Zea mays
  unsure (1)..(428): unsure at all n locations
cagcttctaaaggggagaaacccacgttatancggtcttaaccanatggntatcttttctttataatagatagcaccgttggcgcaagctatgttcaaagcacggtaatacaagtgggaggagcgcatcacagcagaatgtgatgaccacatcaagacccctggagctgctacatatggacctcttcggacccgtcgcctatctaagcatagggggaagtaagtatggtttaattattgtggatgactcttcccgcttcacttgggtattctttttacaggataagtctgaaacccaagggaccctcaagcgcttcctaaggagagctcaaaatgagtttgagctcaaggtgaagaagataatgagcgacaacgggtccgagttcaagaaccttcaagtggaggagttccatgaggaggaatggatca

SEQ ID NO: 54389 - DNA, 397 bp, Zea mays
ttgccttcggcaaactaaggccagataagattctcctttttgggagtggagagatggcgaaagtagcgtgtaccctccatggcaagaggctggacagtgggtatctgtactctcaattggcgtgaacctgatctagtcttaagaaccccggtggcgggttgacatatgcaagggttaagtgctacatatgtcgtgtgattggagatcctcagctgagtataatcgattcggatcgccgtacctttgtggttatgaagacttgatcactgccctatacgtagaactctagtaaagggtaagggttgttaataaattggctagtgcaggtcaagtgaatgaactatggtagaaagaactctagtgcaggtaatttcacttaacttgccaaataaaactg

SEQ ID NO: 54390 - DNA, 403 bp, Zea mays
  unsure (1)..(403): unsure at all n locations
tggattgcttgaatggtggtggatggaggtatttatttcctcaatcactattctagtcgntgtctcaattctctgtcgatgggcacaccggacagtccgggatgcaccggacactccactgttcactgttcggggagtgtcacgtcagccgaccgttggagtttggaactgttgaccgttgaagtcgtctatctttttggtgcaccggacagtccggtggcacaccatacagtttgtgcgaactggcatcgcagactgtctctgaccttgtcggcgtttcgagaccggggggtccctgggccgacgagtgaaatgtcgccgtatgccccagcccagatgggtcaacgcgagactgagcgcgaaggggggaaaaggcagacggagagagtgagaggtggaaatc

SEQ ID NO: 54391 - DNA, 405 bp, Zea mays
ctgggcacacatttgaattttagttcagctcattaccttttgacagatggtcagactgagagaaccaaccagattcttgaagatatgttgagggcttgtgcattgcaagacaagttaggttgggacaaaagattaccgtatgcagaattctcttacaataactgctaccaggctagtctaaaaatatcaccattccaagcactctaagggaggaattgtagaactctgttgcattgggaccagcatagcgaaaggtagggtttcggtccagatatattgcttgaatctaaagagaacatcagaatggttcgagagaatctgaagacaacacagtctatgcaatgaagctatactgacaccagaagaagggaattgagttttgaagtgggagactatgtttacttg

SEQ ID NO: 54392 - DNA, 414 bp, Zea mays
  unsure (1)..(414): unsure at all n locations
tgtgaagattcttcatccccacatgagctaaacggcgatgccacattcagcccatgctagtcttagcaattaagcatgcatctagaccggcctcctcttttgaaaatcaactaaataaagtttgtcgtctaatacacccttaaaagctaatgaaccatcacttcttctaaaaaacagacacatctacatttgtgaataaacagttatatcccatattacaaagttgactcacagacaacaagttatatccaagcgactcaactaagaacacattagaaatagagtgctcggaagaaatatcaatttttcctaaccctttcaccttgccttggttcccatcaccgaatatgattgaatcttggggataattgttcttgacgtacgaagagaacattctctttttccncgtcatgt

SEQ ID NO: 54393 - DNA, 345 bp, Zea mays
cagcttcacagcagcccaatataggctgggcatataggcctcccacaagcccagagcccttgcagagagcagttgcaactacctttgcagctgtcagttgagttaacaaccagataccaggagcagaagcacttttcccagtatgcaatatttcttcaacatttgtgaaaccccagtataagatccctggatatttcagagctatgataccagctcccagcccacccaaagcagggtacactatttatagggaaatcaaacttttcctttatgtgcccaaagaatctttgaaaccattcaaccaatctatcaaacaccacactgaccggttcacatagcatttct

SEQ ID NO: 54394 - DNA, 335 bp, Zea mays
  unsure (1)..(335): unsure at all n locations
gaagtttgagaaactaagcctgcttctgctcgccttagctaggaattgcgtctacaaagcaaccggccagatccgtatcaaatgttctcaggtgagtatctatntatatgatcgactcactccactttggaaggtccctgttgtcattgacttttgctattctatcaaagggaacgtgatgatggggaccataattatggattcttgtctttcctctcggaaggaatactgtttgcgtaataacttgggattataggggaaacttgggtctgttctagtaatacataccgtgccaactacaagccactgctntaagcttaaccccatatatagct

SEQ ID NO: 54395 - DNA, 411 bp, Zea mays
tattaaggattatgatttggaaattcactatcacctgtttctaggcaaatttggttacagatgccttgagtcgaaaggagcatgttcatttagctgttgttgcccagctacccgatgagattgttgaggatttcaagagacttaacctggggatagttgctcacgtttaaggagtcattattgatttggaacctatcttggagcgagaaatctgcaaaggataaattggtgatgctaagacacaagagattaaggatctgattaccgaagatcgagttccggaattcacggaagatgagcaaggcacaatatggttcaaggacaagatatgtgtccccgagactgaaagccttcgtgagactatatcgaagaaagcccatgacttggattattctattcatcctggtagta

SEQ ID NO: 54396 - DNA, 425 bp, Zea mays
  unsure (1)..(425): unsure at all n locations
tctaaagggagaacacattttaggactaacaaatgtttattttgagaaagacaggatttgtagcgcatgtcaagcaggaaagcaagttggtacccatcatccgcatagaacataatgacgaccgacaggccactggagctcctacacatggatctattcggcccgatcgcttacataagcatcggcgggagtaagtactgtctagttattgtggatgattattctcgcttcacttgggtattctttttgcaggaaaaatctcaaacccaagagaccttaaagggattcttgagacgggctcaaaatgagttcggcttaacgatcaagaaaataagaagcgacaacgggacgaagttcaagaactctcaaattgaaggctntcttgaggaggagggcatcaagcatgagttctcttctccctacac

SEQ ID NO: 54397 - DNA, 409 bp, Zea mays
atgagggcaaaaaacaacccttgtgttttgtttatttgctgcccgtaggtgggggaaactgaggtcacaacatagtgatggcgacatccgtcttctgcgaagtatgcctgccttatagtgggagtgacaatgatcttgaccatctaatagacttcgttttcccaaatctcaacgaaaaaatgtcagattccacctacattacttcaagggcgatactgtcaacgcggaatgacggggtggatatgataaatgctaagatgatcaatcgttttcaaggggagcatatggtgtaccatagtttcgatagtgccatggatgatccccataactactacccacctgagtttctaaacacactgacgcctaatgggctgcccccgcatgttttgaagctcaagaatggatgccc

SEQ ID NO: 54398 - DNA, 424 bp, Zea mays
  unsure (1)..(424): unsure at all n locations
tatgaagattcttcatcccaacatgggctagtcggcgatgctagagcctacccatgttagtcttagcaattaagcaagtgtctagttcagcttgattaaaacaactaagtatagctgaccctctagcactcccttaaaagctattgaatcatcacttcttctaaagaaagtaacacctatatcagtaaaaagacagttgtagcccattttacataattgagaaacagaaagaaaattgtaatataaagaatctacaagaaaaacattggatatagaatggtcaggtgatatagcaattntacccaaacctttgaccaaaccttgatttccatccccaaatgtgatagctcgttgggggtcttcatttttctcatacgaggagaacattcttttctcccctatcatgtggtttgtgcatcctctg

SEQ ID NO: 54399 - DNA, 403 bp, Zea mays
tcggcattattttcaggcatacaatattgttgttccttcttctcagccgttgaaggatattatgagaaatagagaagctactggacggattggaaaatgggctgcaagctcaatgaattttgcattgattatgtgcatagatcctcgatccagtctcaagcgttggcagatttcattgccgattggacgccaggggctcaggatgaagaaacaaataaagatgccgaagtgtggacagtgttttgcgatgggtcttgggaaccttcggagcaggagcagccgctgtgttggtctcaccatccaaagttaaaacttgttatgcggcaagacttgattttagctgtacaaacaatattattgagtacgaagccctgcttttgggcctttggaaattaaaagcaat

SEQ ID NO: 54400 - DNA, 406 bp, Zea mays
  unsure (1)..(406): unsure at all n locations
tgcattgcatgtttaaatttcttgtattgcatctagggcttgtttaacctagttgagataaccgccaacaaagcgagtgaaaaagcttaacttggatcaaactgacagtcttaagtttttaagcttttagcacttaaattcttactttttatgcaattgttggttcttgaaatatgcatgaggtactgcacttagggggagtattcaaaactcaaatcactcatgaagacccctagtgcaaggccaaaatgcaaatttcaccatttgcctattttctctaaaaattaactagcctatggaaaaatattttgaaaaatatgagaaaaatatatgagggtgccaatacctgtcccaacaagtgttattntgtgtgattataagttgggatttggttttggtgggaact

SEQ ID NO: 54401 - DNA, 420 bp, Zea mays
tggtgccgatggagaagcaaaaatccttgaagtcttttctgtcaaactgcttgcctttgtcaactgttagttcggacggtactccgaagcggcaaacatgttttgccaaaagaatttttgggcagtctttgatgttattgtggaaacagcccttgcctcgatccatttggtgaagtactcgacagcgacgaaggcgaacttaaggttcccctgagccgtgggcaggggcccgacaatgtccaggccccagcgctagagaggccatgtgtgggcgatcagctttgtaaattgcgaggggctgcctgatcgaggagaaaacttctggcaggcttcacaggaccttgtgacccgatttgcggcgcagatcattgcgggccagtaaaaaccttggcggatcaccttagcagctagggcccttgg

SEQ ID NO: 54402 - DNA, 368 bp, Zea mays
ttatcaaatggacgtgaaaagtgccttcctcaatggatcaatcaatgaagaggtctacgttgagcaacctcccggctttgaagacagtaagtatcctaaccatgtctataagctctctaaggcgctttatgggctcaagcaagccccaagagcatggtatgaatgccttagagattttcttattgctaatggcttcaaagtcggaaaggccgatcctacaccctttactaaaactcttgaaaatgacttgtttgtatgccaaatttatgttgatgatattatatttggatctactaacgagtctacatgtgaagagtttagtaggattatgacacaaaaattcgagatgtctatgatgggggagttga

SEQ ID NO: 54403 - DNA, 425 bp, Zea mays
tgagaaaggaaaaactgcagcaagtgttaagctcaattataagaatgttcctaaagatgaagaaatcaacatgagcttggaaaaaggtaaagattcaattaatcatgttgtttgcactaaccttttctctatgtcattcaagaacaaaaagaaaaaagggaaaaggaggtgctttaagtgcaacaagttaggacacctcattgcgttgtgtccatacaccaacaagggtgaaggaataaggagatgcttcggatgcaatgacaagaaccacacgatcacttcttgtcctctactgacggatcaaacatgtgcagtctccaagatgactctcaccaaggaaaatgacaaacaacaagcgtcatgtcaggttgagcgacgcttctgctacaagtgtggtgagcaggatcatctatccaaggtatgta

SEQ ID NO: 54404 - DNA, 427 bp, Zea mays
  unsure (1)..(427): unsure at all n locations
atactaagctcgcatgcagtgaatggtggtggtgggggtatttatagcctcaaccttatttctagccgntggctgtagctttctgtcgacggacgcaccacacagtccgggcacaccggacacagcactgttcagtgtttggtgtctgccacgtcaattgcctgttggagtcgaccgttagattcgcctgcccttgtggcgcactagacagtcccgtggcacacccgacagtccgtgcgacgaccattttctgacttctgatgtttctgagttgtggcagtcacggtgcagtcgaccgttggtcgtgggctcaccggaccgtctggtgaattttatccgcggagcgctgtgttttcccaggagcaacctgttcgtcgggcgcaccagcctaggcaccggacactgtccggtgcacaccggacagtac

SEQ ID NO: 54405 - DNA, 418 bp, Zea mays
ttatacccaatcttagactcacaagctcatactatgctttccagctatacatcactcagaggagtagggtgttacgctccggcggcccgaaccactctaaatcttgtgtgttcttgtgttcttcctgtttccccaactaacaagcgaaacgtctaagcccctcctcatcttaggatttagggcgggtgcactccgccacccggccggggatttgctcttcgacaaagaccaaaagtgcaactttgggtacaactacaaaaacataaggcttaagtatttgaataagtggcacatacaatatactatgttcccagcactcccagagctatacaacacttcgacgtgatgcgaccacgcttgctagtgatttattgaatctgagcgtgagtctgtgttgctatgtgatcttgtgtcatgt

SEQ ID NO: 54406 - DNA, 413 bp, Zea mays
tgaagccatggtaagtagcataggccaataatatacgaattgactcaagcctagctacgagtgcataggtttcaccgaaatccaaaccttcgacttgggagtatccttggccacaagtcgggctttgttccttgtcaccacaccatgctcgtcttgcttgttgcggaacacccatttggttcctacaacattttgattaggacgtggaactaaatgccatacttcattcctagtgaaattgttgagctcctcttgcatcgccaccacccaatccgaatcttgaagtgcttcctctaccctgtgtggctcaatagaggaaacaaaagagtaatgctcacaaaaatgtgcaacacgagatctagtggttacccccttatgaatgtcgccgaggatggtgtcgacggggtgatctc

SEQ ID NO: 54407 - DNA, 430 bp, Zea mays
  unsure (1)..(430): unsure at all n locations
tataaaactaagcttcnaaggtgccatcttgatactttcttgatagctattattatatgaaaacttcgccaaaggcaaacattcatcccatttctgtgaaagtccagaaccatgctcgaacatatcttcgagtatttgatttaaccctctcagtctgtccacttgtttggcgatgataggtcgaactgtggaacaacttattacccaaggatttgtgaagcgcttcccaaaacttggctacaaattgaggtccacgatctgacactatggtctttggaacaccatgcagactaagaatacgagcaatgtacaattgggcgttgacagttaccggggaatctgtcttgaccgacagaaagtgagcaacttttgtacgtcgatcaattataacccagatagaatcatacccttttgcagtcctgggtaatcc

SEQ ID NO: 54408 - DNA, 438 bp, Zea mays
  unsure (1)..(438): unsure at all n locations
actaagcttggtcactctattgctaactgtcccgacaatgatagtgacccaggatcattttgatatannagagggacagaaaaagaaagaacctattaagaaggcaaagggcgaggctcaccttgcaaggagtgggattcagactgctcctcgtccgactccgacaatgagggactcgccgccactgccttcaacaagtcatccctcttccccaacgagcgtcacacttgcctcatggcaagggagaagaaagtaagcactcctaatactagtacttatgcttcttctagtgaggatgagtctagtgatgatgatgagatagattactcatgcttattcaagggattagatagaactaaggtagacaaaattaatgaattgattgatgccttgaatgataggaatatactgttagaaaagcaagaggatttgttgtat

SEQ ID NO: 54409 - DNA, 403 bp, Zea mays
  unsure (1)..(403): unsure at all n locations
tgcacttacnaccaaaccgcacccacattcatatcacattcttttgctcatcaatagnnggtaagggacaagggtaaccacagttggtacgaattaattttgctattggctcatatcgngatgttggctgcactgtgaatgttgtgctctatggatgctttgtaatatatctgctaggtactaccactggcaatattgattcaaaattgtatgccttcatggcgagatcagaattaactattctctcatacaccatcgataagaaaattattttgcttcccatgtcccctgaggctattgtgcgtgatgatgttgctaaagctaccaaagcttaaactgataacaacaagaatattaaagctgttgtaataacaaagatgggataaaaatgaaaggacattgc

SEQ ID NO: 54410 - DNA, 401 bp, Zea mays
  unsure (1)..(401): unsure at all n locations
taaccttgtaacgaggataagctacctttgtttcaaattgtttttggtccttaactctctttgaaatccttaagggtaaatgcttaaaatgattccaacatgcttcataagtgcatagtctgtcatgggcatcacacttttattatgacacattgcactttacaggttctctgataaagatatgttctcattaatctaattatgtgcacttggcacttaaggccaaaatctgtattcctctcaaggcacatatttacggggagaaatctatattatatagaactgttatgacatagtctgtgaatcatgtctatttgcttcggnacaatagcatatttcctatctctgttgagccaacgctaagactaatatgtttccatgagcatctcataaattaagtc

SEQ ID NO: 54411 - DNA, 414 bp, Zea mays
ttatgaagatcaagcttcggtcatcgcacgctgattgtttcagctgaagctgcttcttccttcaagaccttcggcgcgacgaagcatagtcccaacagtgcccctttcgcggcgctagatcgtttttcgtaacgagcttgatccgtgaaaagaagaagtctcttaagcttcgggaagccgaaggtccaaaaaacaccttccctgagctcgttgccgagaaacgattcagtttccgagcgcgtagcggtcccaccttgcagagttactgtttggtctctgcggtccaccgcgcagcgagtgcaagcggctgtccgcctggtgtaaaaatcctggcgcttcgccttcttacctgcagtactatataaacagacgagtatgtgtgaagttaccacagcattcattgctatttgcact

SEQ ID NO: 54412 - DNA, 239 bp, Zea mays
  unsure (1)..(239): unsure at all n locations
ttgaatggacgttttctcaagcagtaccatcctagtatgtggcaagatgcttaagaaaaccgatgtgatcacatcgagttagttgcttttggttcgctcactccaccaaaaggcaagggggcatatgttgagcaccaaattgagaggccggactgtnctttcntattattctgattgacactccttactctgttcttatccgtgttcgagctctcttttttcgattgtactttataaaa

SEQ ID NO: 54413 - DNA, 423 bp, Zea mays
tcaccttagcgcaagggcagcgatggaaaatggttcttttctaattgggaatatactggccagtcctcgaaagattacttcttagtcagtagtaagtgtcaagaacatagatgtaattttacctaggctgcgtcctgtgcctataaatagatgaacagtaacaccgtactgttcatgctgacttatactcactttcacatcactcctgaatttttaacttctgccaagccaaaggtacaaatgtaattcaatatcattaatgtttgttcatggttatataatgagaatatgaatagtctaatgatttaatattattattcacgttcttttccatgtttcatatgtccctgcccttactattacatgttgtagttatgaaggtatgcccttcataaccctttgtctgaagatcattatatccta

SEQ ID NO: 54414 - DNA, 406 bp, Zea mays
tccacgtgttcgacgcgagctggcatccgggggcgcgctcagatttctcccgtgcgcgaacccccccgcgcccgcggccgcccgtgaccacgcccgcaccacggctataaagcccgccccagtgcttggctgccttccccgttacctcctccgtacctcgccggacttgcccgagccagccattagctccggcgacctccccgcgacccgctagtgccgcccgagagaaaccaccgtggccagcccctctcccgtcctcctccgttcgatccaaaccctcagatagcttcctggtgaggctgtgagacttgctcaagcttgacccggggaccctcgtcaccggaatagcccaatcgtgctcactggagttcaagaacccgccggcgcacgtggaccgggtaagccc

SEQ ID NO: 54415 - DNA, 363 bp, Zea mays
  unsure (1)..(363): unsure at all n locations
tactcctccctgggaaggccccttcatcatttccaatattttgaagcccggaacatacaagctggccaacgatcaaagcgaggtctacaacaacgcttggaacatccaacaactacgtcgcttctacccttaacatgtttcaagttgttcatatacctcgctttctttacatacataaataaaatctaaccgtcaaggaaggatcagccttgcctcggcaaagcccgaccctccctcgggggctagaaggggggaaccccctctgcgtcaaaantttcctcggaaaagtcttttgccataacgtcttttgtgccgtttggactgcttcgatagcacggtcctaaaaaccaccagagtacatgt

SEQ ID NO: 54416 - DNA, 413 bp, Zea mays
cgtcagaattggtctgaggaactcaataagatgttaatctctgcaccaatattggtaatgccagacatccacaatggatctgatgtgtattgcgatgcatcacaccttgtgacttggatgtgtgctaatgcaaaaaagaaaggtgattgcttatgcttcaagacagttgaggaaacatgagaagaattatcctacgcatgatttggaactagctgccgtagtgcatgctttgaagatttggaggcactatatgattggaaacaagtgcaaaatcttcatggatcacaaaagcctgaaatatatattcactcataaggaactcaacctcagacaaagaaaatggcttgagttgattaaagactatgatttggagatcaatatcaccccggaaaagcaaatgtattaactgatgc

SEQ ID NO: 54417 - DNA, 421 bp, Zea mays
tcttgtgcctctgaagtccactgaaacttgtccaccttcttgagtagtttgtaaaatggtaaacctttctctcccagtctggatataaatctgctcagagctgcatcatccagtgagtcgctgaaccttcttttgtgaccgaggagcttccatcttcatgatagcttcaattttttctggattagcctcaattccccggtggctgacaataaatccgagcagctttcctgctggtaccccgaaaacacattttttaggattgagcttccatctatatctcctcaggctgttgaaaaccagctgtaaatcttcgatgaagttttccgaattctctgttttgatcaccacgtcatcaacataagcctccacacgcttgccccagtgatcggctaggcatggttgaatggctctctgataagtc

SEQ ID NO: 54418 - DNA, 427 bp, Zea mays
  unsure (1)..(427): unsure at all n locations
gacacttaaatctaagcttcaggggtctcactgctctccccttcagnggcagtcatagtgtttgatggcagcattattaattgcaattgtgtgattcctgctgctgtctggacaactcagggctttcatttactactgatttccgtgtctttcccctctcagcttacgatgtcgaccttggtatggattggcttgagcacttcatccccatgaagattaactggagagaccggtggttggcattaccatacaaggggcacattgcagtattacacggaaaagttcacacttcagaccggcctgatataatgcatgtggtgtatatgttgcaatctggtagtgacactcaactgcccgacaacttggataccaagctgtccctggttctgcagcaatttcagtcaggttctacccttcagaaggttgc

SEQ ID NO: 54419 - DNA, 429 bp, Zea mays
aatactcaagcttgaagccatggtaagtaacataggcaagtaaaatgcgaattgactcatgtttagctacgggtgcataggtttccccgaaatccaaaccttcgacttgtgaataacccttggccacaaggcgggctttgttccttgtcaccacactatgctcatcttgtttgttgcggaagacccacttggttcctacaacattttggttaggacgtggaactaaatgccataccttattcctcgtgaagttgttgatttcctcttgcattgccaacacccaatctgaatcccttaatgcgtcttccaccctgtatggctcaataaaagacacaaaggagtaatgttcacaaaaatgagcgacacgagatcgagtggttacccccttatgaatatcgccgaggaatggagtcacgagatgatctcatt

SEQ ID NO: 54420 - DNA, 436 bp, Zea mays
  unsure (1)..(436): unsure at all n locations
cctataaatctaagctttacctcaggcagaccaataccagaaaggccaacatgctatggtagtggagagatggcgagagtagcgtgtaccctccgtagcaagaggctggacggtggtgcatttgctctcgggttgcgtgaacccggtctggtcttgagaaccccggtggcaagttgacatatgcaagggttaagtgctacatatgtcgtgtgattggagatcctcagctgagtactattcgatttggatcatcgttacttctcggacatgaagacttggtcactgacttacacatagcattccagtgaactaatgggttgataaaagacggctagtgtaggccaagtgcttgaactanggtagaaagaactctagctacaggtaatgacttaaattggcaataaaactggatttttaaggatccactattagtaag

SEQ ID NO: 54421 - DNA, 393 bp, Zea mays
ttatcaaatggacgtgaagagtgcctttcttaatggattctatcaaggaagaggtctatgttgagcaacctcccggctgtgaagatagtgagtatcctaatcatgtgtataaactctcaaaggtgctttatgggctcaagccaagagcatggtatgaatgcctgcgagatttccatatcactaatggcttcaaagtcggtaaagccgatcctactttctttactaaaactgttgcaaaagacttgtttatatgacaaatttatgttgatgatattatatttgggtctactaacaagtcaacttgtgaagagtgtagttggatcatgatacaaaaattcgagatgtctatgatgggggagttgaggtatttccttggatttcaaatcaagcaac

SEQ ID NO: 54422 - DNA, 420 bp, Zea mays
ttatcaaatggacgtgaaaagtgccttcctcaatggatcaatcaaggaagaggtctatgttgagcaacctcccggctttgaaaacagtgagtaccctaacatgtctataggctctctaaggcgctttatgggctcaagcaagccccaagagcatggtatgaatgcctaagagatttccttattgcaaatggcttcaaagtcggcaaggccgatcctacactctttactaaaactcttgaaaatgacttgtttgtatgccaaatttatgttgatgatattatatttgggtctactaacgagtctacatgtgaagagtttagtaggatcatgacacagaaattcgagatgtcaatgatgggggagttgaagtattttctaggattccaagtcaagcaactccaagagggcaccttcattagc

SEQ ID NO: 54423 - DNA, 406 bp, Zea mays
  unsure (1)..(406): unsure at all n locations
tatacaatgcagcatacctgaggattcatggagagactgtgcttgatgaggcaatttcttttactacgagatgccttcaagatagattagaacatttggatcaccaatagcagaggaagtgtcgtctgcccttgataccccactttttagaagggttggaactttggaaatgaaggattacattcctatctacgaaaaggacgctaaacaaaacaaatcaatattagagtttgcgaaactgaacttcaaccttctacagcttctttattcatcagagctcaaagagtgcacnaacgaagtttatatatatatattacttctcctttcagaaacgaaagtgcatatttaaaatatatgctaattattgctttttcttctatacgatattgcagctggtggaaagaac

SEQ ID NO: 54424 - DNA, 421 bp, Zea mays
tgagaagatatttccacccggcttcttcaatccaatgcttcatttgattcttcatctcccctatgaggcacgaatggggggccccatgcagggatgttatgctatccaatcgagagatgtctaaagactattcgaaagaaatgtagaaataaatgcaaaatcgaggcttccattgcagaggcatacattctagaggaggtctcaaacttcacaacaacttattatggcgacaaactgccgagcgtgcataatccaccccctcgttacaatgatggcgacaatgaatcgaaccttagcatatttcgaggccaactcggaagcgcaagtggctcgaccaccaagaccctgacacatgaagagtggcggcatatcatgctatatgtattgaccaaacttgaagaggtgacgccatacatggaac

SEQ ID NO: 54425 - DNA, 224 bp, Zea mays
tcacatctctgaactaactcagctgcatcactctttgctgtcagccaatagaaaccagacctgaagaccttcccaaccaatgttctggacgctgcatgtatcctacacttgcccggcattggatttcatctaacagttgtttcccagtggttgaaggtatgaacttcatgaggatttctgctgcgcctcttctgtacaaggtgttcccaaatgaggtgtaatgg

SEQ ID NO: 54426 - DNA, 414 bp, Zea mays
  unsure (1)..(414): unsure at all n locations
tctaaagggagaacacattttgggacttattaatgttcattntgagaaagacagggtttgtagcgcatgtcaggcagggaagcaagttggtgctcatcatccacacaagaacactatgacgactgataggccactcgagctcctacacatggatctattcagcccgattgcttacataagcatcagcaggagtaagtactgtctagttattgtggatgattattctcgcttcactagggtgttctttttgcaggaaaaatctcatacccaagagaccttaaagggattattgagacgggtcaaaatgagttcgacttaaggatcaaaaagataagaagcgataacgggacggagtccaaaaactcacaaatcgaaggcttccttgaggaggagggcatcaagcatgagttctct

SEQ ID NO: 54427 - DNA, 410 bp, Zea mays
ttattccagtgcacccaagatcacgaagaatatcttctagcgtatgtccgaaagttcttacgcctgagggcacaagcgccaaaagtgcccaatgaaattgtcattgaggccatgattaaggggcttcggccaagaccttcagcccaatactttgccaggaaaccccctcagactctggagaaactgcttcataagatggatgaatacatcctcactgacaatgactttcgacagagaagggaggaagcttacaggttctcctaaatagccaggggcttcggagggagaattcatcctagacatgtcagatcgattcattccactcagaatgatgacaggggaagccagcagcagaggccgcaatattcctcccaggcttcggggcagcagcagagctatcctcggccccc

SEQ ID NO: 54428 - DNA, 236 bp, Zea mays
tgtgaatggcttgctaaagcaatagaagctgcaggttggttgcccacatactgtggtatgtaaggagagtggcacgaagcagtatgtaaaaccttgcttcggctgattctgctcgagcttctgcttcagtaatctctctttgcttcataatagggatctggcacattcttgttgggtgacctttgtcttcacaacagaataaccaatagattcttctgggctgatcccatatcttc

SEQ ID NO: 54429 - DNA, 434 bp, Zea mays
  unsure (1)..(434): unsure at all n locations
aaaagctatttcttcggggcggttgtatttccgtgtatgaagctacggatgaagtatattgttatgacgcatcctcaaatcgctggagctcagctgctccaatgcctacagcaaggtacttaatcgngcaagtccattggcatctttatattcactctcgagatcgagacatacctgtcaatctataattatagataacatgacatgtgtactccattaatctgtgcctgtatatgtagcgcctcatgttttccctaaaacagcacatatatgtagcatgtcatattcgtccttaggcaacaccttatatactatatctattggagcagttccttatgctccgccgccttcctttcaggtgctattntgtgtctgcatcccttaaggagaagttgtacataactgatggatacggcttgacggacaagtcacca

SEQ ID NO: 54430 - DNA, 439 bp, Zea mays
tgtaccctggtattgtaataacatttactcagactctgtactatttgaagtaaggaatgtgttggtcacttgctctcaaatgcttcggcttaagagcaaggcaacacaaaaaatattaaaagtcaaagtccttcgtcctttggagcattatttcccttaggatataacgactctcggacgaaggttacgaagaatataccttcgtaagttcaacatataaaaatgaggaggaaattatatgaagtataatgaacagtgtgaacaattaaatatgttgttattattgaattatttctatttcattactatgaataaatagaaataataacttattacaagtataccttcggcttgaaggaagataaagagtacaaatgtgacacaaaagcaaatgccaagtcagcgtgaacagtacgggagtactattcatctatttata

SEQ ID NO: 54431 - DNA, 443 bp, Zea mays
  unsure (1)..(443): unsure at all n locations
agctngtggaccacgtggttcgggcgaggggcttctattctccccgctgtcgnagggtcccccacgcctggggtagtagcctcggcgcaccttatcgtcgaggcgggctcgacggtcgcggcggtggtgctcgttgccgaggcgacccggggctgcaggcgctgtgtcccgcgtgcgcccggtgtggaccaaggcttcccgcatgattcgggaagtcncggcgcgatgctccggggggtacccctgccttcgggaggcagagctttcggcctgtcggaccgcgacattttgtaagagattcttgagctctactcggatacgccgccccttagtggtggatggttccggcatcgcttggagtaatattgctactgcagccaggttctggccgaccccactggaagctgggggcagccttcgccttgcatcgtcagggatgcggc

SEQ ID NO: 54432 - DNA, 427 bp, Zea mays
  unsure (1)..(427): unsure at all n locations
tctgccctcccaataacatgagcaagagatacctttccttttactattctgttctcgtgacgctgnctgttcccatttcttcctttttgatttgttacactctcttggtttggtgatgatgaagcttcttcctcccatacattctccttttttcttccatttatgtcaagaacaccactatttgtttgagcatgccaatgcatgtgagaaggtccaacttcaattatttcaccttctgttaatatgtggggatcagattgcatccatgtagtcttactagagttagctcccttcacagcactatcctttttaagcctcgtaattagattctcacctctagacgagagcggnactatgttagtaaaggacctcagtgtcacattggacgagtcattctcatggtaaggaaacattgatggaacgtgac

SEQ ID NO: 54433 - DNA, 438 bp, Zea mays
  unsure (1)..(438): unsure at all n locations
agcttctttttgttctccttngagggcggaggtttctttatatcttcttgacaggccttcatctcgtttgtttcttttttccttgtaattcatgtccatttttccgtggatgaggtggacaacggggttctttgggtgaatgaattttccgctcctggcttgtaggaggtagtcttcgctcggagtgctggaggttgcgctatttcctgcttcgttccggctttcctggagattatcgaggaacgttttctctccggcggatccgctatgcgatgtagagccccttattcgtctgccaaggatgagatggttccgaagcataacacggatctagggcacagagcgatcttgtgctggaaagtgatggccattgagctagcttggatcagtgacacacctctacttggcgcgccagctgtcggtgttttgggtctgacc

SEQ ID NO: 54434 - DNA, 441 bp, Zea mays
  unsure (1)..(441): unsure at all n locations
ntcagatagtcctctctgtantttgcagtcttggcctgttgatagttggcacggttcttttccattcttttggcacagctcgcatgcatattcctcagtagaatcctagagatttaaaagacaactttaactttttaaatcaattatacaaattagcgtaaaatcaatgtgacaatcagcaaaattttcatgaaaagtacattaaaaaagtgtcgcatttgactcaacctgacatgttgggcacactaagaccaacattctgcaatggctacaccgacagcgtgacgaatagtcatcaaaagaagaatcacatatcaaacatgcaccgagtatgttttccttaaggcttcccactgatattctatgaaatgacattgtgacagattagtgagaagaaaaacaaatgaaatccttaaaaggaagagtttcacatttgcaata

SEQ ID NO: 54435 - DNA, 427 bp, Zea mays
  unsure (1)..(427): unsure at all n locations
gcttgatcatattttacaaggaaattttgctttttagataatctgggnatgaagcacatacgagagaagataagggctggtgtagccaagtgtttcaaggaagacgatcaaggtgtgatatggtttaaaaaccgcatagtagtgccaaagaacgaagagctccgccagcaaattctagatgaagcacatcttagtcgttattctattcatcccggaagcactaagatgtaccaagatttaaagcaacattattggtggataaagatgaagattgaaattgcacgctatgtggctagatgtgacacttgcagacgtgttaaggccatacacatgaaaactgctggtccattacaatctttgccaatcccaacatggaaatgggaagacatcagtatggactttattgtgggactgcccacgacgacca

SEQ ID NO: 54436 - DNA, 439 bp, Zea mays
  unsure (1)..(439): unsure at all n locations
nttatcgtctcttattgtctctattntcaaaagttggcttcttgtggtgagaagtgttgattatgggaaaaagggggagtttttgaaatccttgatcaatctcttttggaatgactctctttatacttcaacatgtgtgtttgacttaaagatagagatttgagtttgatttgcaaaaacaaaccaagtggtggcaaaggatgatccatatatgccaaaattgaataaaaccaatttgagttttatttaaagtgattttgcacttgttctagttgctttatattgtgttggcataaatcaccaaaaagggggagattgaaagggaaatgtgcccttgggccatttctatgtattttggtgattgagtgtcaacacatgtgcttaattgggaatttatgtacatggatgaacaaggtgaaaatcatgaagtaaaggtatg

SEQ ID NO: 54437 - DNA, 363 bp, Zea mays
  unsure (1)..(363): unsure at all n locations
atggagnncngaagtgagtagtcgaattccgtccaaatctggacagcattattatttaatactgattgacctttttaagtgtctaatctcatggcgatgataatacccaagctgtatacgatttcttaggctttccagacagccttaattcactatttttggatgaatatttcgcgagttgtgaataaaacaatcgactactgtgtgcgcgccaaaaaatctgcactcgagcacttgattttgttcttgtttggctaactacgaataattagctcttcgattcttgagtgacgaagacttgtggcatttgaaaagtttctccaaatgcttcgccgcatatcgctgagaattttctttcttcat

SEQ ID NO: 54438 - DNA, 440 bp, Zea mays
tctaaagggagaacacattctatgactaaccaatgttcattttgagatagacatggtttgtagcgcatgccaagcaggaaagcaagttggtacccatcatccacacaagaacatcatgatgaccgataggctgcttgagctactccacatggatctattcggctcgatagcttacataagcatcggcgggagtaagtattgtcttgtgattgtggatgactattctcgcttcacttgggtgttctttttgcaggataaatctcaaacccaagagaccttaaagggattcttgagacgggctcaagatgagttcggcttaaggatcaaaaagattagaagcgacaatgggacggagttcaagaactctcaaattgaaggctttcttgaggatgagggcatcaagcatgagttctcttctccctacacaccacaacaaaatg

SEQ ID NO: 54439 - DNA, 393 bp, Zea mays
  unsure (1)..(393): unsure at all n locations
gaagcccgggacatacatgctatcctatgaccaaggcgaggtctacaggaacgcttggaacatcgaacagctacgtggcttttacccttaaaatgtcccaagccgctcatgtatctcgctttctttacatgcataaataaagtctaaccatcaaggaaggatcagccttggctcggcacaacccgagccttccttgggggctagaaggggggaacctcctctgcctcaaaattttcctcggaaaagtattttaccagaacgactntcgcgcttttcgactgcggggataacataatcctaaagactagcaatagataccttgagcggcaaggccgggcgagcccaaggactactacgcctgcgggatacggatacctcactcatcacctttcg

SEQ ID NO: 54440 - DNA, 433 bp, Zea mays
ggaactataaaactcagcttggaaggatctgtatccgcatatgagctaagcttctatttcacagccagcccatgctagtcttagcaattaaacatgcatctagaccgggctcctcttttgcaaaatcaactaagtaaagtttgccgtctaatacacccttaaaagctagtgaaccatcacttcttctaaagacagacacatctatatttgtgaatagacaattatatcccatattgcataattgactaacaaataacaaattatatccaagagactcaactaaaaacacattagatatagagtgctcatttgatattgcaattttgcctaagcctttcaccttgccttgattcccatcaccgaatatgattgaatcttgggaatccttgttcttgacgtacgaggtaaacatcttcttctccccccgtcatgt

SEQ ID NO: 54441 - DNA, 418 bp, Zea mays
  unsure (1)..(418): unsure at all n locations
gcaagcttcatgatgtgttgcatgtcggtcttctctttaaatgtgtgtgcaagcctcccgcgacaccagcgacgatactcgctgttcatcatggagccatcaaccctgagccggaacgtgctgtgcgcactattgttactcgcggggatcgacaggtgctcatccgttggaagggagaacccggaccatcctgcacatgggaagacctgaacaccttntnctccaaaactcaatcgttcatctcgacgaccatctggaaggcgatggggggacatatgtcatgtacagcgttcacaactctatgtgaccggtcgcgcgcgacatacacaaggcatccgagcatgcagcagaggaagcggttgccctaaccatttatccgctaggattaatgcaatataagatatctagcctattattt

SEQ ID NO: 54442 - DNA, 432 bp, Zea mays
  unsure (1)..(432): unsure at all n locations
tggcgcgcgcggttacgtgtcctaaggcgtggcttcctcttcacattgatgggatggcccaagggaatcacggcgacacggtagaaacgctaggccacgcggcggagaaccgtcgaccggagttggagaagaaacgcaagccgcggatgtgctggcaggccttctgcgcggcggtttccggtgagggcacggngtcgccgcttaaccagaggtcgccacctcggtaactctttgccatggtgccaagaaactttactgcgaccaccgacgaccggtcacgccgcggtggtgttcttatcgccagcgaggtccaagaccttatcctctgcgcgatattttcagatgacggcaaacagtgctctgaattcaaaaagagcttgactgacagagcaacttggagcacgattttctctcaattttcagtggtaacat

SEQ ID NO: 54443 - DNA, 394 bp, Zea mays
tctatcatcacgtcgagcagaattatgaatagacctgacgtgcctcgggtgaaatcttcctccgaagcccctgggcatttcagaaaacccgaacgcttcctcccttctctgacgaaagacatcggcagcccgaatatacccgcccatcttctggagcagctcctccaaagcctgcggcggcttcctggaaaagcattgcaccgaaggtcccggccgaagcccctcaatcatggcctcaatgacaacttcattgggcactggtggcgcctgtgccctcagacgcagaaaccttctgacatacgcctgaagatattcttcgcgggcctgcgtacactggaatagagcctgaacggtgaccggctctgccgaaaccccgaaagccggcatcaacata

SEQ ID NO: 54444 - DNA, 423 bp, Zea mays
tgattagagagagattcgttgtgttcattttagctcttgctcttggattgcttcttttctttctcgttcttattgtgatcaaactcaattgtaaccgaggcaagagacgccaattgtgtggtggtccttgcgggaacttcgtgttccgtttgattgagaagagaagttcactcggtctaagtgaccgtttgagagagggaaagggttgaaagagacccggtctttgtgaccacctcaacggggagtaggtttgtaagaaccgaacctcggtaaaacaaatcatcgtgtctcgctctttatttgctcacgatttgttttgcgccctctctttcggactcgtttctatttctaacgctaacccggcttgtagttgtgcttaagtttataaatttcagattcaccctattcacccctctttaggcg

SEQ ID NO: 54445 - DNA, 445 bp, Zea mays
  unsure (1)..(445): unsure at all n locations
catgcagcttctaagggagaacacaatntgggtttattatttgtttatttcgagaaagacagggcttatagcgcatgtcaagcagggaagcaagttggcacccaccatcaacacaagaacatgatggtaatggataggccacttgaactactccacatggatctattcggctcgatcgcttacataagcatcagcgggagtaagtattgtcttgtaattgcggatgaatattctcgcttcacttgtgtattcttcttgcaggagaaatctcaaacccaagagactttaaagggattcttgagatgggctcaaaacgagttcgaattaaggatcaagaagataagaagcgataacgggacggagctcaagaactcacaaatagaatgctttcttgacgacaagggcatcaagcatgagttctaatctccctacacaccacaacaaa

SEQ ID NO: 54446 - DNA, 433 bp, Zea mays
  unsure (1)..(433): unsure at all n locations
tcnaaggtgacattntgatgctggcttggcaactattgttataagataactctacatacgacaaactggattcccaatctctgtcgaaggtcagcacactagctctcaacaaatcttcaaggattttattgactctntctgtctgccaatctgactgggggtggtaggcggagccgaaatttagcttggtgcccatggcttgctgaagactcaaccaaaattatgaggtgaactgtgttcctctgtctgacactattcttcgcggaatgttgtgcagtctgactatttctttgaggtacaaccgagcgagggtggctcctccgtaagtagtctatactggtatgaagtgggataccttggtaaggtagtcaattatgacctacatggaattatttcanttttgggcccggngcagtccgatcacgaaatacat

SEQ ID NO: 54447 - DNA, 438 bp, Zea mays
  unsure (1)..(438): unsure at all n locations
agcttaagacataaagaataaaaattgtgtttatggtccactttgnactacagctcttaattagaggtggggtctgtcctcacggttatttttgttggctaaggggtggttatttagttatgattttctaaagtttaaagtcaaaaaggcactttctactacactgttatttgaaaaatgtcaaacagcagatttcatatttttcctaagttcttaataacaaaacattaactatcccaagggtgggggtgttttcaccttggggttatttttgtagggtttttctaagtttcccttattttattaaaataaaaggtatcctacttattntatactaaaacagggtatgatatatttttcaagtgaactaccttgaataagtatcctaacaaaaataggggtgccctctggttcattatttaaatcacattntctatt

SEQ ID NO: 54448 - DNA, 436 bp, Zea mays
tgtgaaggttcttcatccccacatgtgctaagcggcgatgtcacagccagcccatgctagtcttagctattaagcatgcatctagaccggcttcttcttttgcaaaatcaactaaataaagtttgccgtctaatacacccttaaaagctagtgaaccatcacttcttctaaagacagacacatctatatttgtaaatagacagttatatcccatattgcataattgactcacagatagcagattatatccaagagactcaactaaaaacacattagatatggagtgctcattagaaattgcaattttacctaaaccttttaccttgccttgattcccatcaccgaatataattgaatcttgggaatctttattcttgacgtaggaggtgaacatcttcttctcccccgtcatatggtttgtgcatccgctgtcgat

SEQ ID NO: 54449 - DNA, 378 bp, Zea mays
  unsure (1)..(378): unsure at all n locations
gcgaaagcaacgaatgctgtggtgacttcacacctactcgtctgtttatatagtactgcaagtaagaaggcgaagcgccaggatttttacaccaagcggacacccgcttgcactcgctgtgtggtggaccgcagggacaaacagtaactctgcaaggggggaccactacncgctgggaaactgaatcgtttctcgacaacgagctcagggaaggtgttttttggaccttccgctccccgaaggttaagagactnttttcacggatcaagctcgttacgaaaaacgatctatcaccgcgaaaggcgctactgttgggtctatgcttcgtcgccgaaggtcttctaagaagaagcggctttcggctgaagctgtttgtat

SEQ ID NO: 54450 - DNA, 111 bp, Zea mays
ttgtgtggagttgggagaggaattgatttccctcggtgtgctttgcaatgaatgctagctcttgtatagtggttggaagctggaaaacttggatgccatgaatgtgggggt

SEQ ID NO: 54451 - DNA, 431 bp, Zea mays
catgcaagctttcctcaaaacaactttgtttgtgttttatcattatcaccttaaacccttaacatccctcgatctttaccttgatgtttatcatgcactcatattataaagcttcctttcaagagtgttgccttacctatccctgctcttgtttttcccctttttcctctgtcgcatggcaagtcttgtcttaactcgatcttttgaagtgctttcgcctattacccctttacctttgtaataactaaatctttccactatgctcttcttatgcctaccttttgaattatcatctttctcatcttgatttgagaatggtgtttacctaccctgcccttggttgcattttctcccttgagattacaatccttgctgtaactccacctcttattgcgctcgtgtccctatcctacacgccttgttcttctcct

SEQ ID NO: 54452 - DNA, 425 bp, Zea mays
  unsure (1)..(425): unsure at all n locations
ntagatccattgccttgctacatagcatgttctgactntataatgcgctactaggacagcagcggctcctgcgccgaaggttccccaagaaccatcatagaagactgtccatgcttcggtgtcttttgttacttcttcctgagcccctagcgtccaatcagcgatgaaatctactaatgcctgngactaaattgaggacctttgtacatagtcaatagaaaattcattgagctcggcagcccattttctgatcctcccagtagcttctctattcctcattatgtctttcaaaggttgcgacgaaggaacaattatatgatatgcttgaaaataatgccgaagcttcctggaggccatcaacacaacatatagcaccttcaccaattctgtataattnttctttgataagcttagtactttgggga

SEQ ID NO: 54453 - DNA, 446 bp, Zea mays
agctggaggcgtcgattggttgtcgacttggtgtatactccttcttcttctcctctggtgctttgaatgcaacgggttgagcttcggatgtggtggcatcatcaagctcgttgatcttcctcgagccttcgatcatgcattcaaagctcacaaaattcccgataacttcctcgggggtcattttggtatatctaggattaccacggattaattgaacttgagtagggttaaggaaaataagtgatcttagaataaccttaaccacctcgtggtcatcccactttacgctcccgaggttgcgcgcttgattcaccaaggtcttgagccgattgtacatgtgttgtggctcctcccctttgcgaagccggaaccgaccgagctccccctcaatcgtttcccgcttggtgatcttggtgagctcatcaccttcatgcgcggtcttgagt

SEQ ID NO: 54454 - DNA, 437 bp, Zea mays
  unsure (1)..(437): unsure at all n locations
tcacaaattcctccaactcaagtccggacgacaattcaaattattatccagtggatcagattctaggtgatataagcaagggagtaacaacccgctcacgtttagctaatttttgtgagcattactcgtttgtttcttctattgagcctttcagggtagaagaagccttgcatgatccagactgggtgttggccatgcaagaagagctcaacaacttcaaaagaaatgaagtgtggagcctggtgccacgtcgaaagcaaaatgttgtgggaaccaagtgggtgtttcgtaacaagcaagacgaacgcggtgtggtgacaagaaacaaggctcgacttgtggcaaaaggttatgctcaagtcgcaggtttggattttgaggagacatttgctcctgtggctaggctagaatcaatttggattntattggcctatgct

SEQ ID NO: 54455 - DNA, 425 bp, Zea mays
agcttaagcatgtaaaatgctatagatgtaatatttattatattgtatgtttctagacttagtacattggttttgtggactaatatacttgtctaagtgttagaaacagaaagaagaagaaaaggaaagaggtgcgaaaggcttggctgtgtacagccaagacttagttcagtctggcacaccggactgtccggtggtgcaccggacagtgtccggtggtgcaggctgaactctggcgaactggccgctctcgggaattcaccggcgacgtacgactataattcaccggactgtccggtgtgcaccggactgtccggtgagccaacggtcggccgcgcgatctgcgcgggacacgtggccgagccaacggctagatggaggcaccggactgtccggtgtgcaccggacatgtccggtgcgccaac

SEQ ID NO: 54456 - DNA, 438 bp, Zea mays
  unsure (1)..(438): unsure at all n locations
ctggtcattntattgctaactgtcccgacaatgatagtgatttgattttggaacaagagggaaaagaagaagaactataagaaggcaaagggcgaggcgcatctatgcaaagagtgggattcggactgctcctcttctgactccgacaatgaaggactcgccgccaccgccttcaacaagtcatccctcttccccaacgagcgtcacacttgcctcatggcaagagagaagaaggtaatcactcgtaatgatgtcacttataattcttctagtgacgatgagtctagtgatgatgaaatagattattctagtttgttcaagggattggatagaaataaaattgataaaatcaatgaattgattgatgccttgaatgaaaaggataggcttttagaaaagcaagaggatttgttgtatgatgagcatgataaatttgta

SEQ ID NO: 54457 - DNA, 318 bp, Zea mays
  unsure (1)..(318): unsure at all n locations
agcttaaaccactaaaagccncgtatgaccaagattattcttgttactcagtgatttagnntttcttcctttagcataatgttattaaatcctgcataatcatgacatacatattcattgccttttgatagactgtaacctcgctgacggagagtacgtcctcgtgccggagcaaggagctgctcatgaggtagccccggatccagcacccgagcctgcaccaaaggatctgcctgccacagccttggaaggcaagccccggcttatgcataacctgttatttatgctcatttaatatacttaatgattgtacgattg

SEQ ID NO: 54458 - DNA, 398 bp, Zea mays
  unsure (1)..(398): unsure at all n locations
ctgtgtatagattaccgccctcttaatgcggnaactatcaataacatgtatcctttgcctcggattgatgttctttttgaccagttggtcggggccaaggtgttttccaaaatagaccttcgctccggctaccatcagatcaagatacgagcaagcgatattccgaagacggcattctcaaccagatatgggctatatgaatttttggtgatgtcattcgggctgacaaatgcaccagcatatttcatgtatctgatgaattctgttttcatgcctgaattggataaatttgtagtggtgttcatcgatgatatcttggtgtactcaaaaaacgaagaagaacatgccgggcatttgcatgtagtgcttcaacgtctgcgagagcaccacctttatgc

SEQ ID NO: 54459 - DNA, 450 bp, Zea mays
agcttgtgaagattcttcatcccaacatgggcttgtcggtgatgctagagccaacccatattagtcttaacaattaagcaagtatcgagttcagctctattaaaatcaactaagtatagctgaccctctaatactcccttaaatgctaactgaatcatcacttcttctaaagacagcaacacctaatctgtaaaaagatagttgtaacccattttgcataattgagaacctaagcaagttataatctagagaatctacaagaaaaacattggaaatagagtggtcagtagatattgcaattttaccaagtcctttgaccaaaccttggtttccatccccaatgtgatagctctttggggatcttcatttttctcgtaggaggagaacatccttttctcccctatcatgtggtttgtgcacccgctatcaattatccaacttgagcccccg

SEQ ID NO: 54460 - DNA, 441 bp, Zea mays
tctccttgtcgtcatcaaccttgacgtagaaccattccgatttccattctgccgaccacttgcttcgatagctgatgacaggaaactttgtggttttccgataggcaaaattatagcaaccaaagttatcatgcaatccatcttttctagccttcgtctgataatgcagctcatgaactcgacaaaagctgtcggcaaacggctccaccgcctggcttcggagggcccagatatagacgctaagcctaacgatagcgttaggagtcagctgatgaaagtagatcccaaacctcttcaatacatctgcaataatcccatgcagggggaatctcaacccagcctttagaaagctcttgaaaatgactatttcatccttctctggcttcggggtagtttcttcccccccgaagcgtagtagcttcttctgactttcactgaaat

SEQ ID NO: 54461 - DNA, 419 bp, Zea mays
agcttgagtcaaccattttgcaaaagataattgatgctcttagggataatctgggcatgaagcacatacgagagaaaataagggctggaacagccaaatgtttcaaggaagatgatcaaggtgtgttatggtttaacaaccgcatagtagtgccaaaggatgaagaactccgccagcaaatcttagatgaagcgcatcttagtcgctattctattcatccgggaagcactaagatgtaccaagatttaaagcaacattactggtggacgaagatgaaaattgaaattgcacgctatgtggctaagtgtgacacttgcagacgtgtcaaagccatacacatgaaaactgctggtccattgcaatctttgccaatcccaacatggaaatgggaagacataagcatggacttcattgtggga

SEQ ID NO: 54462 - DNA, 446 bp, Zea mays
  unsure (1)..(446): unsure at all n locations
actcaagctttaagggagagcacatnttgggactaaccaatgttcattttgagaaagacagggtttgtagcgcatgtcaagcatggaagcaagttggtgttcatcatccacacaagaacatcatgacgaccgacaggccgcttgagttactccacatggatctattcggcccgatcgcttacataagcattggcgggaagaagtattgacttggaattgtggatgattattctcgcttcactagggtgttctttttgcaggataaatctcaaacccaagaggccttaaagggattcttgagacgggctcaaaatgagttcggcttaaggataaaaaagattagaagcgacaacgagacaaagttcaagaactctcaaatagaaggcttccttgaggatgagggcatcaagcatgagttctcttctccttacacgccacaacaaaat

SEQ ID NO: 54463 - DNA, 440 bp, Zea mays
  unsure (1)..(440): unsure at all n locations
agctttgccaaatatggcgcataattattctttttatatcnttccgtactttcagggcattcttcacataaaaccattctgtcatccagtcgccgggccatctcttccgaaaggttggcacgggacagcttgacccataccgagaaacgaaactgtagcagccaaaattattgtgatactgttccttaccccaaggttttgtctcgtatgataattcgtgtatatttcagaaacttttcgcatcaggttccagaccttggcttctcacggcccacacgaagatattcagccttatgattgcttcgggggtaagttggtgaagatagactctcaatattttcagcacctctacgacaaagttgctcaggggaaatctaagtccagctttcaaaaagcttcggtacactacgacttcattttcttcacggctcggacaagtc

SEQ ID NO: 54464 - DNA, 387 bp, Zea mays
atagccacagtcttcttgaaggtcatgtcatgacgatgctagcttgatggaactctgtatataagcattattgtcataaaaataaaaatgaatgtacgactattgttgctccggtgcatagaacggcaaatagccatgtacgacgatagatgttcctcttgggttgtactgatactctaaaatggtattgtattttgcttgtatattctcaagtaacaataatgaacatcttttctatatgtttcagctgttatcgcagaaaaatactgagtgggtcttgttcggtaattcccatctcatatatggattattggatgggactagaaaaaattggaaaatgattttaacttgcttagaatttaaacccaattaattctcacaaatcta

SEQ ID NO: 54465 - DNA, 410 bp, Zea mays
agcttatgaagattcttcatcccaacatgttctattctgctatgccagagccaacccatgttagtcttagcaactaagcaagtgtcgagttcagctctatcaaagtctaccaagtatagctgaccctctaacactcccttaaatgctattgaatcatcacttcttctaaagacagcgacacctacatcagtgaatagacagttggagcccatttgacataattgggaaacagaaagcaagttgtaatctaatgaatcaacaagaaaaacattggaaatggaatggtcgggtgaaatagcaattatacccaaacctttgaccaaaccttgatttccatccccgaatgtgatagctcgctggggatctttgtttttctcatatgaggagaacatattcttctcccctgtcat

SEQ ID NO: 54466 - DNA, 439 bp, Zea mays
tcaagcatataacattcaagttagcaaaactattctttctatgaattcgtcagagaaaagtgatgaattcacttgttttcagtgaagtcccaaagtaaaaaaaatggtaagaattgttggcatagagcgtattacctcttcaaggcttgcattcttcagcatctgaaaagtacggccaaagatacgatcaacagtaagagttacaactgaaaatttataagtgaatcacaagttccatacatatcagaagagagctgccacagtctcaccatcagatcgtcagacgctgctttgaagctccggcttcctaaagatgatacgctagagtcatctgaacctccgcagctaggtaatgtgtagacaaccttgagcttcatttcctcgattaccttatcagcttccttgttgaactgcgcacatgtaatgtaaccgtgtatag

SEQ ID NO: 54467 - DNA, 434 bp, Zea mays
  unsure (1)..(434): unsure at all n locations
agcttctaaaggagaacacattttatgtttattttatgtttattgtgagagagacaggatttgtagcgcatgccaagcagggaagcaagttggcactcatcatccacataagaacataatgacaaccgacaggccactggagctcctgcacatggatctattcggcccgatcgcttacataagcatcggcgggagtaagtactgcctagttattgaggatgaatattctcgctttacttgtgtattctttntgcaggaaaaatctcagacccaagagaccttagagggattcttgagacgagctcaaaatgactttggcttaaggatcaacaaaattagaagcgacaacgggacggagttcaagaactctcagattgaatgcttccttgaggaggagggcatcaagcttgagatctcttctccctacacgccac

SEQ ID NO: 54468 - DNA, 428 bp, Zea mays
tgaactcggcttatctgcgatgtctaaggatcatcttgtttacagtcttgcttataacagcttgaaggtgtgtatgttttagtttgtcattctataatgaaacatttctgtggtttttcttaccctcatttcatgcttatttgtcgtttttcagggcttgattttgagcaaggctttaaaagctcaaaaagatgcagaagatgagagctgcaaaatagcccttgggaaccttcgttcagaagttatatcattgagaaacgaagctcttgagaaggatatggtattactttccttagtggagaagctaaaatctagcgaggctagtcttgctgcttaagccgaagctcatgaagccaaagtggaggagctgaaaaagaaagttgctgaagctgctaaaaaatttgaattgaagcagtgaaacatgaaat

SEQ ID NO: 54469 - DNA, 428 bp, Zea mays
agcttctgacttgtgggcccgcctgtgtgtcctgtgttcaccggacatctattgttccttgtccggtgtgccggagtgggcgcgcctgccatctgcgcgcgcagagcgcgcattaaatgcgcggcagagagccgttggcgcggagaagaccgttgctccggagtcgcaccggacagtccggtgcacaccggacagtccggtgaattatagcggactagccgttgatgtttcccgaagctggcgagttcctgaggccgacctcccatggcgcaccggacactgtccggtgtacaccggacagtccggtgaattatagcggagtcgcctctggcaattcccgaaggtggcgagttcgagctggagtcctctggtgcaccggacactgtccggtggtgcaccggacactgtccggtgtacaccggacagtc

SEQ ID NO: 54470 - DNA, 437 bp, Zea mays
  unsure (1)..(437): unsure at all n locations
taaaggatactattcaactaaagtaagatgaagttgttttattgccaaggtatgaaaatttcctctccttcagttgttttagtattctacccttagtaggatgtaccatagtataggttaaattccatgcaatgtaaaatgttcaatagtgcatataactttgacattaactatatgtgtgcactaatttaaaggaatttagtgtatcctttntggtttcaataatgatgattcatttgccatccacatataaggattatcatttgtgaaaccctcccttgtgtttctaatgttctcttttctaagtgtttcaataaggtccttccaagtgctttcaagatggattcaaaatctatggatataaaagtcttggttctttcaatcattgagtttcaataagtctcatatcaagtatgatcaaatcaagaaaagatgaa

SEQ ID NO: 54471 - DNA, 438 bp, Zea mays
agcttgtgaagattcttcattccaacatgtgctattcggcgatgccagagccagcccatgttagtcttagcaattaagcaagtgtcgagtttagctctatcaaaatccaccaagtatagctgaccctctagcactcccttaaatgctactgaatcatcacttcttctaaagacagtaacacttatatctgtaaaaagacagttgtagcccattttacataattgagaaacggaaagcaaattgtaatctaaagaatctacaagaaaaacattggaaatggagtggtcaggagatatagcaattctacccaatcctttgaccaaaccttgatttccatccccgaatgtgatagctcgttggggatcttggtttttctcgtaggaggagaatatcttcttctcctctgtcatgtggtttgtgcacccgctatagatgatc

SEQ ID NO: 54472 - DNA, 431 bp, Zea mays
  unsure (1)..(431): unsure at all n locations
tcatgggttcaccagggtctacggacacattntggtttgggcagaacaaggcccgaggagtgggtcgacggtgagggggtcacggcggtgttcttcagagcaagcacacgttccggtgaaagcttttggcttaagttcgattggttggtactgggagcaatagggggctaatagcaagcaagaacatgaaacaattgggtaagtactcactcgaggaaggctggccacggagatgttcttcgcggcggagttaagaacaagggagcgagggatttggaggatacgtgggttttccggtgatcctgagtcgggcgcttagtggctgagaggtggaatacggtgaagaagcaacgctcgccctcaatttatagccaaccggccgcaatcggatgagcttcaccggctgtaatcgtgctggcgagcttcacccg

SEQ ID NO: 54473 - DNA, 448 bp, Zea mays
gcagcatgcaactaaattcctgcagttatgcatccgtgtctttatctttttatcgcagcggatgcacaaaccacatggcggaggagaagaacatgttcaccttctatgtcatgaacaaggattcccaggatacgatcatctttggagatgggaaccaaggcactgtcaaaggcttgggcaagataaccatcaccaacgagcactccatatcgaatgtatttctagtatagtcgcttggttacaaccttctgcctgccattcaattatgtcacatgggttacaattgtctttttacaaatgttgatgtatctgtctttagaaggagcgatggttcattacctattaagggtgtattacacgacaaactctgacttacttgatttttctaaagagcatgccgatctacatgcatcgctaatacctaacactagtatgggctgactgtggc

SEQ ID NO: 54474 - DNA, 423 bp, Zea mays
cactgttgaactgtcggactagctccgaatcgttctatgcggagcaatgtaacgcgggacgaatgtataatgtctgtcatcggctactcgtgcgaagctgtgttgccgtatggattacgatacgactctcgctcctatagatatgatcagacttcagatgatccttaatcgaagacgctaagagctctgcatacgggggccttttatctcctttttgatcgatcatgatgtgtgatgtttttacgatgaagaaacgtacattgatttggaattatctcaacccaccgtgttggatgaatggtgatagctgctacatctattagcaatctgcttagagcttaacgctacataacagtgctcaacgtaaggcttgcacgacctctgttgtggacgaagggtgggacacactgttgctttctgtat

SEQ ID NO: 54475 - DNA, 462 bp, Zea mays
  unsure (1)..(462): unsure at all n locations
ttaatcacctgcagctgcagctangcatgagctcatatactngantcttttatttcttttgctagatngcacacatagctcatttacactttngatcatatatgctatgactaatgtgttttcaagtctatttcaaaccaagtcatatgtgtattgaaagggaattggagtctccggcgaagacaaggctttcactctactctactactcatccttcgccatcgctccaataaaaggaccttgtcttttggggagagagtaaaagcccaaagcaaaaggaccggacttcgtctttggtataatcctaactcatttacttatgaccaaaggggaagatagtactcatgggctctaatgattccgtttttggcgattaatgccaaagggggagaaagtaagagcccaaatcaaaaggaccgcaccaccaccaatttcaaaacttagtgttttccaagaagtatt

SEQ ID NO: 54476 - DNA, 434 bp, Zea mays
  unsure (1)..(434): unsure at all n locations
ggtccaccatgctcttctcggtaggggactcgntgctggctcctgacctttgcattgtgctcgtgccctatcgccgccaatagggtgtgtcggttcgacactatctggcgatgtggagatataatcgccattcatgttgagacgagatcgttttctcgcatcattggagtcgtcaccgtgtcgagtgcaccacttgggtcgatgatgaagagcacactacatgtggtctggcttgaagtctgtttcactagtcctgttgcggaagcacttctttgccgcttcaagtagcatagtatcatttgatctgcttggcctggccgtgaacaatctgttgtagatgtcgttaaggaggatgagcttgccgttgctcgtggaccatcaatccttagctgtttggcgatacggtggcaaggaggtttggtggtagagttgta

SEQ ID NO: 54477 - DNA, 439 bp, Zea mays
  unsure (1)..(439): unsure at all n locations
nggacccctgngtggaagctctgactctgatgacgttcttgctgttgcgctcggaggacctggaattntctcttgatgtgccctttttcttcctcttttgctctttccacttgaatagctttgttggaaaggtgatagaagctgtggaagtcttggctggcgaggatggtcttaagctcgggtcttaaccctctcagaaaacgggccattttcctggcctcggtgctgacatcctcgggcgcgtagcgggccagctctgtgaacttgtgcacatattcactgactgttctcccgccttgagttagctcccggaactcatcctccttgagttgaactatcccctcgggtacgtggtgctcacggaaggctgcttcgaattctgcccatgtagcatctctgacggcttcactgaaagtgtcccaccatgctaaagccattc

SEQ ID NO: 54478 - DNA, 449 bp, Zea mays
agcttctcctgtataagcgccacacttactgcatatgtgctaaactgccacatacaatagcagaggagcccctggcgtgggtggagttagcgttgttagatctatcaggtattgcttcagctcttcgaaggctttctgctgagctgatccccattgaaagactttggccgacttcaacacttcaaagaatggtaaatttctctctgctgatctaaatatgaatcgattcaaagatgccagtcttcctgtcagccgttgagcccccttctttgtgcttggcggctccatccgaagaatagcttcgattttgttcggattagcttcgatccctttcgttgaaactagacaaccaaggaattttcccttctttactccgaagacacatttctctagatttaattcaaggccagtgttgggggccttcggcttctgaaggtcctcaaaaacat

SEQ ID NO: 54479 - DNA, 455 bp, Zea mays
ggacctataaaactcaagctggcaaatcttctgctaactcatcgggtagttggtcgacaatagctgcatggacatgctccttctgactcaaggcatccacaaccagattcgccttgctcggatgatagtgaatttctaagtcataatccttgatgagctccaaccaacggcgttgcataaggttgagatccttctgagtgaagatatactttaagctcttatgatcagtgtagacttggcacttagtccccataatataatgcctccaaatcttgagagcatgcactacggctgccagttctaagtcatgagttaggtagttcaactcatgtttccacaactgatgagacgcgtaagcaataacatgtccctcttgcataagaacaaatcccaagccctggcggcatgcgtcacagtatatttcaaatcccttctgtagatcttgtaacacccct

SEQ ID NO: 54480 - DNA, 419 bp, Zea mays
agctttgggtcgtaggcgactgcggcggcgatgtttgttgtctgttatacccatgcccgagaggaaggctagcacggcgtccggtcgggagggtgacttgaggcgcgagagcaccttgtaggccttgagcgcctgcgccgcggttaagtggcatgcggcgacgatgtagtcctctacggcgaatggggcagcgcggctagccgagtctgcggcggcggaggaaaatcgagtcgtggggagacggtactggcggagagtcgtgcggagactaacggagagagggaggggttgtttctgtataaggagcatggacatggctgtcggcgccggcgccggcggagactaaggacactatgctaagctccgattcgatgaggaggagacgaagagagagacctatggcgcggagcagactaccg

SEQ ID NO: 54481 - DNA, 450 bp, Zea mays
ctctatagaaactcaagcttgccttcgcttaagtctatcatccgcagtccaacggggtctttgtcttgccattgggaaaatcttcacagctgtcaaaaagatgctcctcgatgaaaaaaaggcagatggaccgatttattaccggaggcagtctgggcgctaaacacaactgagtgcagggcgaccgggttcactcctttccgccttctatacggatcggaggcaatgaccccgcaagaaataaagcatgggtccccgcgtacagttccgtcagccgtccccgacgtggacgagccaacttcaaaagatctcattgacggagaccgggtcttcgccctacaggccctaaacaaataccaagcccagaccaaagcatggcgcgaccacgcagtcatcccgagggagttcagcgagggggacctcgtactcgtccgaacagctcggacggag

SEQ ID NO: 54482 - DNA, 435 bp, Zea mays
agcttacccttgaagttggaacaagctatatattgatccagtttagtcgctcagtcaaaaggcccgaccgtgagaatcaaagcactgcccctgagtcaaagtaaacaggaaaagaggacagaaggagttattaccatacagagaggcaaagattcttggaaccagagaccacaaacatcagggtcatcgaccgcaccactcacccgtgcccccgcacgcgtgcccgcctccatgcgcactaccaccgccccacgcccccttttgcagcgcactaccaccgccccacgccccctttgcagcgcacccaccgtcgccatcatcaccggcaacaccaggccccctccccttgtcgcacccgctgccgcgtagcacctgctccatcaccgccacttccgaaccgagcacccccgctcgcctataaaaccccccaccagc

SEQ ID NO: 54483 - DNA, 433 bp, Zea mays
tatgaagattcttcattccaacatgggctagtctgcagtgccagagccaacccaagttagtcttagcaaccaagcaagtgtcgagttcagctctatcaaaatctaccaagtatagctgaccctctaacactcccttgaatgctattgaatcatcacttcttctaaagacagtaacacctacatcagtaaatagacagttgtagcccatttgacataattgggatacggaaagcaaattgtaatctaaagaatctacaagaaaaacattagaaatagtatggtcaggtgatatagcaattttacccaatcctttgaccaaaccttgatttccatccccaaatgtgatagctcgttggggatcttggtttttctcatatgaggagaacatcttcttctcccctgtcatgtggtttgtgcacccgctgtcgagtat

SEQ ID NO: 54484 - DNA, 444 bp, Zea mays
  unsure (1)..(444): unsure at all n locations
agcttctaaagggagaacacattttatgattattttatgttcattntgagaaagacaggatttgtagcgcgtgccaagccgggaagcaagttggaacccaacatccacacaagaacatcatgacgaccgacaggccgcttgagctactccacatggatctattcggcccgattgcttacataagcgtcggcgggagtaagtattgtcttgtaatagtggatgattattctcgcttcacttgggtgttctttttgcaggaaaaatctcaaacccaagagaccttaaagggattcttgagacgggctcaaaatgagttcggcttaaggatcaagaaaattagaagcgacaacgggacggagttcaagaactcacagatagaaggcttccttgaggaggagggcatcaagcatgagttctcttctccctacactccacaacaaaatg

SEQ ID NO: 54485 - DNA, 410 bp, Zea mays
tgtgtgtctcaaggtacctggcctttgcctcatggaggacttcgctgacgtagtagactagcttctggatggttcgtacccatgtggttggtctcgagtcctcaaaatcctggccttccgtaaacatcgtggtggtcggaccaccacctcctcctaggggaactttttgactcccctggggatgttgtgccgtcctttcggcgaccagcaccatgctcaccgcctctatagccgctgcaatgtataagtacaacggctcccctggctctggagctaccactattggtagggacacaaggtgctgcttcaactcttgaaaggctcgttctgcctcttcggtccaagagaatggcccggacttccgcaatagcttgaagaagggtagtgccctctcagctagtcttgagatg

SEQ ID NO: 54486 - DNA, 433 bp, Zea mays
  unsure (1)..(433): unsure at all n locations
agcttcggcccaacagcagagttcttttctgncttcatcgccaaggggcagaggcgccaggggcttcgggggaaggtttggagaccagccaagaaaaatatattgcctattctgtggtgaagacaagggccatactaccaggatgtgccatgttaccatccagaagcagaaggaaatagcggaagcagcagcgcaacagagtcagccgaagcaggtcatgcatactgcttcgtatcactcaccttatattccagaatatgtaggcaaccaccctgcatcttctgttgcttcgtcgagccaatcccaagcatcctggcagcaacctccaccgccaccaccgatccaaagaggtcagcagccagaagggagtcagcgcactaaccttcagcgggacttcagagaggagtccaaagctcgcatagtcaatagcact

SEQ ID NO: 54487 - DNA, 425 bp, Zea mays
tctccaccatgtcgctgctagccaagttgttgcagctacctccatcaatgatcaaacgacatgaacgctccttaatgacacactttgtttgaaacaacgtatgtcgctgattctgctctgccttctccatttgtgcactaagcacacgttgtacaatgaggctctcataatgctctgcatcatctgcaccaatctattcttcgggtggttccttagtgcctgcatcatcaaccgcaagcaaagcaagtgtagcttcatccaaatcactggcagaggaatacccaccatcgtcttttaccaccaaaatacactgattaggacaatcacgttgcacgtgtccatagcccttgcatcgataacacataacatctcttgttctacccgtggaggctactgaagaggcactacctgctggtttctgggca

SEQ ID NO: 54488 - DNA, 449 bp, Zea mays
  unsure (1)..(449): unsure at all n locations
tgcaagcttctaaagggagaacacaatttgggtctattttatgttcattttgagaaagacaaggtttgcagtgcatgtcaagcacgaaagcaagttggctcccatcatcctcacaagaacattatgacgaccgacaggccgcttgagctactccacatggatttattcggcccgatcgcttacataagcatcggcgggagcaagtattgtcttataattgnggaagattattctcccttcacttgggtattctttttgcaggaaaaatctcaaacccaagagaccttaaagggattcttgagacgagctcaaaataacttcggattaaggatcaaaaagataagaagcgataacgggacggagttcaagaactcacaaactgaaggctntcttgaggatgagggcatcaagcatgagttctcttctccctacacacctcaacaaaatgg

SEQ ID NO: 54489 - DNA, 435 bp, Zea mays
ttaccaaatggacgtgaagagtgccttcctcaatggaccattcaaggaagaggtctacgttgagcaacctcccggctttgaagacagtgagtaccctaaccatgtctataggctctctaaggtgctttatgggctcaagcaagccccaagagcatggtatgaatgcctaagagatttccttatagctaatggcttcaaagtcggaaaggccgatcctactttatttactaaaactcttgacaatgatttgtttgtatgccaaatttatgttgatgatattatatttgggtctactaacgaatctgcatgtgaagaatttagtaggatcatgacacaaaaattcgagatgtcaatgatgggggagttgaagtatttcttaggatttcaagtaaagcaactccaagagggcaccttcatttgccaaatgaagtatac

SEQ ID NO: 54490 - DNA, 440 bp, Zea mays
agctttatgcaaatcctcaagcaacggattgggtatgactacaaacctcgttccaagaaggtttgctacaagtgtggtaagcccggtcacttcattgcaaaatgtcctatgtctagtgacagtgacaggggcgacgacaagaagggaagaagaaaggagaagaagaaatactacaagaagaagggcggcgatgcccatgtttgtcgggagtgggactccgacgaaagctcaagcgactcctccgacgacgaggacgccgccaacatcgccgtcaccaagggccttctcttccccaacgtcggccacaagtgtctcatggccaaggacggcaaaaagaaggtaaaatcaaggtcctccaccaaatatgaaacatctagtgatgaggatgatgataaaaatgaggaggataacttgcgcattctttttgctaaccttaacat

SEQ ID NO: 54491 - DNA, 434 bp, Zea mays
tgtccgcccgcattcaatgcgggtggctgaggcatgccctactgcgcacagggcatgggcaggcttttgacaagccgtgcatgctcgaatgaccgttccgcacgttatcgaggcgggcggttgtgtgtccgcgccgcgcacatgggctgcacagtaagccgcgtgttaaagaggcaggcatctcaatgtcgcgcgcgtgagcggctgcagcgccgccccaaggcgacagctcgggtccatcaccattacctcctacgcacgtcagccaagccggcgagcccttcttacgtcagcataccagactccactctgtagccgactcgagcgggcaaatagcgcagaggcacacgtggtcggaagatctgcacggcagccgagggagaagatctttgtccgtggtaacatttaatactccatgctgtacatttaatact

SEQ ID NO: 54492 - DNA, 410 bp, Zea mays
  unsure (1)..(410): unsure at all n locations
agctttagggtaaaagtcatgaaatatccttattattaaactngaatcacttttatacccctgagataccagaaaccctaattggaaccctggaaaaccctaaacaaaaccctaggggcttatatgcaaaattagtccacttttgggctaaagtgcaaaaaccaagtcaaataggtttcttaagtcccttggttcacaaaaatgtgtacttgaaagcaaagcccaaggttttggacctaaatgcaaattggacctcatttgagttttgctctaagtctgaaaatcagtgaatgggctcaactttggggctttgtaacttacaaagtatagggtttttaccctaggtcaccacatcaaagttgaagacccataataggagaacaactttgcttaaagttgtaagcttagtt

SEQ ID NO: 54493 - DNA, 414 bp, Zea mays
  unsure (1)..(414): unsure at all n locations
tgtgaaggttcttcatccccacatgtgctaagcggcgatgccacagccagcccatgctagtcttagcaattaagcatgcatctagaccggcctcctcttttgcaaaatcaactaagtaaagtttgtcatctaatacacccttaaaagctaatgaaccatcgcttcttctaaagacagacacatctacatttgtgaatagacaattatatcccatattgcataattgactaacagataacaaattatatccaagagactcaactaaaaacacattagatatagagtgctctgatgaaatagcaattttacctaacccttttaccttgccttgattcccatcaccgaatattattgaatcttgggaatccttgtttttgacataggaggtgaacatcttcttctcccncgtcatat

SEQ ID NO: 54494 - DNA, 436 bp, Zea mays
agcttcaacctctatttcattgattattcttacacttcatgaactcccacctttggtgagttcatgccacattattccccacaacttgttgagcgatgaacgtatgtgagctcactcttgctgtctcacacccccccacaagagaagaacaggtggatcaggaggagccacaaggcgaggagtatgatctgatctaggtggcgtttctcagttgacattggcgccgacgatccttagttcgttttatggctatacttttattttgtaataagtcttccgctatgtaataaatactctgatgtattatgacatttatctctatacactctgttattatatatgttgtcttcttggcgcatgtatgagatgcacccggctttgtcctttataaccgggtgttacagaagtggtatcagaggaaatgttgactgtagga

SEQ ID NO: 54495 - DNA, 430 bp, Zea mays
  unsure (1)..(430): unsure at all n locations
tatgaagattcttcatcccaacatgggctagttggcggtgccagagccaacccatgttagtcttagcaattaagcaagtgtcgagttcagctctatcaaaatctaccaagtatagctgaccctctaacactcccttaaatgctactgaatcatcacttcttctaaagacagtgacacctacatcagtaaaaagacagttgtagcccatttgacataattgtgaaacggaaagcaaattgtaatctaaagaatctacaagaaaaacattggaaatggaatggtcaggtgaaatagcaattttacccaaacctttgaccaaaccttggtttccatccccgaatgtgatagctcattgnggatcttggtttttctcgtaagaggagaacatcttcttctcccctgtcatgtggtttgtgcacccgctgtcgat

SEQ ID NO: 54496 - DNA, 445 bp, Zea mays
agcttagaagcactttcgtttattagtcccccttatattatcttttctcacgcgggtaagcgttagaacgaggattaggctctgataccaattgaaagttgcctagagggggggtgaataggcaacttaaaactttttttcaacaaaaactagaagcaaactgggtaaaactgaattgatctcgaaattcacccagttaactttggaaatgagatgttctaaatgatccacagggttcaaagtagtagatctgagaagggcacttctcaaaatccacacaccaaaaagatataaacaatcttccacggaatggtgagagaacgaagaacatgaacaaacacaatgagcaagaacacaagagacacaagatttatcccgaggttcggtcacaccacaaaggtgccctacttcctcgttgaggcgcccacaaagagccgggtctctt

SEQ ID NO: 54497 - DNA, 434 bp, Zea mays
tctgcgcgtcgatccgtcctccgtccgagcaggcgctgcgctcctttacgggatcatccctgggaagcgcgtccagcccctcgggcgactcgacctcccagtctgcttcgggacaccctccaacttccgaagggagaccctgacgttcgaagtggtcgggttccgaggaacctaccacgccgtgctagggaggccatgctacgcgaagttcatggccgtccccaactacacctacctgaagctcaagatgccgggccccaatggggtcatcactgtcggccccacgtacaaacacgcgttcgaatgcgacgtggagtgcgtggagtacgccgaggccctcgccgagtccgaggccctcatcgccgacctggagaacctctccaaggaggtcccagacgtgaagcgctatgccggcaacttcgagccagcggaga

SEQ ID NO: 54498 - DNA, 444 bp, Zea mays
  unsure (1)..(444): unsure at all n locations
agcttggtcattntattgctaactgtcctgataatgaattttatcaggaaaaggggaacaaaagggagaagaagaagcactacaagaaagccaagggcgaggcgcatctaggcaaggagtgggattcggattgctcctcctccgactccgacaatgagggactcgccgccaccgccttcaacaaatcggccctcttccccaacgagcgtcacacgtgtctcatggcgaaggagaagaaggtaagtactcnaaactctacttatgcttcttctagtgataatgattctagtgacgatgatgaaatagactattctagtatatttaaaggtctagatagaactacaattggcaaaattaatgaattaattgatgcattgaatgagaaggataaactcttagagaaacaagaggatttattgtatgaagagcatgantaaattttag

SEQ ID NO: 54499 - DNA, 440 bp, Zea mays
  unsure (1)..(440): unsure at all n locations
tctaaagggagaacacgtgataggtttgactaacgtgctattctttttgatagaccttgngcagcttgtcaagcaggtaaacaagtgggaggagcgcatcaaagcaagaatgtgatgaccacttcaagacccctggagttgctgcatatggacctcttcggacccgtcgcctatctgagcataggagggagtaagtatggtctagttattgttgatgacttttcccgcttcacttgggtgttctttttgcaggataagtctgaaacccaagggaccctcaagcgcttcctcaggagagctcaaaatgagtttgagctcaaggtgaagaaaataaggagcgacaacgggtccgagttcaagaaccttcaagtggaggaattccttgaggaggaagggatcaagcacgagttctccgctccctacacaccacaacaaaatgg

SEQ ID NO: 54500 - DNA, 446 bp, Zea mays
  unsure (1)..(446): unsure at all n locations
agctntgaagtaaaccataccagagaccggggtttggtttacaccgactcaaactcaagagctacgtccccttntgtgatgaacataggctggactcaagggtaggaaaaccatcgctggaccatgccttaatggtaactgaacatgggcaaccatctctgaacttatatgactcagtggggaaatgttctgggaatgccagcagtgcagggctcgtacacgtgtcattcatgctcagcctcatctaagttcacagcctcagcccataacacagaatctggtcgagtttcccagccaaaatatccacctgatcactgaatacagacaggataaatataactgagaactccaccggttacagcaccaatgggtccaaaatggatatttttctgcaggggtgtggccactagatcttttgttaaccagcccaaccacatctcatcagt

SEQ ID NO: 54501 - DNA, 415 bp, Zea mays
tgtggaggttcttcatccccacatgtgctaagcggcgatgtttctttcagtccatgcaagtcttagccattaagcatgcatctagaccggcctcttcttttgcaaaatcaaccaaataaagtttgccgtctagtacacccttaaaagccagtgaaccatcacatcttctaaagacagacacatctatatttgtaaatagacaattatatctcatattacataattgactaacagatagtaaattatatccaagactctcaactaaaaacacattagagatagaatgctcatttgatattgcaatcttgcctaaacctttcaccttgccttggttcccatcaccgaatatgattgaatcttgggaatccttattcttgacgtaggaggtgaacatcttcttctccctcgtcatatg

SEQ ID NO: 54502 - DNA, 445 bp, Zea mays
agcttgttgaccttgatgttgttgtgttgtggctctatatcactttgattaattgatctggccactttcccctgggttgattgaagattaacttcattattcctgtcattatgatgccattggctctttcaacgagtccatttgactccggatgcctgactaatgcaaaatggatcttcgtgccaatttgatcacaaaattctctgaaagcttcggagtcgaactgtgttccattatctacagtgatggcctttggtactccgaaacgacaaacaatattctgccagaaaaacttttgaatggtggccgaagttattgtggctaaaggctttgcctcaatccatttagaaaaatattccacagccactacaacatatcttaagtttccttgagccggtggtaacggacctaacaagtcaaggccccacctttgcaatggccagat

SEQ ID NO: 54503 - DNA, 427 bp, Zea mays
tggaggcgtcgattggttgtcgacttggtgtagcctccttcttctttttctccgtcgccttgaatgcgacgggttgagcttcggatgtggtggaatcatcaagctcgttgatcttcctcgagccttcgatcatgcactcaaaacttacaaaattcccgataacttcctcgggggtcattttagtatatctaggattgccacgaattaattgaacttgagtggggttaaggaaaatgagagatcttaaaataactttaaccacttcgtggtcatcccactttacgctcccgaggttgcgcacttgattcaccaaggtcttgagccggttgtacatgtgttgtggctcttcccctttgcgaagccggaaccgaccgagctccccctcgatcgtttcccgcttggtgatcttggtgagctcgtctccctc

SEQ ID NO: 54504 - DNA, 426 bp, Zea mays
agcttctactgaagcttcggctcaacaagctatttctttatctgggccttcagagccctgcaaggagcaaccttttgaagccgaagcaataaaaattccagaaccagtattagttgaagaaactgacaccgccatccccgaagcacctgccagcatgcgtgattacatgatacgacatgcttcggggaagaagctatctgaagaagaaactcatgaagccatccattatgcaaaggaattaaaatatccgaagggggcagtaatattcaatggaacgaatgaagatgacttcttatactgcctgcctgacaacaaagagctatctgtctgccgagaaatggccagaagtattggtttcccgaagcttgaatctggattaagcgccatgacgaaagaagatctcgcagacagtcttgcgtacaacag

SEQ ID NO: 54505 - DNA, 444 bp, Zea mays
  unsure (1)..(444): unsure at all n locations
taagtcgccgaagcataagaatntatggtggcaaggaggatctttgaagtatcaaaaattntgntctaaggaacgcagcgtaatttcttcgaagcggcaaaagtcgttcctaagggagcgcagtgtaagttttttgctcaaaagtcgttccgaagggaatgcagagcttacagcaaaaaataaacgctgatttcgctgaaaagtaaaggcgaagaagctcctaagggaggcttacatcgaaaaataaacgcttattccgctgaagtaaaaggcgaagaagctcctaagggaggcttacaacgaaaaataaacgctgattccgctgaagtaaaaggcgaagaagctcctaagggaggcttacagtgaaaaaatgtcaacctttggcaaaatatcattttgcataacatcacatcattacatcatttgcatagcataacatcatac

SEQ ID NO: 54506 - DNA, 438 bp, Zea mays
  unsure (1)..(438): unsure at all n locations
agcttcccgtgctcgcgtccgatgactcttcggtcatgaacggcaggctgccgtggcagaggccaagtcccggggattcgtgaatcgtgtcgtgacacaaagaaagcgtgtgtggtggtgcgtgctccaaacttgtattgagcttgtctgctcgcccttttaaccgctgatgatgaattggttcataggcattcgttgtttatcttatcttactagtaataataaatctcatttgcttgcttgcttgcttgtggtggtggtgatcctggctttctaggtgcatgaggaagatgaaacttgtgtgttcaacagagcatcccaatctggaattagccattccatcatttgccattcgccagcgtctttgctgacaatattatacagacaaaaatgaacttgnggaagtgataagtgttactacaagccaaggttagtaca

SEQ ID NO: 54507 - DNA, 434 bp, Zea mays
taataatgcatgtgtgtcatgttttggatgtttcttttctattttattgtgatatagtagttccatagacattgatgctgtcggggacaataattaggggtacccccaagactcctaatctcagctggtaaccccatcagcacaaagctgcaaaggcctgatgggcgcgattccagtcaaggctccgtccactcaagggacacgatctcgtctcgcccgagcccagcctcgggcaggaacagtagaccaaggcagattcacgcctcgcccgagggtctcctcaagcaacgggcgcaccttcgactcgcccgaggcccagctcgggcaggcttcgcggagaagcaaccttggccagatcgccacgccaaccgaccgtatcgcaggagcaaccaatgcaaggatcgcctgacaccttatcctaacgcacgctcctc

SEQ ID NO: 54508 - DNA, 425 bp, Zea mays
agcttaccgcatttgaagcatgagcgcttcctcttggctttggtcttgcttggctgtcccttgcgacccttaagcgccgtcttgaatctcttgatgatgagggccatctcttcatcattaagtccggctgcctcaatttgtgccaccttactaggtagcgcctccttgcttcttgttgccttgagagcaaggggttgcggctcgttgatcgaaccattcaaggcgtcgtccacgtacctcgcctccttgatcatcatccgcccgctaacgaattttccaaggacttcttcgggcgacattttggtgtacctaggattctcacgaatattattcaccaaatgaggatcaagaacggtaaaggaccttagcattagtcggacgacgtcgtggtccgtccatcgcgtgcttccatagctcccttattt

SEQ ID NO: 54509 - DNA, 449 bp, Zea mays
  unsure (1)..(449): unsure at all n locations
ctataaaactaagctnggaaggttcttcatccccacatgtgctaagcgtcgatttcacagccagcccatgctagtcttagcgattaagcatgcatctagaccggcctcctcttttgcaaaatcaactaaataaagtttgccgtctagtacacccttaaaagctagtgaaccatcacatcttctaaagacagacacatctacatttgtaaatagacaattatatcccatattacataattgactgacagatagtaaattatatccaagactctccactaaaaacacattagatatagaatgctcatttgatattgcaatcttgcctaaacctttcaccttgccttggttcccatcaccgaatatgattgaatcttgggaatccttattcttgacgtaggaggtgaacatcttcttctcccccgtcatatggtttgtgcatccgctgtcga

SEQ ID NO: 54510 - DNA, 431 bp, Zea mays
  unsure (1)..(431): unsure at all n locations
agcttataagtattccattnnggnctgttgttttattgctcatcttctcttttcctacataacagtgttcttgtcacatgtaaatgttttttaatcccacacgtaggatgagcaagggataaaaatgggtcgatgtcccatctcttggcatgcgtgtgcaggcccctggtacagatctgagctctccggcattgccttgatgtcgtcgtcgtctctggaggaagcgtgctggtaaggctctgagctcttcggcatcgtctcgacgttgttgtcgtctctagaggaggcgactactgcgccaacctcgtcacctccttccctctgccgtctcaggtactttgtaaggtcctcaagagcctggtccgttaagagtcctctatgtttataaacaacctatagttggtctagaactntattggctccactgctta

SEQ ID NO: 54511 - DNA, 435 bp, Zea mays
  unsure (1)..(435): unsure at all n locations
ntacttagttgattntgcaaaagaagaggccggtctatatttatgcttaatggctaagacttgcatgggctggctgtggcatcgccgcttagcacatgtggggatgaagaaccttcacaagcttctaaagggagaacacgtgataggtctaaccaatgttcatttcgaaaaagatagaccttgtgcagcttgtcaagcagggaaacaggtgggaggctctcatcacaccaaaaatgtgatgacaacatcacgacccctggagctgctacatatggacctcttcggacccatcgcctatctgagcataggaggaagtaagtatggtctagttatcgttgatgacttttcccgcttcactttggtgttctttttgcaggataagtctgaaacccaagggaccctcaagcgcttcctcaggagagctcanaatgagtt

SEQ ID NO: 54512 - DNA, 435 bp, Zea mays
  unsure (1)..(435): unsure at all n locations
agcttgatcccgttttggggctngatgttttattgtagaaaataaggccaaaacaataaatggatcagctacttctggagaaaaattttgaaaataatagaatagagcttttgttttgtcaaaatactcttattggctctttntgtcaaaagttggcttcttgtggggagaagtgttgattatgggaaaaagggggaattttcgaaatcttgaatcaatttctcttggaacaactctctttatgtcttaacaagtggtgttgacttacagatagaaatttgagtttgatttgcaaaaacaaaccaagtggtggcaaagaatgatccatatatgccanatttgaatcaaaaccatttntgagttctcatttgcatcgatattgcacttgttctaagtggtttatggtgtcgtggcataaatcacccaataggggga

SEQ ID NO: 54513 - DNA, 433 bp, Zea mays
tcagggcaagagactgaagccgaagctgggccctcagagtctgctttagataaaatccttggaaagtgaggcagaaaaaatagcaaagccaacttttgttgaagaaaccggtgtcattgcccccgaagcatcccccaaagttcgtgattatattgttcgtcatgcttcggggaaaaaattatcagaaaaagaagagcaagaggcccagcactacgcccaaaaactgaaatatccaaagggggcgttaatattcaatggcagtggagaagaagacttcttgtattgtctccccgacagcgaggaaatttctgtctgtcgggagatgagcaggagcttcggattcccaactttagaagatgggctttcggtgctgtcgaagaacgatctggccgacagcctagcttacaatagcttaaaggtgcgacaaatgaaa

SEQ ID NO: 54514 - DNA, 440 bp, Zea mays
ctgcagcatgcaagctttatggttgataaatatgacttatattttcctctcataatgatgccagatctttagggcatgaaccaccgcaactagctccaaatcatgagtaggataatgcttctcatgtcggggcaactggcttgaagcatacgcaaatactcggccttcttgcattaacacacagccgaaaccactgcctgatgcgtcacaatacacatcaaagggcttattaatatccggttgagcccataccggagcaatggttaataatatcttcaattgttcaaaagcttcattacactttgaagaccaattgaatttaatatcattcttcaataaacttgtgattggcttcacaagcttagaaaaatctggtataaatcggcggtaatatccagccagtccaaggaaactcctgacttgatgaacagtggttgggg

SEQ ID NO: 54515 - DNA, 437 bp, Zea mays
  unsure (1)..(437): unsure at all n locations
nttgaaggttcttcatccccacatgtgctaagcggcgatgccacagccagcccatgctagtcttagctattaagcatgcatctagaccggcctcttcttttgcaaaatcaactaaataaagtttgccgtctaatacacccttaaaagctagtgaaccatcacttcttctaaagacagacacatctatatttgtaaatagacagttataccccatatgacataattgactaacagatagtaaattatatccaagactctctactaaaaatacattagagatagaatgctcattagaaattgcaattttacctaacccttttaccttgccttgattcccatcaccgaatataattgaatcctgngaatccttattcttgacgtaggaagtgaacatcttcttctcccccgtcatatggtttgtgcatccgctgtcgata

SEQ ID NO: 54516 - DNA, 435 bp, Zea mays
agctttagctgcatttctgctttggttctgaattatgagaagttcagtctttgcatctaggctagagttgttacttgtgctacagcactacagctccagagtggagtgttgcgaagttccattcctatcgaaacaatactaatgtgcgtgtcgatcgctaacaaatgtggtttgtgtgttcccaacaggccagagcatacgcaagagcgatgaaggcgaccctcttcttctcgagcgcgacgcacaacatcaacgtgaacaagatcttcaagttcatcacggccaagctcttcaacctcccgtggacggtggagcgcaacctcaccatcggcgagcccatcatagacttctgacgaccccttcctctaactagtaactcggcagcacacgcacgacgacccttggtatatatcatgggttgacagggtcgtgtct

SEQ ID NO: 54517 - DNA, 397 bp, Zea mays
ttatcaaatggacgtgaagagtgcctttctcaatggaccaatcaaggacgaggtctatgttgagcaacctcccggatttgaagatagtgagtaccctaaccacgtctataagctctctaaggcgctttatgggctcaagcaagccccaagagcatggtatgaatgccttagagatttccttatcactaatggattcaaagtcggaaaagccgatcctactttattcactaaaactcttgaaaatgacttgttcgtatgccaaatttatgttgatgatattatatttgggtctactaacgagtctacatgtgaagaatttagtagaatcatgacacaaaagttcgagatgtctatgatgggagagttgaagtacttcttgggatttcaagtaagcaac

SEQ ID NO: 54518 - DNA, 428 bp, Zea mays
agcttgtgagaacagaattaatctatactaactcttcacctaccgacataagttttcccttccagctgctcaatttcttttcaaactctatctctatgggtttccaatcactattacttaactttctataatgcattgggatccccaagtatctgaaaggaaaactgcctttttggcatctaaatagagagagatagagtgttttttccttctcagtcagaccaaaaccaaaaagctcacttttatgataatttatctttaaccctgaaacttgttcgaaagttatcaataagagctttaaatttgccgcttttgctaagtcatgttgcaaaaaaaggacggtgtcatccgcatattgcagaatggataaacccccatccactaaatgcgggatgagtccttcgaatagaccctcctcttttgctcta

SEQ ID NO: 54519 - DNA, 430 bp, Zea mays
tcacccggaacacctcgatgccccctgcacgcatctcactaccaggactatacgtctgcacacgacccgactttgcacaaaaaatgggcaggatccaaaaccatattttagcgcccatagaccataaatataaccatcgactctgatcccgaaaatacctaacaacctcgttctcccctgttagtagaggttatgggtgatttggttgggtaggtttagcaaagtttaatctgatggattatatagtggtatagataatattaccaattggacttgagtgagtagggtagagggagttggttttgatggcgtgttaagtctggacacaatttatttggtgtatttagtggaggtcacgggtgtagagtggtttggttggatgagttccctcgggtatcgtgttagttgtcattttggacaaggtttgagt

SEQ ID NO: 54520 - DNA, 443 bp, Zea mays
  unsure (1)..(443): unsure at all n locations
agctntacgtgcccaatcgaagacaataaanatttctgtatttagaagtatgaataaaacaaaatttgaagacgcctaacagcccgactgcttcgtttccacgcgcacgaaaccctagactagataaaaagttcccatttccctcaattccccaacttccctcgccgcaatctctcgccgcctccagtccagagccaccgtgagatctgcccgattccgccgcccggacccggggactccctcccctcctcgatccgttcgggcggccggccggcctagcttcaagtgcggggatggtgttctacttcaaggcgcggcccgaggccggcgactataccatcttcatgggtcttgacaagtacgagaacgaggacctcatcaaatacggcttccccgaggacatctggtaacctcatcttcccttggtcgtgtgggtgctcctt

SEQ ID NO: 54521 - DNA, 458 bp, Zea mays
  unsure (1)..(458): unsure at all n locations
acctataaaactcagcttctaaaggagaacacgtgataggtctaactaatgtaacttttattaaagatagacctgtgcagcttgtcaagcaggtaaacaagggaaaagctctcatcataccaaaaatgtgatgacgacatcaagacctttggagatgcttcatatggacctcttcggaccccgtcgctatctaagcataagaggaagtaagtatggtcttgttatagttgatgatttttcccgcttcacttgggtattctttntgcaggataaatctgaaacccaaaggaccctcaagcgcttcctaaggagggctcaaaatgagtttgagctcaaggtgaagaaaataaggagcgacaacgggtccgagttcaagaaccttcaagtggaggagtaccttgaggaggaagggatcaagcacgagttcttcgctccctacacaccacagcaaaacggtg

SEQ ID NO: 54522 - DNA, 397 bp, Zea mays
  unsure (1)..(397): unsure at all n locations
atgtagaggaatgcaggaacaaagccacatcatccacgtacatggaaatccgatggagcctggttgttcttgacagatgccagcagccccgcttcttccgctagtgaaaataacaatcaaagttattctctaaaaaggtttaagagattagctttccaacctggaagcctatcagcaatcttctgaatccatagtagaagatctccagcattaagtcttttattactcaaaaggaagaccaaaataagttgtaggaaaacttttagtggcacaccccaatgtttggacagccaactccaccatttcttcatcataccgaattgggaagaagaaactctnttgcaaattagtttggaggccagaggcaaccccaaaactcatcaatatctccctgact

SEQ ID NO: 54523 - DNA, 393 bp, Zea mays
  unsure (1)..(393): unsure at all n locations
ctcagcttcacaacttaagcctgtggagaaaatatattttcctcgttgtttacaacgaaactattacatgaaatctaaacaatgtcctttattgcacagaaaataaaactgaatgaaaaagacctctatcaaggtaagatatttgtcaatagatgggctttgactcttgcacaatgcttgtgactgtgcgagcttcggactgttctctgaagtccctttggtgtggagcatattggctcccttctggctgttggccttgttgcatcngtggtggaggcggaggcttgtgcccggaagcttgaggttggctcgccgaagcaacagaaactacagggtggttgcctacatattctgggatgtaaggcgaatgatacgaagcagtgtgcatgacct

SEQ ID NO: 54524 - DNA, 441 bp, Zea mays
  unsure (1)..(441): unsure at all n locations
agcttttctcgaagttatttcttgactctatccatgtttctctttttgtcnctgggatctgatgcgacgacgtggctaaaactgtgtgcaggtgatattctatccatcaatgtaacactcacgtgtttctttttggagctaggaatccttgtgatgttttctttttggaataactggcaattcaccgactgacagtgcattaggtattcgagaatctgctattagttgttcttggggagaccattgtctttttatgccaaaaaataaaatccggttcttctgttttgtagtttcactttcgtttgtactgatataacgacaaggaattccatagtactcacaacaacaacatgttccaagatcatttgcctgtttgtgtgcatccttttgtgtctgttcatcagctatttcatttctagtgatgtttcgacttgccaacac

SEQ ID NO: 54525 - DNA, 434 bp, Zea mays
  unsure (1)..(434): unsure at all n locations
aagctttgggaacagaagtggcaactntntcaggcaaagnctgntctatggcttctttctctgctgccttctcttcaatttccgaggattttttctcagcaggctctgaaggctcagcttcagcactagcttggcctactgcagcttcagtttcggtcggctctgtctcagcttcggtttgcattttttaagcctcgagaattttccctcaaggggtagagcttaaagcctttactgtttctagcacgtccagtacatttaccatccttttccttttcagggttgccgcaagacctttttgtgccgtcggcactgatatttccgccgaaggacttaaaatttctaacctttttgcttcttcagtttttggttcttcggccttatctctatcagcccttggttcagttatctcggctgaaggcgccttccgtatg

SEQ ID NO: 54526 - DNA, 442 bp, Zea mays
agcttgccttcgcctcagtgtaccacccacaatttttcttcgtcgtggagcgcgccaatggcaagattttcacgacgatcaagaaaatgctcctcgatgacaagaagggcaaatgggccgacctactacctaaagcagtctgggcactgaacacgaccgagtgtcgggcgaccggtttcaccccctttcgcctgttatacggatcgaaggccatgaccccgcaggaaatcaaacatgggtccccgcggacaagcgcttcagcagtacccgacgtcgacgagccaacttccaaagacctcattgacggagaccgtgtcttcgccctgcaggccctcgacaaatatcaagcccaaacgaaggcctggcgcgaccacgcagtcgtcccaagagaattcaacgaaggggacctcgtacttgtccgcacaaactggacagagtcacg

SEQ ID NO: 54527 - DNA, 438 bp, Zea mays
  unsure (1)..(438): unsure at all n locations
aagctttgttcgcgtncctcctctcctccaccaactgacgcctaatatccgttcttctctgcctccgtagccgccaacctctccgacagcctgcggctcttattttccgcagccgacttgtcccgaatagcatccacatgctgcgctcggaggcgctcgatcttgccctcgagtcgttgcctctcggcagcgaactccgaagtcaaggcacccgacgcaacatggtcggcgaaggcggtcgcctgccacaaaaaaatcatcagattcgcaaccacatcaaaacaacgaaccaaagaattctaagacgacttacatgcttcagctgctgggacacaaatcccgccacgtccctagcgatggcggccgacgaaatctcgtcgctggcgcagaatttggaccatgggtcctgcgaagtaccattcgccccacccgtcgcag

SEQ ID NO: 54528 - DNA, 442 bp, Zea mays
  unsure (1)..(442): unsure at all n locations
agcttgtaagtgctgggatagtccaaatgagatgttcttgttctcgatgcgantgtacctgcttgttcgtcccttgtgcttggctttgttagttaacgtgccctttaacaagcagcgacggcaaaagaatgaggggctaatcttttttcccaattggattgtaagtgcagttaacattggattattcatgtttgtggcagagtctgagtataggcgccgtcttgctttattgatgctggactttgcgtgcttgtgggtgggggttggttccctaactaaagtttagttcatgtcccattaaatatttgaatataatatatatttaattaggtttcataaaaacttctcatcttttatctttcatctgtgtaattagtntcataattagcgaccaaactttagtctgatctgaaatgatgcagcacgtctgcttcgatggtat

SEQ ID NO: 54529 - DNA, 447 bp, Zea mays
  unsure (1)..(447): unsure at all n locations
gaaactaagctntatacatggacgtgaagagtgccttcctcaatggaccaatcaatgttgaggtctatgccgagcaacctcccggctttgaagacagtgagtaccctaaccatgtctataagctctctaaagcgctgtatgggctctaacacaccctcaaaacatggtgtgaatgcattagagatttccttattgctaatggctttaaagatggcacagtcgatcctactttattcactatgactcttgacaatgatatgtttgtatgccaaatttatgttgatgatattatatttgggtctactaacgaatctacatgtgaagaatttagtaggatcatgacacaaaaattctagatgtctatgatggaggagttgaagtattttctatgattccaagtcaagcaactccaagagggcaccttcattagccaaacaaagtatactc

SEQ ID NO: 54530 - DNA, 364 bp, Zea mays
tgctgtcttcctctagcacatgagggaatactcgcaaaaatatactatcatagatcgacattcttctggtatggagaaaaatataatacgaaatatatgctagctctaagggatattctgtgtcaagctaacaacacggaggcctatctacttacaatatagaagcacaaagtaaatgtccgcttactaaatggtcgttaaaacagaagaacaccgatgggttatgacaaaattcgcttgaagaaaataccctagggaacataccttgtcacaagcaaccacacaaactggcgaggatggcaaacaacatgtactagcaagcgcctgctgtgacaccctgaactcacggagataaaacatatct

SEQ ID NO: 54531 - DNA, 367 bp, Zea mays
  unsure (1)..(367): unsure at all n locations
caacctgcagcttttgaataggagtaaccctgccatgtctataaacctctcaaggagctctatgggcttaagcatgcaccatgagcatggcatgaaggcctgtgagatttgcttatcactaatggcttcgaaggccgaagagccgagcctactctctttactaaaactattgcagagtatgtgtttgtatgccacatggatgtcgatgatatcatatttgggtctactaacaaagctacttgtgaagagtttactgggatcatgatacataaattcgagatgtctatgatggnggagatgaagtattttctaagatctccaagctagcacacaccaagagggcaccttcatgagccatacagagtac

SEQ ID NO: 54532 - DNA, 453 bp, Zea mays
acctgaggcatgcaagcttcggagccgaagcaactctagctgagatcgattctcttctgctcaaagagcggaagggagttcaccggaggtgggcgccaatgttggggacttgttctcaaatgcttcaagttaagaacaaggcaacacaaagatgttaagtataaatgcccttcgtccgctgaagcattatctccccaaggatttaatgagcttcggacgaaggtcataagtaaagtatcacgaagatttcaccttcgagaccatatttgtaagacaacatacaatgaaaaatgaaacataaagtataaaatatattcacatgttttattatatgaatatacaagtattacaacataatatttatgcacatttataccttcgccttggcggaaagcaataattcaagcgcgacgtgtcaatgattacaggatctcgtgaacagtgccgggatac

SEQ ID NO: 54533 - DNA, 438 bp, Zea mays
  unsure (1)..(438): unsure at all n locations
actcaagcttcgtccggctgcatacttatgtaactgccgcattgtttgttttcgttttataccncgananttcgcgcttgttgctctagcccggctgcacccttaggcgacttctgcatggatagtcttggcggaagactacgatttttcgcacttgttaagctagtccagctgcacccttaggcgacttctgcacggatagtcttcacggaggacttcgatttttcgcgcttgttgcactagcccggctgcacccttatgcgacttctgcatggatagtcttcgcggaagactacgatttttcgcacttgttaagctagtccggctgcacccttaggcgacttctacacggatagtcttcgcggaggactangatttttcgcactatgtgtgctagtccggctgcacccttaggcgacttctgcacggatagtcttc

SEQ ID NO: 54534 - DNA, 436 bp, Zea mays
  unsure (1)..(436): unsure at all n locations
agcttgttaattacaacagagctaagattgtctctcttttaaatggagctcaaactgtcaaataaacacgtcatttagacaacgatgggaaaaacaggatgaaccaagggttccaacatatgtgcaattaattttggctggttctaaagcatctggcatattggcagtcactgcattgcatgtatcagcagaaacatgactgttcgcttgactntaatctatatcagcttctactacttctgtaatatttttgtttttataaattacagctgcataaatctaagcaggctgctttaattctaagcgaacagttcggaccctgagtgcatccagcaactaccaaacacctactcccatagtcccattcactgatgaggaggaacatagctggatctttttctattactcctacnncttttttctctcctcatataat

SEQ ID NO: 54535 - DNA, 450 bp, Zea mays
atagaatactaagcttctaaaggagaacacgtgataggtctaaccaatgttactttcgtttaagatagaccttgggcagcttgtcaagcaggtaaacaagtgggaggagcgcatcacagcaagaatgtgatgaccacatcaagacctctggagctgctacatatggatctcttcggacccgtcgcctatctaagcataggaggaagtaagtatggactagttattgttgatgacttttctcgcttcacttgggtattctttttgcaggataaatctgaaacccaagggaccctcaagcgcttcctaaggagagctcaaaacaagtttgagctcaaggtgaagaagataaggagcgacaatgggtccgagttcaagaaccttcaagtggaggagtaccttgaggaggaagggatcaagcacgagttctccgtccctacacaccacaacaaa

SEQ ID NO: 54536 - DNA, 443 bp, Zea mays
cagcatgaagcttcgctccgaagccccagcagatttatctcattttctactgatgctacaaatgccgaagctgctagagccaaagacattaatctataaagcatggttgctgatatagacaaaatattatcaaacatggccacggaagaagctgccgcagaatccgctgctgcagccaccgaagagattacgacctcagagcccgagagaaagaaagaaataaccgaagacccttccgaagacgaagcttttatgtttcaaaacttacttggtcaagaactgacaaaagtcgaaaaagaagagctgaaagaatatgcaatatcttgcggataccggtctggagcactactctatggtggcatagacgacgaacggttaggatgcatgcgggatcaaactggtgcacagcgcatcggtactctatcaaagagtatccgtttccc

SEQ ID NO: 54537 - DNA, 365 bp, Zea mays
tctaaagggagaacacgtgataggtttgactaactttcaattcttataagatagaccttgtgcagcttgtcaggcaggtaaacaggtgggaggagcgcatcacagcaagaatgtgatgaccacatcaagacccctggagctgctacatatggacctcttcggacccgtcgcctatctaagcataggaggaagtaagtatggcttagttattgttgatgacttttcccgcttcacttgggtgttctttttgcaggataagtctgaaacccaagggaccctcaagcgcttcctcatgagagctcaaaatgagtttgagcttaaggtgaagaagataaggagcgacaacgggtccgagttcaagaacc

SEQ ID NO: 54538 - DNA, 432 bp, Zea mays
  unsure (1)..(432): unsure at all n locations
agctttgtcttttgtgatggacgtcactcgttttatgttatggacagggagttgtatcgtcaccaaggtgccagtgtcagaatgcctggtcccgaggtcaaactgcgccaaaaccgcgtcaaatgaatatggtttgagttcaaacttttccaggatgtgttcaagggaatttggcacaactttgatatttggatctcctggctttgagtttcnaaaaacatagaacgcagatgatctttgggaagaggtctgaaattcagaaattcagaaatctgaatttctctaagggttcatagttcaagggctgatttggggatttatttgagttattctggctaagctttctcaatctttcttgttgctcactaaatatactttaacgtttataattggatcaagtcaaaaccttaaactttgtatcccatttttctt

SEQ ID NO: 54539 - DNA, 410 bp, Zea mays
tgtgaacccgttgcctatcaactgaaattgccacccagcatgtcagttgttcacgatgtgttccatgtatctcagctgcggaaatgtgttcgtctacccacttaagtgctacctgaaccggacattgagatagaaccagacttgtcttaccaagagtaccccgtcaaggtattgtatcagaaggagagatcaactcgggcaagatcagtcagaatgtataaggttcagtggagtcaccattcagcggaggaagctacctgtgaggctgaggattttctacgctcccgcttccccgactttctgtccaaaggagtcggtacgtaaccccaaaaccccacccccacctgccctttgaactcaattataagaaaaacttagataacaagggtagtctaagttgtggatttaac

SEQ ID NO: 54540 - DNA, 204 bp, Zea mays
agcttgtatatactactagcaatatgcttatgcgtactctacgatcctagtaaggggaggggaggggtccgtggccgcggcgcgagtggacgggttgacagtggccgtggtggcggcacgagtgaggggaggccgacgctattggtggccgcctggccacgtttgatacggggcacgcctatatatgaccctaatcatcctgcc

SEQ ID NO: 54541 - DNA, 428 bp, Zea mays
tgtgaaaagtgcacatgtcgatgcaaacactccggttcattatatttccaagcaaatgatgaagcttctacacagtagaaagatgaaagagtcaaaagaagcagtgggaagcatggtgaggacaaattgttatgatgtatatttataccttaatataagtgtcatctaatttgaattatatacgccacaaggtcaaaaggaaacaaacacactctatatgtttgagataagggttgcaagagtatacacaagggttgtgatgaataaattccacgaatctttgaaatatgcaactgcattcaagataatgcatgatcaagaaggggtgcaaatgattgggtagtgcaacatacaacaagatcgaataaaattgtgtggggacaacaccaattcaaagtgacagctgatgaagatacaggaaagtatac

SEQ ID NO: 54542 - DNA, 438 bp, Zea mays
agcttgagtcaatcatttgcatagaataatttatgctcaaaaagataatctgggtatgaagcacatacgagagaagataaggactggagtagccaaatgtttcaaggaagacgatcaaggtgtgatatggtttaaaaaccgcatagtagtgccaaagaacgaagatctccgccagcaaattcttgatgaagcacatcttagtcgttattcaattcatcccggaagcactaagatgtatcaagacttaaagcaacattattggtggacaaagctgaaaatcgaaattgcacgctatgtggctaagtgtgacacttgcagacgtgtcaaggccatacacatgaaaactgttggtccattacaatctttgccaatcccaacatggaaatgggaagacatcagtatggactctattgtgggactgcccaggacgacaaaacg

SEQ ID NO: 54543 - DNA, 424 bp, Zea mays
  unsure (1)..(424): unsure at all n locations
tcagaatcaatccgcactggagaagatttttattgcttgtacggcgggagagagagaaggtattttcgggcggttcatcggctgtgtgctgcgcgttaccgggacgtcctcggtggcgactctgaggccgttagggagcgtggtgatccgggtggggctgcggctcatgttgtcagggaggcacggcgggaggtccagcccgggtagagggcgcangagtgagccctcacacgcggcgaaggcttcagcggcggagagccgtcgcgccgccgccgcgggtcccagttcgcacacctgcggcgcgatggaacgggagcagcgaagcgtgagccaaaggagcattggttttctgtaacaggcgagaaagagaggagaaccggagggtggcttaccttgcggaggacgcgcgtggtcctgcagagca

SEQ ID NO: 54544 - DNA, 385 bp, Zea mays
  unsure (1)..(385): unsure at all n locations
agcttatgaagggtcttcatcccaacatgtgctagacagttatgtttaagccagaccatattagtcttagctattaagcatgcatctagatcgtcattctctttcgaaaaatcaactaaatagagcttgccatctagtacacccttaaaatctagtgaaccatcacttcttctaaaaacagatacatctacatttgtgaataaacaattataacccatgttacataattgactcatagataacaaattatacacgagcgattcaactaanaacacattagagatagaatgctcggatgtgatggctatctttgccaatcctttgaccttgccttggttcccatctccaaagatgatcgaattctgtgaatcattggttttgacat

SEQ ID NO: 54545 - DNA, 442 bp, Zea mays
  unsure (1)..(442): unsure at all n locations
nttatttacttcctacatgctnttaatgtcttccttttcggtggttgatgccatatggggagaagtttagggaccaaagcaatgaaaactatatcaaacaccaaacaccaccaatttaaaattttatatatctccaaatgactttttcaagtggttttggttatttggtccaaaaataggaggtaagtgaattatggagttagggggaggcttaagtccataatatcacattatggggacaatcatgcatcttagcaagtagattgcatattttcactcaaatacttgtattatttgcttgctttggttgtgttgtcatcaatcaccaaaaagggggagattgtaaggaaaatggaccccgggccttttggctaattgagatttggtgtttgatgaacaacacaatccgtgaactaataagttttctagtgtttgtgtttgg

SEQ ID NO: 54546 - DNA, 445 bp, Zea mays
  unsure (1)..(445): unsure at all n locations
agcttgngaaggttcttcatccccacatgtgctattcggtgatttcacagccagcccatgctagtcttagctattaagcatgcatctagaccggcctcctcttttgcaaaatcaactaaataaagtttgccgtctaatacacccttaaaagctagtgaaccatcacttcttctaaagacagacacatctacatttgtaaatagacagttataccccatgttgcataattgactaacagatagtaaattatatcccaaggactcaactaaaaacacattagagattgagtgctcattagaaattgcaattttacctaacctctttaccttgccttgattcccatcaccgaatataattgaatcttgggaatccttattcttgacgtaggaggtgaacatcttcttctctcccgtcatatggtttgtgcatncgctatcaataatcc

SEQ ID NO: 54547 - DNA, 438 bp, Zea mays
  unsure (1)..(438): unsure at all n locations
tcngctccatctatattatggatcgccttttaatctgtctatctctcttcacccttctggcagcttcttgacttccatggacaacaattggcccttgttccgaaggtatcttcatgcataagtacgctggatgaagtatggcttcgaaggcattaagcatccctcgaccaatgattgcattgtatgggtaatccatgtcaacaatgtcaaagataacctgctcagaccttgtgttgtggatgtaaccgaaggtaactgacattgtgattttgccaagtgccacaatttgtcttccttcgaagtcacaaagagggtgtgtagcatcatgaatcttgtcctctggttcttgcatctttctgaaggcctttgcaaatataatgtccgctgcactgcctgtgtcaaccagaacattatggactagaaatcccttgatgacac

SEQ ID NO: 54548 - DNA, 441 bp, Zea mays
  unsure (1)..(441): unsure at all n locations
agcttgtgaaggttcttcatccccacatgtgctatatgttatgcctcagccagcccatgcaagtcttagcaattaagcatgcatctagaccggcctcctcttttgcaaaatcgactaaataaagtttgccgcctagtacacccttaaaagctagtgaaccatcacaccttctaaaaacagacacatctatatttgtgaataaacaattatatcccatattgcataattgactaacgtataacaaattatatccaagtcactcaactaaaaacacattatanatagagtgctcggatgaaatagcaatcttccctaaccctttcaccttgccttggttcccatcaccgaatatgattgaatcttgngaatccttgttcttgacataggaagagaacatcctcttttcccccgtcatgtggttggtgcatccgctgtcgataa

SEQ ID NO: 54549 - DNA, 443 bp, Zea mays
taactaaagccatctaacaagtcaactgaacccattattattttaattctgacacaatatgcatataacaatcacataacacaatcgactcctacttaaaatgagttggctaacacagtataagacttagcaaaccattttagacattgcaactcaaaacatgggtgggagcagattaattagcttttcttaaccattcatcaacttaaacgggataacaccatattttaggagatctaatataaagatcattaacacatggcataaaactccataagactacattttgctgctgaaggacctaaggcacttatgtgcatatcttatcggattgttcttcaattttgacaaggaccgacttatgaacgctatgtgcttccaacaatttttgcgctgcgatgacactcatactagacctctaatcgatcaacaagacaattatt

SEQ ID NO: 54550 - DNA, 438 bp, Zea mays
agcttctaaagggagagcacattttgggactattttatttttattttgagaaagacagggtttgtagcgcatgtcaagcaggaaagcaaattggagctcatcatccacacaagaacatcatgacgaccgacaggccgcttgagctactccacatggacctattcgacccgatagcttacataagcatcggcgggagtaagtattgtcttgtaatagtggatgattattctcgcttcacttgggtgttctttttgcaggaaaaatctcaaacccaagagactctaaagggattcttgagacgggctcaaaatgagttcgacttaaggatcaaaaggattagaagcgacaacgggacggagttcaagaactctcaaatagaaggcttccttgaggaggagggcatcaagcatgagttctcttctccctacacgccacaac

SEQ ID NO: 54551 - DNA, 441 bp, Zea mays
gaaactaagctttcttcggcgccatagtgaaggtttatgattgccaaaggtgttcaattcttaaagagtggaggtgagttcaccggaggtgggcgccaatgttggggacttgttctcaaatgctataagttaagaacaaggcaacacaaaaaatgttaaacgttaaagtccttcgtccttcgaagcattatttcccttggaatataatgattttcggacgaaggttatgaaggacatatcttcatcaacacaacatataataatgaagaaggaatcatatggaatataacgtaaacaattatgtataattatcaactcatttctatattattattatgaaaaaatagaaatgatattaaattacaaatgtaccttcggcttgaaagaaggtaaaaacacaagcgtgacgcacaagtaaatgcccagtccgcgtgaacagta

SEQ ID NO: 54552 - DNA, 434 bp, Zea mays
agagtcacctgcggcatgcaagccttatcatcttttattctttcttcccctgttctttgatttctagtcaacgatgaaatctgctaatgcctgagtctgaattgtacatctatgaacataatctatggtgaattcattcagctctgcagcccactttccaaaccttcatgtggcttctctgtttcttattatatcttcgagaggctaacaaggaggtactatgatatgatatgattggaaataatgccaaagctttctagaggccatcaatacagcatatagcaccttttctagctctgtatattttttctttgatggactaagcacttcacaaacgaagtatactggcacttgcctctttgcttggtcatattgcttctcttgtaccaatgctgcgcttactgcagcatgagaagcacctacatacaataata

SEQ ID NO: 54553 - DNA, 444 bp, Zea mays
tcggcatcaaactgtgttctgttatccacagtaatggccttctgctctcctaagcgacaaacgatattttgccagaagaatttctgaatggtaaccgaagttattgtggctaaaggcttcgcctcaatccacttggaaaaatattatactgctactacaacatattctaaatttgcttgtgctggtgaggacagacctaactaatcaaggccccacctttgcaatggccaagagggttgtattaactgagtcaaagacgaaggctgtttttgatctcttgcgcatttctgacagccttcgcacttttggactaatgacgctgcatccgaacctgcctttggccaataaaatccttgacaaaaaacttttcccagcaaaggcctatgtccaatgtgagatacacacacgcctgcgcgtatttccttcatcaattctataccttcg

SEQ ID NO: 54554 - DNA, 429 bp, Zea mays
agcttatgaagattcttcatcccaacatgttcgattattgttgtgccagagccaacccatgttagtcttagcaattaaacatgtgtcgagctcagctctatcaaaatctactaagtatagctgaccctctaacacacccttaaatgctattgaatcatcacttcttctaaagacagtgacacctatattagtaaaaagacagttgtagcccatttgacataattgggaaacagaaagcaagttgtaatctaatgaatcaacaagaaaaacattggaaatggaatggtcaggtgaaatatcaattttacccaaacctttgaccaacccttgatttccatcctcaaatgtgatagctcgttgggggtctctgtttttctcatatgaagagaacattctcttctccccggtcatgtggtttgtgcacccgct

SEQ ID NO: 54555 - DNA, 414 bp, Zea mays
  unsure (1)..(414): unsure at all n locations
taatcccgagaagtgtgtcttcngggcacccctatgcatgttctttgggttcaacaacnccgagcggcgcatcgaagccaacccggagaagatcgcagccatcaccagcatggggcccatcaaggactcgaaaggcgtacagagagtcatgggatgccttgcggctctgagctgcttcatctcacgcctcggcgaagaagaggcctgcctctgtaccgcctcttaaggaaggccgagtgcttcacttggacccccgaggccgaggaagccctcgggaacctgaaggcgctcctcacgaacgcgcccatcttggtgccccccgctgccggagaagccctcttgatctacgtcgccgcgaccactcacgtggttagcgccgcgattgtggttgagagacgagaagaggggcataca

SEQ ID NO: 54556 - DNA, 443 bp, Zea mays
  unsure (1)..(443): unsure at all n locations
agctntacactaagaatctgtccaacacttaacatactctgtcagccctttaattgggttgtcatccaaaccaccaaatcccacagagagatttcacaaacttcaagtagtgaattaggatacactctatactaggaagcttagtaattatacttgatctaattttatttgggttgattttgaattgtgatcttgagcaggtatatgcatgcaatagtgctgctctaaggctagacagtgtcacacctcttgctaattgaatttagagtgttgttttgaacaagcctattcaacccctaggcatagcaagtccttacactgaggcacggtgaaccacccataactatgtaggaatctcaaactagctcaccccacaaactctttaggagatcactgcattctgattgccactgaaccatctangtgttgccaaacattgagag

SEQ ID NO: 54557 - DNA, 430 bp, Zea mays
gggtgtgtttctcggagatttcattttccttacaatgagtttactacatgaaatagactcgaaaaaggtattagtctcaaagtcttagattatagagtaaactccccctgaaagtgtgcatacaagttttgaatacttggtaggagacatgcactttgatttgatatcaagaggggcagattatccataatccgagctttggcacatataagttaaatgataccaattgtaggatataagcttttgaagcattagtgtcatttacttatggatgttaaataagctatgtgtcatgcttaattaaacaattttaaaccatgtatgtttgctcaagaatatgaaatgagaacgagcaaccctaccatgtaatttacctagtatgcatgcattgttaatctaaagtaagtaccaaatgagatactaagtatgg

SEQ ID NO: 54558 - DNA, 434 bp, Zea mays
  unsure (1)..(434): unsure at all n locations
agcttntaaataaacccttatttctgctgtttctattataccttgagaaggtatttatcagcacttgttttagtgtatggtagcttttggttctcttcaaatatttctcataccttttcattttgtactccaggtgttgtatttgcttgaagtagttattaacaatgctgcatcccaagttgattgtccacctcactctgtacagataactaacaattcagatattgaattcgttgatgggacaccatatcaaacacaggtggaaccatctactttggaacaaggtcatatcccggataataaccaaagtagagatgttgaggtcccaccatcttgtgctaaactggatgttaatgcgcatgcaatccttacccaacttcctgatgctgaattgcataatctgtgcaatattcttgcacttgacgggttagtgt

SEQ ID NO: 54559 - DNA, 435 bp, Zea mays
gtcagcttcacctgaagtgagaaagaccctgtctggaagtatcttctgtcatgacccggatcttacagggtaaggacatggaccgcaacgacattcctagatcctggaatgcggatgagcctccacgatattatctatcaattgatgcaatctttttcatttttcttatggtacccttttcctttccaaagggggagaaaggttattaatggggccatagttaggaattgttcctttcttattcagctctacgagagcaaaatccccaaaacatatgtaaaatgtaaaatctgagcatgcaccatcgagtgcagagagaacaaatacagggagaagctctaaagtcgtccctaatgggatgcagagcactatgaagctacaggacactcgtcctataggagtgcagcataagtcctctgctcataagtggctcct

SEQ ID NO: 54560 - DNA, 433 bp, Zea mays
  unsure (1)..(433): unsure at all n locations
agcttctaaagggagaacacgngatatgtcttattaatgttctttcgaaaaagatagaccttgtgcagcttgtcaagcagggaaacaggtgggaagctctcatcatgccaaaaatgtgatgacaacatcaagacccctggagtggacctcttctgacccggtgcctatctgagcatatgaggaagtaagtatggtcttgttatagttgatgaattttcccgcttcacttgggtattctttttgcaggataaatctgaaacccaagggaccctcaagcgcttcctaatgagagctcaaaacgagtttgagctcaaggtaaagaaggtaagaagcgacaatgggtccgagttcaagaaccttcaagtggaggagtatcttgaggaggaaggaatcaagcacgagttctccgctccctacacaccacagcaaaatg

SEQ ID NO: 54561 - DNA, 410 bp, Zea mays
  unsure (1)..(410): unsure at all n locations
tgtgttggctttgttgattctgtaaccgcgattgctttttatcttctgctntntgntncaagcaaaaatgagatggccgaagataaaaggagtgaggaccccgcactggctaggttttatgaatccatggagaggacaaatgttgaaaaaataactgatgagattttagctaggctgtttgaagattctagtgacaatgaggattatgattttgagagtgataatgatgatgccgaagatcggtcatggaggccgagtcatgttgtttttggaaaatccactattaagaaagggtagattgaagtaatgaagggcaaatatttccatgatatatccgtagtgagggctggaggagagaacactatttctcttcctacggctgacgaagtggtggcattcaaaggtttaat

SEQ ID NO: 54562 - DNA, 434 bp, Zea mays
agcttgaggctgactcgccgaagcaacataaactgtttgatgattgcccacatattctggaatgtagggcgaatgatacgaagctgtatgcatgacttgcttcggctgagcttgttgtgctgctgcttcagctatttccttttgcttctgaatagtaacatggcacatcctggtagtatggcctttgttctcaccgcagaataagcaaaagattcttctcggttgatcgccaaatcttcctccgaagcccctggcgcctctgcctcttggagctggtggtcggaaggagctctgctgttgtcccgaagtctgtgaggagcattgtggcctttgctgttgagcttctctgtcatcactttgtgtagagttatgaattgatcttacgtgcctcgggtaaaacctcccgtcgaagcccctggcatttcagaaacctg

SEQ ID NO: 54563 - DNA, 437 bp, Zea mays
  unsure (1)..(437): unsure at all n locations
tggtactatcaactgcatgccggctcttctttntctctgctcaattatcatgatcttgatatcccaacttgtccatcttgtcgaccatctttgggctgctaaaggtgttgttgttgttgctgaatgtactgtacgtatagatcgctcgacgatctctccgcgcccatgcatgcatgcatctatgtggtgtgttgcaagggattctttctcttaattaagctgtgtctttgtttatatatactctctccgtttcgttgtcgctggataatgtaaaattgaaatatccaacgacaacttaaaaaaacggagagactatatagatatatacgagatagatgctgttcagaatttatctggacatcaggacatggcgtcttctcgctcaacaacaatgatgatgatgaggcgatgacatgggattacgctggcactggcat

SEQ ID NO: 54564 - DNA, 415 bp, Zea mays
  unsure (1)..(415): unsure at all n locations
agctttgagacgaagggnagcacctacttatatattataagaccggncggcccatgataatttgggtcatgagtgtcactatatataaagggcatgaatgtgaagtcacacacgctgcaccctatgcctatagatagatgaacagcaccccccgtctattgacgggtacttgaaatcattcgtgtgtcacgctcggacttttgacttctgtcaagccgaaggcacaacatgaattcaatattggtcatggacattcttgatgatataaaaaacgatatattaatgatgtcatacgatctgttatgtcattggtcatgttacatatgcttcttacttcactaatatatactgcgatgatgaaggtatagtcttcatgaccttcgactaaagatcattatatgctacgggagataat

SEQ ID NO: 54565 - DNA, 426 bp, Zea mays
  unsure (1)..(426): unsure at all n locations
ttacaatntacatgaggctangaagcctgggaaattcttattctagaaatcttggggttcccatgtagcctcgtcttccgaatgctggatccactgtatcttgtgaaatttgagagtctttctttcggtgaccctgtccttttgatccagaactcgaatgggatgttccgagtatgttaaatctgggtccacgacaacatcagtcacttcaatggttcgatcaggaacccgaagacacttcttcaattgtgacacgtggaacacattatgcacagcagacaatgtttcggcgagctgaagtcggcatgccactggtccacattgctcaagtaccaggaatggaccaatgtacctgcgtgcaagtttcccttttaccccaaaacgcgatacacccttcattggtgaaacctttaagtagacataatc

SEQ ID NO: 54566 - DNA, 405 bp, Zea mays
  unsure (1)..(405): unsure at all n locations
agctntacgaaatggacgtgttatgtgtcttccttaatggaccaatcaaggaagaggtctatgtngagcaacctcccggctttgaagatagtgagtattctaaccatgtgtataaactctcaaaggccctttatgggctcaagcaagccccaagagcatggtatgaatgcctaagagattttcttatcactaatggctttaaagtcggtaaagccgatcctacactctttactaaaactattgcaaaagaattgtttgtatgcccaaattatgttgatgatatcatatttgggtctactaacaaatctacttgtgaagagtttagtaggatcatgatacaaaaattctagatgtctatgatggggggtggaagtattttctaagagttcaagtcaagccactccc

SEQ ID NO: 54567 - DNA, 425 bp, Zea mays
tggtgccaatggagaagcagaaatccttgaagtcttggctgtcaaactgcttggcgttgtcaactgtgagttcggacggtactccgaagcggcaaacaatgttttgccagaagaatttctgtgcagtctttgatgttattgtggaaacaaccctcgcctcgatccatttggtaaaatactcaacagcgacgaaggtgaacttgaggttcccctgagccgtgggcaggtgcccgacaatgtccaggccccagcgctgaagaggccatgtgtgggcaatcagttttgtgaattgcgaagggctgcctgagcgaggagaaaacttctggcaggcttcgcaggaccttgtgacccgatttgcggcgcagatcattgcgggcaagtagaaaccttgacggatcacctttgcgactagggcccttgggcct

SEQ ID NO: 54568 - DNA, 446 bp, Zea mays
  unsure (1)..(446): unsure at all n locations
agcttcgtcacttgaaagacaatttccttgaagaaatatatttttcagttctccagncttcactgtgcactggagaaatagtgagcactgctctttccatgagctcaaccgaaggtgcttttattgtttcaaaaaatacttcggagggtaaggggatcccctgagccgctgatttggctagcaaatccgcatgctcattttcacctcttggaatattcttgacggaaaacccttcgaaggaagcttccaaccttcggactgcatctagatatttttcaagcttcgggtctcgtgccttgctgctcttatccacatggccagtaataacttgagaatcagtctttaggatggcccttcttattcccattgcccttagttttcgaagccccaatagaagtgcttcatactcagcaatattatttgtgcaactaacatccagttcgact

SEQ ID NO: 54569 - DNA, 442 bp, Zea mays
  unsure (1)..(442): unsure at all n locations
ngagagggatttttcacggttcaagctcgttacgaanaacgatctagcgccgcgaaaggggctactgttgggcccatgcttcgttgcgccgaaggtcttgcgtgaagaagcagcttcggctggaatcgtccccaggaaatggccgaaggttcctttttatagagcttcggcgttgcaaaccgacataaagatagaatgacctttttatccatagaggtctaagataatgttgtaaacttttgtaaagggcataattgtaattcgtcacaggctgcgtcctgtgtctataaatagatgaacagtacccccgtactgttcacacgaacttggcatttgcttttgcgtcacgcttgtactttttatcttctctcaggaccgaaggtacatttgtaatttgaaatcatttctattnttccatgttaataaaatagaaatgattcta

SEQ ID NO: 54570 - DNA, 383 bp, Zea mays
gatattccactccccgtcctcataataatctacaactctggcatctttgtccatgcatatgtcaaagaatctaggatatactaatttaaggggcacatccccccaccaggtatctttccaaaagagggcaccttcctcgtccctaactttattaatagcaccccatttgaataggtgtttaaccttgtgcaaccctttccaaaattgagacgcatctctatccgaagacaggaaaaaatttcctttggtcatgtattttcctttgataagtttgaaccaagtgtcattagatccctgaacaattttccatattcattttaccagcggacattcattcatcaatctgctatctaggatgccaagaccaccttggtcttttggtc

SEQ ID NO: 54571 - DNA, 438 bp, Zea mays
  unsure (1)..(438): unsure at all n locations
tgagaaaatatttccacctgccttctttgatgtcatggtgtacttgtttgtccatcttcccgatgaggcaatgcttanaggacctgttcagtatggatggatgtacccaatagaaaggcgactaggcactttgaaaaattttgtaaggaacagggctaggccggaaggatcaattgctgaggcatatatggcaagtgataccttaacattttgttctangtacatgaaggatgttgacactagatttaaccaggatgatgatagtggtacagagatgccattgcctaatgacatgtctgtttttaagcatggtgctactcttgttggaggtactaagactgagtacattgatgatgctaccatgaataagttagtttggtatgtgctacataatgctgatgaagtacaggaatatttgacgtaagttagtttggtatg

SEQ ID NO: 54572 - DNA, 344 bp, Zea mays
  unsure (1)..(344): unsure at all n locations
agctntggatttccaacgttagaagatggcctcttatttctgtcttangatgaannggctgacagcttaacatatactagcataaaggtgtgaaaatcaatttttatttgaaaacgaattacttcattgtttatacttaatgttgtactcctcttgtagggcttgatccttaacaatgccctcagagcacaaaaaaacatcgaagatgaagggtgtacaatggctctgaacaaccttctttcagaggtgattgaactaatgaacgaacgtcttgagaaagaaaaaatattatatttattgtgtaacaaaataaaagaagaagaagctaattcctaagctcaagc

SEQ ID NO: 54573 - DNA, 431 bp, Zea mays
  unsure (1)..(431): unsure at all n locations
ntgaggcgtcgattggttgtctacttgatgtagactccttcttcttctcttccgttgccttgaatgctaccggttgagcttcgggtgtggaggggccatctagctcgttaattttctttgagcctttgatcatcaattcaaagctcacaaagtttcctatcacttcctcgggagtcattagtgtatatctaggattactacgaattaattgaacttgagtagggttaaggaaaacaagtgatctaataataaccttaaccatctgtcacacccggctttaaggaacaaagtcaggtgcatctcatacatgcgccaagaagacaacatatataataacagagtgtatagagataaatgtcacaataatcagagtatttattacatagcggaagacttattacaaaataaaataataaatataaaacaaacta

SEQ ID NO: 54574 - DNA, 444 bp, Zea mays
agcttctttaaagctgggcttcggttcccactgttctttttgtagttgaagtgttgaaaaccttccaaatttaccttcatcaattgacccccgaagccatattgagaatgggagtctttgtctgggcaacaaggagccaagggatagaaccaagcgcaaaatgcttctacagcatgcacgaacttacgtatgagacgaaggccatggggaaggaacagtatcacaacaacttcggttgttacgggtttatcgcccgtcccaacgcaagtcacccagtgccaacatttcggaagaggtggccaggaaattggatggaggaatggttttatgtgaagaatgacttggtagcgagggaggatgttaaggaggttattatgcgtcccatatggtcccgcttcggccttcgaaagccgaaggttgaaatcgatgaagccaccgaagcat

SEQ ID NO: 54575 - DNA, 434 bp, Zea mays
  unsure (1)..(434): unsure at all n locations
ntanatgatatttagaaaccttgggtgaagttagacatgatgtggactatgtttgatacctaaaccccaaaaccctaaacttctaagtagtgcctgccctatgaactaatatacagacttcaaaaaccctagtttcctagagtaccgtgaaggaaaattgtattcaagacctaatatgatgtacctttattatctttgcattttcataagcattacatgagcattcatgggtatatatgatatatatagaaaacgaagaagaagtagaagttgaagaaggaagagctacaccaccacctgaagacccacctaccgggaactgcttttatttcgatatttgtggaacagagcccgactctcctataaaacaaggcaagccccggtgcattgccacctacttgctatttaaaatctttctcacttgcttgatgcat

SEQ ID NO: 54576 - DNA, 457 bp, Zea mays
gtctaactgcacgcgtgcgagctctaccaaatggatgtgaagagggccttcctcgatttaccaatcaaagaagaggtctatgttgagcaacctcccggctgtgaagatagtgagtatcctaaccacgtgtataatctctctaaggcgctctatgggctcaagcaaaccctaagagcatggtatgaatgcctaacagattttcttatcactaatggtttcaaagtcggcaaggctgatcctactttattctctaaaactattgcaaatgatatgtttgtatgccaaatttatgttgatgatatgatatttgggtctactaacaaatctatatgtgaagagtgtagtaggatcatgattcaaagattcgagatgtatatgatgggggagttgaaatattttctaggatttcaagtcaagcaactccaagagggcaccttcatcagccaaacgaagtata

SEQ ID NO: 54577 - DNA, 410 bp, Zea mays
  unsure (1)..(410): unsure at all n locations
tgtgaagattcttcatcccaacatgagcaagtcggtgatggctgagtctacccatattagtcttagcaatcagacaagtgtctagttcagcattattatcagcgaaattaactaaatatagctgaccatctaacactcccttaaaagctagggaatcatcatttttctaaagacgggaacatctatatcaataaataaacaattgtagcccattctggataattgagaaacagaaaacaagttgtaacctagagattntacaagaaatacattagaaatgaaatgatcaggagatatagcaattttacccaatcctttgaccaacccttgattaccatacccgaatgtgattgttctttgtggatcatcatttttctcatatgagaacattcttttctcacctgtcatat

SEQ ID NO: 54578 - DNA, 445 bp, Zea mays
  unsure (1)..(445): unsure at all n locations
agcttctaaagggagaacacattntgggactaactaatgttcattttgagaaagacaggatctatagcgcatgtcaggcagggaagcaagttggtgttcatcatccacacaagaacatcatgacgactgacaggccactggagctcctacacatggacctatttggcccaatagcttacataagcatcggcgggagtaagtactgtctagttattgtggatgactattctcgcttcacttgggtgttctttttgcaggaaaaatctcatacccaagagaccttaaaaggattcttgagacaggctcaaaatgagttcgtcttaaggatcaagaaaattagaagcgacaacgggacggagttcaagaactcacaaattgaaggcttccttgaggaggagggcatcaagcatgagttctcttctccctacaccccacaacaaaatgg

SEQ ID NO: 54579 - DNA, 430 bp, Zea mays
  unsure (1)..(430): unsure at all n locations
tcgtganatattctccgaagctataaaaaagttttgtgttgtatctccgatgagactacacttcgtctcgatttgtcttgtgccttagcacgattttctcttttccaaaatattctccgaagaccaacactgtatccccttcttgttccacatgcaatatgctgtatgatgcttatgttatgcagaatgatgtgatgatgttatgttatgcaaaatgatatttgtgccgcagatacatatccttgtaatagagcacacacactttttatctcagcgctgacttttcgctgtaagcctcccttaggagcttattcgccttttactttcagcggaatcagcgtttattttttgctgtaagcctcccttaggagcttcttcgccttttactttcagcggaatcagcgtttatttttcgttgtaagcctccctt

SEQ ID NO: 54580 - DNA, 444 bp, Zea mays
agcttgtgaaggttcttcatccccacatgtgctttactgtgatgccacagccagcccatgctagtcttagcaattaagcatgcatctagaccggcctcctcttttgcaaaatcaactaaataaagtttgtcgtctagtacacccttaaaagctaatgaaccatcacttcttctaaagacagatacatctacatttgtgaataaacagttatatcccatattacaaagttgactcatagacaacaagttatatccatgcgactcaactaagaacacattagaaatagagtgctcggatgaaatagcaatttttcctaaccctttcaccttgccttggttcccatcaccgaatatgattgaatcttggggatccttgttcttgacgtaagaagagaacattctcttctcccccgtcatgtggtttgtgcatccgctgtcgataatc

SEQ ID NO: 54581 - DNA, 437 bp, Zea mays
  unsure (1)..(437): unsure at all n locations
tctataaggggagcacattntttagagcacctagagggagtgaatatgtgatcctacaaaaaatgacttaaaaccacataaacttgatctaaaaataaaggtagagtaaacttaaaccaagtttgagagaagagtgaaagttccctatgcccgggaatatgatctggatgtcgcctagaggggggtgaataggcaaataataattatcactgttaaacttaaaaccttactctactcaaagaccggatcacagcggaaagaagattgcttcgagtaggtggcagcggaaatgaagttcctgtctcgaagagtcctgcacttcacaagtaacttataccacagataagagtatatgaagtgcacaccatactaaagcaagagacaaagaacagaaatagagacaacacaagagacatagcacagagcacgtaggacat

SEQ ID NO: 54582 - DNA, 423 bp, Zea mays
agcttgccttgggaaggccctgcgcatcttcttttatatgtacaaggaggtgacccagctgtacatatggcggtgtagctatgcgctaatgtggacggtagagaagtgcttgagccatgtataagcgtggccggcggcgcggccccaagtcctgacccctgtagcggcgcggccggctccgccgagttgaagccgagctctgtagcgccgtggccggtggtatggcctggtcgtcgaggtggccttgaagtttgtgtcctactgacgtttctttgactttgtaaagagttgaggacagttgatgtcatgggcacatgccggggatcatcattacctgttactagagtaatttgatgtgacaccggtcctgttccttcgtagcctaacgtggctagctaggggaaggatagtggtgtattccct

SEQ ID NO: 54583 - DNA, 437 bp, Zea mays
  unsure (1)..(437): unsure at all n locations
tgttaggatgccactgagtangtccatctgccatcttatgacttgtttgttttgctctcaatccatgtggattgggtgggcttgagtgggtttaaatcctaaacaagtcaaaatcttcataatttttttcaatcccataatccacatgtgattggaataaccgaacaagcccttagacgtagaataaactacaatgttttttatgccatttccaattccaatcattagctgacaccaaagttcatctccaactccaacttaatcagacagcttcattaaacaattcccttcttccgagttctgacccttattcaagtatgaagcctttcctgngttaccttttgaaaataagttgcttcactaacatgtaacatataccctatntttaatatatatttgcaaccttgccctatgacttgtttgagatttggagttgg

SEQ ID NO: 54584 - DNA, 442 bp, Zea mays
  unsure (1)..(442): unsure at all n locations
agctnggggttcccacgcaatntaatgctttatatttcctatttatataacaggacggcaaaataaagagcaagatgttaaggcaaggcaatatcaataaaaaatgtattatgtgtggctagataacagcaaataaacagtcgcacatttatttgaagttcaatatatgcatcagcctacttgcaacataagtttgagagtaaacagtaatccaagctacattatctttttctgattttaaaagttcaaaatttacatgaagaggactttaatgaaattttgagttgtccacctaaaaaattgtctcagcttgttgcattctactcagcaacgcttttgcaaaaataaggatgaaatggttggtatatactatatggcagtgagttgagggcatatagaaccagtatggcggtagccgggtggttaccgtcaaccaattgcg

SEQ ID NO: 54585 - DNA, 414 bp, Zea mays
tcttcctcgtgctcgtgcgcttaatcattgatccggaaattcgtggtattggcggacgtgaatgaccttcgtgtgcatccggttcttgggcttccatggaggcaagtgggcgtcggaggccggacagcaatacagggcgagggcgccgtcggggaagacgaacagacagcgaagaacagactgctcaccgtgtattgagcagacagcgaagaacagatgggcagacggcggagggcacacgccggcacgccgcacaccggcgcggcggtgctgcagcctgctctgctccacggacaatggcggctggcggctctagggtttaggttttggggagagagagggagagaccgagagcgtgagggaaggagaaggcagaagccaagcgccgtctcttgtctctgtctgttcggcact

SEQ ID NO: 54586 - DNA, 435 bp, Zea mays
  unsure (1)..(435): unsure at all n locations
agcttngaaaatatctagattctttttctttgatgaaggcttcctttgaaggattctctgttaaaaatattcctcgtggagaaaatgaatatgctgatctattggctaagtcagcagcacaggggctgactttaccttcggaagtatttttcgaaacaataaaagcaccttcggtcgagcttcttgaaacagcggtcctcaatatatcccctgtctatagtgaagattggagaactgaaatcatctctttccttcagggtaattttctttcagacgacgaagcttttacaacaaaagaataaaagcaagagctcgaccatatgtcataatagaaggggagctgtacaagcgtggggtctgttccccattgctcaagtgtttatccagatccgaaggtatagaattaatgaaggaaatacacgcaggcctgtgtgg

SEQ ID NO: 54587 - DNA, 425 bp, Zea mays
tgtagtacaacttcctgtgcagaatcgccaaagctatagactgctgccagacaacaacaaagttcccagcgctaaggcattacccccacggctatctgggaggggacaaggacggggagaagtaaagtttcagccaaaagatgttaacgcagaagcagctgaaagggaacaggagtgcaatgttcgtgatacattgaaggccttctatatacgatttgtcaggctcactggaattcttttcacgaggaccaggtgcagcccagtcctttacatgttcagaattgctattcttcagtcgtcttctccttggtgtcaatatgcctaattaatttgtcttctctcccttcttaacagtttggaaacatttggggagctgttttcttcagttagcaatgatttgcagattcttctttcttccggtcttg

SEQ ID NO: 54588 - DNA, 429 bp, Zea mays
  unsure (1)..(429): unsure at all n locations
agcttgttcttganaagccatctagagaccaaatcagctggtgcccctgtaatgaagaagaatgctcgatccctgcatttttcgagaacaagcttgcactctatggatgcaagggcaatcaaggtttcttcaagggatgctgctgccaaggaaggtgatggcaagagaccttgcagtgatgagctggctaatcaaaatactacaaagacaaatgagccagccaagaagaggggtgtgggtcggcctccaaagagcgagcagaggattgctggggcacaggaaaatagccccatcaaaggcaggaaaagtagcactggggcacaggtagatagccccagcaaaggcaggaagaggagtgcggaagcacatgatgatagctccagcaaagggggcaagaggagccggcggtgaagctaccatcagctcaat

SEQ ID NO: 54589 - DNA, 429 bp, Zea mays
tgtcatcatgctcatagaatagcatgcaactgttttgacttacgtcgatcctctcatatgtcatcccaagaccagccaacatcttctttgcgaagtacatattctctggcgacttatgattctacgggagaacctcgcccataagttggacgatgtcgttgtaagcactgtttgaaatgttgtgcttcgactttatcgccattagtcttgtgagagtcccaagaactgacatctgagtgtgctcgtgcagtctctcttctcccgcggcgagtagccggaagaattcttgagcatcgcgtggaagctgccccggctcctcagcgttcatttcaacctccctaccaagatcatgcaacatatgcgccatcctatcatgatcgtcatcaagctccacctccgcgtcaacgtgtctaatagactctccatgcc

SEQ ID NO: 54590 - DNA, 440 bp, Zea mays
tgcaagcttacctcgacctgagaggaaagctcatcttattggtctttgtgttttatgcgctaaatggctcatagctcaacctcgtgatgaggatgtgctcaccttggttaaggtggggtttccttgagttcattctgatgttaatggggagaatgcatcaggtgttgataatgcttatcttgttcttattgtcgatcatctgatgatattgcattgctagtgctattattcttgcttagtcgatgcttactctttcatgtgatatgatcatggtgtaccattgcctttatctgttattgagttgtatgtgtagtagatcaactggtatctaccgtgttctttgtttatcttgttgatagatatgcatgctttgttatggtgtattaattaggatctttatggtgtatcgcgataagctgagatcctacagctatatctat

SEQ ID NO: 54591 - DNA, 440 bp, Zea mays
gtatggacgacggtgtcgtactccgctaaattggtctgtactatgtataaagtacttctttaggcctgatatggtgatggaggccgaggaaaaggttcagaaaattatccataatatgaagaaagcacaagctcgtcagaagggttatgcagacaaacggcgaatgcccttatattttcatgaaggagactatgtctacctgaaagtttcacccatgaagggagtatcgcgtttcggggttaaagggaagcttgcacccaggtacattggtccattcctggtgcttgagcaatgtggaccagtggcataccgactccaactacccgaaacattgtctgctgtgcataatgtgttccatgtgtcacaattgaagaagtgtcttcggattcccaatcgaaccattgaagtaaccgatgttgtccttgagccggacttgacat

SEQ ID NO: 54592 - DNA, 443 bp, Zea mays
agctttacgtgcccaatcgaagacaatacaaaagcgaagtaatatgtatgaataaaacaaaatttgaagacgcctaacagtccgactgcttcgttttcacgcgcacgaaaccctagactagataaaaagttcccatttccctcaattccccaacttgcctcgccgcaatctctcgccgcctccagtccagagccaccgtgagatctgcccgattccgccgcccggacccggggactccctcccctactcgatccgttcgggcgggcggacggcctatcttcaagtgcggggatggtgttctacttcaaggcgcggcccgaggccggcgactataccatcttcatgggtcttgacaagtacgagaacgaggacctcatcaaatacggcttgcccgaagacatctggtaacctcatcttcccttggtcgtgtgggtgctccttac

SEQ ID NO: 54593 - DNA, 442 bp, Zea mays
tctaaagggagaacacgtgataggtctaactaatgtaactttaaatttagatagacctgtgcagcttgtcaagcaggtaaacaggtgagaagctctcatcataccaaaaatgtgatgacgacatcaagacctttggagatgcttcatatggacctcttcggacccgtcgcctatctaagcataggaggaagtaagtatggtcttgttatagttgatgatttttcccgcttcacttgggtattctttttgcacgataaatctgaaacccaaaggaccctcaagcgcttcctaatgagggctcaaaatgagtttgagctcaaggtgaagaaaataaggagcgacaacgggtccgagttcaagaaccttcaagtggaggagtaccttgaggaggaagggatcaagcacgagttctccgctccctacacaccacagcaaaacggtg

SEQ ID NO: 54594 - DNA, 448 bp, Zea mays
atcttacagcacctgcagcatgcaagctttgatataaatatatctactgggagttcttgtcgtttaaatatatgaaaacgatcataatatgctaacagaaaagtagatagacccacacagcatacaattgtttgtgcgtaacacagccaggttatccaggaccaactttggggatatcatagtgctcgctgaggttagccaggtattggctgaagtcctgcatgcggtccttgtacgacttgtttgcgactatggccatcttcttcatgtcgatcttctgcttctgttccatgtatcggcgctctgatcgtgtgagatgatcatagtcagaatgtgggttcttttggtctccattcttatcagattcagtctgagacgactcctcacgctggtacttattcttctttatctgtactccaccattcttcacgtgcagcgctttaccctt

SEQ ID NO: 54595 - DNA, 442 bp, Zea mays
  unsure (1)..(442): unsure at all n locations
gggatattcttcagaacactacggatattgtntgggataaatgaaaactcttcttcacgaagcatgaaaagaagggaaggtgtttttttcgtcaaagactcaaaaacggtacgtatgtaaaatttcatgcatcgtaaagaattgaaccataaaagcaagtgtattacattcagggttacaagatgttacacatattacatttcagaagtttttacaatagcacttaatcttctctaagtacaacttccgcagcttcgttcaggagccgattaacaacttcatccatgatagcttcagccatctttttaatttcgtcgtctcctttcgggtgagggcccggagacgctttagtaggatctgaaggagaataggatacaactacattgctattacaaattgcgaacgaagtttanaaccaataattacaacacaataaaaacca

SEQ ID NO: 54596 - DNA, 444 bp, Zea mays
  unsure (1)..(444): unsure at all n locations
agctntatcaaatggacgtgaagagtgctttcctctattggaccaatcaaggaagaggtctatgttgagcaacctcccggctttgaagacagtgagtaccctaaccatgtctataggctctctaaggcgctttacgggctcaagcaagccccaagagcatggtatgaatgccttagagatttccttattgctaatggcttcaaagtcggcaagaccgatcttactttatttactaagactcttgcaaatgatttgttcgtatgccaaatttatgttgatgatattatatttgggtctactaacgaatctacatgtgaggaatttagtaggatcatgacacagaaattcaagatgtcgatgatgggggagttgaaatatttcttgggatttcaagtaaagcaactccaagagggcaccttcatttgtcaaacgaagtatactcaa

SEQ ID NO: 54597 - DNA, 450 bp, Zea mays
  unsure (1)..(450): unsure at all n locations
ctaagctggtgttgcgtaagtaatgatggcatatgtgctatgnatgatttattctgtgttatatgatcaacacggcatatgttgcaccacgttagagtcttgcataataaggcacaagagcatcttgtatatctccatttaagcattgcatccatcattgaaaggatggacttgaagcaattataaaagacttaaaagtgtggttctcacggggagaaatttgcatacccctaaatcgaatcttgaacatgaagttcaaatacctaattatagtcttaagactaaatgaggaaaaaggtgatttgtactctcttccccttatgtgagttttcaatagaagtttctcacatatggtttttaatgagacaaatcatgcaacacagcaagcgtgagccatgtactctctctccagatttatcccactgcgttttgtggagttttgggacatgt

SEQ ID NO: 54598 - DNA, 432 bp, Zea mays
  unsure (1)..(432): unsure at all n locations
agcnntggggctntaacttctgtatatattgtttgttgattattatatctgtatagagtataatagatgttattacatcaaatatacatacaagtatatgttttaaacttggtttgttgggtcttggaaggaaatggattccttttaacatagtgttggcaatcaattttgcctacagtcatcatgacattcggggagttgaaaatggagtgcctgctcctattgcgaacatccatacaacctgcattcctggatgatttatggatggttattttggtttaactaatgtttgatcacacatatatctgaaaatatctagtagtgctggtttgaaattgttgaatangtctatcttatacactgatttggtaatctgaaaatgggctttactcaaatcttgattatctattttctttgctaacattatgagtc

SEQ ID NO: 54599 - DNA, 422 bp, Zea mays
tctaaaggggaacacattttaggactaatcaatgttcattttgagaaagacagaatttgtagtgcatgtcaagcaggaaagcaagttggagctcatcatccacacaagaacatcatgacgaccgagaggctacttgagctactccacatggatctattcgacccgattgtttacataagcatcggcgggagtaagtattgtcttgtaattttggatgactattctcacttcacttgggtattccttttgtaggaaaaatcacaaacccaagagacgttaaagaaattcttgagataggctcaaaatgagttcggattgagaatcaagaagattataagcgacaatggaacagagttcaagaactctcaatatgaaggatttcttgaggaggggcatcagcatgagttatcttctcctacaca

SEQ ID NO: 54600 - DNA, 443 bp, Zea mays
agcttatgaagattcttcatcccaacatgtgctattcttcgatgccagagccagcccatgttagtcttagcaattaagcaagtgtcgagttcagctctatcaaaattcactaagtatagctgaccctctaacactcccttaaatgctattgaatcatcacttcttctaaagacagtgacacctacatcagtaaatagacagttgtagcccattttgcatagttgagatacagaaagcagattgtaatctaaagaatctacaagaaaaacattggaaatagaatggtcaggagatatagcaattttacccaatcctttgaccaaaccttgatttccatccccgaatgtgatagctcgttggggatcttggtttttctcgtaggaggagaacatcttcttctcccctgtcatgtggtttgtgcacccgctttcgattacccagct

SEQ ID NO: 54601 - DNA, 439 bp, Zea mays
gcttctaagggagaacacgtgataggtctaactaatgttactttctaaaaagatagaccttgtgcagcttgtcaagcaggtaaacaggtgggaagctctcatcataccaaaaatgtgatgaccacatcaagacctttggagttgcttcatatggacctcttcggacccgtcgcctatctaagcataggaggaagtaagtatggtcttgttatagttgatgatttttcccacttcacttgggtattctttttgcaggataaatctgaaacccaagggaccctcaagcgcttcctaagaacagctcaaaatgagtttgagctcaaggtgaagaagataaggagcgacaacgggtccgaattcaagaaccttcaagtggaggagtaccttgaggtggaagggatcaagcacgagttctccgctccctacacaccacagcaaa

SEQ ID NO: 54602 - DNA, 436 bp, Zea mays
agcttatgaagattcttcatcccaacgtgggctattcggcgatgccagagccaacccatgttagtcttagcaattaagcatgtgtcgagttcagctctatcaaaatctaccaagtatagctgaccctctaacacacccttaaatgctattgaatcatcacttcttctaaagacagtgacacctacatcagtaaagagacagttgtagcccatttgacataattgagatacagaaagcaaattgtaatctaaagaatctacaagaaaaacattggaaatagtatggtcaggtgatatagcaattttacccaatcctttgaccaaaccttgatttccatccccgaatgtgatagctcgttggggatcttggtttttctcatatgaggagaacatcttcttctcccctgtcatgtggtttgtgcacccactgtcgagta

SEQ ID NO: 54603 - DNA, 435 bp, Zea mays
tgaaccaagagcccgcgtcaccggagaagccaaatccgctcactggagttcaagaactcgccggcgcacgtggaccgggtaaaccccttcaccatttcccgattcgttgcgcgcacggcctctgtgtccccccgtgaagctcctcgtgcaccctaattgacctatgccgccgtggtttggccggagcaggcgtcgccgtcgatccccgccacctgtgttcgtggccaggggagctccgaccacctcgccggacctccctcgccgccggtaagccgcgccaccctttcctttcccgcggctactgtttcagttaagggagggactgcgggtgtgagggagagaaagtcagggggttaagtgaaaagtcagagactcaagtgaatagtggcgtaagggtagatctgcgaggtttgattcagtttaaacccagggacc

SEQ ID NO: 54604 - DNA, 418 bp, Zea mays
agcttctccataacaagagctgcacttttcgttgttgcgaagctaccacatataataacaaaggagcccctggcgtaggtggagttaatgtcgctagatctatcagatactgcatcagttcttcgaaggccttctgctggattggtccccattgaaagacttcagctgtcttcagcacttctaagaatggtaagtttctctctgctgatctagatatgaatctgttgagagacgccagccttcctgtcaatctttgagccccctttcttgtacttggtggttccattcgaagtattgcttcgattttgcttggattagcctcgattccctttgttgagactagggagccgagaaatttcctcttctttactccgaaggcacatttttctggattcaactataggccagcctgtctaaa

SEQ ID NO: 54605 - DNA, 431 bp, Zea mays
  unsure (1)..(431): unsure at all n locations
tcgtcagtcgaggccctaatggacttagcttcgttggcatttgttcagtcattacctttagaatttcctccacgtcgctggtagaaggtggtgtgggggtcccctctccttcggatagttttcgctttggagttgatatctttctcttgacaattttcttcttttttggtggttgttcttcatccttgtttaaagcttcggcctctctttttcttctctggccctcagcatccttgttcagctgcgcatagtcaggatattcgaagcccagtgcatcgagcactcggttcagccttcgcttcggacgggtaccgaaggctgctgtcatcagttgatcttcttttttcgaataatttccaagaatttcattacacatcacctcaactgtgtccagccactcttggcagggcttcttanaatatttcttgaat

SEQ ID NO: 54606 - DNA, 444 bp, Zea mays
agcttaaagatttgcgataacaaagaggtactttttaattatcaaagattctgtgaagcaacaaaaagtcgttctaaggaacgcagagtaagtttgccgaagtcacaaaaagccgctccaaagggagcgcagtgtaagttttctgctccaaagtcgttccaaagggaatgcagagcttacagcgaaaagtcaacgctgataccgcctaaataaaaggcgaagcgcgaaaagtcaacgcgaataccgctgaaagtaaaaggcgaagaagctcctaagggaggcttacaacgaaaaataaacgctgattccgctgaagtaaaaggcaaagaagctcctaagggaggcttatagtaaaaagacaacgctaattcaaaaagattatgtgttttatcgcaagaatgtgtgtgtatcttccgaataaacaccatcttaaataacataaca

SEQ ID NO: 54607 - DNA, 436 bp, Zea mays
  unsure (1)..(436): unsure at all n locations
tcgtcagatgcggtcccagaggacttagcagcttgatatgttatgattcagtcattacctttaaaatttcttctacttcagcagcagaaggcgttgaaggagtttcctcttctatctcagctacctttggctccggagttgcaacccttctcttcttcgaagtcgccaccttcgattcaggactagatttcctcttcttcagagatttttcgtcctctttcaacattctagcagcttgcctgctcagaacactgacaactctttttctctttatcccttcggcacccttgctgagtcgctcataatcagggtattcaaaatttaaagcgtccattacccaattcaacctttattttggtcgggtgccgaaggctgcagtcattagttgatctttntggtataattgcccaaaatttcattacacatagtctcaatc

SEQ ID NO: 54608 - DNA, 433 bp, Zea mays
  unsure (1)..(433): unsure at all n locations
agctttaaaataaatgagacgtttattttgtgtgtctaaatttacttaggatgatgcacctgacgtatgcaatggatttagttatttctgccatggagtttagctgatggccgcttagtggttattgcacaatatagtgcacggatgggatactattggtatatgcactgcatgagtggttgtttaactcaattttactcgtgcgaaaaggatataatgtagcgtgtgaaccatataattgcaggttaattangattatttcggatataaccttgatggaggtcatcttagtcgatattatctagctggtaatcgactgcatgaatcggaagtcagccgctaagccattaaccggcaaacgaagaaatacagcacaatgaggaattagaaatatattacccttttcgtatcgattattattaccttgcagtaa

SEQ ID NO: 54609 - DNA, 430 bp, Zea mays
tgacccggggacccgcgtcaccggaatagctcaatcgtgctcaccggagttcaagaacccgccggcgcacgtggaccgggtaagcctctgcaccgatttccaattcgttgcgcgcatggcctctacatcaccccgtggagctcctcgtgcactttaattgaactataccgccgtggtttggccggagcaggagccgccgacgacccccgccgcctgtgctcgtggccagggtagctccgaccacctccgacgtcgacccgcacaccgacgtgaccgtcgcgacctcccggacgtcactgaccaccccgccggagctctactgccgccggtaagccccaccgccgtaatctatgccgcgggtactgtttaagttagtcagggagcgcgggttagatttcggttaggtccagggggttttgtgcaatgtcag

SEQ ID NO: 54610 - DNA, 431 bp, Zea mays
  unsure (1)..(431): unsure at all n locations
agcttgtccttntcaaatacaatattcttcaattctctaaccatgtctttctttagaaccttcttgagtgtgctcattccaacatgtggaaaccttctatgccatagccatccaagagatgctttggtaaagaggcaagtccttaggtttgcatcttcagaagagaaatccactaagtataggttgttgtatctaaatcctttgaataccattgattcatcatccattntagacacaacaacctttgtaggagtgaataaacattgaaggccaagatcacaaagntgatccactgatagcaagttgaagcttaatggtgcaaccaagagaacatctgaaattgaaagatcatttgaaattgccaccttgccaagcccttgaacttttccttttgaattatccgcaaaagtgattntatcttgttcatcaac

SEQ ID NO: 54611 - DNA, 427 bp, Zea mays
  unsure (1)..(427): unsure at all n locations
tttgtgttgaactggttaatgtgtccactctatttattttattggtgaaaagtgtatatatattgtcctagctgcatgtgaagtgttgggaaccatatgtggcacctgaaaaggagggacgattcggtctgtggcccggacggtccgcgattggatcagattangcgagatatcccctttttcgtgcatgtgtatccaactaaatacacggattctattggggaacgcctaagaacgggtccagactccctatatatatgaaggggtatgaccgattgcgcgcgtcaccaatcgaactaatcaatcaatctactttattttctttgtttttcatcggattaggagtaggcataatttagacctagcttggcttttccctaaacttcaaattttcatccatcttcgattctatgttctcgcggaccgt

SEQ ID NO: 54612 - DNA, 52 bp, Zea mays
cggaccttaagcgactgcagctgcaacctgggggccaagagtgtcttctcct

SEQ ID NO: 54613 - DNA, 157 bp, Zea mays
acttttaaattctacactgccgctaaacactgacactttttatcttatcccttcgacctgcgaagccataatccggatcaaaataaacgtccataccaataccctattagtcgggccgcagcgcgcacaatgactttggaaaagcccaattcttaca

SEQ ID NO: 54614 - DNA, 287 bp, Zea mays
  unsure (1)..(287): unsure at all n locations
gtctagtacacccttaaaagctagtgaaccatcacatcttctaaagacagacacatctacatttgtgaatagacanatatattccatattgcataattgactaacagataacaaattatatccaagagactctactaanaacacattagatatagaagtctcggatgaaatagcaattntacctaaaccctttaccttgccttgattcccatcaccgaatattattgaatcttgggaatccttatttttgacgtaggaggtgaacatcttcttctcccccgtcatat

SEQ ID NO: 54615 - DNA, 415 bp, Zea mays
gtcacctgaggctgcagcttctaagggagatcatgtgttacgactatctgatgtcttgtttgagaaagacagaccttgtgcagcatgtcaagcaagaaaacaggtgggaagcactcatcacggcaagaatgtgatgacaacatcaagaccactggagcttcttcacatggatctcttcggaccccgtgcctatctaagcatcaggggaagtaagtatggtcttgtaatggtgatgattttctcgtacacttgggtgtctttttacaggatagtcagaaacccagaaacctaaacacttttaagagagctaaatgagttgagcttaaggaagaaataagaacgaagtgggccgagttaaaattacaagtgaaagttcttgagagaagctaagcacagtcttgtcctatcccacaca

SEQ ID NO: 54616 - DNA, 265 bp, Zea mays
  unsure (1)..(265): unsure at all n locations
agttgctatatcctgtgcatttatgnttgtcatgacgaactatgtttggtttggatctctgtaatgattggtaccacagtgagggtaccccctgcattttgggttgcatactatgtcaactaaagtaacttttataattgggaaacccattaatctccctttctcttatctgaaaagctgggtgttctgtgttggagatcaaagaagacgctcatctgttcagtgctggtggagaattctatactacttttcttatgctgcaagc

SEQ ID NO: 54617 - DNA, 473 bp, Zea mays
  unsure (1)..(473): unsure at all n locations
agcttcggctccatctatattatgaattgctttggagtcagtccanataccttcagcccttcttgcagcttcctgacttccatggatagcaatgggtccctgttccgaaagtatcttcatgcaaagataagcangatgaatgattgcttctaaggcattaagagtaccacgaccaacaattgcattgtaaggatattccatgtcaacaatgtcaaacacaacttgctcagttctagtgttgttgatgaatccgaaagtcactgacatggtgatcttgcccagtgctacaatctgtcttcctccgaagccacagagaggatgtgtagcatcatgaatcttatcttctggctcttgcatttgtctgaaggctctaccatatatgatgtcagcttgacttgctgtgtcaccaagacattgtggccagaaatctttgatacacagagataccatgcatcgttgtgaggtatcttgac

SEQ ID NO: 54618 - DNA, 422 bp, Zea mays
gcatgttgtggtacacatctgttgatgtttcctttatggctagttaacaaagatctatgaaccccaatgtcctttgcgctaacatctgacaaatacaatagccttcttgcacaaattgcaaatttgggttgcctacgcatatatgaatcaaatgacatactatgagttgaaggattaccaatgagaccactacttgctttgatgactcttttcccggcatgagtagcatacgcgttttccaaggtgagaaaatcacttcttccttctttgtagactgctacatggttagtaaaaactttcttgctaaccctatgcctttgtgtttaaatgtggacagatttagtatatgtctcttctttgagcattaaaacaaaagttgcatccttgctataatcagccatttttaatataggacatgaact

SEQ ID NO: 54619 - DNA, 387 bp, Zea mays
  unsure (1)..(387): unsure at all n locations
acgcttaccgcattgaagcatgagcgcttcctcttggatttggtcttgcttggctagcccttgcgacccttaagcgtcgtcttgaatctttagatgatgagggccatctcttcatcattaagtccgaccgcttcaatttgtgccaccttgctaggtaacgcctccttgcttcttgtggctctgagagcaagaaggtgcggctcgttgatcggtccattcaaggcgtcgtccacgtaccttgcctccttgatcatcattcgcccgctgacgaattttcctaggactttttcgggcgacattttggtgtacctgngattctcacgaatattattcaccanatgaggatcaagaacggtaaaggaccttancattagtcggacgacgtcg

SEQ ID NO: 54620 - DNA, 63 bp, Zea mays
  unsure (1)..(63): unsure at all n locations
agctnngggcatttattgctaactgtcctgttaatgatagtgaccaggacaaggggaacaaga

SEQ ID NO: 54621 - DNA, 342 bp, Zea mays
  unsure (1)..(342): unsure at all n locations
gctntagttctctttgatccggtttcaagtaccatacacaactaagccactagatcataaatacaggtaaaatataggatatattggttttcttctagattatataagttggattatagtgaaatagtagaaaagttaaacattactttaaagacacaaataagctagtatttgagtatcttatttaagcttatcactagtacaaataagctcaaagcctgcggcacgttcaacttttcactggcggtttccgttatcaaacgtcagtgaaagaaacaggtgggcccggctttaaaaaccgccagtggaaacctatttccactggcggttatcttaacacaa

SEQ ID NO: 54622 - DNA, 380 bp, Zea mays
atctttaaggacaaccatttaggactatttatgtttattttgagaaagacaaggtttgcagcgcaagtatagcatgatagcaagtcggtacccatcatccacacataaacgtccatgaccaccaacaagccggatgagctactccacatggatctaatcggcccgattgctacataagcatcgcgggagtaagtcctggctagtcattgtggatgattattcacgctttacctgggtattctttctaaaggaacaatcctcaaaccaagacaccttacagggattctcgagaagggctcaaaatgagttccgcttacagatcacgaatataagaaacgacaacgggacggagttcaacgactacaacttggaagcttctt

SEQ ID NO: 54623 - DNA, 436 bp, Zea mays
  unsure (1)..(436): unsure at all n locations
agcttattcgagggacctagcatgtccttctgtgtactcctgacccgttcatacaggggtccggcgtttcttggagatctggacccatcgatgcaccttgggaaagattatattttcttgccacatggtgcccctagttctacccatgtggtggggtccggagctgctcttcgtatgacctaaaagtgcggtacgggtgcatcgtctttataccgtagaagagggcacctctgattcaaggtaccgactgtggcccccaggcccgccttaagtgaagatgtgagcctgcacgtgggaccaaagtctgattggcggctggaccgctgctcctgcgcgcctgttagctacaattactggtcggccgcctatggccatgccaactgctatgcctatttccacagntaactgagccgtgaccatcgtacttaatgtcact

SEQ ID NO: 54624 - DNA, 314 bp, Zea mays
caactctgccaagcctctcacaattttgaagctctcatctcttctcacatcgtcaatatagcgactgaattaagaagtgcattatatctcttcttcaaactaagaaatcttgcgataaactcacagctaacggggtgtctcagaggagctatctacacaggctgataagtgaccaactttcttttatggcttcacataggccgcagcaagcgccgagcagctgtgtagctgcatggccacaagcctgcaacccctctgtagtgccgaaccctgatctgctcctcgcgccagaccagcacactgagccattcaac

SEQ ID NO: 54625 - DNA, 346 bp, Zea mays
agcttcttctgtacaagcgccacactctctgtatagtgctaagctgccacatacaatagtaatggagcccctggcgcacgtggagttaatagtgttagatcaatcaagtatagcttcagctcttcgaaggatttctgttgagctgggccccattgaaaaacttcggctgactttagtatttcaaagaatggcaagtttctttctgctgatctagatattaatctattcaatgatgccagtcttcttgtcagtcgctgggcccccttctttgtgcttggtggctctatccgaaagatagcttcaatcttgcttgggttagcttcaatctccttcattgaaactagac

SEQ ID NO: 54626 - DNA, 427 bp, Zea mays
  unsure (1)..(427): unsure at all n locations
gcatatattggcacctatcttttgatttgtccatcatgagtagtcaacagagatctatgaacccaaaagtcctttgtgttagcagtaaagaaactcattacctttctagcacaagttgcgaatttggattgcctatgtacatgagaattaattgactatgctaggagtggaattgttaccaatgggacaatccttacattgatgtcccttccttcggcatgtgtagcatagacgcttttcaagctgtgaagcttccttctttccttgttcagttcttgctacatggatagtaaaaactttcttttctaaccttatgccttcttgtttaaatggagacaagatctaagtaagtgtcccttcttggagcatctacaacaaagtctatcattcgtagtaataagtcagctcattttaatgtanggacatg

SEQ ID NO: 54627 - DNA, 428 bp, Zea mays
  unsure (1)..(428): unsure at all n locations
atccttaaagtcacctgangcatcaagctttaaactaaagactcaaggaatcttattgcgcataagtctaaaatcgagcgagcgagagcaagtgacaagagagcgtaccaaatgagctcgcggtatgctcttatttatatgctcggtgcggtaaaaatggaaagaccccgcctgtcagtgaatgttgctattctagcaaagggaaggtgttttttcggaccttcggcttanagccttcgtccatgtcgcaatctaaatttattattttaacaaattaatattgcgaggggctactgttgggggccttcggcttccgaaggtcctcaaaaacatgatttaacagtgtntctagagtataatgtgtgaacaggtatcttcggactcgtatcagagagggagaagctcanaagatacgaaagtcgacacag

SEQ ID NO: 54628 - DNA, 355 bp, Zea mays
caacttgcacttaccaccaattctcttccgtatccatatgacattcaacggctcaacaatagtggtcaggtcaaagtaaccaagctggctcaaatcaatcttgctattggtcatatcgcgaagctgttgactgtgatgttgtgcctatggatgctcgaaaattctgctaagtagaccatggcaatttgattcagattgtatgcatcatggtagatcaaatcaatattctctcatataccatgataagaaaattatcttgcttcccatgtcctctgaggctattgagcgtgatgatgttgctaaagctaccatagctaaaactgacaacaacaataatattaaagttgttggtaat

SEQ ID NO: 54629 - DNA, 277 bp, Zea mays
  unsure (1)..(277): unsure at all n locations
tcggcattcgggtctattccttggcttcggagagcccagatgaagacgctgagcctaacgattgcgttaggagtcagctgatgaagatagatttcgtaattttccaaaacttccccaatcattttgttcaaaggaaatctcaatcccgctctgaagaaactcttgaaaactaccacctcatcattttccggtgtcggagtggnttcttccccgccaaaacgaatcaacttcttctcagcttctccgaagtagcctggctttatcatcataagcatat

SEQ ID NO: 54630 - DNA, 393 bp, Zea mays
ggatctaagcactgcagctcaacttgacaagagaaaaagattcgacacttttctcaatctgaagctgaaaaaagatcatatctgcagaaatcactcaaagatcttcaagaaagatgtttaggcttcggcacccggtgcattcaacgggtgaagcaggtcttcaactcagctggagccaattttaaaagttaaaccttccgttgaagaactaccgggcacatttgaacatattgaaagtgaagttgatgctctcgacgaagttatagctggacatggtgactcttgtgctctgctaccttctcgaggcacaactgttgctttcatgagggctggctgtacacatggaaacattgtaacagacccacttcacctgtcccagcagactggtgacat

SEQ ID NO: 54631 - DNA, 393 bp, Zea mays
agctcatcgactcgtgggcgtgtccctatattatattttctctcacaccttaccaaaaagcatgccattctaacatgaggtaggttcttgcctctactcacaactagcgtaccatcgtagttctcttcatctcgagcgccgacgtgcatttgccatcgggagagcaggtctctggaacatgtattcttcgagatcccacgctgggagaggtcgaataaagtttgtgggaaacgtttgtacgcgacctttctgttgatctccctcaggatgtcatctcttcttggcgaactcatcaatgacatcatccttgaccgttgtgcttcgacgtcggcaaccctgttgcttagacgtcgtcgaccttgatatttcacagtatcaccctactgctcaaca

SEQ ID NO: 54632 - DNA, 84 bp, Zea mays
cctctcaccttccgccgaacaacagactctttttttcctaccgggccgaccgcctagacttatcagccctaaactttcatgtag

SEQ ID NO: 54633 - DNA, 237 bp, Zea mays
tgccatctactacacacttaaacgctaaagaagcatcactcgtcctaaagacagatacatcaacatttggtaataaacaattgtagcccatgtggcacaattgacttacagacaggagattatagcctaacgaccctactaaaaaaacattggagatagagtgctcgctggagatggctattggtcccatacattagactgtgccgtgattcccatctccaaatattattggatcct

SEQ ID NO: 54634 - DNA, 406 bp, Zea mays
  unsure (1)..(406): unsure at all n locations
agctntcccccgaaatcgagcaactgccagttctgctacaagtccatagaatcccaagaaccaaacggtcaaagcgatgcagaatattcatgccactctaaaagaaaattgtaaaattgcaaacaaagtcatgctaggtgagcatctagatgaagtaattagggaagttcagtctatggcggttcgatgtggggcanaggaaggatcagctgaacacttcatggcaactgaactttttcggaaagctgagaatcggtcctcctttaaggcatttgagatagatgaaggaaggcttctttggttgaagcgacactgtgcacgtgcaggactcatgtagaagagcttactatgctagttaaaattgtcatgaaccttattatgatcagctgaacattagcatgctact

SEQ ID NO: 54635 - DNA, 377 bp, Zea mays
  unsure (1)..(377): unsure at all n locations
agcttctaaagggagaagcacatttaagaattatcttatgttattntgagaaagacaggatttgtagcgcatgccaagcanggaagcaaagtggtgttcatcatccacacaagaacatcatgacgactgacaggccactagagcttctacacatggacctattcggcccgatcgcttacataagcatcggcgggagtaagtactgtctaggtattggggatgattattctcgcttcacttgagtattctttttgcaggaaaagtctcatacccaagagaccttanaaggattcttgagacgggctcaaaatgagttcggcttgaagatcaaaaagaatagaagcgacaacgggacggagttcaagaactcacaaatc

SEQ ID NO: 54636 - DNA, 355 bp, Zea mays
tcatccccacatgggttaatctgttatgccactaccagcccatgcgtagtctagcaattaagcatgcatctagaccggtctcctctttagcaaaaacaactaaataaaggtgggtcgcaagacacccttaaaagctatggaactgatacttcttcgaaagacagacacatgtacatttggtaaaaagacaattatatcccatattggattattgactaacataatagatattatattcaagagactctactaaaaacacgttagagatagagtgctcatttgagattgcaatttacctaacccttttaccttgccttgatcccatcaccgaatataattgaatttgggatctttg

SEQ ID NO: 54637 - DNA, 396 bp, Zea mays
tgcacatcagaatctgtttttgctctgatggcgacaaacaatcgagcttaggagtgtaagggtacccctaattatggtacccgacatatactcatattgctttcctcctctaactcgagagctaaacgagtcagctcgagctcgaaacaagcccaaccgatttatggattcgtagcttaacaagccgagccgagctggcttgatatccaaccataatcttatattcctaattaattccttatgattcaccattcgaaatgattgtgcactactattccttggccaacaatgcttttttatatccaccgggttccgaaccagtcatatgtgaacaccctacatttagagtgctaactcgataagtgagctcaccagtcgtgtacctgtaatattctg

SEQ ID NO: 54638 - DNA, 313 bp, Zea mays
acctttatcaaatggacgtgaaaagtgccttcttcattggaccattctacgaagaagtctatgttgagcaacctccccggtttgaagacagtgagcattctaaccacgtctataagctctctaacgcgctttatgggctcaagcaagccccaatagcatgtgttgaatgccatacagattctctatttgccaatcggttcaaagacagaaaagtctattctacacttcttactacaactcttgagaatgacttgctcgcatgcccatattacgctgatgatattatattcggcgctactaacgagtcttcatg

SEQ ID NO: 54639 - DNA, 367 bp, Zea mays
agcttgccttcgcttcagtctatcatcctctatttcatcggagtcgcggagcgtgccaatgggaaaatcttcacagctgtcaagaagatgctccttgacgaaaaaaaaggcagatggaccgatctattaccggaggcagtctgggcgctaaacacaactgagtgcagggcgaccgggttcactcctttccgccttctatacggatcggaggcaatgaccccgcaagaaataaagcatgggtccccgcgtacagttccgtcagccgtccccgacgtggacgagccaacttcaaaagatctcattgacggagaccgggtcttcgccctacaggccctaaacaaataccaagcccagaccaaagcatgac

SEQ ID NO: 54640 - DNA, 329 bp, Zea mays
  unsure (1)..(329): unsure at all n locations
ctccactgtctcctaaaccaacaacactcaccagcataccactgtcatatactttttataagaagcttcttaagaagcccttgacatagagagcacatgctccactctttgtatcctgaaaattatgttggccaacacccaaatgacatgaaagaattgtatttctcaggataaatatgatgtctatgaaatcattncgcgctgtcttttcactagtggagacatccactatgctcactagaacctgcaacaccatcccagactcctcacacatgttagctgactgtattaaataattctgacctgaaactgaactgtaacctatactg

SEQ ID NO: 54641 - DNA, 401 bp, Zea mays
actgtcgaaaaagaaagaccttatgcagcttgtcaagcaggtaaacaggtggaatactctcatcatgccaaaaatgtgatgacaacatcaagacccctggagttacttcatatggacctcttcggacccgtcacctatctaagcatatgaggaagtaagtatggtcttgctatagttgatgatttatcccgcttcacttgggtattctttgtgcaagataaatctgaaacccaagggaccctcaagcgctttctaaagagagctcaaaatgagtttgagctcaaggtgaagaagataaggagtgacaacgggtccgagttcaataactcttaagtggacgagtaccttgaggaggaaaggatcaagcacgagttcttcgctcctatacaccacagcataac

SEQ ID NO: 54642 - DNA, 419 bp, Zea mays
  unsure (1)..(419): unsure at all n locations
catcaccatgattngacatctagaaatgtcaaacagtactaaacgcaatttcttgccagatttggatagaattcgactacttacttcattaattcataactggagtttataaatccaaatcacgtgatcctagactttttagaaagctaatagaattggctacagttcaattattatcatctcaaggtgattcaatgtgtatcgaagtcagttaatacaaacaagcattgctgtccagaatttgacagcttcaaacatcacatttcaaacagccataacctgacttatagaccaccagaaattggtgctcctaaaatttgttgcaaagctgaagaaaagtactacaattatcctataattactaagagctgattctagtttaacttgggcaacaaggtatctcgaaatcatacaaatct

SEQ ID NO: 54643 - DNA, 465 bp, Zea mays
  unsure (1)..(465): unsure at all n locations
agctntaccanatggacgtgaaaagtgcctttctattggaccaatcaaagaggaggtctatgttgagcaacctcccggctntgaagatagtgagtaccctaactatgtatataaactctctaaggcgctttatgggctcaagcaagccccaagagcatggtatgaatgcctaagagaatttcttatcactaatgacttcaaagtcggaaaggccgatcctacactatttaccaaaacacttgaaaatgatttgtttgtatgccaaatttatgttgataatatcatatttgggtctactaacgaatctacatgtgaagagtttagtaggatcatgacacannaaattgagatgtctatgatgggggagttgaagtacttcttaggatntcaagtaaagcaactccaagagggcaccttcattagccaaacgaagtatattcaagacattctannacagtttgggat

SEQ ID NO: 54644 - DNA, 402 bp, Zea mays
  unsure (1)..(402): unsure at all n locations
agcttcaaagcacatggcgcccgatcggcatgttcttatcttcgacanacttatctggaccagccgcaaggtaaggaggtacgactgccaccctgagtttcatccgtggtgaagatctttttactctgaagcgttatccatgcatcaatgagcacgaatcaccacgactgcacgaattcaagcgtgaaggtcgctggcggtagggttcgctgcaccagggatcttcttcagttcactgtaccatcagaacatcatttagaacacctgacaaagaggtttgcagcgcccagatctcctaattttacgtgagaacttgttaatccacctataacaatggtctagccctataatccagctacaaacttgctatagtaaatatactcaaatactcactggattata

SEQ ID NO: 54645 - DNA, 385 bp, Zea mays
  unsure (1)..(385): unsure at all n locations
gaaagctgctaatgcttgggactgaatccacaatctatgcacataatctatgccgaactcatttggttccccaggccactttccaattctctcagtaacctctgtggttcgtcataatattcttctaaggctgtgaagaaagaacgataatatgggatgcttgaaaataatgccgaatgctcctggaagccattaaaacagcatacaacaccctatcccattctgtatattacngctttgataaacagagaactctcgaacaaagcatatcggatgctgcttttccattctcttcagggtttcctgagcagcgccgacttactgagagtggaagctcgacatatacagcaacgagccctggcgctgggagtaaagtgtaaactac

SEQ ID NO: 54646 - DNA, 459 bp, Zea mays
agcttatagccacaaaaacgtgttaagtgttatttctatatatgccaagtggctagaaaggagtctcaacaaaacacaataccacatgagatcaatcacagagatgacacagtggtttatcccgtggttcggccaagaccaacgcttgcctactccacgttgtggcgtcccaacggacgagggttgcaatcaatccctcttaagcggtccaaagacccacttgaataccacaagtgtttgcttgctttttctcaatcccgtttgcgaggaatctccacaatttggagcctctcgtccttacaattgacagtcacaaagaagcacaaagcatgggggaatgagtaacgcacacaagacttcaaaagatcagagcaacaacactcacactaagtcgaacaagagctctcaacacaacttcaagagttcgcaactcaacaagagctctatatgctataccat

SEQ ID NO: 54647 - DNA, 388 bp, Zea mays
agcttgacatcacccagtgcaacgattgtgttattgtcttgtatgcctcaagaagactcgagggagccacgtctgactgatgggatgccttcacagcggcacaccccaacgcagatacaatatctaggcaagagttccaaacgaacttccgcgctaaccatattccctcgagaattatgaagttgaagaagaatgaattcctttcccttactcaagggaatatgtctgtcagtgagtatcgtgatcgtttcactcagctttcatgctacgcaccggaagaagtggacacagatgagaagcgacaagagcgtttcttggaaagattgatcggacctctgaactatcaacttcagagtcacacctttcccaatttccagctccactgaac

SEQ ID NO: 54648 - DNA, 439 bp, Zea mays
  unsure (1)..(439): unsure at all n locations
catgcacacttcaaaaacaacctcgataagataccgtttaatgcgtgtgaagaagcttaaagagggttcaacccgaacttggaagcttaagccaatctatttgggtaagtcacatattgagctgctcatgaggatgacttatgaagaagataccaatgcaaatgaatatcacaaaccttcaagtgggatcaatatctacagagaaatgtccaagcaatcatattccttcacatggtattcactaagtggtgtctagatcaaccatacaattgatatcctttgagcggtacaagacttcaagtgatccaccaccttaagtgatcatcaacttaagagagcaactctctcctaaaataagttcatgcaagtgatgtcaacgattctatcatgcatatggtgtccatcaaanacttattgagtaccttcaagttggtataat

SEQ ID NO: 54649 - DNA, 445 bp, Zea mays
  unsure (1)..(445): unsure at all n locations
tagcttngtaagagaaagagacggatttactcttgggtgcttgagggagttaattcaattcttaacaactcaagcctatcaatcttcaaatgatctacatagtcaagattgacccatggttacttcaatttattatatgcaaaacccatatcatctcgggaagatattaatgctgtaggatataaagaatcattcatgtgcnggacattcaacgcctacaacatggaggaaagtcaaaggatggtaacacttatgcttttaagtgcaagtatcttaaattatcttttcttatgtgtcttgtgtagtcacatacgacaaggaagcactgaagatgttttaaaattatgtcgccattcttagaagaaatcctctcatatggcagaatgcatattcttcatttctatattatggcaatatacatgctttaaaattgttgccagtccca

SEQ ID NO: 54650 - DNA, 434 bp, Zea mays
  unsure (1)..(434): unsure at all n locations
ttcctcccccccgcggcttatctgtgaacnctccccccggacccaancgactgagctgcactggcctaaacatatgtcatattgaggctctggaagctttgcgaatcactgaaacgttagactttgtaatgatttgtaaagctgttgcacatatgtgcaaaacatataacatgtgtangtttagcgaatgatcttgttgtggtgcttgttgatggtttatgtgatgtggatctatcattgtgcagtactaattacacttgtatatctatgtgactatgtgtataaaaaatctgtgacttgcgattcttttgtatatataacagtagttgaatgctaattaatggtatattatcattattaacgactataactatgggcaactttctgttggttgctaatgtataaataaccactcacgaatggttgcttaatct

SEQ ID NO: 54651 - DNA, 398 bp, Zea mays
taagcactgagctgcaactttgaaaatttgtatttcgcgttactatgtgctctctcgggtgctatggggaatgccactattttggagaaaaaaggctgcgatcacgtgaaatccttatcacagaccgaaactgatttatcttctgaggacataaaagacccttcagccgaggcaagtttggttggtggaaaaattttcaccgacatctgagaaaatggtggccgggagatggctcaagaaattataccgagaagcgagaaatgtattcatgacgctataaaagtaccagaagccgctgagaaaagtgcggatctcgaagggcgaataggtattaactactagttcttggctttctgctggaaccttttgatttcgagcttgtttacaacttgttacat

SEQ ID NO: 54652 - DNA, 480 bp, Zea mays
  unsure (1)..(480): unsure at all n locations
agcttctaagggagaacacattntaagattattttatgttcattntgagaaagacagggattgtagcgcttgccaagcagggaagcaagttggcacccatcatccacacaagaacatcatgacgaccgacaggccgcttgagctactccacatggatctattcggcccgattgcttacataagcatcggcgggagtaagtattgtcttgtaatagtggatgattattctcgcttcacttgggtattctttntacaggaaaaatctcaaacccaagagaccttaaagggattcttgagacgggctcaaaatgagttctgcttaaggatcaagaaaataagaagcgacaacgggacggagttcaagaactctcaaatngaaggcttccttgaggaggaaggcatcaaacatgagttctcttctccctacacttcacaacanaatggtgtagtggagaggaagaatagaactctattggacat

SEQ ID NO: 54653 - DNA, 333 bp, Zea mays
atacaaatatattgaggcctgcctcttgacttgaccatcaagcttctcttgaacaagcgcttcacttaccgctgagagcgaaacttgcacatataataactaggaaccccttgcaatggcggagcaatgttgctaaactataataactgcttaactttaaaagccttctgtgattggtcccattgaagactcggttgactcagacttcagaatggtagtttcttctgctgactggaataatctatgaaaaagcaatcttctgtcatcttgagcccttctttgaggtgaggctcatccgaatatacttcaatttactgattagcttattccctt

SEQ ID NO: 54654 - DNA, 181 bp, Zea mays
ataaatgtgtctaactattatgtttgaacatcttaaatctatataatatatcaatgacgctatttatctccaagtcacttgtctgtaaagtctatgcctacgttatttatatatctctggagtcaattatgaagcataaccttcgagttttgcatataacctcggtcgaatacatcttggg

SEQ ID NO: 54655 - DNA, 273 bp, Zea mays
  unsure (1)..(273): unsure at all n locations
ctcccccccagagttgtatctgcacacannaagacgcgccacggacaaagagcattttcttagcaaagacgacctgccccaaaaataaacaacgcctgcgggcacgacgccggccacgaggccaggcccaccgacgacgggaccacaacaggcgacagccgggctcaacgggcaacacaccgacacgcccccggcaacggaacgcaggaaacgacgaaagagacaagaacaaaaaccaaccaatcagacggcgcagccaaacacggacccccc

SEQ ID NO: 54656 - DNA, 333 bp, Zea mays
  unsure (1)..(333): unsure at all n locations
agcttaactcgggctcanattagacaagtcttatttttaatctttttagtacttaaattcttatttactatgcgattgttggttcttgagatatgcatgtggcactgcacttagagggagtattcaaaactcaaaacatcattaaaacccctagtgcaaagccgcaatgcaaatctcaccaatacatgtcccaacaggtgttcttttgtgtgcttataagttgggatttggtttgattcaaaattagatagaaaatttgaaaaatttcaaaaaatcccctctgtctaggctcaccggacagtccggtgtgcaccggacactacactgtgcaat

SEQ ID NO: 54657 - DNA, 360 bp, Zea mays
  unsure (1)..(360): unsure at all n locations
agctnttactagtactctttccgctttattttgtacatcgctntagctttntacatcaatgtaaccatagcttataaagaataaaaatgagattgggatgattcgatgattgcgaggcgctgtctcattctctactgagttgtccatcatggaggagagatatgctttgattatcactggcaaattatcataaaatttgtggtgtagagttgctcatcagcccggtacgtgcgatatccttcataatcatatggatatatttctggttaaagcttctctgcaccccttgtttaaaccacataatcccagccagccgctagataggatctgtactgngagcttttcgtgtggtgtgatgac

SEQ ID NO: 54658 - DNA, 373 bp, Zea mays
  unsure (1)..(373): unsure at all n locations
agctagaggatgacctttcaattttgtctatttattatcttgccgacatcctagcatacaacagtataaaggtatagaagttaactctgaatttgagaatcaagtattttatttaccacactcaattctttcatcctttttgcaaggcttaattcttaataatgcccttaggacgcagaagaaatattgatacgaaggctatacaatggcccttaataaccttcgtttagaagtgactgatctaagaaacgaaggtttagagaaagataaaatcttgatttctttgtgtaataaagtaaaggaagatgaatctaactataaagcccaggtcgaagcctagaanacagaatataaagatcttcggagacagcta

SEQ ID NO: 54659 - DNA, 407 bp, Zea mays
aactgtgttcctcgatctgacactatcttcttcggcacaccatgaaggcagactatccgagacatgtataactcacctaacgttgctctggtgtatgttgtcttcacgggtatgaaaagggccacctttgttaagtggttcacaactacccagatggaatcatagccggcccgggtacgacgtaggccaactataaaatccatcccgatctcatcccactttcactgaggaaattgcaatggctgcaacacgccggcgggcctctgatgctctgcttctggtctctgacagctatcgcagatggcaacatattctgcgattctcttgtcatgccataccaccaaaacctccttcttaaatcttgatgcatctcttcacttccagcgagtatagagtaagttgtctca

SEQ ID NO: 54660 - DNA, 464 bp, Zea mays
  unsure (1)..(464): unsure at all n locations
agcttancattcttaaggagagaatatcttctatcctttgactagcttcgctgtgctttctcgctctttttagaagtctgagcatgaccgccttatcttcttggcttaggcgagcgtatagttgtaagaagcttctttcttcctcctcatcctcatttgtgcttccgctataattgtcattagccacacaacatatgtgggaatcgaaatgggaagacaaacctcttggagagatggattcatcgtttggtctccatcgttcattttcttcttcttccttcaaagggttagtctaacaaataccaaaggaagtagaagcacaaaatgaaatatcatgtttggactcatcacattttatntaaattctaggtcanatatcatgcgcatcatgaatagattcattataattcgatatgaacgcacgataatcttcatcgctaagagaaatacttaagatgtcataa

SEQ ID NO: 54661 - DNA, 467 bp, Zea mays
  unsure (1)..(467): unsure at all n locations
agctaggacgtgactccattatgtgttgtacttataccactggctcttcaatgccttcatctnttctctcatacccttgtctgttatcgcctctgacccttgcgatatttatgtcttctacctaaaatatcaccttagacttatcctttaaaagcctcccctttctttccacccagtgtgagagttgcgagggatctacctctcccttganttctnttcacttcttgtcgccttacaagttgtgagttaattacatcccttggtgagttttatntgctatcaccctcatattgtcgtccatctatattgccttgatacttatctttattcctactctntaaaaatcccctctcttccacctcaattngagagtggcanttaactatctggcccttggacgtaccctatncttttccattngcgggtcctgtcttaactccatcatctgtagtacttatatcattttg

SEQ ID NO: 54662 - DNA, 497 bp, Zea mays
  unsure (1)..(497): unsure at all n locations
agcttgcattgggccgtcattaaagaagacgtgtatctattttatatctatatcccacaaactttttttagttatgattacgtaccgtctaagggcggcagagacctccctnttttcctcactacaccaaaccagttaactttctatagcctaaattataaaaagttagccctaaactctagtaagttagctaaacccctcggaagtaaagcgataccgtcggaagttagactctcgaaatttttttgtttgaagttagcttaattntctaaagccctctaagaagtaactttctagagccagcgacccgtctcggatattagtatgtttacaccggtaaggcacgtagcgccatcgcgccatcagctagctaacttcctagaggctacaataggccatagaaagttaactggctcacttcctagaggcccagtaagcctctacgaaagtaatttgaccagcattataaatagttgttatcttcattctacaccaca

SEQ ID NO: 54663 - DNA, 271 bp, Zea mays
  unsure (1)..(271): unsure at all n locations
cgagcgcacnnaccagaaggaatgttagtgaaaaggaaccaacaccgctgacaaaaagaaaaacaacggttctatcaactgccagataaaccgacaatcttaggggaagagacacccggacgcaaaactgaaaaaagacatacataggtgacacaaggcaccagaaaacaaaaggctcagacgagggaacaggaagataacaacgctagaaaaaaccaaagaaacaaaagaaagacaaaccttagactgaccaacaaggcaaccaacaaca

SEQ ID NO: 54664 - DNA, 59 bp, Zea mays
cccgccacccaacatcataccacattttttttcacggagaagctaaccgtcacactcta

SEQ ID NO: 54665 - DNA, 442 bp, Zea mays
  unsure (1)..(442): unsure at all n locations
agcttaaaaaagnctggtataaatctgcgatattattcatcctttccaaagaaacttcagacctgaagaacagtggtcggaggtttccacttccaaatgtccttgaccttgctggggtctaccgcaatccctctggcagatagaacatgtcctagaaattgaatttcctccagccaaaacactcacttgctgaacttagcatacagctgatgttccctcaggcgcgttaatacgatccgtatatagtgggcgtgctcctcttcattcttggagtatatcaaaatgtcatcaatgaagaccaccacaaacttgtctagctcgagcatgaatacccgagtcatcanatatgtgaagtgggccggagcatttgttaacccaaaagacattaccagatattcaaacaatccatatcgctgactgacgcagtctttgggatatcttc

SEQ ID NO: 54666 - DNA, 379 bp, Zea mays
  unsure (1)..(379): unsure at all n locations
agcttctatagggagagcacattntatgactattccattgtcattntgagaaagacagagtttgtagcgcatgccangcaggatagcaagttggtgcccatcatccacacaagaacatcatgacgaccgacaggccacttgagctattccacatggatttattcggcacgaatgcctacataagcatcggcaggagtaattattgtcttgtaatagtggatgattattctcgcttcacttgggtattctntttgcaggagaaatctcaaacccaagagaccttaaagggattcttgagacgggctcaaaatgagttcggcttaaggatcaagaaaataagaagcgacaacgggacagagttcaagaactctcaaattga

SEQ ID NO: 54667 - DNA, 358 bp, Zea mays
  unsure (1)..(358): unsure at all n locations
actgcttgccgttgtcaactgttagttcagacagtactcccaagcggcaaacaatgttttgccagaagaattgttgggcagtctctgatgttattgtggaaacagccctcgcctcgatccatttggtgaagtactcgacggcgacaaacgcgaacttaatgttcccctgagcggagggcaggggcccgacaatatccaggccccagcgctggagaggccatgtatgggcgatcagctttgtatactgcgaggggctgcctgaccgaagagaaaacttctggcaggctttgcatgaccttgtgactcggattgcggcacagatcattgcgggccagtaaaaccctcggcanatcacctt

SEQ ID NO: 54668 - DNA, 273 bp, Zea mays
gcttaggagagtgaacttgctatatatgattggactaagggtgagtcgcttcaatcactctttgatcggttgatggtgttagtaaacaaaataggagtgcttggaagtgaagattgtagtgactccaaggtcacaagattattcatgagagcatatatagaaaaggattagagtctagcaaggatgataagggatcgtgatgactatgaggatttgacaccttatcatttattggcaagaattcaacaacacgagtcctgaaaagcctctatc

SEQ ID NO: 54669 - DNA, 381 bp, Zea mays
  unsure (1)..(381): unsure at all n locations
agcttaaagncatggagagttcttatgctatttatattcganatgactcaagcctagctacgggtgcataagttntaccgaaattcaaaccttcgacttgtgaataccctttggccacaagtcgagccttgttccttgtcaccacaccatgctcatcttgtttgttgcggaagacccacttgggtcctacaacatcttggttaagacgtggaactaaatgccatacctcatttcttgtgaaattgttgagcttctgttgcatcgccaacactccaatccgaatttgaagtgctttctctaccctgtgtggctcaatagaggaaacaatagagtagtgttcacaaaaatgagccacacgagatcgagtggttacccccttat

SEQ ID NO: 54670 - DNA, 324 bp, Zea mays
  unsure (1)..(324): unsure at all n locations
tgtctggttcgcgtcctttgagcagagacgcgaacgaaagcctttcggnggccgcgtccgtcctgggaccatagctgttgctgcagaggtcgctggcgagtcccccggaacttgccgccccgcaagctctccggtgtggaggttgctcatacctgcggggacggaaccggagttccgtttgcaatggcaccttgaatgccggtcatttttgttattgcagctgtcggagcctgaacacgtatgtattctcggcacggagtcgtgtttttttctcatttcgagcactaagactcgcctgtcggctatctgaaccgcttcaccaag

SEQ ID NO: 54671 - DNA, 484 bp, Zea mays
  unsure (1)..(484): unsure at all n locations
agctntagcaacatatattgagctatagggtcatgtgttgtagttgtttggatgtccagcaaccattgtggtaccacgactgagacagcatggacttcagctggggcacaacgggacaaggcgtcggccacacggttctctaagcctgagcgatactgaatcctgtattgcaattcgagtaatttggaaaaactttgtgctgccatggaatgtgaagcctttgttcatagagttgtcccaaacttttatggtccataaagataacaaattcggtgtgttgaaagtaagcccgccattgttggactgcaagtattatggccatgtactccttctcataagtggaaaggtcgtgggaattgatgcccaatgctcgactgagaaaggcaactgggtgaccttttngcatcangactgcgcctacacccaagtcactggcatctggctcaataagaaaaagagacatgaagtctgtgaaacataatac

SEQ ID NO: 54672 - DNA, 452 bp, Zea mays
tcttcatccccacatgtgcttatttgctatgccacagccagcccatgctcgtcttagcaattaagcatgcatctacaccagcctcttcttttgcaaaatcaactaagtagagcttgccgtctaatacacccttaacagctagtgaaccattacttcttctaaagacagacacatctatatgtgaaatagacagttatatcccatatgacataattgactaacagatagcaagttatatccaagactctccactagaaacacattagagatagaatgctcattggagattgcaattttacctagcccttttaccttgccttgattcccgtcaccgaatataattgaatcttgcgaatccttattcttgacgtaggaagtgaacatcttcttctcccccatcatatggtttgtgcatccgctgtcgataatccagcttggaaccccggatgcat

SEQ ID NO: 54673 - DNA, 413 bp, Zea mays
agcttgacaatgaagagatggcgctcgtcattaatatcttccgtctaatcctcaaacaaaggagggggaaagactacaagtcccgctccaagaaagtatgctataagtgtggtaagcccggtcactttattgctaaatgtccattatcaagtgatagtgacaggggcgacgaccataaagggagaagaaatgagaagaagagatactacaagaagggcggtgatgcccatgtttgtcgggagtgggactccgacgaaagctctatcgacttctccgacgacgaggacgccgccaacatcgccgtcaccaaaggacttctttccccaatgtcggccacaagtgcctcatggcaaaagactgcaaatagaaggtaaatctaaacctgcactcatatgaatctctatgatgacatg

SEQ ID NO: 54674 - DNA, 419 bp, Zea mays
  unsure (1)..(419): unsure at all n locations
agcttaagggacagtggacagctgtagactatgcctatcaataatcgtcaggcgacgaagacactgctttcgacatagctgctcggcacgggtcccaaattgaggctgctccaatccttgacagagtaggaactatttctttactaaaattagagatttcaattcaatgctttatgtctagtttagagcatcctaatgctttaacttgtgaatanggaaactctatgctcgtatctgttgttgaacttgagcgtatctcacagagaacttcagatagtactacgctttcgttactatcagggagtatcaatgtttaaaagaatacttgtttatttgtatgttgtaacatatatctgtaactaatatttcgattatagagggtatcacgtcgtcttcgtcggcagcggctcatttggatg

SEQ ID NO: 54675 - DNA, 210 bp, Zea mays
acttcagtggcttaatccatttttccccacgaccggggacgccaagtgggtctctgcaaccgaaacaccaagtcaaaaccctttcctttggtcttgtcctgatcccaagaaaacaaaaggcccggtctcatgggcaaatatagggcatgaactcacaatgtattccccgatggtgaagtgagagcacacgcgagaatgggacagaaatgg

SEQ ID NO: 54676 - DNA, 411 bp, Zea mays
  unsure (1)..(411): unsure at all n locations
agcttgcacttacgaccaaaccgcacccgctttcatattacattcaatggctcaacaatagtggtaaggtcaaggtaaccaagctggtacgaattaattttgctattggttcatatcgtgatgttgctgactgtgatgttgtgcctatggatgcttgtaatattctgctacgtagaccatggcaacttgattcaaaatgtatgcatcatggtaaatcaaatcaatattctctcatacaccatgataagaaaattattttgcttcccatgtcccctgaagctattgtgcgtgatgatgttgctaaagctactaaagcttaaactgagaacaacaagaatattaaagctgtttgttataacaaagatgggatataattgataggacattgcttgcttgcaacacanactgatg

SEQ ID NO: 54677 - DNA, 435 bp, Zea mays
  unsure (1)..(435): unsure at all n locations
agctngtgagcaatacaagntcagaatggatatatctgcttcggctgatcagccgaagcccatgctcttatgtgaggatataacagaacagaaggtgctactgggatctcaactgtccgaagagcagaggaaaaccttgataaggtttttgttcaacaacaaagatgtttttgcttggtcagctaatgatctttgcggagtaaacagggctgtcattgagcactcgctcaatgttgatccatccttcagaccaagaaagcaaaggcttcggaagatgtctgacgacaaggccgaaggggctcgcaacgaagtgaaaagacttctcagtgctggagttatcagagaggtaaaatatccagaatggctggctaacactgttatggtaaagaaggccaatggtaaatggagaatgtgtatcgantttactgatctcaa

SEQ ID NO: 54678 - DNA, 454 bp, Zea mays
  unsure (1)..(454): unsure at all n locations
agcttgcgcatgacacagaacaggagttcactcatgattctctactatnggacggacacaccacaagaacttagtcaggtcgctatgattctgcaatgaaagagaagaaagactattagtgtatgaattcatgacccatggatcactcaacagatttctatttggtgatgccaagctttagtggagtattcgagctcagcttgttctcggggtggcaagggggctggtatatttacatgaggaatgcagcacacagattatccattgtgacatatagtctcaaaacatccttctcgatgacaatttcacagcaaagatctcagaacttggcttatccaaactgctccgaaccaaccagacacaaacaaatacatgcatntcgggtacccgacgatatgttgctcctgagtggtttaagaacatccgtatcactggccaaggggatgtttatagc

SEQ ID NO: 54679 - DNA, 324 bp, Zea mays
ataactagagaatcaggctttaagatggcccttcttattcccattgcccttaacttctgaagccccaataaaagtgcttcatactcatcaatattatttgagcaactaacatccagtttgactgcataacatgatttaaaattttgaaagtgccactaggaccgcagcttgttctgcaccgaaagctccccaagaaccatcgcaaaacacagtccaagcttcggcatctttgtgtgtcccctcttcgtgagcccctggcgtccaatcagcgatgaaatctgctagcgcatgggatcgaattgaagatctgtgcacgtagtcaat

SEQ ID NO: 54680 - DNA, 444 bp, Zea mays
  unsure (1)..(444): unsure at all n locations
agcttatgaagaatcttcattccaacatgggctagtcggcggagccagagccaacccatgttagtcttagcaattaagcatgtgtcgagttcagctctatcaaagtctactaagtatagctgaccctctaacacacccttaaatgctattgaatgatcacttcttctaaagacagtgacacctacatcagtgaatagacagttgtagcccatttgacataattgggaaacagaaagcaagttgtaatctaatgaatcaacaagaaaaacattagaaatggaatggtcaggtgaaatagcaattntaccaagtccttggaccaaaccttgatttccatccccgaatgtgatagctcgttggagaatctttgttttctcatatgaagagaacattcttnntctcccagtcatgtgggttgtgcacccgctatcgagtatccaactt

SEQ ID NO: 54681 - DNA, 336 bp, Zea mays
  unsure (1)..(336): unsure at all n locations
agctttgtgtggagttgggagaggattcgacctccntgtgtatcttagtttgaatgctagctcttgtaaggtgtagaagagtggaaaacttgcatgccattgaatgtggggtggntccccncctcctccttnctctcctcttacttcctctttcatttctctcttcctttctcatcctcttcctcctctctctctcttattctccccttccctcctcctatctctctccctctttcccctaccccctctctcctcctttcttcttcatcttctcctttctcctcctactccttctcctctctatccttttctcctcttctctcctctcatctcctc

SEQ ID NO: 54682 - DNA, 477 bp, Zea mays
  unsure (1)..(477): unsure at all n locations
agcttggcgcgcggagtacgtgtctcatagcgtgtgtttaattccggtgagccacggngagtccaaaggaggtcacggcgacacggtgaaagggttgagccacgcggcgcgatgccgggaagcggcggtcaccggcgaggtaatccactcggccgcaaggaagaagagagagccacggaggtcaccggagtgatcgccagcgcacgggcggtgaatatcttttaacgccgcgaagttatccacatccccgagcacgaatcgtgacgccggcgacgtgaatcacggcggatagccaccggcggtgaagacagccgtgcggcgaccttatctaattcagttactgtaccatgggaaacactgattcagagcgactgacagagcaactttagagcaacttttctctcaaatcttcatggtaacaggtccaactctctgcagcaatattgtagtgctacataccagctacaactcgactat

SEQ ID NO: 54683 - DNA, 383 bp, Zea mays
aagatagaccttgtgcagcatgtcaagcatgtaaacaggtgggaggagcacatcacagcaagaatgtgatgaccacatccaagcccctggagctgctacatatggacctcttcggactcgtcgcttatctaagcatagggggaagtaagtatggtttagttattgtggatgactcttcccgcttcacttgggtattctttctacaggataagtctgagacccaaggaaccctcaagcgcttcctaatgagagctcagaacgagtttgagctcaacgtgaagaagataggagcgacgacgggtccgaattcaagaaccttcaagtggaggagtaccttgaggaggaacggatcaagcacgagttctccgctccttacacatcac

SEQ ID NO: 54684 - DNA, 401 bp, Zea mays
  unsure (1)..(401): unsure at all n locations
agctngctcaaaaataggcaaatggaanaaactatctattgattctgttctttagcctctgcgatagacagttttgtgtttttgacaaaagagaataattctggaaattgttgtcttggaatgttctggttccactgatcatcccagaaagaaattgatctgccattgccaatgactgggtgcgccagacccttaaagttagaaaggagtttgatcatgcttttccaccagaaggaaccaatgtttcaatgacctaggagtccacgtgacaaataataattattccagatgagatttacctagagtaagtcatagctattaaagaacttatgcaaaaattttatcagaagagcatcgttttgggtttcaaggcgaagcacccncagaccaccattcacttt

SEQ ID NO: 54685 - DNA, 268 bp, Zea mays
gccacccacagcgtgaagattaaactattaagctatcaccaaagaccgctccgagttttgcttcaggttcctactaaaaatggaaagcccccttagggggaaaaagaagaactggccatacttctttcagttaaaacttaaaccctgcaaggctgaaccatgaaatggcagaatctcgattctcaaaaaaatagtgtatgggcttgcccgccacgaatgatcaggcgaccctattttaaccgcacaaattgaaaaggcaagcccaaga

SEQ ID NO: 54686 - DNA, 92 bp, Zea mays
gcagccacccagtactacataagcttaacgccttttaaaacactaaagttgcgctaaccctaacaagaactccttttaaacgaacttcttga

SEQ ID NO: 54687 - DNA, 388 bp, Zea mays
  unsure (1)..(388): unsure at all n locations
tgcagcttgaacgcgatggttgctacttgttgtaacttcttcttcnntccctctgtcggcttaaaagccaccggttgtgcttcggatgtggagggatcatcaagctcgttgatcttctttgagcccttgatcatacattcaaagctcacaaaattcccgatgacttcctcgggagtcattagtgtgtatctaggattaccacgaattaattgaacttgagtggggttaagaaagatgagtgatctaagaataaccttaaccacctcgtggtcatcccatttcttgctcccgaggttgcgcacttggttcaccaaggtcttgagccgtgtgtacatatcttgtggctcctccccttggcgaagacggaagcgactgagctcccnctcga

SEQ ID NO: 54688 - DNA, 266 bp, Zea mays
  unsure (1)..(266): unsure at all n locations
cacacaagaacattatgatgagtgacaggccgcttgagctactccacatggatctattcacnctgatagcttacataatcatcggcggaaagtagtatctgcatgctattgcggatgattattctcacttcacttgggggtactatttcgcggaacaatcacaaaccccagagaccttaaatggattctttagacgggctcataatgagttcggattaacagtctagatcataagaaccgactacgggatggagtncaagaactct

SEQ ID NO: 54689 - DNA, 296 bp, Zea mays
accggagaggacgctagacttattggaacttatacatactgatgtgtgcggaccaatgagtactactgctaagggaggattccaatacttcataaccttcactaatgagtttagtagatatgggtatgtctacttaatgaaacacaagtctgaattcttagaagagttcaaagagtttcagaatgaagtagaaaatcagcgtggcaagaaaattaaagcactgcgatcagatcgtggtggtgaatatttgagtcatgagtatagcaatcatctaaagagttgtggaaatgttccac

SEQ ID NO: 54690 - DNA, 296 bp, Zea mays
  unsure (1)..(296): unsure at all n locations
aatgccaatattttgaaggaagcatcctcatttccttgaanaatcaatgtgaacaatgtatgagtacataatggctgataatgattttcaccaaagaatggggagtttcacagatacatcgaagtcgctgggtcttcggaggaatgtttcatccaagacatgttcgaagtattcataacccaccatagggtgaggaaaggatggcccactctcagggtcagtcatgacagcaatangcaagctctcagcagcaaccctcacatagcacattnttgcgacttgctccaagaagaatg

SEQ ID NO: 54691 - DNA, 461 bp, Zea mays
  unsure (1)..(461): unsure at all n locations
catgcaancttntagcaataaacataacttgcctaaatctctaccatgcattattgcgtttaacgacacatgtcatgtgaaagctacaactatcatttaataccactcaaatatatagatccatatcgaattcaaaaaggaatagaccaacttccatacactggcggaccaagaatttacttaaaagacatgacccacatttttttcatatataactttagtaaaactgtttgattctttaatatgactagataatcgtacaaaagactattactcattttatatattctataatgagcctggagctattaatgatcagtggcctactatttgattcgctataagaaattttttataaaatataacgccatggaaaccagaataactggtgctttataagagtagaaatntattaacaacacaaacggttcttcttgactataacatttcacttctttatt

SEQ ID NO: 54692 - DNA, 372 bp, Zea mays
  unsure (1)..(372): unsure at all n locations
agcttgccttcgctatagtctatcatccgcattttaacggngtcttttagcgctccanagggagaaacttcacagctgtcaagaagatgctcctcgatgaacaaaaggcacatggaccgattcgttaccggaggcagtctgggcgctaaacataactgagtgcagggcgactgagttcactcctttccgccttctatacggatcggaggtcatgaccccgcacgaaataaagcatgggtccccgcgtacagttccgtcagccgtccacgacgtggacgagccaacttcaaaagatctcattgacggagaccgggtcttcgccctacaggccctanacaaataccaagcccataccaaagcatggcgcgacca

SEQ ID NO: 54693 - DNA, 373 bp, Zea mays
agcttctagagggagaacactatttgggactaacaaatgttcatttttataaagacaggaactggagcgcatgtcaggcagggaagcaagctggtgttcatcatccacacaagaacatcatgacggctgacaggccactcgagctcctatacatggacctattcgacccgattgcttacataagcatcggcgggagtaagtactgtctagttattgtggatgattattctcgcttcacttgggtgttctttcttgcaggaaaaatctcatacccaagagaccttagagggattcttgagacgggctcaaaatgagtttggcttaaggatcacaaagattagaagcgacaacgggacggagttcaagaactcta

SEQ ID NO: 54694 - DNA, 366 bp, Zea mays
atgctcttgatacccgtattctgattccgaagatgcctgttcgctacttggaaaaattggcaaatcatatttttgaggaccttctgaaaccgaacgccccccacagtagccccttcgaatattaatttgctataatgataaattcatattgcgacatggacgaaggccttaaacccaatgccgcaaaaacaccttctctttgctagaatagcaacagtccttgacaagccggacccttccattttcaacgcactaggtgtataaataagggatcatcacgagtttatttggcacgctctcttgtcaactggctttactcacccaacttttagcctgcgcgcaacaccacttggcttttagatttta

SEQ ID NO: 54695 - DNA, 363 bp, Zea mays
  unsure (1)..(363): unsure at all n locations
ttatgcttcgttgtgtacgataagaagggaaagtgctttttctccttcggctcaaaaaactgatttcgtccacatcaaagcacctcgatcgaagggtaagaatatattacaaggtatgtacaaagttccttgaagaacagnttaattctatttacaagagttgttacaaaattatcctgagtttttctaaagcacacttctgctagtcttcattaaacttcagcttcgacgacaacttcggcgacatatcctaggaatcatcttcaccttcgtcatcctacatgagtcaaggaatcataagaatcaagcccaaaggaacaggtgagcacgaaatgtctcctttactggtcaagatgacttcgg

SEQ ID NO: 54696 - DNA, 87 bp, Zea mays
  unsure (1)..(87): unsure at all n locations
agctntacctctttcacaatacattattacattcttgaatttgtataaaaagatttcaacttactctaatttcccctgctaagggct

SEQ ID NO: 54697 - DNA, 416 bp, Zea mays
  unsure (1)..(416): unsure at all n locations
ttcctcttaggcaattttgcacgggttgattgcctagagctagatgtctcacccttatacataaaagcatgattaaggctagagtgagacttcctagagtgaattctcctaatcttatgctcgggataaccggcagggtacaaaatgtaaccctcgttatcctgaggcatgggagccttgcccttaacaaagttagacaatcttttaggaggggcattaagtttgacatttgctcccttttggaagccaatgccatccttgatgccagggcgtctcccactatagagcatgcttctagcacatntaannatttcatttgctaagtcatgctcattaattttgggcattaagtgagctatgtgatcattntcgttcttaattaaagctacgtgatcatgaatagcatcaatattaat

SEQ ID NO: 54698 - DNA, 298 bp, Zea mays
  unsure (1)..(298): unsure at all n locations
gaacaagttacctcacaccacttctgaacggtaggaccaactcgacttcttgggagggatgaaccgctaaaaccgtgcactacccactgcattggtgggccattctctcgcgccttggaatattttatatcgtttctcggcaataagctcatggaaggtgtgtttggaccttcggcattccgaagcttcggagatgttatcacggatcacgctcgttacgaataatgatctagcactgctaatgggctactgttggngggtctggttcgtctccgaacgtcctgcacgaaaaacacct

SEQ ID NO: 54699 - DNA, 469 bp, Zea mays
  unsure (1)..(469): unsure at all n locations
agcttatgaagattcttcattccagcatgggctattctgcggtgttttagccaacccaagntagtcttagcaattaagcaagtgtcgagttcagctctatcaaaatctaccaagtatatctaaccctctaacactcccttaaatgctattgaatcatcacttcttctaaagacagtgacacctacatcagtaaatagacagttgtagcccattngacataattgagatacagaaagcaaattgtaatctaaagaatctacaagaaaaacattggaaatagtatggtcaggtgatatggcaattttacccaatcctttgaccaaaccttgatttccatccccgaatgtgatagctcgctggggatcttggtttttctcatatgaggagaacatcttcttctcccctgcatgtggttttgcacccgctgtcgagatccaacttagccccggatcatagactacaaaaattt

SEQ ID NO: 54700 - DNA, 125 bp, Zea mays
ggcacatagaaggtcttccaccgaagacgccctgattggtatacaaaagaggaaaaagcctaaaactactaatcagatttctttacaaaaccaaaaaatgtatcatttataattgatctcatcag

SEQ ID NO: 54701 - DNA, 364 bp, Zea mays
  unsure (1)..(364): unsure at all n locations
agcttatgaagactcttcatcccaacatgggctattcggttgtgccagagccaacccatgttagtcttagcaaataagcatgtgtcgagtttagctctatcaaaatctactaagtatagctgaccctctaacacacccttaaatgctattgaatcatcacttcttctaaagacagtgacacctatatcagtaaagagacagttgtagcccattttgcataattgagatacagaaagcaaattgtaatctaatgaatctactagaanaacattggaaatagaatggtcaggagatatagctattctaccaagacctttgaccaaaccttgatttccatccccgaatgtgatagctcgttggggat

SEQ ID NO: 54702 - DNA, 449 bp, Zea mays
ttaagtcacctgcggcatgaagcttgctcaggccttcttcttttctccatatttgaaccttgctggaacactaccccacttaaaaagaaagagggtagaactcttgaatcttggggatttgaactccttgaagtacctcataacaaaggtgttacagggccttcttctgttgttgctgcttgagcaagctgcggagaaatgactgacacagggttgattctgggacaaccttcttctcatcttctcttcactatcttcttttctcttctcacttttcacttttcactgcctctttctttctctttgctcttcccactcgaggattctatcaaagagtattaccatcatacagaggaggaaaccgaagatgttgaaccatatacaacagtcttcaacccaagaatcaccaagcattgtgatcttatgggcgagggagtggaaaaatggag

SEQ ID NO: 54703 - DNA, 459 bp, Zea mays
  unsure (1)..(459): unsure at all n locations
agcttcagaggtgagtngatgaagaaatatctttaatctttnattttcttcaacaagcattntatgcataggaaactgatggccagcttacataaaactcttaaaaacaaccacttcatcagcttcaggaagaggaacaatattctctcctccggccgtcactatagttgtgccacgaaaatatttacatttcgttgcttcaatctgtcctctcttaacattggatttttgtagcaccccgaaaatttaaatcttgaaagtttctcaaactcgctctaaattcaaaatgaattttaaatttcgtttcacaatgtttgtttgtgagttgatctcaacaaataaaatatagtggtctatattctctccaaaatccttctcaaaatatcctacaaaaatttcaccagcgatccctctcaaattctttctagaaatattgcccaaatattccaccgatnactc

SEQ ID NO: 54704 - DNA, 461 bp, Zea mays
  unsure (1)..(461): unsure at all n locations
catgcaancttaataaagtaaaatattatggcaaaactgtggaagnacctatataagattaaanaaaggggtactatgcgaaacctgtgaaaaagtaaagtctgccacaacacagaatttggtaaaatgtaataccaaccagacacaacggcataaaattcgggtgcttatatcacataatgtgcgtttaaaaaaatctcattattgaaagtaaccaacagttactgggtgcttacctgtagtggaggagttttgtcaaagaggtaacaagctggaattcgaaaatcagtatctccttttgctgggtcattcgaccagggtgagccaaatgtcttgtatagattatctggcgagttcaaagtcaaacccaatgctgtcaaatctattcctaaagcaagagatgctaaatcagcatcattcatgcttataacaccccataatcctaacaagccatatggatc

SEQ ID NO: 54705 - DNA, 440 bp, Zea mays
  unsure (1)..(440): unsure at all n locations
catgcaactaaagccatggaagagctaggctaatttattcgaatttttctagcctagctacgggggcataggtttcaccgaaatccaaaccttcgacttgtgaataccctttggccacgagtcgagctntgttccttgtcaccacaccatgctcatcttgcttgttgcggaagacccatttggctcctacaacattttggttaagacgtggaactaaatgccatacctcgttccttgtgaaattgttgagctcctcttgcattgccatcacccaatccgaatcttgaagtgcttcctctaccctgtgtggctcaatagaggaaacaaaagagtaatgttcacaaaaatgtgcaacacgagatcgagtggttacccccttatgaatgtcgccgaggatggtgtcgacggggtgatctccttgtattgcttggtggactctt

SEQ ID NO: 54706 - DNA, 467 bp, Zea mays
gcaagcttagctccatctatattgcggatggcttttgtattctgccaatttcccttatcctttctggcagcttcctgacttccatgaattgcaatagacccttgttccgaaggtatcttcatgcataggtatgctggatgaagaattgcttcgaaagcattaagtgtcccacgaccaatgattgcattgtaagggtattccatgtcaacaatatcaaacacaacctgttcagtccttgtgttgtggacaaatcctaacgtcactggcattgtgatattgccaagtgctacgatctgcctttctccgaagccacaaatagggtgtgtagcattatgaatcttgtcctctggctcttgcatctgtctgaaggccttatcaaatatgatatctgccgcactgcctgtatcaaccagaacattatggaccagaaatcccttgatgacacaagatataaccatagcatcatt

SEQ ID NO: 54707 - DNA, 378 bp, Zea mays
  unsure (1)..(378): unsure at all n locations
agcttcggatcattgnacttttgttttgnatttctctacataacaaagngcataaggcagactcacagttcaaggataanggaagtatcacgtatgaatctattaccgacttgaggtgacttcgagctctgtcaccagctaagcttcgtccacccttcgtccagatttgtgttatgaatctatttcctatgcttcgagccaggctgcggatatcaattaaatctgctggtgacaaattgaagtttggtctattaactatnttcccatgcgtgcaaccagttttcatgaaggcaacagctgtgccccgagaagctagcagggcacaaaaatcgatgtgcccagctataattcgtcaagagcatcaactncgccctcaat

SEQ ID NO: 54708 - DNA, 360 bp, Zea mays
gcttccccttcacatgccatggtcggagcttttctgtctttattggatgcgctagcaattgctattgaagtggtttattaaaatgcagatgatcatgatgaaaattcgctatgatatatatggcgaagtgatgaggggacaatgaatgctttcaaaactctttctgttgtaacattggaatggtaatataagcactttacttggtctttatttttgcctttgtgatgtgtgaaatcaaaatctcacatttttagccaaaggcgaaaaacaccttcccttcttttttcacatgtgacaaaggcaatgctcttctttattatcttcgatgactcacagttgtgtgtgaaattgatagaactt

SEQ ID NO: 54709 - DNA, 354 bp, Zea mays
  unsure (1)..(354): unsure at all n locations
tacaaaccataccagtaacttggcctttcacatactggggattggatatggttggacctttcaagaaagctcaaggaggatacacncatgtattggcggcaattgacaaattcactaaatggatagagttccagcccattgcctctttaacctctgctaaagccgtggaattcatacaaagcataatattcagatctgggataccaaacagtatcatcactgacctgngatccaactctaccagttcagaattctttgacttctgcgagcaaaaaagcattcagatcaagtatgcatctgtacgccatccaagagccaacgggcatggtgagcgagcccacggaatgatattgg

SEQ ID NO: 54710 - DNA, 314 bp, Zea mays
ctgcagctatacagagattagcagactttttttttttttaaagggagtgtacacctgagttggctcccttctaagttatccaaactaggttcagttatgaagaaatctgccgctatgtgatctactcaatctatgcgtcttggaaaatttccgcaagatttatggcgaggcccttcgagcacagaatggtcaaaggcaagggtagaatggcagagacaaacaacttgccttaccactataacccctggcatgcaagggggcctgttgtagtcgtccacgcccaggaccgaaatgtgatactgtgattttttaag

SEQ ID NO: 54711 - DNA, 454 bp, Zea mays
  unsure (1)..(454): unsure at all n locations
tgcaatcttaaaatatgagaagccattacatatgctatttttcaatgtatgcaactattctntatgagagctacattattgtaacatgttggattgatatgtatgtgcctacatcatgagaaacttattatcatgcacgagactatataagattactaggataaagcgatagtctcaatataatcaagatttagaaatatgctccccctaaagatatgcatcatgttttgaaagaattggacttattttttaaagacaaaatagggagaagcattattcatcttgatcaaggcatgtatgatttgcaataaataacttatgcctagttattctcacaatgaacagaattagaatgcttacaaccacaccatgattgttgtgaagatctcattatccaagtaggtgtcgttgctcttgatgactttctatttcatttgagtggtctcgctttata

SEQ ID NO: 54712 - DNA, 421 bp, Zea mays
  unsure (1)..(421): unsure at all n locations
catgcaagcttatgaagattcttcattccaacangggcttattttgtgatgttatatccaacccacgggaggcgnagcaatgaagcaagcgtctagtttagtttgattataattaaaatcaaccaagtatagctgaccatccagcactcccttaaatgctactgaatcatcacttcttctaaagatagtagcacctacattagtaaatagacagttgtagcccattttgcataattgtgaaacggaaagcaagctgtaatctaaagaatcttcgagaaaaacattggaaatagaatggtcatgggttttaactcatttacccaaacctttgaccaaaccttgtattccatccncgaatgcgatagctctcttgggatccttatatttctcatatgaagagaacactcttttctcctctgca

SEQ ID NO: 54713 - DNA, 425 bp, Zea mays
  unsure (1)..(425): unsure at all n locations
acctgcagcatgcagcttgccaataggcgcaaananacctttgttttcttttatactgncagggcattcttcacataaaactattctatcatccagtcgccgggccatctctttcgaaaggttggcacgggacagcttgacccggaccgagaaacgaaattgtagcagccaaaattattgtgatactgttccttaccccaaggttttgtttcgtatgataattcgtgtatattgcagaaactttntgcatcaggcttcagaccttggcttctcacggcccacacgaagatgttcagccttatgattgcctcacgggtaagttggtgaagatagacttcgaatattctcagcacctctacaacgaagctgctcaggggaaatcttagtccagctttcaaaaagcttcggacactacgacttcattc

SEQ ID NO: 54714 - DNA, 409 bp, Zea mays
  unsure (1)..(409): unsure at all n locations
gacccagagcactgcagatcaactcaccaaacacctttttctgtattttaaactcccnnccggagcgagcaaagacaatgaccatctacagatagtgaggctgccactggcagcgaggcattgacatgccatcgcagactatgggggagtttgaatgcacataaaactaatagctagttggctgaaaaatattagtggaattatctagctaacaaatcactacctaactattaactaatgaactaaaaatagctaatacatgaactatcacctacgggagcttggatgcctgaactaatattagcggctaatcgatgatgctatatacgtaccatcacgaaacgacgaaaaaggacgtcatatactcaaacattctttcgtgcatcatgagttgataatccattgatac

SEQ ID NO: 54715 - DNA, 392 bp, Zea mays
  unsure (1)..(392): unsure at all n locations
agcanggatgtggcatgccaaaaacccaagcccaagcagaggtgctgctccatgcagatccactntctcctttgcctttccttaagaggctccaattgcttgctttgntgcaagacaacgaagtaggaaaggttattttctatgtagacttctttntcttgagttctgaagtagagactaattgatgatcatgccttctgctgtaccactgtaacccattgctataaagtcagattagtaaggcttgaccaaagattagtaaggctagaccaaaaatgtgaaagatcgtagcttgctatattancacgttaacacctacatcactaaatgttacacagtatatttcattattctaccccccgtagcgcgcgccagtactagtactactatac

SEQ ID NO: 54716 - DNA, 337 bp, Zea mays
cacaagatatgaaaggggttaatacattatagacgaattacattggttttacttaatatattgagtcgtggaatacaataatacctttgccttggcaaaaagttgtattccggaagatgccaatgcaatttcttgaatgcctgagcacgaatggaatactgctcactatttatatgcacaggacgcaccccgtgaagaattacaagtatgccccttataaaagcttacaacattgactcagacctttatggactaaaaggtcattctatctttaagtccggttgcaatacccgaagcttacgaagaggaaccttctgccattttatacaaacagctt

SEQ ID NO: 54717 - DNA, 343 bp, Zea mays
  unsure (1)..(343): unsure at all n locations
aaaatgaagatggaggaagcatgatgagtctgacattgatggtgatcctttcatagaagaacgttataagatgagagaagcaatacaagatactgagagggactggaacgactatgatgacacgttctatgaattacagaagagtaagcttgacttggagcgagatcagcacgacaaagagataatgcatactagctaaagcacaatggacaaagaatcaaaagtgtacttcaagttgatgaaacaggagattttggctcgcccgtttgggagtacgcaatctgcatgatagtgtccttgacttaccttgtggtagaccaataatttncatatcacatgttct

SEQ ID NO: 54718 - DNA, 264 bp, Zea mays
aatcgactcgagcctagctacgggtgcatatgtttcaccaaaatccaaaccttcgacttgtgaataccccttggccacgaatcgagctttgttccttgtcaccataccatgctcatctttgttgttgcggaagacccacttggttcttacaacaatttggttaggacgtggaactaaatgccatacctcattccttgtgaagttgttgagctcctcttgcatcgccatcacccaatccgaatcttggagtgcttcttctaccct

SEQ ID NO: 54719 - DNA, 438 bp, Zea mays
  unsure (1)..(438): unsure at all n locations
catgcaagcttataaaggaaggccnctcgacaatctgttaatggtgactttcttcatgttctaagaaccactaacctggcggctagaattttagtctgtatataagctaatacaaggcttcgagtagtgttcctcggtattatattccctttactgccaccaattctaagcaaattgtattagggtccgtttgtttcgttggaattaaattccattttaataattataatttagacaaaactaactaagttcatatatttatatatgaaatatattcgatattatcctaaatcatataagagaattaattatatactacatttatgttatagcgaagcaagtaaaagagtgtgttataattngtacatcgaanaaatagcatgtaaatctatagaattaattttcatctcccaccccatgaatttaaataagctatat

SEQ ID NO: 54720 - DNA, 381 bp, Zea mays
aaccggcgcacaggtctctccaaacttaagccgtcaactagagagaactcctttgcaacaagccttgccttgttctgcacaatcacaccttgaacatcttgtttgattcggaacacccattatgttccaatgacccttgcatcttgtggaggctttttcaaggtccaaacttgatttccagtgaagttgttcaattcttcatgcatggtattcacccaattcggatcctgtatcgcctcatctatacatgtaggctcaacacaagatacaaagagtgttgtcattaaatgaaccttgctttgagacgcagtgatatcccttgtaaggactcccaatgatagatcttgggatgtgtcggagatggtgagtcctctatcacca

SEQ ID NO: 54721 - DNA, 439 bp, Zea mays
tgcaagcttcgaactgcagaactagtaaacccctcttgtttaggagatttgtttttctctgcagggcatgctttggtacttctcaatactacaactaacttttgatatagcatatcacgccaaatgctggcagcattggggtgggcatcaaatacatcaatatttttcagatttctattcaccttgagctggatacattatatccctggatgtatgtttaataaaggaaattaactataaatacagcattagaaactataaaaattgttctaaaaccactgactcaaagtaactactgacgtgtttttttctgaaataaaatgattcaatactgatagatatattcttccacattgaactagtatttgcatatattttcatttcacgacaggctatgccacaataagtgttccgttgagcaaaacaatgcgaaatgaat

SEQ ID NO: 54722 - DNA, 345 bp, Zea mays
gcagcttatacaagggatattgcagagcttttctttttttgatagaagggagtcgacaaacatggagtttgtgctccgttgctcaaatgtttatccagaaccgaaggtatagagttaatgaaagaaatacatgctggcctgtgtggatctcacatcggatctaggccgttacttggaaaaattctccgtcaagggttttattggccgaaggcagcttctgatgcagcaaatatggttcagaagtgcgaaggttgtcagaaatgtgcaagagatcaaaaacaaccttcgtccttaacacagctcatacaacccacttggccattgcaaaggtggcgccttgacttg

SEQ ID NO: 54723 - DNA, 329 bp, Zea mays
  unsure (1)..(329): unsure at all n locations
ccgataaatagggaacagtattccgtttctagtcacacattctgatgattgcggtcgcactctttggaatccaacttttgccaaggcagaggtattattgtattcaatgactcaatatattgagaaaatatcatcgtactcatctatgagtcacttactcctttnataccctttactttatgctatcttacaatatctattgacaatttattaccaagatttaagcttcgcaattatgctcttatcagccttcgtgcaaggcccattatactcaagggaataatgtttcttggaccaacgacattacacttaacacttcatgttgtctt

SEQ ID NO: 54724 - DNA, 305 bp, Zea mays
  unsure (1)..(305): unsure at all n locations
tcactctatcaagctacaagatagctgacctctaacactcccttaaatgctattgaatcatcaacttttctaaagacagtgacacctatatcagtgaatagacagttgtagcccatttgcataattgagatacagaaagcaagttggtatctaaagaatcaacaagaaaaacattggaaatggaatggtcaggagatatagcaattntacccaagcctttgaccaaccttgatttccatccccgaatgtgaacgctctttggggatccntggtttctcatatgaagagaacatcttcttctccct

SEQ ID NO: 54725 - DNA, 351 bp, Zea mays
  unsure (1)..(351): unsure at all n locations
gcttcactccatctatatggggaccgcttttgagtctgttcttttccttcggccnntctggcagcttcttgacttcgatgaatagcaatgggcccttgttctgaaggtatcttcatgcatagatatgttggatgaagtattgcttcaaaagcattgagtgttcctcagccaattattgcattgtaggggtattccatgtcgacaattgtcggcgtttcgagaccggggggtccctaagccgacgagtgagtgtgtcgcgtgccccaccccaaatgggtcgagcgcgtgggcgaacgcaaagaggggaagcgaggtggccggagactggcgtgagagaggtggaaatcccgc

SEQ ID NO: 54726 - DNA, 380 bp, Zea mays
  unsure (1)..(380): unsure at all n locations
gcttatgaagattcttcatcccaacatgagctattctgcgatgctatattcaacccacgcgagncntagcaattaagcaagtgtcgagttcagctctatcaaaatctaccaagtatagctgaccctctaacacacccttaaatgctattgaatcatcacttcttctaaagacagtgacacctatatcagtaaaaagacagttgtagcccatttgacataattgtgaaacagaaagcaagttgtaatctaaggaatcaacaagaaaaacatttgaaatagaatggtcaggagatatagcaattctaccaagtcctntgaccaaaccttgatctccatccccgaatgtgatagctcgttggggatcttggttnttctcatat

SEQ ID NO: 54727 - DNA, 380 bp, Zea mays
  unsure (1)..(380): unsure at all n locations
ggcagcgatctgggaccatctgcacaggctcaattattaagagcacacaaagggggtgtgaatatttttttagctgggtgatgtgaaatttttgttcctcagaacgaaacacatgagcataaagggggcagctattcctttcccccatgtttcagccagctgaacttgaagcaaatgcataaattttacacgtttccattgtttcgcaattgccggcttnatgggttacaactggagtttgcgctacaagtgaagaggttgagaatcacctgagcggggctgttactattgcccttctaatctagtgtgctcttcaattcacatgcaggtatgaaatccacatcggtgtatcatttactattcattcaaagtgcaacaac

SEQ ID NO: 54728 - DNA, 272 bp, Zea mays
gtaagcggcaaggccgaccgagccgagggattcccacgcctctgggatacggatacctcactcgtcccttccgcgaaaagcaactctcgctcacacaaacatccctgttaccgacaaagtccagatgctcgaaacaagaggaaaaaagacgcagcttcgcaagcgcagcgagggtgtgttcttctggcctcggcggccgcagaaagcacacgctacaggatgatctgatcctgcaggctcgggtcttcacgccgaaaggagccgtagcaccc

SEQ ID NO: 54729 - DNA, 339 bp, Zea mays
aaacaaaacaacactcttttatgcctaatgagaagaagcttgttttgcaccctatgtcccccgatgctattttgaaagatgaaggtgcttgagcatgcaaagagaaaaacaaatctgttcataataaaaatctagatgttccaaggaattggtacaacctaagagtgatgaatctaaatctgctcatgtaggaaaaatgaaatacaactggaaagcgcttgttcctcgccttcaatctgattacttgattaaacgatgttgattcatctgctatgtgttatatgcaaggatgtttggtctcacttacaacataccatctactttgcgtctactatcact

SEQ ID NO: 54730 - DNA, 163 bp, Zea mays
cgccaagactcatcactccttgatccagatctttacgcgtcgggagacgcggtagaatgcaactgcctggtatgcgtctttacgatgcgtacactgcggctcaccgtttcgcccgttgggaaacccccgccagagcccctgcagagagagcgggccctacgcc

SEQ ID NO: 54731 - DNA, 371 bp, Zea mays
  unsure (1)..(371): unsure at all n locations
ttttaatcaaatcatcacatgaagttgttatatcaatcttagtaatttgggtaagagcaacatgtgtttcactaagcaagagcaaaagcaatggcaagattatcatgattatcttaacattagtcttattttaaagatgtaagtctagatttgagctccctatctatcccttcaagtttatattggtttccctttatttatcttagatatgattntagctgcttgatgttggacgacatatttttattntcttattntagtccatcactagattttaggctgtatacttaacaagcaatacttcttcttatattntaaatttaatcatattgagcttgatttctattaattgaggggattcttaagcatca

SEQ ID NO: 54732 - DNA, 389 bp, Zea mays
tctggatgcaccggactgtccggtgtacaccggacagtgtccggtgcaccagaggactccaactcgaactcgccccctttgggaatttccagggcgactccgctataattcaccggactgttcggtgtgcaccggacatgttcggtgctccaaggaagaatcgccccaggaactcgccagcctcgggttttcacttcggccgctccgttataattcaccggactgtccggtatacaccggactgtccgggcaactccggagcaacggctatctccgcgccaacggctctctgcggtgcattaaatgcgcgcgcagcgcgcgcagatgtcacgcgcgctcatactggcgcaccggacaaggaacagtagatgttctgtgtgaccggacat

SEQ ID NO: 54733 - DNA, 474 bp, Zea mays
  unsure (1)..(474): unsure at all n locations
cactgcagctgcagctttgatanttacatacaagncnnctctttttgcgcacattgtgccggagtatcacataaaaggtaggcttatgtccatcaaattgtcgcgactttcatttcttttctttgctctcgcatttatttggtaggcaaacgaacactnccttcagcttattgttagataaaatgacgcanataaactatgttctctggatttccttctgatgatcagngcatatattcatacatctccagcttcgctaagcaaatatcttatcagggtcatcagtattatcttttggatcttcactataaaattcttgttattagagcaacctcagtagttttcttatacacttcttaaatcaacaatttaagtagttaacacaaagtctcatctccaacagttctctaaataaactttctaaattaacaactgtcatctaaccctattactcttacattcgcaccatttaca

SEQ ID NO: 54734 - DNA, 338 bp, Zea mays
ggtcctgtatcgtcaaccctgaaggacaaagtatgtgtgcctatatttgcttcaaaattaccaaaatatatagctgtataccatctacctgtttgacctggactgacctcaaggtgcattccagggcgaagttcctagatgttctaaagaactggccacatacaaacattcaaattatcatttgtactgatggtgagcgaatcttgagacttggagatttgggttatcaggtatgattgtctcattagtaacttattacttcagggcccttgcttatattatatcgaatccttctatatggaatgggaattcatgtaggcacacttgctatatacact

SEQ ID NO: 54735 - DNA, 285 bp, Zea mays
atcattaaaatcaactaactatagttgatcatctaacactcccttaaaagctattgaatcatcactctcttctaaagacaggaacacgcacaccagtaaaaagacagtaggacccattctgcataattgaaaaacaaaaagcaagctgaatctaaagaatctacaagaaaaacattggaatggaatgggtaggagatatagcaattttacccaaacctttgaccaaaccttgatttccatccctgaatggaaccactcattggggatcatgatttttcttatatg

SEQ ID NO: 54736 - DNA, 238 bp, Zea mays
aatttcttttttgtcagtgcatcgccactaatttaacagacataatgaatagccatctcatacatatcaatatatacattattcattaaatgcgggacctattagggacccaacctatctacggtacccatatatagtgaaggcgagggcataatcggacatcaacatgatcatacctaccacctactggaagagcacttaaactcttcccggccctttaggaacaacgtcgcagctg

SEQ ID NO: 54737 - DNA, 344 bp, Zea mays
gcgcgccaatggggaacatcttcacagctgtcaagaagatgctcctcgatgaaaaaaggcagatggaccgatttattacctgaggcagtctgggcgcttaacacaactgagtgcagggcgactgggttcactcctttccgccttctatacggatcggaggccatgaccccgcaaggataaagcatgggtccccgcgtacagatccgtcagccgtcctcgacgtggacgagccaacttcaaaagatctcattgacgaagaccgggtcttcgccctacaggccctaaacaaataccaagcccagaccaaagcatggcgcgaccacgcagtcattccgagggagttc

SEQ ID NO: 54738 - DNA, 318 bp, Zea mays
gagagaaaattaacggtaacggctgatcgcggtggataatatttttcgggtgaattctctgacttttgtgtcgaacatggtattattcatgagacgacaccggcatactcaccacaatccaatggggttgctgaaagaaagaaccgtactctaactgatttggttaacgccatgttagagacttcatggctatctaaagaatggtggggtgaggcgatcttgacggcgtgtcatgtcctgaataaagcttccacacagaacaaagaaatcacaccattcgaggaatgcgaaaagacgaaattaaatatctcctatttg

SEQ ID NO: 54739 - DNA, 231 bp, Zea mays
cacaccctctaatgccattgaatcatcacttcttctaaagacagcgacacctatatcaataaaaagacaggtgtcgcccatttgacatattgggaaacacaaagccagttgttatctaatgaatcaacaagaaaaacattggaaatggaatgggcacgtgaaataacaattttacccaaacctttgacaaccctcgatttccatcccgaatgtgatactcgttgggatctt

SEQ ID NO: 54740 - DNA, 355 bp, Zea mays
  unsure (1)..(355): unsure at all n locations
atgaanagccaaattagacctcgaagaatcactatagagttactgataaatggtaagggcactaatgtaattcttcacgggctgcgtcctgtgcctataaatagatgaacagtactcccgtactgttcacgctgatttggcatctgcttttcgcatcacgcctgtacctttactttttcgacaatccaaaggtacatttataatttgttattatgattctaataatacaaaatagaaataagttgatgataatatttgtattattggtcgtattccatttatgtattcttccttcgcatatgttgaacttacgaaggtcttttcctcacaaccttcgtctggaattattatatct

SEQ ID NO: 54741 - DNA, 201 bp, Zea mays
caatactatgtaatattttatgttcttaactttgaattaaatatgtaaattattgtaatttattttttgcgatgctgaaactacgcacataccgtttttgagccttcggcgaacaaacacctttcctttttttcatgcttcgtaaagaaagaaatcccttcttgggaaaaggctgataaatctgtatttttcgaagcttac

SEQ ID NO: 54742 - DNA, 300 bp, Zea mays
gcttctcgcacaagggatggtgagccaatgcgctgatttttcgtccactgttgacacgacggacagtgcgccgctgcagagacccgagacttgccgcgagagactggacgcttaaatgccgaaagggcacatcgtctgtcggcatggtggcaagcggcacgtcctctccgcaataaatgtagagacctcttggctttagaggccttacgtcaggctctgcccgttggcttatgtcacgggccacaagccacgcggcagcagcgggcctccaccttcgcgggtagcgcgagccacataggt

SEQ ID NO: 54743 - DNA, 185 bp, Zea mays
  unsure (1)..(185): unsure at all n locations
tttgtgcttccactattcattttcattaatcaaacacaactnagtgggaaataaaagggccaaaacaatctttggaacagcggatcttgtttggtctccaaacataaatttatttttcttacctaaaaggttagctctctaaggactacaggacgtagaagcctcccatgaactatcctgtttgg

SEQ ID NO: 54744 - DNA, 253 bp, Zea mays
tctaaagggagaacacgtgatacgtttgactaacgttcaattctatatagatagaccttgtgcagcttgtcaagcatgcaaacaggtgggaggagcgctcacacagaatgtgatgaccacttcaagacctctggagctgctgcatatggacctcttcggacccgtcgcctatcttatcataggaggaagtaagtatggtctagttatcgttgatgacttttcccgcttcacttgggtgttgtttttgacagat

SEQ ID NO: 54745 - DNA, 218 bp, Zea mays
  unsure (1)..(218): unsure at all n locations
ttcctcgtattgactacgatgtcatcgacccttgttcttaccggtccaccaagtgttcgccgaacagtggatcatgcccatggttgagaacaccatgctcataccgaacggatgagcacatatcggatcctgctcaagggtgtgatganaaaaggttagagccggtcggactatttcatgctgaggtggtgagaccctgaatacgcatccaggaaaga

SEQ ID NO: 54746 - DNA, 221 bp, Zea mays
tccttcgaaggattttctgtcaaaaatatcccccgatgacaaaatgagcatgctgatttgctagctaagtcagcagcacaggggctgcctttacctcgatgtgttcttcgaaacaataaaagcaccttcggtggaacttcttgaaagagcagtcctcaatatatctcctgtttatagcgaagattggagaactgagatcatctcttacctacagggtaaat

SEQ ID NO: 54747 - DNA, 196 bp, Zea mays
gaaataaattaattcctaaatacttcaggggttattgaaaatccaagatgaatggcatttaaaaagtcatcgcggctacctaaatgtcgggaacctaattagggtaccctccaagcttctaaactaactggtaacccccatcaacacaaaactgcaaaggcctgatgggtacaattaagtcagggcttggtccact

SEQ ID NO: 54748 - DNA, 192 bp, Zea mays
gaccttaaaaccactggcccttggaatccggcagatctggtccttgccgaaaccatcccgctcccgatttcaccccccgacactggacgggtaagccactccaccatccttcgattccttgagcacacagtcgttgcgtgaccccgtgatgctcaccgtgccctcggattgcgccagttcgccgtaatttgg

SEQ ID NO: 54749 - DNA, 225 bp, Zea mays
tggggtgctaaggagtctacccgtgcaggaattgaagaaaggctcaccggggagctcggtctaccgctcgtcgcagtcgggtgaaagtccggtgacctgatcggtgttctccggcgaggcagagctcgattcctcgctctgggagcttcaccgaggcatgtagagtctttctcgtgggtcggacggggctgggaaaagctcggttggccggtctaactggtgggt

SEQ ID NO: 54750 - DNA, 158 bp, Zea mays
tctagactgaccttctcttttgcaatcaactaaataaaagctcgctcgtctagtacacccttaaaagctaatgaaccatcacttcttctaaaggcacacacatctacatctgtgaataaactgttatatcccatattacaaagttgactcacagacaa

SEQ ID NO: 54751 - DNA, 162 bp, Zea mays
tgttgaacccaacgcaatggcattttgccacattcaagagttgcattatcatgatgcaagctactgagggcctttgcaacaactttgggtgttacaatttcccttacccgaaatcgctatgtttttggcccttgcatgaactaccagatggccgaacactgg

SEQ ID NO: 54752 - DNA, 250 bp, Zea mays
  unsure (1)..(250): unsure at all n locations
tcaaaagggaaaacatgtgttangactaaccgatgtctatttcgagaaagacagaccttgtgcagcatgtcaggcagagaagcaagttggaaacaagtcatccagcaagaacataatgacgacatcaagaccattggagctacttcacatggatctctttggacctgttgcttaccttagcatcggaggaagtaagtatggtttagttattgttgatgaattttcccgcttcattgggtattctttttgc

SEQ ID NO: 54753 - DNA, 198 bp, Zea mays
  unsure (1)..(198): unsure at all n locations
tcgaggagtgaccatgcangagcccacggagactatttctctggtgcggaggatctcgcgaacggcgcgcgagacgggagggacctccgccgcagttgagaggaggaagtggaggaagagccgccgcgatcggcgacggcaaagcaggaggaggcgacggcggcgctggggtcggaggggtcccgcccgttcactatg

SEQ ID NO: 54754 - DNA, 138 bp, Zea mays
attgttcggattgcattatcagccaccgagaatgaagcaactcgagtaagatgaatctatctgatgatggaagcagcacaatcacagtacaaagtgctgaggcttactggatgcattgtagctttaagcacgttcata

SEQ ID NO: 54755 - DNA, 330 bp, Zea mays
tataggtttgatcttttcctttttattttctatttctattttcacttcttatttccaatttatgcccaagcaaaacttcaacatgatgcacaatttctactagtatttatttatttagttactttagttatttttattatttatttaggtaatgttttcaacatgaagtacaacatattattccaatatattattattctgggtgtgtagtcaaattaaaggtatattcaaaagttctccctttgttttgataaaaacattttctaatgtctaatctttattaagatttaatttaactatcattattttattatgaccatttaccataaa

SEQ ID NO: 54756 - DNA, 123 bp, Zea mays
atgatgcaaaaaagtgaccatagcagctgagaaagctgggaactgaaagcggataggtcttgcttaattgcttttgactttgcgtttgatttctgtgacttcgaacttatttatgttttgtat

SEQ ID NO: 54757 - DNA, 232 bp, Zea mays
tgtgagattagtaatatgtattacatattttcatctctgttctaaattgtaggtcacaataaaatatgttgaactatgtttttgtactggtcataacacttagaggaataataatcaatttccaaaatgaagttaagttatgttgtagttcatgttatactttgaatccattatcgcttatgtagtattgtgtcttttaagatgtgttcccatgattgtcaatgtttgatgt

SEQ ID NO: 54758 - DNA, 93 bp, Zea mays
tgcttgtcgacggacaacaagcattagcacatggtaatatagtatcaatttgaatacatgtgcatgagtgaggttgttgagaattttaatttt

SEQ ID NO: 54759 - DNA, 193 bp, Zea mays
tttgaataactgccgagacatttgtgccttctcagggctaggggaatggccctattttgggagaaaaaggctgcgatcactgaaattctggcacaaccgaagccgacttgtcttttgaaaatataaaaaaccccctcgccgaagcgagcctggtccgtggaaaatttttcaccgacatctgggacaatggtgg

SEQ ID NO: 54760 - DNA, 223 bp, Zea mays
  unsure (1)..(223): unsure at all n locations
ttangtttacttaacttgagttaagttttacccctttatctattatttatggctaagccctttaaccagggttctatttgcaaaacactttaaacaacacaactgttgaaattattgcctagtgaatgcactctatgcgtgtcaaacatatgcaatgccaatgctatgatgccatgctcaagttttaattatagtaacaccatgggagaaacattcttccccc

SEQ ID NO: 54761 - DNA, 231 bp, Zea mays
  unsure (1)..(231): unsure at all n locations
tcgacggcgtcatcaatttcgaccttcggctttcggagacctaagcgggaccatatggggcgcatgataacctccttgatgtcctccctcgctgtcaagtcgtctcacataaaaccattcttccatccaagctccgggccatctcttccaaaatgttggcacagggtggcttgcattgggacgggcaataaatccataacaactgaagttgttgtggtcccgttntttaac

SEQ ID NO: 54762 - DNA, 195 bp, Zea mays
aacaaacactactgaccactgctttattttctcaaaaaatacccaccatacttctgaaaggaaactgccctgggcctttctatatcttggtgattaaatgcacaacacattatatttgaactaacatgatgttgagcaaaagaagcagaactcggaaaaggacttaatgaaaatctatatggttcaagcaaaaat

SEQ ID NO: 54763 - DNA, 312 bp, Zea mays
  unsure (1)..(312): unsure at all n locations
tgatccgngaaaaagtctcttaggcttcgggatgcctttatattctataaacaccttccttgagctcgttgccgagaaatgattaaaataattcgagcgcaatgtggcccgccatgcagtagttacgcgtgtcctggcgattcaccttctcgggctctgtggcccaccgttcagtgggtgcgggcggctgtttgtcccgtgtggaaaacttgacgatttacctttccacctgccgcactatattaacagaccagtaggtgtgaagttaccacagcattacttgctattgcactgttttgctgccaaaaattt

SEQ ID NO: 54764 - DNA, 268 bp, Zea mays
acactatacaaacccagctagagagaccgaagtccaaaaacacctcttgattttttgccgagaagcgaaaaatttcccacacgtacgggcccacttgcatagttatgttgaccatcgcgtccaccctgcatctagcgcaagcggatgagcgcctggcgaaaaaaatccggcgctgcgcaatattatctgccgcactatataaacagacgagtccgtgtgaagttaccacagcattcattgatatttgtaatgttttcctgccaaaatt

SEQ ID NO: 54765 - DNA, 240 bp, Zea mays
  unsure (1)..(240): unsure at all n locations
tctaaaggtagaatacattttgggactaacaaatgttcattttgagaaagacaggtttgtagcgcagtcagcaggaagcagtggtaccacctcccacaagaactcatgacgaccgacaggccgcttgagctactccatatggatttattcggcccgatcgcttacataagcatcgacgggagtaagtactgtctagtaattgtggatgattattctcgcttcatttgggttttntttttg

SEQ ID NO: 54766 - DNA, 215 bp, Zea mays
acttattaagtgcaaaaatagtcactgacataaggtttatttgcatccgaggcaaggccgctgagataatcaagaagaacaaaacagatttcatgacactcgtagtctgtaaaagcagctgaaacagctggggacctcgagagacgaataggtattactcaatggcttgtaactgtctgtgtatattcgtgacttccaactgaggtacgtttgtt

SEQ ID NO: 54767 - DNA, 217 bp, Zea mays
tggatgaggtgtcatcatcatcatcatccgaactattattcgagtcccattcaactaagtaggctttgccatctttcttcttgttatagtatttcttttctctgtcactctcatctttgcccttcttcttcttgcttgggcaattcatggcaatgtgaccgggttccccacactcaaaacattttctatcattgaaagccatttttctaaatgtttg

SEQ ID NO: 54768 - DNA, 233 bp, Zea mays
  unsure (1)..(233): unsure at all n locations
ccccgcgttattttaatgaccgaccggaccttaatgaccgcagcatgcactggaactcgagggagcctattttgtatacncttttttttttcccccctgaagcacggtgcacccgagggagtgccgcctgctctaaatncaccatgtgtttgngatcctttgatcattagttcaaagctcacaaactttcctatcacttccttgggagacattaatttgtatctacgatcccc

SEQ ID NO: 54769 - DNA, 382 bp, Zea mays
tgtactttgcctcaacatggcatgattgatgattgtctcgccgtttcagcgcgtctgctgacgcacccaccgtcaatccaccttcgttcacaccaactgcctatctgtccccgtggctgactgacccacgggcccccacgcctggtgatttcgtcgggccacgcgtggggcgcctcgttgctgctgcattggtttaaaaaaattaccttttgtcttctgctgcggccccaaggaggcgcactacaggcacgtgcgactgttcgctctttccgcacccgaagtccggcacacaaaccgtatgacttgtggacctgggcccccacgtcatggactaagtttgtcttctgcagttgccccgaagaggcgcactacaagcgcgtgc

SEQ ID NO: 54770 - DNA, 229 bp, Zea mays
  unsure (1)..(229): unsure at all n locations
cagctgcaacttcgccggcctatacggcgtttcccaaccgtcgacccgatacatacaatatgggggaaacagccgaaatgtggctcgcggaataacgggtggcctgccagctgggtggaaaaaacgatgacaaactnatcatccggaacctccccatgttcctctccgacgccgcccgagcctggctggagcatntgcctcctgcgcagatctccaactgggacgacct

SEQ ID NO: 54771 - DNA, 75 bp, Zea mays
  unsure (1)..(75): unsure at all n locations
tntnaaactagagtacggattgatcgatctttatctatgtcatgggagcagattggggaatatcccttttatccc

SEQ ID NO: 54772 - DNA, 209 bp, Zea mays
  unsure (1)..(209): unsure at all n locations
tgatctaaacttttctcggatttataaagggaagggacataaatgattttatgtatcaccgatccatgtttctactatacaacttaacntcttccgctcgcgttgtatagtagagatttagcacataaatatctctctcatagatggctaacaacaaatatattatgtataaaaccatattagcttaattggtttatgcctaaattatg

SEQ ID NO: 54773 - DNA, 202 bp, Zea mays
ccttaaaactaagttatggattatcttgtattccaaggtacttttttttcccgcgaaccgggcaagtgttggctctgtagccttgatacttaacaaaacaagttaaatcttaaaaacttgtggtgtgataatcatattagtatgcccggatagcttcacaaaccaagtgaaaatgtttataaatatattaacagaccatttt

SEQ ID NO: 54774 - DNA, 195 bp, Zea mays
  unsure (1)..(195): unsure at all n locations
ngaagccctggtaagtatcataggcaagtaatatgcgtantgactcaagcctagctacgggtgcataggattcaacgaaaaccaaaccttcgactgtgaattccttggctaccagtacagctttgatccttgttcaccacaccatgctcatcttgcttgttgcggaatacccatttggttcctacaacatttgat

SEQ ID NO: 54775 - DNA, 199 bp, Zea mays
tttattatctcttattgtctctattggcaaaatttttttccatgtggggagaagcgttgattatgggaaataggggagttttgaatctttgaacaactttttggaatgactctctttatgcctcaacatgtgtgtttgacatagaaatagagatttgagtttgatttgcaaaaaccaacccagtggtggcaaaaaatga

SEQ ID NO: 54776 - DNA, 235 bp, Zea mays
  unsure (1)..(235): unsure at all n locations
tgtggtggtgtcccttcgatggcttcggtcactgtatatgattcttgcttncttgngcctagcccgccttctnattttngccggccccctgtncctctgaaagcttngtnagaatatggcccctaatggactcagcttgacaggcaaggattcagtcattaccttcaaattttcctccacatcggtggtagagggtgatgcaacagtttttttcttcttcgtccattgctttttt

SEQ ID NO: 54777 - DNA, 206 bp, Zea mays
  unsure (1)..(206): unsure at all n locations
ccccccgggccttgggagtgccgacggtgttctttctgcctgaggaggccctcggccgagacgtgaacngtctcgggactacgttncccatngaggtcgggangggtgaaatcccgtccctcgggtagaccaagtcttggcttgaaccgcacccgtcagttgtctgagggtgtttaccagccatgattaggagcgttgggggtacc

SEQ ID NO: 54778 - DNA, 324 bp, Zea mays
tctaaagggagaacatgtgataggtctaacgaatgttcatttctaaaaagatagaccttgtgcagcttgtcaggcaggtaaacatgtgggaggagcgcatacagcaagaatgtgatgaccacgtcaagacccctggagctgctgcatatggacctcttcggacctgtcgcctatctgagcataggaggaagtaagtatggtttagttattgttgatgacttttcccgcttcacttgggtgttctttttgcaggaaaaatccgaaacccaagggaccttcagcgcttcctcaggaggctcaaaatgatttgagcccaaatgaaaa

SEQ ID NO: 54779 - DNA, 162 bp, Zea mays
  unsure (1)..(162): unsure at all n locations
gaccctctaacactcccttaaatgctattgaatcatcacttcttctaaagacagngacacctaccttagtgaatagacagttgtagcccatttgacataattgggatacggaaagcaaattgtaatctaaagaatctacaagaaaaacttggaaatggtatg

SEQ ID NO: 54780 - DNA, 73 bp, Zea mays
gatgaatatgatgatgaccactaccattgggatgcacctggcagttttctcattgaaaaaatgcccatgggtc

SEQ ID NO: 54781 - DNA, 61 bp, Zea mays
gtttttggatttttctaaaatttgcgacacaattctaaagttctctggtcaaaagacaaac

SEQ ID NO: 54782 - DNA, 111 bp, Zea mays
agagtttttggcttttaaggtttttcctagtttaaaagaatgggaaatgccgaagctagaaagggagaacacagaagggaacttgtgccgttacctctatcattacagttt

SEQ ID NO: 54783 - DNA, 206 bp, Zea mays
  unsure (1)..(206): unsure at all n locations
nggaggcatcgattggaagcctatttgttggtgtaggctcttcctttctttccttttatggccttgaatgccaacggtttgcacctcggtgtggaggtggtgcctcttcccagattgacaacagtttgggagtctttggatcataaattctgttgggaccatgcttcgtcgtcgaaggttcttgcagaaaaaacagcttccgctga

SEQ ID NO: 54784 - DNA, 63 bp, Zea mays
gcaataggacctataatccatctggaaatctatccaacaggctatcgcattctatcaacctaa

SEQ ID NO: 54785 - DNA, 323 bp, Zea mays
  unsure (1)..(323): unsure at all n locations
ttataggnnatagcttctgcgcttgcccctgataatatcttctttaagtgatctctctctttaggaatctcggctacgaagcatacccccaacagaactgatggantttatgataccatattgttatcctgactctgtggatgatattgtgaaactctatggggctgccgcttttttctgagtacctctccgaaaggatgtgttcatggagtgaccacctcggatccccttgctacccatgaggttggatgggatacccttcaatgcatcagtacattaacccgggggtgtcattggctttcgctggaaggcccttcatgggg

SEQ ID NO: 54786 - DNA, 225 bp, Zea mays
  unsure (1)..(225): unsure at all n locations
tttagttctgctattntagcttcagcttttgtttattagcctttggttgatctgaaacttcaaattccttttcagaacagctgatggtctttttatgattttctaaatctcgaattataaacttgtgttttttatctttcaaatcttgctgcattttcaaggctttactcaaaagcataatatacccaccaacaacctttgctagaaaacatcttcgttgttgaa

SEQ ID NO: 54787 - DNA, 293 bp, Zea mays
  unsure (1)..(293): unsure at all n locations
tgancatgaagatatggcgctcgtcatcaagagtcttttccttatcctcaaacaaaggagggggaaagacttcaagtcccgctccaagaaggtttgctacaatgtggtaagcccggtcattttattgcttacagtcctatatcaagtgacagtgaccgaggcgactaccataaggggagaagaaaggaaaagatgaggtactacaagaagaagggcggcgatgcccatgtttgtcgggaatgggattccgacgaaagctcgagcgacttctccgactacgaggacgccgtcaa

SEQ ID NO: 54788 - DNA, 83 bp, Zea mays
ccatttggcccattacttaaatactcaaccgcgcgacccatctcgaaatccctcgcgcgtgccgacagcgggcccccatgggt

SEQ ID NO: 54789 - DNA, 378 bp, Zea mays
tgccctgggtcgcggctcttgggagcgttcccctggtgttttgccgattcgagggagacgctgacccggggaaccaggctccaaacaggccggcaaaattactctggcccattctcccgtggggttttctcaccaggaaaaaggttgaatccctcgagaaaagtgggcttccaaactaggccttaaggagcaatcttgttagagggcaagtcttttaattgcttcctatatggttttaatgtcttccttttcggtgtttgattccaaagagggagaaattttatagaccaaagcaattctaagtataccaaataccaaacgcaccaaatataattatgtggatttacaagtggtttttggttctcaattggttttagt

SEQ ID NO: 54790 - DNA, 114 bp, Zea mays
acatgttccatcagtacatgaagtaccctggagcattcgtgaatccgaatgacataaccatgaactcatataagtcatatttggtgaagaaagttgtcttcggtaatatctgca

SEQ ID NO: 54791 - DNA, 209 bp, Zea mays
  unsure (1)..(209): unsure at all n locations
taggccactgtccttgtccatttgaaacttttgttttgtcattgntagcacaaaaagagacaaaagcaacaaactggaacctcacatatttcaggtggtggtggatgtggaataccaattatgagagtttacccgctcttacaagttcttaccagcactgcaagtggcaaacagtgactggtgtgacctgtccaaccagcctgggtgtg

SEQ ID NO: 54792 - DNA, 213 bp, Zea mays
  unsure (1)..(213): unsure at all n locations
tataccggccggatcactcaatgaccggtgctctactttcggcttgagaactaattncaagcccctaacaagaatttnncccncatataattncatcangcganctaaacncgctncgtnccacggtgacagcggccacaagcgacagcacgacctgttcccggcgatctaaggggtcctaacctaattggcagggtcggggagcatcaagga

SEQ ID NO: 54793 - DNA, 194 bp, Zea mays
tccactcgaactaatcttcggagataccctacctgttgcacacgaaacccacagttccaacccccagctgaaaaatttgatatagccaaatctagtccccacaaatccttccaagattttggctttcaagtttttcctatttaaaagaagggaaagtccaactaaaggggagaaaaaaaagtgaccttggcttt

SEQ ID NO: 54794 - DNA, 297 bp, Zea mays
tatcaatctcgatctcatggttggttcctcctcatattaaatatcggatcaatctttggctgataatccccatgatgatcataaaatggttctctgagttaagaaaattctcatgtgatgctcttttgccaaccattcttgcttcaactttagtcacattttctgagccatactctcatgggctccatctaattatgccaagtgaattttcattggttacgtttggtaatggtgtcatgactaacgactgatggtgccgcgacgaaaccgaagcctactatggtgcacacatggttg

SEQ ID NO: 54795 - DNA, 214 bp, Zea mays
  unsure (1)..(214): unsure at all n locations
ttacagcctcccaggaagctacctatggtcttggattgtaacacaggagaacacggatggtttcgtccacgcggttgacccgggtcgtntggcgttcacggaaagttccccgatcttgggccgagctccaggaagttttgtcgcgaggcaaaggatgcaacggggaagacagtccggccctgggaccggctttatagccgtggcgcgggtgtgg

SEQ ID NO: 54796 - DNA, 254 bp, Zea mays
  unsure (1)..(254): unsure at all n locations
tctaaagggagagcacattttaggattaacaaagtttttttgagaagaacagattgtaacctgccaaccggnaacagttggtgtcatctcccctcaaaaatccttccgcatgtaggtccatcccactcctaacactggatctattccgcccgattgcttacataagcatcggtgggaataagtactgtctagttattgaggatgattattctccctctcactgggtcatctttttggcagaaaaaaatccacac

SEQ ID NO: 54797 - DNA, 56 bp, Zea mays
gctaacaacaaatatattatgtataaaaccatattagcttaattggtttatgccta

SEQ ID NO: 54798 - DNA, 198 bp, Zea mays
gggcctccttggttctaccggcggtttgtaatttattttgtacggtggtggttccctccaccattggaccaaaagaaataccttccatggggaagcccaacaaaggctattgagaattgaaaccagttaacaacgccccattcttgcactcccagattccgtaagactttgaaattgaatgtgatgccatggaatggg

SEQ ID NO: 54799 - DNA, 51 bp, Zea mays
tttgcacggcttgatacttaccaatgctctcacagcacagaaagatactga

SEQ ID NO: 54800 - DNA, 215 bp, Zea mays
  unsure (1)..(215): unsure at all n locations
tgctgcttaaaggaacgaaaatgctgttgcttttttcctgnatatccgtttncagtttggtggaatgcagnctgtttnctntttttngttgaactgctgncttncacttatntcacaaanctaattnccaatntgttatgcttaaacttcgcactgattcgatggacttctggttggaccttgcatcctgtattcctgtgccttttggtttggta

SEQ ID NO: 54801 - DNA, 307 bp, Zea mays
  unsure (1)..(307): unsure at all n locations
tcacacatggnggccgcanggaagggcggtngggggnnnnttttttttatctactcattcggataaacgccgtgggctcgaccaacccccaagatttatcacaaaatggctctctgaataaaaaaatatgacgtgatgctcttttgccaaccttccggcttgaactgtagtcacattgtctgagccatactctcatgggctccatctaattatgccaagtgaattttcattggttacctttggtaatggtgtcatgactaacgactgatggtgccgcgacgaaaccgagagcctactatggtgcaca

SEQ ID NO: 54802 - DNA, 251 bp, Zea mays
  unsure (1)..(251): unsure at all n locations
tttgtgatccgtgaagatcttgcacttgtttcttatctatatagtgcctccaaancttcaaagctgtcactacggaacctattnccaaaactgcctcagaattnttntcctgccttctccaatgcctctgagcataagctatccattttccttcttgcattagcacacatccaagtccaaggtgtgatgcatcgcaatacacatcaaatcccttatgaatgtctgaccattaccatattggtgccgtggtt

SEQ ID NO: 54803 - DNA, 224 bp, Zea mays
  unsure (1)..(224): unsure at all n locations
acatatanaaactcagcttctactcggtgacttattggaggccggaaatttctttgttaggcatatctgaggtgctcgcctccagtgccgtgaaaagaatnctagtnctgtcctgcaacctcagcgagcctcaaaatacattcgccatacttatgcagtactctagttatctggtacttgctgttcagtccactctgatacgaaatccaccagtgcttgagttt

SEQ ID NO: 54804 - DNA, 336 bp, Zea mays
tctaaaggggaacacattttaggacctacctatgtttattttgagaaatttgtagcgtatgtcaagcagggaagcatgttggagctcatcatccacacaagaacattatgacgaccgagaggccgtttgagctatatttttctattttacaaaaaatcatatatatatatatatttgtataatttacattcaatattaaaaatacctaagtatgatgcttaatggctagacgacttaaacgatgtctcctgctttcttccatgagggaaggttcaaacttatatctcgcacgtttttaatatttttgttgatattaaccatggcccgacggttaac

SEQ ID NO: 54805 - DNA, 215 bp, Zea mays
  unsure (1)..(215): unsure at all n locations
tatcaaagaaaaattacagagttggagaaagtattgtctgctgtattaatggcttccaggaagcttncgcattatttcccagcttaccacatattgttccctcgtcatagcctctgaaggatattatgaggaatagagaagctactggaagggaaagaaagtgggctgcggagctcaatgaatttaccattgattacgtgcacagatcttcaatt

SEQ ID NO: 54806 - DNA, 248 bp, Zea mays
  unsure (1)..(248): unsure at all n locations
accttagaatctcagctttannnnncgtgagagacagtgttgcgtctctttgnagctcttgcgctcggaatgctttgctttctcttctttcttgagatcaaactccttgtcatgaacagagacacgaatcgtgtggtggtccttgtgggaactttgtgtttccagtgattgagaagaaaagctcactcggttcgatggaccctttaccactgcatacttgccctgcttttcgattcaatgccctccct

SEQ ID NO: 54807 - DNA, 222 bp, Zea mays
  unsure (1)..(222): unsure at all n locations
tgnggtaccctactagcaccacatcaagacaacacatgcctgtttggttcgtcttttttctgaccagcttttctgaaaagctggctgtggggaaaagctggggtagaatttaggtgtttggttcgccagctgtgcagaaaagctgttcgtgagaatctacgtgtttggataatcagaatctcatattgcagattctgttcgaacaaaccataaaattaaacc

SEQ ID NO: 54808 - DNA, 261 bp, Zea mays
tctaaagggagaacacgtgatatgtttttttcttgtttctttcgaaaaagatagaccttgtgcagcttggtcaagccaggtaaacaagtgggaggagcacatcaacaagcaagaatgtggatgaccacatcaagacctttggagctgctacacatggacctcttcagacccgtcgcctatctaagtataagaggaagtaagtatggtcttgttatagttgatgacttttcccgcttcacttgggtattctttttgcaggaa

SEQ ID NO: 54809 - DNA, 75 bp, Zea mays
tgtgggtggtgtcgttgagtctcctccgcccgtctgttcatacctcggtgaaaagatcatgatgcccaaaagggg

SEQ ID NO: 54810 - DNA, 217 bp, Zea mays
tcggatccttagccttgcaactcttgtcaatatgacttgaatcaacctgggaatcagttttaagcatagcccttctgattcccattgcttttagcttccgagacccaaaagcagggcttcgtactcggcaatgttatttgtgcaactaaaatcaagttttgccgcatagcaagttttaactttggaaggtgaaaccaacacagcagccgctcccgct

SEQ ID NO: 54811 - DNA, 237 bp, Zea mays
  unsure (1)..(237): unsure at all n locations
ntgtaggagaaggagatggtatgaaccttcggggtgcttgatggagttaattcaattcttatcaactcaagctatcaatcttcaaatgatactactattcagattgacccaaggttacttcaatttattgtattcaaaactcatatcatctcgggaagatattaatgttgtaggaaataaagaatcattatgtgcggaatatcaaagcctacaacatggaggaaagtcacgggatgg

SEQ ID NO: 54812 - DNA, 63 bp, Zea mays
ctaacccccgaggagattaccaatattccaagcatatacatcttacgccagtaagctaaagat

SEQ ID NO: 54813 - DNA, 234 bp, Zea mays
tctggacgtccttgatacgggccggaggcctcattgtctcaatcgccttgatcttctccggtttgcttcaatgccccggtacgaaaccggaacccagtagcttccctgcggagacaccaaagacacacttgtccgggatcagcttcatgctggttgcccgcagcctatcgaagaccagggttaagtcttccactagggtcgaccctctcttggtcttgactacgatgtcattga

SEQ ID NO: 54814 - DNA, 375 bp, Zea mays
  unsure (1)..(375): unsure at all n locations
catacaaattggcccacgatcaaagcgaggtctacagcaatggttggaacatccgacagctacgtcgcttttacccttaagatggtttcaagtcgttcatatacctcgttttttatacatacacaaataaagtctaaacgtcaaggaagggtcagcctttgctcggcgaagcccaaccctccctcgggggctagaagggggaaccccctctgcgtcgtcaaaattttcctcggaaaaagtctttctgccagaacatctttcgcgcttttcgactgcttcgatagcgggatcctgaaaacaatggagtacatgtaagtggcaaggccgacctagccgagggactcctatgcctncgggatacagatacctcactca

SEQ ID NO: 54815 - DNA, 130 bp, Zea mays
  unsure (1)..(130): unsure at all n locations
ccacttagactatcaaccagctggccacttgctaccataactggtcactggaaattttgtattcttgcgggaggcaaaattgtatcagtcaaaattttcatgtagaccatttcctctagccttggnctgg

SEQ ID NO: 54816 - DNA, 384 bp, Zea mays
  unsure (1)..(384): unsure at all n locations
ntaattctgtgcagagacaacataaatataccataaaaaagtgtttacttcaattgtgggtcaatcatatggtcataaactgaacgggcaacagttcctccagtaaccaaatcaaacaagtagcagagctattctagactaaagtcacaacttaagagaagtgcaaaacacattctaaccaaaacatgcatattggaaccataccatccagaattaagaccactagcgacacacaaaacatgcatctangagcaccgggcgccaaaataccagtgattcacccggcacccaaagtaagcttctatgatctttcaacatgctctactctatcatttgctggtcaattcaaccttgcacagaaattgggatcatgacaccaatgga

SEQ ID NO: 54817 - DNA, 404 bp, Zea mays
  unsure (1)..(404): unsure at all n locations
ntaataccatagagatacacactctcattgatgtgccaatatttttatatggtatcaaaaaatatataagtttctctctaatcctcgntggagccaccatgcaagggaatgctcatgcaaggatcaatttcctggtttggtaactctatgaatagctctaggcctttttcacgtgcaagtggtgctccagtcgtggtctctctcagatgattctcgttgtatccactatggagtttttagctaaaacaccacatgcctcgttccctccaatatacggtggcagccacaccacaaacatagttagtgtgattntgcaagattacaagctcctccagtgcaactaatacaatagcacacacaagcggcaaggaggataaagtcctcgttcctcacttctagtcact

SEQ ID NO: 54818 - DNA, 329 bp, Zea mays
  unsure (1)..(329): unsure at all n locations
tttggcagcaaaacagggcaaanatcattgtttgctgtggtaacttcacacctactcgtctgtttatatagtgctgcaggtaagaaggcgaagcgccaggatttttacaccaggcggacacccgctcgcactcgctgcgcggtggaccgcagagaccgaacagtaactctgaaaggtggggccgctacacgctgagaaattgaatcgtttctcgacaacgagctcagggaaggtgttttttagaccttcggcgctccgaagcttaagagacttttttcacggatcaagctcgttacgaaaaacgatctatcaccgcgaaaggggctact

SEQ ID NO: 54819 - DNA, 442 bp, Zea mays
  unsure (1)..(442): unsure at all n locations
tggaggcgtcgatggggactctactcggtgtagagtcttctttcttctcctccgntgccttgaatgccacgggttgcacatcgggtgtggaggaggcgccttgctcgatgattttcctagaacctttcatcattaattcaaagctcacaaattttcctattacttactcgggagacattagcttgtatctaggatcaccacgaattaattgaatttgagtgggattaagaaatacaagtgatcttagaataaccttgaccatctcatggtcatcccacttggtgctctcgaggttacgcacttggttcaccaaggtcttgagccggttgtacatggcttgtggatcctccccttggtgaagcatgaagcgaccgagctccccctcgatcgtttccctcttggtgatcttggtcacctcatatccttcgtgcgcggtcttgag

SEQ ID NO: 54820 - DNA, 392 bp, Zea mays
cctttatttccatgctagaaggaaaccagaccaaagcggttgtgaggatccaacaaaacacgaacaagccaggtagtcgggcctcaaagatctatccaaacattctaaaaagctaaacaagtacattaaccctgcccacagatgtgctgccatatggaatgggaaggacacattccacgcgaaagacttgaatcagagcctaaagcggacatatagatgaggacctattctcgtaggttttggcagctagccggcatcccttgttcacatgtcatcacttctctatatatctgctctaagccacctgaagaatacacaacagactgctagataggtgagcaatacaacagaacctatgatcatctcatgaggccaatggaggggatgcacca

SEQ ID NO: 54821 - DNA, 419 bp, Zea mays
  unsure (1)..(419): unsure at all n locations
tcttcttcattctgatgaanaccaagccctttgatctctttatcaatacgaatggtccaactccgagatgcttgcttcaacccataaatggatttctgaagtttgcatatctttccagcattgatcggatcgacaaaaccctcgggctgtatcatatacacgtcctcatcaaggtttccattaaggaaagctgttttgacatccatctgccaaatctcataatcgaaatatgcggcaatagctagaatgatccgaatagatttaagcatcgctactggcgagaatgtctcgtcatagtcaactccttgaacttgtcgaaaaccctttgcaacaagtcgagccttatagatgtgaacatttccatccatgtctttcttcttcttatagatccatttgcattctataggtctaacaccatc

SEQ ID NO: 54822 - DNA, 350 bp, Zea mays
tctaaagggagagcacattttatgactaaccaatgtttatttttataaagacaggggttgtagcgcatgccaagcacgaaagcaagttggtgcccatcatccacacaagaacgtcatgacgaccgacaagccgcttgagctactccacatggatctattcggcccgattgcttacgtaagcatcggcgggagtaagtattggcttggtatagtggatgattattctcgcttcacttgggtattctttttacaggaaaaatctcaaacccaagagactttaaagagattcttgaaaagagctcaaaatgagttcggcttaaggatcaagaaaataagaagcgaccacggga

SEQ ID NO: 54823 - DNA, 388 bp, Zea mays
attatttgaaagctatattctttactagcaagaacttagtttttatactccgataattgttcatcttgttctaaccactaatcaaaggatctagttgggggataaagttttaattttcaggtttcgcctattcaccccccctctaggcgactttcaattggtatcagagctaggcacttcatcttgagtctaacaactcgaagtgatggctcgtagaagatcccaaaagaacaagaaaacccaggagaacaaggaggtaactcttgagatattactttccgattgttctaattatgtttcttggtctactagagtgataaatgcctttagagcggtagaccctcaattagaaccaaatttagacaagagtattattcctcctaactat

SEQ ID NO: 54824 - DNA, 440 bp, Zea mays
tgcttacttggtaagatgaccaaagcgcccttatgggtttttcggagaggacgttagatttattggaactcatacatactgatgtgtgcggaccaatgagtacgacagctaggggaggattccaatacttcataaccttcactgatgattttagtagatatgggtatgtctacttaatgaaacacaagtctgaatccttagaaaagttcaaagagtttcagaatgaagtagaaaatcagcgtggcaagaaaattaaagcactgcgatcggatcgtggaggtgaatatttgagtcatgagtttagcaatcatctaaagagttgtggaattgttccacagcttacgccgcctggaacgcctcagaggaatggcgtgtctgagcgacgtaatcggactttattggatatggttcgatcaatgatgagccagtcggacctacct

SEQ ID NO: 54825 - DNA, 442 bp, Zea mays
ttggtagagtttgtatgatttggaccttggttgatacttttatttctaaccctaccccctgccttttgaacttcactattgactccggaaaccctaagttctcagagatccgtgaaggaaaattgtattcaagactttagataataaacctttattatctttgcactctcatgagcattacatgagcattcattattatacttggctatatattcgcctgtaaaccaaggcaagccctggtgcatgcaaccccttccttgtgtttttaaataatttttgcacactttaagtctagtgaaatgtgcattaggtttataggagttgcttggaaaccctttgatgcattgccttccttgatattcatacctttatagatacttctggtgaagtatcaaaatatgatttacaaaaatgcttagccctgctcagatcttgtggatag

SEQ ID NO: 54826 - DNA, 381 bp, Zea mays
cggcaggcggcgagaaaagacaaggtttgatgtgttgtgttttttacaataaggctccatgtgcgtttgaaatctatttcatatatgcatgtgtttgatgtggttttcaattttgttcaatgtaatcataggtatggagttcattgcaagtttgtaatttaattgcccaaaatatgatgggatagacagatgggcttcatgggaaacaattcacacctgcatatgtgaaaggagttgaagagttcatgaattttgttactgaaagatacccagaagacacagacatttgttgtccgtgcgtgaattgtcttaatcaaaggttgtgacctcagagtgaagtataaactcatatacacatttatggaatgtcagctacataca

SEQ ID NO: 54827 - DNA, 412 bp, Zea mays
tcggcatggcccactctttcatagttggaaataccttgaaattctttaatttctgcactaagtccctagtgccaatgtgctctgtgataatcctgaattcagccagtgcagtttgggttggaccctctggtgtcatattacattggggtctggtctctccgaagatcaactctagcgggctctggaccaacttctccttatcatcgtcaactttgatgtaaaaccattccgatttccagcctgtcggccacttgcttcgagagctgatcacgggaaattttgtagtcttccggtaggcaaaattgtagcagccgaagttttcatgtaacccatctcttctggccttggttaggtaatgcagctcatgcactcgacaaaatatttggaaacagttccccccttggctcggaag

SEQ ID NO: 54828 - DNA, 403 bp, Zea mays
  unsure (1)..(403): unsure at all n locations
ntggccncacctgcaggctngcatcctcccttaggtgggctttttgccactgtcggtaccctgaaactagggtaccccttaatactgtatgaagacgcaatacccacgtgactatctgtagtcgcgtggtaaaggagttgtacgttggacaagaccaagactcgccctagcctcggacgactactctgggtccacaacagcgcctgaccccaccacatgggcgggtccggagccgccacatgtccagagaaggtgatataccccaaggcctcaacagtgagtccggacccccatgggagagtgccggacccctggatatacagtccggaccttcaaggttggtccaggaccaccacgtgtgcaggccagacccctggaatgggatcccgaccccccctatatg

SEQ ID NO: 54829 - DNA, 291 bp, Zea mays
ttgaagccaatatgcgtgcacctctatgacactgttcatacttttatataactttcaataaagcgaatgattgcatacaacgtacctatggactataggcacccaaggggctagccaacttggcggcactagaagtttaagtccatcctatagacacactttatgttgatactaccgccttctgagctcagagacttataaattcaaatcttctcgtgattaagaatcctctaggggcgacatgactgtttaaccatctatccgaccagtaacctacactatctaatattt

SEQ ID NO: 54830 - DNA, 363 bp, Zea mays
tcattcctcaacatgcaaaagcgggtcttatcaagtggcttaatgaaaatatccgctaattgatcttccgacctcactccttctaaaatgatatctcctttagcaacatgatctctaaggaagtgatgacggatatcaatgtgcttggtgcgagagtgttgtacaggattattagcaattctaacagcactctcattatcacacaacaaaggtaccttttctagaactacgccatagtctagaagagtttgtttcatatacaaaatttgtgtgcaacaagcacctgcggcaatgtattccgcttcggcagttaacaaggcaacagtgttttgctttttggatgtccatgaaactagtgatcta

SEQ ID NO: 54831 - DNA, 435 bp, Zea mays
  unsure (1)..(435): unsure at all n locations
tcactagccacagcttcggaactggntcatccttcttccagtatcgttcttttcatactatattcaccttcatctcaaagctgaagctaaatattatactgaaaaatatgttagtcgtgtttttgagaaccttcggaagacgaaggcccccaacacgctcagcacctcctaggcaaccaaggaggacagcatgctcgcacaagaagaggcgggcaccacgttcacaagcagtctagccggtgtcgacgacacaagagcttgggaggtcgaggcgccccttcgccatgagggtcgcacttcacacccttcaccgtcttgcctggcacgtacgcgttacaggatcaaccaaatcaaaaccctcaacagagacgaagaagaactagacaaagcaagtggcgacgtaccgggaaaagctcacttgggtaaccgccctac

SEQ ID NO: 54832 - DNA, 262 bp, Zea mays
aagcggccaacaaagtccgccaaaagaaggaccgggcaggctcagatgccattgtagagacagcccgcgccacaacccaatcggcgaacgactcgacagcgacgaacgcgaacttaaagttcccccgaccggcggcacggacccgacgaagtccaggccccagcgctggagaggccaggcatgggcgagcagccccgcccacagcgaagagcggcccgaccgaggagaaaacaccaggcacgccacgcaggaccgtgagacc

SEQ ID NO: 54833 - DNA, 288 bp, Zea mays
agcaaacacacaaccacaacaagacccgcgggccacaccggcgccagcgaaaagaccacacgaaagcaacgaacccgacagacagattgcgcatgcaaactagataccacaaacgaccagaggccagccatgggcacaaaaaaagggaggacaaagcacccagaacaacaggcgacggaagaccgaccacggagaacaagacgcacaggcccataaggcaacacccccataacccgcgcacccccaaccgaggggacgagaccaccaacagggcgccgcccaagccca

SEQ ID NO: 54834 - DNA, 438 bp, Zea mays
tgtgcagacaaaggcacaccattgcatttcttcactatatcttcttccaatcacttctatcctaggatcatcccttccaggaacaaaggctcttctcttaaacaaaatccaacaatcatcatcagataggacatccatcttgtaaggcatgcaatgatccatcagggaagcaatcttcccagtgcgtgtagtcacaacgatcttacttccttttgcaccacagctgagcattgccttcagattttgcaattggatccaattgtcttcccataagtcatcaagaacaaccaagaatttcttgccatcaagtactctttggagatgacgagtaacctcctgaaggttttcgtggtggccacagttgccttcatcaatttcagaaagtatagattcaccaattttcttcagatcaaattcatagatacgtagacccatact

SEQ ID NO: 54835 - DNA, 406 bp, Zea mays
ttctatttgtgagttcttgaactctgccctttgtttctttttttttcttgaaccttaagccaaactcattttgagcccgtctcaagaatccctttaaggtctcttgggtatgggatttttcctgcaaaaagaacacccaagtgaagcgagaataatcatccacaataactagacagtacttactcccgccgatgcttatgtaagcgatcgggccgaataggtccatgcgtaggagctccagtggcctgtcactagtcatgatgttcttgtgtggatgatgagtgccaacttgcttcccggcttggcatgcgctacaaatcctgtctttctcaaaatgaacatttgttaatcctaaaatgtgctctccctttagaagcttatgaagattcttcattccaacatgggc

SEQ ID NO: 54836 - DNA, 398 bp, Zea mays
ctcagcttgtcaccatctcacgacttgcaagaatatggcagctccctccatcaatgatcacctttactacttcgtcttgtactttggctcgcgtttgaaaaagattatgtcgctgtccaatttcaatttctttcatttgaacactcaagatttgtgtaaccacaagagcagtaccttgctcaaattcacatcccgtatgttcttcagatttatcaatgtcatctccatttcctgcttcagcttcctcttcactagctgatgtatattctccatcatcagtcacaaggatcacatgattatttggacactcctttatgacatgaccatgacctccacacttgaagcactgaataccactactcttggctgttgaacccactaatgttgaagtggatgct

SEQ ID NO: 54837 - DNA, 448 bp, Zea mays
  unsure (1)..(448): unsure at all n locations
tctgccatgacgtgattgtccctggctggagagaagagtctatgtctgggtcacacttcggactgccatgacgaaggacttcgccatgactacagtattgcccccgtacgaagatatagttgcttcgtagctcatcaggaactgcttcggatttgagtgcccatcatacatggggagctgaggtggcttgtatgatggngggcatggtgtagcctgcaattntgctgatagaggagaagcatcatcaaaagcaaaatttccatgatggaaatcatcgtaccaatcatcatcattgtagaaattgtcttgacgaagctctctttgtggaggtcttcggtcctagtcatcttgagtaagatgacgtatttctttagcagcttcattgatcttcttctgtagatcggaaagacgaagcattttctctctcttcctttcgacctgctgatgg

SEQ ID NO: 54838 - DNA, 396 bp, Zea mays
  unsure (1)..(396): unsure at all n locations
caacactcaagcttaccacatttgaagcatgagcgtcttccccttgtctaggtttttcttgtctgccccttgcgaccttntagcgccgtcttgaatctcttgatgatgagagccatctcttcatcattaagtacgaccgcctcaatttgtgccaccttgctaggtagcgtctccttgcttcttgctgccttgagagcaagaggttgaggctcattgattgaaccattcattgcgtcgtccacgtatcttgcttccttgatcatcattcgcccgctcacgaactttccaagtatctcctcgggcgtcatcttggtgtacctacgattctcacgaatattgtttacaagatgaggatcaacgacagtaaaagaccttagcattatgcggacgacgtcg

SEQ ID NO: 54839 - DNA, 450 bp, Zea mays
tccaagcgtgttgcatacataaaaaagatatatgagaagacttatgtttctattgagctcaaagcagtgcgcaaggctacaagcatgatcaagcataggaagaaagtgttatttgaaccaggggacttagtttggattcacttgcgcaaggagcgttttcctgagcagcgcaaatccaaattgatgccacgaggggatggtccatttcgtgttcttgccaagatcattgataatgcatacaagatagatcttccaccaagctatggcgtgagcaacacgttcaatgttgctgacctcttaccatatacaagtgaagacacttcagagttgaggatgactccttttcaaggggaggaggatgatacggccatgccattaagcaacacgttagaacccccaagtcatactacatcaactcaagtacaaccaacatcatcaccaactcaagcc

SEQ ID NO: 54840 - DNA, 322 bp, Zea mays
  unsure (1)..(322): unsure at all n locations
agagtctcaacaaaacacaataccacaagagatcaatcacagagatgacacagtggtttatcccgtggtttggtcaaaaccaacgcttgactactccacgttgtggtgtcccaacggacgaaggttgcgatcaacccctcttaagctgtccaaagactcactctaataccacggcgnttatacttgctttttctcaatcccgttcgcgaggaatattcacaactcggagcctctcgcccttacaatcgaagttcacaaagaacacatagcaaagggggaatgatcaacgcccacactacttcttaagatcagagttacaaca

SEQ ID NO: 54841 - DNA, 441 bp, Zea mays
tgccaagccctcggacccggccggacttcaccggaggccctttatcgacctcaccggacttcggtcttccgccgccgcgcgtggaccgagctatccagtgagtccccgcccaattccttgcgctcatatcttctctggcatcccgtggacctccctgacccatttgattgaactatctcgccgtgaccaggccggtctcctcgccgccgacgagcatccccgcctgcgcgcgtggaccgaccgactccggccatctccgacggtgttccgcacaccgttgtgatccccgagacctccccttcgtcctcgaccacttcaccagagcaatctcgccgccggtaagcccctccgccctttcttccgccgcggttactgtttgaggtagaagaaggacctcgggttaggatttgtagaacccgaggggttttctgtaatgtcagt

SEQ ID NO: 54842 - DNA, 368 bp, Zea mays
  unsure (1)..(368): unsure at all n locations
gacctatgaaactcagcttctaagggagaacacattttgngactaaccaatgtttatgtttgttaagacagggtttggagcgcatgtgaagcatgaaagcaagttggtattcatcatccacacaagaacatcatgacgaccgacaggccgcttgagctactccacatggacttattcggcccgatcgcttacataagcatcggcgggagtaagtactgtctagttattggggatgattattctcgcttcacttgggtgttctttttgcaggataaatcacaaacccaagagaccttaaagggattcttgagacgggctcaaaatgagttcggcttaaggataaaaaagattataagcgacaaccggac

SEQ ID NO: 54843 - DNA, 386 bp, Zea mays
acacataaaactcagctggaattcctgcatggctatcatttatctttttgttgtacactctttattgacttgatttatcacaagcatcgagtttcctagaacttagatccgatgtatgatgagagcaatagatatccttattgtcggggaccataattaggggtaccctcaagactcctaaatctcagctggtaacccccatcagcacaaagctgcaaaggcctgatgggtgcgattaagtcaaggatcggtccattcaagggacgcgatcgcgcctcgcccgagcccagcctcgggcaaggacagccgaccccggagggtttacgtctcgcccgaggaccccctatggcaacggacacaccttcggctcgcccgaggcccagtct

SEQ ID NO: 54844 - DNA, 433 bp, Zea mays
  unsure (1)..(433): unsure at all n locations
tgtgaagcccatcacaagtntattaaagaatgttctcttattttattggncctcaagaagcaatgaagccttcgagcagctgaaggcgttattaaccactgctccggnattagctcaaccggacattgaaaagccatttgatgtgtattgtgacgcatcangcattggtttaagttgtgtcttgatgcaagaaagcctagtgatagcctacgcttcaagcagttgcgctggcatgaggaacattatccaactcatgacctggaattaactgctgtggatcatgccctaaaaatattgtgtcattatctgctgggaaatatctgtcatatttatacagatcataaaagcttgaagtacatctgtacccactcagagcgtaatatgaagcacacgagatggcttgagctgaataacaatatgaattggaattcat

SEQ ID NO: 54845 - DNA, 423 bp, Zea mays
ggggcgccgacggggccaccatgggagatttactttggtgttatcaggttcccgggggacaggctgggtgagtatcttcattgaatgtctcctccgctgcgtgtaggttcgttcaaactagaagatagggcgcgacagggtcggtcggacgctccagtcatggctacaatcgtggtggcactgtgcgccaccgaatagatgaccaggggaggaagaaaaaggtgagtccgttggatttcgatccagcggctaatattagatcgggttcaaattggatgtggttcgttcgatctaaatggacgggcgggattttaagtagcataccccttcgcaaatgaaatctgagccacaggttttagatctgacagtagtcgtagcttaccgattcatacgcatcgggatctaatctaaaccacaggatgt

SEQ ID NO: 54846 - DNA, 445 bp, Zea mays
  unsure (1)..(445): unsure at all n locations
tgagcaagactcacggcttcaccaggaagctctccgagggcttggatctaacggaggaggacgggagaggggctggccacggtggttgctctcgggcggcactggcgggtcgcggggaggtcgccggagttaatggctggctcgggcgagtccggtgaggtacggaggaggtaacggngaaggcagccaagcactggggcgggctttatagccgtggcgcgggcgtggtcacgggcggccgcgggtgcgcgggggttcgcgcacgggcgtgctctgagcgcgcccccggatgccagctcgcgtcgaacacgtggaagcttgcttctgccatggttcaacggccgattagagtgccatagcgtgcgtatcttagcaaagtcactgtgtacggtcgcttctctgctccaaatcctatcttttcgntgtgagtttcaagtcgagatat

SEQ ID NO: 54847 - DNA, 450 bp, Zea mays
tactaagcttagaactagatgacgaaacatgtgtttctgcttcaatcgattatgattactatgccttggaacctaaaaaggttggcgaagaagctattatagtgaagccttgcaaggcactagagcaaaaaaaaggtggagacgaaggccccatagccgcatgaggccgaagcgatatctcttcgtgaaaaggaagatatcggctttgatttcaagcacattgctggtggacaacttgataatgaaaaattaaccgagctgaaggattatggttttattggacacattgacggtggacaacttttattggattcttgttttaatccatgaaccatgtgaaccacgacaatgagacaaatatttagtatttgtgttcgtgccatatatgctttggttgtacgacatgcttagcaggtgaaagggaaatagtctcaatatttcctataatcg

SEQ ID NO: 54848 - DNA, 449 bp, Zea mays
  unsure (1)..(449): unsure at all n locations
ccaaaatctaagctttggtcaaactatattaatagagctttaaagtttctatttacatagggggttttatatttttcctaagtaggttacattatttagagtctgacaaaatttgtttgaccaaatttggataaattaaacagaagttatgaaatttcaaagtttctgtttaatttaaaaacagatttaataaaggttttctggaaaaacagtttatgccgaggtccctgggtttaaactaaatcaaccttcgcaaatctaccctcgcgccactattcccctgtgtctctgacatttcacaaaaccccctgaccttctctccctctcacccgcagtccttccccttatgcgaacagtaaccgtgggaaagaaaagggtggcgcggcttaccggcggcgagggaggtccgancaangggtgggttggcttcgggagactctggcggtcac

SEQ ID NO: 54849 - DNA, 398 bp, Zea mays
  unsure (1)..(398): unsure at all n locations
tattntcggagtcgtgcccgggcctcagttntcggcccgtgttccatggtttaacccctcattntcggcccagacgcaaggccgaacagccatgccgcccgtcgccttgcgcctccgtgccgttttccctccgttccgccatgcccttcacccaagacatacatattaccttcggtgtctttccacacgcttggacttagcttatntccggtgccatgcccgaacctcggttttccgcccctgcgccatgggcgaacccctcgttttcggcccaaacgcaaggccgaacagccatgccgccccgtcgccatcctgcccttcacccaaggcatacgtcgcagctttggtgtccttgcacacgcctggacttggtctttttttggtcgtgcacgaaccca

SEQ ID NO: 54850 - DNA, 398 bp, Zea mays
tcagcagaatgacagcgaaggtccttcattctcacataggcttatatgtgctaacttatgttgatgatatcattttaaaaagcatgaagcaagaaaatcacattgctgatctgcaggagaccttcgctaattttagacaggccggtttaaagttgaatccagaaaaatgtgtcttcggagtgaagaaagggaaatttcttggctgcctagtctcaacaaaagggattgaggctaatccaaataaaatcgaagctatccttcgaatggaaccaccaagtacaaagaagggggctcaaagattgacaggaagactgacatctctcaacagattcatatctagatcagcagagagaaatttaccatttttcgaagtgctgaagtcagccgaagttttcaat

SEQ ID NO: 54851 - DNA, 423 bp, Zea mays
  unsure (1)..(423): unsure at all n locations
tcggcgcctttgttatttcttcttcctgagcccctttgtttcttctcaatgaagnctgctaacgcctgngactgaattgaggatctatgcacatagtcaattgtgaattcattaagttctgcagcccatttcccaatccttccagtagcttctctgttcctcataatgttctttagaggctgtgacgaaggaacaattatgtgatatgcttgaaaataatgccgaagctttctagaagccattaacacagcatatagcaccttctctaattctgtataattttcctttgacagacttaaaacttcggagacgaagtatactggagcttgctttntgacttggccatctagcttttccagcacaagtgccgcacttattacagaatgcgaagctgcaacatataagagcaatggagcccctggc

SEQ ID NO: 54852 - DNA, 448 bp, Zea mays
  unsure (1)..(448): unsure at all n locations
ntagttntgtaacacccaggtgttaccaaggccctacttgttttctatgacttgntatcacatgtattaagtggaggagagggagccccaaagccttggaaacaatgtattaactaagaatgttaatgacaaaagcttcaccccaaacattttgagcaattgtcaccttgggcaaaagaggttaaaacctagacccttaaagcactagacttccaagcaagggattagtgggcaagctaatcaagtggccaattcatgtttctaatcctcaacgaaaatctaagtacactagtgtatctacaaaaacagtaaaggaatcattacaaaaaggccccttaaagacccaaaatccattccttaagtagaaagcacactagagctctctaatcttctctaagtcaaaaataaaccctagtttaaagattagaacgtgtcagttagtaaatgg

SEQ ID NO: 54853 - DNA, 356 bp, Zea mays
  unsure (1)..(356): unsure at all n locations
aacacattctgggactaacaaatgtttatttgtaaaagacaggattngtagcgcatgtcaagcacggaagcaagttggtgttcatcatccacacaagaacatcatgacgactgacaggccacttgagctcctacacatggatctattccgcccgattgcctacataagcattggcgggaataagtactgtctggttattatggatgactattctcgcttcacttgggtgttctttttgcaagaaaaatctcatacccaatagaccttaaagggattcttgagacgagctcaaaacgagttcggcttaaggatcaagaaaataagaagcgacaacgggacggagttcaagaactctc

SEQ ID NO: 54854 - DNA, 403 bp, Zea mays
  unsure (1)..(403): unsure at all n locations
tgcacacatagctctttngaataccttngatcatatctcttttatatgctatgactaatgtgttttcaagtttatttcaaaccaagtcatacgtatattgaaagggacttggagtcttcggcgaagacaaaggcttccactctgtaactcatacttcgccaccactccgagcaactctctcttctttgggggagaaatgaacatcaaggaaaaggatttcctccttgngggagagagtaaaagctcaaacgcaaaaggacttcgtctttggtataaactcacttatttatgaccaaaggggaagattgcacttagagggctctaatggttccgttnttggcgattcatgccaaacagggggagaaatgagcccaaagcaaaaggaccgcaccaccaccaccaa

SEQ ID NO: 54855 - DNA, 344 bp, Zea mays
ctataaacagcaagtgggggaagagagatactctatcttgccatatgttgtcactttctttccatgcacctatctgtaataagaagattatgaagagtgatctatcgctctacgttgaaaagaacactgataagctaccaagctggaatgccctctctcttcaatcctgttgaaagagtggttcttgttaaaaatgctctcagtaataccaatttacctactcatttcgttaaatgtgcctaaaattatgtttaagctaatgataaattggaatgaccgccatgtggaaaagaatgaaataagtgaatggtggaaggtgtcttatgtcttggcagaaaataact

SEQ ID NO: 54856 - DNA, 408 bp, Zea mays
tatgttactactatcaagctgttaagatggtaaattttgttttcttgaatcaagctatcaagctgtccatgttgctatctttgtccatgttactctgttaagttgttaagatggtaaattgtgtatatttttcaagctatcaagatgatatatgcctatgatactgtcatgttaaattgtgtaacctatcaagctgtttgtactttttttgtgctggtaaattgtgtaagctgtcaagcttgaatcaagctgtccatgttactatctctgtccctgttgctatctctttccatgttgctatatctgtcaagttggtaaattttgtaaattttcaacctatttactggtaaaattgtgtaaatttttaagaattcatttgtccctatcaagctgttaaatataattcaa

SEQ ID NO: 54857 - DNA, 439 bp, Zea mays
  unsure (1)..(439): unsure at all n locations
tgtttgctgcatcctcaaccgaagctatttactttgctcaatctttgtatctttgaaagagcttcggcaaagtaaagaaaaattttcaacttcattcaaaaaacaaaaaaatcaatcattagatggacagagtgcgttccacagctagggttacacacgacggagaggaagccgaaggtacagagactgccccaatctccgaagtaatgaagcgctcaaggctggtagcatcggaggaagcacctgccactgagacagagcaagctgatgttgaggagactgagtctgaagatgattatagcgcagtgccaagtaaacccagccatctggacttccggaaatccaccatctccgaagatgatttgcctaagctgttgaatttgggttattntaatgaagcgaagaaagagctggttcgttttggtggggaagagactac

SEQ ID NO: 54858 - DNA, 322 bp, Zea mays
actaagctggcattgcatgtgtaatttcttgattgcatcagggctcttcttttttttgagataaccgccaacaaagcgagtgagaaaagctaactcggatcacacctgacaaggcttagttttaagctgttagcacattgaatcgtactttctatgccactggtggctctctgaatatgcatgaagtactgcactcaggggaggttttataactcaaatcactcatgaaaacccctagtgcaaggcccaaaagcaaatttcaccacttgcctattttctctaaaacatatctagctcatggggaaatattttgaaaattctg

SEQ ID NO: 54859 - DNA, 445 bp, Zea mays
acactatacacaactcaagctttaagtggcacattgattcccatatgtaagaactccgtagttatgtttatctatctgagcccttgaccccttacgtacaacatggagtacttgtctgaaatctcccccaaacacaatagtcttcccaccaaagggcagaccagggcgtcccatgatatcacgcatgctgttgtccaatgcttcaattgattgtctcttagccattgatgccttcgcccaaataatcagcgacgctttctgtagcaacttcgatgtcccactttgtttcgtgaaggtacatatagcaccatcatcaatagtaagtggtatcttgaagcgtgaatgggcagttctcccaccaggcattatggaagccgcaaccccatatgtagctgttgcaactgcaatcttgtcctgactacgtagcaccgcaagcaatggctta

SEQ ID NO: 54860 - DNA, 449 bp, Zea mays
  unsure (1)..(449): unsure at all n locations
ctaagcttcgcgtttagcgtatccgaagataaggatcgaaccgtctatttgttttatgaccttctagtccataagggtctaagtcattgttgtaaacttttataaggggtatgattgtaattccttacaagctgtgtcctgtgcctataaatagtgaacagtattcctttactgttcatgcaatcctgtaatggcaagcgcattgctcgggaaatattaatttctaccaaggcgaaggtataaatgcacctaaacattatgttttgatatttacgttcatataataaaatatgtgaataatgttatctatttttggtacatctttctttaatgtttcatggtttatatattatttcatattatcttgtaagtctgatcacgaaggcgtgaccttcgntatattctactcatgggcttcgtcccaagtcattaaatccttggagagataa

SEQ ID NO: 54861 - DNA, 396 bp, Zea mays
  unsure (1)..(396): unsure at all n locations
actaagctntatccctcttcttacaaacagtgctggacagtcttttttctatttgcttgggcgaataaatcccttatncagcaactcttgcaactgcttcttcaactctgccaactcagcgggtggcattcggtagggcctcttggaaaatggggccgttcccggttgcaactcgatggcgaattcaatatcccggtccggtggcattcctggcaattcatcaggaaagacatctgcatactcacagaccactgngatcttcttcaggggtaactccgtcatagagaaagcacatgactgagaagaaccctgactatgcagaatcaaagagaaattcccgcagaaaggagaattaacttccacggtaccactggctatatcaagcacaacttggtg

SEQ ID NO: 54862 - DNA, 443 bp, Zea mays
tgtgaagccaatcacaagtttgttgaagaatgacacttattttaattggtcttcacagcgtaatgaagcctttgagcaattgaagacactattgaccactgctccggtattagctcaaccggacatcactaaaccttttgatgtatattgtgatgcatctggcaatgggctcggctgtgtactgatgcaagagggccgagtgattgcgtatgcttcaaggcagatgcgccgacatgaggagcactatccaactcatgatctggagctagctgctgtggttcatgccctaaagatttggcgtcactatctgctgggtaatatctgtcacatatatacagatcataaaagtttgaagtacatcttcacccagtcagagttaaatatgaagcaaagacgatggcttgagctcattaaagactacgaactggagattcattatcacc

SEQ ID NO: 54863 - DNA, 344 bp, Zea mays
ctacttgagctcgacctttttgttgtgcctcgtttacacaaatcaaaccgcccttgagcgtaagagaacgaacctcgacagctacaagtatgtgcaatgtgccgctgcggttcttctcaggaggaaaataccgaagctcctcctcaaactggacatctccaaggcgttcgactccctcgcttggaatttcttgcttgagaacctgctgaagctcggcttcagcacctcgtggtgcgattggatttcaatcttgctgtttacagcttcctccaagatactgctaaatggcgttcctggggcaccgaccacacatcgcaaaggggtgcgccacggggatgccctct

SEQ ID NO: 54864 - DNA, 376 bp, Zea mays
  unsure (1)..(376): unsure at all n locations
aaccaagttgtgaagattttcatccncatgtgctagtctgctatgttatatttagcccatgttagtcttagcaatcaagcaagtgtcgagttcatcttctattaaaatctactacatataactgaccctctaacactcccttaaatgttattgaatcatcacttcttctaaagacagtaacatctgtattcgtaaaaagacagctggaacccattttacataattgcgagactgaaagcaagttgtaatttacagaatctacaagaaaaatatttgaaatggaatggtcacgtgatataccaattttacccaatcctttgaccaaatcttgatttccatccccgaatgtgataactcattggggatcttggttttc

SEQ ID NO: 54865 - DNA, 340 bp, Zea mays
  unsure (1)..(340): unsure at all n locations
ctcggatattcttcatcacaacactaccgatcacggtgttattatttataatntcccgttacgaagcacgaaaagaagggaacgtgcttttcccctcaaagactcaaaaaccgtacgtatgtcaaatttcatgcctcgcccagaattgaaccatacaaaaacgacaagtatattacattcaggattaccacatattatacacattatattccagatgctcttacaatagcacctagccctccctaagtactacttccgcagcttcattcaggagttgattaaccacctgatccatgatagcttcagccacctttttaatttcatcgcccactttcggggg

SEQ ID NO: 54866 - DNA, 385 bp, Zea mays
  unsure (1)..(385): unsure at all n locations
ntctcgactaagtcggcgacagggcctcatttactgttgatattcgcgtaagcggcaaggccgaccaagccgagggattcccacgctctctgggatactgcgatacctcacatcgtctccttcccgcgaaaagacagcttcttgctcacacaaacattcctgttaccgacgaaatccagatgctctaaacaagaggaaaaaaggcacagctttacaagtgcagcgagggtgttttcttctggcctcggcggccgcaggaagcacacgctacaagatgatcggatcctgcacgctctggtcttcacgccgaatggagctgtatcaccctcggcatcgactacgtattcagcaaagcccgacccatcctctggcggagccgcggtcc

SEQ ID NO: 54867 - DNA, 440 bp, Zea mays
  unsure (1)..(440): unsure at all n locations
tactcctccctgggaagggccgntcatcatcgccaagattttgaagcccggaacatacaagctggccaacgatcgaggcgaggtctacaacaacgcttggaacatccaacaactacgtcgcttctacccttaaaatgtttctagtcgttcatgtatctcgctttctttacatatataaataaagtctaaccgtcaaggaaggatcagccttgcctcggcaaagcccgaccctccctcgggggctagaaggggggaaccccctctgcgtcaaaattttcctcggaaaagttttccgccaaaacgactttcgtgcttttcgactatattgataacagaatcctaaaaacgacgagaggaactttaacggcaaggccgaccgagccgagggactcctacgcctccaggatacggatacctcactcatcaccttccgcgaaaag

SEQ ID NO: 54868 - DNA, 449 bp, Zea mays
actcagcttgtatgaacctaaatttggctatgtcttactacattgcatctcagacataaaacaattggcttctattcatgttgttagagcaacaccttaattttggcgtgtcctctgccatcgacccctgcgcatgcgccactcgctttggtgctccccgagttcttgtccggtcaaaccaaaagccgttctctcgttcatcggttcaggtgtgaagttgccgccgaccacagctcacccttgacttgaggtgttcagctgttggcacgcacgcactacgcagtgcggtctgatacggcgatgcagtagtgctaaccttgtcgttgccgttttatagaaagataataaagagcagtacagttgctgcgacggcgatgcttgagagcacaaaaacgtttccgtcacgtccgaaggaacctttttattggttcccgtttagttttgttgag

SEQ ID NO: 54869 - DNA, 361 bp, Zea mays
  unsure (1)..(361): unsure at all n locations
tgaagccatggtaagtagcatatgctaataatatgcgaattgtctctatcctatctaccggtgcataggtttcactgaaatccaaacctttgacttgggagtatcccttggccacaagtcgagctttgttccttgtcaccacaccatgctcatcttgcttgttgcggaaaacccatttggttcctacaacattttggttaggacgtggaactaaatgccatacctcattcctagtgaaggtgttgagctcctcttgcatagccaccacccaatccaaatcttggagtgcttcctctaccctgtgtggctcaatagaggatacaaaagagtaatgctcacaaanatgtgcaacacgagatct

SEQ ID NO: 54870 - DNA, 378 bp, Zea mays
cttaaagccacggtcactcgcacatgcgagagatataccaatatttctcatacctatctatgggtgcataggaaccaccaaaatccaaaccttcgactcgcgaatatcctttagccacaagccaggctttgttccttgacaccacaccatgctcatcttgcttgttgcgcgaatacccattaggcacctacaacactttgaataagacgggcaaaatgatgccatacctcattcctcgcgaactaatgagctcctcgagcttagccaccacccaatccgagactcttagcgcatactccaccctgtatggctcaatagaggacacaaaagagtaatgtgccaaaaatgacggactcgagatcgagtgagtacccccct

SEQ ID NO: 54871 - DNA, 441 bp, Zea mays
  unsure (1)..(441): unsure at all n locations
tctntcttcctcctcatcctcattggtgcttccgctatcattttcattatccacacaacacatgtgggaatcgaaatgggaagacaaaccttttggagaggtgggttcatcgtttggtctccatcgttcattttctccttcttccttgcaagggttagtatcacaaaaactaaaggaagtagaggcatcaaatgaattattatgtttggactcatcaaacttgattttaattctagtccaaatatcatgcgcatcgggaatggattcgtcatagtttgatatgaaggcacgataatcttctntgctaagagaattgtttaagatgtcaaaagctaggtagtttaagcgataacatctttgatcctcctcggaattaatttctccattaaaactagagggaaaaatactctcgcaataatttggtctaattgaggatggatg

SEQ ID NO: 54872 - DNA, 441 bp, Zea mays
  unsure (1)..(441): unsure at all n locations
tatgaagattcttcatcccaacatgggctagtcagtggtgctttatccaacccatgttagtcttagcaattaagcaagtgtcgagttcagctctatcaaaatctaccaagtatagctgaccctctaacactcccttaaatgctattgaatcatcacttcttctaaagacagtgacacctacatcagtgaatagacagttgtagcccatttgacataattgggaaacacaaagcaagttgtaatctaatgaatcaacaagaaaaacattggaaatggaatggtcaggtgaaatagcaattntacccaaacctttgaccaaaccttgatttccatccncgaatgtgatcgctctttggggatcttggtttttctcatatgaggagaacattttcttctcccctgtcatgtggtttgtgcacccgctgtcgagtatccaacttg

SEQ ID NO: 54873 - DNA, 375 bp, Zea mays
ccaacttggaaggccaaacttgccttctgtcaggcggtgcactgaacagtccggtgcaccaccggacagtcactgtagttgtccgatgcatgatctacttccttttctggcgcatccaacctttggtcctcggggtcgattggcgcaccggaccattgcccggtgtgcccaaccgaccgttgctgcgggccacgagtcgcccgcagatcgtgcggccgaccgttggcgctggcgaccgttggctcaccggacagtctggtgcaccaccggacagtccggtgaattatagccgtacgcctctgcgttctcccgggagcagacaagtcactcgccggcagtctaacgcactggacagttgtcagtggcacaccggac

SEQ ID NO: 54874 - DNA, 197 bp, Zea mays
aaaaccggcactgtcgcccccgaagcatcttccgaagccttcgacaacattcttcgacacgcttcggggaaaaagttgactgaaaaagaacagcaagaggcgcaacctcacgccccaaaaactgaaacatccaaagggggcattgatatcaaaccacagcggacaggaagacttcttgtattgtctccctgacagca

SEQ ID NO: 54875 - DNA, 402 bp, Zea mays
gccgacaaatatttccctttcttgaccgagtatgctttatttgttacttttccgtgatgtttgtgatacactggtggcactggtggtctgggtttcaccacaaatgcagattgcagaggccatatgagaggattcgaaagttcagtacctggcctctagtgaagcacgctctctgtgccccttggtgcgcagcgcatagtctgcgggacactcgctcttctgcggcggcggcgtcggcggcacaaaggaggtgcgaacgattttttctttttttctgataggaggtgcgaattgcgattgatatctgtaagactgaaacgaagcccgagcctgactgtccgacgaatcgagaaaaactaatacctctgatttaatgaaccaacactatgaagttaatggccc

SEQ ID NO: 54876 - DNA, 441 bp, Zea mays
tgtgaagcccatcacaagtttattaaagaattatctctaatttaattggtcttcaagatgcaatgaagccttcgagcagctgaaggtgttattaaccactgctccggtattagctcaaccggacattgaaaagccatttgatgtgtattgtgacgcatcaggcaatggtttaagttgtgtcttgatgcaagaaggccgagtgatagcctacgcttcaaggcagttgcgctggcatgaggaacattatccaactcatgacctggaattagctgttgtggttcatgccctaaaaatatggtgtcattatctgctgggaaatatctgtcatatttatacagatcataaaagcttgaagtacatctttacccagtcagagcttaatatgaggcagaggagatggcttgagctgattaaagattatgaattggaaattcattatca

SEQ ID NO: 54877 - DNA, 430 bp, Zea mays
  unsure (1)..(430): unsure at all n locations
tctaaagggagaacatgtgataggtctaaccaatgttcatttcgaaaaagatagaccttgtgcagcttgtcaagcagggaaacaggtgggaggagcgcatcacagcaagaatgtgatgaccacttcaagacccctggagctgctgcatatggacctcttcggacccgtcgcctatctgagcataggaggaagtaagtatggtttagttattgttgatgacttttcccgcttcacttgggtgctctttttgcaggaaaagtccgaaacccaagggactctcaaacgcttcctcaggagagctcaaaatgagtttgagctcaaagtgaaaaagataagaagcgacaacgggtccgagttcaagaaccttcaagtggaggagttccttgaagaagaanggatcaagcacgagttctccgctcctacacaccac

SEQ ID NO: 54878 - DNA, 437 bp, Zea mays
  unsure (1)..(437): unsure at all n locations
aactcagcttgactagtctcgatgatgtatgcctttacatagnccaagatttcttagctattactttctgcgaagccgcattgaaaaagtaacacaagcgtgtgatgacaactctgacatgctctgtttcgagggctcttactgcatttgggaggaacactgtcatcatcacatggcagtcatgagagttgtagccaaatagagacaagtccttcattctgactagtttgctgatattggatgagaaacctgtgggcactttgaccccacgcaaacatttgcaaatctttgttctctcctcaactaacaagttgtagctagctggggggaggtaaggcttccctttgccactatccactggatgaagtttcggtctgatttgaagatctactagatcattgcatgacttaagttcatcctttgtcttactcggcatg

SEQ ID NO: 54879 - DNA, 447 bp, Zea mays
  unsure (1)..(447): unsure at all n locations
cgagttntgagggccctatattgcataggaccagtaactctctctatctaagactntgcaacccaaatttgtctaggtctactcttgtttggtggacctaggaatgtgactttgacctttccatttgcaacctttcttagaacataatgagcattgaaagcaaatggtcttgagtgcttaggcaagggagttggtggtttggctttgcaggtgtgggcaaaatgaccttcatttcaacactcanagcatttgataggcttgtgagtctgttttggcttgtattgagtagtagctntcttttgcacaaaagcattgtatccaataccactcttgttgtttttcatgacagtgttcataagcaactcattttggaggtattggcctttggtgaactnttgcacacttgttgcaagatgttcatttcactcttaacgttcttgacctcat

SEQ ID NO: 54880 - DNA, 399 bp, Zea mays
  unsure (1)..(399): unsure at all n locations
actcaagcttctaaagggagaacacattgtgngattaaccaatgttcaatttgagaaagacagggtttgtagcgcatgtcaagcagggaagcaagttggtgttcatcatccacacaagaacatcatgacgaccgacaggccgcttgagttgctccacatggacctattcggcctgatagcttacataagcatccgcgggagtaagtactgtcttggtattgtggatgattattctcgcttcacttgggtgttctttttgcacgaaaaaatcacaaacccaagagactttaaagggattcttgagacgggctcaaaacgagttcggcttacggatcaaaaatattagaagcgacaacaagacggagttcaagtattcttcaaatgaaagcttccttgatg

SEQ ID NO: 54881 - DNA, 419 bp, Zea mays
  unsure (1)..(419): unsure at all n locations
ttgcttaatagcatactctgtacacgaataaccttcgntacttaacattttntgtgaaaataaaaagttagagggagattgtttaccttgaaattggaataaaacaaactaccgacgatgtgttgttgtcgatagtggctaatatcggcttcgagcttcgggaaaccgatactctctgatagagtactgataacctttgctccggtctgatctcggatgcagcctagcttctcatcatcaacacctccgaagagaagtgcccctggtcggtatccgcaggaaatggcatattctttcaatttttctttttccgcttttgttaattcttgaccaaccaagttctgaaaattcaaattttcatcttctagtgtttcttcggcaatctctttctttttctcggcctctgcggccgaagcctc

SEQ ID NO: 54882 - DNA, 415 bp, Zea mays
  unsure (1)..(415): unsure at all n locations
gctcagcatgatggagcggttatctgattaccgcaccgaaacttcnacggagtccgaggcggaggaggaagctgcttcttacacaccactggttcccaaccgccctgtgccgggcgctgctactgtgcatgccgcacggtagcatacggctgcacagacatcccggactccgtctatggcgactccgggagcattgccaacagctagggagttgctgaaagacccttcaagctacacagcctcaccacgggccatgaagcaatggcaggacgacgtcaaccgactgctcggcatgggacactcacctcgaccagatcgaggccacagtcatcctggcgtcaacatgacgcatgggcatctgtgcgctcaccctcagtgatgggcgcacagaccaatgaccctcgagcagaactcg

SEQ ID NO: 54883 - DNA, 346 bp, Zea mays
  unsure (1)..(346): unsure at all n locations
aacatcagcagcaatgaaatcaaccaaatatagctgaccatctaacactcccttaaaagctaggtaaccatcatttcttctaaagacggcaacatcaacatcagtaaataaacaattggacgccattctgcataattgagatacataaagcaagctggaacccagagattctataagaaatacattagaaatggaacggcccggcgatatagcaatctcatccaatccctcgaccaaaccttgagttccatccccgaaagagattgctctttggggatcaatatctttctcatatgacgagaacattctcttctctcccgtcatgtggntcgtgcacccgctatcg

SEQ ID NO: 54884 - DNA, 444 bp, Zea mays
  unsure (1)..(444): unsure at all n locations
tgacattgtctcccttttggaagccaatgccatccttaatgttatggcgtctgccattataaagcatactacgagcaaacttaaaattttcattctctaattcatgctcagcaattttagcatctaactttgctatatgatcatttcgttgtttaatcatagcaatgtgatcatggatagcatcaatattaacatatctacatctagtgcaaatagagatatgactaaccagtncatgtagagggtttgcaagcatttaattcatcaatcttagcatgtaacatgacattttcatttctaagattggaaacaatatcattgcaaacatttaaattcttacccttagtaattaatttttcattctcaactttaaagctagagagcgatgcattcaaattattaatcttaggaatcaaactagcattattatctctaagactaaca

SEQ ID NO: 54885 - DNA, 417 bp, Zea mays
  unsure (1)..(417): unsure at all n locations
tatatctcccacagctctgggtggtgcaaaaattcatgcatgttctaaccattgtattctgtatcgnggcaattttgagaacgcatcaagatgcccagtttgcaatgtcagtcgatacaagaagagctacaatcaagacagtgtaaaaaaattcccgaagaaaaataaaaactagaaatccactattggacctgaaagtgacgatgacactcttgatgacatggatgggaaaaagaagtcaaagatcccagctttggtgatgtggtatcttccagtaattgatcgcttaaaacgtttgttctcaaatcctatggaggctgagcttatgcgttggatgctgaaattacagcagaataacaatataatcgacctctgctgatgctcacaatggaaaattcgatctatgtatctgagttg

SEQ ID NO: 54886 - DNA, 418 bp, Zea mays
tcttctggacaagcgctgcacttaccgctgagtgctaagctttcacatataataacaaaggagcccctggcattggtggagtcaatgttgttagatctattaaatactgcttcagctcttcgaaggccttctgctggattggtccccattgaaagacttcggctgatttcagcacttcgaagaatggtaagtttctctctgctgatctggatatgaatctattgagagatgccaaccgtcctgtcaatctttgagcccccttctttgtagttggtggctccatccgaagtatagcttcaatcttacttggattagcttcaattccctttgttgaaaccaagcatcctagaaatcttcccttctttactcccaagacgcattttttcggattcaactttaagccagcttgtctgaaact

SEQ ID NO: 54887 - DNA, 301 bp, Zea mays
  unsure (1)..(301): unsure at all n locations
gataacgagggttacattntatatcctgtcggctatcccgaacacaaaattaggagaattcattctaggaagtctcactctggctctcatcatgcttttatgtacaagagtgaggcatctagctctaggtaatcaacccatgttaaattgcctaaacagaaatctcctattgcatcaaatgatcacaacatttcgtttaagacttttgatgcttcatatgttttaactaacaaancacgcaaagtagttgccaaatatgttggggccaaacacaaaggctcaaagactcgtgttgggtacc

SEQ ID NO: 54888 - DNA, 357 bp, Zea mays
  unsure (1)..(357): unsure at all n locations
tgaagccatggtaagaagcataagcaagtattatgctaattgattctagcctagctacaggtgattagggttcaccacaatccaaaccttcgacttgtgaataccccttggccacaagtcgggctttgctccttgtcaccacaccatgctcatcttgcttgttgcggaaaacccacttggttcctacaacattttggttaggacgtggatctaaatgccatacctcgttcctagtgaagttgttgagctcctcttgcatcgccaccacccaatccgaatcttgaagtgcttcttctaccctctgtggctcaatagaggaaacaaaagagtaatgttcacaanaatgagcaacaccag

SEQ ID NO: 54889 - DNA, 429 bp, Zea mays
  unsure (1)..(429): unsure at all n locations
ctttcttatcttgcttgtgttaaaatntcataactatatgcctaacggtttaagagttatgacatttacaaactgcttgctgtgttctgtccaccgtcagaacagatttcgaaaactgtgttgtttgatttagttaaacattgaatcacttcttagtgattataaaagttatgtggtgcttttgctgagctttccaaaaagtcttagatcactcttttggtgatctacagattaagttatggatgttcaaagtgtgaagtctgaatctgtccaaatctggacagcgccattgtgttaacaccttttgaccatgctaagtgtttaatcctgctgtgatgataataccaaagttgtaaagtacctttcaagctttctagaaagttctagtttactatctttggcttaatatctngtgaattatgactgaaa

SEQ ID NO: 54890 - DNA, 454 bp, Zea mays
  unsure (1)..(454): unsure at all n locations
accaaaatctcagctntaaggttaatcttcacctaatagaaagattaggaatgctttttgcttatgtatggaactaattgcttcaattggtagttgatcaatagtagttcctttcaagtggcatactttcaattagtaataatctattttatgaaaagaaatgtcaatatgaaggttaaattccttttggattaaatttgtaaattggtgcacattgttaattcactcatccatgtgcattaacttaaaaggaatttaatttatgcctttatgcctcatagatgatgatttatttgacattcatatataaatatcatcattcatcattgtactactaatacctcttttcaaagtgctttnttactagttttaaaaggaaaagagataacaagctaaagaaggaagtctccacaattgaagaaaagaagaatacttagatgacaccatctcatat

SEQ ID NO: 54891 - DNA, 444 bp, Zea mays
gaccatagatactaagctataagtgtactctgataatcagtcaatttgatctgcttgtatatttataactcttcttaggtcctattgaactcaactcttctttctttcgcctgtacctcaaaggccatgccttctatctcctttcctctatgagaagaaaggctgattgataagaacaaaagtaaaaccaaagctatccttagtagtagcacattataggatcatagtttgtacctgtattagggacaaagatcacatgcaagttttcactgttgtgcaactgtagaatggtggggacatacacttatatgatcaataagagcatataaatgcccaagctagggagcaaacttatcaaacatctaaattgaatctggttccataagcaatcacaatgtaattagtaatagacttcccacacaaaaatgttaatgaaatgtgttg

SEQ ID NO: 54892 - DNA, 430 bp, Zea mays
ctcagcttatgtggacatggattgccataggtaacaactcctagattaggatatctatctgagccctagacccctagcgttcaacagggagtacttgcctgaaattacccccgaacacaacgattctgccaccaaagggcagcccaggccgtcccattatatcacgcatgctattgtctagcgccataattgcttgtctcttagtcattgatagcctcgtcccagataatgagcgatgcttaatgtagcaactttgctgccccgctttgatccgggaagctacatacagcaccatcatcaatagttagtggcatcttgaagcgtgaatgggcagatctccccccaggcaatatggaagacggaacaccagatgtagatgttgaactgacatcttgtcctgactgcagaatgccgaagcaatgccttatac

SEQ ID NO: 54893 - DNA, 437 bp, Zea mays
  unsure (1)..(437): unsure at all n locations
tgacattgtctccctgttggaagccaatgccatccttaatgccagtgtttctcccactatagagcatacttctagcgaatttaaattttcattttctaagtcatgctcattaattttagcactaagttgagctatgtgatcattttgttgtttaattaaagctaggtgatcatggatagcatcaacattaatgtctctacatctagtacaaatggtaacatgataaacactaaatgtagatggtttgcaagcatttaattcatcaatcttagcatgtaacatggcattctcatttctaagattggagatagaaacattgcaaacatttaaatctttagccttagaaattaatttatcattctcaatcttaaggctaaaaagtgaggcattcaatntatcaatcttagcaatcaaactagcattatcattctaagatt

SEQ ID NO: 54894 - DNA, 425 bp, Zea mays
  unsure (1)..(425): unsure at all n locations
aactcaagcttaccagngcagaattcttcgactatagcgtttagaagtgcattcagctcaagggcgcttcaatagcgtgcccaaaggctaatggataagtagaaagggcgaacggaatgatcctagaagcactcaaaaagaaggttttttgacaaaaatgagaagcttgtagggaaatggatcagggagttgccctacgtggtctagagcctaccaactcaaccctatcgagcattgtagggaaatacccctttcttcatggtatatggatcaaaagcagcattgtcagcggacctagccttcagggacccaggctaacctttaacagcatcgaggaagcagaattacccgactcgagcataatgatgtgctataagaaaaacgactatatgtagtcattcagtcggcagaatccagcaaacttg

SEQ ID NO: 54895 - DNA, 440 bp, Zea mays
  unsure (1)..(440): unsure at all n locations
ctctatgtcttttagctttgggatctccttcttgtgttttttaagaatattccaaatgtcacgggcatcttctcttccttgaactttccggtattcttccggacaaagacttcctttaattatgctcactgcttgagcatttcgatgaacctcttgcatcatttccggagtcatctcttctccttgggcgggcttatacatacctacattaacaatctcccaaagactaggatgcacaccgattaaatgcgacttcatcttgtcggcccactcatcatagttcaactcactaagggttggtaactttccaagtggggcggaagagaagttgggaatataatttctagagtaatcaaattgaactttgctaaattcattacctttgcttttggtagatgatccttcggtgtngagacttaccttgctcaataccttagaca

SEQ ID NO: 54896 - DNA, 420 bp, Zea mays
tactcagcttggatcgggagtcgctttagagggaagcgtcctcgctgaccaagttttgggctctgttgatggcactgagttggttcctgctggttcgttgcaagctgcttcgggtggcgaccttacgcccggtcatcaattgatctctcatgatttgggagtcccttcgttcttttccaacctccaagtactgtgatatattttagcttgatttttacaccgcatgaactgctatcattacactcatctgttctccttatcaggctttggtggacgggatggctagccagctgaggttgcagggtgcttctgttccagaaggagctttgtctcttgcacgttggaatccagtgttacttcaacatcgtgtctctgacttggaagcgaccaatgctggttagggcttttttgcgtctcttt

SEQ ID NO: 54897 - DNA, 306 bp, Zea mays
  unsure (1)..(306): unsure at all n locations
gcaaaataaactcaattcctttattaactcggncaaaacagacaagagccatgtgtgtgctgaatcaaaacaaccccgcaagccacacaaggctgctgaagccaggagtttggcacctctagaacttgctcattctgatctgtgcgaaatgaatggagttttgaccacagggggcaaaagatacccgcctcccttttatagatgacctcacgaaattttgatatgtgtatccttaataacaaaagatgaagcggcaaattattctaaagcctataagctgaacgtgacaaccaacctcggaggaaa

SEQ ID NO: 54898 - DNA, 371 bp, Zea mays
  unsure (1)..(371): unsure at all n locations
aactcagcttggaaggttcttcatccncacatgtgctaagcggcgatgctactttcagcccatgctagtcttagctattaagcatgcatctagaccggcctcttcttttgcaaaatcaactaaataaagtttgccgtctaatacacccttaaaagctagtgaaccatcacttcttctaaagacagacacatctacatttgtaaatagacagttataccccatgttgcataattgactaacagatagcaaattatatccaagagactctactagaaacacattagatatggagtgctcattagaaattgcaattttacctaacccttttaccttgccttgattcccatcaccgaatataattgaatcttggg

SEQ ID NO: 54899 - DNA, 421 bp, Zea mays
ctacggcctcccagggaagctacccaggggcgtggatctttctgggaggacgagaaaagggttggccacggtggctaccctcgggcggctctggcgggtcgcggggaggtcgccggagctaagggcgagctcgggagagttaggcgtggtacagaggaggcaacggggaagatagccaggcactgggacgggctttatagccgtggcgcgggcgtggtcacgggcggccacgggcgcgcgggggttcgtgcacgggcgtgctctgagcgcgcccacgagtgtcagcccgcgtggaacacgtgggagcttgcttctgccatggttcaacggcggatttgagcaccttatcgtgtgtatttggcaaaccactgtgacggcgtttcctgctcatatcaccttttgctggagtccaagccagatc

SEQ ID NO: 54900 - DNA, 424 bp, Zea mays
gcttcgtatgatgcatacatagcgtcagtgatggtggaagtgcacttatctatcctcattgtggcgttgatgctcaacttcatgttgactgcatacttcatggtgaagataagcatgtctcacaccctgatttatgggcaaatccaggcgcgaatcaaatgtgtgctaggatcaagtctcacacatatgatgacttatgatgcagatatgaacgtcacatccttaccatataatacgaattctatgctcaatacttgagtaattacatcatacgaagacaacactccagctaccataggtgactgggagacgacgaagtataccactcatgaactcatcatagcatgcttcatgcgcttcatctcatggaacctattcttgacctaggggatgtgagttcaacaagggtgagcttacatacttt

SEQ ID NO: 54901 - DNA, 403 bp, Zea mays
  unsure (1)..(403): unsure at all n locations
ntatcaaatggacgtgaaaagtgccttcctttatgtttcattcaaagaagaggtctatgttgagcaacctcccggctttgaagacagtgagtatcctaactatgtctataagctctctaaggcgctttatgggctcaagcaagccccgagagcatggtatgaatgccttagagatttccttatttcaaatggattcaaagtcggaaaggccgatcctacactctttaccaaaacacttgaaaatgatttgttcgtatgccaaatttatgttgatgatattatatttgggtctactaacgagtctacatgtgaagaatttagtaggatcatgacacaaaaattcgagatgtctatgatgggggagttgaaagtattcttaggatttcaagtgaaacaactccca

SEQ ID NO: 54902 - DNA, 408 bp, Zea mays
gctatgaagattcttcatcccaacatgggctattcggcgatgccagagccaacccatggagtcttaagcattaaaccaagtgtccgagtcaactctatcaaagtctaccaagtatagctgaccctctaacactcccttaaatgctattgaatcatcacttcttctaaagacagtgacacctacatcagtgaatagacagttgtagcccatttgacataattgggaaacagaaagcaagttgtaatctaatgaatcaacaagaaaaacattggatatggaatggtcgggtgaaatatcaattttacccaaacctttgaccaaaccttgatttccatccccgaatgtgatagctcgttggggatctttgtttttctcatatgaagagaacatattcttctcccctgtcat

SEQ ID NO: 54903 - DNA, 415 bp, Zea mays
  unsure (1)..(415): unsure at all n locations
ctcactgtagtttggtaaatggtccccagtcgtgtgaagcccaaaaccatcagaaagaatcatggggagttccaagagaaaggtttgcgtgttggcatcaatgctttcttaataagctagcttccaagcgaaagcgtataacctggaaatgatcttttaatagccagaatcacgtttgcaatcccaacaggatgcttctaanagggccagatttgttgacgttccatctcctcgaagagtctacaaagtgaagatatgtagctgaagtaaagttatacccataacccttcttagccgaatctcgaggacgagattcattntatgtggggtagacttgtagcatcccaaaaaatcaaatattgaaaacacctcaaactcgctcttaattcaattgaattctaatttcctttcaaat

SEQ ID NO: 54904 - DNA, 373 bp, Zea mays
ggctacaagtggagtgtggtgggcctttatctgcaccagacaatgccacagcgggttcgcattgggcggcccttcgtcggctcctcccagactatcggttgctgaccacggtggagggtggtgatgggcgtactacggctttctggtatgactgctggctgccctcagggcccctcgtggaggcaatgccgtcgctgtacacacacgcacgacataaaaatgcctcagtcagcgacgttctttcaaaaggtctgcgcctcgccttcgtctctcggctctcaacggtagctgctgctgaactggtgcaattgatggcgctgcttgatggtgtggtgttaacaaataccccagatgtacgtgtgtgtccctggga

SEQ ID NO: 54905 - DNA, 271 bp, Zea mays
  unsure (1)..(271): unsure at all n locations
ttttgaattgtttctcaaacttaaagcgataagggagccgtacaagtcatgcttctttcccacttcttttctcttcngcattccacaaccactagaagttggatatgttctgtttgataagtactcctgcactaagtccctagtactgatgtgcccaaccaccactctaaattctacttcggccaatnggcaaggggcccctaactgcatgttgcacaagggtcgagtcatgccaaagttcagctttaagggactcattaccatactcatg

SEQ ID NO: 54906 - DNA, 433 bp, Zea mays
  unsure (1)..(433): unsure at all n locations
ctatanatactcaagcttcgcaggaccttgtgacccgtattgcagcgcagatcattgctgtgccttttaaaccttggcggatcaccttagcagctatggcccttggccctgcgtgtgagccgcatgtaccactgtggactttgcgtaagatctggacgccttcngtgtcggtgacgcatataagcattggctgattgaccccccttttgtagagtttggcctcaatcagtgcgaagtcccggcttcgatgtttgaggcgctcggcctcgctgatgtcggttggatgatagtacccctgtaagaacagggttattggtgcncgcagtcttcgccatgataaggttgactatgccggggccctcgctgtcattggttattggaagccttcggggctccggacggctggcgtgccgatgacattgaagaacacgtc

SEQ ID NO: 54907 - DNA, 308 bp, Zea mays
  unsure (1)..(308): unsure at all n locations
atcaagctaatggctaatcacattagcgcatgaacaagcctgccatgatacattacgatcgcttgtaaaaaaaagtgttccacatgaagcgataacttatgatctccttccttgaacatgacaaggctgctttgaaccgttctcccactctatgaatagctgcactaatgatgaaactanagcctacctttcgaccaacctaacaagacagagtatttagttacatgttcaacatatactaggtaatgtcataacatgcagtgaacctatagtctatttgcatgtagattcttttcatattatgcatc

SEQ ID NO: 54908 - DNA, 418 bp, Zea mays
  unsure (1)..(418): unsure at all n locations
gactgtgaacctcaagaagtgcatctttgtctcagacngatgcctcaaggagatgcgcagaatcgtccagtgtcctggagagtttgcagatcgaggagtgcagcaaggttactcttgtgggcattcttgctttcctcctgaactgcaaccccaagttcaaggctctctccttgtccaagtgcatcgggatcaaggacatctgctcggcacctgcgcagcttccaatatgcaagtcgctgcggtccctgaccatcaaggattgcccaggattcacggacgctagccttgcccgggtgggcatgatctgccctcagttggagagcatcgatctgagcggtctcggtgcagtcaccgacaacggcttcctttcgttgatgaagaaaggttcngagagtgggctggtccgtgtgggcttgaa

SEQ ID NO: 54909 - DNA, 435 bp, Zea mays
  unsure (1)..(435): unsure at all n locations
agagcgattcacggacatgagagcacattatctttatgataacaagtaagttatgtatgggcaatgtacccntatttatatgggtgaagtgctcctatcacccccatagtcgatgaatgctaagtgttatatggagtactcagtctagaggttgacaatccgtgcgtacatgtctctaatagtcatgcacaccatacttgatggtgtccactatgaagcctctacattaatgaggaggatgccgatgcacgagcagagattaatggtaagcattgccatgcncttatttattgtcttttgcctatagtcccatcttcatcacaacttcagtttagttactggcatttgcagtcttgtgggagatgttggtcgtgaacgcaatgtcgcctcacatatggacgagaggtgatgcacacacccacataataatcaata

SEQ ID NO: 54910 - DNA, 293 bp, Zea mays
gtcgtctaaaggccaacttgccgtgccacaagtcggacaggtcgctcccacctggcggacggtccgcgaccgtccaggggcgatttttcaagaaccctatccgccccaatcactcaatcaatgattcggcagaaaactaccatgcgaactctgtcatagttgagcacaacattcgcaatgagtcgcatctacatgtgcacccatcacactcgaaatccattgcttaattctagagcagagagaacacccgaagaatccccaaattgaagaaatctgtgaaatcatgacatatg

SEQ ID NO: 54911 - DNA, 341 bp, Zea mays
  unsure (1)..(341): unsure at all n locations
tctcaaccccttaaactacntctccaagtctttggaaggatacatttttttctgaattctactaatgaatgactctagagtgtaaactatgcatgccacgttatgagccacgctcaattttagttacagtaacatcaggggtgttacacgtggggtccgcttttacgcctgtgtccctccggattctcctccttcgtgctctgtactcgccgaatcatctgggctggggcacgcgacgacaatttactcgtcggttcagggacgccccggtgtctaaacgcctatatgtggcgtgccatataggtgcctactacatgttgacgaacagctttccgtctagc

SEQ ID NO: 54912 - DNA, 336 bp, Zea mays
accgggacaccaaaacaaacaccacagcaacaattaggccacgaccctgcggcaatgcaccaccaaaacaagcaggaactaggcgcaagcctaaaacccttacaagacgcaacgcctgcagccccgggacgccacggcaacgaacaccaccgccacgacccgcaagcccggctcgacgagaaggagcgccgaggctaccacccctggcatgggggacgccacaacagcgaggacgagcggagcccctcacccgaactaccaggtcccgaagccatcagcggggccatacgacaggcgccgttcacgacccggtgccgagccccgataccatcacca

SEQ ID NO: 54913 - DNA, 346 bp, Zea mays
cttttgctctatcgatgaacactttaacctatccgcctgagattaacaatagatgtgcctatggtctcttcgtggagaccttctttgcttgaaagaaagtccagcatcgtgttaacattaccgttaccctttgcacgacataaagactgaaccaagaatccatgtgaagaaagcctttcttcgcatatttgcataaaatggcccctccttatatagcttttcaagtaagctcagacactctgctcggtttattagtcatgcatggtcatgaaaaccacctaggaggtaacatactcaactgctgggttctactatcgagccaaagggaaactccacatgcataccc

SEQ ID NO: 54914 - DNA, 434 bp, Zea mays
  unsure (1)..(434): unsure at all n locations
agcttggaccaaggacagtggactgtgtctttcttggatatgcttcgtgtagcatagcatatagatttttagtagttaaatctaaagttcatgatgtgtatgttgatactattatggaatcatgtgatgctactttctttgaacacatatttccaatgaaaggcattcatagcaattctagatactcttttgagataactcctgaacatagtacacctgttgagagttttgaacagccacatgaaattgtcctagaggaggatgacaatgatgctcctaanaggagcaagagacaaagggttgaanaatcctttggtgatgatttcattgtgtaccttgtggacaatactcctactaccattgcagaagaaattgcatctncagatgcagatgatnggaaagaagcagttcataatgagatgngactcattctt

SEQ ID NO: 54915 - DNA, 444 bp, Zea mays
  unsure (1)..(444): unsure at all n locations
tatgattctccaatatttcctgttctatgtggtccaaccctgcattcttatttctccaagaatcgttagcccacaagcagttgtcattaattaccaaaacatcaccaaaggggcctagatgattcacaatctccccctttntggtaattgatgacaacactacataatatattaaagagaagtttagtttttccaaatctccctcataccttaggtataagatagatnttggagatgagtttcataggacttatcttgatttanagttctgtccgagagatagataaatcccaataaaaaaactcagtatgtaagaaaggctccccctaagtgtgtgcaggattatntgaagctgaagatataacacatataatagatcggagttntgatggagactntcctacaaacatnggtatcaaggcatacaagagatgatatgtagag

SEQ ID NO: 54916 - DNA, 425 bp, Zea mays
taagacacctgcggcatgccagcaagaatagagtttgacctccatcatttttttatgcaagaacacctaatgatacatctgggggttcagataaaaatattagcggccactatatttacatcatatgtttcaattggagcgatacctgtgagtattaaaaggttatgtgcgaaatcgcgctcacccaaagggttcaatcatggagggatacactacacaagaagtgatggagagctgtatagattacatcagtgacggaacaatgataggtgtgcatgtacctaaacatgatggtaaactatgtgggagagggagaatggtcaaaacaacttttcgtgttgaagatacaagctatccatcgtgctcatggtagagactacaacatcttactatttccgagcctcacatagaaggacacctatatg

SEQ ID NO: 54917 - DNA, 396 bp, Zea mays
tcactccggaatccatcaacagatgggcatccttcgtcagggtcgcgaaaaggccaggtttacaaccaaatgctataaggttctgcgacctacatgagttattgaatgagacacaaccttggcgtaaagaacagtatcacaaccaacttcggctgctacagcttcggatgccgctctgggtccagctgccccgagccaacctttccatagaagtggcccgccgactggatgaccgagtggctttacatgaagaatgacttgaatcacaggacgatataacagtatattatgcgcccatctggaatgctttggctgcggggccgaagtggaacaatgaacagcgagaatgcacaaccctcgtgcgttgtcttattgacagaaacagtcaaacaatgc

SEQ ID NO: 54918 - DNA, 421 bp, Zea mays
  unsure (1)..(421): unsure at all n locations
gctttcctggcacaaaaggtctaactctggtagttcagtctccggcccttcttccggagctaggggttcttgatcgacggtccccgcttcttctagtaaaacaggcaataaaacaatacatcaacagtggntttataattgtagtgtgtcattttctaacatattattacatgtgactttagaaatcaattttgataattgttggtgcataaaatattgagaagtactaattaaaggagaaaaggctgaaaaaagaaaaaaagaaaaagggtttcagctctggtgggccaggggggaatctggcccagccaagcgcagcgcacacgcgggcgcgagtgcgtcggcccaattgcggcccaaggcggtagacggcgcgggcgcgcgaggagaggggacgacgtctccgcggtgcccacacgct

SEQ ID NO: 54919 - DNA, 348 bp, Zea mays
taatgatatgtcttatccgacaccgtcacgggttgggaaaggattctaagtctgatttcctgagagaactcattatggatgagaaagttactttattggatacacgatactataagatcactttaggatccttattgtcttgcttgtaggaaaaacttttgtctggtctttctcccctaagggaatcggtggcctttatgggcttactctaagtgtcgagcagaaacattaactgggagttatgatcgcactctgttttcataaaaaaaaactacctcgatttgtcatgcgtggagtcgtcaaagacacaaacctttctcacgattgctgtgttggcgaaactacgtc

SEQ ID NO: 54920 - DNA, 354 bp, Zea mays
  unsure (1)..(354): unsure at all n locations
atgccaataaggggaagcaagttggtgctcatcatccacataagaacattatgacaactgacaggccactcgagctcctacacatggatctattcggcccgattgcttacataagcatcggcgggagtaaatactatctagttattgtggatgattattctcgcttcacttgggtattctttntgcaggaaaaatctcatacccaagagaccttaaagggattcttgagacgggctnaaaacgagttcggcttanggatcaagaaaattagaagcgacaacgggacggagttcaagaactcacaaattgaaggcttccttgaggaggagggcatcaagcatgagttctcttctc

SEQ ID NO: 54921 - DNA, 451 bp, Zea mays
  unsure (1)..(451): unsure at all n locations
catgggctagtcggcggtgccaaagccaacccaagntagtcttagcaactaagcaagtgtcgagttcagctctttcaaaatctaccaagtatagctgaccctctaacactcccttaaaagctatggaatcgtcacttcttctaaagacagtaacaccagtatcagtaaaaagacagttgtagcccattttacataattgggatacggaaangcaaattgaatctaaagaatctacaagaaaaacattggaaatagtatggtcaggtgatatagcaattntacccaaaccttggaccaaaccttgatttccatccccgaatgtgatagctcgttggggatcttggtttttctcatatgaagagaacatctttntctccnctggcatatggttggtgcacccactggcgagtatcaacttgagcccncggatgataaacctacaaacaagtta

SEQ ID NO: 54922 - DNA, 385 bp, Zea mays
catgtttgtcttagcaattaagcaactatcaagttcagctctatctaaatcaactaagtatagctgaccctctaatactcccttaaattctactgaatcatcacttcttctagagacagtaacacctatatccgtaaaaagacaattgtagcccattttgcataatggagaaactgaaagcagattgtcatctcaagaatctacaagaaagacattggaaatggaatggtcaggtgatatagcaattttaccaagttctttgaccaaaccttgatttccatccccgaatgtgatagctctttgggaatcactcattttctcgtaggagaacatccttttctcccctgtcatatgggttgtgcatacgctatcaatgatccaactt

SEQ ID NO: 54923 - DNA, 436 bp, Zea mays
  unsure (1)..(436): unsure at all n locations
ctggagtataatgtgtgaacaggtatcttcggactcaagtcggcaccacagtagaccataataatacgaagggtggtacagcgccgaacgtgtgagcatgaaagctccggtgtgacagcagataaggtgaaaccgacntanaagatgaaaaggctatgtagacctccacagatactatagaattattatcaactgtaaagggcatgaatgtaattttgtatgggtttgtgtccgcgcctataaataggtgaacagtactctcgtactgttcacgctgacatggcattcgctttttgcgtcacacttgtactatcatctccttccagatgaaggtacactttgaattcatagatgcttatgtctatgtctgatagtaatatatacctagttatggtatctgttatactctctacattttatgcttcgtcactgtata

SEQ ID NO: 54924 - DNA, 328 bp, Zea mays
gactcgcactgtatttgggcacaaaaacaagtttgtcggtatcgagtctaacttggaggtgaaccacacagagccgatcctgctccaagttcccatgaccatacaaacacagccatgctcgcatcttatttgattttctcctgaccctgcgtcagtcagcaagaagctgtaacgcctggactgatcgaaatcatgacatattcaaacaaattcgtactctgagccatgtcaatcctcaatagctctggtcctatatatcttagaggtggaaaagaacattatatgagctgaaaagtgcaacttccgttcctcaaacactatacctgag

SEQ ID NO: 54925 - DNA, 516 bp, Zea mays
  unsure (1)..(516): unsure at all n locations
taagctttgtgtgtacgatnagtgaacaattagtccattggcctctgttaatatttgtanaattacgatgacttcaaatctatgcctttacaatgatattatcaccctaaagaaagtatcttgacttgcaccataattttgaatttgctcgaaacaagagctggctcttgtagtggatggctgggcactatagattattctatcacgctatactgaagctcttactgaactagcaattctttcaaaaactgcattatgctgncgtgttacaccttcacaaaaagcacaggttattctttaccattgcctcctttgtttcttgaataaaaaatattcatcgacactagtcatttgtatgaatatagtacaatccattattgtgaataataaagtgcaaatagaaatatgtcttttaatcatgagtatagtccgatttgctccttgaacttgcactatattttanaaacaccctcaattcaataccgacacatacaccctatcttagagctgacaatg

SEQ ID NO: 54926 - DNA, 126 bp, Zea mays
  unsure (1)..(126): unsure at all n locations
acggggttttttttcccaacacactctcctcttttcataactatcaatccaactaaagtcagccaattcattttgtgngatctcaattcttatccacaaatctaacttgaaataaacactattgca

SEQ ID NO: 54927 - DNA, 404 bp, Zea mays
  unsure (1)..(404): unsure at all n locations
agcttgcgctatggcgtggagataagccaatgtgtctctgacgcgtgtgcgcggggtatttctgagcacggtggttcactggaaccgtgggaattgctcgccggagcaattttggcatcccagatccgcccaacgccgtagggagcctgtntctgccgccactgccggtaagaatcctctctggtatactcacgttgatctcaactgtgtgtaggaatggtcgacgatggagtctgggtgccgggccaatggatggtcgtgggcggcaatggccccgccggctatgctagacatgccatcggccgacgttggggggaagaaggangatgcgggaccattggatcttggacgtacgaccaggattaaagcgagacataccccttcacctaataagatcttattcg

SEQ ID NO: 54928 - DNA, 358 bp, Zea mays
  unsure (1)..(358): unsure at all n locations
caattgtgagctcggatgggactccgaatcggcaaacaatgttttgccagaagaatttctgggcagtcttcgatgttattgcggatactgccctttcctcgatccacttggtaaaatactcgacggcgacgaaggtgaacttgaggttcccttgtgctgtgggtagtggcccgacaatgtccaggccccagcgctgaagaggccatgtgtgggcgatcagctntgtgaattgcgaagggttgcccaaacggngggaaaacttctagcaggcttcgcacgacctcgtgactcggttcgcggcgcagatcatagagggccagtagaagccttgaaggatcaccttggcagcgagggccct

SEQ ID NO: 54929 - DNA, 337 bp, Zea mays
gctgcagctaaatgcagggagcctcctattgtttaccccctcataagatgactggctacaaaggaaccaaaacttccagcctaagctccatctccgcaagaaaaggaagcccctaggctagtatggcaaaaaacatctttatgaccatatggagacatctaaaatgctttggagttgaatatgccttgatctatgccatttgctttattcttttatggctgataaatgtggaagaaaatctgtcatatatgcctagagaatgtgtaatgtctagaagaaataacctctacattatatgcttaatcttcttgctattgaaaagaagaaatattctaaa

SEQ ID NO: 54930 - DNA, 370 bp, Zea mays
tcgagcgactgggcgacgaggagatagcgacgacaggaaataagtaccacgcgcccggagaaagatcaacggatagcggtcacaaaaatcagaggaagaatatcatggagagggagagaaacacgcaaggaaggaagaaatccatgacgcgcgcgaaacagataaggacggcgggaaaaatctgggaagaataagagcggccggatgtttctctatgctgagatattatctattttttattcaaatgatacagatatctataatctgaaattagaagttaaaagaaacatacacgagttggatccaacaagactaaacacacgactcagatagaatttgattagtgatcacttgaattcaatgaatttac

SEQ ID NO: 54931 - DNA, 358 bp, Zea mays
aaccccgctgcagtttcgactactaaacagtctgttttttttaccggaacctagacctgatgaaactatcgggacttatcctcaccgactgaaatgggtctcatgctgctatgggggacaagtgcgacactgatggtagcagcggggcatgaagcatgttgccaagcatgggccttacccaacgggaatgatgggacggttgacatgtgggggacggaatgcctgcatgtatgtgttaggttacctgcaggttaactcattcaatcgctgctttcgaataagcgatgttgaccttgcctaataagtaaaaggaatgagtactgaaaactgtggtgacaatgctgtccatgttgctaaa

SEQ ID NO: 54932 - DNA, 444 bp, Zea mays
catgcaagcttgcataggatcaatggaatatcttcttttatcttttgcacaacatctatccgtagatttctactgcatagttccctgaagaacgtccccagctctgcaattgcttcatatacatccttcctcaccagtcctctaaggccagcggctatgattctctgtaagagtatgtggcaagaatgtgttttcagttttccaaccacctttgaaccatcttcacttatgtatcttgctagggtatccgcaaatccatcaggaaacttgatacctttgaggaacttgcaaaactcgactttctgatccttccccaacacatatggagcaggtggagccctgcaggccgagttgccatcttgttgcaagtgcagttcaggtcttatgcccatatcatacaaatctaaccttgcattatgcgtgctcttggaccttgctggaata

SEQ ID NO: 54933 - DNA, 467 bp, Zea mays
  unsure (1)..(467): unsure at all n locations
gaacacgtgatacggctgactaacgtgcatttttaaaaagatagaccctgtgcagctcgtcaagcaggttaacaggtgggatgagcacatcacagcatacatgtgatgaccacttcaagacccctggagctgctgcatatggacctcctcggacccgtcgcctatctaagcatatggggaagtaagtatggtctagttattgttgatgacttttcccgcttcactcgggtggtctttttgcaggatatgtctgaaacccaaaggaccctcaagcgctttctcatgagggctcaaaatgagtttgagctcaaagcgaagaagataaggagcgacaacgggttcgaggtcaagaaccttcatatggaggagttccttgaagaagaanggatcaagcacgagttctccgctctctacacaccacagctaaatggtgtggtatagaggacgaacaggacgctcatcgacat

SEQ ID NO: 54934 - DNA, 390 bp, Zea mays
gcttcgcgagagagagagagagtgcctccttgttgttgagccgccgagttagccttctctgcgttttctctccttctccgcctgcctcctttgggatgaccctggacatcccttttatagatacaaggagatggtccaactgtacatgggggtgtagctatgtgctaacgtggccggcggagaagtacttgagccctgtaaaagcgcggctggcggtgcgacccggggtcctgctgacgtttctttgccttcgtagagagttgagaataatcgacgtcatggacgcatgcagggaactatcattacctgttgccggagtaatctagatgggacatcggtcttgttccttcgtagcctaaggcagctagctaggggtagggtaatgatgta

SEQ ID NO: 54935 - DNA, 463 bp, Zea mays
  unsure (1)..(463): unsure at all n locations
taattaacctaactatatgcagcggttagccatcatattattaatctaacataaacttaattntagccataacatacaagattaattctagccataacatacaagattaatttttatcgaaggtcctcacccaccatattattaattaaacataaacttaattttagtcataacatacaagattaattttagccataacatacaagatctaatttagccataacatacaagattaattntcatcgaaggtcctcacccaccatattattaatcaaacataaacttaattntagccataacatacaagattaattttagccataacatacaagattaattntagccataacatacaagattgaatttcatcgaaggtcctcacccaccatattattaatcaaacataaacttaatcttagccataacataaaagaagttagcatagctaaactatatgcagcgg

SEQ ID NO: 54936 - DNA, 132 bp, Zea mays
aacccctgagcatagcttaaagacgcaagtttatttttcaccattgaaacaggtgcggacccacaatcgtcccgaggttagacaatgaccattggttaatcaacctagccttttaagtgagcatccgaacga

SEQ ID NO: 54937 - DNA, 334 bp, Zea mays
  unsure (1)..(334): unsure at all n locations
agatggtaacactctgacaatcagcgttgagaaatgtaagctaacatgcgtaacaccaagtgtatcatgtgaacgtgcattctactccatatctggtataacttatgaatgaaagcctgattgctcaggatggacaaagcgcattccaaaactcacaagtgtacgttagcacttgatggggaccatacgcagcacattcttgacgaataggatgcactcttgtgcgcatggcacacaataattctgtaaagggtcaaacttaccatccttntatgcatggtgtctaaaatggaacaatgagacacctaatattctaccatgagcacgaagcaca

SEQ ID NO: 54938 - DNA, 358 bp, Zea mays
cttcggcatcctacatgaatcaaggaatcgcgagtaaaaatcaagtgctaagaagaaaggtaaggtacgaagttttatttcttactggttcaagatgacttcgtgcttgatgctcagtcttctcccgctcgccgtttgtccatatcatttttataaatctattggagatacttcgggcgatgtcaggcatatcatccaggattgatggagatacggtgacttggtcctgttgacaatttttcctgttcgcagccggccttcagaaatgctgcactcgtaccccgaaagctacccaggcacagaagtcgccgtgcccagatataaccttcgcaagctctttgatttcagcctcaatatg

SEQ ID NO: 54939 - DNA, 325 bp, Zea mays
ctgatccttcaacacagaccacacagctttcagataaagacgaaacgagaataatgggttttccaactatataacctactgtattgacatagtacgtgaaccaaaatgcatgcgatacccacacattggtgacaattattacaaaaatacaaaccacacatatgttaatatgacaaacataactgcacatgatatagccaactaccctgtctaactaagactaactaagagcgagactaacacttagaccgaagcttctatgtatatatttatatcggattaattacgagatccaactctaacgatctattggtctaggttgatc

SEQ ID NO: 54940 - DNA, 421 bp, Zea mays
gatcttattccacagggctattttctatgccacaccaaccctattagttgtgaattaacagtgtgagctacctgttcctattaaatcaactaaatattgctgaccctctacacttccttatatgctatcgaatcatcactttttctaaagacagtaacatctacatctataaaaagacacgtgttgcccattttgcataattgagaaacaggaagccaattgtattctatagaatctacaagagaaacattgatataaaatggtcaggtgatatattaatttcaccaagtcctttgaccaaaccttgatttccatccccgaatgtgatagttcggtgaggatcttcgtttctctcataagaggacaacattctcttctccgcttcatgtggttggcgcattcgctatctattatctaactc

SEQ ID NO: 54941 - DNA, 443 bp, Zea mays
  unsure (1)..(443): unsure at all n locations
ttgaaccatggctagtagcataggctaattatatgcgaatcgactctatcctatctacaggtgcatacgtntcaccaaaatccaaaccttcgacttgtgaataccccttggccacgagttgagctttggtcctagtcaccacaccatgctcatcttgcttggtgcggaagacccacttgcttcctacaacattttggttaggacgcggaactaagtgccatacctcgttccttgtgaaattgttgagctcctcttgcatcgccatcacccaatccgaatcttgtagtgcttcctctaccctgtgtggctcaatagaggatacaaaagagtaatgctcacaaaaatgtgcaacacgagatcgagtggttacccccttatgaatgtcgccgacgatggtgtcgacggcgtgatctcgttgtatagcttggtgaactcatgggtgt

SEQ ID NO: 54942 - DNA, 221 bp, Zea mays
ctaaagacagacacatttacatttggtaaaagacaattttattccatattacataattgactgacagatagtaaattatattccaagagactcaacttaaaacacattagagatagagtgctcattggatattgaaattttgctaaacctttaccttgccttgttcccataacgaattgattgaatttggaatcttaatttgacgtagatggaacatttct

SEQ ID NO: 54943 - DNA, 452 bp, Zea mays
accttatatgctcggagaactgagagataacttcgaagatttaacaccttcacgacgaatctgctcaaggggaatcgcaatccagcttccaaaaagcttcgatacaccacaacttcatttcttcaaggtgtggacaaagtctttccccttcgtccgacctcacaatggacaggtcccggaaataccttcctttcatattaacaagatgatcctctctgatagtcgatttaccataaactgaatggcttggtcgccaggggcgatcttcggagtcttcgccaccgctgtccacatcataactttcacctgtcacagtatcttcagacagcccttccagaatttccgtggtgatcttatctgggtggtcttcgacatgctataggcacgctaagtcttctcttcataagactcagtgcatctagcagcagcctcgtagcagctgagacatcttc

SEQ ID NO: 54944 - DNA, 409 bp, Zea mays
  unsure (1)..(409): unsure at all n locations
cccgaaacgtgatatactctttattggtgaaactntcacgtagacatagtctccaactgaatagtacaacggcatccggtgggcgtctgcataactcttctgacgagcttgagctgtcttcaaattatgaattattcgttgaaccttctcttctgtctcctttaccatgtcaggcttgaagaaatatctttcaccaggttcagaccatgttaacggagtgcgacatcgtcgtccatataaagcttcgaagggtgccatcttaatactctcttgatagctattattatatgagaactccacttatgggtaacaatcatcccatttctgtgggaactccagaacacatgcttccaacatatctttgagtatctgaattacctctcagtctgccactggtttgaggatgata

SEQ ID NO: 54945 - DNA, 371 bp, Zea mays
  unsure (1)..(371): unsure at all n locations
ctatanaaatactaagcctgtgcacacctccgtgagggctcccgagcaaagaatccgagtttctcttcccggagaagccagtccaccctcgcctgagcacttaataccccgccgagttcgtggaccgggtaaaccactccaccacccttcgaatccttgtgcacaccgtcgctacgtgacctcgtgatgctcaccgtgccgtccgattgaaccagatccgcgtggtttggcccggatactcgccgccgacgaggatacccagctgcacgcgtggaccgggcgacttcgaccacactcgacgacgagccgtacctcgacgtgaccgcccgagccttctcgagccgaccccacccttcgccggaccgtcctcg

SEQ ID NO: 54946 - DNA, 379 bp, Zea mays
  unsure (1)..(379): unsure at all n locations
gcttcagcataatgacagccaacggtcttcactcttcaatatgcatgaatgcgttgacttatgttgatgacatcatcgtaaacagcacaaagcatgagaatcatattgctgacttgcaagagacgtttgccaacttcaagcaagatggtcttaaattaaatccataatagtgtgcttttggactaaagaagggcaagttccttggctgtctggatcaacgaagggaatcgaagtgaatccaagtaagatcgaagctatccttcggatggagccgccagattcaaagaaagaggctcaccgattgccacgaacgcctgcatcattaaatacatctatatcaatatcaccagaaaggaatctgncattttgnttgaatact

SEQ ID NO: 54947 - DNA, 315 bp, Zea mays
gaatcaccttgcaaaaattccttatgtttctctctttgataccccttgatgtattacttctttagcataagggctaccttattctgaagaaattgtttcaaatcaattttatcaacgtgtcaaatcaacgctcctctgtctttttatccaagaaatctatgttattcagaatatctctcttttcttttttgtacgctgccgctgaattttatgcccaactccaaggtgtggccttactcgtctaatcttggcctgccacctttccaacggggtatatcccactgtaactgaagcccaagtattctctaccatatc

SEQ ID NO: 54948 - DNA, 332 bp, Zea mays
tcaccatggtagtcttacaatttagcaagtgttcagctcaactctatcaaaatctaccaagtatagctgaccctctaacactcccttgaatgctactgaatcatcacttcttctaaagacagcgacacctacatacattaatagacagttgttgcccattagaacaatctgcaaacagaaagctatctggatctaatgaatcaccaagaataacattggaaatggaatggttatgagatatatctattttacccacacctatgaccaaagcttggttatcattcccagaagtgattgcccttagtggatcttggttcttctcataggaggag

SEQ ID NO: 54949 - DNA, 402 bp, Zea mays
ataatgtatctgaagactatttttttaaccgacttaaagatgaaatgacttcttattccataagggtctaagtcataactgtaatctcttgtaaggggtatgaatgtaattactcacaggctgcgtcctgtgcctataaatagatgaacagtacacctttacttgtcacgcaattctgtaatcattgacgcatcacactggacttattgttcttttgtcaagcaaagtatacatgtacttaaatattatgttctgatatttaagtttgaatataacactattgtttaataatatctgtctttgaattaaataccttaatttttcattatctaccattgtttacattgttctatagaactaatcacgaacgtaagacccttcggaaatttgcttatgggctcc

SEQ ID NO: 54950 - DNA, 492 bp, Zea mays
  unsure (1)..(492): unsure at all n locations
cgcacaagagctataaattgagtgttcggtagctgttggccagagagcgtgtcatatgagtttgcggtatggccgtatttatacgccaaatgcgttgataattgaaagaccncgcttgtcagtgaatgttgctattctagcaaagggaaggtgttttttcggaccttcggcgtaaagccttcgtccatgtcgcaatctaaatttattatttaaacaaattattattgcgaggggctactgttggggaccttctgcatccgaaggtccttaacaacaggatttaatagtgtttctggagtataatgtgtgaacaagtatcttcggacccaattctgcatgacaatacaccataataatacgaatggttgtgcatcgcccaatgtgaaacaggaagctttcgctgacgtcgcattttaaatgaaacgctatttaacctcgctaatactatacaatattacaagtgtacggctgaccgtattatgtggtgtgtcc

SEQ ID NO: 54951 - DNA, 447 bp, Zea mays
gaaccccccccgctgcagcttacaaaaaaagggagatttatatatgtactcagcctgagccggtaaaatattgttcatcaagtggcctggcaaagatatcggctaattgatctttaagactaatggtagaaatctcgatatcccctctttgttggcgatccctaagaaaatgataccgaatggctatcgtccttatgcggctatgctcgacgggattgtcggccatcttgatagccctctcattattacatagcacagggactttggttaatttgtaaccgcagtcccgcagggtttgcctcatccaaagcaattgcgcgccacaatgtcctgcggcaatgtactcggcttcggcggtggaaagagcgaccgatatttgcttctttgaagcccacgacccattgatcttcccaagaactgccaagtccctgatgtgctcttcctatt

SEQ ID NO: 54952 - DNA, 382 bp, Zea mays
ctacatgagcgaagcggctattctctctgccagccatgctagtcttagctattaagcatgcatctagaccggccttactctttgcaaaatcaactatatacaagattggcgtctaatacacccttaaaagctaatgaaccatcacttcttctaaagacagacacatctacattcgtaaatagacaattatatcccatactacataattgactaacagataggaaattatatccaagggactcaactaaaaatacattagagatagagtgctcatttgaaattgcaatcttgcctaagcctttcaccttgccttggttccgatgaccaaatatgagcgactgtaggaaatcgtgtctttacgtaggaggtgaacatcttctct

SEQ ID NO: 54953 - DNA, 445 bp, Zea mays
  unsure (1)..(445): unsure at all n locations
agcttagcagntggaggggattctccctggtgcacctgacactgntccggggcacatcggacagtccggtgcgtcagaccaggggcagccttcggttttttttgctcctttgatttgaaccctctcttttatatttggattggnctattgtgaacctttggcacctgtagaacttataatctagagcaaactagttagtccaattatttgtgttgggcaattcaaccaccaaaattatttaggaaaaggtgtgagcctatttccctttcactactcgcctacctcgataggttgtagatcctctccaccactagctctgtatagcctagtccacgttcgtggatctctcttctttcttccacattttttcttggagccgatggcggcgagagcaccgagatcttagctgtgaaaagaccgtcccgtcctcgacgtcatgagttat

SEQ ID NO: 54954 - DNA, 404 bp, Zea mays
  unsure (1)..(404): unsure at all n locations
cagctaaccaaatgaatctgtatgcatgaactaatctataagattaatatatttaactcctagggctttcattntatttattttgntaaataaataaactaacatatacattgatcctatattctaagtgtaaaattaaagtatatagattacagttggtcatattntatttgacagagaataatcttgtgaacattttgcaatntgaaccactaaatttagagttcatatgaaaaagatatgaaataaacaagttttgaagtttgaaatatgaaattagggctaaatacgtgattaaataaaagtacaggggactatntaaaataaaccaggggcctgcgcgctaaaacagaggacggtgagttgatttcctaanaccagggggcttttaagcaaaactcaca

SEQ ID NO: 54955 - DNA, 412 bp, Zea mays
  unsure (1)..(412): unsure at all n locations
gggctggcagactaaaacttcctgatattcagagaaatagtttttgtatcaactntgtggcctttgggagctngattaaatggatgtttaactaaaacctctgtgacaaagtttgagatggactgataagctacaactttaatgcagagcactgatctagtcaccatacaaaatctagagaatattctgcccacaccaagcttctgtcagaaccacactgatgaaagcctctgatggtacagtgcactgaaatatcctagggttcagtccccctcgccaccggtgatccgcgcgcccggaatcacgccggtcgccgtgatttgtgctgggcacacagtggatatccacggtgaggtaaaagatctcgcggtgaagcagatgtggtcgcaagggaagcttatcaccgtcctat

SEQ ID NO: 54956 - DNA, 249 bp, Zea mays
ctcaaaaaaactggggagaggggggttttttttttaaactcagaagaatcggaatgaactacatgctcataggacccccccacaacctctagcttaagaaaccaaaatgtacctccttcttggggaaggaggtaccccggagaaacaacatttaggaatcactttccgagccggggggcctaaaaaaatacgaaagtaggccagacaaaccctaaactggtctaagacaatcaaaagcatgtggtcgtg

SEQ ID NO: 54957 - DNA, 301 bp, Zea mays
  unsure (1)..(301): unsure at all n locations
cttgactagtatgaaatgggctgcctttgtcaaacggtccattactacccagatggagtcgtaaccagtacgagtgcgaggcaaaccgactatgaaattccttctgatctcatcccatttccactgaggaatcttcaacggttgcaacaaacctacaggtctctgatgttccgctttaatcctctgacaactgtcacatacagccacataccctgctatttctcttttcataccgtaccactagaatcttttcttcaggtcttggtacatcttcccactaccagngtgtatagagtatgct

SEQ ID NO: 54958 - DNA, 449 bp, Zea mays
  unsure (1)..(449): unsure at all n locations
gcagaagtgtggcattgngcattgaactgagtgtacctggctatatttaatatagaggggacctaagtagacatgagttgcttntgcattttatcagatctatcctgtgaggtattggatacggtgtaagttggaattagggtcactagtgtatgccccaatttaatatgtaagtcaagttggtgtgtaaagatagcatggccgcatgggactttagtcctatattgctcatctaatcaacttatatgtgagagtgttgcctactcttcatataagacanaatttaaggggtgggtcttacattgttgtctctctttgagagagacagagaaagagtagaaggagaacaagtcctttggttgtcgtggcaggtgcnccttccctggtcgtgcatagtagtacccncgctatggtgtcgtccgtcactcctgttcatgtggcgtgttcat

SEQ ID NO: 54959 - DNA, 292 bp, Zea mays
agctataagttcttatatgaccggtttttttctatcggcagagcggcgtttattgtttttacgaacattctgctttttgccatggctgagcacctatttgccatgggcggataagtagccataggaccatctaggttgacagacccatacctgggggcctcctgttatacccctaccgcaccaaacagggtttgttaacaagtactttgctcttgttgagcgccggcatcaccgccgttttgttcgaccccatatgtagtgactaaacacattaatcgaatatactgtcact

SEQ ID NO: 54960 - DNA, 488 bp, Zea mays
  unsure (1)..(488): unsure at all n locations
tgcacttactaccaaacctcacacgcatacatatcacattctatggttcatcaatagtgcgtaggtctaggttacctagctggtgcgaattaattttgctattggttcatatcgtgatgttgctgactgcgatgttgcgcctatggatgcttgtaatattctgctaggcagaccatggcaattngattcagattgtatgcatcatggtacatcaaatcaattatctctcatataccatgataagaaaattattttgcttcccatgtcctctgaggctattgtgcgcgatgatgttgctaacgctaccaaagctacaactgagaacaacatgaatattaaagttgttggtataacacagatgggatataactgacaggacatcgcttgcttgcaacaaaaactgacgctatgaattattcgctcctcctactgtgcctacgccttggtatgcaacgatgcttcgtattatattaacatatgcatcattc

SEQ ID NO: 54961 - DNA, 448 bp, Zea mays
  unsure (1)..(448): unsure at all n locations
gcaagcttctaaagggagaacacattttaggactatcttatgttcattntgagaaagacagggtttgtagcgcatgccaagcaagaaagcaagttggtgcccatcatccacacaagaacatcatgacgaccgacaggctgcttgagctactccacatggatctattcggctcgattgcttacataagcatcggcgggagtaagtattgtcttgtaatagtggatgattattctcgcttcacttgggtgttctttttgcaggaaaaatctcaaacccaagaaaccttaaagggattcttgagacgagctcaaaatgagttcggcttaaggatcaagaaaattagaagcgacaacgggacggagttcaagaactctcanatcgaaggtttcttgaaganganggcatcaagcatgagttctcttctcctacaccccacanacaaatggtg

SEQ ID NO: 54962 - DNA, 441 bp, Zea mays
  unsure (1)..(441): unsure at all n locations
ttaagcaaacactcacaagttcataaaagctcccatgcatttcatcacacagtggagtatggtattacgctccagcgacccgaaccactctaaaccctcgcgtgctctcgtgtgttgatccaccagtctcgtagcaagcaaaacgcttaggcccctcctctctttaggatttaggtcgggtgcaatccaccacccggccggggagatttcctncccgacatttggcgcgccaggtagggactaggcttcgagtttttgcttgctacctgtttgacactatgatccatatcgccgagcaccaagatgaggcctccaaggatttcctcttggaagagggggccgcatccgctacgccacaagagtccgactgcccggtgctcggtgccgcaactatgtgctccgcatggcagcacagaaccgcatgggcaacccgggcttcat

SEQ ID NO: 54963 - DNA, 334 bp, Zea mays
  unsure (1)..(334): unsure at all n locations
tgatctatcaggcctacatacgcattcaatccttaattgacccgggcgaagcattacctgttcctagcccaagtccgcgatttaagtactttcacccttaggattgtttgtattcccttaggatggaaaagagccattaatagggaacctttatagtaaagatcccaccatgctcccaatgaaaatattcgtgcaggtagaggtcatccttcctcaagatcaacctgagctaggcataagtgcaaaggaccaactctatctgcctataagcanggctaaacattgttttggaaatcatattttgatacttcacccgaagtttctaaaaagggat

SEQ ID NO: 54964 - DNA, 471 bp, Zea mays
tgcattcatcccttttgtgagctttggtgatctggataacaacacatttaaaggtctaacgagtttgcttagtgttgaacaggaaattcagtatgatgaacatacttaaatagtgtataatgatcagtgaacaaaggttcaacacgagggtatataaccaatgagacaatgcacatggatataatatgatctctatattggttcgaatatatggacaagacctgagaaatcactacatacatatgaccagaataagaggacaaagtgatttagaggattggtcagccaaagagaaaagatatgaggaatcatgaattggcttgaccatattagtatcagtccatatatgcttctatgagaatcaaactagagtctgattgatcttaacggttatatctagaagacattcaagcgagggtcacaatattgaagacatgattctctcactggctgatcaatatgatgtgactc

SEQ ID NO: 54965 - DNA, 160 bp, Zea mays
accggtgtttctttgatggcaacggctctttgaaaactaaaaggtgcgtatcactaagcatgacctactttaaacacacttcttggaaaacgtttcattggatgatacgaaagtttcaggatgctaaacttgaagaggcggtaaatatttcaccttactg

SEQ ID NO: 54966 - DNA, 334 bp, Zea mays
agcttgccaagccctcggacccgaccggactttccggaggcccgagatcaacctcaccggacttcggtcttccgccgccgcgcgtggaccgagctatccagtgagtctccggccgattcctttcgctcatgtcttctctggcatcccgtggacctccctgacctatttgattgaactatctcgccgcgaccaggccggtctcctcgccgccgacgagcatccccgcctgcgcgcgtggaccgaccgactccggccatctccgacggtgttccgcacaccgttgtgatccccgcgacctccccttcaccctcggccacttcaaccgaacagtctc

SEQ ID NO: 54967 - DNA, 427 bp, Zea mays
  unsure (1)..(427): unsure at all n locations
tgttccaccacagaggaatcaataaactataaattccatctttctccaaagtaaaactcgatagaaacaaatgttggatagatcgtaagacgatcagaataaacctatgacgtgaagccttatgatgatagaggggtagttaagtggttaagtgactaagccctataagctattataaaggatgggagttcatgcctcttccctctacgctgttgtgaagtcgttcangacgagcatgcatgcattcttaaaactatactaatggattattgagtaacgactttaatacaaaatgatgaccaactaagtaccccagtaccatggttatagttagagagagggtgagttgtgattccttcttcttttataaatcttttcttttacttacgcttaaccatacacagatggacctccacggatcctctga

SEQ ID NO: 54968 - DNA, 422 bp, Zea mays
  unsure (1)..(422): unsure at all n locations
catgcaagctnctggtagagtctatgaagccattgtttcttagatcaagaacattccggtagtatgtgagtttccagatgtatttccggaagatttgcctggactaccccctgaaagagatgtagaatttgtgatcgagctaaagcccggtacggctccgatttcccgaagatcgtaccgtatgccccctaatgaattggcagaattgaaaattcaattacaagacctgctgaataagggatttattcggccaagctcgtccccgtggggttgtcccgccatctttgtgaagaagaaggatcaaaccttgcgtatgtgcgtggactatcggcccctgaatgagtcaccatcaagaatagtaccctcttccaaaatcgacatttatttgatcactaactgggcgagggatttctaaaattgat

SEQ ID NO: 54969 - DNA, 412 bp, Zea mays
catgagaacatgagtacgaagtcgaatttcagtactacttatcaccctcagactgatggacagactgaaaggactaatcaagtatcggaagatatgttgagagcttgtgcccttcagcatggaggaagttgggataagagtttaccttatgctgagttctcatataataatagttatcaggccagtctgaagatgtcaccttttgaagctttatatgggaggaagtgcaggactcctttgtattgggatcagactggagaaagacaattctttgggcctgaattgattcaagaagcagaagaacaagtccgtataattcgagagaatttgagagtggctcacaccaggcaaaagagctatgctgataatagaaggagaccacttgaatttgaagaatggagatatgtgtatc

SEQ ID NO: 54970 - DNA, 435 bp, Zea mays
  unsure (1)..(435): unsure at all n locations
ctgcagcttaaggatctattaactaagtaagattttttgttaagaggccaaggtatgaaaacttcctcttcttcagttggcttagtattctatccttagtgggatgtaccatagtataggttaatttccttgcaatataaaatgttcaatagtgcatataaatttgacatcaactatatgtgtgccactaattaaaaaaatttaatctatccttttgggtttcaagaatgatgatttattctccatccacatataaggattatcatttgtgaaaccctcccttgtgtctctaatgctctcttttctaagtgtttcagtaagctctttccaagtgctttcaagatggattcaaaatctacggatataagagtcttggttgtttcaatcatcgagtntcaatgggtctcatatcaagtatgattgaaccaagccaag

SEQ ID NO: 54971 - DNA, 426 bp, Zea mays
  unsure (1)..(426): unsure at all n locations
catgttagtcttagcaattaagcaagtgtcgagttcagctctatcaaaatctaccaagtatagctgaccctctaacactcccttaaatgctattgaatcatgacttcttctaaagacagtgacacctacatcagtgaatagacagttgtagcccattttgcataattgagaaacggaaagcaaattgtaatctaatgaatctacaagaaaaacattggaaatagaatggtcaggagatatatgcaatttacccaatcctttgaccaaaccttgatttccatccccgaatgtgatagctcgttggggatcttgggtnttctcgtaggaggagatcatcttcttctccctggcatggtggttgtgacccgctgtcgatgatccaacttgagcccccggatgcataaacctacanaacatgggttagtc

SEQ ID NO: 54972 - DNA, 306 bp, Zea mays
gctcgctgacgtgtcgcggaaattttatttttctaaggggggtatcgggcggtatctatcacgccggataaaatcccttactgaagaatactgaccccgactttaattaaccgcatccgctggactgttggctagaaagtactctgaacccgacttgcaaatgggccatccaacatgtaaataaaaggaataaatagatttatgcaaaataatcctaacttgatattataaaatacatactcaattatctccactttaaattgaattatttttactaagcttgttgctgaacgacaaatatttata

SEQ ID NO: 54973 - DNA, 435 bp, Zea mays
  unsure (1)..(435): unsure at all n locations
ntgtgagatatgaatatgatagatntttcatacacttagccttgcgtattattttattaactggcacgcaaattttgtaaacagccttttcccataaaacaaagagtatatcaaaacatattctgatgatgctctagatatatatacacacaacactgatgccaaaccacatatatcaaaaactgacaaacatcatggctagtctctgataattgtataaaacactacattaatcgggactgcatattaattggttattacaggcagttgatgggagaggatctttctgggctgaatgtttaagaactgcagtccctaaaaatcaagttgagactagcctgcgtggtgtccgacaaagaacgtcggttctaatcaaatttctatatcagtcgttaacaaatactaaagatcgtagtactggtgtgctctaacaga

SEQ ID NO: 54974 - DNA, 127 bp, Zea mays
acaatgcctttcctaccaattttttacgataccttctccgttcaaatcacccagtttttctgttatgaagtacagcctgcggtatagaaatcctcctatgggtaatgccttttggagtgcatttccc

SEQ ID NO: 54975 - DNA, 379 bp, Zea mays
attgtagcgcatgccaatcttggaagcaagttggaacccatcatccacacaaaaacatcatgacgaccgacaggccggcttgagctactccacatggatctattcggctccgattgcttacataagcatcggcgggagtaagtattgtcttgtaatagtggatgattattctcgcttcactgggtgttcttttacaggaaaaatctcaacccaaatacttaaaggattcttgagacgggctcaaaatgagtctggcttaaggatcaagataataagaagcgacaacgggacggagttcaagaactctcaaatcgaaggcttccttgaagaagagggcatcaagcatgagttctcttctccctacactccacaacaaaat

SEQ ID NO: 54976 - DNA, 363 bp, Zea mays
actgcaatccccgctactagagggttcgctatcggcgtggtaaatcccgtcattatattgctcaatgtccatatacaagtgatattcgcgacagaacctcccatatcattaggcccacctacaggtgtccttgctcaacggacctcttacaaccaccgatacgcaccttgatcgcttgacaagttccgtatctgaattctttaccttttccaagagcgttcaacctgtcatgcatatattacaacacatcggaggaacgaatatgtggaagcagttacagtaacttaattacattcacaatatgaagatcgttgtattacataccacatatacatacgagtgcatgagtaatactattacaaa

SEQ ID NO: 54977 - DNA, 308 bp, Zea mays
  unsure (1)..(308): unsure at all n locations
ctatcccatgctcattgatttaacttgttactgagctatatgatcattttggttgttgattaaagccaggtgatcgtaaatagcatcaatgttaatatctctacatctagtaccaatagtgacatgatcaatagtaaatgttaaggtttgcaagcatttaaccatctatcttatattttagatgacattttcattctaagaaagaaataaatcattgcaaacatcagatctttacctttgaattaactagcatntcagtttgagctaaaattgatctttcattataatctagcatagactacatttca

SEQ ID NO: 54978 - DNA, 402 bp, Zea mays
  unsure (1)..(402): unsure at all n locations
ggtgcccatcatccacacaagaacattatgactaccgacaggccactggagcttctacacatggatctattctcgcttcactttgagattctttgtgcaggaaaaatcttatacccaagagaccttgtaaggattcttgagacaggctcaaaatgaattccgcttacggatcaagaanaatagaagcgacaactggacggagttcaagaactctcatgttgaaggcttccttgaggaggagggcatcaagcatgagttctcttctccctacacccacagcaatatggcgtatcggagaggaagaatataactctattggacatggcatgaaccatgcttgatgagtcaagacttagatcggtttgtgctgaggggtgaacatctgctgctacgccatcaacc

SEQ ID NO: 54979 - DNA, 382 bp, Zea mays
cttgtaactcctaccgcgagcgcgccggggcttgttttataagccccatccctactcttgcgtgtcatcttgcatcaatccatctgggcagggacacgcggcacaaaaagtattggctcagtgcagccaaaacactgtccatgctagcacaccggactggccaggggtgcaccggacagtgttcggcgcgccagacagaactccggtgaacaggccactcttgaaagagttgatggcgcacgactataattcctcggactgcccaatggtacaccggactgtccggtgagccaacggtcgactgcaccaactgttggtcagtgacatctttacgtgacgcgtggcaacttctatggtccgcgtgggggcacactatcatgtc

SEQ ID NO: 54980 - DNA, 348 bp, Zea mays
  unsure (1)..(348): unsure at all n locations
taaacagtaagccggcatgtagacgcggctcttctcttgcagaatcaactaagggaagcttgccgtctacgaaacccctaaaagcgtaagagacgacaacactacctaagatatacacataacatatgtaatccaacagtctctcccatattgcgtaattgactaacagagagaagagtatatctcagagaatctacgtaaaacacattgtagatagagtgctcatttgagaatgcaatntcacctaacccttataccgttgcttgatatccatcaccggatattatggaatcgtgggaatcattaatcttgacgtaggaggtgaatatgttcttctcccacgcatat

SEQ ID NO: 54981 - DNA, 435 bp, Zea mays
ttgtcgcctcgccatcgatcttctttctgctcttgccactgacagagcggatgcatgctggtaacccactccgagatccttatgaccagctgcctctgcagctctcaagttgcacgggttcatgatcggcgcaaggcagcacgaattgggtaacagcttttcgctgggccttgctggcgctcgcgttctttccctgtgccggaacggaagcctggaacgaacatgtgcaacggcgtttcgggtcgcgggagtgcccgaaatcctgtggtttatccagagtagctaacagcgagcaaatagataggagatttaatgtattctaataacttaagtatattaattggtgacactaaatattagtggctactatgtttaattatttgtgagctccacatcatcgctgattgagacaaccactgtgacccctgatactcc

SEQ ID NO: 54982 - DNA, 328 bp, Zea mays
ctatgcggagtgcacatattttttttattcctcaaaataactcgggcgaaaagtcttattgccatgtgtgtgttgaatcaaaacaaccccgctagcctcacaaggctggtgaagcaaagagattggcacctctaaaactttgtcattctgatctgtgcgagatgaatggaattttgaccacatgtggtaaaagatactttttcactcttatagatgactccactagaattctgtatgtgtatctcttaaaacaaaagatgaagcgctcaattattataaggcctataaagctgaagttgagaaccactcgagaggaacataaaacgtt

SEQ ID NO: 54983 - DNA, 433 bp, Zea mays
  unsure (1)..(433): unsure at all n locations
ctataacatctctgttgaaaccacagacatcattggaagaccaacatacaacatccctattaatgaacaagtattttaatagtgctctttcttgcgcctcggatattcggacccaaataacaccttctggtcagctatagtcttcgcccaaaacatagaccttggttgatacactgcagcagccttatctctcatgtacgtatgctattggagagctctggcttcatccatatagtgaatggccctggaatatgtccaattccctttggctcttctagcagcctctcggcttccatgcacagcaataggacccctgacagatgatatcntcatacacagatatgctggatgaagcattgcttcgaaagcatacaatgtccctcatccaaagattgcattataatgatatccatgtctacatgcaaatacacct

SEQ ID NO: 54984 - DNA, 421 bp, Zea mays
agcttgacaacaccatttgacatcttaaatattattctgagatcaagtatatttaattcattcctcaacatgcaaaagcgggttctatcaagtggcttagtgaaaatatccgcttattgatcttccgacctcactccttctaaaatgatatctcctttcgcaacatgatctctaagaaagggatgacggatatcaatgtgcttggtgcgagattggtgaacagggttattagcaattttaacagcactctcattgtcacacaacaaaggtaccttttctagaaccgcgccatagtctagaagagtttgtttcatatatataatttgtgtgcaacaagcacccgcgacaatgtattccgcttctgcggttgacaagacaacactattttgctttttggatgtccatgatactagtgatctcc

SEQ ID NO: 54985 - DNA, 373 bp, Zea mays
catgcaagcttgcaaaaatgttctcggctctttgtctgtatgctgaacgcaatgaagatgttggccgagctgaagtaccacaagcgtcttccagcacagacaaaactgctgcaagcaaacctggttggtgctcttttagcccttccatcttgaatggaacttggggatatattaagtagtggtctttctttattctccatgggaattgcatttctggttcatttatatccctgcaaggttaattggctacacctatttggtggtccagatgagtctacaaggacaattatattgatgagaaaatagtaccgaccaaatttttgtcattgcatgatgattatatactctaatgtcttggtaatatgcaacaatt

SEQ ID NO: 54986 - DNA, 438 bp, Zea mays
ctcagctttaagggagaacacgtgaatgtctgactaacgtgctttctatataatagaccttgtcagcttgcaagcaggtatcaagtgggaggagcacatcacagcaagaatgtgatgaccacttccagacccctggaactgctgcatatggaccttttcggacccgtcgcctatctgagcatatgagggagtaagtatggctcagttattgttgatgatttttcccgcttcactcgggtgttcttcttgcaggataagtctgaaacccaagggaccctcaagcgcttcctcaggagagctcaaaatgagtttgagctctacgtgaagaatataagaagcgacaacgggtccgaattcaagaaccttcaagtggagaaatctcttgaggatgaatggatcaagcacgagttctccgcttcctacacaccacagcaaaat

SEQ ID NO: 54987 - DNA, 290 bp, Zea mays
cgcccggttaacttgataaagatgtcacgagaagttgcaagggctcctttcttctccctgcgacaagaatcagttcccaacgtctagccagcattttgaacacaacagattagggcaatgataagtttaattcattggccacctttttcaagacaaagctgagcattgagagtggagatcaccatgttggcatcattcagagaatcagaaacctgcgccaaattcatctgaccttgagaatatttgtcttcaggaacagaataccgacgagccatatctatcaagaaaca

SEQ ID NO: 54988 - DNA, 250 bp, Zea mays
gagcgcatcacacgcaagaatgcgtatgaccaccgacaagaccccctggagctactgcatatggacctcttcggacccctcgcctatctaagcatatgaagaaggaagcatggtttaactatcgacgatgacctctcccgcttcactcgcgtgttctatttgcaggataaatctaaacccacggactctcaacgcttctcagagagctaacagagtgactcaaaggaaagataaaagcacacgggccgag

SEQ ID NO: 54989 - DNA, 438 bp, Zea mays
  unsure (1)..(438): unsure at all n locations
gctttcggttttcttttctattgcactcgatggtgcatgcccagctnttacatttacatcttcgggggatactgctcttgtagagctgatataagaaaaagagaaattacatgctatgaccctattaaaaacctttctccccctttggaaaggaaaatgatgccataggaaagaataaaaaagattacatcaggttacacataataccgccgaagctcatccgcgttccaagatctaggaatgtcgctgtcgtccatatccttcagcctgtaaaagccgggtcttgacgaagatactaccaggaaaggcccttcccatttcaattgtagcttgcccactctgtctgggttggcgactcttcgaagtaccaagtgtcctggcttaatattttttagcccgaacctttctgtcacgccatttattgtctcggcttgatat

SEQ ID NO: 54990 - DNA, 440 bp, Zea mays
  unsure (1)..(440): unsure at all n locations
ctaagcttctaagggagaacacgtgatatgtttgactaacgtacaattcgaattagatagaccttgtgcagcttgtcaagcaggtaaacaagtgggaggagcacatcacagcaagaatgtgatgaccacatcaagacccctggagctgctacacatggacctcttcggacccgtcgcctatctgagcataggaggaagtaagtatggtctagttattggtgatgacttttcccgctacacttgggtggttcttttgcaggataagtctgaaacccaaggaaccctcaagcgcttcctcaggagagctcaaaatgaagttgagctcaaggtgaagaagataaggagcgacaacgggtccgagttcaagaaccttcaagtggaggagttccttgaggaggaanggatcangcacgagttctncgctctctacacaccacaac

SEQ ID NO: 54991 - DNA, 227 bp, Zea mays
cactatcctcctcagcacaccatgaaagcagactatccgagacatgtatcactcagcttacatcgctccggtgtatgtcgtcctcaccggtatcaaatgggtcaccttctgtgaagccggccaccatccacccagatggaatcctagccggcccgcggacgacgtaggccaactatataatccattccgatctcatcccacttccaccaaagaatccgcaatggctg

SEQ ID NO: 54992 - DNA, 278 bp, Zea mays
  unsure (1)..(278): unsure at all n locations
ctccccagtcagcgtgtgcacgttatccaaaaaatttcagtcgtcccgatggttacacaggttcaaattcaaacgtccaaanagcagtggtggttccttcacgtgctttttattcttcctagccactggcagacacttctagatgggagacgaagcgagcgcaccaaaggggaagaaggcagctacttctttctcttataatgtcgccatctttgggcgagtcgacgccgctcgcgacttcatcgtttcccatcccatccattacttctagcgctaca

SEQ ID NO: 54993 - DNA, 290 bp, Zea mays
cgctcttaagacacctttgttgaacaacgatgtcctgatctgctctgcctctcctttgtcactaacacacctgacaatgagctctcatatgctctgatatctgaccaatctgtcttggggggtcttaggcctgcatataccgcagcaagcagtgtgcttatccaatactacagagaaacccaccatcgctttacacaaacaccgatagacatcacgctgacggtcataccctgcatgatacaaaacattttgtctaccgggagcacgaaagcctactgtgttctggcaat

SEQ ID NO: 54994 - DNA, 316 bp, Zea mays
agacctccaaaaggaagccctcaaaatcctgctgatcaaaattaaattattactaattctattccctaccgtcacactatagtgggcttttctgcaatacaggataccagatgtttcttgctttccatttattgaagattcacacttactatccttgtgattccattaagataacaagaaagtctatcttgaacacgcatgtgtatgtgttagacaaagaacgcgtgctcttggatcgacttctattgaacatgaaacaaaggcgttcaattatacaacggttagcttcaagatggaatgataacaatcaggctat

SEQ ID NO: 54995 - DNA, 324 bp, Zea mays
ataccttcccgactagtgtcttggatgctgcgtgtattccacattgcccatcatggacctcatctagaagttgttttccgtagatgagagaatgcttttatgaggacgcccgatgcaccccttcttgatagtgtctccccaatgagtgtgtagtgagctgactgtctagcgatgcgctcggcttgcgttttgtcatctgcgtcctcttcatcctttatatatttaatgatcggcctttttcatcatcagaatctgactctagttggatcatgatattacattcttctggcctggccattgagatgcttggatgtggtatttctt

SEQ ID NO: 54996 - DNA, 299 bp, Zea mays
gcttggagggcgcgattggcagaccatttggtgtatactccttcttaatcccctccgtcgctttgaaagcaactcgttgagcttcggaccgggagggaccgtctagctcgttgatttttcgtgagcccttgatcataaattcaaaggctacaaaattcccgattactttctcgggagtcattaatgtatatcttggatggcacgaataaatgtacttgagtggcgttaggaaaatagagaactagaataccttaacacctcgtggcagtcacttttgctccgaggtggcacttgattac

SEQ ID NO: 54997 - DNA, 381 bp, Zea mays
ctctcgcgagacactttccacgcctctttctaaccatgtgttattcattatgcgatgtgatattctatgcatatttactttattcgctctctcgcatggtgtactggttgtttcctaatttgaatggatggatgtatgtatgcttgcaatcgcatagagaacgatccggttgaagagcccgaggaactcgcatgagaagcccctgagcagcagtcggttggtggaggcaagtgtcccttgacctatcgttgtcatattcattctgtaattcacctcccgcattacacatttatacttaaagattgactaacttttgtgatccatgtccttgttcacctatttgggttggattattatggtttagctctatgctatttgata

SEQ ID NO: 54998 - DNA, 384 bp, Zea mays
catgcaagctttacataatataagtcatgcgtatttttttatgcaccaaaaactctcctataatctaggtgtgattgctttttaactgaagccaaaaatagaattcataccttcgagctattgtaagccaaagagactgcatggtccctcttttgcattgcagataaaccatgctcaagctttggataaccaatattatccatcatgaagcgacatacatcaaattctctactatctggatagcaatacaaataatcatcttcatagttatgcaccatagagaattgagcctgacagatatctcaacccttcaacataaaacctgaactttggcaatctactcaatcatcaactttttccagcatcatgtcggataatatattc

SEQ ID NO: 54999 - DNA, 437 bp, Zea mays
  unsure (1)..(437): unsure at all n locations
tgaagtcacactttaataagagggttttcattgttttctcggtagcttaggtgaataggacataatcataagaggggagatctatttgccatgagaagttattttgtggtaggtcggtcttttaagagtcaccagaaaataactttatattttttattggcggcatcatcttcagatccattcaaatattgggtgtatctttatgtgtctaaatagaactaaagtttttgtctgagttgtagatgtgagagctccaaatgctccaaatgtgagactagtcatgttcaactatcaaactaatgactcgtagatcttactccaattatcgtagctacataaaagcttcggtcgagatagagctganaaggattgtgtaaatgtgcaattgatttggctttgttggatgtttgaattgttntaaaaacatagacaattta

SEQ ID NO: 55000 - DNA, 482 bp, Zea mays
  unsure (1)..(482): unsure at all n locations
tactcagcttaagtntacacgatcacctattcacccccctctaagtgctctcaattaccaaaaagggggagattgtgaatcatctaagccccttagtgatgttctggtaattaatgacaactngttgtggactaacggttcttggagaaataagaatgcacggttggaccacatagaacagaatatcttggagatttataagcattggttgtggatcaagtgaaggcaaaggtataacataggttttgtttttgccggtctccaggagtttagagaagttatttgaccagattaataggctagattggcgtactataaagacgcgttaatgacatttgtctgtgtcaaacttagtgcctcatagagcatctagtggtngcatttgcatgaggactaacaacgcttnncaattcaagaattaaaaatcttttcaaagcattgttgaaatattgcaagtcttggatgtcggaccgtcggccatg

SEQ ID NO: 55001 - DNA, 377 bp, Zea mays
agaacccagctgagagatattctgccaactcctcatctaatgcaacatcttttcctcatactccctatgaggcacgaatggtggggcatgccaggacactggtgctatccatatcgagagatgtctaaagactattcgtacgagatgtcgaaataaatgcaaaatcgaggcttcaattgccgaagcctaccttctaatgaggtgtcaacttcaaacaacttactaccgtgaccaacttatgaacaagcataatccaccccctcattatatgatggtggctatgacatccaacaaccctcatggatcggccagcccattcgcgtaccattccagtcgtccacctcgatgagacttatgttcttagtgttgagaactat

SEQ ID NO: 55002 - DNA, 293 bp, Zea mays
tgcttttataaggctcttcccagagatcgtgcttcttttcttcaccacaaaaaaatctggaaattccggatgccacccaagtgccatttcttcctgtggctgggggcccatgataaatgctggactgctgataggctgcataaaagatgcatgaaccattcggctatgtgccctctttgtgatcaagaacctgaaagcattaatcacctgctggtttcctgtgtgttctccagagttttctggtatacgcttttgagaaagttgggttcacagcttattccctcacaagtgga

SEQ ID NO: 55003 - DNA, 232 bp, Zea mays
  unsure (1)..(232): unsure at all n locations
atgatgcgtcgagcaatggactctgtccactgcatgacatagcagcagcagcagtactacaagcatggcgagtttcgacggctgcttccagtgactcattaaggcacgtaattgacaacctgcaaaaaataaagaatgaactcttggcggcgtattacggagaaagtactacgcttagttcaaggagtgaccaagcctactacanacttactatacgaattcttaacaagta

SEQ ID NO: 55004 - DNA, 297 bp, Zea mays
  unsure (1)..(297): unsure at all n locations
tctcagacagtcctgcatgggcacctcccatggcgccaccctttccctcgacgctttccgccagcgggaattctatctcccatggaaatcaacagcacccttcttcttcaactcgaaacccgtgcaacaagggcctttctccccacagtcggccagtcgtcccctggccctgctccgtgcccttcatccccaggccgatgagcaagccctctttctccctctggcgagctccctctctcttcaatggtggacatgcacagnccctacagaagccccttggcagcacctgctctctat

SEQ ID NO: 55005 - DNA, 195 bp, Zea mays
gaaacttatgtccgtgtgccactgggaattttgaaaagaaccacgaacggatcctcgaaaacctgaatgtatactgggaccacaaggtcattatgagctaggttatgacagtagggtgacaagtatttaaaaatacaggttggtaaccgctaaatggccaaccaatataggttatatcatccactgacaatcact

SEQ ID NO: 55006 - DNA, 378 bp, Zea mays
actgaatccaagactaacttgggcaaactaagtcagtttcgaaatctggacagaaactggacagattcaagactagacttgtagataattataactttccaattcctagacctatggtcatgaaattttacgcaagttaagatgatgaagttggctacaactttttatataccacacctctaccaaaaacctggagtgatttattgaacctgccggataaacaaaactgtgtatgtttgcccaaaccacaagcaatagatcttttcgggttctatacttttctaagattagcgttcatcgaggactaatactttaagttttattacgagacactagagccaacataaggagaagcatatgctactgttaatatttaag

SEQ ID NO: 55007 - DNA, 252 bp, Zea mays
actctcaaattctgtcggaacatgtttacaaaactcttatttaacaacgaatatgtatggccataatcaacgtattcgtacctaacttactactatgaacaaggtattgcgtatgctgaccctctctcgttctgccattcctatcaccgacgaatgcactcgacactattgcgaaaaccattcacacctggcctcctctagctcatacccgtctcttgctacaatcacgcagcgctccccatgccacgacct

SEQ ID NO: 55008 - DNA, 317 bp, Zea mays
cttgtcatcaagataacactgggagagggatatgctcatcacatctagaatgtgatgactacatcataacctctggagctattgtatatggaccctttttgaccccgcgcctatcttagcatcggtggaagaaagtatcgacttgttattgttgaaaaatttttccgcttcacttgggtattcttcttgcaggataaatcaaaaaccccaaggaccctcaagcgctgtctaatgcgagctctaaacgagttttagctcaaggtgaataaaaatatttgcgacaacgggtccgatgtcaaaaacctgcaagtggagga

SEQ ID NO: 55009 - DNA, 339 bp, Zea mays
tcttcccttctggacctggcggcggcttcttttttccttcttcggcgaataaaaaggcccggcacccagtcgtctactggtcgacaactgttctgttccaacaagtccgcgtcgtcggcgtacgggcgggcgcgcctgcaagtcatgacagaagaaaaataacatgcgcgagcgtgacggtcaataagactccagcagatcgaggttaactgcctagacatttcaacctcttggccgcggcacaaacacgtgcttgtccctctggtaattactactatattgctagatttcaacttatataggcgacacaataaaataacggaggagtaattacatctg

SEQ ID NO: 55010 - DNA, 415 bp, Zea mays
  unsure (1)..(415): unsure at all n locations
catgcaagcttttccttgattcccaaaagtcagtatattttctttttccttagacgggtaagaattgcgaatggacactccgtactcagggttntcaaacccatgttgttgtaggtgatgaaacggctgagttctgctgtttgtattcccaggtaagctcgaggacgaaaactaagacttatttgggaaggagctgtgccttcctatgatgtaataataaggttacacacttcagtacccagatatgtaataactcttcctatactttacttatgatgcgaattatgttattggaatcctctcttcttactccgatgttgtgtaatgtctgcgtgatgggttaagcgctattgtgcgatgttatggcgatacaggataccgaacttggcgattcattatgcacacctacatgact

SEQ ID NO: 55011 - DNA, 381 bp, Zea mays
agtacgttctccgttctcaaccacttcactattattctctttgattctggggcatcacataatttatgtcagcacaaggttcaatggtcaatacccactacctttttgccacacaaagggggcttacatgatagcaacgctagggggcattttgcaacttatcaacttgccccaagaagaccaattagtttgggtagccaatatttcaaaacgagactccttatattggaactggaaggcgtggacatcattttgggaaccgattggatgaccaagcatcaggtcctgatagatgtggcagctaaagctattgagatccatacctcgatctgtggagagcttaccctgtatatactcaactaatggaatacttgttcctat
